United States Patent Application Publication US 2020/0095579 A1 - sequence listing, part 13

SEQ ID NO: 189819 - DNA, 20 bp, Artificial Sequence
  Description of Artificial Sequence: Synthetic oligonucleotide
  Target: LAMA2; (-) strand; PAM type: YTN; PAM sequence: TTG
tgccatgtttgaaagctatg

SEQ ID NO: 189820 - DNA, 20 bp, Artificial Sequence
  Description of Artificial Sequence: Synthetic oligonucleotide
  Target: LAMA2; (-) strand; PAM type: YTN; PAM sequence: TTT
gtgccatgtttgaaagctat

SEQ ID NO: 189821 - DNA, 20 bp, Artificial Sequence
  Description of Artificial Sequence: Synthetic oligonucleotide
  Target: LAMA2; (-) strand; PAM type: YTN; PAM sequence: CTA
aacaaataatttgtgccatg

SEQ ID NO: 189822 - DNA, 20 bp, Artificial Sequence
  Description of Artificial Sequence: Synthetic oligonucleotide
  Target: LAMA2; (-) strand; PAM type: YTN; PAM sequence: TTA
ctaaacaaataatttgtgcc

SEQ ID NO: 189823 - DNA, 20 bp, Artificial Sequence
  Description of Artificial Sequence: Synthetic oligonucleotide
  Target: LAMA2; (-) strand; PAM type: YTN; PAM sequence: TTT
actaaacaaataatttgtgc

SEQ ID NO: 189824 - DNA, 20 bp, Artificial Sequence
  Description of Artificial Sequence: Synthetic oligonucleotide
  Target: LAMA2; (-) strand; PAM type: YTN; PAM sequence: TTA
tgcagtagtatgtatatgtt

SEQ ID NO: 189825 - DNA, 20 bp, Artificial Sequence
  Description of Artificial Sequence: Synthetic oligonucleotide
  Target: LAMA2; (-) strand; PAM type: YTN; PAM sequence: CTT
atgcagtagtatgtatatgt

SEQ ID NO: 189826 - DNA, 20 bp, Artificial Sequence
  Description of Artificial Sequence: Synthetic oligonucleotide
  Target: LAMA2; (-) strand; PAM type: YTN; PAM sequence: TTC
ttatgcagtagtatgtatat

SEQ ID NO: 189827 - DNA, 20 bp, Artificial Sequence
  Description of Artificial Sequence: Synthetic oligonucleotide
  Target: LAMA2; (-) strand; PAM type: YTN; PAM sequence: CTT
cttatgcagtagtatgtata

SEQ ID NO: 189828 - DNA, 20 bp, Artificial Sequence
  Description of Artificial Sequence: Synthetic oligonucleotide
  Target: LAMA2; (-) strand; PAM type: YTN; PAM sequence: TTC
ttcttatgcagtagtatgta

SEQ ID NO: 189829 - DNA, 20 bp, Artificial Sequence
  Description of Artificial Sequence: Synthetic oligonucleotide
  Target: LAMA2; (-) strand; PAM type: YTN; PAM sequence: TTT
cttcttatgcagtagtatgt

SEQ ID NO: 189830 - DNA, 20 bp, Artificial Sequence
  Description of Artificial Sequence: Synthetic oligonucleotide
  Target: LAMA2; (-) strand; PAM type: YTN; PAM sequence: TTT
tcttcttatgcagtagtatg

SEQ ID NO: 189831 - DNA, 20 bp, Artificial Sequence
  Description of Artificial Sequence: Synthetic oligonucleotide
  Target: LAMA2; (-) strand; PAM type: YTN; PAM sequence: TTC
agataccatattttcttctt

SEQ ID NO: 189832 - DNA, 20 bp, Artificial Sequence
  Description of Artificial Sequence: Synthetic oligonucleotide
  Target: LAMA2; (-) strand; PAM type: YTN; PAM sequence: TTT
cagataccatattttcttct

SEQ ID NO: 189833 - DNA, 20 bp, Artificial Sequence
  Description of Artificial Sequence: Synthetic oligonucleotide
  Target: LAMA2; (-) strand; PAM type: YTN; PAM sequence: CTT
tcagataccatattttcttc

SEQ ID NO: 189834 - DNA, 20 bp, Artificial Sequence
  Description of Artificial Sequence: Synthetic oligonucleotide
  Target: LAMA2; (-) strand; PAM type: YTN; PAM sequence: CTG
atgtacactttcagatacca

SEQ ID NO: 189835 - DNA, 20 bp, Artificial Sequence
  Description of Artificial Sequence: Synthetic oligonucleotide
  Target: LAMA2; (-) strand; PAM type: YTN; PAM sequence: TTG
taggaagctgatgtacactt

SEQ ID NO: 189836 - DNA, 20 bp, Artificial Sequence
  Description of Artificial Sequence: Synthetic oligonucleotide
  Target: LAMA2; (-) strand; PAM type: YTN; PAM sequence: TTT
gtaggaagctgatgtacact

SEQ ID NO: 189837 - DNA, 20 bp, Artificial Sequence
  Description of Artificial Sequence: Synthetic oligonucleotide
  Target: LAMA2; (-) strand; PAM type: YTN; PAM sequence: TTG
tttgtaggaagctgatgtac

SEQ ID NO: 189838 - DNA, 20 bp, Artificial Sequence
  Description of Artificial Sequence: Synthetic oligonucleotide
  Target: LAMA2; (-) strand; PAM type: YTN; PAM sequence: CTT
gtttgtaggaagctgatgta

SEQ ID NO: 189839 - DNA, 20 bp, Artificial Sequence
  Description of Artificial Sequence: Synthetic oligonucleotide
  Target: LAMA2; (-) strand; PAM type: YTN; PAM sequence: CTA
cttgtttgtaggaagctgat

SEQ ID NO: 189840 - DNA, 20 bp, Artificial Sequence
  Description of Artificial Sequence: Synthetic oligonucleotide
  Target: LAMA2; (-) strand; PAM type: YTN; PAM sequence: TTG
ctacttgtttgtaggaagct

SEQ ID NO: 189841 - DNA, 20 bp, Artificial Sequence
  Description of Artificial Sequence: Synthetic oligonucleotide
  Target: LAMA2; (-) strand; PAM type: YTN; PAM sequence: TTT
gctacttgtttgtaggaagc

SEQ ID NO: 189842 - DNA, 20 bp, Artificial Sequence
  Description of Artificial Sequence: Synthetic oligonucleotide
  Target: LAMA2; (-) strand; PAM type: YTN; PAM sequence: CTT
tgctacttgtttgtaggaag

SEQ ID NO: 189843 - DNA, 20 bp, Artificial Sequence
  Description of Artificial Sequence: Synthetic oligonucleotide
  Target: LAMA2; (-) strand; PAM type: YTN; PAM sequence: CTC
tttgctacttgtttgtagga

SEQ ID NO: 189844 - DNA, 20 bp, Artificial Sequence
  Description of Artificial Sequence: Synthetic oligonucleotide
  Target: LAMA2; (-) strand; PAM type: YTN; PAM sequence: TTA
ctctttgctacttgtttgta

SEQ ID NO: 189845 - DNA, 20 bp, Artificial Sequence
  Description of Artificial Sequence: Synthetic oligonucleotide
  Target: LAMA2; (-) strand; PAM type: YTN; PAM sequence: CTT
actctttgctacttgtttgt

SEQ ID NO: 189846 - DNA, 20 bp, Artificial Sequence
  Description of Artificial Sequence: Synthetic oligonucleotide
  Target: LAMA2; (-) strand; PAM type: YTN; PAM sequence: CTG
aatacttactctttgctact

SEQ ID NO: 189847 - DNA, 20 bp, Artificial Sequence
  Description of Artificial Sequence: Synthetic oligonucleotide
  Target: LAMA2; (-) strand; PAM type: YTN; PAM sequence: TTC
actgaatacttactctttgc

SEQ ID NO: 189848 - DNA, 20 bp, Artificial Sequence
  Description of Artificial Sequence: Synthetic oligonucleotide
  Target: LAMA2; (-) strand; PAM type: YTN; PAM sequence: TTT
cactgaatacttactctttg

SEQ ID NO: 189849 - DNA, 20 bp, Artificial Sequence
  Description of Artificial Sequence: Synthetic oligonucleotide
  Target: LAMA2; (-) strand; PAM type: YTN; PAM sequence: TTA
taatttcactgaatacttac

SEQ ID NO: 189850 - DNA, 20 bp, Artificial Sequence
  Description of Artificial Sequence: Synthetic oligonucleotide
  Target: LAMA2; (-) strand; PAM type: YTN; PAM sequence: TTT
ataatttcactgaatactta

SEQ ID NO: 189851 - DNA, 20 bp, Artificial Sequence
  Description of Artificial Sequence: Synthetic oligonucleotide
  Target: LAMA2; (-) strand; PAM type: YTN; PAM sequence: TTT
tataatttcactgaatactt

SEQ ID NO: 189852 - DNA, 20 bp, Artificial Sequence
  Description of Artificial Sequence: Synthetic oligonucleotide
  Target: LAMA2; (-) strand; PAM type: YTN; PAM sequence: TTA
tgatagttttataatttcac

SEQ ID NO: 189853 - DNA, 20 bp, Artificial Sequence
  Description of Artificial Sequence: Synthetic oligonucleotide
  Target: LAMA2; (-) strand; PAM type: YTN; PAM sequence: TTT
atgatagttttataatttca

SEQ ID NO: 189854 - DNA, 20 bp, Artificial Sequence
  Description of Artificial Sequence: Synthetic oligonucleotide
  Target: LAMA2; (-) strand; PAM type: YTN; PAM sequence: TTT
tatgatagttttataatttc

SEQ ID NO: 189855 - DNA, 20 bp, Artificial Sequence
  Description of Artificial Sequence: Synthetic oligonucleotide
  Target: LAMA2; (-) strand; PAM type: YTN; PAM sequence: TTT
ttatgatagttttataattt

SEQ ID NO: 189856 - DNA, 20 bp, Artificial Sequence
  Description of Artificial Sequence: Synthetic oligonucleotide
  Target: LAMA2; (-) strand; PAM type: YTN; PAM sequence: CTA
tttttatgatagttttataa

SEQ ID NO: 189857 - DNA, 20 bp, Artificial Sequence
  Description of Artificial Sequence: Synthetic oligonucleotide
  Target: LAMA2; (-) strand; PAM type: YTN; PAM sequence: TTA
ggctatttttatgatagttt

SEQ ID NO: 189858 - DNA, 20 bp, Artificial Sequence
  Description of Artificial Sequence: Synthetic oligonucleotide
  Target: LAMA2; (-) strand; PAM type: YTN; PAM sequence: CTT
aggctatttttatgatagtt

SEQ ID NO: 189859 - DNA, 20 bp, Artificial Sequence
  Description of Artificial Sequence: Synthetic oligonucleotide
  Target: LAMA2; (-) strand; PAM type: YTN; PAM sequence: TTC
agagcccttaggctattttt

SEQ ID NO: 189860 - DNA, 20 bp, Artificial Sequence
  Description of Artificial Sequence: Synthetic oligonucleotide
  Target: LAMA2; (-) strand; PAM type: YTN; PAM sequence: TTT
cagagcccttaggctatttt

SEQ ID NO: 189861 - DNA, 20 bp, Artificial Sequence
  Description of Artificial Sequence: Synthetic oligonucleotide
  Target: LAMA2; (-) strand; PAM type: YTN; PAM sequence: TTG
acatagaatgtttcagagcc

SEQ ID NO: 189862 - DNA, 20 bp, Artificial Sequence
  Description of Artificial Sequence: Synthetic oligonucleotide
  Target: LAMA2; (-) strand; PAM type: YTN; PAM sequence: CTT
gacatagaatgtttcagagc

SEQ ID NO: 189863 - DNA, 20 bp, Artificial Sequence
  Description of Artificial Sequence: Synthetic oligonucleotide
  Target: LAMA2; (-) strand; PAM type: YTN; PAM sequence: TTA
agaggataaaaaggaatctt

SEQ ID NO: 189864 - DNA, 20 bp, Artificial Sequence
  Description of Artificial Sequence: Synthetic oligonucleotide
  Target: LAMA2; (-) strand; PAM type: YTN; PAM sequence: TTT
aagaggataaaaaggaatct

SEQ ID NO: 189865 - DNA, 20 bp, Artificial Sequence
  Description of Artificial Sequence: Synthetic oligonucleotide
  Target: LAMA2; (-) strand; PAM type: YTN; PAM sequence: TTT
taagaggataaaaaggaatc

SEQ ID NO: 189866 - DNA, 20 bp, Artificial Sequence
  Description of Artificial Sequence: Synthetic oligonucleotide
  Target: LAMA2; (-) strand; PAM type: YTN; PAM sequence: TTT
ttaagaggataaaaaggaat

SEQ ID NO: 189867 - DNA, 20 bp, Artificial Sequence
  Description of Artificial Sequence: Synthetic oligonucleotide
  Target: LAMA2; (-) strand; PAM type: YTN; PAM sequence: TTA
tttttaagaggataaaaagg

SEQ ID NO: 189868 - DNA, 20 bp, Artificial Sequence
  Description of Artificial Sequence: Synthetic oligonucleotide
  Target: LAMA2; (-) strand; PAM type: YTN; PAM sequence: TTC
aattatttttaagaggataa

SEQ ID NO: 189869 - DNA, 20 bp, Artificial Sequence
  Description of Artificial Sequence: Synthetic oligonucleotide
  Target: LAMA2; (-) strand; PAM type: YTN; PAM sequence: TTT
caattatttttaagaggata

SEQ ID NO: 189870 - DNA, 20 bp, Artificial Sequence
  Description of Artificial Sequence: Synthetic oligonucleotide
  Target: LAMA2; (-) strand; PAM type: YTN; PAM sequence: TTA
atacaatcaaatagtagata

SEQ ID NO: 189871 - DNA, 20 bp, Artificial Sequence
  Description of Artificial Sequence: Synthetic oligonucleotide
  Target: LAMA2; (-) strand; PAM type: YTN; PAM sequence: TTT
aatacaatcaaatagtagat

SEQ ID NO: 189872 - DNA, 20 bp, Artificial Sequence
  Description of Artificial Sequence: Synthetic oligonucleotide
  Target: LAMA2; (-) strand; PAM type: YTN; PAM sequence: TTT
taatacaatcaaatagtaga

SEQ ID NO: 189873 - DNA, 20 bp, Artificial Sequence
  Description of Artificial Sequence: Synthetic oligonucleotide
  Target: LAMA2; (-) strand; PAM type: YTN; PAM sequence: TTA
attttaatacaatcaaatag

SEQ ID NO: 189874 - DNA, 20 bp, Artificial Sequence
  Description of Artificial Sequence: Synthetic oligonucleotide
  Target: LAMA2; (-) strand; PAM type: YTN; PAM sequence: TTT
aattttaatacaatcaaata

SEQ ID NO: 189875 - DNA, 20 bp, Artificial Sequence
  Description of Artificial Sequence: Synthetic oligonucleotide
  Target: LAMA2; (-) strand; PAM type: YTN; PAM sequence: TTT
taattttaatacaatcaaat

SEQ ID NO: 189876 - DNA, 20 bp, Artificial Sequence
  Description of Artificial Sequence: Synthetic oligonucleotide
  Target: LAMA2; (-) strand; PAM type: YTN; PAM sequence: TTC
ccaattttaattttaataca

SEQ ID NO: 189877 - DNA, 20 bp, Artificial Sequence
  Description of Artificial Sequence: Synthetic oligonucleotide
  Target: LAMA2; (-) strand; PAM type: YTN; PAM sequence: TTT
cccaattttaattttaatac

SEQ ID NO: 189878 - DNA, 20 bp, Artificial Sequence
  Description of Artificial Sequence: Synthetic oligonucleotide
  Target: LAMA2; (-) strand; PAM type: YTN; PAM sequence: TTA
aatttcccaattttaatttt

SEQ ID NO: 189879 - DNA, 20 bp, Artificial Sequence
  Description of Artificial Sequence: Synthetic oligonucleotide
  Target: LAMA2; (-) strand; PAM type: YTN; PAM sequence: TTT
aaatttcccaattttaattt

SEQ ID NO: 189880 - DNA, 20 bp, Artificial Sequence
  Description of Artificial Sequence: Synthetic oligonucleotide
  Target: LAMA2; (-) strand; PAM type: YTN; PAM sequence: TTT
taaatttcccaattttaatt

SEQ ID NO: 189881 - DNA, 20 bp, Artificial Sequence
  Description of Artificial Sequence: Synthetic oligonucleotide
  Target: LAMA2; (-) strand; PAM type: YTN; PAM sequence: TTT
ttaaatttcccaattttaat

SEQ ID NO: 189882 - DNA, 20 bp, Artificial Sequence
  Description of Artificial Sequence: Synthetic oligonucleotide
  Target: LAMA2; (-) strand; PAM type: YTN; PAM sequence: TTA
gtaaacatttttaaatttcc

SEQ ID NO: 189883 - DNA, 20 bp, Artificial Sequence
  Description of Artificial Sequence: Synthetic oligonucleotide
  Target: LAMA2; (-) strand; PAM type: YTN; PAM sequence: TTA
attagtaaacatttttaaat

SEQ ID NO: 189884 - DNA, 20 bp, Artificial Sequence
  Description of Artificial Sequence: Synthetic oligonucleotide
  Target: LAMA2; (-) strand; PAM type: YTN; PAM sequence: TTA
aattaattagtaaacatttt

SEQ ID NO: 189885 - DNA, 20 bp, Artificial Sequence
  Description of Artificial Sequence: Synthetic oligonucleotide
  Target: LAMA2; (-) strand; PAM type: YTN; PAM sequence: TTT
aaattaattagtaaacattt

SEQ ID NO: 189886 - DNA, 20 bp, Artificial Sequence
  Description of Artificial Sequence: Synthetic oligonucleotide
  Target: LAMA2; (-) strand; PAM type: YTN; PAM sequence: TTT
taaattaattagtaaacatt

SEQ ID NO: 189887 - DNA, 20 bp, Artificial Sequence
  Description of Artificial Sequence: Synthetic oligonucleotide
  Target: LAMA2; (-) strand; PAM type: YTN; PAM sequence: CTG
gtattttaaattaattagta

SEQ ID NO: 189888 - DNA, 20 bp, Artificial Sequence
  Description of Artificial Sequence: Synthetic oligonucleotide
  Target: LAMA2; (-) strand; PAM type: YTN; PAM sequence: TTA
ctggtattttaaattaatta

SEQ ID NO: 189889 - DNA, 20 bp, Artificial Sequence
  Description of Artificial Sequence: Synthetic oligonucleotide
  Target: LAMA2; (-) strand; PAM type: YTN; PAM sequence: TTA
ttactggtattttaaattaa

SEQ ID NO: 189890 - DNA, 20 bp, Artificial Sequence
  Description of Artificial Sequence: Synthetic oligonucleotide
  Target: LAMA2; (-) strand; PAM type: YTN; PAM sequence: TTT
attactggtattttaaatta

SEQ ID NO: 189891 - DNA, 20 bp, Artificial Sequence
  Description of Artificial Sequence: Synthetic oligonucleotide
  Target: LAMA2; (-) strand; PAM type: YTN; PAM sequence: TTT
tattactggtattttaaatt

SEQ ID NO: 189892 - DNA, 20 bp, Artificial Sequence
  Description of Artificial Sequence: Synthetic oligonucleotide
  Target: LAMA2; (-) strand; PAM type: YTN; PAM sequence: TTG
ttttattactggtattttaa

SEQ ID NO: 189893 - DNA, 20 bp, Artificial Sequence
  Description of Artificial Sequence: Synthetic oligonucleotide
  Target: LAMA2; (-) strand; PAM type: YTN; PAM sequence: TTG
tcaacatgtaattgttttat

SEQ ID NO: 189894 - DNA, 20 bp, Artificial Sequence
  Description of Artificial Sequence: Synthetic oligonucleotide
  Target: LAMA2; (-) strand; PAM type: YTN; PAM sequence: TTT
gtcaacatgtaattgtttta

SEQ ID NO: 189895 - DNA, 20 bp, Artificial Sequence
  Description of Artificial Sequence: Synthetic oligonucleotide
  Target: LAMA2; (-) strand; PAM type: YTN; PAM sequence: TTT
tgtcaacatgtaattgtttt

SEQ ID NO: 189896 - DNA, 20 bp, Artificial Sequence
  Description of Artificial Sequence: Synthetic oligonucleotide
  Target: LAMA2; (-) strand; PAM type: YTN; PAM sequence: TTT
ttgtcaacatgtaattgttt

SEQ ID NO: 189897 - DNA, 20 bp, Artificial Sequence
  Description of Artificial Sequence: Synthetic oligonucleotide
  Target: LAMA2; (-) strand; PAM type: YTN; PAM sequence: CTT
tttgtcaacatgtaattgtt

SEQ ID NO: 189898 - DNA, 20 bp, Artificial Sequence
  Description of Artificial Sequence: Synthetic oligonucleotide
  Target: LAMA2; (-) strand; PAM type: YTN; PAM sequence: TTC
tttttgtcaacatgtaattg

SEQ ID NO: 189899 - DNA, 20 bp, Artificial Sequence
  Description of Artificial Sequence: Synthetic oligonucleotide
  Target: LAMA2; (-) strand; PAM type: YTN; PAM sequence: TTA
tgttctttttgtcaacatgt

SEQ ID NO: 189900 - DNA, 20 bp, Artificial Sequence
  Description of Artificial Sequence: Synthetic oligonucleotide
  Target: LAMA2; (-) strand; PAM type: YTN; PAM sequence: TTC
ataaagttatgttctttttg

SEQ ID NO: 189901 - DNA, 20 bp, Artificial Sequence
  Description of Artificial Sequence: Synthetic oligonucleotide
  Target: LAMA2; (-) strand; PAM type: YTN; PAM sequence: TTT
cataaagttatgttcttttt

SEQ ID NO: 189902 - DNA, 20 bp, Artificial Sequence
  Description of Artificial Sequence: Synthetic oligonucleotide
  Target: LAMA2; (-) strand; PAM type: YTN; PAM sequence: TTT
tcataaagttatgttctttt

SEQ ID NO: 189903 - DNA, 20 bp, Artificial Sequence
  Description of Artificial Sequence: Synthetic oligonucleotide
  Target: LAMA2; (-) strand; PAM type: YTN; PAM sequence: TTT
ttcataaagttatgttcttt

SEQ ID NO: 189904 - DNA, 20 bp, Artificial Sequence
  Description of Artificial Sequence: Synthetic oligonucleotide
  Target: LAMA2; (-) strand; PAM type: YTN; PAM sequence: TTA
tttttcataaagttatgttc

SEQ ID NO: 189905 - DNA, 20 bp, Artificial Sequence
  Description of Artificial Sequence: Synthetic oligonucleotide
  Target: LAMA2; (-) strand; PAM type: YTN; PAM sequence: TTG
gatataaaattatttttcat

SEQ ID NO: 189906 - DNA, 20 bp, Artificial Sequence
  Description of Artificial Sequence: Synthetic oligonucleotide
  Target: LAMA2; (-) strand; PAM type: YTN; PAM sequence: TTT
ggatataaaattatttttca

SEQ ID NO: 189907 - DNA, 20 bp, Artificial Sequence
  Description of Artificial Sequence: Synthetic oligonucleotide
  Target: LAMA2; (-) strand; PAM type: YTN; PAM sequence: TTT
tggatataaaattatttttc

SEQ ID NO: 189908 - DNA, 20 bp, Artificial Sequence
  Description of Artificial Sequence: Synthetic oligonucleotide
  Target: LAMA2; (-) strand; PAM type: YTN; PAM sequence: TTA
ttttggatataaaattattt

SEQ ID NO: 189909 - DNA, 20 bp, Artificial Sequence
  Description of Artificial Sequence: Synthetic oligonucleotide
  Target: LAMA2; (-) strand; PAM type: YTN; PAM sequence: TTT
attttggatataaaattatt

SEQ ID NO: 189910 - DNA, 20 bp, Artificial Sequence
  Description of Artificial Sequence: Synthetic oligonucleotide
  Target: LAMA2; (-) strand; PAM type: YTN; PAM sequence: TTT
tattttggatataaaattat

SEQ ID NO: 189911 - DNA, 20 bp, Artificial Sequence
  Description of Artificial Sequence: Synthetic oligonucleotide
  Target: LAMA2; (-) strand; PAM type: YTN; PAM sequence: TTG
aagagttttattttggatat

SEQ ID NO: 189912 - DNA, 20 bp, Artificial Sequence
  Description of Artificial Sequence: Synthetic oligonucleotide
  Target: LAMA2; (-) strand; PAM type: YTN; PAM sequence: TTA
agccagacattgaagagttt

SEQ ID NO: 189913 - DNA, 20 bp, Artificial Sequence
  Description of Artificial Sequence: Synthetic oligonucleotide
  Target: LAMA2; (-) strand; PAM type: YTN; PAM sequence: CTA
ttaagccagacattgaagag

SEQ ID NO: 189914 - DNA, 20 bp, Artificial Sequence
  Description of Artificial Sequence: Synthetic oligonucleotide
  Target: LAMA2; (-) strand; PAM type: YTN; PAM sequence: TTC
tattaagccagacattgaag

SEQ ID NO: 189915 - DNA, 20 bp, Artificial Sequence
  Description of Artificial Sequence: Synthetic oligonucleotide
  Target: LAMA2; (-) strand; PAM type: YTN; PAM sequence: CTT
ctattaagccagacattgaa

SEQ ID NO: 189916 - DNA, 20 bp, Artificial Sequence
  Description of Artificial Sequence: Synthetic oligonucleotide
  Target: LAMA2; (-) strand; PAM type: YTN; PAM sequence: CTC
ttctattaagccagacattg

SEQ ID NO: 189917 - DNA, 20 bp, Artificial Sequence
  Description of Artificial Sequence: Synthetic oligonucleotide
  Target: LAMA2; (-) strand; PAM type: YTN; PAM sequence: TTC
tcttctattaagccagacat

SEQ ID NO: 189918 - DNA, 20 bp, Artificial Sequence
  Description of Artificial Sequence: Synthetic oligonucleotide
  Target: LAMA2; (-) strand; PAM type: YTN; PAM sequence: TTG
aacgcagaggcagaaatgag

SEQ ID NO: 189919 - DNA, 20 bp, Artificial Sequence
  Description of Artificial Sequence: Synthetic oligonucleotide
  Target: LAMA2; (-) strand; PAM type: YTN; PAM sequence: TTT
gaacgcagaggcagaaatga

SEQ ID NO: 189920 - DNA, 20 bp, Artificial Sequence
  Description of Artificial Sequence: Synthetic oligonucleotide
  Target: LAMA2; (-) strand; PAM type: YTN; PAM sequence: CTA
aaataacatgtaataatttg

SEQ ID NO: 189921 - DNA, 20 bp, Artificial Sequence
  Description of Artificial Sequence: Synthetic oligonucleotide
  Target: LAMA2; (-) strand; PAM type: YTN; PAM sequence: TTA
aactaaaataacatgtaata

SEQ ID NO: 189922 - DNA, 20 bp, Artificial Sequence
  Description of Artificial Sequence: Synthetic oligonucleotide
  Target: LAMA2; (-) strand; PAM type: YTN; PAM sequence: TTT
aaactaaaataacatgtaat

SEQ ID NO: 189923 - DNA, 20 bp, Artificial Sequence
  Description of Artificial Sequence: Synthetic oligonucleotide
  Target: LAMA2; (-) strand; PAM type: YTN; PAM sequence: TTA
aaccaaaataatttaaacta

SEQ ID NO: 189924 - DNA, 20 bp, Artificial Sequence
  Description of Artificial Sequence: Synthetic oligonucleotide
  Target: LAMA2; (-) strand; PAM type: YTN; PAM sequence: CTT
aaaccaaaataatttaaact

SEQ ID NO: 189925 - DNA, 20 bp, Artificial Sequence
  Description of Artificial Sequence: Synthetic oligonucleotide
  Target: LAMA2; (-) strand; PAM type: YTN; PAM sequence: TTA
atatgcttaaaccaaaataa

SEQ ID NO: 189926 - DNA, 20 bp, Artificial Sequence
  Description of Artificial Sequence: Synthetic oligonucleotide
  Target: LAMA2; (-) strand; PAM type: YTN; PAM sequence: CTT
aatatgcttaaaccaaaata

SEQ ID NO: 189927 - DNA, 20 bp, Artificial Sequence
  Description of Artificial Sequence: Synthetic oligonucleotide
  Target: LAMA2; (-) strand; PAM type: YTN; PAM sequence: TTC
ttaatatgcttaaaccaaaa

SEQ ID NO: 189928 - DNA, 20 bp, Artificial Sequence
  Description of Artificial Sequence: Synthetic oligonucleotide
  Target: LAMA2; (-) strand; PAM type: YTN; PAM sequence: TTT
cttaatatgcttaaaccaaa

SEQ ID NO: 189929 - DNA, 20 bp, Artificial Sequence
  Description of Artificial Sequence: Synthetic oligonucleotide
  Target: LAMA2; (-) strand; PAM type: YTN; PAM sequence: TTA
tatatttcttaatatgctta

SEQ ID NO: 189930 - DNA, 20 bp, Artificial Sequence
  Description of Artificial Sequence: Synthetic oligonucleotide
  Target: LAMA2; (-) strand; PAM type: YTN; PAM sequence: TTG
ttatatatttcttaatatgc

SEQ ID NO: 189931 - DNA, 20 bp, Artificial Sequence
  Description of Artificial Sequence: Synthetic oligonucleotide
  Target: LAMA2; (-) strand; PAM type: YTN; PAM sequence: TTG
ttgttatatatttcttaata

SEQ ID NO: 189932 - DNA, 20 bp, Artificial Sequence
  Description of Artificial Sequence: Synthetic oligonucleotide
  Target: LAMA2; (-) strand; PAM type: YTN; PAM sequence: TTT
gttgttatatatttcttaat

SEQ ID NO: 189933 - DNA, 20 bp, Artificial Sequence
  Description of Artificial Sequence: Synthetic oligonucleotide
  Target: LAMA2; (-) strand; PAM type: YTN; PAM sequence: CTA
tgtttgttgttatatatttc

SEQ ID NO: 189934 - DNA, 20 bp, Artificial Sequence
  Description of Artificial Sequence: Synthetic oligonucleotide
  Target: LAMA2; (-) strand; PAM type: YTN; PAM sequence: TTA
tctatgtttgttgttatata

SEQ ID NO: 189935 - DNA, 20 bp, Artificial Sequence
  Description of Artificial Sequence: Synthetic oligonucleotide
  Target: LAMA2; (-) strand; PAM type: YTN; PAM sequence: CTT
atctatgtttgttgttatat

SEQ ID NO: 189936 - DNA, 20 bp, Artificial Sequence
  Description of Artificial Sequence: Synthetic oligonucleotide
  Target: LAMA2; (-) strand; PAM type: YTN; PAM sequence: TTC
caatagcttatctatgtttg

SEQ ID NO: 189937 - DNA, 20 bp, Artificial Sequence
  Description of Artificial Sequence: Synthetic oligonucleotide
  Target: LAMA2; (-) strand; PAM type: YTN; PAM sequence: TTT
ccaatagcttatctatgttt

SEQ ID NO: 189938 - DNA, 20 bp, Artificial Sequence
  Description of Artificial Sequence: Synthetic oligonucleotide
  Target: LAMA2; (-) strand; PAM type: YTN; PAM sequence: TTT
tccaatagcttatctatgtt

SEQ ID NO: 189939 - DNA, 20 bp, Artificial Sequence
  Description of Artificial Sequence: Synthetic oligonucleotide
  Target: LAMA2; (-) strand; PAM type: YTN; PAM sequence: TTT
ttccaatagcttatctatgt

SEQ ID NO: 189940 - DNA, 20 bp, Artificial Sequence
  Description of Artificial Sequence: Synthetic oligonucleotide
  Target: LAMA2; (-) strand; PAM type: YTN; PAM sequence: TTT
tttccaatagcttatctatg

SEQ ID NO: 189941 - DNA, 20 bp, Artificial Sequence
  Description of Artificial Sequence: Synthetic oligonucleotide
  Target: LAMA2; (-) strand; PAM type: YTN; PAM sequence: CTT
ttttccaatagcttatctat

SEQ ID NO: 189942 - DNA, 20 bp, Artificial Sequence
  Description of Artificial Sequence: Synthetic oligonucleotide
  Target: LAMA2; (-) strand; PAM type: YTN; PAM sequence: CTC
ttttttccaatagcttatct

SEQ ID NO: 189943 - DNA, 20 bp, Artificial Sequence
  Description of Artificial Sequence: Synthetic oligonucleotide
  Target: LAMA2; (-) strand; PAM type: YTN; PAM sequence: CTC
ctcttttttccaatagctta

SEQ ID NO: 189944 - DNA, 20 bp, Artificial Sequence
  Description of Artificial Sequence: Synthetic oligonucleotide
  Target: LAMA2; (-) strand; PAM type: YTN; PAM sequence: CTG
acagactcctcttttttcca

SEQ ID NO: 189945 - DNA, 20 bp, Artificial Sequence
  Description of Artificial Sequence: Synthetic oligonucleotide
  Target: LAMA2; (-) strand; PAM type: YTN; PAM sequence: TTA
aaaggcactgacagactcct

SEQ ID NO: 189946 - DNA, 20 bp, Artificial Sequence
  Description of Artificial Sequence: Synthetic oligonucleotide
  Target: LAMA2; (-) strand; PAM type: YTN; PAM sequence: CTT
aaaaggcactgacagactcc

SEQ ID NO: 189947 - DNA, 20 bp, Artificial Sequence
  Description of Artificial Sequence: Synthetic oligonucleotide
  Target: LAMA2; (-) strand; PAM type: YTN; PAM sequence: CTA
tcttaaaaggcactgacaga

SEQ ID NO: 189948 - DNA, 20 bp, Artificial Sequence
  Description of Artificial Sequence: Synthetic oligonucleotide
  Target: LAMA2; (-) strand; PAM type: YTN; PAM sequence: TTA
cagctatcttaaaaggcact

SEQ ID NO: 189949 - DNA, 20 bp, Artificial Sequence
  Description of Artificial Sequence: Synthetic oligonucleotide
  Target: LAMA2; (-) strand; PAM type: YTN; PAM sequence: TTT
acagctatcttaaaaggcac

SEQ ID NO: 189950 - DNA, 20 bp, Artificial Sequence
  Description of Artificial Sequence: Synthetic oligonucleotide
  Target: LAMA2; (-) strand; PAM type: YTN; PAM sequence: TTG
gtatagaatcaaagaatatt

SEQ ID NO: 189951 - DNA, 20 bp, Artificial Sequence
  Description of Artificial Sequence: Synthetic oligonucleotide
  Target: LAMA2; (-) strand; PAM type: YTN; PAM sequence: TTT
ggtatagaatcaaagaatat

SEQ ID NO: 189952 - DNA, 20 bp, Artificial Sequence
  Description of Artificial Sequence: Synthetic oligonucleotide
  Target: LAMA2; (-) strand; PAM type: YTN; PAM sequence: TTT
tggtatagaatcaaagaata

SEQ ID NO: 189953 - DNA, 20 bp, Artificial Sequence
  Description of Artificial Sequence: Synthetic oligonucleotide
  Target: LAMA2; (-) strand; PAM type: YTN; PAM sequence: CTG
agttttggtatagaatcaaa

SEQ ID NO: 189954 - DNA, 20 bp, Artificial Sequence
  Description of Artificial Sequence: Synthetic oligonucleotide
  Target: LAMA2; (-) strand; PAM type: YTN; PAM sequence: TTA
ctgagttttggtatagaatc

SEQ ID NO: 189955 - DNA, 20 bp, Artificial Sequence
  Description of Artificial Sequence: Synthetic oligonucleotide
  Target: LAMA2; (-) strand; PAM type: YTN; PAM sequence: CTT
actgagttttggtatagaat

SEQ ID NO: 189956 - DNA, 20 bp, Artificial Sequence
  Description of Artificial Sequence: Synthetic oligonucleotide
  Target: LAMA2; (-) strand; PAM type: YTN; PAM sequence: CTA
ccacttactgagttttggta

SEQ ID NO: 189957 - DNA, 20 bp, Artificial Sequence
  Description of Artificial Sequence: Synthetic oligonucleotide
  Target: LAMA2; (-) strand; PAM type: YTN; PAM sequence: TTG
aaaactaccacttactgagt

SEQ ID NO: 189958 - DNA, 20 bp, Artificial Sequence
  Description of Artificial Sequence: Synthetic oligonucleotide
  Target: LAMA2; (-) strand; PAM type: YTN; PAM sequence: TTT
gaaaactaccacttactgag

SEQ ID NO: 189959 - DNA, 20 bp, Artificial Sequence
  Description of Artificial Sequence: Synthetic oligonucleotide
  Target: LAMA2; (-) strand; PAM type: YTN; PAM sequence: TTT
tgaaaactaccacttactga

SEQ ID NO: 189960 - DNA, 20 bp, Artificial Sequence
  Description of Artificial Sequence: Synthetic oligonucleotide
  Target: LAMA2; (-) strand; PAM type: YTN; PAM sequence: CTT
ttgaaaactaccacttactg

SEQ ID NO: 189961 - DNA, 20 bp, Artificial Sequence
  Description of Artificial Sequence: Synthetic oligonucleotide
  Target: LAMA2; (-) strand; PAM type: YTN; PAM sequence: CTG
cagccaatcttttgaaaact

SEQ ID NO: 189962 - DNA, 20 bp, Artificial Sequence
  Description of Artificial Sequence: Synthetic oligonucleotide
  Target: LAMA2; (-) strand; PAM type: YTN; PAM sequence: TTC
agataccacactgcagccaa

SEQ ID NO: 189963 - DNA, 20 bp, Artificial Sequence
  Description of Artificial Sequence: Synthetic oligonucleotide
  Target: LAMA2; (-) strand; PAM type: YTN; PAM sequence: TTT
cagataccacactgcagcca

SEQ ID NO: 189964 - DNA, 20 bp, Artificial Sequence
  Description of Artificial Sequence: Synthetic oligonucleotide
  Target: LAMA2; (-) strand; PAM type: YTN; PAM sequence: TTG
atgcagtttcagataccaca

SEQ ID NO: 189965 - DNA, 20 bp, Artificial Sequence
  Description of Artificial Sequence: Synthetic oligonucleotide
  Target: LAMA2; (-) strand; PAM type: YTN; PAM sequence: TTA
atataaaagcgtacaaaaat

SEQ ID NO: 189966 - DNA, 20 bp, Artificial Sequence
  Description of Artificial Sequence: Synthetic oligonucleotide
  Target: LAMA2; (-) strand; PAM type: YTN; PAM sequence: TTT
aatataaaagcgtacaaaaa

SEQ ID NO: 189967 - DNA, 20 bp, Artificial Sequence
  Description of Artificial Sequence: Synthetic oligonucleotide
  Target: LAMA2; (-) strand; PAM type: YTN; PAM sequence: TTT
taatataaaagcgtacaaaa

SEQ ID NO: 189968 - DNA, 20 bp, Artificial Sequence
  Description of Artificial Sequence: Synthetic oligonucleotide
  Target: LAMA2; (-) strand; PAM type: YTN; PAM sequence: TTC
caggtgtaagatagatccgt

SEQ ID NO: 189969 - DNA, 20 bp, Artificial Sequence
  Description of Artificial Sequence: Synthetic oligonucleotide
  Target: LAMA2; (-) strand; PAM type: YTN; PAM sequence: TTT
ccaggtgtaagatagatccg

SEQ ID NO: 189970 - DNA, 20 bp, Artificial Sequence
  Description of Artificial Sequence: Synthetic oligonucleotide
  Target: LAMA2; (-) strand; PAM type: YTN; PAM sequence: CTT
tccaggtgtaagatagatcc

SEQ ID NO: 189971 - DNA, 20 bp, Artificial Sequence
  Description of Artificial Sequence: Synthetic oligonucleotide
  Target: LAMA2; (-) strand; PAM type: YTN; PAM sequence: TTC
tttccaggtgtaagatagat

SEQ ID NO: 189972 - DNA, 20 bp, Artificial Sequence
  Description of Artificial Sequence: Synthetic oligonucleotide
  Target: LAMA2; (-) strand; PAM type: YTN; PAM sequence: CTA
taacatcacacatgggtaaa

SEQ ID NO: 189973 - DNA, 20 bp, Artificial Sequence
  Description of Artificial Sequence: Synthetic oligonucleotide
  Target: LAMA2; (-) strand; PAM type: YTN; PAM sequence: CTA
tgaatgatactataacatca

SEQ ID NO: 189974 - DNA, 20 bp, Artificial Sequence
  Description of Artificial Sequence: Synthetic oligonucleotide
  Target: LAMA2; (-) strand; PAM type: YTN; PAM sequence: TTC
caaatgatctatgaatgata

SEQ ID NO: 189975 - DNA, 20 bp, Artificial Sequence
  Description of Artificial Sequence: Synthetic oligonucleotide
  Target: LAMA2; (-) strand; PAM type: YTN; PAM sequence: CTT
ccaaatgatctatgaatgat

SEQ ID NO: 189976 - DNA, 20 bp, Artificial Sequence
  Description of Artificial Sequence: Synthetic oligonucleotide
  Target: LAMA2; (-) strand; PAM type: YTN; PAM sequence: CTA
gtaaatcagtatcttccaaa

SEQ ID NO: 189977 - DNA, 20 bp, Artificial Sequence
  Description of Artificial Sequence: Synthetic oligonucleotide
  Target: LAMA2; (-) strand; PAM type: YTN; PAM sequence: CTG
cataactagtaaatcagtat

SEQ ID NO: 189978 - DNA, 20 bp, Artificial Sequence
  Description of Artificial Sequence: Synthetic oligonucleotide
  Target: LAMA2; (-) strand; PAM type: YTN; PAM sequence: CTG
atctgcataactagtaaatc

SEQ ID NO: 189979 - DNA, 20 bp, Artificial Sequence
  Description of Artificial Sequence: Synthetic oligonucleotide
  Target: LAMA2; (-) strand; PAM type: YTN; PAM sequence: TTG
tggctgatctgcataactag

SEQ ID NO: 189980 - DNA, 20 bp, Artificial Sequence
  Description of Artificial Sequence: Synthetic oligonucleotide
  Target: LAMA2; (-) strand; PAM type: YTN; PAM sequence: CTG
tcaagttgtggctgatctgc

SEQ ID NO: 189981 - DNA, 20 bp, Artificial Sequence
  Description of Artificial Sequence: Synthetic oligonucleotide
  Target: LAMA2; (-) strand; PAM type: YTN; PAM sequence: TTA
taagaaaatctgtcaagttg

SEQ ID NO: 189982 - DNA, 20 bp, Artificial Sequence
  Description of Artificial Sequence: Synthetic oligonucleotide
  Target: LAMA2; (-) strand; PAM type: YTN; PAM sequence: TTT
ataagaaaatctgtcaagtt

SEQ ID NO: 189983 - DNA, 20 bp, Artificial Sequence
  Description of Artificial Sequence: Synthetic oligonucleotide
  Target: LAMA2; (-) strand; PAM type: YTN; PAM sequence: TTT
tataagaaaatctgtcaagt

SEQ ID NO: 189984 - DNA, 20 bp, Artificial Sequence
  Description of Artificial Sequence: Synthetic oligonucleotide
  Target: LAMA2; (-) strand; PAM type: YTN; PAM sequence: TTA
aaatattttataagaaaatc

SEQ ID NO: 189985 - DNA, 20 bp, Artificial Sequence
  Description of Artificial Sequence: Synthetic oligonucleotide
  Target: LAMA2; (-) strand; PAM type: YTN; PAM sequence: CTG
gtgagatcaatagtcataaa

SEQ ID NO: 189986 - DNA, 20 bp, Artificial Sequence
  Description of Artificial Sequence: Synthetic oligonucleotide
  Target: LAMA2; (-) strand; PAM type: YTN; PAM sequence: TTC
tggtgagatcaatagtcata

SEQ ID NO: 189987 - DNA, 20 bp, Artificial Sequence
  Description of Artificial Sequence: Synthetic oligonucleotide
  Target: LAMA2; (-) strand; PAM type: YTN; PAM sequence: TTT
ctggtgagatcaatagtcat

SEQ ID NO: 189988 - DNA, 20 bp, Artificial Sequence
  Description of Artificial Sequence: Synthetic oligonucleotide
  Target: LAMA2; (-) strand; PAM type: YTN; PAM sequence: TTT
tctggtgagatcaatagtca

SEQ ID NO: 189989 - DNA, 20 bp, Artificial Sequence
  Description of Artificial Sequence: Synthetic oligonucleotide
  Target: LAMA2; (-) strand; PAM type: YTN; PAM sequence: CTT
ttctggtgagatcaatagtc

SEQ ID NO: 189990 - DNA, 20 bp, Artificial Sequence
  Description of Artificial Sequence: Synthetic oligonucleotide
  Target: LAMA2; (-) strand; PAM type: YTN; PAM sequence: TTA
gggacttttctggtgagatc

SEQ ID NO: 189991 - DNA, 20 bp, Artificial Sequence
  Description of Artificial Sequence: Synthetic oligonucleotide
  Target: LAMA2; (-) strand; PAM type: YTN; PAM sequence: TTT
agggacttttctggtgagat

SEQ ID NO: 189992 - DNA, 20 bp, Artificial Sequence
  Description of Artificial Sequence: Synthetic oligonucleotide
  Target: LAMA2; (-) strand; PAM type: YTN; PAM sequence: CTA
atatttagggacttttctgg

SEQ ID NO: 189993 - DNA, 20 bp, Artificial Sequence
  Description of Artificial Sequence: Synthetic oligonucleotide
  Target: LAMA2; (-) strand; PAM type: YTN; PAM sequence: TTC
taatatttagggacttttct

SEQ ID NO: 189994 - DNA, 20 bp, Artificial Sequence
  Description of Artificial Sequence: Synthetic oligonucleotide
  Target: LAMA2; (-) strand; PAM type: YTN; PAM sequence: CTT
ctaatatttagggacttttc

SEQ ID NO: 189995 - DNA, 20 bp, Artificial Sequence
  Description of Artificial Sequence: Synthetic oligonucleotide
  Target: LAMA2; (-) strand; PAM type: YTN; PAM sequence: TTA
acagcttctaatatttaggg

SEQ ID NO: 189996 - DNA, 20 bp, Artificial Sequence
  Description of Artificial Sequence: Synthetic oligonucleotide
  Target: LAMA2; (-) strand; PAM type: YTN; PAM sequence: TTG
tgagattaacagcttctaat

SEQ ID NO: 189997 - DNA, 20 bp, Artificial Sequence
  Description of Artificial Sequence: Synthetic oligonucleotide
  Target: LAMA2; (-) strand; PAM type: YTN; PAM sequence: CTA
ccattgtgagattaacagct

SEQ ID NO: 189998 - DNA, 20 bp, Artificial Sequence
  Description of Artificial Sequence: Synthetic oligonucleotide
  Target: LAMA2; (-) strand; PAM type: YTN; PAM sequence: CTC
taccattgtgagattaacag

SEQ ID NO: 189999 - DNA, 20 bp, Artificial Sequence
  Description of Artificial Sequence: Synthetic oligonucleotide
  Target: LAMA2; (-) strand; PAM type: YTN; PAM sequence: TTG
tctctaccattgtgagatta

SEQ ID NO: 190000 - DNA, 20 bp, Artificial Sequence
  Description of Artificial Sequence: Synthetic oligonucleotide
  Target: LAMA2; (-) strand; PAM type: YTN; PAM sequence: TTT
gtctctaccattgtgagatt

SEQ ID NO: 190001 - DNA, 20 bp, Artificial Sequence
  Description of Artificial Sequence: Synthetic oligonucleotide
  Target: LAMA2; (-) strand; PAM type: YTN; PAM sequence: CTG
aaaaatttgtctctaccatt

SEQ ID NO: 190002 - DNA, 20 bp, Artificial Sequence
  Description of Artificial Sequence: Synthetic oligonucleotide
  Target: LAMA2; (-) strand; PAM type: YTN; PAM sequence: TTC
tgaaaaatttgtctctacca

SEQ ID NO: 190003 - DNA, 20 bp, Artificial Sequence
  Description of Artificial Sequence: Synthetic oligonucleotide
  Target: LAMA2; (-) strand; PAM type: YTN; PAM sequence: TTA
caaatgaaaataaaaattct

SEQ ID NO: 190004 - DNA, 20 bp, Artificial Sequence
  Description of Artificial Sequence: Synthetic oligonucleotide
  Target: LAMA2; (-) strand; PAM type: YTN; PAM sequence: CTT
acaaatgaaaataaaaattc

SEQ ID NO: 190005 - DNA, 20 bp, Artificial Sequence
  Description of Artificial Sequence: Synthetic oligonucleotide
  Target: LAMA2; (-) strand; PAM type: YTN; PAM sequence: CTA
cagaaacttacaaatgaaaa

SEQ ID NO: 190006 - DNA, 20 bp, Artificial Sequence
  Description of Artificial Sequence: Synthetic oligonucleotide
  Target: LAMA2; (-) strand; PAM type: YTN; PAM sequence: TTG
tcaataactacagaaactta

SEQ ID NO: 190007 - DNA, 20 bp, Artificial Sequence
  Description of Artificial Sequence: Synthetic oligonucleotide
  Target: LAMA2; (-) strand; PAM type: YTN; PAM sequence: TTT
gtcaataactacagaaactt

SEQ ID NO: 190008 - DNA, 20 bp, Artificial Sequence
  Description of Artificial Sequence: Synthetic oligonucleotide
  Target: LAMA2; (-) strand; PAM type: YTN; PAM sequence: TTC
aagaaaaataacaaaatttg

SEQ ID NO: 190009 - DNA, 20 bp, Artificial Sequence
  Description of Artificial Sequence: Synthetic oligonucleotide
  Target: LAMA2; (-) strand; PAM type: YTN; PAM sequence: TTT
caagaaaaataacaaaattt

SEQ ID NO: 190010 - DNA, 20 bp, Artificial Sequence
  Description of Artificial Sequence: Synthetic oligonucleotide
  Target: LAMA2; (-) strand; PAM type: YTN; PAM sequence: CTA
tttcaagaaaaataacaaaa

SEQ ID NO: 190011 - DNA, 20 bp, Artificial Sequence
  Description of Artificial Sequence: Synthetic oligonucleotide
  Target: LAMA2; (-) strand; PAM type: YTN; PAM sequence: TTA
agaatgaataaagtaactat

SEQ ID NO: 190012 - DNA, 20 bp, Artificial Sequence
  Description of Artificial Sequence: Synthetic oligonucleotide
  Target: LAMA2; (-) strand; PAM type: YTN; PAM sequence: CTT
aagaatgaataaagtaacta

SEQ ID NO: 190013 - DNA, 20 bp, Artificial Sequence
  Description of Artificial Sequence: Synthetic oligonucleotide
  Target: LAMA2; (-) strand; PAM type: YTN; PAM sequence: TTC
ttaagaatgaataaagtaac

SEQ ID NO: 190014 - DNA, 20 bp, Artificial Sequence
  Description of Artificial Sequence: Synthetic oligonucleotide
  Target: LAMA2; (-) strand; PAM type: YTN; PAM sequence: TTT
cttaagaatgaataaagtaa

SEQ ID NO: 190015 - DNA, 20 bp, Artificial Sequence
  Description of Artificial Sequence: Synthetic oligonucleotide
  Target: LAMA2; (-) strand; PAM type: YTN; PAM sequence: TTT
tcttaagaatgaataaagta

SEQ ID NO: 190016 - DNA, 20 bp, Artificial Sequence
  Description of Artificial Sequence: Synthetic oligonucleotide
  Target: LAMA2; (-) strand; PAM type: YTN; PAM sequence: TTG
ataaacattttcttaagaat

SEQ ID NO: 190017 - DNA, 20 bp, Artificial Sequence
  Description of Artificial Sequence: Synthetic oligonucleotide
  Target: LAMA2; (-) strand; PAM type: YTN; PAM sequence: TTT
gataaacattttcttaagaa

SEQ ID NO: 190018 - DNA, 20 bp, Artificial Sequence
  Description of Artificial Sequence: Synthetic oligonucleotide
  Target: LAMA2; (-) strand; PAM type: YTN; PAM sequence: TTG
tttgataaacattttcttaa

SEQ ID NO: 190019 - DNA, 20 bp, Artificial Sequence
  Description of Artificial Sequence: Synthetic oligonucleotide
  Target: LAMA2; (-) strand; PAM type: YTN; PAM sequence: TTT
gtttgataaacattttctta

SEQ ID NO: 190020 - DNA, 20 bp, Artificial Sequence
  Description of Artificial Sequence: Synthetic oligonucleotide
  Target: LAMA2; (-) strand; PAM type: YTN; PAM sequence: CTC
atttgtttgataaacatttt

SEQ ID NO: 190021 - DNA, 20 bp, Artificial Sequence
  Description of Artificial Sequence: Synthetic oligonucleotide
  Target: LAMA2; (-) strand; PAM type: YTN; PAM sequence: TTA
agactcatttgtttgataaa

SEQ ID NO: 190022 - DNA, 20 bp, Artificial Sequence
  Description of Artificial Sequence: Synthetic oligonucleotide
  Target: LAMA2; (-) strand; PAM type: YTN; PAM sequence: TTT
aagactcatttgtttgataa

SEQ ID NO: 190023 - DNA, 20 bp, Artificial Sequence
  Description of Artificial Sequence: Synthetic oligonucleotide
  Target: LAMA2; (-) strand; PAM type: YTN; PAM sequence: TTT
taagactcatttgtttgata

SEQ ID NO: 190024 - DNA, 20 bp, Artificial Sequence
  Description of Artificial Sequence: Synthetic oligonucleotide
  Target: LAMA2; (-) strand; PAM type: YTN; PAM sequence: TTT
ttaagactcatttgtttgat

SEQ ID NO: 190025 - DNA, 20 bp, Artificial Sequence
  Description of Artificial Sequence: Synthetic oligonucleotide
  Target: LAMA2; (-) strand; PAM type: YTN; PAM sequence: CTA
tggtttttaagactcatttg

SEQ ID NO: 190026 - DNA, 20 bp, Artificial Sequence
  Description of Artificial Sequence: Synthetic oligonucleotide
  Target: LAMA2; (-) strand; PAM type: YTN; PAM sequence: CTA
actatggtttttaagactca

SEQ ID NO: 190027 - DNA, 20 bp, Artificial Sequence
  Description of Artificial Sequence: Synthetic oligonucleotide
  Target: LAMA2; (-) strand; PAM type: YTN; PAM sequence: CTA
caaaaaggatctaactatgg

SEQ ID NO: 190028 - DNA, 20 bp, Artificial Sequence
  Description of Artificial Sequence: Synthetic oligonucleotide
  Target: LAMA2; (-) strand; PAM type: YTN; PAM sequence: CTA
tgtactacaaaaaggatcta

SEQ ID NO: 190029 - DNA, 20 bp, Artificial Sequence
  Description of Artificial Sequence: Synthetic oligonucleotide
  Target: LAMA2; (-) strand; PAM type: YTN; PAM sequence: TTC
gtggaataccctatgtacta

SEQ ID NO: 190030 - DNA, 20 bp, Artificial Sequence
  Description of Artificial Sequence: Synthetic oligonucleotide
  Target: LAMA2; (-) strand; PAM type: YTN; PAM sequence: TTT
cgtggaataccctatgtact

SEQ ID NO: 190031 - DNA, 20 bp, Artificial Sequence
  Description of Artificial Sequence: Synthetic oligonucleotide
  Target: LAMA2; (-) strand; PAM type: YTN; PAM sequence: TTT
tcgtggaataccctatgtac

SEQ ID NO: 190032 - DNA, 20 bp, Artificial Sequence
  Description of Artificial Sequence: Synthetic oligonucleotide
  Target: LAMA2; (-) strand; PAM type: YTN; PAM sequence: TTT
ttcgtggaataccctatgta

SEQ ID NO: 190033 - DNA, 20 bp, Artificial Sequence
  Description of Artificial Sequence: Synthetic oligonucleotide
  Target: LAMA2; (-) strand; PAM type: YTN; PAM sequence: TTT
tttcgtggaataccctatgt

SEQ ID NO: 190034 - DNA, 20 bp, Artificial Sequence
  Description of Artificial Sequence: Synthetic oligonucleotide
  Target: LAMA2; (-) strand; PAM type: YTN; PAM sequence: CTT
ttttcgtggaataccctatg

SEQ ID NO: 190035 - DNA, 20 bp, Artificial Sequence
  Description of Artificial Sequence: Synthetic oligonucleotide
  Target: LAMA2; (-) strand; PAM type: YTN; PAM sequence: CTA
gccacttttttcgtggaata

SEQ ID NO: 190036 - DNA, 20 bp, Artificial Sequence
  Description of Artificial Sequence: Synthetic oligonucleotide
  Target: LAMA2; (-) strand; PAM type: YTN; PAM sequence: CTA
aactagccacttttttcgtg

SEQ ID NO: 190037 - DNA, 20 bp, Artificial Sequence
  Description of Artificial Sequence: Synthetic oligonucleotide
  Target: LAMA2; (-) strand; PAM type: YTN; PAM sequence: CTG
caagctaaactagccacttt

SEQ ID NO: 190038 - DNA, 20 bp, Artificial Sequence
  Description of Artificial Sequence: Synthetic oligonucleotide
  Target: LAMA2; (-) strand; PAM type: YTN; PAM sequence: TTC
agctgcaagctaaactagcc

SEQ ID NO: 190039 - DNA, 20 bp, Artificial Sequence
  Description of Artificial Sequence: Synthetic oligonucleotide
  Target: LAMA2; (-) strand; PAM type: YTN; PAM sequence: TTT
cagctgcaagctaaactagc

SEQ ID NO: 190040 - DNA, 20 bp, Artificial Sequence
  Description of Artificial Sequence: Synthetic oligonucleotide
  Target: LAMA2; (-) strand; PAM type: YTN; PAM sequence: TTT
tcagctgcaagctaaactag

SEQ ID NO: 190041 - DNA, 20 bp, Artificial Sequence
  Description of Artificial Sequence: Synthetic oligonucleotide
  Target: LAMA2; (-) strand; PAM type: YTN; PAM sequence: TTG
ttttcagctgcaagctaaac

SEQ ID NO: 190042 - DNA, 20 bp, Artificial Sequence
  Description of Artificial Sequence: Synthetic oligonucleotide
  Target: LAMA2; (-) strand; PAM type: YTN; PAM sequence: TTG
tacagttgttttcagctgca

SEQ ID NO: 190043 - DNA, 20 bp, Artificial Sequence
  Description of Artificial Sequence: Synthetic oligonucleotide
  Target: LAMA2; (-) strand; PAM type: YTN; PAM sequence: TTT
gtacagttgttttcagctgc

SEQ ID NO: 190044 - DNA, 20 bp, Artificial Sequence
  Description of Artificial Sequence: Synthetic oligonucleotide
  Target: LAMA2; (-) strand; PAM type: YTN; PAM sequence: TTG
aggaaaagcatttgtacagt

SEQ ID NO: 190045 - DNA, 20 bp, Artificial Sequence
  Description of Artificial Sequence: Synthetic oligonucleotide
  Target: LAMA2; (-) strand; PAM type: YTN; PAM sequence: TTT
gaggaaaagcatttgtacag

SEQ ID NO: 190046 - DNA, 20 bp, Artificial Sequence
  Description of Artificial Sequence: Synthetic oligonucleotide
  Target: LAMA2; (-) strand; PAM type: YTN; PAM sequence: TTG
atttgaggaaaagcatttgt

SEQ ID NO: 190047 - DNA, 20 bp, Artificial Sequence
  Description of Artificial Sequence: Synthetic oligonucleotide
  Target: LAMA2; (-) strand; PAM type: YTN; PAM sequence: CTG
aagcatgatggttgatttga

SEQ ID NO: 190048 - DNA, 20 bp, Artificial Sequence
  Description of Artificial Sequence: Synthetic oligonucleotide
  Target: LAMA2; (-) strand; PAM type: YTN; PAM sequence: CTG
tatactgaagcatgatggtt

SEQ ID NO: 190049 - DNA, 20 bp, Artificial Sequence
  Description of Artificial Sequence: Synthetic oligonucleotide
  Target: LAMA2; (-) strand; PAM type: YTN; PAM sequence: TTA
acatcaactgtatactgaag

SEQ ID NO: 190050 - DNA, 20 bp, Artificial Sequence
  Description of Artificial Sequence: Synthetic oligonucleotide
  Target: LAMA2; (-) strand; PAM type: YTN; PAM sequence: TTT
aacatcaactgtatactgaa

SEQ ID NO: 190051 - DNA, 20 bp, Artificial Sequence
  Description of Artificial Sequence: Synthetic oligonucleotide
  Target: LAMA2; (-) strand; PAM type: YTN; PAM sequence: TTT
taacatcaactgtatactga

SEQ ID NO: 190052 - DNA, 20 bp, Artificial Sequence
  Description of Artificial Sequence: Synthetic oligonucleotide
  Target: LAMA2; (-) strand; PAM type: YTN; PAM sequence: TTT
ttaacatcaactgtatactg

SEQ ID NO: 190053 - DNA, 20 bp, Artificial Sequence
  Description of Artificial Sequence: Synthetic oligonucleotide
  Target: LAMA2; (-) strand; PAM type: YTN; PAM sequence: CTT
tttaacatcaactgtatact

SEQ ID NO: 190054 - DNA, 20 bp, Artificial Sequence
  Description of Artificial Sequence: Synthetic oligonucleotide
  Target: LAMA2; (-) strand; PAM type: YTN; PAM sequence: TTG
ggtacatctttttaacatca

SEQ ID NO: 190055 - DNA, 20 bp, Artificial Sequence
  Description of Artificial Sequence: Synthetic oligonucleotide
  Target: LAMA2; (-) strand; PAM type: YTN; PAM sequence: CTT
gggtacatctttttaacatc

SEQ ID NO: 190056 - DNA, 20 bp, Artificial Sequence
  Description of Artificial Sequence: Synthetic oligonucleotide
  Target: LAMA2; (-) strand; PAM type: YTN; PAM sequence: TTA
aatcttgggtacatcttttt

SEQ ID NO: 190057 - DNA, 20 bp, Artificial Sequence
  Description of Artificial Sequence: Synthetic oligonucleotide
  Target: LAMA2; (-) strand; PAM type: YTN; PAM sequence: TTA
ttaaatcttgggtacatctt

SEQ ID NO: 190058 - DNA, 20 bp, Artificial Sequence
  Description of Artificial Sequence: Synthetic oligonucleotide
  Target: LAMA2; (-) strand; PAM type: YTN; PAM sequence: TTT
attaaatcttgggtacatct

SEQ ID NO: 190059 - DNA, 20 bp, Artificial Sequence
  Description of Artificial Sequence: Synthetic oligonucleotide
  Target: LAMA2; (-) strand; PAM type: YTN; PAM sequence: TTA
aatttattaaatcttgggta

SEQ ID NO: 190060 - DNA, 20 bp, Artificial Sequence
  Description of Artificial Sequence: Synthetic oligonucleotide
  Target: LAMA2; (-) strand; PAM type: YTN; PAM sequence: TTG
atgaagtagtaacaatgatt

SEQ ID NO: 190061 - DNA, 20 bp, Artificial Sequence
  Description of Artificial Sequence: Synthetic oligonucleotide
  Target: LAMA2; (-) strand; PAM type: YTN; PAM sequence: CTT
gatgaagtagtaacaatgat

SEQ ID NO: 190062 - DNA, 20 bp, Artificial Sequence
  Description of Artificial Sequence: Synthetic oligonucleotide
  Target: LAMA2; (-) strand; PAM type: YTN; PAM sequence: TTC
acagatgaatgtacttgatg

SEQ ID NO: 190063 - DNA, 20 bp, Artificial Sequence
  Description of Artificial Sequence: Synthetic oligonucleotide
  Target: LAMA2; (-) strand; PAM type: YTN; PAM sequence: TTT
cacagatgaatgtacttgat

SEQ ID NO: 190064 - DNA, 20 bp, Artificial Sequence
  Description of Artificial Sequence: Synthetic oligonucleotide
  Target: LAMA2; (-) strand; PAM type: YTN; PAM sequence: CTA
gtttcacagatgaatgtact

SEQ ID NO: 190065 - DNA, 20 bp, Artificial Sequence
  Description of Artificial Sequence: Synthetic oligonucleotide
  Target: LAMA2; (-) strand; PAM type: YTN; PAM sequence: CTC
ccagaagaaaaaaacaacta

SEQ ID NO: 190066 - DNA, 20 bp, Artificial Sequence
  Description of Artificial Sequence: Synthetic oligonucleotide
  Target: LAMA2; (-) strand; PAM type: YTN; PAM sequence: TTC
accaccacacactcccagaa

SEQ ID NO: 190067 - DNA, 20 bp, Artificial Sequence
  Description of Artificial Sequence: Synthetic oligonucleotide
  Target: LAMA2; (-) strand; PAM type: YTN; PAM sequence: TTT
caccaccacacactcccaga

SEQ ID NO: 190068 - DNA, 20 bp, Artificial Sequence
  Description of Artificial Sequence: Synthetic oligonucleotide
  Target: LAMA2; (-) strand; PAM type: YTN; PAM sequence: TTT
tcaccaccacacactcccag

SEQ ID NO: 190069 - DNA, 20 bp, Artificial Sequence
  Description of Artificial Sequence: Synthetic oligonucleotide
  Target: LAMA2; (-) strand; PAM type: YTN; PAM sequence: TTA
gttttcaccaccacacactc

SEQ ID NO: 190070 - DNA, 20 bp, Artificial Sequence
  Description of Artificial Sequence: Synthetic oligonucleotide
  Target: LAMA2; (-) strand; PAM type: YTN; PAM sequence: TTT
agttttcaccaccacacact

SEQ ID NO: 190071 - DNA, 20 bp, Artificial Sequence
  Description of Artificial Sequence: Synthetic oligonucleotide
  Target: LAMA2; (-) strand; PAM type: YTN; PAM sequence: CTA
gtggtcagtttagttttcac

SEQ ID NO: 190072 - DNA, 20 bp, Artificial Sequence
  Description of Artificial Sequence: Synthetic oligonucleotide
  Target: LAMA2; (-) strand; PAM type: YTN; PAM sequence: CTA
aaccatgctagtggtcagtt

SEQ ID NO: 190073 - DNA, 20 bp, Artificial Sequence
  Description of Artificial Sequence: Synthetic oligonucleotide
  Target: LAMA2; (-) strand; PAM type: YTN; PAM sequence: TTA
gcacaaatcaaggcaggggt

SEQ ID NO: 190074 - DNA, 20 bp, Artificial Sequence
  Description of Artificial Sequence: Synthetic oligonucleotide
  Target: LAMA2; (-) strand; PAM type: YTN; PAM sequence: CTG
atggtacattagcacaaatc

SEQ ID NO: 190075 - DNA, 20 bp, Artificial Sequence
  Description of Artificial Sequence: Synthetic oligonucleotide
  Target: LAMA2; (-) strand; PAM type: YTN; PAM sequence: CTG
atggtgcaaaagcaatagtg

SEQ ID NO: 190076 - DNA, 20 bp, Artificial Sequence
  Description of Artificial Sequence: Synthetic oligonucleotide
  Target: LAMA2; (-) strand; PAM type: YTN; PAM sequence: TTG
acatgtgcactgatggtgca

SEQ ID NO: 190077 - DNA, 20 bp, Artificial Sequence
  Description of Artificial Sequence: Synthetic oligonucleotide
  Target: LAMA2; (-) strand; PAM type: YTN; PAM sequence: TTG
tgttgacatgtgcactgatg

SEQ ID NO: 190078 - DNA, 20 bp, Artificial Sequence
  Description of Artificial Sequence: Synthetic oligonucleotide
  Target: LAMA2; (-) strand; PAM type: YTN; PAM sequence: TTC
attgtgttgacatgtgcact

SEQ ID NO: 190079 - DNA, 20 bp, Artificial Sequence
  Description of Artificial Sequence: Synthetic oligonucleotide
  Target: LAMA2; (-) strand; PAM type: YTN; PAM sequence: TTT
cattgtgttgacatgtgcac

SEQ ID NO: 190080 - DNA, 20 bp, Artificial Sequence
  Description of Artificial Sequence: Synthetic oligonucleotide
  Target: LAMA2; (-) strand; PAM type: YTN; PAM sequence: TTT
tcattgtgttgacatgtgca

SEQ ID NO: 190081 - DNA, 20 bp, Artificial Sequence
  Description of Artificial Sequence: Synthetic oligonucleotide
  Target: LAMA2; (-) strand; PAM type: YTN; PAM sequence: CTT
ttcattgtgttgacatgtgc

SEQ ID NO: 190082 - DNA, 20 bp, Artificial Sequence
  Description of Artificial Sequence: Synthetic oligonucleotide
  Target: LAMA2; (-) strand; PAM type: YTN; PAM sequence: CTG
ccttttcattgtgttgacat

SEQ ID NO: 190083 - DNA, 20 bp, Artificial Sequence
  Description of Artificial Sequence: Synthetic oligonucleotide
  Target: LAMA2; (-) strand; PAM type: YTN; PAM sequence: TTA
tctgccttttcattgtgttg

SEQ ID NO: 190084 - DNA, 20 bp, Artificial Sequence
  Description of Artificial Sequence: Synthetic oligonucleotide
  Target: LAMA2; (-) strand; PAM type: YTN; PAM sequence: TTA
ttatctgccttttcattgtg

SEQ ID NO: 190085 - DNA, 20 bp, Artificial Sequence
  Description of Artificial Sequence: Synthetic oligonucleotide
  Target: LAMA2; (-) strand; PAM type: YTN; PAM sequence: TTA
attattatctgccttttcat

SEQ ID NO: 190086 - DNA, 20 bp, Artificial Sequence
  Description of Artificial Sequence: Synthetic oligonucleotide
  Target: LAMA2; (-) strand; PAM type: YTN; PAM sequence: TTT
aattattatctgccttttca

SEQ ID NO: 190087 - DNA, 20 bp, Artificial Sequence
  Description of Artificial Sequence: Synthetic oligonucleotide
  Target: LAMA2; (-) strand; PAM type: YTN; PAM sequence: TTA
gtaacaagatttaattatta

SEQ ID NO: 190088 - DNA, 20 bp, Artificial Sequence
  Description of Artificial Sequence: Synthetic oligonucleotide
  Target: LAMA2; (-) strand; PAM type: YTN; PAM sequence: TTT
agtaacaagatttaattatt

SEQ ID NO: 190089 - DNA, 20 bp, Artificial Sequence
  Description of Artificial Sequence: Synthetic oligonucleotide
  Target: LAMA2; (-) strand; PAM type: YTN; PAM sequence: TTT
tagtaacaagatttaattat

SEQ ID NO: 190090 - DNA, 20 bp, Artificial Sequence
  Description of Artificial Sequence: Synthetic oligonucleotide
  Target: LAMA2; (-) strand; PAM type: YTN; PAM sequence: CTT
ttagtaacaagatttaatta

SEQ ID NO: 190091 - DNA, 20 bp, Artificial Sequence
  Description of Artificial Sequence: Synthetic oligonucleotide
  Target: LAMA2; (-) strand; PAM type: YTN; PAM sequence: TTC
aaaaatccttttagtaacaa

SEQ ID NO: 190092 - DNA, 20 bp, Artificial Sequence
  Description of Artificial Sequence: Synthetic oligonucleotide
  Target: LAMA2; (-) strand; PAM type: YTN; PAM sequence: TTA
tccataggtacacaagttca

SEQ ID NO: 190093 - DNA, 20 bp, Artificial Sequence
  Description of Artificial Sequence: Synthetic oligonucleotide
  Target: LAMA2; (-) strand; PAM type: YTN; PAM sequence: CTG
ggagtccacaatacattatc

SEQ ID NO: 190094 - DNA, 20 bp, Artificial Sequence
  Description of Artificial Sequence: Synthetic oligonucleotide
  Target: LAMA2; (-) strand; PAM type: YTN; PAM sequence: CTG
tgaatccctgggagtccaca

SEQ ID NO: 190095 - DNA, 20 bp, Artificial Sequence
  Description of Artificial Sequence: Synthetic oligonucleotide
  Target: LAMA2; (-) strand; PAM type: YTN; PAM sequence: CTC
aaagaaagatctgtgaatcc

SEQ ID NO: 190096 - DNA, 20 bp, Artificial Sequence
  Description of Artificial Sequence: Synthetic oligonucleotide
  Target: LAMA2; (-) strand; PAM type: YTN; PAM sequence: CTG
tagagctcaaagaaagatct

SEQ ID NO: 190097 - DNA, 20 bp, Artificial Sequence
  Description of Artificial Sequence: Synthetic oligonucleotide
  Target: LAMA2; (-) strand; PAM type: YTN; PAM sequence: CTG
tagtccaaccctgtagagct

SEQ ID NO: 190098 - DNA, 20 bp, Artificial Sequence
  Description of Artificial Sequence: Synthetic oligonucleotide
  Target: LAMA2; (-) strand; PAM type: YTN; PAM sequence: TTA
actgtagtccaaccctgtag

SEQ ID NO: 190099 - DNA, 20 bp, Artificial Sequence
  Description of Artificial Sequence: Synthetic oligonucleotide
  Target: LAMA2; (-) strand; PAM type: YTN; PAM sequence: CTT
aactgtagtccaaccctgta

SEQ ID NO: 190100 - DNA, 20 bp, Artificial Sequence
  Description of Artificial Sequence: Synthetic oligonucleotide
  Target: LAMA2; (-) strand; PAM type: YTN; PAM sequence: TTG
gtgaagaggcaggcagtgag

SEQ ID NO: 190101 - DNA, 20 bp, Artificial Sequence
  Description of Artificial Sequence: Synthetic oligonucleotide
  Target: LAMA2; (-) strand; PAM type: YTN; PAM sequence: TTG
tagaattggtgaagaggcag

SEQ ID NO: 190102 - DNA, 20 bp, Artificial Sequence
  Description of Artificial Sequence: Synthetic oligonucleotide
  Target: LAMA2; (-) strand; PAM type: YTN; PAM sequence: TTT
gtagaattggtgaagaggca

SEQ ID NO: 190103 - DNA, 20 bp, Artificial Sequence
  Description of Artificial Sequence: Synthetic oligonucleotide
  Target: LAMA2; (-) strand; PAM type: YTN; PAM sequence: TTT
tgtagaattggtgaagaggc

SEQ ID NO: 190104 - DNA, 20 bp, Artificial Sequence
  Description of Artificial Sequence: Synthetic oligonucleotide
  Target: LAMA2; (-) strand; PAM type: YTN; PAM sequence: CTA
tagattttgtagaattggtg

SEQ ID NO: 190105 - DNA, 20 bp, Artificial Sequence
  Description of Artificial Sequence: Synthetic oligonucleotide
  Target: LAMA2; (-) strand; PAM type: YTN; PAM sequence: TTC
atatggctatagattttgta

SEQ ID NO: 190106 - DNA, 20 bp, Artificial Sequence
  Description of Artificial Sequence: Synthetic oligonucleotide
  Target: LAMA2; (-) strand; PAM type: YTN; PAM sequence: CTT
catatggctatagattttgt

SEQ ID NO: 190107 - DNA, 20 bp, Artificial Sequence
  Description of Artificial Sequence: Synthetic oligonucleotide
  Target: LAMA2; (-) strand; PAM type: YTN; PAM sequence: TTA
ccttcatatggctatagatt

SEQ ID NO: 190108 - DNA, 20 bp, Artificial Sequence
  Description of Artificial Sequence: Synthetic oligonucleotide
  Target: LAMA2; (-) strand; PAM type: YTN; PAM sequence: TTT
accttcatatggctatagat

SEQ ID NO: 190109 - DNA, 20 bp, Artificial Sequence
  Description of Artificial Sequence: Synthetic oligonucleotide
  Target: LAMA2; (-) strand; PAM type: YTN; PAM sequence: TTG
caaaatttaccttcatatgg

SEQ ID NO: 190110 - DNA, 20 bp, Artificial Sequence
  Description of Artificial Sequence: Synthetic oligonucleotide
  Target: LAMA2; (-) strand; PAM type: YTN; PAM sequence: CTG
attgcaaaatttaccttcat

SEQ ID NO: 190111 - DNA, 20 bp, Artificial Sequence
  Description of Artificial Sequence: Synthetic oligonucleotide
  Target: LAMA2; (-) strand; PAM type: YTN; PAM sequence: TTC
tgattgcaaaatttaccttc

SEQ ID NO: 190112 - DNA, 20 bp, Artificial Sequence
  Description of Artificial Sequence: Synthetic oligonucleotide
  Target: LAMA2; (-) strand; PAM type: YTN; PAM sequence: TTT
ctgattgcaaaatttacctt

SEQ ID NO: 190113 - DNA, 20 bp, Artificial Sequence
  Description of Artificial Sequence: Synthetic oligonucleotide
  Target: LAMA2; (-) strand; PAM type: YTN; PAM sequence: TTT
tctgattgcaaaatttacct

SEQ ID NO: 190114 - DNA, 20 bp, Artificial Sequence
  Description of Artificial Sequence: Synthetic oligonucleotide
  Target: LAMA2; (-) strand; PAM type: YTN; PAM sequence: TTT
ttctgattgcaaaatttacc

SEQ ID NO: 190115 - DNA, 20 bp, Artificial Sequence
  Description of Artificial Sequence: Synthetic oligonucleotide
  Target: LAMA2; (-) strand; PAM type: YTN; PAM sequence: CTT
tttctgattgcaaaatttac

SEQ ID NO: 190116 - DNA, 20 bp, Artificial Sequence
  Description of Artificial Sequence: Synthetic oligonucleotide
  Target: LAMA2; (-) strand; PAM type: YTN; PAM sequence: TTG
gctttttctgattgcaaaat

SEQ ID NO: 190117 - DNA, 20 bp, Artificial Sequence
  Description of Artificial Sequence: Synthetic oligonucleotide
  Target: LAMA2; (-) strand; PAM type: YTN; PAM sequence: TTT
ggctttttctgattgcaaaa

SEQ ID NO: 190118 - DNA, 20 bp, Artificial Sequence
  Description of Artificial Sequence: Synthetic oligonucleotide
  Target: LAMA2; (-) strand; PAM type: YTN; PAM sequence: TTT
tggctttttctgattgcaaa

SEQ ID NO: 190119 - DNA, 20 bp, Artificial Sequence
  Description of Artificial Sequence: Synthetic oligonucleotide
  Target: LAMA2; (-) strand; PAM type: YTN; PAM sequence: CTG
aagtggttttggctttttct

SEQ ID NO: 190120 - DNA, 20 bp, Artificial Sequence
  Description of Artificial Sequence: Synthetic oligonucleotide
  Target: LAMA2; (-) strand; PAM type: YTN; PAM sequence: CTG
aggtaaaaactgaagtggtt

SEQ ID NO: 190121 - DNA, 20 bp, Artificial Sequence
  Description of Artificial Sequence: Synthetic oligonucleotide
  Target: LAMA2; (-) strand; PAM type: YTN; PAM sequence: CTA
gacctgaggtaaaaactgaa

SEQ ID NO: 190122 - DNA, 20 bp, Artificial Sequence
  Description of Artificial Sequence: Synthetic oligonucleotide
  Target: LAMA2; (-) strand; PAM type: YTN; PAM sequence: CTA
gactagacctgaggtaaaaa

SEQ ID NO: 190123 - DNA, 20 bp, Artificial Sequence
  Description of Artificial Sequence: Synthetic oligonucleotide
  Target: LAMA2; (-) strand; PAM type: YTN; PAM sequence: CTC
ctagactagacctgaggtaa

SEQ ID NO: 190124 - DNA, 20 bp, Artificial Sequence
  Description of Artificial Sequence: Synthetic oligonucleotide
  Target: LAMA2; (-) strand; PAM type: YTN; PAM sequence: CTC
tcctagactagacctgaggt

SEQ ID NO: 190125 - DNA, 20 bp, Artificial Sequence
  Description of Artificial Sequence: Synthetic oligonucleotide
  Target: LAMA2; (-) strand; PAM type: YTN; PAM sequence: TTA
aaaagaaatggtatcactct

SEQ ID NO: 190126 - DNA, 20 bp, Artificial Sequence
  Description of Artificial Sequence: Synthetic oligonucleotide
  Target: LAMA2; (-) strand; PAM type: YTN; PAM sequence: CTT
aaaaagaaatggtatcactc

SEQ ID NO: 190127 - DNA, 20 bp, Artificial Sequence
  Description of Artificial Sequence: Synthetic oligonucleotide
  Target: LAMA2; (-) strand; PAM type: YTN; PAM sequence: TTC
ccccttaaaaagaaatggta

SEQ ID NO: 190128 - DNA, 20 bp, Artificial Sequence
  Description of Artificial Sequence: Synthetic oligonucleotide
  Target: LAMA2; (-) strand; PAM type: YTN; PAM sequence: CTT
cccccttaaaaagaaatggt

SEQ ID NO: 190129 - DNA, 20 bp, Artificial Sequence
  Description of Artificial Sequence: Synthetic oligonucleotide
  Target: LAMA2; (-) strand; PAM type: YTN; PAM sequence: TTC
ttcccccttaaaaagaaatg

SEQ ID NO: 190130 - DNA, 20 bp, Artificial Sequence
  Description of Artificial Sequence: Synthetic oligonucleotide
  Target: LAMA2; (-) strand; PAM type: YTN; PAM sequence: TTT
cttcccccttaaaaagaaat

SEQ ID NO: 190131 - DNA, 20 bp, Artificial Sequence
  Description of Artificial Sequence: Synthetic oligonucleotide
  Target: LAMA2; (-) strand; PAM type: YTN; PAM sequence: CTG
gatttcttcccccttaaaaa

SEQ ID NO: 190132 - DNA, 20 bp, Artificial Sequence
  Description of Artificial Sequence: Synthetic oligonucleotide
  Target: LAMA2; (-) strand; PAM type: YTN; PAM sequence: TTC
tggatttcttcccccttaaa

SEQ ID NO: 190133 - DNA, 20 bp, Artificial Sequence
  Description of Artificial Sequence: Synthetic oligonucleotide
  Target: LAMA2; (-) strand; PAM type: YTN; PAM sequence: TTT
ctggatttcttcccccttaa

SEQ ID NO: 190134 - DNA, 20 bp, Artificial Sequence
  Description of Artificial Sequence: Synthetic oligonucleotide
  Target: LAMA2; (-) strand; PAM type: YTN; PAM sequence: TTT
tctggatttcttccccctta

SEQ ID NO: 190135 - DNA, 20 bp, Artificial Sequence
  Description of Artificial Sequence: Synthetic oligonucleotide
  Target: LAMA2; (-) strand; PAM type: YTN; PAM sequence: CTT
ttctggatttcttccccctt

SEQ ID NO: 190136 - DNA, 20 bp, Artificial Sequence
  Description of Artificial Sequence: Synthetic oligonucleotide
  Target: LAMA2; (-) strand; PAM type: YTN; PAM sequence: TTC
cacagaagaagcttttctgg

SEQ ID NO: 190137 - DNA, 20 bp, Artificial Sequence
  Description of Artificial Sequence: Synthetic oligonucleotide
  Target: LAMA2; (-) strand; PAM type: YTN; PAM sequence: TTT
ccacagaagaagcttttctg

SEQ ID NO: 190138 - DNA, 20 bp, Artificial Sequence
  Description of Artificial Sequence: Synthetic oligonucleotide
  Target: LAMA2; (-) strand; PAM type: YTN; PAM sequence: TTT
tccacagaagaagcttttct

SEQ ID NO: 190139 - DNA, 20 bp, Artificial Sequence
  Description of Artificial Sequence: Synthetic oligonucleotide
  Target: LAMA2; (-) strand; PAM type: YTN; PAM sequence: TTT
ttccacagaagaagcttttc

SEQ ID NO: 190140 - DNA, 20 bp, Artificial Sequence
  Description of Artificial Sequence: Synthetic oligonucleotide
  Target: LAMA2; (-) strand; PAM type: YTN; PAM sequence: CTT
tttccacagaagaagctttt

SEQ ID NO: 190141 - DNA, 20 bp, Artificial Sequence
  Description of Artificial Sequence: Synthetic oligonucleotide
  Target: LAMA2; (-) strand; PAM type: YTN; PAM sequence: CTG
ctttttccacagaagaagct

SEQ ID NO: 190142 - DNA, 20 bp, Artificial Sequence
  Description of Artificial Sequence: Synthetic oligonucleotide
  Target: LAMA2; (-) strand; PAM type: YTN; PAM sequence: TTC
ctgctttttccacagaagaa

SEQ ID NO: 190143 - DNA, 20 bp, Artificial Sequence
  Description of Artificial Sequence: Synthetic oligonucleotide
  Target: LAMA2; (-) strand; PAM type: YTN; PAM sequence: CTT
cctgctttttccacagaaga

SEQ ID NO: 190144 - DNA, 20 bp, Artificial Sequence
  Description of Artificial Sequence: Synthetic oligonucleotide
  Target: LAMA2; (-) strand; PAM type: YTN; PAM sequence: TTA
acacttcctgctttttccac

SEQ ID NO: 190145 - DNA, 20 bp, Artificial Sequence
  Description of Artificial Sequence: Synthetic oligonucleotide
  Target: LAMA2; (-) strand; PAM type: YTN; PAM sequence: TTT
aacacttcctgctttttcca

SEQ ID NO: 190146 - DNA, 20 bp, Artificial Sequence
  Description of Artificial Sequence: Synthetic oligonucleotide
  Target: LAMA2; (-) strand; PAM type: YTN; PAM sequence: TTT
taacacttcctgctttttcc

SEQ ID NO: 190147 - DNA, 20 bp, Artificial Sequence
  Description of Artificial Sequence: Synthetic oligonucleotide
  Target: LAMA2; (-) strand; PAM type: YTN; PAM sequence: CTG
gttttaacacttcctgcttt

SEQ ID NO: 190148 - DNA, 20 bp, Artificial Sequence
  Description of Artificial Sequence: Synthetic oligonucleotide
  Target: LAMA2; (-) strand; PAM type: YTN; PAM sequence: CTG
gctggttttaacacttcctg

SEQ ID NO: 190149 - DNA, 20 bp, Artificial Sequence
  Description of Artificial Sequence: Synthetic oligonucleotide
  Target: LAMA2; (-) strand; PAM type: YTN; PAM sequence: CTA
tatgtatgtctggctggttt

SEQ ID NO: 190150 - DNA, 20 bp, Artificial Sequence
  Description of Artificial Sequence: Synthetic oligonucleotide
  Target: LAMA2; (-) strand; PAM type: YTN; PAM sequence: TTC
tatatgtatgtctggctggt

SEQ ID NO: 190151 - DNA, 20 bp, Artificial Sequence
  Description of Artificial Sequence: Synthetic oligonucleotide
  Target: LAMA2; (-) strand; PAM type: YTN; PAM sequence: TTT
ctatatgtatgtctggctgg

SEQ ID NO: 190152 - DNA, 20 bp, Artificial Sequence
  Description of Artificial Sequence: Synthetic oligonucleotide
  Target: LAMA2; (-) strand; PAM type: YTN; PAM sequence: TTG
atttctatatgtatgtctgg

SEQ ID NO: 190153 - DNA, 20 bp, Artificial Sequence
  Description of Artificial Sequence: Synthetic oligonucleotide
  Target: LAMA2; (-) strand; PAM type: YTN; PAM sequence: TTT
gatttctatatgtatgtctg

SEQ ID NO: 190154 - DNA, 20 bp, Artificial Sequence
  Description of Artificial Sequence: Synthetic oligonucleotide
  Target: LAMA2; (-) strand; PAM type: YTN; PAM sequence: TTT
tgatttctatatgtatgtct

SEQ ID NO: 190155 - DNA, 20 bp, Artificial Sequence
  Description of Artificial Sequence: Synthetic oligonucleotide
  Target: LAMA2; (-) strand; PAM type: YTN; PAM sequence: TTA
agaagggcagatgatatggc

SEQ ID NO: 190156 - DNA, 20 bp, Artificial Sequence
  Description of Artificial Sequence: Synthetic oligonucleotide
  Target: LAMA2; (-) strand; PAM type: YTN; PAM sequence: TTG
ggcaagtgaaaggaaattaa

SEQ ID NO: 190157 - DNA, 20 bp, Artificial Sequence
  Description of Artificial Sequence: Synthetic oligonucleotide
  Target: LAMA2; (-) strand; PAM type: YTN; PAM sequence: TTT
gggcaagtgaaaggaaatta

SEQ ID NO: 190158 - DNA, 20 bp, Artificial Sequence
  Description of Artificial Sequence: Synthetic oligonucleotide
  Target: LAMA2; (-) strand; PAM type: YTN; PAM sequence: CTA
tagtttgggcaagtgaaagg

SEQ ID NO: 190159 - DNA, 20 bp, Artificial Sequence
  Description of Artificial Sequence: Synthetic oligonucleotide
  Target: LAMA2; (-) strand; PAM type: YTN; PAM sequence: CTA
ctatagtttgggcaagtgaa

SEQ ID NO: 190160 - DNA, 20 bp, Artificial Sequence
  Description of Artificial Sequence: Synthetic oligonucleotide
  Target: LAMA2; (-) strand; PAM type: YTN; PAM sequence: CTC
tactatagtttgggcaagtg

SEQ ID NO: 190161 - DNA, 20 bp, Artificial Sequence
  Description of Artificial Sequence: Synthetic oligonucleotide
  Target: LAMA2; (-) strand; PAM type: YTN; PAM sequence: CTA
tctctactatagtttgggca

SEQ ID NO: 190162 - DNA, 20 bp, Artificial Sequence
  Description of Artificial Sequence: Synthetic oligonucleotide
  Target: LAMA2; (-) strand; PAM type: YTN; PAM sequence: CTG
tgggtaagtacactatctct

SEQ ID NO: 190163 - DNA, 20 bp, Artificial Sequence
  Description of Artificial Sequence: Synthetic oligonucleotide
  Target: LAMA2; (-) strand; PAM type: YTN; PAM sequence: TTA
ggaataacatcatatgtcca

SEQ ID NO: 190164 - DNA, 20 bp, Artificial Sequence
  Description of Artificial Sequence: Synthetic oligonucleotide
  Target: LAMA2; (-) strand; PAM type: YTN; PAM sequence: CTA
ttaggaataacatcatatgt

SEQ ID NO: 190165 - DNA, 20 bp, Artificial Sequence
  Description of Artificial Sequence: Synthetic oligonucleotide
  Target: LAMA2; (-) strand; PAM type: YTN; PAM sequence: TTA
agtctattaggaataacatc

SEQ ID NO: 190166 - DNA, 20 bp, Artificial Sequence
  Description of Artificial Sequence: Synthetic oligonucleotide
  Target: LAMA2; (-) strand; PAM type: YTN; PAM sequence: TTT
aagtctattaggaataacat

SEQ ID NO: 190167 - DNA, 20 bp, Artificial Sequence
  Description of Artificial Sequence: Synthetic oligonucleotide
  Target: LAMA2; (-) strand; PAM type: YTN; PAM sequence: TTT
taagtctattaggaataaca

SEQ ID NO: 190168 - DNA, 20 bp, Artificial Sequence
  Description of Artificial Sequence: Synthetic oligonucleotide
  Target: LAMA2; (-) strand; PAM type: YTN; PAM sequence: TTT
ttaagtctattaggaataac

SEQ ID NO: 190169 - DNA, 20 bp, Artificial Sequence
  Description of Artificial Sequence: Synthetic oligonucleotide
  Target: LAMA2; (-) strand; PAM type: YTN; PAM sequence: CTT
tttaagtctattaggaataa

SEQ ID NO: 190170 - DNA, 20 bp, Artificial Sequence
  Description of Artificial Sequence: Synthetic oligonucleotide
  Target: LAMA2; (-) strand; PAM type: YTN; PAM sequence: TTC
actttttaagtctattagga

SEQ ID NO: 190171 - DNA, 20 bp, Artificial Sequence
  Description of Artificial Sequence: Synthetic oligonucleotide
  Target: LAMA2; (-) strand; PAM type: YTN; PAM sequence: TTA
caggcgtgagccaccgcgcc

SEQ ID NO: 190172 - DNA, 20 bp, Artificial Sequence
  Description of Artificial Sequence: Synthetic oligonucleotide
  Target: LAMA2; (-) strand; PAM type: YTN; PAM sequence: CTG
ggattacaggcgtgagccac

SEQ ID NO: 190173 - DNA, 20 bp, Artificial Sequence
  Description of Artificial Sequence: Synthetic oligonucleotide
  Target: LAMA2; (-) strand; PAM type: YTN; PAM sequence: CTC
ccaaagtgctgggattacag

SEQ ID NO: 190174 - DNA, 20 bp, Artificial Sequence
  Description of Artificial Sequence: Synthetic oligonucleotide
  Target: LAMA2; (-) strand; PAM type: YTN; PAM sequence: CTC
gtgatccacccgccccggcc

SEQ ID NO: 190175 - DNA, 20 bp, Artificial Sequence
  Description of Artificial Sequence: Synthetic oligonucleotide
  Target: LAMA2; (-) strand; PAM type: YTN; PAM sequence: CTG
acctcgtgatccacccgccc

SEQ ID NO: 190176 - DNA, 20 bp, Artificial Sequence
  Description of Artificial Sequence: Synthetic oligonucleotide
  Target: LAMA2; (-) strand; PAM type: YTN; PAM sequence: CTC
ctgacctcgtgatccacccg

SEQ ID NO: 190177 - DNA, 20 bp, Artificial Sequence
  Description of Artificial Sequence: Synthetic oligonucleotide
  Target: LAMA2; (-) strand; PAM type: YTN; PAM sequence: CTC
gatctcctgacctcgtgatc

SEQ ID NO: 190178 - DNA, 20 bp, Artificial Sequence
  Description of Artificial Sequence: Synthetic oligonucleotide
  Target: LAMA2; (-) strand; PAM type: YTN; PAM sequence: TTA
gccaggatggtctcgatctc

SEQ ID NO: 190179 - DNA, 20 bp, Artificial Sequence
  Description of Artificial Sequence: Synthetic oligonucleotide
  Target: LAMA2; (-) strand; PAM type: YTN; PAM sequence: TTC
accatgttagccaggatggt

SEQ ID NO: 190180 - DNA, 20 bp, Artificial Sequence
  Description of Artificial Sequence: Synthetic oligonucleotide
  Target: LAMA2; (-) strand; PAM type: YTN; PAM sequence: TTT
caccatgttagccaggatgg

SEQ ID NO: 190181 - DNA, 20 bp, Artificial Sequence
  Description of Artificial Sequence: Synthetic oligonucleotide
  Target: LAMA2; (-) strand; PAM type: YTN; PAM sequence: TTA
gtagagacagggtttcacca

SEQ ID NO: 190182 - DNA, 20 bp, Artificial Sequence
  Description of Artificial Sequence: Synthetic oligonucleotide
  Target: LAMA2; (-) strand; PAM type: YTN; PAM sequence: TTT
agtagagacagggtttcacc

SEQ ID NO: 190183 - DNA, 20 bp, Artificial Sequence
  Description of Artificial Sequence: Synthetic oligonucleotide
  Target: LAMA2; (-) strand; PAM type: YTN; PAM sequence: TTT
tagtagagacagggtttcac

SEQ ID NO: 190184 - DNA, 20 bp, Artificial Sequence
  Description of Artificial Sequence: Synthetic oligonucleotide
  Target: LAMA2; (-) strand; PAM type: YTN; PAM sequence: TTT
ttagtagagacagggtttca

SEQ ID NO: 190185 - DNA, 20 bp, Artificial Sequence
  Description of Artificial Sequence: Synthetic oligonucleotide
  Target: LAMA2; (-) strand; PAM type: YTN; PAM sequence: TTT
tttagtagagacagggtttc

SEQ ID NO: 190186 - DNA, 20 bp, Artificial Sequence
  Description of Artificial Sequence: Synthetic oligonucleotide
  Target: LAMA2; (-) strand; PAM type: YTN; PAM sequence: TTT
ttttagtagagacagggttt

SEQ ID NO: 190187 - DNA, 20 bp, Artificial Sequence
  Description of Artificial Sequence: Synthetic oligonucleotide
  Target: LAMA2; (-) strand; PAM type: YTN; PAM sequence: TTT
tttttagtagagacagggtt

SEQ ID NO: 190188 - DNA, 20 bp, Artificial Sequence
  Description of Artificial Sequence: Synthetic oligonucleotide
  Target: LAMA2; (-) strand; PAM type: YTN; PAM sequence: TTT
ttttttagtagagacagggt

SEQ ID NO: 190189 - DNA, 20 bp, Artificial Sequence
  Description of Artificial Sequence: Synthetic oligonucleotide
  Target: LAMA2; (-) strand; PAM type: YTN; PAM sequence: TTT
tttttttagtagagacaggg

SEQ ID NO: 190190 - DNA, 20 bp, Artificial Sequence
  Description of Artificial Sequence: Synthetic oligonucleotide
  Target: LAMA2; (-) strand; PAM type: YTN; PAM sequence: TTT
ttttttttagtagagacagg

SEQ ID NO: 190191 - DNA, 20 bp, Artificial Sequence
  Description of Artificial Sequence: Synthetic oligonucleotide
  Target: LAMA2; (-) strand; PAM type: YTN; PAM sequence: TTT
tttttttttagtagagacag

SEQ ID NO: 190192 - DNA, 20 bp, Artificial Sequence
  Description of Artificial Sequence: Synthetic oligonucleotide
  Target: LAMA2; (-) strand; PAM type: YTN; PAM sequence: TTT
ttttttttttagtagagaca

SEQ ID NO: 190193 - DNA, 20 bp, Artificial Sequence
  Description of Artificial Sequence: Synthetic oligonucleotide
  Target: LAMA2; (-) strand; PAM type: YTN; PAM sequence: TTT
tttttttttttagtagagac

SEQ ID NO: 190194 - DNA, 20 bp, Artificial Sequence
  Description of Artificial Sequence: Synthetic oligonucleotide
  Target: LAMA2; (-) strand; PAM type: YTN; PAM sequence: TTT
ttttttttttttagtagaga

SEQ ID NO: 190195 - DNA, 20 bp, Artificial Sequence
  Description of Artificial Sequence: Synthetic oligonucleotide
  Target: LAMA2; (-) strand; PAM type: YTN; PAM sequence: TTT
tttttttttttttagtagag

SEQ ID NO: 190196 - DNA, 20 bp, Artificial Sequence
  Description of Artificial Sequence: Synthetic oligonucleotide
  Target: LAMA2; (-) strand; PAM type: YTN; PAM sequence: TTT
ttttttttttttttagtaga

SEQ ID NO: 190197 - DNA, 20 bp, Artificial Sequence
  Description of Artificial Sequence: Synthetic oligonucleotide
  Target: LAMA2; (-) strand; PAM type: YTN; PAM sequence: TTT
tttttttttttttttagtag

SEQ ID NO: 190198 - DNA, 20 bp, Artificial Sequence
  Description of Artificial Sequence: Synthetic oligonucleotide
  Target: LAMA2; (-) strand; PAM type: YTN; PAM sequence: TTT
ttttttttttttttttagta

SEQ ID NO: 190199 - DNA, 20 bp, Artificial Sequence
  Description of Artificial Sequence: Synthetic oligonucleotide
  Target: LAMA2; (-) strand; PAM type: YTN; PAM sequence: TTT
tttttttttttttttttagt

SEQ ID NO: 190200 - DNA, 20 bp, Artificial Sequence
  Description of Artificial Sequence: Synthetic oligonucleotide
  Target: LAMA2; (-) strand; PAM type: YTN; PAM sequence: TTT
ttttttttttttttttttag

SEQ ID NO: 190201 - DNA, 20 bp, Artificial Sequence
  Description of Artificial Sequence: Synthetic oligonucleotide
  Target: LAMA2; (-) strand; PAM type: YTN; PAM sequence: TTT
ttttttttttttttttttta

SEQ ID NO: 190202 - DNA, 20 bp, Artificial Sequence
  Description of Artificial Sequence: Synthetic oligonucleotide
  Target: LAMA2; (-) strand; PAM type: YTN; PAM sequence: TTT
tttttttttttttttttttt

SEQ ID NO: 190203 - DNA, 20 bp, Artificial Sequence
  Description of Artificial Sequence: Synthetic oligonucleotide
  Target: LAMA2; (-) strand; PAM type: YTN; PAM sequence: CTT
tttttttttttttttttttt

SEQ ID NO: 190204 - DNA, 20 bp, Artificial Sequence
  Description of Artificial Sequence: Synthetic oligonucleotide
  Target: LAMA2; (-) strand; PAM type: YTN; PAM sequence: TTG
cttttttttttttttttttt

SEQ ID NO: 190205 - DNA, 20 bp, Artificial Sequence
  Description of Artificial Sequence: Synthetic oligonucleotide
  Target: LAMA2; (-) strand; PAM type: YTN; PAM sequence: TTT
gctttttttttttttttttt

SEQ ID NO: 190206 - DNA, 20 bp, Artificial Sequence
  Description of Artificial Sequence: Synthetic oligonucleotide
  Target: LAMA2; (-) strand; PAM type: YTN; PAM sequence: TTT
tgcttttttttttttttttt

SEQ ID NO: 190207 - DNA, 20 bp, Artificial Sequence
  Description of Artificial Sequence: Synthetic oligonucleotide
  Target: LAMA2; (-) strand; PAM type: YTN; PAM sequence: TTT
ttgctttttttttttttttt

SEQ ID NO: 190208 - DNA, 20 bp, Artificial Sequence
  Description of Artificial Sequence: Synthetic oligonucleotide
  Target: LAMA2; (-) strand; PAM type: YTN; PAM sequence: CTA
atttttgctttttttttttt

SEQ ID NO: 190209 - DNA, 20 bp, Artificial Sequence
  Description of Artificial Sequence: Synthetic oligonucleotide
  Target: LAMA2; (-) strand; PAM type: YTN; PAM sequence: CTA
caagcgcccgccaccacgcc

SEQ ID NO: 190210 - DNA, 20 bp, Artificial Sequence
  Description of Artificial Sequence: Synthetic oligonucleotide
  Target: LAMA2; (-) strand; PAM type: YTN; PAM sequence: CTG
gcactacaagcgcccgccac

SEQ ID NO: 190211 - DNA, 20 bp, Artificial Sequence
  Description of Artificial Sequence: Synthetic oligonucleotide
  Target: LAMA2; (-) strand; PAM type: YTN; PAM sequence: CTC
cagagtacctggcactacaa

SEQ ID NO: 190212 - DNA, 20 bp, Artificial Sequence
  Description of Artificial Sequence: Synthetic oligonucleotide
  Target: LAMA2; (-) strand; PAM type: YTN; PAM sequence: CTC
agcctccagagtacctggca

SEQ ID NO: 190213 - DNA, 20 bp, Artificial Sequence
  Description of Artificial Sequence: Synthetic oligonucleotide
  Target: LAMA2; (-) strand; PAM type: YTN; PAM sequence: CTG
cctcagcctccagagtacct

SEQ ID NO: 190214 - DNA, 20 bp, Artificial Sequence
  Description of Artificial Sequence: Synthetic oligonucleotide
  Target: LAMA2; (-) strand; PAM type: YTN; PAM sequence: CTC
ctgcctcagcctccagagta

SEQ ID NO: 190215 - DNA, 20 bp, Artificial Sequence
  Description of Artificial Sequence: Synthetic oligonucleotide
  Target: LAMA2; (-) strand; PAM type: YTN; PAM sequence: TTC
tcctgcctcagcctccagag

SEQ ID NO: 190216 - DNA, 20 bp, Artificial Sequence
  Description of Artificial Sequence: Synthetic oligonucleotide
  Target: LAMA2; (-) strand; PAM type: YTN; PAM sequence: TTC
acgccattctcctgcctcag

SEQ ID NO: 190217 - DNA, 20 bp, Artificial Sequence
  Description of Artificial Sequence: Synthetic oligonucleotide
  Target: LAMA2; (-) strand; PAM type: YTN; PAM sequence: CTC
ccggattcacgccattctcc

SEQ ID NO: 190218 - DNA, 20 bp, Artificial Sequence
  Description of Artificial Sequence: Synthetic oligonucleotide
  Target: LAMA2; (-) strand; PAM type: YTN; PAM sequence: CTC
ctcccggattcacgccattc

SEQ ID NO: 190219 - DNA, 20 bp, Artificial Sequence
  Description of Artificial Sequence: Synthetic oligonucleotide
  Target: LAMA2; (-) strand; PAM type: YTN; PAM sequence: CTC
ctcctcccggattcacgcca

SEQ ID NO: 190220 - DNA, 20 bp, Artificial Sequence
  Description of Artificial Sequence: Synthetic oligonucleotide
  Target: LAMA2; (-) strand; PAM type: YTN; PAM sequence: CTG
caagctcctcctcccggatt

SEQ ID NO: 190221 - DNA, 20 bp, Artificial Sequence
  Description of Artificial Sequence: Synthetic oligonucleotide
  Target: LAMA2; (-) strand; PAM type: YTN; PAM sequence: CTC
actgcaagctcctcctcccg

SEQ ID NO: 190222 - DNA, 20 bp, Artificial Sequence
  Description of Artificial Sequence: Synthetic oligonucleotide
  Target: LAMA2; (-) strand; PAM type: YTN; PAM sequence: CTC
ggctcactgcaagctcctcc

SEQ ID NO: 190223 - DNA, 20 bp, Artificial Sequence
  Description of Artificial Sequence: Synthetic oligonucleotide
  Target: LAMA2; (-) strand; PAM type: YTN; PAM sequence: CTG
gagtgcagtggcgcaatctc

SEQ ID NO: 190224 - DNA, 20 bp, Artificial Sequence
  Description of Artificial Sequence: Synthetic oligonucleotide
  Target: LAMA2; (-) strand; PAM type: YTN; PAM sequence: TTG
cccaagctggagtgcagtgg

SEQ ID NO: 190225 - DNA, 20 bp, Artificial Sequence
  Description of Artificial Sequence: Synthetic oligonucleotide
  Target: LAMA2; (-) strand; PAM type: YTN; PAM sequence: CTG
ttgcccaagctggagtgcag

SEQ ID NO: 190226 - DNA, 20 bp, Artificial Sequence
  Description of Artificial Sequence: Synthetic oligonucleotide
  Target: LAMA2; (-) strand; PAM type: YTN; PAM sequence: CTC
tgttgcccaagctggagtgc

SEQ ID NO: 190227 - DNA, 20 bp, Artificial Sequence
  Description of Artificial Sequence: Synthetic oligonucleotide
  Target: LAMA2; (-) strand; PAM type: YTN; PAM sequence: CTC
gctctgttgcccaagctgga

SEQ ID NO: 190228 - DNA, 20 bp, Artificial Sequence
  Description of Artificial Sequence: Synthetic oligonucleotide
  Target: LAMA2; (-) strand; PAM type: YTN; PAM sequence: TTC
acggagtctcgctctgttgc

SEQ ID NO: 190229 - DNA, 20 bp, Artificial Sequence
  Description of Artificial Sequence: Synthetic oligonucleotide
  Target: LAMA2; (-) strand; PAM type: YTN; PAM sequence: CTC
atgagttcacggagtctcgc

SEQ ID NO: 190230 - DNA, 20 bp, Artificial Sequence
  Description of Artificial Sequence: Synthetic oligonucleotide
  Target: LAMA2; (-) strand; PAM type: YTN; PAM sequence: TTG
ctcatgagttcacggagtct

SEQ ID NO: 190231 - DNA, 20 bp, Artificial Sequence
  Description of Artificial Sequence: Synthetic oligonucleotide
  Target: LAMA2; (-) strand; PAM type: YTN; PAM sequence: CTT
gctcatgagttcacggagtc

SEQ ID NO: 190232 - DNA, 20 bp, Artificial Sequence
  Description of Artificial Sequence: Synthetic oligonucleotide
  Target: LAMA2; (-) strand; PAM type: YTN; PAM sequence: CTA
aaccttgctcatgagttcac

SEQ ID NO: 190233 - DNA, 20 bp, Artificial Sequence
  Description of Artificial Sequence: Synthetic oligonucleotide
  Target: LAMA2; (-) strand; PAM type: YTN; PAM sequence: TTG
tactaaaccttgctcatgag

SEQ ID NO: 190234 - DNA, 20 bp, Artificial Sequence
  Description of Artificial Sequence: Synthetic oligonucleotide
  Target: LAMA2; (-) strand; PAM type: YTN; PAM sequence: TTT
gtactaaaccttgctcatga

SEQ ID NO: 190235 - DNA, 20 bp, Artificial Sequence
  Description of Artificial Sequence: Synthetic oligonucleotide
  Target: LAMA2; (-) strand; PAM type: YTN; PAM sequence: CTT
tgtactaaaccttgctcatg

SEQ ID NO: 190236 - DNA, 20 bp, Artificial Sequence
  Description of Artificial Sequence: Synthetic oligonucleotide
  Target: LAMA2; (-) strand; PAM type: YTN; PAM sequence: TTC
ctttgtactaaaccttgctc

SEQ ID NO: 190237 - DNA, 20 bp, Artificial Sequence
  Description of Artificial Sequence: Synthetic oligonucleotide
  Target: LAMA2; (-) strand; PAM type: YTN; PAM sequence: TTT
cctttgtactaaaccttgct

SEQ ID NO: 190238 - DNA, 20 bp, Artificial Sequence
  Description of Artificial Sequence: Synthetic oligonucleotide
  Target: LAMA2; (-) strand; PAM type: YTN; PAM sequence: TTA
gtatgtttcctttgtactaa

SEQ ID NO: 190239 - DNA, 20 bp, Artificial Sequence
  Description of Artificial Sequence: Synthetic oligonucleotide
  Target: LAMA2; (-) strand; PAM type: YTN; PAM sequence: TTA
cagatattagtatgtttcct

SEQ ID NO: 190240 - DNA, 20 bp, Artificial Sequence
  Description of Artificial Sequence: Synthetic oligonucleotide
  Target: LAMA2; (-) strand; PAM type: YTN; PAM sequence: TTC
agaattacagatattagtat

SEQ ID NO: 190241 - DNA, 20 bp, Artificial Sequence
  Description of Artificial Sequence: Synthetic oligonucleotide
  Target: LAMA2; (-) strand; PAM type: YTN; PAM sequence: CTA
atattcagaattacagatat

SEQ ID NO: 190242 - DNA, 20 bp, Artificial Sequence
  Description of Artificial Sequence: Synthetic oligonucleotide
  Target: LAMA2; (-) strand; PAM type: YTN; PAM sequence: CTG
ctaatattcagaattacaga

SEQ ID NO: 190243 - DNA, 20 bp, Artificial Sequence
  Description of Artificial Sequence: Synthetic oligonucleotide
  Target: LAMA2; (-) strand; PAM type: YTN; PAM sequence: TTC
tgctaatattcagaattaca

SEQ ID NO: 190244 - DNA, 20 bp, Artificial Sequence
  Description of Artificial Sequence: Synthetic oligonucleotide
  Target: LAMA2; (-) strand; PAM type: YTN; PAM sequence: CTT
ctgctaatattcagaattac

SEQ ID NO: 190245 - DNA, 20 bp, Artificial Sequence
  Description of Artificial Sequence: Synthetic oligonucleotide
  Target: LAMA2; (-) strand; PAM type: YTN; PAM sequence: CTC
ttctgctaatattcagaatt

SEQ ID NO: 190246 - DNA, 20 bp, Artificial Sequence
  Description of Artificial Sequence: Synthetic oligonucleotide
  Target: LAMA2; (-) strand; PAM type: YTN; PAM sequence: CTC
agcaaggaataaaaatctct

SEQ ID NO: 190247 - DNA, 20 bp, Artificial Sequence
  Description of Artificial Sequence: Synthetic oligonucleotide
  Target: LAMA2; (-) strand; PAM type: YTN; PAM sequence: TTC
aggagctcagcaaggaataa

SEQ ID NO: 190248 - DNA, 20 bp, Artificial Sequence
  Description of Artificial Sequence: Synthetic oligonucleotide
  Target: LAMA2; (-) strand; PAM type: YTN; PAM sequence: CTG
atgtgagttcaggagctcag

SEQ ID NO: 190249 - DNA, 20 bp, Artificial Sequence
  Description of Artificial Sequence: Synthetic oligonucleotide
  Target: LAMA2; (-) strand; PAM type: YTN; PAM sequence: CTC
ctgatgtgagttcaggagct

SEQ ID NO: 190250 - DNA, 20 bp, Artificial Sequence
  Description of Artificial Sequence: Synthetic oligonucleotide
  Target: LAMA2; (-) strand; PAM type: YTN; PAM sequence: CTA
tgaaaagaacaaaggacccc

SEQ ID NO: 190251 - DNA, 20 bp, Artificial Sequence
  Description of Artificial Sequence: Synthetic oligonucleotide
  Target: LAMA2; (-) strand; PAM type: YTN; PAM sequence: TTC
tatgaaaagaacaaaggacc

SEQ ID NO: 190252 - DNA, 20 bp, Artificial Sequence
  Description of Artificial Sequence: Synthetic oligonucleotide
  Target: LAMA2; (-) strand; PAM type: YTN; PAM sequence: TTT
ctatgaaaagaacaaaggac

SEQ ID NO: 190253 - DNA, 20 bp, Artificial Sequence
  Description of Artificial Sequence: Synthetic oligonucleotide
  Target: LAMA2; (-) strand; PAM type: YTN; PAM sequence: CTT
tctatgaaaagaacaaagga

SEQ ID NO: 190254 - DNA, 20 bp, Artificial Sequence
  Description of Artificial Sequence: Synthetic oligonucleotide
  Target: LAMA2; (-) strand; PAM type: YTN; PAM sequence: TTC
tttctatgaaaagaacaaag

SEQ ID NO: 190255 - DNA, 20 bp, Artificial Sequence
  Description of Artificial Sequence: Synthetic oligonucleotide
  Target: LAMA2; (-) strand; PAM type: YTN; PAM sequence: TTC
caacaggaattctttctatg

SEQ ID NO: 190256 - DNA, 20 bp, Artificial Sequence
  Description of Artificial Sequence: Synthetic oligonucleotide
  Target: LAMA2; (-) strand; PAM type: YTN; PAM sequence: CTT
ccaacaggaattctttctat

SEQ ID NO: 190257 - DNA, 20 bp, Artificial Sequence
  Description of Artificial Sequence: Synthetic oligonucleotide
  Target: LAMA2; (-) strand; PAM type: YTN; PAM sequence: TTG
agaaatacgatatccagtgc

SEQ ID NO: 190258 - DNA, 20 bp, Artificial Sequence
  Description of Artificial Sequence: Synthetic oligonucleotide
  Target: LAMA2; (-) strand; PAM type: YTN; PAM sequence: TTT
gagaaatacgatatccagtg

SEQ ID NO: 190259 - DNA, 20 bp, Artificial Sequence
  Description of Artificial Sequence: Synthetic oligonucleotide
  Target: LAMA2; (-) strand; PAM type: YTN; PAM sequence: TTT
tgagaaatacgatatccagt

SEQ ID NO: 190260 - DNA, 20 bp, Artificial Sequence
  Description of Artificial Sequence: Synthetic oligonucleotide
  Target: LAMA2; (-) strand; PAM type: YTN; PAM sequence: TTC
catattttgagaaatacgat

SEQ ID NO: 190261 - DNA, 20 bp, Artificial Sequence
  Description of Artificial Sequence: Synthetic oligonucleotide
  Target: LAMA2; (-) strand; PAM type: YTN; PAM sequence: CTA
gaaataaatgaaggaaattc

SEQ ID NO: 190262 - DNA, 20 bp, Artificial Sequence
  Description of Artificial Sequence: Synthetic oligonucleotide
  Target: LAMA2; (-) strand; PAM type: YTN; PAM sequence: TTC
aaaggctagaaataaatgaa

SEQ ID NO: 190263 - DNA, 20 bp, Artificial Sequence
  Description of Artificial Sequence: Synthetic oligonucleotide
  Target: LAMA2; (-) strand; PAM type: YTN; PAM sequence: CTT
caaaggctagaaataaatga

SEQ ID NO: 190264 - DNA, 20 bp, Artificial Sequence
  Description of Artificial Sequence: Synthetic oligonucleotide
  Target: LAMA2; (-) strand; PAM type: YTN; PAM sequence: TTA
gaaatcacaaaacttcaaag

SEQ ID NO: 190265 - DNA, 20 bp, Artificial Sequence
  Description of Artificial Sequence: Synthetic oligonucleotide
  Target: LAMA2; (-) strand; PAM type: YTN; PAM sequence: TTT
agaaatcacaaaacttcaaa

SEQ ID NO: 190266 - DNA, 20 bp, Artificial Sequence
  Description of Artificial Sequence: Synthetic oligonucleotide
  Target: LAMA2; (-) strand; PAM type: YTN; PAM sequence: CTT
tagaaatcacaaaacttcaa

SEQ ID NO: 190267 - DNA, 20 bp, Artificial Sequence
  Description of Artificial Sequence: Synthetic oligonucleotide
  Target: LAMA2; (-) strand; PAM type: YTN; PAM sequence: TTA
aatgctttagaaatcacaaa

SEQ ID NO: 190268 - DNA, 20 bp, Artificial Sequence
  Description of Artificial Sequence: Synthetic oligonucleotide
  Target: LAMA2; (-) strand; PAM type: YTN; PAM sequence: TTT
aaatgctttagaaatcacaa

SEQ ID NO: 190269 - DNA, 20 bp, Artificial Sequence
  Description of Artificial Sequence: Synthetic oligonucleotide
  Target: LAMA2; (-) strand; PAM type: YTN; PAM sequence: TTT
taaatgctttagaaatcaca

SEQ ID NO: 190270 - DNA, 20 bp, Artificial Sequence
  Description of Artificial Sequence: Synthetic oligonucleotide
  Target: LAMA2; (-) strand; PAM type: YTN; PAM sequence: CTT
ttaaatgctttagaaatcac

SEQ ID NO: 190271 - DNA, 20 bp, Artificial Sequence
  Description of Artificial Sequence: Synthetic oligonucleotide
  Target: LAMA2; (-) strand; PAM type: YTN; PAM sequence: TTA
caaaaccttttaaatgcttt

SEQ ID NO: 190272 - DNA, 20 bp, Artificial Sequence
  Description of Artificial Sequence: Synthetic oligonucleotide
  Target: LAMA2; (-) strand; PAM type: YTN; PAM sequence: CTC
aacattacaaaaccttttaa

SEQ ID NO: 190273 - DNA, 20 bp, Artificial Sequence
  Description of Artificial Sequence: Synthetic oligonucleotide
  Target: LAMA2; (-) strand; PAM type: YTN; PAM sequence: TTC
tcaacattacaaaacctttt

SEQ ID NO: 190274 - DNA, 20 bp, Artificial Sequence
  Description of Artificial Sequence: Synthetic oligonucleotide
  Target: LAMA2; (-) strand; PAM type: YTN; PAM sequence: TTA
ggttctcaacattacaaaac

SEQ ID NO: 190275 - DNA, 20 bp, Artificial Sequence
  Description of Artificial Sequence: Synthetic oligonucleotide
  Target: LAMA2; (-) strand; PAM type: YTN; PAM sequence: TTT
aggttctcaacattacaaaa

SEQ ID NO: 190276 - DNA, 20 bp, Artificial Sequence
  Description of Artificial Sequence: Synthetic oligonucleotide
  Target: LAMA2; (-) strand; PAM type: YTN; PAM sequence: TTT
taggttctcaacattacaaa

SEQ ID NO: 190277 - DNA, 20 bp, Artificial Sequence
  Description of Artificial Sequence: Synthetic oligonucleotide
  Target: LAMA2; (-) strand; PAM type: YTN; PAM sequence: CTC
ccaacaaataagaaaaagaa

SEQ ID NO: 190278 - DNA, 20 bp, Artificial Sequence
  Description of Artificial Sequence: Synthetic oligonucleotide
  Target: LAMA2; (-) strand; PAM type: YTN; PAM sequence: CTG
gacatctcccaacaaataag

SEQ ID NO: 190279 - DNA, 20 bp, Artificial Sequence
  Description of Artificial Sequence: Synthetic oligonucleotide
  Target: LAMA2; (-) strand; PAM type: YTN; PAM sequence: CTC
tggacatctcccaacaaata

SEQ ID NO: 190280 - DNA, 20 bp, Artificial Sequence
  Description of Artificial Sequence: Synthetic oligonucleotide
  Target: LAMA2; (-) strand; PAM type: YTN; PAM sequence: TTG
agtctctggacatctcccaa

SEQ ID NO: 190281 - DNA, 20 bp, Artificial Sequence
  Description of Artificial Sequence: Synthetic oligonucleotide
  Target: LAMA2; (-) strand; PAM type: YTN; PAM sequence: CTT
gagtctctggacatctccca

SEQ ID NO: 190282 - DNA, 20 bp, Artificial Sequence
  Description of Artificial Sequence: Synthetic oligonucleotide
  Target: LAMA2; (-) strand; PAM type: YTN; PAM sequence: TTG
gtcaaaggatagatccttga

SEQ ID NO: 190283 - DNA, 20 bp, Artificial Sequence
  Description of Artificial Sequence: Synthetic oligonucleotide
  Target: LAMA2; (-) strand; PAM type: YTN; PAM sequence: TTT
ggtcaaaggatagatccttg

SEQ ID NO: 190284 - DNA, 20 bp, Artificial Sequence
  Description of Artificial Sequence: Synthetic oligonucleotide
  Target: LAMA2; (-) strand; PAM type: YTN; PAM sequence: TTG
aagagtgaaaaatttggtca

SEQ ID NO: 190285 - DNA, 20 bp, Artificial Sequence
  Description of Artificial Sequence: Synthetic oligonucleotide
  Target: LAMA2; (-) strand; PAM type: YTN; PAM sequence: CTT
gaagagtgaaaaatttggtc

SEQ ID NO: 190286 - DNA, 20 bp, Artificial Sequence
  Description of Artificial Sequence: Synthetic oligonucleotide
  Target: LAMA2; (-) strand; PAM type: YTN; PAM sequence: CTG
aaatcagagcagtatgaggc

SEQ ID NO: 190287 - DNA, 20 bp, Artificial Sequence
  Description of Artificial Sequence: Synthetic oligonucleotide
  Target: LAMA2; (-) strand; PAM type: YTN; PAM sequence: CTA
tacatctgaaatcagagcag

SEQ ID NO: 190288 - DNA, 20 bp, Artificial Sequence
  Description of Artificial Sequence: Synthetic oligonucleotide
  Target: LAMA2; (-) strand; PAM type: YTN; PAM sequence: TTG
ataagcaatatatctataca

SEQ ID NO: 190289 - DNA, 20 bp, Artificial Sequence
  Description of Artificial Sequence: Synthetic oligonucleotide
  Target: LAMA2; (-) strand; PAM type: YTN; PAM sequence: TTT
gataagcaatatatctatac

SEQ ID NO: 190290 - DNA, 20 bp, Artificial Sequence
  Description of Artificial Sequence: Synthetic oligonucleotide
  Target: LAMA2; (-) strand; PAM type: YTN; PAM sequence: TTC
agacccatcagtgtttgata

SEQ ID NO: 190291 - DNA, 20 bp, Artificial Sequence
  Description of Artificial Sequence: Synthetic oligonucleotide
  Target: LAMA2; (-) strand; PAM type: YTN; PAM sequence: CTC
atgttcagacccatcagtgt

SEQ ID NO: 190292 - DNA, 20 bp, Artificial Sequence
  Description of Artificial Sequence: Synthetic oligonucleotide
  Target: LAMA2; (-) strand; PAM type: YTN; PAM sequence: CTA
ccactcatgttcagacccat

SEQ ID NO: 190293 - DNA, 20 bp, Artificial Sequence
  Description of Artificial Sequence: Synthetic oligonucleotide
  Target: LAMA2; (-) strand; PAM type: YTN; PAM sequence: TTA
ctaccactcatgttcagacc

SEQ ID NO: 190294 - DNA, 20 bp, Artificial Sequence
  Description of Artificial Sequence: Synthetic oligonucleotide
  Target: LAMA2; (-) strand; PAM type: YTN; PAM sequence: CTT
actaccactcatgttcagac

SEQ ID NO: 190295 - DNA, 20 bp, Artificial Sequence
  Description of Artificial Sequence: Synthetic oligonucleotide
  Target: LAMA2; (-) strand; PAM type: YTN; PAM sequence: CTG
gaaatatcttactaccactc

SEQ ID NO: 190296 - DNA, 20 bp, Artificial Sequence
  Description of Artificial Sequence: Synthetic oligonucleotide
  Target: LAMA2; (-) strand; PAM type: YTN; PAM sequence: TTA
atctggaaatatcttactac

SEQ ID NO: 190297 - DNA, 20 bp, Artificial Sequence
  Description of Artificial Sequence: Synthetic oligonucleotide
  Target: LAMA2; (-) strand; PAM type: YTN; PAM sequence: CTT
aatctggaaatatcttacta

SEQ ID NO: 190298 - DNA, 20 bp, Artificial Sequence
  Description of Artificial Sequence: Synthetic oligonucleotide
  Target: LAMA2; (-) strand; PAM type: YTN; PAM sequence: CTA
cttaatctggaaatatctta

SEQ ID NO: 190299 - DNA, 20 bp, Artificial Sequence
  Description of Artificial Sequence: Synthetic oligonucleotide
  Target: LAMA2; (-) strand; PAM type: YTN; PAM sequence: TTG
tctacttaatctggaaatat

SEQ ID NO: 190300 - DNA, 20 bp, Artificial Sequence
  Description of Artificial Sequence: Synthetic oligonucleotide
  Target: LAMA2; (-) strand; PAM type: YTN; PAM sequence: TTT
gtctacttaatctggaaata

SEQ ID NO: 190301 - DNA, 20 bp, Artificial Sequence
  Description of Artificial Sequence: Synthetic oligonucleotide
  Target: LAMA2; (-) strand; PAM type: YTN; PAM sequence: CTG
cacaatttgtctacttaatc

SEQ ID NO: 190302 - DNA, 20 bp, Artificial Sequence
  Description of Artificial Sequence: Synthetic oligonucleotide
  Target: LAMA2; (-) strand; PAM type: YTN; PAM sequence: TTC
tgcacaatttgtctacttaa

SEQ ID NO: 190303 - DNA, 20 bp, Artificial Sequence
  Description of Artificial Sequence: Synthetic oligonucleotide
  Target: LAMA2; (-) strand; PAM type: YTN; PAM sequence: CTA
aaaagttctgcacaatttgt

SEQ ID NO: 190304 - DNA, 20 bp, Artificial Sequence
  Description of Artificial Sequence: Synthetic oligonucleotide
  Target: LAMA2; (-) strand; PAM type: YTN; PAM sequence: TTA
aatagtgatactaaaaagtt

SEQ ID NO: 190305 - DNA, 20 bp, Artificial Sequence
  Description of Artificial Sequence: Synthetic oligonucleotide
  Target: LAMA2; (-) strand; PAM type: YTN; PAM sequence: TTT
aaatagtgatactaaaaagt

SEQ ID NO: 190306 - DNA, 20 bp, Artificial Sequence
  Description of Artificial Sequence: Synthetic oligonucleotide
  Target: LAMA2; (-) strand; PAM type: YTN; PAM sequence: TTA
gtcatttaaatagtgatact

SEQ ID NO: 190307 - DNA, 20 bp, Artificial Sequence
  Description of Artificial Sequence: Synthetic oligonucleotide
  Target: LAMA2; (-) strand; PAM type: YTN; PAM sequence: TTT
agtcatttaaatagtgatac

SEQ ID NO: 190308 - DNA, 20 bp, Artificial Sequence
  Description of Artificial Sequence: Synthetic oligonucleotide
  Target: LAMA2; (-) strand; PAM type: YTN; PAM sequence: CTC
aaaaatttagtcatttaaat

SEQ ID NO: 190309 - DNA, 20 bp, Artificial Sequence
  Description of Artificial Sequence: Synthetic oligonucleotide
  Target: LAMA2; (-) strand; PAM type: YTN; PAM sequence: CTG
gatacacataaacctcaaaa

SEQ ID NO: 190310 - DNA, 20 bp, Artificial Sequence
  Description of Artificial Sequence: Synthetic oligonucleotide
  Target: LAMA2; (-) strand; PAM type: YTN; PAM sequence: TTG
ggctggatacacataaacct

SEQ ID NO: 190311 - DNA, 20 bp, Artificial Sequence
  Description of Artificial Sequence: Synthetic oligonucleotide
  Target: LAMA2; (-) strand; PAM type: YTN; PAM sequence: CTA
gataaggagaggacatattg

SEQ ID NO: 190312 - DNA, 20 bp, Artificial Sequence
  Description of Artificial Sequence: Synthetic oligonucleotide
  Target: LAMA2; (-) strand; PAM type: YTN; PAM sequence: TTA
tactagataaggagaggaca

SEQ ID NO: 190313 - DNA, 20 bp, Artificial Sequence
  Description of Artificial Sequence: Synthetic oligonucleotide
  Target: LAMA2; (-) strand; PAM type: YTN; PAM sequence: TTA
aagataaattatactagata

SEQ ID NO: 190314 - DNA, 20 bp, Artificial Sequence
  Description of Artificial Sequence: Synthetic oligonucleotide
  Target: LAMA2; (-) strand; PAM type: YTN; PAM sequence: TTT
aaagataaattatactagat

SEQ ID NO: 190315 - DNA, 20 bp, Artificial Sequence
  Description of Artificial Sequence: Synthetic oligonucleotide
  Target: LAMA2; (-) strand; PAM type: YTN; PAM sequence: TTT
taaagataaattatactaga

SEQ ID NO: 190316 - DNA, 20 bp, Artificial Sequence
  Description of Artificial Sequence: Synthetic oligonucleotide
  Target: LAMA2; (-) strand; PAM type: YTN; PAM sequence: TTT
ttaaagataaattatactag

SEQ ID NO: 190317 - DNA, 20 bp, Artificial Sequence
  Description of Artificial Sequence: Synthetic oligonucleotide
  Target: LAMA2; (-) strand; PAM type: YTN; PAM sequence: CTA
atttttaaagataaattata

SEQ ID NO: 190318 - DNA, 20 bp, Artificial Sequence
  Description of Artificial Sequence: Synthetic oligonucleotide
  Target: LAMA2; (-) strand; PAM type: YTN; PAM sequence: CTG
acatatgccaagccagtcta

SEQ ID NO: 190319 - DNA, 20 bp, Artificial Sequence
  Description of Artificial Sequence: Synthetic oligonucleotide
  Target: LAMA2; (-) strand; PAM type: YTN; PAM sequence: TTA
aatacaaaatctgacatatg

SEQ ID NO: 190320 - DNA, 20 bp, Artificial Sequence
  Description of Artificial Sequence: Synthetic oligonucleotide
  Target: LAMA2; (-) strand; PAM type: YTN; PAM sequence: CTG
ttaaatacaaaatctgacat

SEQ ID NO: 190321 - DNA, 20 bp, Artificial Sequence
  Description of Artificial Sequence: Synthetic oligonucleotide
  Target: LAMA2; (-) strand; PAM type: YTN; PAM sequence: CTA
acaaagaaatatataaaaag

SEQ ID NO: 190322 - DNA, 20 bp, Artificial Sequence
  Description of Artificial Sequence: Synthetic oligonucleotide
  Target: LAMA2; (-) strand; PAM type: YTN; PAM sequence: CTC
ctaacaaagaaatatataaa

SEQ ID NO: 190323 - DNA, 20 bp, Artificial Sequence
  Description of Artificial Sequence: Synthetic oligonucleotide
  Target: LAMA2; (-) strand; PAM type: YTN; PAM sequence: TTG
aacacctcctaacaaagaaa

SEQ ID NO: 190324 - DNA, 20 bp, Artificial Sequence
  Description of Artificial Sequence: Synthetic oligonucleotide
  Target: LAMA2; (-) strand; PAM type: YTN; PAM sequence: CTA
acattgaacacctcctaaca

SEQ ID NO: 190325 - DNA, 20 bp, Artificial Sequence
  Description of Artificial Sequence: Synthetic oligonucleotide
  Target: LAMA2; (-) strand; PAM type: YTN; PAM sequence: TTG
tctaacattgaacacctcct

SEQ ID NO: 190326 - DNA, 20 bp, Artificial Sequence
  Description of Artificial Sequence: Synthetic oligonucleotide
  Target: LAMA2; (-) strand; PAM type: YTN; PAM sequence: TTT
gtctaacattgaacacctcc

SEQ ID NO: 190327 - DNA, 20 bp, Artificial Sequence
  Description of Artificial Sequence: Synthetic oligonucleotide
  Target: LAMA2; (-) strand; PAM type: YTN; PAM sequence: CTT
tgtctaacattgaacacctc

SEQ ID NO: 190328 - DNA, 20 bp, Artificial Sequence
  Description of Artificial Sequence: Synthetic oligonucleotide
  Target: LAMA2; (-) strand; PAM type: YTN; PAM sequence: TTC
actttgtctaacattgaaca

SEQ ID NO: 190329 - DNA, 20 bp, Artificial Sequence
  Description of Artificial Sequence: Synthetic oligonucleotide
  Target: LAMA2; (-) strand; PAM type: YTN; PAM sequence: CTG
ttcactttgtctaacattga

SEQ ID NO: 190330 - DNA, 20 bp, Artificial Sequence
  Description of Artificial Sequence: Synthetic oligonucleotide
  Target: LAMA2; (-) strand; PAM type: YTN; PAM sequence: TTC
caaagtaatctgttcacttt

SEQ ID NO: 190331 - DNA, 20 bp, Artificial Sequence
  Description of Artificial Sequence: Synthetic oligonucleotide
  Target: LAMA2; (-) strand; PAM type: YTN; PAM sequence: TTC
agcaggaccaggacatggat

SEQ ID NO: 190332 - DNA, 20 bp, Artificial Sequence
  Description of Artificial Sequence: Synthetic oligonucleotide
  Target: LAMA2; (-) strand; PAM type: YTN; PAM sequence: TTA
ttcagcaggaccaggacatg

SEQ ID NO: 190333 - DNA, 20 bp, Artificial Sequence
  Description of Artificial Sequence: Synthetic oligonucleotide
  Target: LAMA2; (-) strand; PAM type: YTN; PAM sequence: CTG
gaatgtgtatggcagaaaaa

SEQ ID NO: 190334 - DNA, 20 bp, Artificial Sequence
  Description of Artificial Sequence: Synthetic oligonucleotide
  Target: LAMA2; (-) strand; PAM type: YTN; PAM sequence: TTA
ctggaatgtgtatggcagaa

SEQ ID NO: 190335 - DNA, 20 bp, Artificial Sequence
  Description of Artificial Sequence: Synthetic oligonucleotide
  Target: LAMA2; (-) strand; PAM type: YTN; PAM sequence: TTC
agtgttactggaatgtgtat

SEQ ID NO: 190336 - DNA, 20 bp, Artificial Sequence
  Description of Artificial Sequence: Synthetic oligonucleotide
  Target: LAMA2; (-) strand; PAM type: YTN; PAM sequence: TTT
cagtgttactggaatgtgta

SEQ ID NO: 190337 - DNA, 20 bp, Artificial Sequence
  Description of Artificial Sequence: Synthetic oligonucleotide
  Target: LAMA2; (-) strand; PAM type: YTN; PAM sequence: CTT
tcagtgttactggaatgtgt

SEQ ID NO: 190338 - DNA, 20 bp, Artificial Sequence
  Description of Artificial Sequence: Synthetic oligonucleotide
  Target: LAMA2; (-) strand; PAM type: YTN; PAM sequence: CTC
tttcagtgttactggaatgt

SEQ ID NO: 190339 - DNA, 20 bp, Artificial Sequence
  Description of Artificial Sequence: Synthetic oligonucleotide
  Target: LAMA2; (-) strand; PAM type: YTN; PAM sequence: TTA
actctttcagtgttactgga

SEQ ID NO: 190340 - DNA, 20 bp, Artificial Sequence
  Description of Artificial Sequence: Synthetic oligonucleotide
  Target: LAMA2; (-) strand; PAM type: YTN; PAM sequence: TTA
caaaagcaataaagatggga

SEQ ID NO: 190341 - DNA, 20 bp, Artificial Sequence
  Description of Artificial Sequence: Synthetic oligonucleotide
  Target: LAMA2; (-) strand; PAM type: YTN; PAM sequence: TTT
acaaaagcaataaagatggg

SEQ ID NO: 190342 - DNA, 20 bp, Artificial Sequence
  Description of Artificial Sequence: Synthetic oligonucleotide
  Target: LAMA2; (-) strand; PAM type: YTN; PAM sequence: CTA
tttacaaaagcaataaagat

SEQ ID NO: 190343 - DNA, 20 bp, Artificial Sequence
  Description of Artificial Sequence: Synthetic oligonucleotide
  Target: LAMA2; (-) strand; PAM type: YTN; PAM sequence: CTA
tagctatttacaaaagcaat

SEQ ID NO: 190344 - DNA, 20 bp, Artificial Sequence
  Description of Artificial Sequence: Synthetic oligonucleotide
  Target: LAMA2; (-) strand; PAM type: YTN; PAM sequence: CTA
catataaagtgtatctatag

SEQ ID NO: 190345 - DNA, 20 bp, Artificial Sequence
  Description of Artificial Sequence: Synthetic oligonucleotide
  Target: LAMA2; (-) strand; PAM type: YTN; PAM sequence: TTA
tctacatataaagtgtatct

SEQ ID NO: 190346 - DNA, 20 bp, Artificial Sequence
  Description of Artificial Sequence: Synthetic oligonucleotide
  Target: LAMA2; (-) strand; PAM type: YTN; PAM sequence: TTA
aaacataccattatctacat

SEQ ID NO: 190347 - DNA, 20 bp, Artificial Sequence
  Description of Artificial Sequence: Synthetic oligonucleotide
  Target: LAMA2; (-) strand; PAM type: YTN; PAM sequence: TTT
aaaacataccattatctaca

SEQ ID NO: 190348 - DNA, 20 bp, Artificial Sequence
  Description of Artificial Sequence: Synthetic oligonucleotide
  Target: LAMA2; (-) strand; PAM type: YTN; PAM sequence: TTT
taaaacataccattatctac

SEQ ID NO: 190349 - DNA, 20 bp, Artificial Sequence
  Description of Artificial Sequence: Synthetic oligonucleotide
  Target: LAMA2; (-) strand; PAM type: YTN; PAM sequence: TTG
cagaattttaaaacatacca

SEQ ID NO: 190350 - DNA, 20 bp, Artificial Sequence
  Description of Artificial Sequence: Synthetic oligonucleotide
  Target: LAMA2; (-) strand; PAM type: YTN; PAM sequence: TTT
gcagaattttaaaacatacc

SEQ ID NO: 190351 - DNA, 20 bp, Artificial Sequence
  Description of Artificial Sequence: Synthetic oligonucleotide
  Target: LAMA2; (-) strand; PAM type: YTN; PAM sequence: TTT
tgcagaattttaaaacatac

SEQ ID NO: 190352 - DNA, 20 bp, Artificial Sequence
  Description of Artificial Sequence: Synthetic oligonucleotide
  Target: LAMA2; (-) strand; PAM type: YTN; PAM sequence: TTT
ttgcagaattttaaaacata

SEQ ID NO: 190353 - DNA, 20 bp, Artificial Sequence
  Description of Artificial Sequence: Synthetic oligonucleotide
  Target: LAMA2; (-) strand; PAM type: YTN; PAM sequence: CTA
tttttgcagaattttaaaac

SEQ ID NO: 190354 - DNA, 20 bp, Artificial Sequence
  Description of Artificial Sequence: Synthetic oligonucleotide
  Target: LAMA2; (-) strand; PAM type: YTN; PAM sequence: TTG
aaaagctatttttgcagaat

SEQ ID NO: 190355 - DNA, 20 bp, Artificial Sequence
  Description of Artificial Sequence: Synthetic oligonucleotide
  Target: LAMA2; (-) strand; PAM type: YTN; PAM sequence: TTG
agaaagagaataaagagaat

SEQ ID NO: 190356 - DNA, 20 bp, Artificial Sequence
  Description of Artificial Sequence: Synthetic oligonucleotide
  Target: LAMA2; (-) strand; PAM type: YTN; PAM sequence: CTT
gagaaagagaataaagagaa

SEQ ID NO: 190357 - DNA, 20 bp, Artificial Sequence
  Description of Artificial Sequence: Synthetic oligonucleotide
  Target: LAMA2; (-) strand; PAM type: YTN; PAM sequence: TTA
tcaaagcttgagaaagagaa

SEQ ID NO: 190358 - DNA, 20 bp, Artificial Sequence
  Description of Artificial Sequence: Synthetic oligonucleotide
  Target: LAMA2; (-) strand; PAM type: YTN; PAM sequence: TTT
atcaaagcttgagaaagaga

SEQ ID NO: 190359 - DNA, 20 bp, Artificial Sequence
  Description of Artificial Sequence: Synthetic oligonucleotide
  Target: LAMA2; (-) strand; PAM type: YTN; PAM sequence: TTT
tatcaaagcttgagaaagag

SEQ ID NO: 190360 - DNA, 20 bp, Artificial Sequence
  Description of Artificial Sequence: Synthetic oligonucleotide
  Target: LAMA2; (-) strand; PAM type: YTN; PAM sequence: TTG
aatgaaaaatattttatcaa

SEQ ID NO: 190361 - DNA, 20 bp, Artificial Sequence
  Description of Artificial Sequence: Synthetic oligonucleotide
  Target: LAMA2; (-) strand; PAM type: YTN; PAM sequence: CTA
aaagttgaatgaaaaatatt

SEQ ID NO: 190362 - DNA, 20 bp, Artificial Sequence
  Description of Artificial Sequence: Synthetic oligonucleotide
  Target: LAMA2; (-) strand; PAM type: YTN; PAM sequence: CTA
tggagaaaatcagtccctaa

SEQ ID NO: 190363 - DNA, 20 bp, Artificial Sequence
  Description of Artificial Sequence: Synthetic oligonucleotide
  Target: LAMA2; (-) strand; PAM type: YTN; PAM sequence: CTC
tatggagaaaatcagtccct

SEQ ID NO: 190364 - DNA, 20 bp, Artificial Sequence
  Description of Artificial Sequence: Synthetic oligonucleotide
  Target: LAMA2; (-) strand; PAM type: YTN; PAM sequence: CTC
cagtagcaccacatcaggaa

SEQ ID NO: 190365 - DNA, 20 bp, Artificial Sequence
  Description of Artificial Sequence: Synthetic oligonucleotide
  Target: LAMA2; (-) strand; PAM type: YTN; PAM sequence: CTC
agcatcactccagtagcacc

SEQ ID NO: 190366 - DNA, 20 bp, Artificial Sequence
  Description of Artificial Sequence: Synthetic oligonucleotide
  Target: LAMA2; (-) strand; PAM type: YTN; PAM sequence: TTC
tcagcatcactccagtagca

SEQ ID NO: 190367 - DNA, 20 bp, Artificial Sequence
  Description of Artificial Sequence: Synthetic oligonucleotide
  Target: LAMA2; (-) strand; PAM type: YTN; PAM sequence: TTT
ctcagcatcactccagtagc

SEQ ID NO: 190368 - DNA, 20 bp, Artificial Sequence
  Description of Artificial Sequence: Synthetic oligonucleotide
  Target: LAMA2; (-) strand; PAM type: YTN; PAM sequence: TTT
tctcagcatcactccagtag

SEQ ID NO: 190369 - DNA, 20 bp, Artificial Sequence
  Description of Artificial Sequence: Synthetic oligonucleotide
  Target: LAMA2; (-) strand; PAM type: YTN; PAM sequence: TTA
gaataatgttttctcagcat

SEQ ID NO: 190370 - DNA, 20 bp, Artificial Sequence
  Description of Artificial Sequence: Synthetic oligonucleotide
  Target: LAMA2; (-) strand; PAM type: YTN; PAM sequence: TTT
agaataatgttttctcagca

SEQ ID NO: 190371 - DNA, 20 bp, Artificial Sequence
  Description of Artificial Sequence: Synthetic oligonucleotide
  Target: LAMA2; (-) strand; PAM type: YTN; PAM sequence: CTA
aaaaacatttagaataatgt

SEQ ID NO: 190372 - DNA, 20 bp, Artificial Sequence
  Description of Artificial Sequence: Synthetic oligonucleotide
  Target: LAMA2; (-) strand; PAM type: YTN; PAM sequence: TTC
taaaaaacatttagaataat

SEQ ID NO: 190373 - DNA, 20 bp, Artificial Sequence
  Description of Artificial Sequence: Synthetic oligonucleotide
  Target: LAMA2; (-) strand; PAM type: YTN; PAM sequence: TTT
ctaaaaaacatttagaataa

SEQ ID NO: 190374 - DNA, 20 bp, Artificial Sequence
  Description of Artificial Sequence: Synthetic oligonucleotide
  Target: LAMA2; (-) strand; PAM type: YTN; PAM sequence: CTA
aaaaatgtttctaaaaaaca

SEQ ID NO: 190375 - DNA, 20 bp, Artificial Sequence
  Description of Artificial Sequence: Synthetic oligonucleotide
  Target: LAMA2; (-) strand; PAM type: YTN; PAM sequence: TTC
taaaaaatgtttctaaaaaa

SEQ ID NO: 190376 - DNA, 20 bp, Artificial Sequence
  Description of Artificial Sequence: Synthetic oligonucleotide
  Target: LAMA2; (-) strand; PAM type: YTN; PAM sequence: TTT
ctaaaaaatgtttctaaaaa

SEQ ID NO: 190377 - DNA, 20 bp, Artificial Sequence
  Description of Artificial Sequence: Synthetic oligonucleotide
  Target: LAMA2; (-) strand; PAM type: YTN; PAM sequence: TTT
tctaaaaaatgtttctaaaa

SEQ ID NO: 190378 - DNA, 20 bp, Artificial Sequence
  Description of Artificial Sequence: Synthetic oligonucleotide
  Target: LAMA2; (-) strand; PAM type: YTN; PAM sequence: CTG
ggtgaatgatgttttctaaa

SEQ ID NO: 190379 - DNA, 20 bp, Artificial Sequence
  Description of Artificial Sequence: Synthetic oligonucleotide
  Target: LAMA2; (-) strand; PAM type: YTN; PAM sequence: TTC
tgggtgaatgatgttttcta

SEQ ID NO: 190380 - DNA, 20 bp, Artificial Sequence
  Description of Artificial Sequence: Synthetic oligonucleotide
  Target: LAMA2; (-) strand; PAM type: YTN; PAM sequence: TTC
agattctgggtgaatgatgt

SEQ ID NO: 190381 - DNA, 20 bp, Artificial Sequence
  Description of Artificial Sequence: Synthetic oligonucleotide
  Target: LAMA2; (-) strand; PAM type: YTN; PAM sequence: TTT
cagattctgggtgaatgatg

SEQ ID NO: 190382 - DNA, 20 bp, Artificial Sequence
  Description of Artificial Sequence: Synthetic oligonucleotide
  Target: LAMA2; (-) strand; PAM type: YTN; PAM sequence: TTA
tccaaaggaataaataaata

SEQ ID NO: 190383 - DNA, 20 bp, Artificial Sequence
  Description of Artificial Sequence: Synthetic oligonucleotide
  Target: LAMA2; (-) strand; PAM type: YTN; PAM sequence: TTT
atccaaaggaataaataaat

SEQ ID NO: 190384 - DNA, 20 bp, Artificial Sequence
  Description of Artificial Sequence: Synthetic oligonucleotide
  Target: LAMA2; (-) strand; PAM type: YTN; PAM sequence: TTT
tatccaaaggaataaataaa

SEQ ID NO: 190385 - DNA, 20 bp, Artificial Sequence
  Description of Artificial Sequence: Synthetic oligonucleotide
  Target: LAMA2; (-) strand; PAM type: YTN; PAM sequence: CTG
tgagggcaatgttttatcca

SEQ ID NO: 190386 - DNA, 20 bp, Artificial Sequence
  Description of Artificial Sequence: Synthetic oligonucleotide
  Target: LAMA2; (-) strand; PAM type: YTN; PAM sequence: TTA
gaaaagaatagcctgtgagg

SEQ ID NO: 190387 - DNA, 20 bp, Artificial Sequence
  Description of Artificial Sequence: Synthetic oligonucleotide
  Target: LAMA2; (-) strand; PAM type: YTN; PAM sequence: TTT
agaaaagaatagcctgtgag

SEQ ID NO: 190388 - DNA, 20 bp, Artificial Sequence
  Description of Artificial Sequence: Synthetic oligonucleotide
  Target: LAMA2; (-) strand; PAM type: YTN; PAM sequence: TTT
tagaaaagaatagcctgtga

SEQ ID NO: 190389 - DNA, 20 bp, Artificial Sequence
  Description of Artificial Sequence: Synthetic oligonucleotide
  Target: LAMA2; (-) strand; PAM type: YTN; PAM sequence: TTA
aagtgaataataacagcaca

SEQ ID NO: 190390 - DNA, 20 bp, Artificial Sequence
  Description of Artificial Sequence: Synthetic oligonucleotide
  Target: LAMA2; (-) strand; PAM type: YTN; PAM sequence: TTC
cattaaagtgaataataaca

SEQ ID NO: 190391 - DNA, 20 bp, Artificial Sequence
  Description of Artificial Sequence: Synthetic oligonucleotide
  Target: LAMA2; (-) strand; PAM type: YTN; PAM sequence: TTT
ccattaaagtgaataataac

SEQ ID NO: 190392 - DNA, 20 bp, Artificial Sequence
  Description of Artificial Sequence: Synthetic oligonucleotide
  Target: LAMA2; (-) strand; PAM type: YTN; PAM sequence: TTA
atttccattaaagtgaataa

SEQ ID NO: 190393 - DNA, 20 bp, Artificial Sequence
  Description of Artificial Sequence: Synthetic oligonucleotide
  Target: LAMA2; (-) strand; PAM type: YTN; PAM sequence: CTG
tcaaaaaggaggtcagcaga

SEQ ID NO: 190394 - DNA, 20 bp, Artificial Sequence
  Description of Artificial Sequence: Synthetic oligonucleotide
  Target: LAMA2; (-) strand; PAM type: YTN; PAM sequence: CTA
aactgtcaaaaaggaggtca

SEQ ID NO: 190395 - DNA, 20 bp, Artificial Sequence
  Description of Artificial Sequence: Synthetic oligonucleotide
  Target: LAMA2; (-) strand; PAM type: YTN; PAM sequence: TTA
atacagtcctaaactgtcaa

SEQ ID NO: 190396 - DNA, 20 bp, Artificial Sequence
  Description of Artificial Sequence: Synthetic oligonucleotide
  Target: LAMA2; (-) strand; PAM type: YTN; PAM sequence: CTT
aatacagtcctaaactgtca

SEQ ID NO: 190397 - DNA, 20 bp, Artificial Sequence
  Description of Artificial Sequence: Synthetic oligonucleotide
  Target: LAMA2; (-) strand; PAM type: YTN; PAM sequence: CTG
aaaacttaatacagtcctaa

SEQ ID NO: 190398 - DNA, 20 bp, Artificial Sequence
  Description of Artificial Sequence: Synthetic oligonucleotide
  Target: LAMA2; (-) strand; PAM type: YTN; PAM sequence: CTC
accgagcagatctgaaaact

SEQ ID NO: 190399 - DNA, 20 bp, Artificial Sequence
  Description of Artificial Sequence: Synthetic oligonucleotide
  Target: LAMA2; (-) strand; PAM type: YTN; PAM sequence: TTC
tcaccgagcagatctgaaaa

SEQ ID NO: 190400 - DNA, 20 bp, Artificial Sequence
  Description of Artificial Sequence: Synthetic oligonucleotide
  Target: LAMA2; (-) strand; PAM type: YTN; PAM sequence: TTT
ctcaccgagcagatctgaaa

SEQ ID NO: 190401 - DNA, 20 bp, Artificial Sequence
  Description of Artificial Sequence: Synthetic oligonucleotide
  Target: LAMA2; (-) strand; PAM type: YTN; PAM sequence: CTA
tttctcaccgagcagatctg

SEQ ID NO: 190402 - DNA, 20 bp, Artificial Sequence
  Description of Artificial Sequence: Synthetic oligonucleotide
  Target: LAMA2; (-) strand; PAM type: YTN; PAM sequence: TTC
actatttctcaccgagcaga

SEQ ID NO: 190403 - DNA, 20 bp, Artificial Sequence
  Description of Artificial Sequence: Synthetic oligonucleotide
  Target: LAMA2; (-) strand; PAM type: YTN; PAM sequence: TTT
cactatttctcaccgagcag

SEQ ID NO: 190404 - DNA, 20 bp, Artificial Sequence
  Description of Artificial Sequence: Synthetic oligonucleotide
  Target: LAMA2; (-) strand; PAM type: YTN; PAM sequence: TTA
tttcactatttctcaccgag

SEQ ID NO: 190405 - DNA, 20 bp, Artificial Sequence
  Description of Artificial Sequence: Synthetic oligonucleotide
  Target: LAMA2; (-) strand; PAM type: YTN; PAM sequence: TTT
atttcactatttctcaccga

SEQ ID NO: 190406 - DNA, 20 bp, Artificial Sequence
  Description of Artificial Sequence: Synthetic oligonucleotide
  Target: LAMA2; (-) strand; PAM type: YTN; PAM sequence: TTT
tatttcactatttctcaccg

SEQ ID NO: 190407 - DNA, 20 bp, Artificial Sequence
  Description of Artificial Sequence: Synthetic oligonucleotide
  Target: LAMA2; (-) strand; PAM type: YTN; PAM sequence: CTA
gttttatttcactatttctc

SEQ ID NO: 190408 - DNA, 20 bp, Artificial Sequence
  Description of Artificial Sequence: Synthetic oligonucleotide
  Target: LAMA2; (-) strand; PAM type: YTN; PAM sequence: TTA
actagttttatttcactatt

SEQ ID NO: 190409 - DNA, 20 bp, Artificial Sequence
  Description of Artificial Sequence: Synthetic oligonucleotide
  Target: LAMA2; (-) strand; PAM type: YTN; PAM sequence: TTC
catagatgttaactagtttt

SEQ ID NO: 190410 - DNA, 20 bp, Artificial Sequence
  Description of Artificial Sequence: Synthetic oligonucleotide
  Target: LAMA2; (-) strand; PAM type: YTN; PAM sequence: TTA
ggtattccatagatgttaac

SEQ ID NO: 190411 - DNA, 20 bp, Artificial Sequence
  Description of Artificial Sequence: Synthetic oligonucleotide
  Target: LAMA2; (-) strand; PAM type: YTN; PAM sequence: CTG
gcccatagttaggtattcca

SEQ ID NO: 190412 - DNA, 20 bp, Artificial Sequence
  Description of Artificial Sequence: Synthetic oligonucleotide
  Target: LAMA2; (-) strand; PAM type: YTN; PAM sequence: TTA
cagcagtgctggcccatagt

SEQ ID NO: 190413 - DNA, 20 bp, Artificial Sequence
  Description of Artificial Sequence: Synthetic oligonucleotide
  Target: LAMA2; (-) strand; PAM type: YTN; PAM sequence: CTT
acagcagtgctggcccatag

SEQ ID NO: 190414 - DNA, 20 bp, Artificial Sequence
  Description of Artificial Sequence: Synthetic oligonucleotide
  Target: LAMA2; (-) strand; PAM type: YTN; PAM sequence: TTA
aggcatgagacatgcttaca

SEQ ID NO: 190415 - DNA, 20 bp, Artificial Sequence
  Description of Artificial Sequence: Synthetic oligonucleotide
  Target: LAMA2; (-) strand; PAM type: YTN; PAM sequence: TTG
ataaattaaggcatgagaca

SEQ ID NO: 190416 - DNA, 20 bp, Artificial Sequence
  Description of Artificial Sequence: Synthetic oligonucleotide
  Target: LAMA2; (-) strand; PAM type: YTN; PAM sequence: TTT
gataaattaaggcatgagac

SEQ ID NO: 190417 - DNA, 20 bp, Artificial Sequence
  Description of Artificial Sequence: Synthetic oligonucleotide
  Target: LAMA2; (-) strand; PAM type: YTN; PAM sequence: CTT
tgataaattaaggcatgaga

SEQ ID NO: 190418 - DNA, 20 bp, Artificial Sequence
  Description of Artificial Sequence: Synthetic oligonucleotide
  Target: LAMA2; (-) strand; PAM type: YTN; PAM sequence: CTA
cctttgataaattaaggcat

SEQ ID NO: 190419 - DNA, 20 bp, Artificial Sequence
  Description of Artificial Sequence: Synthetic oligonucleotide
  Target: LAMA2; (-) strand; PAM type: YTN; PAM sequence: TTA
atagcatctacctttgataa

SEQ ID NO: 190420 - DNA, 20 bp, Artificial Sequence
  Description of Artificial Sequence: Synthetic oligonucleotide
  Target: LAMA2; (-) strand; PAM type: YTN; PAM sequence: TTA
aatgagattaatagcatcta

SEQ ID NO: 190421 - DNA, 20 bp, Artificial Sequence
  Description of Artificial Sequence: Synthetic oligonucleotide
  Target: LAMA2; (-) strand; PAM type: YTN; PAM sequence: CTG
ttaaatgagattaatagcat

SEQ ID NO: 190422 - DNA, 20 bp, Artificial Sequence
  Description of Artificial Sequence: Synthetic oligonucleotide
  Target: LAMA2; (-) strand; PAM type: YTN; PAM sequence: TTC
tgttaaatgagattaatagc

SEQ ID NO: 190423 - DNA, 20 bp, Artificial Sequence
  Description of Artificial Sequence: Synthetic oligonucleotide
  Target: LAMA2; (-) strand; PAM type: YTN; PAM sequence: CTT
ctgttaaatgagattaatag

SEQ ID NO: 190424 - DNA, 20 bp, Artificial Sequence
  Description of Artificial Sequence: Synthetic oligonucleotide
  Target: LAMA2; (-) strand; PAM type: YTN; PAM sequence: CTC
ttctgttaaatgagattaat

SEQ ID NO: 190425 - DNA, 20 bp, Artificial Sequence
  Description of Artificial Sequence: Synthetic oligonucleotide
  Target: LAMA2; (-) strand; PAM type: YTN; PAM sequence: TTC
tcttctgttaaatgagatta

SEQ ID NO: 190426 - DNA, 20 bp, Artificial Sequence
  Description of Artificial Sequence: Synthetic oligonucleotide
  Target: LAMA2; (-) strand; PAM type: YTN; PAM sequence: TTT
ctcttctgttaaatgagatt

SEQ ID NO: 190427 - DNA, 20 bp, Artificial Sequence
  Description of Artificial Sequence: Synthetic oligonucleotide
  Target: LAMA2; (-) strand; PAM type: YTN; PAM sequence: TTT
tctcttctgttaaatgagat

SEQ ID NO: 190428 - DNA, 20 bp, Artificial Sequence
  Description of Artificial Sequence: Synthetic oligonucleotide
  Target: LAMA2; (-) strand; PAM type: YTN; PAM sequence: TTC
agttttctcttctgttaaat

SEQ ID NO: 190429 - DNA, 20 bp, Artificial Sequence
  Description of Artificial Sequence: Synthetic oligonucleotide
  Target: LAMA2; (-) strand; PAM type: YTN; PAM sequence: TTT
cagttttctcttctgttaaa

SEQ ID NO: 190430 - DNA, 20 bp, Artificial Sequence
  Description of Artificial Sequence: Synthetic oligonucleotide
  Target: LAMA2; (-) strand; PAM type: YTN; PAM sequence: TTG
catttcagttttctcttctg

SEQ ID NO: 190431 - DNA, 20 bp, Artificial Sequence
  Description of Artificial Sequence: Synthetic oligonucleotide
  Target: LAMA2; (-) strand; PAM type: YTN; PAM sequence: TTT
gcatttcagttttctcttct

SEQ ID NO: 190432 - DNA, 20 bp, Artificial Sequence
  Description of Artificial Sequence: Synthetic oligonucleotide
  Target: LAMA2; (-) strand; PAM type: YTN; PAM sequence: TTT
tgcatttcagttttctcttc

SEQ ID NO: 190433 - DNA, 20 bp, Artificial Sequence
  Description of Artificial Sequence: Synthetic oligonucleotide
  Target: LAMA2; (-) strand; PAM type: YTN; PAM sequence: TTA
acattttgcatttcagtttt

SEQ ID NO: 190434 - DNA, 20 bp, Artificial Sequence
  Description of Artificial Sequence: Synthetic oligonucleotide
  Target: LAMA2; (-) strand; PAM type: YTN; PAM sequence: CTT
aacattttgcatttcagttt

SEQ ID NO: 190435 - DNA, 20 bp, Artificial Sequence
  Description of Artificial Sequence: Synthetic oligonucleotide
  Target: LAMA2; (-) strand; PAM type: YTN; PAM sequence: TTA
cttaacattttgcatttcag

SEQ ID NO: 190436 - DNA, 20 bp, Artificial Sequence
  Description of Artificial Sequence: Synthetic oligonucleotide
  Target: LAMA2; (-) strand; PAM type: YTN; PAM sequence: TTG
gaaagttacttaacattttg

SEQ ID NO: 190437 - DNA, 20 bp, Artificial Sequence
  Description of Artificial Sequence: Synthetic oligonucleotide
  Target: LAMA2; (-) strand; PAM type: YTN; PAM sequence: TTT
ggaaagttacttaacatttt

SEQ ID NO: 190438 - DNA, 20 bp, Artificial Sequence
  Description of Artificial Sequence: Synthetic oligonucleotide
  Target: LAMA2; (-) strand; PAM type: YTN; PAM sequence: TTT
tggaaagttacttaacattt

SEQ ID NO: 190439 - DNA, 20 bp, Artificial Sequence
  Description of Artificial Sequence: Synthetic oligonucleotide
  Target: LAMA2; (-) strand; PAM type: YTN; PAM sequence: CTT
ttggaaagttacttaacatt

SEQ ID NO: 190440 - DNA, 20 bp, Artificial Sequence
  Description of Artificial Sequence: Synthetic oligonucleotide
  Target: LAMA2; (-) strand; PAM type: YTN; PAM sequence: TTA
cttttggaaagttacttaac

SEQ ID NO: 190441 - DNA, 20 bp, Artificial Sequence
  Description of Artificial Sequence: Synthetic oligonucleotide
  Target: LAMA2; (-) strand; PAM type: YTN; PAM sequence: TTT
acttttggaaagttacttaa

SEQ ID NO: 190442 - DNA, 20 bp, Artificial Sequence
  Description of Artificial Sequence: Synthetic oligonucleotide
  Target: LAMA2; (-) strand; PAM type: YTN; PAM sequence: TTT
tacttttggaaagttactta

SEQ ID NO: 190443 - DNA, 20 bp, Artificial Sequence
  Description of Artificial Sequence: Synthetic oligonucleotide
  Target: LAMA2; (-) strand; PAM type: YTN; PAM sequence: TTG
ttttacttttggaaagttac

SEQ ID NO: 190444 - DNA, 20 bp, Artificial Sequence
  Description of Artificial Sequence: Synthetic oligonucleotide
  Target: LAMA2; (-) strand; PAM type: YTN; PAM sequence: CTG
gttgttttacttttggaaag

SEQ ID NO: 190445 - DNA, 20 bp, Artificial Sequence
  Description of Artificial Sequence: Synthetic oligonucleotide
  Target: LAMA2; (-) strand; PAM type: YTN; PAM sequence: TTC
actggttgttttacttttgg

SEQ ID NO: 190446 - DNA, 20 bp, Artificial Sequence
  Description of Artificial Sequence: Synthetic oligonucleotide
  Target: LAMA2; (-) strand; PAM type: YTN; PAM sequence: CTA
ccagttcactggttgtttta

SEQ ID NO: 190447 - DNA, 20 bp, Artificial Sequence
  Description of Artificial Sequence: Synthetic oligonucleotide
  Target: LAMA2; (-) strand; PAM type: YTN; PAM sequence: CTC
taccagttcactggttgttt

SEQ ID NO: 190448 - DNA, 20 bp, Artificial Sequence
  Description of Artificial Sequence: Synthetic oligonucleotide
  Target: LAMA2; (-) strand; PAM type: YTN; PAM sequence: TTG
gtctctaccagttcactggt

SEQ ID NO: 190449 - DNA, 20 bp, Artificial Sequence
  Description of Artificial Sequence: Synthetic oligonucleotide
  Target: LAMA2; (-) strand; PAM type: YTN; PAM sequence: CTT
ggtctctaccagttcactgg

SEQ ID NO: 190450 - DNA, 20 bp, Artificial Sequence
  Description of Artificial Sequence: Synthetic oligonucleotide
  Target: LAMA2; (-) strand; PAM type: YTN; PAM sequence: CTA
ggtccaaatcttggtctcta

SEQ ID NO: 190451 - DNA, 20 bp, Artificial Sequence
  Description of Artificial Sequence: Synthetic oligonucleotide
  Target: LAMA2; (-) strand; PAM type: YTN; PAM sequence: CTA
cctaggtccaaatcttggtc

SEQ ID NO: 190452 - DNA, 20 bp, Artificial Sequence
  Description of Artificial Sequence: Synthetic oligonucleotide
  Target: LAMA2; (-) strand; PAM type: YTN; PAM sequence: CTG
ccatgggtaggtgaatgggc

SEQ ID NO: 190453 - DNA, 20 bp, Artificial Sequence
  Description of Artificial Sequence: Synthetic oligonucleotide
  Target: LAMA2; (-) strand; PAM type: YTN; PAM sequence: TTG
aggtcacacgctgccatggg

SEQ ID NO: 190454 - DNA, 20 bp, Artificial Sequence
  Description of Artificial Sequence: Synthetic oligonucleotide
  Target: LAMA2; (-) strand; PAM type: YTN; PAM sequence: TTC
agggttgaggtcacacgctg

SEQ ID NO: 190455 - DNA, 20 bp, Artificial Sequence
  Description of Artificial Sequence: Synthetic oligonucleotide
  Target: LAMA2; (-) strand; PAM type: YTN; PAM sequence: TTT
cagggttgaggtcacacgct

SEQ ID NO: 190456 - DNA, 20 bp, Artificial Sequence
  Description of Artificial Sequence: Synthetic oligonucleotide
  Target: LAMA2; (-) strand; PAM type: YTN; PAM sequence: CTT
tcagggttgaggtcacacgc

SEQ ID NO: 190457 - DNA, 20 bp, Artificial Sequence
  Description of Artificial Sequence: Synthetic oligonucleotide
  Target: LAMA2; (-) strand; PAM type: YTN; PAM sequence: CTC
tttcagggttgaggtcacac

SEQ ID NO: 190458 - DNA, 20 bp, Artificial Sequence
  Description of Artificial Sequence: Synthetic oligonucleotide
  Target: LAMA2; (-) strand; PAM type: YTN; PAM sequence: TTG
tactctttcagggttgaggt

SEQ ID NO: 190459 - DNA, 20 bp, Artificial Sequence
  Description of Artificial Sequence: Synthetic oligonucleotide
  Target: LAMA2; (-) strand; PAM type: YTN; PAM sequence: TTT
gtactctttcagggttgagg

SEQ ID NO: 190460 - DNA, 20 bp, Artificial Sequence
  Description of Artificial Sequence: Synthetic oligonucleotide
  Target: LAMA2; (-) strand; PAM type: YTN; PAM sequence: CTA
atttgtactctttcagggtt

SEQ ID NO: 190461 - DNA, 20 bp, Artificial Sequence
  Description of Artificial Sequence: Synthetic oligonucleotide
  Target: LAMA2; (-) strand; PAM type: YTN; PAM sequence: TTA
ctaatttgtactctttcagg

SEQ ID NO: 190462 - DNA, 20 bp, Artificial Sequence
  Description of Artificial Sequence: Synthetic oligonucleotide
  Target: LAMA2; (-) strand; PAM type: YTN; PAM sequence: CTT
actaatttgtactctttcag

SEQ ID NO: 190463 - DNA, 20 bp, Artificial Sequence
  Description of Artificial Sequence: Synthetic oligonucleotide
  Target: LAMA2; (-) strand; PAM type: YTN; PAM sequence: TTA
cttactaatttgtactcttt

SEQ ID NO: 190464 - DNA, 20 bp, Artificial Sequence
  Description of Artificial Sequence: Synthetic oligonucleotide
  Target: LAMA2; (-) strand; PAM type: YTN; PAM sequence: TTT
acttactaatttgtactctt

SEQ ID NO: 190465 - DNA, 20 bp, Artificial Sequence
  Description of Artificial Sequence: Synthetic oligonucleotide
  Target: LAMA2; (-) strand; PAM type: YTN; PAM sequence: CTT
tacttactaatttgtactct

SEQ ID NO: 190466 - DNA, 20 bp, Artificial Sequence
  Description of Artificial Sequence: Synthetic oligonucleotide
  Target: LAMA2; (-) strand; PAM type: YTN; PAM sequence: CTA
aaggaagccctttacttact

SEQ ID NO: 190467 - DNA, 20 bp, Artificial Sequence
  Description of Artificial Sequence: Synthetic oligonucleotide
  Target: LAMA2; (-) strand; PAM type: YTN; PAM sequence: CTG
aagtatgtcactaaaggaag

SEQ ID NO: 190468 - DNA, 20 bp, Artificial Sequence
  Description of Artificial Sequence: Synthetic oligonucleotide
  Target: LAMA2; (-) strand; PAM type: YTN; PAM sequence: CTC
tgaagtatgtcactaaagga

SEQ ID NO: 190469 - DNA, 20 bp, Artificial Sequence
  Description of Artificial Sequence: Synthetic oligonucleotide
  Target: LAMA2; (-) strand; PAM type: YTN; PAM sequence: CTC
acaaaaaagggaaataaaat

SEQ ID NO: 190470 - DNA, 20 bp, Artificial Sequence
  Description of Artificial Sequence: Synthetic oligonucleotide
  Target: LAMA2; (-) strand; PAM type: YTN; PAM sequence: TTC
ataggaaatctcacaaaaaa

SEQ ID NO: 190471 - DNA, 20 bp, Artificial Sequence
  Description of Artificial Sequence: Synthetic oligonucleotide
  Target: LAMA2; (-) strand; PAM type: YTN; PAM sequence: TTT
cataggaaatctcacaaaaa

SEQ ID NO: 190472 - DNA, 20 bp, Artificial Sequence
  Description of Artificial Sequence: Synthetic oligonucleotide
  Target: LAMA2; (-) strand; PAM type: YTN; PAM sequence: TTT
tcataggaaatctcacaaaa

SEQ ID NO: 190473 - DNA, 20 bp, Artificial Sequence
  Description of Artificial Sequence: Synthetic oligonucleotide
  Target: LAMA2; (-) strand; PAM type: YTN; PAM sequence: CTT
ttcataggaaatctcacaaa

SEQ ID NO: 190474 - DNA, 20 bp, Artificial Sequence
  Description of Artificial Sequence: Synthetic oligonucleotide
  Target: LAMA2; (-) strand; PAM type: YTN; PAM sequence: TTA
atcttttcataggaaatctc

SEQ ID NO: 190475 - DNA, 20 bp, Artificial Sequence
  Description of Artificial Sequence: Synthetic oligonucleotide
  Target: LAMA2; (-) strand; PAM type: YTN; PAM sequence: TTG
ttaatcttttcataggaaat

SEQ ID NO: 190476 - DNA, 20 bp, Artificial Sequence
  Description of Artificial Sequence: Synthetic oligonucleotide
  Target: LAMA2; (-) strand; PAM type: YTN; PAM sequence: TTA
aattgttaatcttttcatag

SEQ ID NO: 190477 - DNA, 20 bp, Artificial Sequence
  Description of Artificial Sequence: Synthetic oligonucleotide
  Target: LAMA2; (-) strand; PAM type: YTN; PAM sequence: TTT
aaattgttaatcttttcata

SEQ ID NO: 190478 - DNA, 20 bp, Artificial Sequence
  Description of Artificial Sequence: Synthetic oligonucleotide
  Target: LAMA2; (-) strand; PAM type: YTN; PAM sequence: TTG
tttaaattgttaatcttttc

SEQ ID NO: 190479 - DNA, 20 bp, Artificial Sequence
  Description of Artificial Sequence: Synthetic oligonucleotide
  Target: LAMA2; (-) strand; PAM type: YTN; PAM sequence: CTA
aatggcaaatattgtttaaa

SEQ ID NO: 190480 - DNA, 20 bp, Artificial Sequence
  Description of Artificial Sequence: Synthetic oligonucleotide
  Target: LAMA2; (-) strand; PAM type: YTN; PAM sequence: CTG
aatctaaatggcaaatattg

SEQ ID NO: 190481 - DNA, 20 bp, Artificial Sequence
  Description of Artificial Sequence: Synthetic oligonucleotide
  Target: LAMA2; (-) strand; PAM type: YTN; PAM sequence: CTG
atatatcaggacatagtgct

SEQ ID NO: 190482 - DNA, 20 bp, Artificial Sequence
  Description of Artificial Sequence: Synthetic oligonucleotide
  Target: LAMA2; (-) strand; PAM type: YTN; PAM sequence: TTC
tgatatatcaggacatagtg

SEQ ID NO: 190483 - DNA, 20 bp, Artificial Sequence
  Description of Artificial Sequence: Synthetic oligonucleotide
  Target: LAMA2; (-) strand; PAM type: YTN; PAM sequence: CTT
ctgatatatcaggacatagt

SEQ ID NO: 190484 - DNA, 20 bp, Artificial Sequence
  Description of Artificial Sequence: Synthetic oligonucleotide
  Target: LAMA2; (-) strand; PAM type: YTN; PAM sequence: CTC
ttctgatatatcaggacata

SEQ ID NO: 190485 - DNA, 20 bp, Artificial Sequence
  Description of Artificial Sequence: Synthetic oligonucleotide
  Target: LAMA2; (-) strand; PAM type: YTN; PAM sequence: TTC
atagactcttctgatatatc

SEQ ID NO: 190486 - DNA, 20 bp, Artificial Sequence
  Description of Artificial Sequence: Synthetic oligonucleotide
  Target: LAMA2; (-) strand; PAM type: YTN; PAM sequence: TTA
aaaaaaaaaagttcatagac

SEQ ID NO: 190487 - DNA, 20 bp, Artificial Sequence
  Description of Artificial Sequence: Synthetic oligonucleotide
  Target: LAMA2; (-) strand; PAM type: YTN; PAM sequence: TTT
aaaaaaaaaaagttcataga

SEQ ID NO: 190488 - DNA, 20 bp, Artificial Sequence
  Description of Artificial Sequence: Synthetic oligonucleotide
  Target: LAMA2; (-) strand; PAM type: YTN; PAM sequence: CTT
taaaaaaaaaaagttcatag

SEQ ID NO: 190489 - DNA, 20 bp, Artificial Sequence
  Description of Artificial Sequence: Synthetic oligonucleotide
  Target: LAMA2; (-) strand; PAM type: YTN; PAM sequence: CTC
caaggagtctttaaaaaaaa

SEQ ID NO: 190490 - DNA, 20 bp, Artificial Sequence
  Description of Artificial Sequence: Synthetic oligonucleotide
  Target: LAMA2; (-) strand; PAM type: YTN; PAM sequence: CTA
tctccaaggagtctttaaaa

SEQ ID NO: 190491 - DNA, 20 bp, Artificial Sequence
  Description of Artificial Sequence: Synthetic oligonucleotide
  Target: LAMA2; (-) strand; PAM type: YTN; PAM sequence: TTG
ctatctccaaggagtcttta

SEQ ID NO: 190492 - DNA, 20 bp, Artificial Sequence
  Description of Artificial Sequence: Synthetic oligonucleotide
  Target: LAMA2; (-) strand; PAM type: YTN; PAM sequence: TTC
attgctatctccaaggagtc

SEQ ID NO: 190493 - DNA, 20 bp, Artificial Sequence
  Description of Artificial Sequence: Synthetic oligonucleotide
  Target: LAMA2; (-) strand; PAM type: YTN; PAM sequence: TTC
attcattgctatctccaagg

SEQ ID NO: 190494 - DNA, 20 bp, Artificial Sequence
  Description of Artificial Sequence: Synthetic oligonucleotide
  Target: LAMA2; (-) strand; PAM type: YTN; PAM sequence: TTA
agaattcattcattgctatc

SEQ ID NO: 190495 - DNA, 20 bp, Artificial Sequence
  Description of Artificial Sequence: Synthetic oligonucleotide
  Target: LAMA2; (-) strand; PAM type: YTN; PAM sequence: CTG
acacagttaagaattcattc

SEQ ID NO: 190496 - DNA, 20 bp, Artificial Sequence
  Description of Artificial Sequence: Synthetic oligonucleotide
  Target: LAMA2; (-) strand; PAM type: YTN; PAM sequence: TTC
aggcatgcctgacacagtta

SEQ ID NO: 190497 - DNA, 20 bp, Artificial Sequence
  Description of Artificial Sequence: Synthetic oligonucleotide
  Target: LAMA2; (-) strand; PAM type: YTN; PAM sequence: CTC
aaaaaattcaggcatgcctg

SEQ ID NO: 190498 - DNA, 20 bp, Artificial Sequence
  Description of Artificial Sequence: Synthetic oligonucleotide
  Target: LAMA2; (-) strand; PAM type: YTN; PAM sequence: TTA
tatgactcaaaaaattcagg

SEQ ID NO: 190499 - DNA, 20 bp, Artificial Sequence
  Description of Artificial Sequence: Synthetic oligonucleotide
  Target: LAMA2; (-) strand; PAM type: YTN; PAM sequence: CTT
atatgactcaaaaaattcag

SEQ ID NO: 190500 - DNA, 20 bp, Artificial Sequence
  Description of Artificial Sequence: Synthetic oligonucleotide
  Target: LAMA2; (-) strand; PAM type: YTN; PAM sequence: CTC
ttatatgactcaaaaaattc

SEQ ID NO: 190501 - DNA, 20 bp, Artificial Sequence
  Description of Artificial Sequence: Synthetic oligonucleotide
  Target: LAMA2; (-) strand; PAM type: YTN; PAM sequence: CTA
caaactcttatatgactcaa

SEQ ID NO: 190502 - DNA, 20 bp, Artificial Sequence
  Description of Artificial Sequence: Synthetic oligonucleotide
  Target: LAMA2; (-) strand; PAM type: YTN; PAM sequence: CTA
ggagtgctacaaactcttat

SEQ ID NO: 190503 - DNA, 20 bp, Artificial Sequence
  Description of Artificial Sequence: Synthetic oligonucleotide
  Target: LAMA2; (-) strand; PAM type: YTN; PAM sequence: TTC
taggagtgctacaaactctt

SEQ ID NO: 190504 - DNA, 20 bp, Artificial Sequence
  Description of Artificial Sequence: Synthetic oligonucleotide
  Target: LAMA2; (-) strand; PAM type: YTN; PAM sequence: TTA
acaattctaggagtgctaca

SEQ ID NO: 190505 - DNA, 20 bp, Artificial Sequence
  Description of Artificial Sequence: Synthetic oligonucleotide
  Target: LAMA2; (-) strand; PAM type: YTN; PAM sequence: TTA
agttaacaattctaggagtg

SEQ ID NO: 190506 - DNA, 20 bp, Artificial Sequence
  Description of Artificial Sequence: Synthetic oligonucleotide
  Target: LAMA2; (-) strand; PAM type: YTN; PAM sequence: TTA
ccaattaagttaacaattct

SEQ ID NO: 190507 - DNA, 20 bp, Artificial Sequence
  Description of Artificial Sequence: Synthetic oligonucleotide
  Target: LAMA2; (-) strand; PAM type: YTN; PAM sequence: CTT
accaattaagttaacaattc

SEQ ID NO: 190508 - DNA, 20 bp, Artificial Sequence
  Description of Artificial Sequence: Synthetic oligonucleotide
  Target: LAMA2; (-) strand; PAM type: YTN; PAM sequence: TTC
ttaccaattaagttaacaat

SEQ ID NO: 190509 - DNA, 20 bp, Artificial Sequence
  Description of Artificial Sequence: Synthetic oligonucleotide
  Target: LAMA2; (-) strand; PAM type: YTN; PAM sequence: TTC
atacaacaacaaagagaaaa

SEQ ID NO: 190510 - DNA, 20 bp, Artificial Sequence
  Description of Artificial Sequence: Synthetic oligonucleotide
  Target: LAMA2; (-) strand; PAM type: YTN; PAM sequence: CTT
catacaacaacaaagagaaa

SEQ ID NO: 190511 - DNA, 20 bp, Artificial Sequence
  Description of Artificial Sequence: Synthetic oligonucleotide
  Target: LAMA2; (-) strand; PAM type: YTN; PAM sequence: TTA
acacttcatacaacaacaaa

SEQ ID NO: 190512 - DNA, 20 bp, Artificial Sequence
  Description of Artificial Sequence: Synthetic oligonucleotide
  Target: LAMA2; (-) strand; PAM type: YTN; PAM sequence: TTT
aacacttcatacaacaacaa

SEQ ID NO: 190513 - DNA, 20 bp, Artificial Sequence
  Description of Artificial Sequence: Synthetic oligonucleotide
  Target: LAMA2; (-) strand; PAM type: YTN; PAM sequence: TTG
gtttaacacttcatacaaca

SEQ ID NO: 190514 - DNA, 20 bp, Artificial Sequence
  Description of Artificial Sequence: Synthetic oligonucleotide
  Target: LAMA2; (-) strand; PAM type: YTN; PAM sequence: TTT
ggtttaacacttcatacaac

SEQ ID NO: 190515 - DNA, 20 bp, Artificial Sequence
  Description of Artificial Sequence: Synthetic oligonucleotide
  Target: LAMA2; (-) strand; PAM type: YTN; PAM sequence: TTT
tggtttaacacttcatacaa

SEQ ID NO: 190516 - DNA, 20 bp, Artificial Sequence
  Description of Artificial Sequence: Synthetic oligonucleotide
  Target: LAMA2; (-) strand; PAM type: YTN; PAM sequence: TTT
ttggtttaacacttcataca

SEQ ID NO: 190517 - DNA, 20 bp, Artificial Sequence
  Description of Artificial Sequence: Synthetic oligonucleotide
  Target: LAMA2; (-) strand; PAM type: YTN; PAM sequence: TTA
tttttggtttaacacttcat

SEQ ID NO: 190518 - DNA, 20 bp, Artificial Sequence
  Description of Artificial Sequence: Synthetic oligonucleotide
  Target: LAMA2; (-) strand; PAM type: YTN; PAM sequence: TTG
attatttttggtttaacact

SEQ ID NO: 190519 - DNA, 20 bp, Artificial Sequence
  Description of Artificial Sequence: Synthetic oligonucleotide
  Target: LAMA2; (-) strand; PAM type: YTN; PAM sequence: CTT
gattatttttggtttaacac

SEQ ID NO: 190520 - DNA, 20 bp, Artificial Sequence
  Description of Artificial Sequence: Synthetic oligonucleotide
  Target: LAMA2; (-) strand; PAM type: YTN; PAM sequence: CTG
ggccttgattatttttggtt

SEQ ID NO: 190521 - DNA, 20 bp, Artificial Sequence
  Description of Artificial Sequence: Synthetic oligonucleotide
  Target: LAMA2; (-) strand; PAM type: YTN; PAM sequence: TTA
atggaccaggaaaagccctg

SEQ ID NO: 190522 - DNA, 20 bp, Artificial Sequence
  Description of Artificial Sequence: Synthetic oligonucleotide
  Target: LAMA2; (-) strand; PAM type: YTN; PAM sequence: TTG
tcatatatccattaatggac

SEQ ID NO: 190523 - DNA, 20 bp, Artificial Sequence
  Description of Artificial Sequence: Synthetic oligonucleotide
  Target: LAMA2; (-) strand; PAM type: YTN; PAM sequence: CTT
gtcatatatccattaatgga

SEQ ID NO: 190524 - DNA, 20 bp, Artificial Sequence
  Description of Artificial Sequence: Synthetic oligonucleotide
  Target: LAMA2; (-) strand; PAM type: YTN; PAM sequence: TTG
ccatcacttgtcatatatcc

SEQ ID NO: 190525 - DNA, 20 bp, Artificial Sequence
  Description of Artificial Sequence: Synthetic oligonucleotide
  Target: LAMA2; (-) strand; PAM type: YTN; PAM sequence: TTT
gccatcacttgtcatatatc

SEQ ID NO: 190526 - DNA, 20 bp, Artificial Sequence
  Description of Artificial Sequence: Synthetic oligonucleotide
  Target: LAMA2; (-) strand; PAM type: YTN; PAM sequence: TTT
tgccatcacttgtcatatat

SEQ ID NO: 190527 - DNA, 20 bp, Artificial Sequence
  Description of Artificial Sequence: Synthetic oligonucleotide
  Target: LAMA2; (-) strand; PAM type: YTN; PAM sequence: CTT
ttgccatcacttgtcatata

SEQ ID NO: 190528 - DNA, 20 bp, Artificial Sequence
  Description of Artificial Sequence: Synthetic oligonucleotide
  Target: LAMA2; (-) strand; PAM type: YTN; PAM sequence: CTA
tccttttgccatcacttgtc

SEQ ID NO: 190529 - DNA, 20 bp, Artificial Sequence
  Description of Artificial Sequence: Synthetic oligonucleotide
  Target: LAMA2; (-) strand; PAM type: YTN; PAM sequence: CTG
taactatccttttgccatca

SEQ ID NO: 190530 - DNA, 20 bp, Artificial Sequence
  Description of Artificial Sequence: Synthetic oligonucleotide
  Target: LAMA2; (-) strand; PAM type: YTN; PAM sequence: TTA
ataactgtaactatcctttt

SEQ ID NO: 190531 - DNA, 20 bp, Artificial Sequence
  Description of Artificial Sequence: Synthetic oligonucleotide
  Target: LAMA2; (-) strand; PAM type: YTN; PAM sequence: TTA
agttaataactgtaactatc

SEQ ID NO: 190532 - DNA, 20 bp, Artificial Sequence
  Description of Artificial Sequence: Synthetic oligonucleotide
  Target: LAMA2; (-) strand; PAM type: YTN; PAM sequence: TTA
atgattaagttaataactgt

SEQ ID NO: 190533 - DNA, 20 bp, Artificial Sequence
  Description of Artificial Sequence: Synthetic oligonucleotide
  Target: LAMA2; (-) strand; PAM type: YTN; PAM sequence: CTG
agccaattaatgattaagtt

SEQ ID NO: 190534 - DNA, 20 bp, Artificial Sequence
  Description of Artificial Sequence: Synthetic oligonucleotide
  Target: LAMA2; (-) strand; PAM type: YTN; PAM sequence: TTG
gggataccctgagccaatta

SEQ ID NO: 190535 - DNA, 20 bp, Artificial Sequence
  Description of Artificial Sequence: Synthetic oligonucleotide
  Target: LAMA2; (-) strand; PAM type: YTN; PAM sequence: TTT
ggggataccctgagccaatt

SEQ ID NO: 190536 - DNA, 20 bp, Artificial Sequence
  Description of Artificial Sequence: Synthetic oligonucleotide
  Target: LAMA2; (-) strand; PAM type: YTN; PAM sequence: TTT
tggggataccctgagccaat

SEQ ID NO: 190537 - DNA, 20 bp, Artificial Sequence
  Description of Artificial Sequence: Synthetic oligonucleotide
  Target: LAMA2; (-) strand; PAM type: YTN; PAM sequence: CTG
cggttttggggataccctga

SEQ ID NO: 190538 - DNA, 20 bp, Artificial Sequence
  Description of Artificial Sequence: Synthetic oligonucleotide
  Target: LAMA2; (-) strand; PAM type: YTN; PAM sequence: TTC
caactgcggttttggggata

SEQ ID NO: 190539 - DNA, 20 bp, Artificial Sequence
  Description of Artificial Sequence: Synthetic oligonucleotide
  Target: LAMA2; (-) strand; PAM type: YTN; PAM sequence: TTC
agttccaactgcggttttgg

SEQ ID NO: 190540 - DNA, 20 bp, Artificial Sequence
  Description of Artificial Sequence: Synthetic oligonucleotide
  Target: LAMA2; (-) strand; PAM type: YTN; PAM sequence: CTT
cagttccaactgcggttttg

SEQ ID NO: 190541 - DNA, 20 bp, Artificial Sequence
  Description of Artificial Sequence: Synthetic oligonucleotide
  Target: LAMA2; (-) strand; PAM type: YTN; PAM sequence: TTG
tagcacttcagttccaactg

SEQ ID NO: 190542 - DNA, 20 bp, Artificial Sequence
  Description of Artificial Sequence: Synthetic oligonucleotide
  Target: LAMA2; (-) strand; PAM type: YTN; PAM sequence: TTT
gtagcacttcagttccaact

SEQ ID NO: 190543 - DNA, 20 bp, Artificial Sequence
  Description of Artificial Sequence: Synthetic oligonucleotide
  Target: LAMA2; (-) strand; PAM type: YTN; PAM sequence: TTT
tgtagcacttcagttccaac

SEQ ID NO: 190544 - DNA, 20 bp, Artificial Sequence
  Description of Artificial Sequence: Synthetic oligonucleotide
  Target: LAMA2; (-) strand; PAM type: YTN; PAM sequence: TTT
ttgtagcacttcagttccaa

SEQ ID NO: 190545 - DNA, 20 bp, Artificial Sequence
  Description of Artificial Sequence: Synthetic oligonucleotide
  Target: LAMA2; (-) strand; PAM type: YTN; PAM sequence: CTA
taacaacaaaatggtcattt

SEQ ID NO: 190546 - DNA, 20 bp, Artificial Sequence
  Description of Artificial Sequence: Synthetic oligonucleotide
  Target: LAMA2; (-) strand; PAM type: YTN; PAM sequence: TTA
tgtgaagaaaagctataaca

SEQ ID NO: 190547 - DNA, 20 bp, Artificial Sequence
  Description of Artificial Sequence: Synthetic oligonucleotide
  Target: LAMA2; (-) strand; PAM type: YTN; PAM sequence: CTT
atgtgaagaaaagctataac

SEQ ID NO: 190548 - DNA, 20 bp, Artificial Sequence
  Description of Artificial Sequence: Synthetic oligonucleotide
  Target: LAMA2; (-) strand; PAM type: YTN; PAM sequence: TTC
cttatgtgaagaaaagctat

SEQ ID NO: 190549 - DNA, 20 bp, Artificial Sequence
  Description of Artificial Sequence: Synthetic oligonucleotide
  Target: LAMA2; (-) strand; PAM type: YTN; PAM sequence: TTT
ccttatgtgaagaaaagcta

SEQ ID NO: 190550 - DNA, 20 bp, Artificial Sequence
  Description of Artificial Sequence: Synthetic oligonucleotide
  Target: LAMA2; (-) strand; PAM type: YTN; PAM sequence: TTA
tttccttatgtgaagaaaag

SEQ ID NO: 190551 - DNA, 20 bp, Artificial Sequence
  Description of Artificial Sequence: Synthetic oligonucleotide
  Target: LAMA2; (-) strand; PAM type: YTN; PAM sequence: TTT
atttccttatgtgaagaaaa

SEQ ID NO: 190552 - DNA, 20 bp, Artificial Sequence
  Description of Artificial Sequence: Synthetic oligonucleotide
  Target: LAMA2; (-) strand; PAM type: YTN; PAM sequence: TTA
tttatttccttatgtgaaga

SEQ ID NO: 190553 - DNA, 20 bp, Artificial Sequence
  Description of Artificial Sequence: Synthetic oligonucleotide
  Target: LAMA2; (-) strand; PAM type: YTN; PAM sequence: CTT
atttatttccttatgtgaag

SEQ ID NO: 190554 - DNA, 20 bp, Artificial Sequence
  Description of Artificial Sequence: Synthetic oligonucleotide
  Target: LAMA2; (-) strand; PAM type: YTN; PAM sequence: TTG
cttatttatttccttatgtg

SEQ ID NO: 190555 - DNA, 20 bp, Artificial Sequence
  Description of Artificial Sequence: Synthetic oligonucleotide
  Target: LAMA2; (-) strand; PAM type: YTN; PAM sequence: TTT
gcttatttatttccttatgt

SEQ ID NO: 190556 - DNA, 20 bp, Artificial Sequence
  Description of Artificial Sequence: Synthetic oligonucleotide
  Target: LAMA2; (-) strand; PAM type: YTN; PAM sequence: TTT
tgcttatttatttccttatg

SEQ ID NO: 190557 - DNA, 20 bp, Artificial Sequence
  Description of Artificial Sequence: Synthetic oligonucleotide
  Target: LAMA2; (-) strand; PAM type: YTN; PAM sequence: TTT
ttgcttatttatttccttat

SEQ ID NO: 190558 - DNA, 20 bp, Artificial Sequence
  Description of Artificial Sequence: Synthetic oligonucleotide
  Target: LAMA2; (-) strand; PAM type: YTN; PAM sequence: CTT
tttgcttatttatttcctta

SEQ ID NO: 190559 - DNA, 20 bp, Artificial Sequence
  Description of Artificial Sequence: Synthetic oligonucleotide
  Target: LAMA2; (-) strand; PAM type: YTN; PAM sequence: CTC
tttttgcttatttatttcct

SEQ ID NO: 190560 - DNA, 20 bp, Artificial Sequence
  Description of Artificial Sequence: Synthetic oligonucleotide
  Target: LAMA2; (-) strand; PAM type: YTN; PAM sequence: CTC
cctctttttgcttatttatt

SEQ ID NO: 190561 - DNA, 20 bp, Artificial Sequence
  Description of Artificial Sequence: Synthetic oligonucleotide
  Target: LAMA2; (-) strand; PAM type: YTN; PAM sequence: TTG
atcaacaaatagataagaca

SEQ ID NO: 190562 - DNA, 20 bp, Artificial Sequence
  Description of Artificial Sequence: Synthetic oligonucleotide
  Target: LAMA2; (-) strand; PAM type: YTN; PAM sequence: TTT
gatcaacaaatagataagac

SEQ ID NO: 190563 - DNA, 20 bp, Artificial Sequence
  Description of Artificial Sequence: Synthetic oligonucleotide
  Target: LAMA2; (-) strand; PAM type: YTN; PAM sequence: CTT
tgatcaacaaatagataaga

SEQ ID NO: 190564 - DNA, 20 bp, Artificial Sequence
  Description of Artificial Sequence: Synthetic oligonucleotide
  Target: LAMA2; (-) strand; PAM type: YTN; PAM sequence: TTA
caagatctttgatcaacaaa

SEQ ID NO: 190565 - DNA, 20 bp, Artificial Sequence
  Description of Artificial Sequence: Synthetic oligonucleotide
  Target: LAMA2; (-) strand; PAM type: YTN; PAM sequence: TTA
ccataagcagaattacaaga

SEQ ID NO: 190566 - DNA, 20 bp, Artificial Sequence
  Description of Artificial Sequence: Synthetic oligonucleotide
  Target: LAMA2; (-) strand; PAM type: YTN; PAM sequence: CTG
ggagttaccataagcagaat

SEQ ID NO: 190567 - DNA, 20 bp, Artificial Sequence
  Description of Artificial Sequence: Synthetic oligonucleotide
  Target: LAMA2; (-) strand; PAM type: YTN; PAM sequence: CTC
tgggagttaccataagcaga

SEQ ID NO: 190568 - DNA, 20 bp, Artificial Sequence
  Description of Artificial Sequence: Synthetic oligonucleotide
  Target: LAMA2; (-) strand; PAM type: YTN; PAM sequence: CTA
ctctgggagttaccataagc

SEQ ID NO: 190569 - DNA, 20 bp, Artificial Sequence
  Description of Artificial Sequence: Synthetic oligonucleotide
  Target: LAMA2; (-) strand; PAM type: YTN; PAM sequence: CTC
tactctgggagttaccataa

SEQ ID NO: 190570 - DNA, 20 bp, Artificial Sequence
  Description of Artificial Sequence: Synthetic oligonucleotide
  Target: LAMA2; (-) strand; PAM type: YTN; PAM sequence: TTC
tctactctgggagttaccat

SEQ ID NO: 190571 - DNA, 20 bp, Artificial Sequence
  Description of Artificial Sequence: Synthetic oligonucleotide
  Target: LAMA2; (-) strand; PAM type: YTN; PAM sequence: CTG
gatgatattctctactctgg

SEQ ID NO: 190572 - DNA, 20 bp, Artificial Sequence
  Description of Artificial Sequence: Synthetic oligonucleotide
  Target: LAMA2; (-) strand; PAM type: YTN; PAM sequence: TTC
ataaagggggccaactggat

SEQ ID NO: 190573 - DNA, 20 bp, Artificial Sequence
  Description of Artificial Sequence: Synthetic oligonucleotide
  Target: LAMA2; (-) strand; PAM type: YTN; PAM sequence: TTG
caatccaagttcataaaggg

SEQ ID NO: 190574 - DNA, 20 bp, Artificial Sequence
  Description of Artificial Sequence: Synthetic oligonucleotide
  Target: LAMA2; (-) strand; PAM type: YTN; PAM sequence: TTC
cattgcaatccaagttcata

SEQ ID NO: 190575 - DNA, 20 bp, Artificial Sequence
  Description of Artificial Sequence: Synthetic oligonucleotide
  Target: LAMA2; (-) strand; PAM type: YTN; PAM sequence: CTT
ccattgcaatccaagttcat

SEQ ID NO: 190576 - DNA, 20 bp, Artificial Sequence
  Description of Artificial Sequence: Synthetic oligonucleotide
  Target: LAMA2; (-) strand; PAM type: YTN; PAM sequence: CTG
gccgataggacttccattgc

SEQ ID NO: 190577 - DNA, 20 bp, Artificial Sequence
  Description of Artificial Sequence: Synthetic oligonucleotide
  Target: LAMA2; (-) strand; PAM type: YTN; PAM sequence: CTA
gtaaactggccgataggact

SEQ ID NO: 190578 - DNA, 20 bp, Artificial Sequence
  Description of Artificial Sequence: Synthetic oligonucleotide
  Target: LAMA2; (-) strand; PAM type: YTN; PAM sequence: TTA
actagtaaactggccgatag

SEQ ID NO: 190579 - DNA, 20 bp, Artificial Sequence
  Description of Artificial Sequence: Synthetic oligonucleotide
  Target: LAMA2; (-) strand; PAM type: YTN; PAM sequence: CTG
ttaactagtaaactggccga

SEQ ID NO: 190580 - DNA, 20 bp, Artificial Sequence
  Description of Artificial Sequence: Synthetic oligonucleotide
  Target: LAMA2; (-) strand; PAM type: YTN; PAM sequence: CTC
ctgttaactagtaaactggc

SEQ ID NO: 190581 - DNA, 20 bp, Artificial Sequence
  Description of Artificial Sequence: Synthetic oligonucleotide
  Target: LAMA2; (-) strand; PAM type: YTN; PAM sequence: CTA
cagctcctgttaactagtaa

SEQ ID NO: 190582 - DNA, 20 bp, Artificial Sequence
  Description of Artificial Sequence: Synthetic oligonucleotide
  Target: LAMA2; (-) strand; PAM type: YTN; PAM sequence: CTA
gtactacagctcctgttaac

SEQ ID NO: 190583 - DNA, 20 bp, Artificial Sequence
  Description of Artificial Sequence: Synthetic oligonucleotide
  Target: LAMA2; (-) strand; PAM type: YTN; PAM sequence: CTC
tagtactacagctcctgtta

SEQ ID NO: 190584 - DNA, 20 bp, Artificial Sequence
  Description of Artificial Sequence: Synthetic oligonucleotide
  Target: LAMA2; (-) strand; PAM type: YTN; PAM sequence: CTG
atgcagtcatagctctagta

SEQ ID NO: 190585 - DNA, 20 bp, Artificial Sequence
  Description of Artificial Sequence: Synthetic oligonucleotide
  Target: LAMA2; (-) strand; PAM type: YTN; PAM sequence: TTC
tgatgcagtcatagctctag

SEQ ID NO: 190586 - DNA, 20 bp, Artificial Sequence
  Description of Artificial Sequence: Synthetic oligonucleotide
  Target: LAMA2; (-) strand; PAM type: YTN; PAM sequence: CTT
ctgatgcagtcatagctcta

SEQ ID NO: 190587 - DNA, 20 bp, Artificial Sequence
  Description of Artificial Sequence: Synthetic oligonucleotide
  Target: LAMA2; (-) strand; PAM type: YTN; PAM sequence: CTG
gacttctgatgcagtcatag

SEQ ID NO: 190588 - DNA, 20 bp, Artificial Sequence
  Description of Artificial Sequence: Synthetic oligonucleotide
  Target: LAMA2; (-) strand; PAM type: YTN; PAM sequence: CTG
ctggacttctgatgcagtca

SEQ ID NO: 190589 - DNA, 20 bp, Artificial Sequence
  Description of Artificial Sequence: Synthetic oligonucleotide
  Target: LAMA2; (-) strand; PAM type: YTN; PAM sequence: TTG
tgcccacactgctggacttc

SEQ ID NO: 190590 - DNA, 20 bp, Artificial Sequence
  Description of Artificial Sequence: Synthetic oligonucleotide
  Target: LAMA2; (-) strand; PAM type: YTN; PAM sequence: TTT
gtgcccacactgctggactt

SEQ ID NO: 190591 - DNA, 20 bp, Artificial Sequence
  Description of Artificial Sequence: Synthetic oligonucleotide
  Target: LAMA2; (-) strand; PAM type: YTN; PAM sequence: CTT
tgtgcccacactgctggact

SEQ ID NO: 190592 - DNA, 20 bp, Artificial Sequence
  Description of Artificial Sequence: Synthetic oligonucleotide
  Target: LAMA2; (-) strand; PAM type: YTN; PAM sequence: CTG
ctttgtgcccacactgctgg

SEQ ID NO: 190593 - DNA, 20 bp, Artificial Sequence
  Description of Artificial Sequence: Synthetic oligonucleotide
  Target: LAMA2; (-) strand; PAM type: YTN; PAM sequence: CTG
cgctgctttgtgcccacact

SEQ ID NO: 190594 - DNA, 20 bp, Artificial Sequence
  Description of Artificial Sequence: Synthetic oligonucleotide
  Target: LAMA2; (-) strand; PAM type: YTN; PAM sequence: TTC
aaaagtgctgcgctgctttg

SEQ ID NO: 190595 - DNA, 20 bp, Artificial Sequence
  Description of Artificial Sequence: Synthetic oligonucleotide
  Target: LAMA2; (-) strand; PAM type: YTN; PAM sequence: CTT
caaaagtgctgcgctgcttt

SEQ ID NO: 190596 - DNA, 20 bp, Artificial Sequence
  Description of Artificial Sequence: Synthetic oligonucleotide
  Target: LAMA2; (-) strand; PAM type: YTN; PAM sequence: CTA
acttcaaaagtgctgcgctg

SEQ ID NO: 190597 - DNA, 20 bp, Artificial Sequence
  Description of Artificial Sequence: Synthetic oligonucleotide
  Target: LAMA2; (-) strand; PAM type: YTN; PAM sequence: CTC
gatgtctaacttcaaaagtg

SEQ ID NO: 190598 - DNA, 20 bp, Artificial Sequence
  Description of Artificial Sequence: Synthetic oligonucleotide
  Target: LAMA2; (-) strand; PAM type: YTN; PAM sequence: CTC
tcgatgtctaacttcaaaag

SEQ ID NO: 190599 - DNA, 20 bp, Artificial Sequence
  Description of Artificial Sequence: Synthetic oligonucleotide
  Target: LAMA2; (-) strand; PAM type: YTN; PAM sequence: CTC
aaactctcgatgtctaactt

SEQ ID NO: 190600 - DNA, 20 bp, Artificial Sequence
  Description of Artificial Sequence: Synthetic oligonucleotide
  Target: LAMA2; (-) strand; PAM type: YTN; PAM sequence: CTA
ggactcaaactctcgatgtc

SEQ ID NO: 190601 - DNA, 20 bp, Artificial Sequence
  Description of Artificial Sequence: Synthetic oligonucleotide
  Target: LAMA2; (-) strand; PAM type: YTN; PAM sequence: CTC
agccagcaaggtgtgaatct

SEQ ID NO: 190602 - DNA, 20 bp, Artificial Sequence
  Description of Artificial Sequence: Synthetic oligonucleotide
  Target: LAMA2; (-) strand; PAM type: YTN; PAM sequence: TTG
caacagcactcagccagcaa

SEQ ID NO: 190603 - DNA, 20 bp, Artificial Sequence
  Description of Artificial Sequence: Synthetic oligonucleotide
  Target: LAMA2; (-) strand; PAM type: YTN; PAM sequence: CTA
ttgcaacagcactcagccag

SEQ ID NO: 190604 - DNA, 20 bp, Artificial Sequence
  Description of Artificial Sequence: Synthetic oligonucleotide
  Target: LAMA2; (-) strand; PAM type: YTN; PAM sequence: CTC
aacagcactattgcaacagc

SEQ ID NO: 190605 - DNA, 20 bp, Artificial Sequence
  Description of Artificial Sequence: Synthetic oligonucleotide
  Target: LAMA2; (-) strand; PAM type: YTN; PAM sequence: CTC
actcaacagcactattgcaa

SEQ ID NO: 190606 - DNA, 20 bp, Artificial Sequence
  Description of Artificial Sequence: Synthetic oligonucleotide
  Target: LAMA2; (-) strand; PAM type: YTN; PAM sequence: TTA
aataactcactcaacagcac

SEQ ID NO: 190607 - DNA, 20 bp, Artificial Sequence
  Description of Artificial Sequence: Synthetic oligonucleotide
  Target: LAMA2; (-) strand; PAM type: YTN; PAM sequence: TTA
aagaagttaaataactcact

SEQ ID NO: 190608 - DNA, 20 bp, Artificial Sequence
  Description of Artificial Sequence: Synthetic oligonucleotide
  Target: LAMA2; (-) strand; PAM type: YTN; PAM sequence: TTT
aaagaagttaaataactcac

SEQ ID NO: 190609 - DNA, 20 bp, Artificial Sequence
  Description of Artificial Sequence: Synthetic oligonucleotide
  Target: LAMA2; (-) strand; PAM type: YTN; PAM sequence: TTA
aaggtgaggatgatcaggtt

SEQ ID NO: 190610 - DNA, 20 bp, Artificial Sequence
  Description of Artificial Sequence: Synthetic oligonucleotide
  Target: LAMA2; (-) strand; PAM type: YTN; PAM sequence: CTT
aaaggtgaggatgatcaggt

SEQ ID NO: 190611 - DNA, 20 bp, Artificial Sequence
  Description of Artificial Sequence: Synthetic oligonucleotide
  Target: LAMA2; (-) strand; PAM type: YTN; PAM sequence: CTC
ttaaaggtgaggatgatcag

SEQ ID NO: 190612 - DNA, 20 bp, Artificial Sequence
  Description of Artificial Sequence: Synthetic oligonucleotide
  Target: LAMA2; (-) strand; PAM type: YTN; PAM sequence: TTC
tcttaaaggtgaggatgatc

SEQ ID NO: 190613 - DNA, 20 bp, Artificial Sequence
  Description of Artificial Sequence: Synthetic oligonucleotide
  Target: LAMA2; (-) strand; PAM type: YTN; PAM sequence: TTC
attctcttaaaggtgaggat

SEQ ID NO: 190614 - DNA, 20 bp, Artificial Sequence
  Description of Artificial Sequence: Synthetic oligonucleotide
  Target: LAMA2; (-) strand; PAM type: YTN; PAM sequence: TTT
cattctcttaaaggtgagga

SEQ ID NO: 190615 - DNA, 20 bp, Artificial Sequence
  Description of Artificial Sequence: Synthetic oligonucleotide
  Target: LAMA2; (-) strand; PAM type: YTN; PAM sequence: TTT
tcattctcttaaaggtgagg

SEQ ID NO: 190616 - DNA, 20 bp, Artificial Sequence
  Description of Artificial Sequence: Synthetic oligonucleotide
  Target: LAMA2; (-) strand; PAM type: YTN; PAM sequence: CTA
ttttcattctcttaaaggtg

SEQ ID NO: 190617 - DNA, 20 bp, Artificial Sequence
  Description of Artificial Sequence: Synthetic oligonucleotide
  Target: LAMA2; (-) strand; PAM type: YTN; PAM sequence: CTA
ctattttcattctcttaaag

SEQ ID NO: 190618 - DNA, 20 bp, Artificial Sequence
  Description of Artificial Sequence: Synthetic oligonucleotide
  Target: LAMA2; (-) strand; PAM type: YTN; PAM sequence: TTA
aaaaggcactactattttca

SEQ ID NO: 190619 - DNA, 20 bp, Artificial Sequence
  Description of Artificial Sequence: Synthetic oligonucleotide
  Target: LAMA2; (-) strand; PAM type: YTN; PAM sequence: CTT
aaaaaggcactactattttc

SEQ ID NO: 190620 - DNA, 20 bp, Artificial Sequence
  Description of Artificial Sequence: Synthetic oligonucleotide
  Target: LAMA2; (-) strand; PAM type: YTN; PAM sequence: TTA
atccttaaaaaggcactact

SEQ ID NO: 190621 - DNA, 20 bp, Artificial Sequence
  Description of Artificial Sequence: Synthetic oligonucleotide
  Target: LAMA2; (-) strand; PAM type: YTN; PAM sequence: TTT
aatccttaaaaaggcactac

SEQ ID NO: 190622 - DNA, 20 bp, Artificial Sequence
  Description of Artificial Sequence: Synthetic oligonucleotide
  Target: LAMA2; (-) strand; PAM type: YTN; PAM sequence: TTC
catttaatccttaaaaaggc

SEQ ID NO: 190623 - DNA, 20 bp, Artificial Sequence
  Description of Artificial Sequence: Synthetic oligonucleotide
  Target: LAMA2; (-) strand; PAM type: YTN; PAM sequence: TTA
attccatttaatccttaaaa

SEQ ID NO: 190624 - DNA, 20 bp, Artificial Sequence
  Description of Artificial Sequence: Synthetic oligonucleotide
  Target: LAMA2; (-) strand; PAM type: YTN; PAM sequence: CTT
aattccatttaatccttaaa

SEQ ID NO: 190625 - DNA, 20 bp, Artificial Sequence
  Description of Artificial Sequence: Synthetic oligonucleotide
  Target: LAMA2; (-) strand; PAM type: YTN; PAM sequence: TTA
aatacttaattccatttaat

SEQ ID NO: 190626 - DNA, 20 bp, Artificial Sequence
  Description of Artificial Sequence: Synthetic oligonucleotide
  Target: LAMA2; (-) strand; PAM type: YTN; PAM sequence: CTG
aatacaaattaaatacttaa

SEQ ID NO: 190627 - DNA, 20 bp, Artificial Sequence
  Description of Artificial Sequence: Synthetic oligonucleotide
  Target: LAMA2; (-) strand; PAM type: YTN; PAM sequence: TTC
tgaatacaaattaaatactt

SEQ ID NO: 190628 - DNA, 20 bp, Artificial Sequence
  Description of Artificial Sequence: Synthetic oligonucleotide
  Target: LAMA2; (-) strand; PAM type: YTN; PAM sequence: CTT
ctgaatacaaattaaatact

SEQ ID NO: 190629 - DNA, 20 bp, Artificial Sequence
  Description of Artificial Sequence: Synthetic oligonucleotide
  Target: LAMA2; (-) strand; PAM type: YTN; PAM sequence: CTC
ttctgaatacaaattaaata

SEQ ID NO: 190630 - DNA, 20 bp, Artificial Sequence
  Description of Artificial Sequence: Synthetic oligonucleotide
  Target: LAMA2; (-) strand; PAM type: YTN; PAM sequence: TTC
catcctcttctgaatacaaa

SEQ ID NO: 190631 - DNA, 20 bp, Artificial Sequence
  Description of Artificial Sequence: Synthetic oligonucleotide
  Target: LAMA2; (-) strand; PAM type: YTN; PAM sequence: TTG
aatgatgattccatcctctt

SEQ ID NO: 190632 - DNA, 20 bp, Artificial Sequence
  Description of Artificial Sequence: Synthetic oligonucleotide
  Target: LAMA2; (-) strand; PAM type: YTN; PAM sequence: TTT
gaatgatgattccatcctct

SEQ ID NO: 190633 - DNA, 20 bp, Artificial Sequence
  Description of Artificial Sequence: Synthetic oligonucleotide
  Target: LAMA2; (-) strand; PAM type: YTN; PAM sequence: CTT
tgaatgatgattccatcctc

SEQ ID NO: 190634 - DNA, 20 bp, Artificial Sequence
  Description of Artificial Sequence: Synthetic oligonucleotide
  Target: LAMA2; (-) strand; PAM type: YTN; PAM sequence: TTG
taaagtctttgaatgatgat

SEQ ID NO: 190635 - DNA, 20 bp, Artificial Sequence
  Description of Artificial Sequence: Synthetic oligonucleotide
  Target: LAMA2; (-) strand; PAM type: YTN; PAM sequence: CTG
attgtaaagtctttgaatga

SEQ ID NO: 190636 - DNA, 20 bp, Artificial Sequence
  Description of Artificial Sequence: Synthetic oligonucleotide
  Target: LAMA2; (-) strand; PAM type: YTN; PAM sequence: CTG
aaaacaccactgattgtaaa

SEQ ID NO: 190637 - DNA, 20 bp, Artificial Sequence
  Description of Artificial Sequence: Synthetic oligonucleotide
  Target: LAMA2; (-) strand; PAM type: YTN; PAM sequence: TTG
tccatgctgaaaacaccact

SEQ ID NO: 190638 - DNA, 20 bp, Artificial Sequence
  Description of Artificial Sequence: Synthetic oligonucleotide
  Target: LAMA2; (-) strand; PAM type: YTN; PAM sequence: CTC
cagttgtccatgctgaaaac

SEQ ID NO: 190639 - DNA, 20 bp, Artificial Sequence
  Description of Artificial Sequence: Synthetic oligonucleotide
  Target: LAMA2; (-) strand; PAM type: YTN; PAM sequence: TTA
aagctccagttgtccatgct

SEQ ID NO: 190640 - DNA, 20 bp, Artificial Sequence
  Description of Artificial Sequence: Synthetic oligonucleotide
  Target: LAMA2; (-) strand; PAM type: YTN; PAM sequence: TTA
agttaaagctccagttgtcc

SEQ ID NO: 190641 - DNA, 20 bp, Artificial Sequence
  Description of Artificial Sequence: Synthetic oligonucleotide
  Target: LAMA2; (-) strand; PAM type: YTN; PAM sequence: TTT
aagttaaagctccagttgtc

SEQ ID NO: 190642 - DNA, 20 bp, Artificial Sequence
  Description of Artificial Sequence: Synthetic oligonucleotide
  Target: LAMA2; (-) strand; PAM type: YTN; PAM sequence: TTT
taagttaaagctccagttgt

SEQ ID NO: 190643 - DNA, 20 bp, Artificial Sequence
  Description of Artificial Sequence: Synthetic oligonucleotide
  Target: LAMA2; (-) strand; PAM type: YTN; PAM sequence: CTT
ttaagttaaagctccagttg

SEQ ID NO: 190644 - DNA, 20 bp, Artificial Sequence
  Description of Artificial Sequence: Synthetic oligonucleotide
  Target: LAMA2; (-) strand; PAM type: YTN; PAM sequence: CTA
gatcttttaagttaaagctc

SEQ ID NO: 190645 - DNA, 20 bp, Artificial Sequence
  Description of Artificial Sequence: Synthetic oligonucleotide
  Target: LAMA2; (-) strand; PAM type: YTN; PAM sequence: TTC
tagatcttttaagttaaagc

SEQ ID NO: 190646 - DNA, 20 bp, Artificial Sequence
  Description of Artificial Sequence: Synthetic oligonucleotide
  Target: LAMA2; (-) strand; PAM type: YTN; PAM sequence: TTT
ctagatcttttaagttaaag

SEQ ID NO: 190647 - DNA, 20 bp, Artificial Sequence
  Description of Artificial Sequence: Synthetic oligonucleotide
  Target: LAMA2; (-) strand; PAM type: YTN; PAM sequence: CTG
tggccaacaagcccagtttc

SEQ ID NO: 190648 - DNA, 20 bp, Artificial Sequence
  Description of Artificial Sequence: Synthetic oligonucleotide
  Target: LAMA2; (-) strand; PAM type: YTN; PAM sequence: CTA
aaactgtggccaacaagccc

SEQ ID NO: 190649 - DNA, 20 bp, Artificial Sequence
  Description of Artificial Sequence: Synthetic oligonucleotide
  Target: LAMA2; (-) strand; PAM type: YTN; PAM sequence: CTA
atcacactaaaactgtggcc

SEQ ID NO: 190650 - DNA, 20 bp, Artificial Sequence
  Description of Artificial Sequence: Synthetic oligonucleotide
  Target: LAMA2; (-) strand; PAM type: YTN; PAM sequence: CTC
taatcacactaaaactgtgg

SEQ ID NO: 190651 - DNA, 20 bp, Artificial Sequence
  Description of Artificial Sequence: Synthetic oligonucleotide
  Target: LAMA2; (-) strand; PAM type: YTN; PAM sequence: CTA
tgaccacctctaatcacact

SEQ ID NO: 190652 - DNA, 20 bp, Artificial Sequence
  Description of Artificial Sequence: Synthetic oligonucleotide
  Target: LAMA2; (-) strand; PAM type: YTN; PAM sequence: CTA
ccctatgaccacctctaatc

SEQ ID NO: 190653 - DNA, 20 bp, Artificial Sequence
  Description of Artificial Sequence: Synthetic oligonucleotide
  Target: LAMA2; (-) strand; PAM type: YTN; PAM sequence: TTG
actaccctatgaccacctct

SEQ ID NO: 190654 - DNA, 20 bp, Artificial Sequence
  Description of Artificial Sequence: Synthetic oligonucleotide
  Target: LAMA2; (-) strand; PAM type: YTN; PAM sequence: TTT
gactaccctatgaccacctc

SEQ ID NO: 190655 - DNA, 20 bp, Artificial Sequence
  Description of Artificial Sequence: Synthetic oligonucleotide
  Target: LAMA2; (-) strand; PAM type: YTN; PAM sequence: CTT
tgactaccctatgaccacct

SEQ ID NO: 190656 - DNA, 20 bp, Artificial Sequence
  Description of Artificial Sequence: Synthetic oligonucleotide
  Target: LAMA2; (-) strand; PAM type: YTN; PAM sequence: TTA
ccatccataaccaggatagt

SEQ ID NO: 190657 - DNA, 20 bp, Artificial Sequence
  Description of Artificial Sequence: Synthetic oligonucleotide
  Target: LAMA2; (-) strand; PAM type: YTN; PAM sequence: CTA
ttaccatccataaccaggat

SEQ ID NO: 190658 - DNA, 20 bp, Artificial Sequence
  Description of Artificial Sequence: Synthetic oligonucleotide
  Target: LAMA2; (-) strand; PAM type: YTN; PAM sequence: TTC
tattaccatccataaccagg

SEQ ID NO: 190659 - DNA, 20 bp, Artificial Sequence
  Description of Artificial Sequence: Synthetic oligonucleotide
  Target: LAMA2; (-) strand; PAM type: YTN; PAM sequence: CTA
agtgaagacatcaaataaat

SEQ ID NO: 190660 - DNA, 20 bp, Artificial Sequence
  Description of Artificial Sequence: Synthetic oligonucleotide
  Target: LAMA2; (-) strand; PAM type: YTN; PAM sequence: CTA
ggagacaactaagtgaagac

SEQ ID NO: 190661 - DNA, 20 bp, Artificial Sequence
  Description of Artificial Sequence: Synthetic oligonucleotide
  Target: LAMA2; (-) strand; PAM type: YTN; PAM sequence: CTG
tgaaggacctaggagacaac

SEQ ID NO: 190662 - DNA, 20 bp, Artificial Sequence
  Description of Artificial Sequence: Synthetic oligonucleotide
  Target: LAMA2; (-) strand; PAM type: YTN; PAM sequence: TTC
gctgtgaaggacctaggaga

SEQ ID NO: 190663 - DNA, 20 bp, Artificial Sequence
  Description of Artificial Sequence: Synthetic oligonucleotide
  Target: LAMA2; (-) strand; PAM type: YTN; PAM sequence: CTG
gcaaatgttcgctgtgaagg

SEQ ID NO: 190664 - DNA, 20 bp, Artificial Sequence
  Description of Artificial Sequence: Synthetic oligonucleotide
  Target: LAMA2; (-) strand; PAM type: YTN; PAM sequence: TTC
aatcctggcaaatgttcgct

SEQ ID NO: 190665 - DNA, 20 bp, Artificial Sequence
  Description of Artificial Sequence: Synthetic oligonucleotide
  Target: LAMA2; (-) strand; PAM type: YTN; PAM sequence: CTA
tgttcaatcctggcaaatgt

SEQ ID NO: 190666 - DNA, 20 bp, Artificial Sequence
  Description of Artificial Sequence: Synthetic oligonucleotide
  Target: LAMA2; (-) strand; PAM type: YTN; PAM sequence: TTG
aggaaatgcagagtacctat

SEQ ID NO: 190667 - DNA, 20 bp, Artificial Sequence
  Description of Artificial Sequence: Synthetic oligonucleotide
  Target: LAMA2; (-) strand; PAM type: YTN; PAM sequence: CTG
atgggaaaagagttgaggaa

SEQ ID NO: 190668 - DNA, 20 bp, Artificial Sequence
  Description of Artificial Sequence: Synthetic oligonucleotide
  Target: LAMA2; (-) strand; PAM type: YTN; PAM sequence: TTG
ggaaaagctgatgggaaaag

SEQ ID NO: 190669 - DNA, 20 bp, Artificial Sequence
  Description of Artificial Sequence: Synthetic oligonucleotide
  Target: LAMA2; (-) strand; PAM type: YTN; PAM sequence: CTG
agttgggaaaagctgatggg

SEQ ID NO: 190670 - DNA, 20 bp, Artificial Sequence
  Description of Artificial Sequence: Synthetic oligonucleotide
  Target: LAMA2; (-) strand; PAM type: YTN; PAM sequence: TTC
tgagttgggaaaagctgatg

SEQ ID NO: 190671 - DNA, 20 bp, Artificial Sequence
  Description of Artificial Sequence: Synthetic oligonucleotide
  Target: LAMA2; (-) strand; PAM type: YTN; PAM sequence: TTT
ctgagttgggaaaagctgat

SEQ ID NO: 190672 - DNA, 20 bp, Artificial Sequence
  Description of Artificial Sequence: Synthetic oligonucleotide
  Target: LAMA2; (-) strand; PAM type: YTN; PAM sequence: TTT
tctgagttgggaaaagctga

SEQ ID NO: 190673 - DNA, 20 bp, Artificial Sequence
  Description of Artificial Sequence: Synthetic oligonucleotide
  Target: LAMA2; (-) strand; PAM type: YTN; PAM sequence: TTC
aaggggtgaatgatggtacc

SEQ ID NO: 190674 - DNA, 20 bp, Artificial Sequence
  Description of Artificial Sequence: Synthetic oligonucleotide
  Target: LAMA2; (-) strand; PAM type: YTN; PAM sequence: TTG
attcaaggggtgaatgatgg

SEQ ID NO: 190675 - DNA, 20 bp, Artificial Sequence
  Description of Artificial Sequence: Synthetic oligonucleotide
  Target: LAMA2; (-) strand; PAM type: YTN; PAM sequence: TTT
gattcaaggggtgaatgatg

SEQ ID NO: 190676 - DNA, 20 bp, Artificial Sequence
  Description of Artificial Sequence: Synthetic oligonucleotide
  Target: LAMA2; (-) strand; PAM type: YTN; PAM sequence: CTA
gatgtcaaatttgattcaag

SEQ ID NO: 190677 - DNA, 20 bp, Artificial Sequence
  Description of Artificial Sequence: Synthetic oligonucleotide
  Target: LAMA2; (-) strand; PAM type: YTN; PAM sequence: TTC
tagatgtcaaatttgattca

SEQ ID NO: 190678 - DNA, 20 bp, Artificial Sequence
  Description of Artificial Sequence: Synthetic oligonucleotide
  Target: LAMA2; (-) strand; PAM type: YTN; PAM sequence: CTT
ctagatgtcaaatttgattc

SEQ ID NO: 190679 - DNA, 20 bp, Artificial Sequence
  Description of Artificial Sequence: Synthetic oligonucleotide
  Target: LAMA2; (-) strand; PAM type: YTN; PAM sequence: TTA
atagtaacttctagatgtca

SEQ ID NO: 190680 - DNA, 20 bp, Artificial Sequence
  Description of Artificial Sequence: Synthetic oligonucleotide
  Target: LAMA2; (-) strand; PAM type: YTN; PAM sequence: CTG
ggaggtgaaggaaagagaga

SEQ ID NO: 190681 - DNA, 20 bp, Artificial Sequence
  Description of Artificial Sequence: Synthetic oligonucleotide
  Target: LAMA2; (-) strand; PAM type: YTN; PAM sequence: TTC
aatctgggaggtgaaggaaa

SEQ ID NO: 190682 - DNA, 20 bp, Artificial Sequence
  Description of Artificial Sequence: Synthetic oligonucleotide
  Target: LAMA2; (-) strand; PAM type: YTN; PAM sequence: TTT
caatctgggaggtgaaggaa

SEQ ID NO: 190683 - DNA, 20 bp, Artificial Sequence
  Description of Artificial Sequence: Synthetic oligonucleotide
  Target: LAMA2; (-) strand; PAM type: YTN; PAM sequence: TTA
tttcaatctgggaggtgaag

SEQ ID NO: 190684 - DNA, 20 bp, Artificial Sequence
  Description of Artificial Sequence: Synthetic oligonucleotide
  Target: LAMA2; (-) strand; PAM type: YTN; PAM sequence: CTG
attatttcaatctgggaggt

SEQ ID NO: 190685 - DNA, 20 bp, Artificial Sequence
  Description of Artificial Sequence: Synthetic oligonucleotide
  Target: LAMA2; (-) strand; PAM type: YTN; PAM sequence: CTG
gtggtgtggatgacagacat

SEQ ID NO: 190686 - DNA, 20 bp, Artificial Sequence
  Description of Artificial Sequence: Synthetic oligonucleotide
  Target: LAMA2; (-) strand; PAM type: YTN; PAM sequence: CTC
tggtggtgtggatgacagac

SEQ ID NO: 190687 - DNA, 20 bp, Artificial Sequence
  Description of Artificial Sequence: Synthetic oligonucleotide
  Target: LAMA2; (-) strand; PAM type: YTN; PAM sequence: TTA
tggaataaactctggtggtg

SEQ ID NO: 190688 - DNA, 20 bp, Artificial Sequence
  Description of Artificial Sequence: Synthetic oligonucleotide
  Target: LAMA2; (-) strand; PAM type: YTN; PAM sequence: TTT
atggaataaactctggtggt

SEQ ID NO: 190689 - DNA, 20 bp, Artificial Sequence
  Description of Artificial Sequence: Synthetic oligonucleotide
  Target: LAMA2; (-) strand; PAM type: YTN; PAM sequence: CTA
gaaggcaatagggacaaaaa

SEQ ID NO: 190690 - DNA, 20 bp, Artificial Sequence
  Description of Artificial Sequence: Synthetic oligonucleotide
  Target: LAMA2; (-) strand; PAM type: YTN; PAM sequence: CTG
tggtctagaaggcaataggg

SEQ ID NO: 190691 - DNA, 20 bp, Artificial Sequence
  Description of Artificial Sequence: Synthetic oligonucleotide
  Target: LAMA2; (-) strand; PAM type: YTN; PAM sequence: TTG
cataggcaaaaaaagagtgc

SEQ ID NO: 190692 - DNA, 20 bp, Artificial Sequence
  Description of Artificial Sequence: Synthetic oligonucleotide
  Target: LAMA2; (-) strand; PAM type: YTN; PAM sequence: CTG
aagttgcataggcaaaaaaa

SEQ ID NO: 190693 - DNA, 20 bp, Artificial Sequence
  Description of Artificial Sequence: Synthetic oligonucleotide
  Target: LAMA2; (-) strand; PAM type: YTN; PAM sequence: CTG
ctgaagttgcataggcaaaa

SEQ ID NO: 190694 - DNA, 20 bp, Artificial Sequence
  Description of Artificial Sequence: Synthetic oligonucleotide
  Target: LAMA2; (-) strand; PAM type: YTN; PAM sequence: CTG
ggaggctgctgaagttgcat

SEQ ID NO: 190695 - DNA, 20 bp, Artificial Sequence
  Description of Artificial Sequence: Synthetic oligonucleotide
  Target: LAMA2; (-) strand; PAM type: YTN; PAM sequence: TTG
taaaatggaaaagagaaaag

SEQ ID NO: 190696 - DNA, 20 bp, Artificial Sequence
  Description of Artificial Sequence: Synthetic oligonucleotide
  Target: LAMA2; (-) strand; PAM type: YTN; PAM sequence: TTG
attgtaaaatggaaaagaga

SEQ ID NO: 190697 - DNA, 20 bp, Artificial Sequence
  Description of Artificial Sequence: Synthetic oligonucleotide
  Target: LAMA2; (-) strand; PAM type: YTN; PAM sequence: TTG
catggaaaattgattgtaaa

SEQ ID NO: 190698 - DNA, 20 bp, Artificial Sequence
  Description of Artificial Sequence: Synthetic oligonucleotide
  Target: LAMA2; (-) strand; PAM type: YTN; PAM sequence: CTA
ttgcatggaaaattgattgt

SEQ ID NO: 190699 - DNA, 20 bp, Artificial Sequence
  Description of Artificial Sequence: Synthetic oligonucleotide
  Target: LAMA2; (-) strand; PAM type: YTN; PAM sequence: TTG
cctattgcatggaaaattga

SEQ ID NO: 190700 - DNA, 20 bp, Artificial Sequence
  Description of Artificial Sequence: Synthetic oligonucleotide
  Target: LAMA2; (-) strand; PAM type: YTN; PAM sequence: TTT
gcctattgcatggaaaattg

SEQ ID NO: 190701 - DNA, 20 bp, Artificial Sequence
  Description of Artificial Sequence: Synthetic oligonucleotide
  Target: LAMA2; (-) strand; PAM type: YTN; PAM sequence: CTT
tgcctattgcatggaaaatt

SEQ ID NO: 190702 - DNA, 20 bp, Artificial Sequence
  Description of Artificial Sequence: Synthetic oligonucleotide
  Target: LAMA2; (-) strand; PAM type: YTN; PAM sequence: TTC
actttgcctattgcatggaa

SEQ ID NO: 190703 - DNA, 20 bp, Artificial Sequence
  Description of Artificial Sequence: Synthetic oligonucleotide
  Target: LAMA2; (-) strand; PAM type: YTN; PAM sequence: TTC
agagttcactttgcctattg

SEQ ID NO: 190704 - DNA, 20 bp, Artificial Sequence
  Description of Artificial Sequence: Synthetic oligonucleotide
  Target: LAMA2; (-) strand; PAM type: YTN; PAM sequence: TTT
cagagttcactttgcctatt

SEQ ID NO: 190705 - DNA, 20 bp, Artificial Sequence
  Description of Artificial Sequence: Synthetic oligonucleotide
  Target: LAMA2; (-) strand; PAM type: YTN; PAM sequence: TTT
tcagagttcactttgcctat

SEQ ID NO: 190706 - DNA, 20 bp, Artificial Sequence
  Description of Artificial Sequence: Synthetic oligonucleotide
  Target: LAMA2; (-) strand; PAM type: YTN; PAM sequence: CTA
ttttcagagttcactttgcc

SEQ ID NO: 190707 - DNA, 20 bp, Artificial Sequence
  Description of Artificial Sequence: Synthetic oligonucleotide
  Target: LAMA2; (-) strand; PAM type: YTN; PAM sequence: TTA
ctattttcagagttcacttt

SEQ ID NO: 190708 - DNA, 20 bp, Artificial Sequence
  Description of Artificial Sequence: Synthetic oligonucleotide
  Target: LAMA2; (-) strand; PAM type: YTN; PAM sequence: TTT
actattttcagagttcactt

SEQ ID NO: 190709 - DNA, 20 bp, Artificial Sequence
  Description of Artificial Sequence: Synthetic oligonucleotide
  Target: LAMA2; (-) strand; PAM type: YTN; PAM sequence: CTG
atttactattttcagagttc

SEQ ID NO: 190710 - DNA, 20 bp, Artificial Sequence
  Description of Artificial Sequence: Synthetic oligonucleotide
  Target: LAMA2; (-) strand; PAM type: YTN; PAM sequence: CTA
atctgatttactattttcag

SEQ ID NO: 190711 - DNA, 20 bp, Artificial Sequence
  Description of Artificial Sequence: Synthetic oligonucleotide
  Target: LAMA2; (-) strand; PAM type: YTN; PAM sequence: TTA
agcagaggaaagatctaatc

SEQ ID NO: 190712 - DNA, 20 bp, Artificial Sequence
  Description of Artificial Sequence: Synthetic oligonucleotide
  Target: LAMA2; (-) strand; PAM type: YTN; PAM sequence: TTT
aagcagaggaaagatctaat

SEQ ID NO: 190713 - DNA, 20 bp, Artificial Sequence
  Description of Artificial Sequence: Synthetic oligonucleotide
  Target: LAMA2; (-) strand; PAM type: YTN; PAM sequence: TTT
taagcagaggaaagatctaa

SEQ ID NO: 190714 - DNA, 20 bp, Artificial Sequence
  Description of Artificial Sequence: Synthetic oligonucleotide
  Target: LAMA2; (-) strand; PAM type: YTN; PAM sequence: TTG
aaaggttttaagcagaggaa

SEQ ID NO: 190715 - DNA, 20 bp, Artificial Sequence
  Description of Artificial Sequence: Synthetic oligonucleotide
  Target: LAMA2; (-) strand; PAM type: YTN; PAM sequence: TTA
taatagaaatgcattgaaag

SEQ ID NO: 190716 - DNA, 20 bp, Artificial Sequence
  Description of Artificial Sequence: Synthetic oligonucleotide
  Target: LAMA2; (-) strand; PAM type: YTN; PAM sequence: CTT
ataatagaaatgcattgaaa

SEQ ID NO: 190717 - DNA, 20 bp, Artificial Sequence
  Description of Artificial Sequence: Synthetic oligonucleotide
  Target: LAMA2; (-) strand; PAM type: YTN; PAM sequence: TTC
ttataatagaaatgcattga

SEQ ID NO: 190718 - DNA, 20 bp, Artificial Sequence
  Description of Artificial Sequence: Synthetic oligonucleotide
  Target: LAMA2; (-) strand; PAM type: YTN; PAM sequence: TTA
ttcttataatagaaatgcat

SEQ ID NO: 190719 - DNA, 20 bp, Artificial Sequence
  Description of Artificial Sequence: Synthetic oligonucleotide
  Target: LAMA2; (-) strand; PAM type: YTN; PAM sequence: TTT
attcttataatagaaatgca

SEQ ID NO: 190720 - DNA, 20 bp, Artificial Sequence
  Description of Artificial Sequence: Synthetic oligonucleotide
  Target: LAMA2; (-) strand; PAM type: YTN; PAM sequence: TTA
gaatttattcttataataga

SEQ ID NO: 190721 - DNA, 20 bp, Artificial Sequence
  Description of Artificial Sequence: Synthetic oligonucleotide
  Target: LAMA2; (-) strand; PAM type: YTN; PAM sequence: TTT
agaatttattcttataatag

SEQ ID NO: 190722 - DNA, 20 bp, Artificial Sequence
  Description of Artificial Sequence: Synthetic oligonucleotide
  Target: LAMA2; (-) strand; PAM type: YTN; PAM sequence: CTA
atgaatttagaatttattct

SEQ ID NO: 190723 - DNA, 20 bp, Artificial Sequence
  Description of Artificial Sequence: Synthetic oligonucleotide
  Target: LAMA2; (-) strand; PAM type: YTN; PAM sequence: TTA
aaatctaatgaatttagaat

SEQ ID NO: 190724 - DNA, 20 bp, Artificial Sequence
  Description of Artificial Sequence: Synthetic oligonucleotide
  Target: LAMA2; (-) strand; PAM type: YTN; PAM sequence: CTT
aaaatctaatgaatttagaa

SEQ ID NO: 190725 - DNA, 20 bp, Artificial Sequence
  Description of Artificial Sequence: Synthetic oligonucleotide
  Target: LAMA2; (-) strand; PAM type: YTN; PAM sequence: CTG
tcatgaatagacttaaaatc

SEQ ID NO: 190726 - DNA, 20 bp, Artificial Sequence
  Description of Artificial Sequence: Synthetic oligonucleotide
  Target: LAMA2; (-) strand; PAM type: YTN; PAM sequence: TTG
aaatcagagaaaaatacaag

SEQ ID NO: 190727 - DNA, 20 bp, Artificial Sequence
  Description of Artificial Sequence: Synthetic oligonucleotide
  Target: LAMA2; (-) strand; PAM type: YTN; PAM sequence: TTT
gaaatcagagaaaaatacaa

SEQ ID NO: 190728 - DNA, 20 bp, Artificial Sequence
  Description of Artificial Sequence: Synthetic oligonucleotide
  Target: LAMA2; (-) strand; PAM type: YTN; PAM sequence: CTG
gtaaataacagaaaaagaga

SEQ ID NO: 190729 - DNA, 20 bp, Artificial Sequence
  Description of Artificial Sequence: Synthetic oligonucleotide
  Target: LAMA2; (-) strand; PAM type: YTN; PAM sequence: TTG
ctggtaaataacagaaaaag

SEQ ID NO: 190730 - DNA, 20 bp, Artificial Sequence
  Description of Artificial Sequence: Synthetic oligonucleotide
  Target: LAMA2; (-) strand; PAM type: YTN; PAM sequence: CTG
ttgctggtaaataacagaaa

SEQ ID NO: 190731 - DNA, 20 bp, Artificial Sequence
  Description of Artificial Sequence: Synthetic oligonucleotide
  Target: LAMA2; (-) strand; PAM type: YTN; PAM sequence: TTA
ctgttgctggtaaataacag

SEQ ID NO: 190732 - DNA, 20 bp, Artificial Sequence
  Description of Artificial Sequence: Synthetic oligonucleotide
  Target: LAMA2; (-) strand; PAM type: YTN; PAM sequence: TTT
actgttgctggtaaataaca

SEQ ID NO: 190733 - DNA, 20 bp, Artificial Sequence
  Description of Artificial Sequence: Synthetic oligonucleotide
  Target: LAMA2; (-) strand; PAM type: YTN; PAM sequence: CTT
tactgttgctggtaaataac

SEQ ID NO: 190734 - DNA, 20 bp, Artificial Sequence
  Description of Artificial Sequence: Synthetic oligonucleotide
  Target: LAMA2; (-) strand; PAM type: YTN; PAM sequence: TTG
agacggaaaaaaagtcttta

SEQ ID NO: 190735 - DNA, 20 bp, Artificial Sequence
  Description of Artificial Sequence: Synthetic oligonucleotide
  Target: LAMA2; (-) strand; PAM type: YTN; PAM sequence: CTT
gagacggaaaaaaagtcttt

SEQ ID NO: 190736 - DNA, 20 bp, Artificial Sequence
  Description of Artificial Sequence: Synthetic oligonucleotide
  Target: LAMA2; (-) strand; PAM type: YTN; PAM sequence: CTG
gacagaggaacagcaaggac

SEQ ID NO: 190737 - DNA, 20 bp, Artificial Sequence
  Description of Artificial Sequence: Synthetic oligonucleotide
  Target: LAMA2; (-) strand; PAM type: YTN; PAM sequence: CTC
tggacagaggaacagcaagg

SEQ ID NO: 190738 - DNA, 20 bp, Artificial Sequence
  Description of Artificial Sequence: Synthetic oligonucleotide
  Target: LAMA2; (-) strand; PAM type: YTN; PAM sequence: CTA
atggaacaatgctctggaca

SEQ ID NO: 190739 - DNA, 20 bp, Artificial Sequence
  Description of Artificial Sequence: Synthetic oligonucleotide
  Target: LAMA2; (-) strand; PAM type: YTN; PAM sequence: TTG
agaaggagacagccatcagg

SEQ ID NO: 190740 - DNA, 20 bp, Artificial Sequence
  Description of Artificial Sequence: Synthetic oligonucleotide
  Target: LAMA2; (-) strand; PAM type: YTN; PAM sequence: TTG
gaatattgagaaggagacag

SEQ ID NO: 190741 - DNA, 20 bp, Artificial Sequence
  Description of Artificial Sequence: Synthetic oligonucleotide
  Target: LAMA2; (-) strand; PAM type: YTN; PAM sequence: TTG
acatgagattggaatattga

SEQ ID NO: 190742 - DNA, 20 bp, Artificial Sequence
  Description of Artificial Sequence: Synthetic oligonucleotide
  Target: LAMA2; (-) strand; PAM type: YTN; PAM sequence: TTT
gacatgagattggaatattg

SEQ ID NO: 190743 - DNA, 20 bp, Artificial Sequence
  Description of Artificial Sequence: Synthetic oligonucleotide
  Target: LAMA2; (-) strand; PAM type: YTN; PAM sequence: CTG
taagaggtgacatttgacat

SEQ ID NO: 190744 - DNA, 20 bp, Artificial Sequence
  Description of Artificial Sequence: Synthetic oligonucleotide
  Target: LAMA2; (-) strand; PAM type: YTN; PAM sequence: CTC
tgtaagaggtgacatttgac

SEQ ID NO: 190745 - DNA, 20 bp, Artificial Sequence
  Description of Artificial Sequence: Synthetic oligonucleotide
  Target: LAMA2; (-) strand; PAM type: YTN; PAM sequence: CTG
gaaaggcctctgtaagaggt

SEQ ID NO: 190746 - DNA, 20 bp, Artificial Sequence
  Description of Artificial Sequence: Synthetic oligonucleotide
  Target: LAMA2; (-) strand; PAM type: YTN; PAM sequence: CTC
tggaaaggcctctgtaagag

SEQ ID NO: 190747 - DNA, 20 bp, Artificial Sequence
  Description of Artificial Sequence: Synthetic oligonucleotide
  Target: LAMA2; (-) strand; PAM type: YTN; PAM sequence: TTA
aagtggtcctctggaaaggc

SEQ ID NO: 190748 - DNA, 20 bp, Artificial Sequence
  Description of Artificial Sequence: Synthetic oligonucleotide
  Target: LAMA2; (-) strand; PAM type: YTN; PAM sequence: TTT
aaagtggtcctctggaaagg

SEQ ID NO: 190749 - DNA, 20 bp, Artificial Sequence
  Description of Artificial Sequence: Synthetic oligonucleotide
  Target: LAMA2; (-) strand; PAM type: YTN; PAM sequence: CTA
atttaaagtggtcctctgga

SEQ ID NO: 190750 - DNA, 20 bp, Artificial Sequence
  Description of Artificial Sequence: Synthetic oligonucleotide
  Target: LAMA2; (-) strand; PAM type: YTN; PAM sequence: CTG
acagaagctaatttaaagtg

SEQ ID NO: 190751 - DNA, 20 bp, Artificial Sequence
  Description of Artificial Sequence: Synthetic oligonucleotide
  Target: LAMA2; (-) strand; PAM type: YTN; PAM sequence: TTA
caacagggagatgagtgcct

SEQ ID NO: 190752 - DNA, 20 bp, Artificial Sequence
  Description of Artificial Sequence: Synthetic oligonucleotide
  Target: LAMA2; (-) strand; PAM type: YTN; PAM sequence: TTC
aaagaaattacaacagggag

SEQ ID NO: 190753 - DNA, 20 bp, Artificial Sequence
  Description of Artificial Sequence: Synthetic oligonucleotide
  Target: LAMA2; (-) strand; PAM type: YTN; PAM sequence: TTG
ttcaaagaaattacaacagg

SEQ ID NO: 190754 - DNA, 20 bp, Artificial Sequence
  Description of Artificial Sequence: Synthetic oligonucleotide
  Target: LAMA2; (-) strand; PAM type: YTN; PAM sequence: TTA
attgttcaaagaaattacaa

SEQ ID NO: 190755 - DNA, 20 bp, Artificial Sequence
  Description of Artificial Sequence: Synthetic oligonucleotide
  Target: LAMA2; (-) strand; PAM type: YTN; PAM sequence: TTT
aattgttcaaagaaattaca

SEQ ID NO: 190756 - DNA, 20 bp, Artificial Sequence
  Description of Artificial Sequence: Synthetic oligonucleotide
  Target: LAMA2; (-) strand; PAM type: YTN; PAM sequence: TTC
aagataaacatttaattgtt

SEQ ID NO: 190757 - DNA, 20 bp, Artificial Sequence
  Description of Artificial Sequence: Synthetic oligonucleotide
  Target: LAMA2; (-) strand; PAM type: YTN; PAM sequence: CTG
gggagacaaacaacaaagaa

SEQ ID NO: 190758 - DNA, 20 bp, Artificial Sequence
  Description of Artificial Sequence: Synthetic oligonucleotide
  Target: LAMA2; (-) strand; PAM type: YTN; PAM sequence: TTC
caacagtctggggagacaaa

SEQ ID NO: 190759 - DNA, 20 bp, Artificial Sequence
  Description of Artificial Sequence: Synthetic oligonucleotide
  Target: LAMA2; (-) strand; PAM type: YTN; PAM sequence: TTA
tattccaacagtctggggag

SEQ ID NO: 190760 - DNA, 20 bp, Artificial Sequence
  Description of Artificial Sequence: Synthetic oligonucleotide
  Target: LAMA2; (-) strand; PAM type: YTN; PAM sequence: TTT
atattccaacagtctgggga

SEQ ID NO: 190761 - DNA, 20 bp, Artificial Sequence
  Description of Artificial Sequence: Synthetic oligonucleotide
  Target: LAMA2; (-) strand; PAM type: YTN; PAM sequence: TTA
taacaaaatttatattccaa

SEQ ID NO: 190762 - DNA, 20 bp, Artificial Sequence
  Description of Artificial Sequence: Synthetic oligonucleotide
  Target: LAMA2; (-) strand; PAM type: YTN; PAM sequence: TTT
ataacaaaatttatattcca

SEQ ID NO: 190763 - DNA, 20 bp, Artificial Sequence
  Description of Artificial Sequence: Synthetic oligonucleotide
  Target: LAMA2; (-) strand; PAM type: YTN; PAM sequence: TTT
tataacaaaatttatattcc

SEQ ID NO: 190764 - DNA, 20 bp, Artificial Sequence
  Description of Artificial Sequence: Synthetic oligonucleotide
  Target: LAMA2; (-) strand; PAM type: YTN; PAM sequence: CTG
gagatgaaggccattttata

SEQ ID NO: 190765 - DNA, 20 bp, Artificial Sequence
  Description of Artificial Sequence: Synthetic oligonucleotide
  Target: LAMA2; (-) strand; PAM type: YTN; PAM sequence: CTC
tggagatgaaggccatttta

SEQ ID NO: 190766 - DNA, 20 bp, Artificial Sequence
  Description of Artificial Sequence: Synthetic oligonucleotide
  Target: LAMA2; (-) strand; PAM type: YTN; PAM sequence: CTC
agctctggagatgaaggcca

SEQ ID NO: 190767 - DNA, 20 bp, Artificial Sequence
  Description of Artificial Sequence: Synthetic oligonucleotide
  Target: LAMA2; (-) strand; PAM type: YTN; PAM sequence: CTC
ctcagctctggagatgaagg

SEQ ID NO: 190768 - DNA, 20 bp, Artificial Sequence
  Description of Artificial Sequence: Synthetic oligonucleotide
  Target: LAMA2; (-) strand; PAM type: YTN; PAM sequence: TTA
tgtatctcctcagctctgga

SEQ ID NO: 190769 - DNA, 20 bp, Artificial Sequence
  Description of Artificial Sequence: Synthetic oligonucleotide
  Target: LAMA2; (-) strand; PAM type: YTN; PAM sequence: TTT
atgtatctcctcagctctgg

SEQ ID NO: 190770 - DNA, 20 bp, Artificial Sequence
  Description of Artificial Sequence: Synthetic oligonucleotide
  Target: LAMA2; (-) strand; PAM type: YTN; PAM sequence: TTC
aaaataaaaaatatttatgt

SEQ ID NO: 190771 - DNA, 20 bp, Artificial Sequence
  Description of Artificial Sequence: Synthetic oligonucleotide
  Target: LAMA2; (-) strand; PAM type: YTN; PAM sequence: TTA
attcaaaataaaaaatattt

SEQ ID NO: 190772 - DNA, 20 bp, Artificial Sequence
  Description of Artificial Sequence: Synthetic oligonucleotide
  Target: LAMA2; (-) strand; PAM type: YTN; PAM sequence: CTG
aacacagccatgtgttaatt

SEQ ID NO: 190773 - DNA, 20 bp, Artificial Sequence
  Description of Artificial Sequence: Synthetic oligonucleotide
  Target: LAMA2; (-) strand; PAM type: YTN; PAM sequence: TTC
agaagagcctgaacacagcc

SEQ ID NO: 190774 - DNA, 20 bp, Artificial Sequence
  Description of Artificial Sequence: Synthetic oligonucleotide
  Target: LAMA2; (-) strand; PAM type: YTN; PAM sequence: TTA
cattcagaagagcctgaaca

SEQ ID NO: 190775 - DNA, 20 bp, Artificial Sequence
  Description of Artificial Sequence: Synthetic oligonucleotide
  Target: LAMA2; (-) strand; PAM type: YTN; PAM sequence: CTC
catggaattacattcagaag

SEQ ID NO: 190776 - DNA, 20 bp, Artificial Sequence
  Description of Artificial Sequence: Synthetic oligonucleotide
  Target: LAMA2; (-) strand; PAM type: YTN; PAM sequence: CTC
ctccatggaattacattcag

SEQ ID NO: 190777 - DNA, 20 bp, Artificial Sequence
  Description of Artificial Sequence: Synthetic oligonucleotide
  Target: LAMA2; (-) strand; PAM type: YTN; PAM sequence: TTG
acctcctccatggaattaca

SEQ ID NO: 190778 - DNA, 20 bp, Artificial Sequence
  Description of Artificial Sequence: Synthetic oligonucleotide
  Target: LAMA2; (-) strand; PAM type: YTN; PAM sequence: TTT
gacctcctccatggaattac

SEQ ID NO: 190779 - DNA, 20 bp, Artificial Sequence
  Description of Artificial Sequence: Synthetic oligonucleotide
  Target: LAMA2; (-) strand; PAM type: YTN; PAM sequence: TTT
tgacctcctccatggaatta

SEQ ID NO: 190780 - DNA, 20 bp, Artificial Sequence
  Description of Artificial Sequence: Synthetic oligonucleotide
  Target: LAMA2; (-) strand; PAM type: YTN; PAM sequence: CTA
catacaggaatccaattttg

SEQ ID NO: 190781 - DNA, 20 bp, Artificial Sequence
  Description of Artificial Sequence: Synthetic oligonucleotide
  Target: LAMA2; (-) strand; PAM type: YTN; PAM sequence: TTC
actacatacaggaatccaat

SEQ ID NO: 190782 - DNA, 20 bp, Artificial Sequence
  Description of Artificial Sequence: Synthetic oligonucleotide
  Target: LAMA2; (-) strand; PAM type: YTN; PAM sequence: CTG
aaaatcataaacgggacaga

SEQ ID NO: 190783 - DNA, 20 bp, Artificial Sequence
  Description of Artificial Sequence: Synthetic oligonucleotide
  Target: LAMA2; (-) strand; PAM type: YTN; PAM sequence: TTA
tataactgaaaatcataaac

SEQ ID NO: 190784 - DNA, 20 bp, Artificial Sequence
  Description of Artificial Sequence: Synthetic oligonucleotide
  Target: LAMA2; (-) strand; PAM type: YTN; PAM sequence: CTA
attatataactgaaaatcat

SEQ ID NO: 190785 - DNA, 20 bp, Artificial Sequence
  Description of Artificial Sequence: Synthetic oligonucleotide
  Target: LAMA2; (-) strand; PAM type: YTN; PAM sequence: CTA
actaattatataactgaaaa

SEQ ID NO: 190786 - DNA, 20 bp, Artificial Sequence
  Description of Artificial Sequence: Synthetic oligonucleotide
  Target: LAMA2; (-) strand; PAM type: YTN; PAM sequence: TTC
taactaattatataactgaa

SEQ ID NO: 190787 - DNA, 20 bp, Artificial Sequence
  Description of Artificial Sequence: Synthetic oligonucleotide
  Target: LAMA2; (-) strand; PAM type: YTN; PAM sequence: CTT
ctaactaattatataactga

SEQ ID NO: 190788 - DNA, 20 bp, Artificial Sequence
  Description of Artificial Sequence: Synthetic oligonucleotide
  Target: LAMA2; (-) strand; PAM type: YTN; PAM sequence: TTG
gtcttctaactaattatata

SEQ ID NO: 190789 - DNA, 20 bp, Artificial Sequence
  Description of Artificial Sequence: Synthetic oligonucleotide
  Target: LAMA2; (-) strand; PAM type: YTN; PAM sequence: TTG
gattggtcttctaactaatt

SEQ ID NO: 190790 - DNA, 20 bp, Artificial Sequence
  Description of Artificial Sequence: Synthetic oligonucleotide
  Target: LAMA2; (-) strand; PAM type: YTN; PAM sequence: CTG
aaatatgattggattggtct

SEQ ID NO: 190791 - DNA, 20 bp, Artificial Sequence
  Description of Artificial Sequence: Synthetic oligonucleotide
  Target: LAMA2; (-) strand; PAM type: YTN; PAM sequence: TTA
tctgaaatatgattggattg

SEQ ID NO: 190792 - DNA, 20 bp, Artificial Sequence
  Description of Artificial Sequence: Synthetic oligonucleotide
  Target: LAMA2; (-) strand; PAM type: YTN; PAM sequence: TTT
atctgaaatatgattggatt

SEQ ID NO: 190793 - DNA, 20 bp, Artificial Sequence
  Description of Artificial Sequence: Synthetic oligonucleotide
  Target: LAMA2; (-) strand; PAM type: YTN; PAM sequence: TTG
aggtttatctgaaatatgat

SEQ ID NO: 190794 - DNA, 20 bp, Artificial Sequence
  Description of Artificial Sequence: Synthetic oligonucleotide
  Target: LAMA2; (-) strand; PAM type: YTN; PAM sequence: CTT
gaggtttatctgaaatatga

SEQ ID NO: 190795 - DNA, 20 bp, Artificial Sequence
  Description of Artificial Sequence: Synthetic oligonucleotide
  Target: LAMA2; (-) strand; PAM type: YTN; PAM sequence: CTC
ttgaggtttatctgaaatat

SEQ ID NO: 190796 - DNA, 20 bp, Artificial Sequence
  Description of Artificial Sequence: Synthetic oligonucleotide
  Target: LAMA2; (-) strand; PAM type: YTN; PAM sequence: TTG
ctcttgaggtttatctgaaa

SEQ ID NO: 190797 - DNA, 20 bp, Artificial Sequence
  Description of Artificial Sequence: Synthetic oligonucleotide
  Target: LAMA2; (-) strand; PAM type: YTN; PAM sequence: CTG
ccatagcaattgctcttgag

SEQ ID NO: 190798 - DNA, 20 bp, Artificial Sequence
  Description of Artificial Sequence: Synthetic oligonucleotide
  Target: LAMA2; (-) strand; PAM type: YTN; PAM sequence: CTC
tgccatagcaattgctcttg

SEQ ID NO: 190799 - DNA, 20 bp, Artificial Sequence
  Description of Artificial Sequence: Synthetic oligonucleotide
  Target: LAMA2; (-) strand; PAM type: YTN; PAM sequence: TTC
tctgccatagcaattgctct

SEQ ID NO: 190800 - DNA, 20 bp, Artificial Sequence
  Description of Artificial Sequence: Synthetic oligonucleotide
  Target: LAMA2; (-) strand; PAM type: YTN; PAM sequence: CTA
gttctctgccatagcaattg

SEQ ID NO: 190801 - DNA, 20 bp, Artificial Sequence
  Description of Artificial Sequence: Synthetic oligonucleotide
  Target: LAMA2; (-) strand; PAM type: YTN; PAM sequence: TTC
tagttctctgccatagcaat

SEQ ID NO: 190802 - DNA, 20 bp, Artificial Sequence
  Description of Artificial Sequence: Synthetic oligonucleotide
  Target: LAMA2; (-) strand; PAM type: YTN; PAM sequence: CTT
ctagttctctgccatagcaa

SEQ ID NO: 190803 - DNA, 20 bp, Artificial Sequence
  Description of Artificial Sequence: Synthetic oligonucleotide
  Target: LAMA2; (-) strand; PAM type: YTN; PAM sequence: TTA
aatacccttctagttctctg

SEQ ID NO: 190804 - DNA, 20 bp, Artificial Sequence
  Description of Artificial Sequence: Synthetic oligonucleotide
  Target: LAMA2; (-) strand; PAM type: YTN; PAM sequence: TTG
attaaatacccttctagttc

SEQ ID NO: 190805 - DNA, 20 bp, Artificial Sequence
  Description of Artificial Sequence: Synthetic oligonucleotide
  Target: LAMA2; (-) strand; PAM type: YTN; PAM sequence: CTA
gttgattaaatacccttcta

SEQ ID NO: 190806 - DNA, 20 bp, Artificial Sequence
  Description of Artificial Sequence: Synthetic oligonucleotide
  Target: LAMA2; (-) strand; PAM type: YTN; PAM sequence: TTG
gaaaaggaactagttgatta

SEQ ID NO: 190807 - DNA, 20 bp, Artificial Sequence
  Description of Artificial Sequence: Synthetic oligonucleotide
  Target: LAMA2; (-) strand; PAM type: YTN; PAM sequence: CTT
ggaaaaggaactagttgatt

SEQ ID NO: 190808 - DNA, 20 bp, Artificial Sequence
  Description of Artificial Sequence: Synthetic oligonucleotide
  Target: LAMA2; (-) strand; PAM type: YTN; PAM sequence: CTA
aagatcttggaaaaggaact

SEQ ID NO: 190809 - DNA, 20 bp, Artificial Sequence
  Description of Artificial Sequence: Synthetic oligonucleotide
  Target: LAMA2; (-) strand; PAM type: YTN; PAM sequence: TTA
aagagctaaagatcttggaa

SEQ ID NO: 190810 - DNA, 20 bp, Artificial Sequence
  Description of Artificial Sequence: Synthetic oligonucleotide
  Target: LAMA2; (-) strand; PAM type: YTN; PAM sequence: CTG
ttaaagagctaaagatcttg

SEQ ID NO: 190811 - DNA, 20 bp, Artificial Sequence
  Description of Artificial Sequence: Synthetic oligonucleotide
  Target: LAMA2; (-) strand; PAM type: YTN; PAM sequence: TTA
taactgttaaagagctaaag

SEQ ID NO: 190812 - DNA, 20 bp, Artificial Sequence
  Description of Artificial Sequence: Synthetic oligonucleotide
  Target: LAMA2; (-) strand; PAM type: YTN; PAM sequence: TTT
ataactgttaaagagctaaa

SEQ ID NO: 190813 - DNA, 20 bp, Artificial Sequence
  Description of Artificial Sequence: Synthetic oligonucleotide
  Target: LAMA2; (-) strand; PAM type: YTN; PAM sequence: TTA
atttataactgttaaagagc

SEQ ID NO: 190814 - DNA, 20 bp, Artificial Sequence
  Description of Artificial Sequence: Synthetic oligonucleotide
  Target: LAMA2; (-) strand; PAM type: YTN; PAM sequence: TTA
ttaatttataactgttaaag

SEQ ID NO: 190815 - DNA, 20 bp, Artificial Sequence
  Description of Artificial Sequence: Synthetic oligonucleotide
  Target: LAMA2; (-) strand; PAM type: YTN; PAM sequence: TTT
attaatttataactgttaaa

SEQ ID NO: 190816 - DNA, 20 bp, Artificial Sequence
  Description of Artificial Sequence: Synthetic oligonucleotide
  Target: LAMA2; (-) strand; PAM type: YTN; PAM sequence: CTT
tattaatttataactgttaa

SEQ ID NO: 190817 - DNA, 20 bp, Artificial Sequence
  Description of Artificial Sequence: Synthetic oligonucleotide
  Target: LAMA2; (-) strand; PAM type: YTN; PAM sequence: TTA
tataacatactttattaatt

SEQ ID NO: 190818 - DNA, 20 bp, Artificial Sequence
  Description of Artificial Sequence: Synthetic oligonucleotide
  Target: LAMA2; (-) strand; PAM type: YTN; PAM sequence: CTA
gcattatataacatacttta

SEQ ID NO: 190819 - DNA, 20 bp, Artificial Sequence
  Description of Artificial Sequence: Synthetic oligonucleotide
  Target: LAMA2; (-) strand; PAM type: YTN; PAM sequence: CTG
gagataaagcaacagaaaca

SEQ ID NO: 190820 - DNA, 20 bp, Artificial Sequence
  Description of Artificial Sequence: Synthetic oligonucleotide
  Target: LAMA2; (-) strand; PAM type: YTN; PAM sequence: CTA
gaagctggagataaagcaac

SEQ ID NO: 190821 - DNA, 20 bp, Artificial Sequence
  Description of Artificial Sequence: Synthetic oligonucleotide
  Target: LAMA2; (-) strand; PAM type: YTN; PAM sequence: CTA
ccatatgtcagactagaagc

SEQ ID NO: 190822 - DNA, 20 bp, Artificial Sequence
  Description of Artificial Sequence: Synthetic oligonucleotide
  Target: LAMA2; (-) strand; PAM type: YTN; PAM sequence: TTG
agtgcctaccatatgtcaga

SEQ ID NO: 190823 - DNA, 20 bp, Artificial Sequence
  Description of Artificial Sequence: Synthetic oligonucleotide
  Target: LAMA2; (-) strand; PAM type: YTN; PAM sequence: TTT
gagtgcctaccatatgtcag

SEQ ID NO: 190824 - DNA, 20 bp, Artificial Sequence
  Description of Artificial Sequence: Synthetic oligonucleotide
  Target: LAMA2; (-) strand; PAM type: YTN; PAM sequence: TTT
tgagtgcctaccatatgtca

SEQ ID NO: 190825 - DNA, 20 bp, Artificial Sequence
  Description of Artificial Sequence: Synthetic oligonucleotide
  Target: LAMA2; (-) strand; PAM type: YTN; PAM sequence: TTT
ttgagtgcctaccatatgtc

SEQ ID NO: 190826 - DNA, 20 bp, Artificial Sequence
  Description of Artificial Sequence: Synthetic oligonucleotide
  Target: LAMA2; (-) strand; PAM type: YTN; PAM sequence: TTC
atccaatttttgagtgccta

SEQ ID NO: 190827 - DNA, 20 bp, Artificial Sequence
  Description of Artificial Sequence: Synthetic oligonucleotide
  Target: LAMA2; (-) strand; PAM type: YTN; PAM sequence: CTT
catccaatttttgagtgcct

SEQ ID NO: 190828 - DNA, 20 bp, Artificial Sequence
  Description of Artificial Sequence: Synthetic oligonucleotide
  Target: LAMA2; (-) strand; PAM type: YTN; PAM sequence: TTC
ttcatccaatttttgagtgc

SEQ ID NO: 190829 - DNA, 20 bp, Artificial Sequence
  Description of Artificial Sequence: Synthetic oligonucleotide
  Target: LAMA2; (-) strand; PAM type: YTN; PAM sequence: CTT
cttcatccaatttttgagtg

SEQ ID NO: 190830 - DNA, 20 bp, Artificial Sequence
  Description of Artificial Sequence: Synthetic oligonucleotide
  Target: LAMA2; (-) strand; PAM type: YTN; PAM sequence: CTG
cttcttcatccaatttttga

SEQ ID NO: 190831 - DNA, 20 bp, Artificial Sequence
  Description of Artificial Sequence: Synthetic oligonucleotide
  Target: LAMA2; (-) strand; PAM type: YTN; PAM sequence: CTG
tccaaaaagagctgcttctt

SEQ ID NO: 190832 - DNA, 20 bp, Artificial Sequence
  Description of Artificial Sequence: Synthetic oligonucleotide
  Target: LAMA2; (-) strand; PAM type: YTN; PAM sequence: TTG
gtctgtccaaaaagagctgc

SEQ ID NO: 190833 - DNA, 20 bp, Artificial Sequence
  Description of Artificial Sequence: Synthetic oligonucleotide
  Target: LAMA2; (-) strand; PAM type: YTN; PAM sequence: CTT
ggtctgtccaaaaagagctg

SEQ ID NO: 190834 - DNA, 20 bp, Artificial Sequence
  Description of Artificial Sequence: Synthetic oligonucleotide
  Target: LAMA2; (-) strand; PAM type: YTN; PAM sequence: CTC
ttggtctgtccaaaaagagc

SEQ ID NO: 190835 - DNA, 20 bp, Artificial Sequence
  Description of Artificial Sequence: Synthetic oligonucleotide
  Target: LAMA2; (-) strand; PAM type: YTN; PAM sequence: TTA
aaaggcaacactcttggtct

SEQ ID NO: 190836 - DNA, 20 bp, Artificial Sequence
  Description of Artificial Sequence: Synthetic oligonucleotide
  Target: LAMA2; (-) strand; PAM type: YTN; PAM sequence: TTT
aaaaggcaacactcttggtc

SEQ ID NO: 190837 - DNA, 20 bp, Artificial Sequence
  Description of Artificial Sequence: Synthetic oligonucleotide
  Target: LAMA2; (-) strand; PAM type: YTN; PAM sequence: TTT
taaaaggcaacactcttggt

SEQ ID NO: 190838 - DNA, 20 bp, Artificial Sequence
  Description of Artificial Sequence: Synthetic oligonucleotide
  Target: LAMA2; (-) strand; PAM type: YTN; PAM sequence: CTA
taaaaggatcagggggaaaa

SEQ ID NO: 190839 - DNA, 20 bp, Artificial Sequence
  Description of Artificial Sequence: Synthetic oligonucleotide
  Target: LAMA2; (-) strand; PAM type: YTN; PAM sequence: TTC
atactataaaaggatcaggg

SEQ ID NO: 190840 - DNA, 20 bp, Artificial Sequence
  Description of Artificial Sequence: Synthetic oligonucleotide
  Target: LAMA2; (-) strand; PAM type: YTN; PAM sequence: TTC
attcatactataaaaggatc

SEQ ID NO: 190841 - DNA, 20 bp, Artificial Sequence
  Description of Artificial Sequence: Synthetic oligonucleotide
  Target: LAMA2; (-) strand; PAM type: YTN; PAM sequence: TTA
tacaaacattcattcatact

SEQ ID NO: 190842 - DNA, 20 bp, Artificial Sequence
  Description of Artificial Sequence: Synthetic oligonucleotide
  Target: LAMA2; (-) strand; PAM type: YTN; PAM sequence: CTT
atacaaacattcattcatac

SEQ ID NO: 190843 - DNA, 20 bp, Artificial Sequence
  Description of Artificial Sequence: Synthetic oligonucleotide
  Target: LAMA2; (-) strand; PAM type: YTN; PAM sequence: TTA
tgtcttatacaaacattcat

SEQ ID NO: 190844 - DNA, 20 bp, Artificial Sequence
  Description of Artificial Sequence: Synthetic oligonucleotide
  Target: LAMA2; (-) strand; PAM type: YTN; PAM sequence: TTT
atgtcttatacaaacattca

SEQ ID NO: 190845 - DNA, 20 bp, Artificial Sequence
  Description of Artificial Sequence: Synthetic oligonucleotide
  Target: LAMA2; (-) strand; PAM type: YTN; PAM sequence: TTG
tagaaatttatgtcttatac

SEQ ID NO: 190846 - DNA, 20 bp, Artificial Sequence
  Description of Artificial Sequence: Synthetic oligonucleotide
  Target: LAMA2; (-) strand; PAM type: YTN; PAM sequence: TTT
gtagaaatttatgtcttata

SEQ ID NO: 190847 - DNA, 20 bp, Artificial Sequence
  Description of Artificial Sequence: Synthetic oligonucleotide
  Target: LAMA2; (-) strand; PAM type: YTN; PAM sequence: TTC
agtatttgtagaaatttatg

SEQ ID NO: 190848 - DNA, 20 bp, Artificial Sequence
  Description of Artificial Sequence: Synthetic oligonucleotide
  Target: LAMA2; (-) strand; PAM type: YTN; PAM sequence: TTT
cagtatttgtagaaatttat

SEQ ID NO: 190849 - DNA, 20 bp, Artificial Sequence
  Description of Artificial Sequence: Synthetic oligonucleotide
  Target: LAMA2; (-) strand; PAM type: YTN; PAM sequence: CTG
tgtttcagtatttgtagaaa

SEQ ID NO: 190850 - DNA, 20 bp, Artificial Sequence
  Description of Artificial Sequence: Synthetic oligonucleotide
  Target: LAMA2; (-) strand; PAM type: YTN; PAM sequence: CTG
tccatactgtgtttcagtat

SEQ ID NO: 190851 - DNA, 20 bp, Artificial Sequence
  Description of Artificial Sequence: Synthetic oligonucleotide
  Target: LAMA2; (-) strand; PAM type: YTN; PAM sequence: CTC
atatctgtccatactgtgtt

SEQ ID NO: 190852 - DNA, 20 bp, Artificial Sequence
  Description of Artificial Sequence: Synthetic oligonucleotide
  Target: LAMA2; (-) strand; PAM type: YTN; PAM sequence: TTA
ataataataactcatatctg

SEQ ID NO: 190853 - DNA, 20 bp, Artificial Sequence
  Description of Artificial Sequence: Synthetic oligonucleotide
  Target: LAMA2; (-) strand; PAM type: YTN; PAM sequence: CTA
ggtgatattaataataataa

SEQ ID NO: 190854 - DNA, 20 bp, Artificial Sequence
  Description of Artificial Sequence: Synthetic oligonucleotide
  Target: LAMA2; (-) strand; PAM type: YTN; PAM sequence: TTA
tctaggtgatattaataata

SEQ ID NO: 190855 - DNA, 20 bp, Artificial Sequence
  Description of Artificial Sequence: Synthetic oligonucleotide
  Target: LAMA2; (-) strand; PAM type: YTN; PAM sequence: CTA
ttatctaggtgatattaata

SEQ ID NO: 190856 - DNA, 20 bp, Artificial Sequence
  Description of Artificial Sequence: Synthetic oligonucleotide
  Target: LAMA2; (-) strand; PAM type: YTN; PAM sequence: TTA
tctattatctaggtgatatt

SEQ ID NO: 190857 - DNA, 20 bp, Artificial Sequence
  Description of Artificial Sequence: Synthetic oligonucleotide
  Target: LAMA2; (-) strand; PAM type: YTN; PAM sequence: TTT
atctattatctaggtgatat

SEQ ID NO: 190858 - DNA, 20 bp, Artificial Sequence
  Description of Artificial Sequence: Synthetic oligonucleotide
  Target: LAMA2; (-) strand; PAM type: YTN; PAM sequence: TTT
tatctattatctaggtgata

SEQ ID NO: 190859 - DNA, 20 bp, Artificial Sequence
  Description of Artificial Sequence: Synthetic oligonucleotide
  Target: LAMA2; (-) strand; PAM type: YTN; PAM sequence: CTA
aaatattttatctattatct

SEQ ID NO: 190860 - DNA, 20 bp, Artificial Sequence
  Description of Artificial Sequence: Synthetic oligonucleotide
  Target: LAMA2; (-) strand; PAM type: YTN; PAM sequence: TTC
taaaatattttatctattat

SEQ ID NO: 190861 - DNA, 20 bp, Artificial Sequence
  Description of Artificial Sequence: Synthetic oligonucleotide
  Target: LAMA2; (-) strand; PAM type: YTN; PAM sequence: TTT
ctaaaatattttatctatta

SEQ ID NO: 190862 - DNA, 20 bp, Artificial Sequence
  Description of Artificial Sequence: Synthetic oligonucleotide
  Target: LAMA2; (-) strand; PAM type: YTN; PAM sequence: CTT
tctaaaatattttatctatt

SEQ ID NO: 190863 - DNA, 20 bp, Artificial Sequence
  Description of Artificial Sequence: Synthetic oligonucleotide
  Target: LAMA2; (-) strand; PAM type: YTN; PAM sequence: CTC
actttctaaaatattttatc

SEQ ID NO: 190864 - DNA, 20 bp, Artificial Sequence
  Description of Artificial Sequence: Synthetic oligonucleotide
  Target: LAMA2; (-) strand; PAM type: YTN; PAM sequence: TTA
aggtagcctcactttctaaa

SEQ ID NO: 190865 - DNA, 20 bp, Artificial Sequence
  Description of Artificial Sequence: Synthetic oligonucleotide
  Target: LAMA2; (-) strand; PAM type: YTN; PAM sequence: TTT
aaggtagcctcactttctaa

SEQ ID NO: 190866 - DNA, 20 bp, Artificial Sequence
  Description of Artificial Sequence: Synthetic oligonucleotide
  Target: LAMA2; (-) strand; PAM type: YTN; PAM sequence: CTC
aagaagcaagataatttaag

SEQ ID NO: 190867 - DNA, 20 bp, Artificial Sequence
  Description of Artificial Sequence: Synthetic oligonucleotide
  Target: LAMA2; (-) strand; PAM type: YTN; PAM sequence: TTA
gaggggaaaaaaaaaactca

SEQ ID NO: 190868 - DNA, 20 bp, Artificial Sequence
  Description of Artificial Sequence: Synthetic oligonucleotide
  Target: LAMA2; (-) strand; PAM type: YTN; PAM sequence: CTT
agaggggaaaaaaaaaactc

SEQ ID NO: 190869 - DNA, 20 bp, Artificial Sequence
  Description of Artificial Sequence: Synthetic oligonucleotide
  Target: LAMA2; (-) strand; PAM type: YTN; PAM sequence: CTG
gaatatccttagaggggaaa

SEQ ID NO: 190870 - DNA, 20 bp, Artificial Sequence
  Description of Artificial Sequence: Synthetic oligonucleotide
  Target: LAMA2; (-) strand; PAM type: YTN; PAM sequence: TTA
ctggaatatccttagagggg

SEQ ID NO: 190871 - DNA, 20 bp, Artificial Sequence
  Description of Artificial Sequence: Synthetic oligonucleotide
  Target: LAMA2; (-) strand; PAM type: YTN; PAM sequence: CTT
actggaatatccttagaggg

SEQ ID NO: 190872 - DNA, 20 bp, Artificial Sequence
  Description of Artificial Sequence: Synthetic oligonucleotide
  Target: LAMA2; (-) strand; PAM type: YTN; PAM sequence: CTC
ttactggaatatccttagag

SEQ ID NO: 190873 - DNA, 20 bp, Artificial Sequence
  Description of Artificial Sequence: Synthetic oligonucleotide
  Target: LAMA2; (-) strand; PAM type: YTN; PAM sequence: CTC
aactcttactggaatatcct

SEQ ID NO: 190874 - DNA, 20 bp, Artificial Sequence
  Description of Artificial Sequence: Synthetic oligonucleotide
  Target: LAMA2; (-) strand; PAM type: YTN; PAM sequence: CTG
ctcaactcttactggaatat

SEQ ID NO: 190875 - DNA, 20 bp, Artificial Sequence
  Description of Artificial Sequence: Synthetic oligonucleotide
  Target: LAMA2; (-) strand; PAM type: YTN; PAM sequence: TTA
aatactgctcaactcttact

SEQ ID NO: 190876 - DNA, 20 bp, Artificial Sequence
  Description of Artificial Sequence: Synthetic oligonucleotide
  Target: LAMA2; (-) strand; PAM type: YTN; PAM sequence: CTT
aaatactgctcaactcttac

SEQ ID NO: 190877 - DNA, 20 bp, Artificial Sequence
  Description of Artificial Sequence: Synthetic oligonucleotide
  Target: LAMA2; (-) strand; PAM type: YTN; PAM sequence: TTA
tccaaagcttaaatactgct

SEQ ID NO: 190878 - DNA, 20 bp, Artificial Sequence
  Description of Artificial Sequence: Synthetic oligonucleotide
  Target: LAMA2; (-) strand; PAM type: YTN; PAM sequence: CTT
atccaaagcttaaatactgc

SEQ ID NO: 190879 - DNA, 20 bp, Artificial Sequence
  Description of Artificial Sequence: Synthetic oligonucleotide
  Target: LAMA2; (-) strand; PAM type: YTN; PAM sequence: TTC
cttatccaaagcttaaatac

SEQ ID NO: 190880 - DNA, 20 bp, Artificial Sequence
  Description of Artificial Sequence: Synthetic oligonucleotide
  Target: LAMA2; (-) strand; PAM type: YTN; PAM sequence: CTA
agccaagaaatatgcattcc

SEQ ID NO: 190881 - DNA, 20 bp, Artificial Sequence
  Description of Artificial Sequence: Synthetic oligonucleotide
  Target: LAMA2; (-) strand; PAM type: YTN; PAM sequence: CTG
actaagccaagaaatatgca

SEQ ID NO: 190882 - DNA, 20 bp, Artificial Sequence
  Description of Artificial Sequence: Synthetic oligonucleotide
  Target: LAMA2; (-) strand; PAM type: YTN; PAM sequence: TTC
tgactaagccaagaaatatg

SEQ ID NO: 190883 - DNA, 20 bp, Artificial Sequence
  Description of Artificial Sequence: Synthetic oligonucleotide
  Target: LAMA2; (-) strand; PAM type: YTN; PAM sequence: TTC
catccagaaaagttctgact

SEQ ID NO: 190884 - DNA, 20 bp, Artificial Sequence
  Description of Artificial Sequence: Synthetic oligonucleotide
  Target: LAMA2; (-) strand; PAM type: YTN; PAM sequence: CTT
ccatccagaaaagttctgac

SEQ ID NO: 190885 - DNA, 20 bp, Artificial Sequence
  Description of Artificial Sequence: Synthetic oligonucleotide
  Target: LAMA2; (-) strand; PAM type: YTN; PAM sequence: CTC
atccaaaaagaccttccatc

SEQ ID NO: 190886 - DNA, 20 bp, Artificial Sequence
  Description of Artificial Sequence: Synthetic oligonucleotide
  Target: LAMA2; (-) strand; PAM type: YTN; PAM sequence: TTC
tcatccaaaaagaccttcca

SEQ ID NO: 190887 - DNA, 20 bp, Artificial Sequence
  Description of Artificial Sequence: Synthetic oligonucleotide
  Target: LAMA2; (-) strand; PAM type: YTN; PAM sequence: TTA
tgtagtataattctcatcca

SEQ ID NO: 190888 - DNA, 20 bp, Artificial Sequence
  Description of Artificial Sequence: Synthetic oligonucleotide
  Target: LAMA2; (-) strand; PAM type: YTN; PAM sequence: CTT
atgtagtataattctcatcc

SEQ ID NO: 190889 - DNA, 20 bp, Artificial Sequence
  Description of Artificial Sequence: Synthetic oligonucleotide
  Target: LAMA2; (-) strand; PAM type: YTN; PAM sequence: TTA
atcttatgtagtataattct

SEQ ID NO: 190890 - DNA, 20 bp, Artificial Sequence
  Description of Artificial Sequence: Synthetic oligonucleotide
  Target: LAMA2; (-) strand; PAM type: YTN; PAM sequence: TTT
aatcttatgtagtataattc

SEQ ID NO: 190891 - DNA, 20 bp, Artificial Sequence
  Description of Artificial Sequence: Synthetic oligonucleotide
  Target: LAMA2; (-) strand; PAM type: YTN; PAM sequence: TTT
taatcttatgtagtataatt

SEQ ID NO: 190892 - DNA, 20 bp, Artificial Sequence
  Description of Artificial Sequence: Synthetic oligonucleotide
  Target: LAMA2; (-) strand; PAM type: YTN; PAM sequence: TTA
aatgggcattttaatcttat

SEQ ID NO: 190893 - DNA, 20 bp, Artificial Sequence
  Description of Artificial Sequence: Synthetic oligonucleotide
  Target: LAMA2; (-) strand; PAM type: YTN; PAM sequence: CTT
aaatgggcattttaatctta

SEQ ID NO: 190894 - DNA, 20 bp, Artificial Sequence
  Description of Artificial Sequence: Synthetic oligonucleotide
  Target: LAMA2; (-) strand; PAM type: YTN; PAM sequence: TTA
catcttaaatgggcatttta

SEQ ID NO: 190895 - DNA, 20 bp, Artificial Sequence
  Description of Artificial Sequence: Synthetic oligonucleotide
  Target: LAMA2; (-) strand; PAM type: YTN; PAM sequence: TTT
acatcttaaatgggcatttt

SEQ ID NO: 190896 - DNA, 20 bp, Artificial Sequence
  Description of Artificial Sequence: Synthetic oligonucleotide
  Target: LAMA2; (-) strand; PAM type: YTN; PAM sequence: CTA
taatttacatcttaaatggg

SEQ ID NO: 190897 - DNA, 20 bp, Artificial Sequence
  Description of Artificial Sequence: Synthetic oligonucleotide
  Target: LAMA2; (-) strand; PAM type: YTN; PAM sequence: TTA
tccctataatttacatctta

SEQ ID NO: 190898 - DNA, 20 bp, Artificial Sequence
  Description of Artificial Sequence: Synthetic oligonucleotide
  Target: LAMA2; (-) strand; PAM type: YTN; PAM sequence: TTT
atccctataatttacatctt

SEQ ID NO: 190899 - DNA, 20 bp, Artificial Sequence
  Description of Artificial Sequence: Synthetic oligonucleotide
  Target: LAMA2; (-) strand; PAM type: YTN; PAM sequence: TTT
tatccctataatttacatct

SEQ ID NO: 190900 - DNA, 20 bp, Artificial Sequence
  Description of Artificial Sequence: Synthetic oligonucleotide
  Target: LAMA2; (-) strand; PAM type: YTN; PAM sequence: CTA
tattttatccctataattta

SEQ ID NO: 190901 - DNA, 20 bp, Artificial Sequence
  Description of Artificial Sequence: Synthetic oligonucleotide
  Target: LAMA2; (-) strand; PAM type: YTN; PAM sequence: TTA
tctatattttatccctataa

SEQ ID NO: 190902 - DNA, 20 bp, Artificial Sequence
  Description of Artificial Sequence: Synthetic oligonucleotide
  Target: LAMA2; (-) strand; PAM type: YTN; PAM sequence: CTA
aaaagaaacaaagaaaaatg

SEQ ID NO: 190903 - DNA, 20 bp, Artificial Sequence
  Description of Artificial Sequence: Synthetic oligonucleotide
  Target: LAMA2; (-) strand; PAM type: YTN; PAM sequence: TTG
gtggtatctaaaaagaaaca

SEQ ID NO: 190904 - DNA, 20 bp, Artificial Sequence
  Description of Artificial Sequence: Synthetic oligonucleotide
  Target: LAMA2; (-) strand; PAM type: YTN; PAM sequence: TTT
ggtggtatctaaaaagaaac

SEQ ID NO: 190905 - DNA, 20 bp, Artificial Sequence
  Description of Artificial Sequence: Synthetic oligonucleotide
  Target: LAMA2; (-) strand; PAM type: YTN; PAM sequence: CTT
tggtggtatctaaaaagaaa

SEQ ID NO: 190906 - DNA, 20 bp, Artificial Sequence
  Description of Artificial Sequence: Synthetic oligonucleotide
  Target: LAMA2; (-) strand; PAM type: YTN; PAM sequence: CTG
aaataggaaggactttggtg

SEQ ID NO: 190907 - DNA, 20 bp, Artificial Sequence
  Description of Artificial Sequence: Synthetic oligonucleotide
  Target: LAMA2; (-) strand; PAM type: YTN; PAM sequence: TTG
cctgaaataggaaggacttt

SEQ ID NO: 190908 - DNA, 20 bp, Artificial Sequence
  Description of Artificial Sequence: Synthetic oligonucleotide
  Target: LAMA2; (-) strand; PAM type: YTN; PAM sequence: TTT
gcctgaaataggaaggactt

SEQ ID NO: 190909 - DNA, 20 bp, Artificial Sequence
  Description of Artificial Sequence: Synthetic oligonucleotide
  Target: LAMA2; (-) strand; PAM type: YTN; PAM sequence: TTT
tgcctgaaataggaaggact

SEQ ID NO: 190910 - DNA, 20 bp, Artificial Sequence
  Description of Artificial Sequence: Synthetic oligonucleotide
  Target: LAMA2; (-) strand; PAM type: YTN; PAM sequence: TTT
ttgcctgaaataggaaggac

SEQ ID NO: 190911 - DNA, 20 bp, Artificial Sequence
  Description of Artificial Sequence: Synthetic oligonucleotide
  Target: LAMA2; (-) strand; PAM type: YTN; PAM sequence: CTT
tttgcctgaaataggaagga

SEQ ID NO: 190912 - DNA, 20 bp, Artificial Sequence
  Description of Artificial Sequence: Synthetic oligonucleotide
  Target: LAMA2; (-) strand; PAM type: YTN; PAM sequence: TTA
aaacatatctttttgcctga

SEQ ID NO: 190913 - DNA, 20 bp, Artificial Sequence
  Description of Artificial Sequence: Synthetic oligonucleotide
  Target: LAMA2; (-) strand; PAM type: YTN; PAM sequence: TTT
aaaacatatctttttgcctg

SEQ ID NO: 190914 - DNA, 20 bp, Artificial Sequence
  Description of Artificial Sequence: Synthetic oligonucleotide
  Target: LAMA2; (-) strand; PAM type: YTN; PAM sequence: TTT
taaaacatatctttttgcct

SEQ ID NO: 190915 - DNA, 20 bp, Artificial Sequence
  Description of Artificial Sequence: Synthetic oligonucleotide
  Target: LAMA2; (-) strand; PAM type: YTN; PAM sequence: TTT
ttaaaacatatctttttgcc

SEQ ID NO: 190916 - DNA, 20 bp, Artificial Sequence
  Description of Artificial Sequence: Synthetic oligonucleotide
  Target: LAMA2; (-) strand; PAM type: YTN; PAM sequence: TTG
tgagtggtttttaaaacata

SEQ ID NO: 190917 - DNA, 20 bp, Artificial Sequence
  Description of Artificial Sequence: Synthetic oligonucleotide
  Target: LAMA2; (-) strand; PAM type: YTN; PAM sequence: CTT
gtgagtggtttttaaaacat

SEQ ID NO: 190918 - DNA, 20 bp, Artificial Sequence
  Description of Artificial Sequence: Synthetic oligonucleotide
  Target: LAMA2; (-) strand; PAM type: YTN; PAM sequence: TTG
tagaggccttgtgagtggtt

SEQ ID NO: 190919 - DNA, 20 bp, Artificial Sequence
  Description of Artificial Sequence: Synthetic oligonucleotide
  Target: LAMA2; (-) strand; PAM type: YTN; PAM sequence: CTG
acatattgtagaggccttgt

SEQ ID NO: 190920 - DNA, 20 bp, Artificial Sequence
  Description of Artificial Sequence: Synthetic oligonucleotide
  Target: LAMA2; (-) strand; PAM type: YTN; PAM sequence: TTA
tctgacatattgtagaggcc

SEQ ID NO: 190921 - DNA, 20 bp, Artificial Sequence
  Description of Artificial Sequence: Synthetic oligonucleotide
  Target: LAMA2; (-) strand; PAM type: YTN; PAM sequence: TTC
acgcacatgcattatctgac

SEQ ID NO: 190922 - DNA, 20 bp, Artificial Sequence
  Description of Artificial Sequence: Synthetic oligonucleotide
  Target: LAMA2; (-) strand; PAM type: YTN; PAM sequence: TTC
aagcaagagaccatacacat

SEQ ID NO: 190923 - DNA, 20 bp, Artificial Sequence
  Description of Artificial Sequence: Synthetic oligonucleotide
  Target: LAMA2; (-) strand; PAM type: YTN; PAM sequence: CTT
caagcaagagaccatacaca

SEQ ID NO: 190924 - DNA, 20 bp, Artificial Sequence
  Description of Artificial Sequence: Synthetic oligonucleotide
  Target: LAMA2; (-) strand; PAM type: YTN; PAM sequence: CTG
ataacttcaagcaagagacc

SEQ ID NO: 190925 - DNA, 20 bp, Artificial Sequence
  Description of Artificial Sequence: Synthetic oligonucleotide
  Target: LAMA2; (-) strand; PAM type: YTN; PAM sequence: CTG
gctgataacttcaagcaaga

SEQ ID NO: 190926 - DNA, 20 bp, Artificial Sequence
  Description of Artificial Sequence: Synthetic oligonucleotide
  Target: LAMA2; (-) strand; PAM type: YTN; PAM sequence: TTG
ctggctgataacttcaagca

SEQ ID NO: 190927 - DNA, 20 bp, Artificial Sequence
  Description of Artificial Sequence: Synthetic oligonucleotide
  Target: LAMA2; (-) strand; PAM type: YTN; PAM sequence: TTT
gctggctgataacttcaagc

SEQ ID NO: 190928 - DNA, 20 bp, Artificial Sequence
  Description of Artificial Sequence: Synthetic oligonucleotide
  Target: LAMA2; (-) strand; PAM type: YTN; PAM sequence: TTT
tgctggctgataacttcaag

SEQ ID NO: 190929 - DNA, 20 bp, Artificial Sequence
  Description of Artificial Sequence: Synthetic oligonucleotide
  Target: LAMA2; (-) strand; PAM type: YTN; PAM sequence: TTC
accattttgctggctgataa

SEQ ID NO: 190930 - DNA, 20 bp, Artificial Sequence
  Description of Artificial Sequence: Synthetic oligonucleotide
  Target: LAMA2; (-) strand; PAM type: YTN; PAM sequence: TTT
caccattttgctggctgata

SEQ ID NO: 190931 - DNA, 20 bp, Artificial Sequence
  Description of Artificial Sequence: Synthetic oligonucleotide
  Target: LAMA2; (-) strand; PAM type: YTN; PAM sequence: CTA
agtatttcaccattttgctg

SEQ ID NO: 190932 - DNA, 20 bp, Artificial Sequence
  Description of Artificial Sequence: Synthetic oligonucleotide
  Target: LAMA2; (-) strand; PAM type: YTN; PAM sequence: TTC
taagtatttcaccattttgc

SEQ ID NO: 190933 - DNA, 20 bp, Artificial Sequence
  Description of Artificial Sequence: Synthetic oligonucleotide
  Target: LAMA2; (-) strand; PAM type: YTN; PAM sequence: TTA
attctaagtatttcaccatt

SEQ ID NO: 190934 - DNA, 20 bp, Artificial Sequence
  Description of Artificial Sequence: Synthetic oligonucleotide
  Target: LAMA2; (-) strand; PAM type: YTN; PAM sequence: TTG
attaattctaagtatttcac

SEQ ID NO: 190935 - DNA, 20 bp, Artificial Sequence
  Description of Artificial Sequence: Synthetic oligonucleotide
  Target: LAMA2; (-) strand; PAM type: YTN; PAM sequence: TTT
gattaattctaagtatttca

SEQ ID NO: 190936 - DNA, 20 bp, Artificial Sequence
  Description of Artificial Sequence: Synthetic oligonucleotide
  Target: LAMA2; (-) strand; PAM type: YTN; PAM sequence: CTC
cagatgtttgattaattcta

SEQ ID NO: 190937 - DNA, 20 bp, Artificial Sequence
  Description of Artificial Sequence: Synthetic oligonucleotide
  Target: LAMA2; (-) strand; PAM type: YTN; PAM sequence: TTG
acctccagatgtttgattaa

SEQ ID NO: 190938 - DNA, 20 bp, Artificial Sequence
  Description of Artificial Sequence: Synthetic oligonucleotide
  Target: LAMA2; (-) strand; PAM type: YTN; PAM sequence: CTT
gacctccagatgtttgatta

SEQ ID NO: 190939 - DNA, 20 bp, Artificial Sequence
  Description of Artificial Sequence: Synthetic oligonucleotide
  Target: LAMA2; (-) strand; PAM type: YTN; PAM sequence: TTC
ttgacctccagatgtttgat

SEQ ID NO: 190940 - DNA, 20 bp, Artificial Sequence
  Description of Artificial Sequence: Synthetic oligonucleotide
  Target: LAMA2; (-) strand; PAM type: YTN; PAM sequence: TTT
cttgacctccagatgtttga

SEQ ID NO: 190941 - DNA, 20 bp, Artificial Sequence
  Description of Artificial Sequence: Synthetic oligonucleotide
  Target: LAMA2; (-) strand; PAM type: YTN; PAM sequence: CTG
cgtttcttgacctccagatg

SEQ ID NO: 190942 - DNA, 20 bp, Artificial Sequence
  Description of Artificial Sequence: Synthetic oligonucleotide
  Target: LAMA2; (-) strand; PAM type: YTN; PAM sequence: TTA
aagtaaggagaagaatatag

SEQ ID NO: 190943 - DNA, 20 bp, Artificial Sequence
  Description of Artificial Sequence: Synthetic oligonucleotide
  Target: LAMA2; (-) strand; PAM type: YTN; PAM sequence: CTT
aaagtaaggagaagaatata

SEQ ID NO: 190944 - DNA, 20 bp, Artificial Sequence
  Description of Artificial Sequence: Synthetic oligonucleotide
  Target: LAMA2; (-) strand; PAM type: YTN; PAM sequence: TTC
ttaaagtaaggagaagaata

SEQ ID NO: 190945 - DNA, 20 bp, Artificial Sequence
  Description of Artificial Sequence: Synthetic oligonucleotide
  Target: LAMA2; (-) strand; PAM type: YTN; PAM sequence: TTC
attcttaaagtaaggagaag

SEQ ID NO: 190946 - DNA, 20 bp, Artificial Sequence
  Description of Artificial Sequence: Synthetic oligonucleotide
  Target: LAMA2; (-) strand; PAM type: YTN; PAM sequence: TTT
cattcttaaagtaaggagaa

SEQ ID NO: 190947 - DNA, 20 bp, Artificial Sequence
  Description of Artificial Sequence: Synthetic oligonucleotide
  Target: LAMA2; (-) strand; PAM type: YTN; PAM sequence: TTA
gtttcattcttaaagtaagg

SEQ ID NO: 190948 - DNA, 20 bp, Artificial Sequence
  Description of Artificial Sequence: Synthetic oligonucleotide
  Target: LAMA2; (-) strand; PAM type: YTN; PAM sequence: TTA
ttagtttcattcttaaagta

SEQ ID NO: 190949 - DNA, 20 bp, Artificial Sequence
  Description of Artificial Sequence: Synthetic oligonucleotide
  Target: LAMA2; (-) strand; PAM type: YTN; PAM sequence: TTT
attagtttcattcttaaagt

SEQ ID NO: 190950 - DNA, 20 bp, Artificial Sequence
  Description of Artificial Sequence: Synthetic oligonucleotide
  Target: LAMA2; (-) strand; PAM type: YTN; PAM sequence: TTT
tattagtttcattcttaaag

SEQ ID NO: 190951 - DNA, 20 bp, Artificial Sequence
  Description of Artificial Sequence: Synthetic oligonucleotide
  Target: LAMA2; (-) strand; PAM type: YTN; PAM sequence: TTT
ttattagtttcattcttaaa

SEQ ID NO: 190952 - DNA, 20 bp, Artificial Sequence
  Description of Artificial Sequence: Synthetic oligonucleotide
  Target: LAMA2; (-) strand; PAM type: YTN; PAM sequence: TTT
tttattagtttcattcttaa

SEQ ID NO: 190953 - DNA, 20 bp, Artificial Sequence
  Description of Artificial Sequence: Synthetic oligonucleotide
  Target: LAMA2; (-) strand; PAM type: YTN; PAM sequence: TTA
ttttttattagtttcattct

SEQ ID NO: 190954 - DNA, 20 bp, Artificial Sequence
  Description of Artificial Sequence: Synthetic oligonucleotide
  Target: LAMA2; (-) strand; PAM type: YTN; PAM sequence: CTT
attttttattagtttcattc

SEQ ID NO: 190955 - DNA, 20 bp, Artificial Sequence
  Description of Artificial Sequence: Synthetic oligonucleotide
  Target: LAMA2; (-) strand; PAM type: YTN; PAM sequence: CTC
cgccttattttttattagtt

SEQ ID NO: 190956 - DNA, 20 bp, Artificial Sequence
  Description of Artificial Sequence: Synthetic oligonucleotide
  Target: LAMA2; (-) strand; PAM type: YTN; PAM sequence: CTG
aagggccagctccgccttat

SEQ ID NO: 190957 - DNA, 20 bp, Artificial Sequence
  Description of Artificial Sequence: Synthetic oligonucleotide
  Target: LAMA2; (-) strand; PAM type: YTN; PAM sequence: TTG
ctgaagggccagctccgcct

SEQ ID NO: 190958 - DNA, 20 bp, Artificial Sequence
  Description of Artificial Sequence: Synthetic oligonucleotide
  Target: LAMA2; (-) strand; PAM type: YTN; PAM sequence: TTT
gctgaagggccagctccgcc

SEQ ID NO: 190959 - DNA, 20 bp, Artificial Sequence
  Description of Artificial Sequence: Synthetic oligonucleotide
  Target: LAMA2; (-) strand; PAM type: YTN; PAM sequence: CTT
tgctgaagggccagctccgc

SEQ ID NO: 190960 - DNA, 20 bp, Artificial Sequence
  Description of Artificial Sequence: Synthetic oligonucleotide
  Target: LAMA2; (-) strand; PAM type: YTN; PAM sequence: CTC
ctttgctgaagggccagctc

SEQ ID NO: 190961 - DNA, 20 bp, Artificial Sequence
  Description of Artificial Sequence: Synthetic oligonucleotide
  Target: LAMA2; (-) strand; PAM type: YTN; PAM sequence: CTC
atataataaaaatccctcct

SEQ ID NO: 190962 - DNA, 20 bp, Artificial Sequence
  Description of Artificial Sequence: Synthetic oligonucleotide
  Target: LAMA2; (-) strand; PAM type: YTN; PAM sequence: TTC
actcatataataaaaatccc

SEQ ID NO: 190963 - DNA, 20 bp, Artificial Sequence
  Description of Artificial Sequence: Synthetic oligonucleotide
  Target: LAMA2; (-) strand; PAM type: YTN; PAM sequence: CTC
aaattcactcatataataaa

SEQ ID NO: 190964 - DNA, 20 bp, Artificial Sequence
  Description of Artificial Sequence: Synthetic oligonucleotide
  Target: LAMA2; (-) strand; PAM type: YTN; PAM sequence: CTC
tcaaattcactcatataata

SEQ ID NO: 190965 - DNA, 20 bp, Artificial Sequence
  Description of Artificial Sequence: Synthetic oligonucleotide
  Target: LAMA2; (-) strand; PAM type: YTN; PAM sequence: TTC
tctcaaattcactcatataa

SEQ ID NO: 190966 - DNA, 20 bp, Artificial Sequence
  Description of Artificial Sequence: Synthetic oligonucleotide
  Target: LAMA2; (-) strand; PAM type: YTN; PAM sequence: TTT
ctctcaaattcactcatata

SEQ ID NO: 190967 - DNA, 20 bp, Artificial Sequence
  Description of Artificial Sequence: Synthetic oligonucleotide
  Target: LAMA2; (-) strand; PAM type: YTN; PAM sequence: CTT
tctctcaaattcactcatat

SEQ ID NO: 190968 - DNA, 20 bp, Artificial Sequence
  Description of Artificial Sequence: Synthetic oligonucleotide
  Target: LAMA2; (-) strand; PAM type: YTN; PAM sequence: TTG
tccccctttctctcaaattc

SEQ ID NO: 190969 - DNA, 20 bp, Artificial Sequence
  Description of Artificial Sequence: Synthetic oligonucleotide
  Target: LAMA2; (-) strand; PAM type: YTN; PAM sequence: CTT
gtccccctttctctcaaatt

SEQ ID NO: 190970 - DNA, 20 bp, Artificial Sequence
  Description of Artificial Sequence: Synthetic oligonucleotide
  Target: LAMA2; (-) strand; PAM type: YTN; PAM sequence: TTC
ttgtccccctttctctcaaa

SEQ ID NO: 190971 - DNA, 20 bp, Artificial Sequence
  Description of Artificial Sequence: Synthetic oligonucleotide
  Target: LAMA2; (-) strand; PAM type: YTN; PAM sequence: TTT
cttgtccccctttctctcaa

SEQ ID NO: 190972 - DNA, 20 bp, Artificial Sequence
  Description of Artificial Sequence: Synthetic oligonucleotide
  Target: LAMA2; (-) strand; PAM type: YTN; PAM sequence: TTT
tcttgtccccctttctctca

SEQ ID NO: 190973 - DNA, 20 bp, Artificial Sequence
  Description of Artificial Sequence: Synthetic oligonucleotide
  Target: LAMA2; (-) strand; PAM type: YTN; PAM sequence: CTT
ttcttgtccccctttctctc

SEQ ID NO: 190974 - DNA, 20 bp, Artificial Sequence
  Description of Artificial Sequence: Synthetic oligonucleotide
  Target: LAMA2; (-) strand; PAM type: YTN; PAM sequence: CTC
aaaggtcttttcttgtcccc

SEQ ID NO: 190975 - DNA, 20 bp, Artificial Sequence
  Description of Artificial Sequence: Synthetic oligonucleotide
  Target: LAMA2; (-) strand; PAM type: YTN; PAM sequence: CTG
atctcaaaggtcttttcttg

SEQ ID NO: 190976 - DNA, 20 bp, Artificial Sequence
  Description of Artificial Sequence: Synthetic oligonucleotide
  Target: LAMA2; (-) strand; PAM type: YTN; PAM sequence: CTG
ggccctgatctcaaaggtct

SEQ ID NO: 190977 - DNA, 20 bp, Artificial Sequence
  Description of Artificial Sequence: Synthetic oligonucleotide
  Target: LAMA2; (-) strand; PAM type: YTN; PAM sequence: CTA
tgcagtaaggatacagtagt

SEQ ID NO: 190978 - DNA, 20 bp, Artificial Sequence
  Description of Artificial Sequence: Synthetic oligonucleotide
  Target: LAMA2; (-) strand; PAM type: YTN; PAM sequence: CTG
tgctatgcagtaaggataca

SEQ ID NO: 190979 - DNA, 20 bp, Artificial Sequence
  Description of Artificial Sequence: Synthetic oligonucleotide
  Target: LAMA2; (-) strand; PAM type: YTN; PAM sequence: CTA
ggtgccaggcactgtgctat

SEQ ID NO: 190980 - DNA, 20 bp, Artificial Sequence
  Description of Artificial Sequence: Synthetic oligonucleotide
  Target: LAMA2; (-) strand; PAM type: YTN; PAM sequence: CTG
tgaccatgctaggtgccagg

SEQ ID NO: 190981 - DNA, 20 bp, Artificial Sequence
  Description of Artificial Sequence: Synthetic oligonucleotide
  Target: LAMA2; (-) strand; PAM type: YTN; PAM sequence: TTA
ctgtgaccatgctaggtgcc

SEQ ID NO: 190982 - DNA, 20 bp, Artificial Sequence
  Description of Artificial Sequence: Synthetic oligonucleotide
  Target: LAMA2; (-) strand; PAM type: YTN; PAM sequence: TTT
actgtgaccatgctaggtgc

SEQ ID NO: 190983 - DNA, 20 bp, Artificial Sequence
  Description of Artificial Sequence: Synthetic oligonucleotide
  Target: LAMA2; (-) strand; PAM type: YTN; PAM sequence: CTT
tactgtgaccatgctaggtg

SEQ ID NO: 190984 - DNA, 20 bp, Artificial Sequence
  Description of Artificial Sequence: Synthetic oligonucleotide
  Target: LAMA2; (-) strand; PAM type: YTN; PAM sequence: TTC
aatctttactgtgaccatgc

SEQ ID NO: 190985 - DNA, 20 bp, Artificial Sequence
  Description of Artificial Sequence: Synthetic oligonucleotide
  Target: LAMA2; (-) strand; PAM type: YTN; PAM sequence: CTA
tcattcaatctttactgtga

SEQ ID NO: 190986 - DNA, 20 bp, Artificial Sequence
  Description of Artificial Sequence: Synthetic oligonucleotide
  Target: LAMA2; (-) strand; PAM type: YTN; PAM sequence: TTC
tatcattcaatctttactgt

SEQ ID NO: 190987 - DNA, 20 bp, Artificial Sequence
  Description of Artificial Sequence: Synthetic oligonucleotide
  Target: LAMA2; (-) strand; PAM type: YTN; PAM sequence: TTT
ctatcattcaatctttactg

SEQ ID NO: 190988 - DNA, 20 bp, Artificial Sequence
  Description of Artificial Sequence: Synthetic oligonucleotide
  Target: LAMA2; (-) strand; PAM type: YTN; PAM sequence: TTT
tctatcattcaatctttact

SEQ ID NO: 190989 - DNA, 20 bp, Artificial Sequence
  Description of Artificial Sequence: Synthetic oligonucleotide
  Target: LAMA2; (-) strand; PAM type: YTN; PAM sequence: TTT
ttctatcattcaatctttac

SEQ ID NO: 190990 - DNA, 20 bp, Artificial Sequence
  Description of Artificial Sequence: Synthetic oligonucleotide
  Target: LAMA2; (-) strand; PAM type: YTN; PAM sequence: CTA
tttttctatcattcaatctt

SEQ ID NO: 190991 - DNA, 20 bp, Artificial Sequence
  Description of Artificial Sequence: Synthetic oligonucleotide
  Target: LAMA2; (-) strand; PAM type: YTN; PAM sequence: TTC
tatttttctatcattcaatc

SEQ ID NO: 190992 - DNA, 20 bp, Artificial Sequence
  Description of Artificial Sequence: Synthetic oligonucleotide
  Target: LAMA2; (-) strand; PAM type: YTN; PAM sequence: TTT
ctatttttctatcattcaat

SEQ ID NO: 190993 - DNA, 20 bp, Artificial Sequence
  Description of Artificial Sequence: Synthetic oligonucleotide
  Target: LAMA2; (-) strand; PAM type: YTN; PAM sequence: TTT
tctatttttctatcattcaa

SEQ ID NO: 190994 - DNA, 20 bp, Artificial Sequence
  Description of Artificial Sequence: Synthetic oligonucleotide
  Target: LAMA2; (-) strand; PAM type: YTN; PAM sequence: CTT
ttctatttttctatcattca

SEQ ID NO: 190995 - DNA, 20 bp, Artificial Sequence
  Description of Artificial Sequence: Synthetic oligonucleotide
  Target: LAMA2; (-) strand; PAM type: YTN; PAM sequence: TTC
cttttctatttttctatcat

SEQ ID NO: 190996 - DNA, 20 bp, Artificial Sequence
  Description of Artificial Sequence: Synthetic oligonucleotide
  Target: LAMA2; (-) strand; PAM type: YTN; PAM sequence: CTT
ccttttctatttttctatca

SEQ ID NO: 190997 - DNA, 20 bp, Artificial Sequence
  Description of Artificial Sequence: Synthetic oligonucleotide
  Target: LAMA2; (-) strand; PAM type: YTN; PAM sequence: CTC
ttccttttctatttttctat

SEQ ID NO: 190998 - DNA, 20 bp, Artificial Sequence
  Description of Artificial Sequence: Synthetic oligonucleotide
  Target: LAMA2; (-) strand; PAM type: YTN; PAM sequence: TTA
gctcttccttttctattttt

SEQ ID NO: 190999 - DNA, 20 bp, Artificial Sequence
  Description of Artificial Sequence: Synthetic oligonucleotide
  Target: LAMA2; (-) strand; PAM type: YTN; PAM sequence: CTA
aaagttagctcttccttttc

SEQ ID NO: 191000 - DNA, 20 bp, Artificial Sequence
  Description of Artificial Sequence: Synthetic oligonucleotide
  Target: LAMA2; (-) strand; PAM type: YTN; PAM sequence: TTC
ctaaaagttagctcttcctt

SEQ ID NO: 191001 - DNA, 20 bp, Artificial Sequence
  Description of Artificial Sequence: Synthetic oligonucleotide
  Target: LAMA2; (-) strand; PAM type: YTN; PAM sequence: CTT
cctaaaagttagctcttcct

SEQ ID NO: 191002 - DNA, 20 bp, Artificial Sequence
  Description of Artificial Sequence: Synthetic oligonucleotide
  Target: LAMA2; (-) strand; PAM type: YTN; PAM sequence: TTC
cttcctaaaagttagctctt

SEQ ID NO: 191003 - DNA, 20 bp, Artificial Sequence
  Description of Artificial Sequence: Synthetic oligonucleotide
  Target: LAMA2; (-) strand; PAM type: YTN; PAM sequence: CTG
taagtgggaagtaagtgttc

SEQ ID NO: 191004 - DNA, 20 bp, Artificial Sequence
  Description of Artificial Sequence: Synthetic oligonucleotide
  Target: LAMA2; (-) strand; PAM type: YTN; PAM sequence: TTC
aataactgtaagtgggaagt

SEQ ID NO: 191005 - DNA, 20 bp, Artificial Sequence
  Description of Artificial Sequence: Synthetic oligonucleotide
  Target: LAMA2; (-) strand; PAM type: YTN; PAM sequence: TTT
caataactgtaagtgggaag

SEQ ID NO: 191006 - DNA, 20 bp, Artificial Sequence
  Description of Artificial Sequence: Synthetic oligonucleotide
  Target: LAMA2; (-) strand; PAM type: YTN; PAM sequence: TTT
tcaataactgtaagtgggaa

SEQ ID NO: 191007 - DNA, 20 bp, Artificial Sequence
  Description of Artificial Sequence: Synthetic oligonucleotide
  Target: LAMA2; (-) strand; PAM type: YTN; PAM sequence: TTT
ttcaataactgtaagtggga

SEQ ID NO: 191008 - DNA, 20 bp, Artificial Sequence
  Description of Artificial Sequence: Synthetic oligonucleotide
  Target: LAMA2; (-) strand; PAM type: YTN; PAM sequence: TTT
tttcaataactgtaagtggg

SEQ ID NO: 191009 - DNA, 20 bp, Artificial Sequence
  Description of Artificial Sequence: Synthetic oligonucleotide
  Target: LAMA2; (-) strand; PAM type: YTN; PAM sequence: TTC
atagttttttcaataactgt

SEQ ID NO: 191010 - DNA, 20 bp, Artificial Sequence
  Description of Artificial Sequence: Synthetic oligonucleotide
  Target: LAMA2; (-) strand; PAM type: YTN; PAM sequence: CTT
catagttttttcaataactg

SEQ ID NO: 191011 - DNA, 20 bp, Artificial Sequence
  Description of Artificial Sequence: Synthetic oligonucleotide
  Target: LAMA2; (-) strand; PAM type: YTN; PAM sequence: TTA
accatcttcatagttttttc

SEQ ID NO: 191012 - DNA, 20 bp, Artificial Sequence
  Description of Artificial Sequence: Synthetic oligonucleotide
  Target: LAMA2; (-) strand; PAM type: YTN; PAM sequence: CTA
catccgacagtatcatgatg

SEQ ID NO: 191013 - DNA, 20 bp, Artificial Sequence
  Description of Artificial Sequence: Synthetic oligonucleotide
  Target: LAMA2; (-) strand; PAM type: YTN; PAM sequence: CTG
cctacatccgacagtatcat

SEQ ID NO: 191014 - DNA, 20 bp, Artificial Sequence
  Description of Artificial Sequence: Synthetic oligonucleotide
  Target: LAMA2; (-) strand; PAM type: YTN; PAM sequence: TTG
taactgcctacatccgacag

SEQ ID NO: 191015 - DNA, 20 bp, Artificial Sequence
  Description of Artificial Sequence: Synthetic oligonucleotide
  Target: LAMA2; (-) strand; PAM type: YTN; PAM sequence: TTG
agtagaaattgtaactgcct

SEQ ID NO: 191016 - DNA, 20 bp, Artificial Sequence
  Description of Artificial Sequence: Synthetic oligonucleotide
  Target: LAMA2; (-) strand; PAM type: YTN; PAM sequence: CTA
tcgttgagtagaaattgtaa

SEQ ID NO: 191017 - DNA, 20 bp, Artificial Sequence
  Description of Artificial Sequence: Synthetic oligonucleotide
  Target: LAMA2; (-) strand; PAM type: YTN; PAM sequence: TTC
tatcgttgagtagaaattgt

SEQ ID NO: 191018 - DNA, 20 bp, Artificial Sequence
  Description of Artificial Sequence: Synthetic oligonucleotide
  Target: LAMA2; (-) strand; PAM type: YTN; PAM sequence: TTT
ctatcgttgagtagaaattg

SEQ ID NO: 191019 - DNA, 20 bp, Artificial Sequence
  Description of Artificial Sequence: Synthetic oligonucleotide
  Target: LAMA2; (-) strand; PAM type: YTN; PAM sequence: TTT
tctatcgttgagtagaaatt

SEQ ID NO: 191020 - DNA, 20 bp, Artificial Sequence
  Description of Artificial Sequence: Synthetic oligonucleotide
  Target: LAMA2; (-) strand; PAM type: YTN; PAM sequence: TTT
ttctatcgttgagtagaaat

SEQ ID NO: 191021 - DNA, 20 bp, Artificial Sequence
  Description of Artificial Sequence: Synthetic oligonucleotide
  Target: LAMA2; (-) strand; PAM type: YTN; PAM sequence: TTT
tttctatcgttgagtagaaa

SEQ ID NO: 191022 - DNA, 20 bp, Artificial Sequence
  Description of Artificial Sequence: Synthetic oligonucleotide
  Target: LAMA2; (-) strand; PAM type: YTN; PAM sequence: CTT
ttttctatcgttgagtagaa

SEQ ID NO: 191023 - DNA, 20 bp, Artificial Sequence
  Description of Artificial Sequence: Synthetic oligonucleotide
  Target: LAMA2; (-) strand; PAM type: YTN; PAM sequence: TTC
ttttttctatcgttgagtag

SEQ ID NO: 191024 - DNA, 20 bp, Artificial Sequence
  Description of Artificial Sequence: Synthetic oligonucleotide
  Target: LAMA2; (-) strand; PAM type: YTN; PAM sequence: TTA
gttcttttttctatcgttga

SEQ ID NO: 191025 - DNA, 20 bp, Artificial Sequence
  Description of Artificial Sequence: Synthetic oligonucleotide
  Target: LAMA2; (-) strand; PAM type: YTN; PAM sequence: TTT
agttcttttttctatcgttg

SEQ ID NO: 191026 - DNA, 20 bp, Artificial Sequence
  Description of Artificial Sequence: Synthetic oligonucleotide
  Target: LAMA2; (-) strand; PAM type: YTN; PAM sequence: CTT
tagttcttttttctatcgtt

SEQ ID NO: 191027 - DNA, 20 bp, Artificial Sequence
  Description of Artificial Sequence: Synthetic oligonucleotide
  Target: LAMA2; (-) strand; PAM type: YTN; PAM sequence: CTC
tttagttcttttttctatcg

SEQ ID NO: 191028 - DNA, 20 bp, Artificial Sequence
  Description of Artificial Sequence: Synthetic oligonucleotide
  Target: LAMA2; (-) strand; PAM type: YTN; PAM sequence: TTC
tctttagttcttttttctat

SEQ ID NO: 191029 - DNA, 20 bp, Artificial Sequence
  Description of Artificial Sequence: Synthetic oligonucleotide
  Target: LAMA2; (-) strand; PAM type: YTN; PAM sequence: CTG
gtaaattctctttagttctt

SEQ ID NO: 191030 - DNA, 20 bp, Artificial Sequence
  Description of Artificial Sequence: Synthetic oligonucleotide
  Target: LAMA2; (-) strand; PAM type: YTN; PAM sequence: TTC
atgtcctggtaaattctctt

SEQ ID NO: 191031 - DNA, 20 bp, Artificial Sequence
  Description of Artificial Sequence: Synthetic oligonucleotide
  Target: LAMA2; (-) strand; PAM type: YTN; PAM sequence: TTT
catgtcctggtaaattctct

SEQ ID NO: 191032 - DNA, 20 bp, Artificial Sequence
  Description of Artificial Sequence: Synthetic oligonucleotide
  Target: LAMA2; (-) strand; PAM type: YTN; PAM sequence: CTT
tcatgtcctggtaaattctc

SEQ ID NO: 191033 - DNA, 20 bp, Artificial Sequence
  Description of Artificial Sequence: Synthetic oligonucleotide
  Target: LAMA2; (-) strand; PAM type: YTN; PAM sequence: TTC
tttcatgtcctggtaaattc

SEQ ID NO: 191034 - DNA, 20 bp, Artificial Sequence
  Description of Artificial Sequence: Synthetic oligonucleotide
  Target: LAMA2; (-) strand; PAM type: YTN; PAM sequence: TTT
ctttcatgtcctggtaaatt

SEQ ID NO: 191035 - DNA, 20 bp, Artificial Sequence
  Description of Artificial Sequence: Synthetic oligonucleotide
  Target: LAMA2; (-) strand; PAM type: YTN; PAM sequence: CTT
tctttcatgtcctggtaaat

SEQ ID NO: 191036 - DNA, 20 bp, Artificial Sequence
  Description of Artificial Sequence: Synthetic oligonucleotide
  Target: LAMA2; (-) strand; PAM type: YTN; PAM sequence: TTA
cacctttctttcatgtcctg

SEQ ID NO: 191037 - DNA, 20 bp, Artificial Sequence
  Description of Artificial Sequence: Synthetic oligonucleotide
  Target: LAMA2; (-) strand; PAM type: YTN; PAM sequence: CTT
acacctttctttcatgtcct

SEQ ID NO: 191038 - DNA, 20 bp, Artificial Sequence
  Description of Artificial Sequence: Synthetic oligonucleotide
  Target: LAMA2; (-) strand; PAM type: YTN; PAM sequence: TTC
aggaatccatgatcttacac

SEQ ID NO: 191039 - DNA, 20 bp, Artificial Sequence
  Description of Artificial Sequence: Synthetic oligonucleotide
  Target: LAMA2; (-) strand; PAM type: YTN; PAM sequence: TTT
caggaatccatgatcttaca

SEQ ID NO: 191040 - DNA, 20 bp, Artificial Sequence
  Description of Artificial Sequence: Synthetic oligonucleotide
  Target: LAMA2; (-) strand; PAM type: YTN; PAM sequence: CTG
tttcaggaatccatgatctt

SEQ ID NO: 191041 - DNA, 20 bp, Artificial Sequence
  Description of Artificial Sequence: Synthetic oligonucleotide
  Target: LAMA2; (-) strand; PAM type: YTN; PAM sequence: TTG
gaacatcctgtttcaggaat

SEQ ID NO: 191042 - DNA, 20 bp, Artificial Sequence
  Description of Artificial Sequence: Synthetic oligonucleotide
  Target: LAMA2; (-) strand; PAM type: YTN; PAM sequence: TTA
attggaacatcctgtttcag

SEQ ID NO: 191043 - DNA, 20 bp, Artificial Sequence
  Description of Artificial Sequence: Synthetic oligonucleotide
  Target: LAMA2; (-) strand; PAM type: YTN; PAM sequence: TTT
aattggaacatcctgtttca

SEQ ID NO: 191044 - DNA, 20 bp, Artificial Sequence
  Description of Artificial Sequence: Synthetic oligonucleotide
  Target: LAMA2; (-) strand; PAM type: YTN; PAM sequence: TTA
aatatttaattggaacatcc

SEQ ID NO: 191045 - DNA, 20 bp, Artificial Sequence
  Description of Artificial Sequence: Synthetic oligonucleotide
  Target: LAMA2; (-) strand; PAM type: YTN; PAM sequence: TTT
aaatatttaattggaacatc

SEQ ID NO: 191046 - DNA, 20 bp, Artificial Sequence
  Description of Artificial Sequence: Synthetic oligonucleotide
  Target: LAMA2; (-) strand; PAM type: YTN; PAM sequence: TTA
aatttaaatatttaattgga

SEQ ID NO: 191047 - DNA, 20 bp, Artificial Sequence
  Description of Artificial Sequence: Synthetic oligonucleotide
  Target: LAMA2; (-) strand; PAM type: YTN; PAM sequence: CTT
aaatttaaatatttaattgg

SEQ ID NO: 191048 - DNA, 20 bp, Artificial Sequence
  Description of Artificial Sequence: Synthetic oligonucleotide
  Target: LAMA2; (-) strand; PAM type: YTN; PAM sequence: CTC
acttaaatttaaatatttaa

SEQ ID NO: 191049 - DNA, 20 bp, Artificial Sequence
  Description of Artificial Sequence: Synthetic oligonucleotide
  Target: LAMA2; (-) strand; PAM type: YTN; PAM sequence: CTA
caatcctcacttaaatttaa

SEQ ID NO: 191050 - DNA, 20 bp, Artificial Sequence
  Description of Artificial Sequence: Synthetic oligonucleotide
  Target: LAMA2; (-) strand; PAM type: YTN; PAM sequence: CTC
ctacaatcctcacttaaatt

SEQ ID NO: 191051 - DNA, 20 bp, Artificial Sequence
  Description of Artificial Sequence: Synthetic oligonucleotide
  Target: LAMA2; (-) strand; PAM type: YTN; PAM sequence: TTA
aactcctacaatcctcactt

SEQ ID NO: 191052 - DNA, 20 bp, Artificial Sequence
  Description of Artificial Sequence: Synthetic oligonucleotide
  Target: LAMA2; (-) strand; PAM type: YTN; PAM sequence: CTG
ttaaactcctacaatcctca

SEQ ID NO: 191053 - DNA, 20 bp, Artificial Sequence
  Description of Artificial Sequence: Synthetic oligonucleotide
  Target: LAMA2; (-) strand; PAM type: YTN; PAM sequence: TTA
aatagctgttaaactcctac

SEQ ID NO: 191054 - DNA, 20 bp, Artificial Sequence
  Description of Artificial Sequence: Synthetic oligonucleotide
  Target: LAMA2; (-) strand; PAM type: YTN; PAM sequence: TTT
aaatagctgttaaactccta

SEQ ID NO: 191055 - DNA, 20 bp, Artificial Sequence
  Description of Artificial Sequence: Synthetic oligonucleotide
  Target: LAMA2; (-) strand; PAM type: YTN; PAM sequence: TTT
taaatagctgttaaactcct

SEQ ID NO: 191056 - DNA, 20 bp, Artificial Sequence
  Description of Artificial Sequence: Synthetic oligonucleotide
  Target: LAMA2; (-) strand; PAM type: YTN; PAM sequence: CTA
ggaaggaaagcagcagggcg

SEQ ID NO: 191057 - DNA, 20 bp, Artificial Sequence
  Description of Artificial Sequence: Synthetic oligonucleotide
  Target: LAMA2; (-) strand; PAM type: YTN; PAM sequence: TTG
aaggtgtggagaacctagga

SEQ ID NO: 191058 - DNA, 20 bp, Artificial Sequence
  Description of Artificial Sequence: Synthetic oligonucleotide
  Target: LAMA2; (-) strand; PAM type: YTN; PAM sequence: TTT
gaaggtgtggagaacctagg

SEQ ID NO: 191059 - DNA, 20 bp, Artificial Sequence
  Description of Artificial Sequence: Synthetic oligonucleotide
  Target: LAMA2; (-) strand; PAM type: YTN; PAM sequence: CTT
tgaaggtgtggagaacctag

SEQ ID NO: 191060 - DNA, 20 bp, Artificial Sequence
  Description of Artificial Sequence: Synthetic oligonucleotide
  Target: LAMA2; (-) strand; PAM type: YTN; PAM sequence: TTA
tccaagtgatgagctttgaa

SEQ ID NO: 191061 - DNA, 20 bp, Artificial Sequence
  Description of Artificial Sequence: Synthetic oligonucleotide
  Target: LAMA2; (-) strand; PAM type: YTN; PAM sequence: CTT
atccaagtgatgagctttga

SEQ ID NO: 191062 - DNA, 20 bp, Artificial Sequence
  Description of Artificial Sequence: Synthetic oligonucleotide
  Target: LAMA2; (-) strand; PAM type: YTN; PAM sequence: TTG
gaaaaagtaaagaggcaatc

SEQ ID NO: 191063 - DNA, 20 bp, Artificial Sequence
  Description of Artificial Sequence: Synthetic oligonucleotide
  Target: LAMA2; (-) strand; PAM type: YTN; PAM sequence: TTT
ggaaaaagtaaagaggcaat

SEQ ID NO: 191064 - DNA, 20 bp, Artificial Sequence
  Description of Artificial Sequence: Synthetic oligonucleotide
  Target: LAMA2; (-) strand; PAM type: YTN; PAM sequence: TTG
atttggaaaaagtaaagagg

SEQ ID NO: 191065 - DNA, 20 bp, Artificial Sequence
  Description of Artificial Sequence: Synthetic oligonucleotide
  Target: LAMA2; (-) strand; PAM type: YTN; PAM sequence: TTG
caaaaaatggatgaaccaga

SEQ ID NO: 191066 - DNA, 20 bp, Artificial Sequence
  Description of Artificial Sequence: Synthetic oligonucleotide
  Target: LAMA2; (-) strand; PAM type: YTN; PAM sequence: TTT
gcaaaaaatggatgaaccag

SEQ ID NO: 191067 - DNA, 20 bp, Artificial Sequence
  Description of Artificial Sequence: Synthetic oligonucleotide
  Target: LAMA2; (-) strand; PAM type: YTN; PAM sequence: TTT
tgcaaaaaatggatgaacca

SEQ ID NO: 191068 - DNA, 20 bp, Artificial Sequence
  Description of Artificial Sequence: Synthetic oligonucleotide
  Target: LAMA2; (-) strand; PAM type: YTN; PAM sequence: TTT
ttgcaaaaaatggatgaacc

SEQ ID NO: 191069 - DNA, 20 bp, Artificial Sequence
  Description of Artificial Sequence: Synthetic oligonucleotide
  Target: LAMA2; (-) strand; PAM type: YTN; PAM sequence: TTC
atttttgcaaaaaatggatg

SEQ ID NO: 191070 - DNA, 20 bp, Artificial Sequence
  Description of Artificial Sequence: Synthetic oligonucleotide
  Target: LAMA2; (-) strand; PAM type: YTN; PAM sequence: TTT
catttttgcaaaaaatggat

SEQ ID NO: 191071 - DNA, 20 bp, Artificial Sequence
  Description of Artificial Sequence: Synthetic oligonucleotide
  Target: LAMA2; (-) strand; PAM type: YTN; PAM sequence: TTT
tcatttttgcaaaaaatgga

SEQ ID NO: 191072 - DNA, 20 bp, Artificial Sequence
  Description of Artificial Sequence: Synthetic oligonucleotide
  Target: LAMA2; (-) strand; PAM type: YTN; PAM sequence: TTA
gtgaaagaggggagttttca

SEQ ID NO: 191073 - DNA, 20 bp, Artificial Sequence
  Description of Artificial Sequence: Synthetic oligonucleotide
  Target: LAMA2; (-) strand; PAM type: YTN; PAM sequence: CTT
agtgaaagaggggagttttc

SEQ ID NO: 191074 - DNA, 20 bp, Artificial Sequence
  Description of Artificial Sequence: Synthetic oligonucleotide
  Target: LAMA2; (-) strand; PAM type: YTN; PAM sequence: CTC
aaataccttagtgaaagagg

SEQ ID NO: 191075 - DNA, 20 bp, Artificial Sequence
  Description of Artificial Sequence: Synthetic oligonucleotide
  Target: LAMA2; (-) strand; PAM type: YTN; PAM sequence: TTG
atggctcaaataccttagtg

SEQ ID NO: 191076 - DNA, 20 bp, Artificial Sequence
  Description of Artificial Sequence: Synthetic oligonucleotide
  Target: LAMA2; (-) strand; PAM type: YTN; PAM sequence: CTT
gatggctcaaataccttagt

SEQ ID NO: 191077 - DNA, 20 bp, Artificial Sequence
  Description of Artificial Sequence: Synthetic oligonucleotide
  Target: LAMA2; (-) strand; PAM type: YTN; PAM sequence: TTC
ttgatggctcaaatacctta

SEQ ID NO: 191078 - DNA, 20 bp, Artificial Sequence
  Description of Artificial Sequence: Synthetic oligonucleotide
  Target: LAMA2; (-) strand; PAM type: YTN; PAM sequence: CTA
gacaggagggtgttcttgat

SEQ ID NO: 191079 - DNA, 20 bp, Artificial Sequence
  Description of Artificial Sequence: Synthetic oligonucleotide
  Target: LAMA2; (-) strand; PAM type: YTN; PAM sequence: CTG
tgagccaccatgcctagaca

SEQ ID NO: 191080 - DNA, 20 bp, Artificial Sequence
  Description of Artificial Sequence: Synthetic oligonucleotide
  Target: LAMA2; (-) strand; PAM type: YTN; PAM sequence: TTA
tagctgtgagccaccatgcc

SEQ ID NO: 191081 - DNA, 20 bp, Artificial Sequence
  Description of Artificial Sequence: Synthetic oligonucleotide
  Target: LAMA2; (-) strand; PAM type: YTN; PAM sequence: CTG
ggattatagctgtgagccac

SEQ ID NO: 191082 - DNA, 20 bp, Artificial Sequence
  Description of Artificial Sequence: Synthetic oligonucleotide
  Target: LAMA2; (-) strand; PAM type: YTN; PAM sequence: TTC
caaagagctgggattatagc

SEQ ID NO: 191083 - DNA, 20 bp, Artificial Sequence
  Description of Artificial Sequence: Synthetic oligonucleotide
  Target: LAMA2; (-) strand; PAM type: YTN; PAM sequence: CTT
ccaaagagctgggattatag

SEQ ID NO: 191084 - DNA, 20 bp, Artificial Sequence
  Description of Artificial Sequence: Synthetic oligonucleotide
  Target: LAMA2; (-) strand; PAM type: YTN; PAM sequence: TTG
gccttccaaagagctgggat

SEQ ID NO: 191085 - DNA, 20 bp, Artificial Sequence
  Description of Artificial Sequence: Synthetic oligonucleotide
  Target: LAMA2; (-) strand; PAM type: YTN; PAM sequence: CTT
ggccttccaaagagctggga

SEQ ID NO: 191086 - DNA, 20 bp, Artificial Sequence
  Description of Artificial Sequence: Synthetic oligonucleotide
  Target: LAMA2; (-) strand; PAM type: YTN; PAM sequence: CTG
ccttggccttccaaagagct

SEQ ID NO: 191087 - DNA, 20 bp, Artificial Sequence
  Description of Artificial Sequence: Synthetic oligonucleotide
  Target: LAMA2; (-) strand; PAM type: YTN; PAM sequence: CTC
ctgccttggccttccaaaga

SEQ ID NO: 191088 - DNA, 20 bp, Artificial Sequence
  Description of Artificial Sequence: Synthetic oligonucleotide
  Target: LAMA2; (-) strand; PAM type: YTN; PAM sequence: CTC
aagccatcctcctgccttgg

SEQ ID NO: 191089 - DNA, 20 bp, Artificial Sequence
  Description of Artificial Sequence: Synthetic oligonucleotide
  Target: LAMA2; (-) strand; PAM type: YTN; PAM sequence: CTG
gcctcaagccatcctcctgc

SEQ ID NO: 191090 - DNA, 20 bp, Artificial Sequence
  Description of Artificial Sequence: Synthetic oligonucleotide
  Target: LAMA2; (-) strand; PAM type: YTN; PAM sequence: CTC
ctggcctcaagccatcctcc

SEQ ID NO: 191091 - DNA, 20 bp, Artificial Sequence
  Description of Artificial Sequence: Synthetic oligonucleotide
  Target: LAMA2; (-) strand; PAM type: YTN; PAM sequence: TTG
aactcctggcctcaagccat

SEQ ID NO: 191092 - DNA, 20 bp, Artificial Sequence
  Description of Artificial Sequence: Synthetic oligonucleotide
  Target: LAMA2; (-) strand; PAM type: YTN; PAM sequence: CTT
gaactcctggcctcaagcca

SEQ ID NO: 191093 - DNA, 20 bp, Artificial Sequence
  Description of Artificial Sequence: Synthetic oligonucleotide
  Target: LAMA2; (-) strand; PAM type: YTN; PAM sequence: CTG
gtcttgaactcctggcctca

SEQ ID NO: 191094 - DNA, 20 bp, Artificial Sequence
  Description of Artificial Sequence: Synthetic oligonucleotide
  Target: LAMA2; (-) strand; PAM type: YTN; PAM sequence: CTA
agctggtcttgaactcctgg

SEQ ID NO: 191095 - DNA, 20 bp, Artificial Sequence
  Description of Artificial Sequence: Synthetic oligonucleotide
  Target: LAMA2; (-) strand; PAM type: YTN; PAM sequence: TTG
cctaagctggtcttgaactc

SEQ ID NO: 191096 - DNA, 20 bp, Artificial Sequence
  Description of Artificial Sequence: Synthetic oligonucleotide
  Target: LAMA2; (-) strand; PAM type: YTN; PAM sequence: TTT
gcctaagctggtcttgaact

SEQ ID NO: 191097 - DNA, 20 bp, Artificial Sequence
  Description of Artificial Sequence: Synthetic oligonucleotide
  Target: LAMA2; (-) strand; PAM type: YTN; PAM sequence: TTT
tgcctaagctggtcttgaac

SEQ ID NO: 191098 - DNA, 20 bp, Artificial Sequence
  Description of Artificial Sequence: Synthetic oligonucleotide
  Target: LAMA2; (-) strand; PAM type: YTN; PAM sequence: CTA
ttttgcctaagctggtcttg

SEQ ID NO: 191099 - DNA, 20 bp, Artificial Sequence
  Description of Artificial Sequence: Synthetic oligonucleotide
  Target: LAMA2; (-) strand; PAM type: YTN; PAM sequence: CTC
actattttgcctaagctggt

SEQ ID NO: 191100 - DNA, 20 bp, Artificial Sequence
  Description of Artificial Sequence: Synthetic oligonucleotide
  Target: LAMA2; (-) strand; PAM type: YTN; PAM sequence: TTG
tagaggcagggatctcacta

SEQ ID NO: 191101 - DNA, 20 bp, Artificial Sequence
  Description of Artificial Sequence: Synthetic oligonucleotide
  Target: LAMA2; (-) strand; PAM type: YTN; PAM sequence: TTT
gtagaggcagggatctcact

SEQ ID NO: 191102 - DNA, 20 bp, Artificial Sequence
  Description of Artificial Sequence: Synthetic oligonucleotide
  Target: LAMA2; (-) strand; PAM type: YTN; PAM sequence: TTT
tgtagaggcagggatctcac

SEQ ID NO: 191103 - DNA, 20 bp, Artificial Sequence
  Description of Artificial Sequence: Synthetic oligonucleotide
  Target: LAMA2; (-) strand; PAM type: YTN; PAM sequence: TTT
ttgtagaggcagggatctca

SEQ ID NO: 191104 - DNA, 20 bp, Artificial Sequence
  Description of Artificial Sequence: Synthetic oligonucleotide
  Target: LAMA2; (-) strand; PAM type: YTN; PAM sequence: TTA
tttttgtagaggcagggatc

SEQ ID NO: 191105 - DNA, 20 bp, Artificial Sequence
  Description of Artificial Sequence: Synthetic oligonucleotide
  Target: LAMA2; (-) strand; PAM type: YTN; PAM sequence: TTT
atttttgtagaggcagggat

SEQ ID NO: 191106 - DNA, 20 bp, Artificial Sequence
  Description of Artificial Sequence: Synthetic oligonucleotide
  Target: LAMA2; (-) strand; PAM type: YTN; PAM sequence: TTT
tatttttgtagaggcaggga

SEQ ID NO: 191107 - DNA, 20 bp, Artificial Sequence
  Description of Artificial Sequence: Synthetic oligonucleotide
  Target: LAMA2; (-) strand; PAM type: YTN; PAM sequence: TTC
attttatttttgtagaggca

SEQ ID NO: 191108 - DNA, 20 bp, Artificial Sequence
  Description of Artificial Sequence: Synthetic oligonucleotide
  Target: LAMA2; (-) strand; PAM type: YTN; PAM sequence: TTT
cattttatttttgtagaggc

SEQ ID NO: 191109 - DNA, 20 bp, Artificial Sequence
  Description of Artificial Sequence: Synthetic oligonucleotide
  Target: LAMA2; (-) strand; PAM type: YTN; PAM sequence: TTT
tcattttatttttgtagagg

SEQ ID NO: 191110 - DNA, 20 bp, Artificial Sequence
  Description of Artificial Sequence: Synthetic oligonucleotide
  Target: LAMA2; (-) strand; PAM type: YTN; PAM sequence: TTT
ttcattttatttttgtagag

SEQ ID NO: 191111 - DNA, 20 bp, Artificial Sequence
  Description of Artificial Sequence: Synthetic oligonucleotide
  Target: LAMA2; (-) strand; PAM type: YTN; PAM sequence: TTT
tttcattttatttttgtaga

SEQ ID NO: 191112 - DNA, 20 bp, Artificial Sequence
  Description of Artificial Sequence: Synthetic oligonucleotide
  Target: LAMA2; (-) strand; PAM type: YTN; PAM sequence: CTA
attttttcattttatttttg

SEQ ID NO: 191113 - DNA, 20 bp, Artificial Sequence
  Description of Artificial Sequence: Synthetic oligonucleotide
  Target: LAMA2; (-) strand; PAM type: YTN; PAM sequence: CTG
gcatgtgccaccacacgcag

SEQ ID NO: 191114 - DNA, 20 bp, Artificial Sequence
  Description of Artificial Sequence: Synthetic oligonucleotide
  Target: LAMA2; (-) strand; PAM type: YTN; PAM sequence: CTG
ggaccactggcatgtgccac

SEQ ID NO: 191115 - DNA, 20 bp, Artificial Sequence
  Description of Artificial Sequence: Synthetic oligonucleotide
  Target: LAMA2; (-) strand; PAM type: YTN; PAM sequence: CTG
agtagctgggaccactggca

SEQ ID NO: 191116 - DNA, 20 bp, Artificial Sequence
  Description of Artificial Sequence: Synthetic oligonucleotide
  Target: LAMA2; (-) strand; PAM type: YTN; PAM sequence: CTC
ctgagtagctgggaccactg

SEQ ID NO: 191117 - DNA, 20 bp, Artificial Sequence
  Description of Artificial Sequence: Synthetic oligonucleotide
  Target: LAMA2; (-) strand; PAM type: YTN; PAM sequence: CTC
agcctcctgagtagctggga

SEQ ID NO: 191118 - DNA, 20 bp, Artificial Sequence
  Description of Artificial Sequence: Synthetic oligonucleotide
  Target: LAMA2; (-) strand; PAM type: YTN; PAM sequence: TTC
ccatctcagcctcctgagta

SEQ ID NO: 191119 - DNA, 20 bp, Artificial Sequence
  Description of Artificial Sequence: Synthetic oligonucleotide
  Target: LAMA2; (-) strand; PAM type: YTN; PAM sequence: CTT
cccatctcagcctcctgagt

SEQ ID NO: 191120 - DNA, 20 bp, Artificial Sequence
  Description of Artificial Sequence: Synthetic oligonucleotide
  Target: LAMA2; (-) strand; PAM type: YTN; PAM sequence: TTC
aagtaatcttcccatctcag

SEQ ID NO: 191121 - DNA, 20 bp, Artificial Sequence
  Description of Artificial Sequence: Synthetic oligonucleotide
  Target: LAMA2; (-) strand; PAM type: YTN; PAM sequence: CTC
ccgggttcaagtaatcttcc

SEQ ID NO: 191122 - DNA, 20 bp, Artificial Sequence
  Description of Artificial Sequence: Synthetic oligonucleotide
  Target: LAMA2; (-) strand; PAM type: YTN; PAM sequence: CTC
gacctcccgggttcaagtaa

SEQ ID NO: 191123 - DNA, 20 bp, Artificial Sequence
  Description of Artificial Sequence: Synthetic oligonucleotide
  Target: LAMA2; (-) strand; PAM type: YTN; PAM sequence: CTG
cagcctcgacctcccgggtt

SEQ ID NO: 191124 - DNA, 20 bp, Artificial Sequence
  Description of Artificial Sequence: Synthetic oligonucleotide
  Target: LAMA2; (-) strand; PAM type: YTN; PAM sequence: CTA
aagtgcagtggtgtgatcat

SEQ ID NO: 191125 - DNA, 20 bp, Artificial Sequence
  Description of Artificial Sequence: Synthetic oligonucleotide
  Target: LAMA2; (-) strand; PAM type: YTN; PAM sequence: TTG
cccaggctaaagtgcagtgg

SEQ ID NO: 191126 - DNA, 20 bp, Artificial Sequence
  Description of Artificial Sequence: Synthetic oligonucleotide
  Target: LAMA2; (-) strand; PAM type: YTN; PAM sequence: CTG
ttgcccaggctaaagtgcag

SEQ ID NO: 191127 - DNA, 20 bp, Artificial Sequence
  Description of Artificial Sequence: Synthetic oligonucleotide
  Target: LAMA2; (-) strand; PAM type: YTN; PAM sequence: CTC
tgttgcccaggctaaagtgc

SEQ ID NO: 191128 - DNA, 20 bp, Artificial Sequence
  Description of Artificial Sequence: Synthetic oligonucleotide
  Target: LAMA2; (-) strand; PAM type: YTN; PAM sequence: TTG
ctctgttgcccaggctaaag

SEQ ID NO: 191129 - DNA, 20 bp, Artificial Sequence
  Description of Artificial Sequence: Synthetic oligonucleotide
  Target: LAMA2; (-) strand; PAM type: YTN; PAM sequence: CTT
gctctgttgcccaggctaaa

SEQ ID NO: 191130 - DNA, 20 bp, Artificial Sequence
  Description of Artificial Sequence: Synthetic oligonucleotide
  Target: LAMA2; (-) strand; PAM type: YTN; PAM sequence: CTA
gataaggtcttgctctgttg

SEQ ID NO: 191131 - DNA, 20 bp, Artificial Sequence
  Description of Artificial Sequence: Synthetic oligonucleotide
  Target: LAMA2; (-) strand; PAM type: YTN; PAM sequence: TTC
ctagataaggtcttgctctg

SEQ ID NO: 191132 - DNA, 20 bp, Artificial Sequence
  Description of Artificial Sequence: Synthetic oligonucleotide
  Target: LAMA2; (-) strand; PAM type: YTN; PAM sequence: TTG
ttcctagataaggtcttgct

SEQ ID NO: 191133 - DNA, 20 bp, Artificial Sequence
  Description of Artificial Sequence: Synthetic oligonucleotide
  Target: LAMA2; (-) strand; PAM type: YTN; PAM sequence: TTA
ttgttcctagataaggtctt

SEQ ID NO: 191134 - DNA, 20 bp, Artificial Sequence
  Description of Artificial Sequence: Synthetic oligonucleotide
  Target: LAMA2; (-) strand; PAM type: YTN; PAM sequence: TTT
attgttcctagataaggtct

SEQ ID NO: 191135 - DNA, 20 bp, Artificial Sequence
  Description of Artificial Sequence: Synthetic oligonucleotide
  Target: LAMA2; (-) strand; PAM type: YTN; PAM sequence: TTT
tattgttcctagataaggtc

SEQ ID NO: 191136 - DNA, 20 bp, Artificial Sequence
  Description of Artificial Sequence: Synthetic oligonucleotide
  Target: LAMA2; (-) strand; PAM type: YTN; PAM sequence: TTT
ttattgttcctagataaggt

SEQ ID NO: 191137 - DNA, 20 bp, Artificial Sequence
  Description of Artificial Sequence: Synthetic oligonucleotide
  Target: LAMA2; (-) strand; PAM type: YTN; PAM sequence: TTT
tttattgttcctagataagg

SEQ ID NO: 191138 - DNA, 20 bp, Artificial Sequence
  Description of Artificial Sequence: Synthetic oligonucleotide
  Target: LAMA2; (-) strand; PAM type: YTN; PAM sequence: TTG
gatcaaataatgaataatga

SEQ ID NO: 191139 - DNA, 20 bp, Artificial Sequence
  Description of Artificial Sequence: Synthetic oligonucleotide
  Target: LAMA2; (-) strand; PAM type: YTN; PAM sequence: TTT
ggatcaaataatgaataatg

SEQ ID NO: 191140 - DNA, 20 bp, Artificial Sequence
  Description of Artificial Sequence: Synthetic oligonucleotide
  Target: LAMA2; (-) strand; PAM type: YTN; PAM sequence: TTT
tggatcaaataatgaataat

SEQ ID NO: 191141 - DNA, 20 bp, Artificial Sequence
  Description of Artificial Sequence: Synthetic oligonucleotide
  Target: LAMA2; (-) strand; PAM type: YTN; PAM sequence: TTG
ttttggatcaaataatgaat

SEQ ID NO: 191142 - DNA, 20 bp, Artificial Sequence
  Description of Artificial Sequence: Synthetic oligonucleotide
  Target: LAMA2; (-) strand; PAM type: YTN; PAM sequence: TTT
gttttggatcaaataatgaa

SEQ ID NO: 191143 - DNA, 20 bp, Artificial Sequence
  Description of Artificial Sequence: Synthetic oligonucleotide
  Target: LAMA2; (-) strand; PAM type: YTN; PAM sequence: TTT
tgttttggatcaaataatga

SEQ ID NO: 191144 - DNA, 20 bp, Artificial Sequence
  Description of Artificial Sequence: Synthetic oligonucleotide
  Target: LAMA2; (-) strand; PAM type: YTN; PAM sequence: TTT
ttgttttggatcaaataatg

SEQ ID NO: 191145 - DNA, 20 bp, Artificial Sequence
  Description of Artificial Sequence: Synthetic oligonucleotide
  Target: LAMA2; (-) strand; PAM type: YTN; PAM sequence: CTA
taacatgtttttgttttgga

SEQ ID NO: 191146 - DNA, 20 bp, Artificial Sequence
  Description of Artificial Sequence: Synthetic oligonucleotide
  Target: LAMA2; (-) strand; PAM type: YTN; PAM sequence: CTA
tagatagtctataacatgtt

SEQ ID NO: 191147 - DNA, 20 bp, Artificial Sequence
  Description of Artificial Sequence: Synthetic oligonucleotide
  Target: LAMA2; (-) strand; PAM type: YTN; PAM sequence: TTG
aatctatagatagtctataa

SEQ ID NO: 191148 - DNA, 20 bp, Artificial Sequence
  Description of Artificial Sequence: Synthetic oligonucleotide
  Target: LAMA2; (-) strand; PAM type: YTN; PAM sequence: TTG
aaaattgaatctatagatag

SEQ ID NO: 191149 - DNA, 20 bp, Artificial Sequence
  Description of Artificial Sequence: Synthetic oligonucleotide
  Target: LAMA2; (-) strand; PAM type: YTN; PAM sequence: TTT
gaaaattgaatctatagata

SEQ ID NO: 191150 - DNA, 20 bp, Artificial Sequence
  Description of Artificial Sequence: Synthetic oligonucleotide
  Target: LAMA2; (-) strand; PAM type: YTN; PAM sequence: TTT
tgaaaattgaatctatagat

SEQ ID NO: 191151 - DNA, 20 bp, Artificial Sequence
  Description of Artificial Sequence: Synthetic oligonucleotide
  Target: LAMA2; (-) strand; PAM type: YTN; PAM sequence: TTT
ttgaaaattgaatctataga

SEQ ID NO: 191152 - DNA, 20 bp, Artificial Sequence
  Description of Artificial Sequence: Synthetic oligonucleotide
  Target: LAMA2; (-) strand; PAM type: YTN; PAM sequence: TTA
gagatgagaagcataggatt

SEQ ID NO: 191153 - DNA, 20 bp, Artificial Sequence
  Description of Artificial Sequence: Synthetic oligonucleotide
  Target: LAMA2; (-) strand; PAM type: YTN; PAM sequence: TTT
agagatgagaagcataggat

SEQ ID NO: 191154 - DNA, 20 bp, Artificial Sequence
  Description of Artificial Sequence: Synthetic oligonucleotide
  Target: LAMA2; (-) strand; PAM type: YTN; PAM sequence: TTA
taacaatatttagagatgag

SEQ ID NO: 191155 - DNA, 20 bp, Artificial Sequence
  Description of Artificial Sequence: Synthetic oligonucleotide
  Target: LAMA2; (-) strand; PAM type: YTN; PAM sequence: TTG
cagtattataacaatattta

SEQ ID NO: 191156 - DNA, 20 bp, Artificial Sequence
  Description of Artificial Sequence: Synthetic oligonucleotide
  Target: LAMA2; (-) strand; PAM type: YTN; PAM sequence: TTG
aaaattgcagtattataaca

SEQ ID NO: 191157 - DNA, 20 bp, Artificial Sequence
  Description of Artificial Sequence: Synthetic oligonucleotide
  Target: LAMA2; (-) strand; PAM type: YTN; PAM sequence: TTT
gaaaattgcagtattataac

SEQ ID NO: 191158 - DNA, 20 bp, Artificial Sequence
  Description of Artificial Sequence: Synthetic oligonucleotide
  Target: LAMA2; (-) strand; PAM type: YTN; PAM sequence: CTA
atttgaaaattgcagtatta

SEQ ID NO: 191159 - DNA, 20 bp, Artificial Sequence
  Description of Artificial Sequence: Synthetic oligonucleotide
  Target: LAMA2; (-) strand; PAM type: YTN; PAM sequence: TTA
aaggtgaaagctaatttgaa

SEQ ID NO: 191160 - DNA, 20 bp, Artificial Sequence
  Description of Artificial Sequence: Synthetic oligonucleotide
  Target: LAMA2; (-) strand; PAM type: YTN; PAM sequence: CTT
aaaggtgaaagctaatttga

SEQ ID NO: 191161 - DNA, 20 bp, Artificial Sequence
  Description of Artificial Sequence: Synthetic oligonucleotide
  Target: LAMA2; (-) strand; PAM type: YTN; PAM sequence: TTC
ttaaaggtgaaagctaattt

SEQ ID NO: 191162 - DNA, 20 bp, Artificial Sequence
  Description of Artificial Sequence: Synthetic oligonucleotide
  Target: LAMA2; (-) strand; PAM type: YTN; PAM sequence: TTT
cttaaaggtgaaagctaatt

SEQ ID NO: 191163 - DNA, 20 bp, Artificial Sequence
  Description of Artificial Sequence: Synthetic oligonucleotide
  Target: LAMA2; (-) strand; PAM type: YTN; PAM sequence: TTC
caatatggaaagtagcattt

SEQ ID NO: 191164 - DNA, 20 bp, Artificial Sequence
  Description of Artificial Sequence: Synthetic oligonucleotide
  Target: LAMA2; (-) strand; PAM type: YTN; PAM sequence: TTC
attccaatatggaaagtagc

SEQ ID NO: 191165 - DNA, 20 bp, Artificial Sequence
  Description of Artificial Sequence: Synthetic oligonucleotide
  Target: LAMA2; (-) strand; PAM type: YTN; PAM sequence: TTA
ttcattccaatatggaaagt

SEQ ID NO: 191166 - DNA, 20 bp, Artificial Sequence
  Description of Artificial Sequence: Synthetic oligonucleotide
  Target: LAMA2; (-) strand; PAM type: YTN; PAM sequence: TTA
attattcattccaatatgga

SEQ ID NO: 191167 - DNA, 20 bp, Artificial Sequence
  Description of Artificial Sequence: Synthetic oligonucleotide
  Target: LAMA2; (-) strand; PAM type: YTN; PAM sequence: CTA
tattaattattcattccaat

SEQ ID NO: 191168 - DNA, 20 bp, Artificial Sequence
  Description of Artificial Sequence: Synthetic oligonucleotide
  Target: LAMA2; (-) strand; PAM type: YTN; PAM sequence: TTC
tatattaattattcattcca

SEQ ID NO: 191169 - DNA, 20 bp, Artificial Sequence
  Description of Artificial Sequence: Synthetic oligonucleotide
  Target: LAMA2; (-) strand; PAM type: YTN; PAM sequence: TTG
gttctatattaattattcat

SEQ ID NO: 191170 - DNA, 20 bp, Artificial Sequence
  Description of Artificial Sequence: Synthetic oligonucleotide
  Target: LAMA2; (-) strand; PAM type: YTN; PAM sequence: TTT
ggttctatattaattattca

SEQ ID NO: 191171 - DNA, 20 bp, Artificial Sequence
  Description of Artificial Sequence: Synthetic oligonucleotide
  Target: LAMA2; (-) strand; PAM type: YTN; PAM sequence: TTT
tggttctatattaattattc

SEQ ID NO: 191172 - DNA, 20 bp, Artificial Sequence
  Description of Artificial Sequence: Synthetic oligonucleotide
  Target: LAMA2; (-) strand; PAM type: YTN; PAM sequence: CTA
aatcccagacatgcattttg

SEQ ID NO: 191173 - DNA, 20 bp, Artificial Sequence
  Description of Artificial Sequence: Synthetic oligonucleotide
  Target: LAMA2; (-) strand; PAM type: YTN; PAM sequence: TTC
taaatcccagacatgcattt

SEQ ID NO: 191174 - DNA, 20 bp, Artificial Sequence
  Description of Artificial Sequence: Synthetic oligonucleotide
  Target: LAMA2; (-) strand; PAM type: YTN; PAM sequence: TTT
ctaaatcccagacatgcatt

SEQ ID NO: 191175 - DNA, 20 bp, Artificial Sequence
  Description of Artificial Sequence: Synthetic oligonucleotide
  Target: LAMA2; (-) strand; PAM type: YTN; PAM sequence: TTT
tctaaatcccagacatgcat

SEQ ID NO: 191176 - DNA, 20 bp, Artificial Sequence
  Description of Artificial Sequence: Synthetic oligonucleotide
  Target: LAMA2; (-) strand; PAM type: YTN; PAM sequence: TTA
ataaaaaataagcaaggatg

SEQ ID NO: 191177 - DNA, 20 bp, Artificial Sequence
  Description of Artificial Sequence: Synthetic oligonucleotide
  Target: LAMA2; (-) strand; PAM type: YTN; PAM sequence: CTT
aataaaaaataagcaaggat

SEQ ID NO: 191178 - DNA, 20 bp, Artificial Sequence
  Description of Artificial Sequence: Synthetic oligonucleotide
  Target: LAMA2; (-) strand; PAM type: YTN; PAM sequence: TTA
gcttaataaaaaataagcaa

SEQ ID NO: 191179 - DNA, 20 bp, Artificial Sequence
  Description of Artificial Sequence: Synthetic oligonucleotide
  Target: LAMA2; (-) strand; PAM type: YTN; PAM sequence: CTT
agcttaataaaaaataagca

SEQ ID NO: 191180 - DNA, 20 bp, Artificial Sequence
  Description of Artificial Sequence: Synthetic oligonucleotide
  Target: LAMA2; (-) strand; PAM type: YTN; PAM sequence: TTA
aaatgaatgacttagcttaa

SEQ ID NO: 191181 - DNA, 20 bp, Artificial Sequence
  Description of Artificial Sequence: Synthetic oligonucleotide
  Target: LAMA2; (-) strand; PAM type: YTN; PAM sequence: CTT
aaaatgaatgacttagctta

SEQ ID NO: 191182 - DNA, 20 bp, Artificial Sequence
  Description of Artificial Sequence: Synthetic oligonucleotide
  Target: LAMA2; (-) strand; PAM type: YTN; PAM sequence: TTC
ttaaaatgaatgacttagct

SEQ ID NO: 191183 - DNA, 20 bp, Artificial Sequence
  Description of Artificial Sequence: Synthetic oligonucleotide
  Target: LAMA2; (-) strand; PAM type: YTN; PAM sequence: TTT
cttaaaatgaatgacttagc

SEQ ID NO: 191184 - DNA, 20 bp, Artificial Sequence
  Description of Artificial Sequence: Synthetic oligonucleotide
  Target: LAMA2; (-) strand; PAM type: YTN; PAM sequence: TTG
gggtaaaggggatcatttct

SEQ ID NO: 191185 - DNA, 20 bp, Artificial Sequence
  Description of Artificial Sequence: Synthetic oligonucleotide
  Target: LAMA2; (-) strand; PAM type: YTN; PAM sequence: CTA
tagttggggtaaaggggatc

SEQ ID NO: 191186 - DNA, 20 bp, Artificial Sequence
  Description of Artificial Sequence: Synthetic oligonucleotide
  Target: LAMA2; (-) strand; PAM type: YTN; PAM sequence: CTC
tatagttggggtaaagggga

SEQ ID NO: 191187 - DNA, 20 bp, Artificial Sequence
  Description of Artificial Sequence: Synthetic oligonucleotide
  Target: LAMA2; (-) strand; PAM type: YTN; PAM sequence: TTA
agtatggtagtatataaggt

SEQ ID NO: 191188 - DNA, 20 bp, Artificial Sequence
  Description of Artificial Sequence: Synthetic oligonucleotide
  Target: LAMA2; (-) strand; PAM type: YTN; PAM sequence: TTT
aagtatggtagtatataagg

SEQ ID NO: 191189 - DNA, 20 bp, Artificial Sequence
  Description of Artificial Sequence: Synthetic oligonucleotide
  Target: LAMA2; (-) strand; PAM type: YTN; PAM sequence: TTT
taagtatggtagtatataag

SEQ ID NO: 191190 - DNA, 20 bp, Artificial Sequence
  Description of Artificial Sequence: Synthetic oligonucleotide
  Target: LAMA2; (-) strand; PAM type: YTN; PAM sequence: CTT
ttaagtatggtagtatataa

SEQ ID NO: 191191 - DNA, 20 bp, Artificial Sequence
  Description of Artificial Sequence: Synthetic oligonucleotide
  Target: LAMA2; (-) strand; PAM type: YTN; PAM sequence: CTA
accttttaagtatggtagta

SEQ ID NO: 191192 - DNA, 20 bp, Artificial Sequence
  Description of Artificial Sequence: Synthetic oligonucleotide
  Target: LAMA2; (-) strand; PAM type: YTN; PAM sequence: TTC
actaaccttttaagtatggt

SEQ ID NO: 191193 - DNA, 20 bp, Artificial Sequence
  Description of Artificial Sequence: Synthetic oligonucleotide
  Target: LAMA2; (-) strand; PAM type: YTN; PAM sequence: CTT
cactaaccttttaagtatgg

SEQ ID NO: 191194 - DNA, 20 bp, Artificial Sequence
  Description of Artificial Sequence: Synthetic oligonucleotide
  Target: LAMA2; (-) strand; PAM type: YTN; PAM sequence: CTC
ttcactaaccttttaagtat

SEQ ID NO: 191195 - DNA, 20 bp, Artificial Sequence
  Description of Artificial Sequence: Synthetic oligonucleotide
  Target: LAMA2; (-) strand; PAM type: YTN; PAM sequence: CTA
tgcctcttcactaacctttt

SEQ ID NO: 191196 - DNA, 20 bp, Artificial Sequence
  Description of Artificial Sequence: Synthetic oligonucleotide
  Target: LAMA2; (-) strand; PAM type: YTN; PAM sequence: TTC
tatgcctcttcactaacctt

SEQ ID NO: 191197 - DNA, 20 bp, Artificial Sequence
  Description of Artificial Sequence: Synthetic oligonucleotide
  Target: LAMA2; (-) strand; PAM type: YTN; PAM sequence: TTT
ctatgcctcttcactaacct

SEQ ID NO: 191198 - DNA, 20 bp, Artificial Sequence
  Description of Artificial Sequence: Synthetic oligonucleotide
  Target: LAMA2; (-) strand; PAM type: YTN; PAM sequence: CTT
tctatgcctcttcactaacc

SEQ ID NO: 191199 - DNA, 20 bp, Artificial Sequence
  Description of Artificial Sequence: Synthetic oligonucleotide
  Target: LAMA2; (-) strand; PAM type: YTN; PAM sequence: CTC
tttctatgcctcttcactaa

SEQ ID NO: 191200 - DNA, 20 bp, Artificial Sequence
  Description of Artificial Sequence: Synthetic oligonucleotide
  Target: LAMA2; (-) strand; PAM type: YTN; PAM sequence: CTA
ctctttctatgcctcttcac

SEQ ID NO: 191201 - DNA, 20 bp, Artificial Sequence
  Description of Artificial Sequence: Synthetic oligonucleotide
  Target: LAMA2; (-) strand; PAM type: YTN; PAM sequence: TTC
actactctttctatgcctct

SEQ ID NO: 191202 - DNA, 20 bp, Artificial Sequence
  Description of Artificial Sequence: Synthetic oligonucleotide
  Target: LAMA2; (-) strand; PAM type: YTN; PAM sequence: TTT
cactactctttctatgcctc

SEQ ID NO: 191203 - DNA, 20 bp, Artificial Sequence
  Description of Artificial Sequence: Synthetic oligonucleotide
  Target: LAMA2; (-) strand; PAM type: YTN; PAM sequence: CTG
tttcactactctttctatgc

SEQ ID NO: 191204 - DNA, 20 bp, Artificial Sequence
  Description of Artificial Sequence: Synthetic oligonucleotide
  Target: LAMA2; (-) strand; PAM type: YTN; PAM sequence: TTC
actgtttcactactctttct

SEQ ID NO: 191205 - DNA, 20 bp, Artificial Sequence
  Description of Artificial Sequence: Synthetic oligonucleotide
  Target: LAMA2; (-) strand; PAM type: YTN; PAM sequence: TTT
cactgtttcactactctttc

SEQ ID NO: 191206 - DNA, 20 bp, Artificial Sequence
  Description of Artificial Sequence: Synthetic oligonucleotide
  Target: LAMA2; (-) strand; PAM type: YTN; PAM sequence: CTA
gaaggtttcactgtttcact

SEQ ID NO: 191207 - DNA, 20 bp, Artificial Sequence
  Description of Artificial Sequence: Synthetic oligonucleotide
  Target: LAMA2; (-) strand; PAM type: YTN; PAM sequence: CTG
gcatctagaaggtttcactg

SEQ ID NO: 191208 - DNA, 20 bp, Artificial Sequence
  Description of Artificial Sequence: Synthetic oligonucleotide
  Target: LAMA2; (-) strand; PAM type: YTN; PAM sequence: TTG
tatagcatctggcatctaga

SEQ ID NO: 191209 - DNA, 20 bp, Artificial Sequence
  Description of Artificial Sequence: Synthetic oligonucleotide
  Target: LAMA2; (-) strand; PAM type: YTN; PAM sequence: TTT
gtatagcatctggcatctag

SEQ ID NO: 191210 - DNA, 20 bp, Artificial Sequence
  Description of Artificial Sequence: Synthetic oligonucleotide
  Target: LAMA2; (-) strand; PAM type: YTN; PAM sequence: TTC
acatttgtatagcatctggc

SEQ ID NO: 191211 - DNA, 20 bp, Artificial Sequence
  Description of Artificial Sequence: Synthetic oligonucleotide
  Target: LAMA2; (-) strand; PAM type: YTN; PAM sequence: CTT
cacatttgtatagcatctgg

SEQ ID NO: 191212 - DNA, 20 bp, Artificial Sequence
  Description of Artificial Sequence: Synthetic oligonucleotide
  Target: LAMA2; (-) strand; PAM type: YTN; PAM sequence: CTG
gtgtcatatgcttcacattt

SEQ ID NO: 191213 - DNA, 20 bp, Artificial Sequence
  Description of Artificial Sequence: Synthetic oligonucleotide
  Target: LAMA2; (-) strand; PAM type: YTN; PAM sequence: TTC
accatgctggtgtcatatgc

SEQ ID NO: 191214 - DNA, 20 bp, Artificial Sequence
  Description of Artificial Sequence: Synthetic oligonucleotide
  Target: LAMA2; (-) strand; PAM type: YTN; PAM sequence: TTT
caccatgctggtgtcatatg

SEQ ID NO: 191215 - DNA, 20 bp, Artificial Sequence
  Description of Artificial Sequence: Synthetic oligonucleotide
  Target: LAMA2; (-) strand; PAM type: YTN; PAM sequence: TTT
tcaccatgctggtgtcatat

SEQ ID NO: 191216 - DNA, 20 bp, Artificial Sequence
  Description of Artificial Sequence: Synthetic oligonucleotide
  Target: LAMA2; (-) strand; PAM type: YTN; PAM sequence: TTT
ttcaccatgctggtgtcata

SEQ ID NO: 191217 - DNA, 20 bp, Artificial Sequence
  Description of Artificial Sequence: Synthetic oligonucleotide
  Target: LAMA2; (-) strand; PAM type: YTN; PAM sequence: CTT
tttcaccatgctggtgtcat

SEQ ID NO: 191218 - DNA, 20 bp, Artificial Sequence
  Description of Artificial Sequence: Synthetic oligonucleotide
  Target: LAMA2; (-) strand; PAM type: YTN; PAM sequence: TTC
ctttttcaccatgctggtgt

SEQ ID NO: 191219 - DNA, 20 bp, Artificial Sequence
  Description of Artificial Sequence: Synthetic oligonucleotide
  Target: LAMA2; (-) strand; PAM type: YTN; PAM sequence: CTT
cctttttcaccatgctggtg

SEQ ID NO: 191220 - DNA, 20 bp, Artificial Sequence
  Description of Artificial Sequence: Synthetic oligonucleotide
  Target: LAMA2; (-) strand; PAM type: YTN; PAM sequence: TTA
gcttcctttttcaccatgct

SEQ ID NO: 191221 - DNA, 20 bp, Artificial Sequence
  Description of Artificial Sequence: Synthetic oligonucleotide
  Target: LAMA2; (-) strand; PAM type: YTN; PAM sequence: TTA
attagcttcctttttcacca

SEQ ID NO: 191222 - DNA, 20 bp, Artificial Sequence
  Description of Artificial Sequence: Synthetic oligonucleotide
  Target: LAMA2; (-) strand; PAM type: YTN; PAM sequence: CTT
aattagcttcctttttcacc

SEQ ID NO: 191223 - DNA, 20 bp, Artificial Sequence
  Description of Artificial Sequence: Synthetic oligonucleotide
  Target: LAMA2; (-) strand; PAM type: YTN; PAM sequence: CTG
atggtcttaattagcttcct

SEQ ID NO: 191224 - DNA, 20 bp, Artificial Sequence
  Description of Artificial Sequence: Synthetic oligonucleotide
  Target: LAMA2; (-) strand; PAM type: YTN; PAM sequence: CTA
tctgatggtcttaattagct

SEQ ID NO: 191225 - DNA, 20 bp, Artificial Sequence
  Description of Artificial Sequence: Synthetic oligonucleotide
  Target: LAMA2; (-) strand; PAM type: YTN; PAM sequence: CTA
tggagagataaaatcaaata

SEQ ID NO: 191226 - DNA, 20 bp, Artificial Sequence
  Description of Artificial Sequence: Synthetic oligonucleotide
  Target: LAMA2; (-) strand; PAM type: YTN; PAM sequence: TTC
tatggagagataaaatcaaa

SEQ ID NO: 191227 - DNA, 20 bp, Artificial Sequence
  Description of Artificial Sequence: Synthetic oligonucleotide
  Target: LAMA2; (-) strand; PAM type: YTN; PAM sequence: TTT
ctatggagagataaaatcaa

SEQ ID NO: 191228 - DNA, 20 bp, Artificial Sequence
  Description of Artificial Sequence: Synthetic oligonucleotide
  Target: LAMA2; (-) strand; PAM type: YTN; PAM sequence: TTA
tcatgatttctatggagaga

SEQ ID NO: 191229 - DNA, 20 bp, Artificial Sequence
  Description of Artificial Sequence: Synthetic oligonucleotide
  Target: LAMA2; (-) strand; PAM type: YTN; PAM sequence: CTA
tgtaacatagttatcatgat

SEQ ID NO: 191230 - DNA, 20 bp, Artificial Sequence
  Description of Artificial Sequence: Synthetic oligonucleotide
  Target: LAMA2; (-) strand; PAM type: YTN; PAM sequence: TTC
agtaactatgtaacatagtt

SEQ ID NO: 191231 - DNA, 20 bp, Artificial Sequence
  Description of Artificial Sequence: Synthetic oligonucleotide
  Target: LAMA2; (-) strand; PAM type: YTN; PAM sequence: TTT
cagtaactatgtaacatagt

SEQ ID NO: 191232 - DNA, 20 bp, Artificial Sequence
  Description of Artificial Sequence: Synthetic oligonucleotide
  Target: LAMA2; (-) strand; PAM type: YTN; PAM sequence: CTA
aatttcagtaactatgtaac

SEQ ID NO: 191233 - DNA, 20 bp, Artificial Sequence
  Description of Artificial Sequence: Synthetic oligonucleotide
  Target: LAMA2; (-) strand; PAM type: YTN; PAM sequence: TTA
atgtctaaatttcagtaact

SEQ ID NO: 191234 - DNA, 20 bp, Artificial Sequence
  Description of Artificial Sequence: Synthetic oligonucleotide
  Target: LAMA2; (-) strand; PAM type: YTN; PAM sequence: CTT
aatgtctaaatttcagtaac

SEQ ID NO: 191235 - DNA, 20 bp, Artificial Sequence
  Description of Artificial Sequence: Synthetic oligonucleotide
  Target: LAMA2; (-) strand; PAM type: YTN; PAM sequence: TTC
cacaaacttaatgtctaaat

SEQ ID NO: 191236 - DNA, 20 bp, Artificial Sequence
  Description of Artificial Sequence: Synthetic oligonucleotide
  Target: LAMA2; (-) strand; PAM type: YTN; PAM sequence: CTG
tcagagagattccacaaact

SEQ ID NO: 191237 - DNA, 20 bp, Artificial Sequence
  Description of Artificial Sequence: Synthetic oligonucleotide
  Target: LAMA2; (-) strand; PAM type: YTN; PAM sequence: CTA
atataactgtcagagagatt

SEQ ID NO: 191238 - DNA, 20 bp, Artificial Sequence
  Description of Artificial Sequence: Synthetic oligonucleotide
  Target: LAMA2; (-) strand; PAM type: YTN; PAM sequence: TTA
gctaatataactgtcagaga

SEQ ID NO: 191239 - DNA, 20 bp, Artificial Sequence
  Description of Artificial Sequence: Synthetic oligonucleotide
  Target: LAMA2; (-) strand; PAM type: YTN; PAM sequence: TTA
gtgattagctaatataactg

SEQ ID NO: 191240 - DNA, 20 bp, Artificial Sequence
  Description of Artificial Sequence: Synthetic oligonucleotide
  Target: LAMA2; (-) strand; PAM type: YTN; PAM sequence: TTT
agtgattagctaatataact

SEQ ID NO: 191241 - DNA, 20 bp, Artificial Sequence
  Description of Artificial Sequence: Synthetic oligonucleotide
  Target: LAMA2; (-) strand; PAM type: YTN; PAM sequence: CTG
tttagtgattagctaatata

SEQ ID NO: 191242 - DNA, 20 bp, Artificial Sequence
  Description of Artificial Sequence: Synthetic oligonucleotide
  Target: LAMA2; (-) strand; PAM type: YTN; PAM sequence: TTC
tgtttagtgattagctaata

SEQ ID NO: 191243 - DNA, 20 bp, Artificial Sequence
  Description of Artificial Sequence: Synthetic oligonucleotide
  Target: LAMA2; (-) strand; PAM type: YTN; PAM sequence: TTT
ctgtttagtgattagctaat

SEQ ID NO: 191244 - DNA, 20 bp, Artificial Sequence
  Description of Artificial Sequence: Synthetic oligonucleotide
  Target: LAMA2; (-) strand; PAM type: YTN; PAM sequence: TTA
aaatttctgtttagtgatta

SEQ ID NO: 191245 - DNA, 20 bp, Artificial Sequence
  Description of Artificial Sequence: Synthetic oligonucleotide
  Target: LAMA2; (-) strand; PAM type: YTN; PAM sequence: TTT
aaaatttctgtttagtgatt

SEQ ID NO: 191246 - DNA, 20 bp, Artificial Sequence
  Description of Artificial Sequence: Synthetic oligonucleotide
  Target: LAMA2; (-) strand; PAM type: YTN; PAM sequence: TTT
taaaatttctgtttagtgat

SEQ ID NO: 191247 - DNA, 20 bp, Artificial Sequence
  Description of Artificial Sequence: Synthetic oligonucleotide
  Target: LAMA2; (-) strand; PAM type: YTN; PAM sequence: CTT
ttaaaatttctgtttagtga

SEQ ID NO: 191248 - DNA, 20 bp, Artificial Sequence
  Description of Artificial Sequence: Synthetic oligonucleotide
  Target: LAMA2; (-) strand; PAM type: YTN; PAM sequence: TTC
ttttaaaatttctgtttagt

SEQ ID NO: 191249 - DNA, 20 bp, Artificial Sequence
  Description of Artificial Sequence: Synthetic oligonucleotide
  Target: LAMA2; (-) strand; PAM type: YTN; PAM sequence: CTT
cttttaaaatttctgtttag

SEQ ID NO: 191250 - DNA, 20 bp, Artificial Sequence
  Description of Artificial Sequence: Synthetic oligonucleotide
  Target: LAMA2; (-) strand; PAM type: YTN; PAM sequence: TTA
aatacttcttttaaaatttc

SEQ ID NO: 191251 - DNA, 20 bp, Artificial Sequence
  Description of Artificial Sequence: Synthetic oligonucleotide
  Target: LAMA2; (-) strand; PAM type: YTN; PAM sequence: TTA
atattaaatacttcttttaa

SEQ ID NO: 191252 - DNA, 20 bp, Artificial Sequence
  Description of Artificial Sequence: Synthetic oligonucleotide
  Target: LAMA2; (-) strand; PAM type: YTN; PAM sequence: TTG
agaattaatattaaatactt

SEQ ID NO: 191253 - DNA, 20 bp, Artificial Sequence
  Description of Artificial Sequence: Synthetic oligonucleotide
  Target: LAMA2; (-) strand; PAM type: YTN; PAM sequence: CTT
gagaattaatattaaatact

SEQ ID NO: 191254 - DNA, 20 bp, Artificial Sequence
  Description of Artificial Sequence: Synthetic oligonucleotide
  Target: LAMA2; (-) strand; PAM type: YTN; PAM sequence: CTA
agacttgagaattaatatta

SEQ ID NO: 191255 - DNA, 20 bp, Artificial Sequence
  Description of Artificial Sequence: Synthetic oligonucleotide
  Target: LAMA2; (-) strand; PAM type: YTN; PAM sequence: CTC
ctaagacttgagaattaata

SEQ ID NO: 191256 - DNA, 20 bp, Artificial Sequence
  Description of Artificial Sequence: Synthetic oligonucleotide
  Target: LAMA2; (-) strand; PAM type: YTN; PAM sequence: TTC
tcctaagacttgagaattaa

SEQ ID NO: 191257 - DNA, 20 bp, Artificial Sequence
  Description of Artificial Sequence: Synthetic oligonucleotide
  Target: LAMA2; (-) strand; PAM type: YTN; PAM sequence: CTA
aatattctcctaagacttga

SEQ ID NO: 191258 - DNA, 20 bp, Artificial Sequence
  Description of Artificial Sequence: Synthetic oligonucleotide
  Target: LAMA2; (-) strand; PAM type: YTN; PAM sequence: TTA
gctaaatattctcctaagac

SEQ ID NO: 191259 - DNA, 20 bp, Artificial Sequence
  Description of Artificial Sequence: Synthetic oligonucleotide
  Target: LAMA2; (-) strand; PAM type: YTN; PAM sequence: TTA
ttagctaaatattctcctaa

SEQ ID NO: 191260 - DNA, 20 bp, Artificial Sequence
  Description of Artificial Sequence: Synthetic oligonucleotide
  Target: LAMA2; (-) strand; PAM type: YTN; PAM sequence: CTG
tagaattattagctaaatat

SEQ ID NO: 191261 - DNA, 20 bp, Artificial Sequence
  Description of Artificial Sequence: Synthetic oligonucleotide
  Target: LAMA2; (-) strand; PAM type: YTN; PAM sequence: CTG
cagtcaactgtagaattatt

SEQ ID NO: 191262 - DNA, 20 bp, Artificial Sequence
  Description of Artificial Sequence: Synthetic oligonucleotide
  Target: LAMA2; (-) strand; PAM type: YTN; PAM sequence: CTC
tgcagtcaactgtagaatta

SEQ ID NO: 191263 - DNA, 20 bp, Artificial Sequence
  Description of Artificial Sequence: Synthetic oligonucleotide
  Target: LAMA2; (-) strand; PAM type: YTN; PAM sequence: TTA
aataatgaataaactctgca

SEQ ID NO: 191264 - DNA, 20 bp, Artificial Sequence
  Description of Artificial Sequence: Synthetic oligonucleotide
  Target: LAMA2; (-) strand; PAM type: YTN; PAM sequence: TTA
tgaattaaataatgaataaa

SEQ ID NO: 191265 - DNA, 20 bp, Artificial Sequence
  Description of Artificial Sequence: Synthetic oligonucleotide
  Target: LAMA2; (-) strand; PAM type: YTN; PAM sequence: TTG
aaaagacattatgaattaaa

SEQ ID NO: 191266 - DNA, 20 bp, Artificial Sequence
  Description of Artificial Sequence: Synthetic oligonucleotide
  Target: LAMA2; (-) strand; PAM type: YTN; PAM sequence: TTC
atgaatcaagaaacagtaaa

SEQ ID NO: 191267 - DNA, 20 bp, Artificial Sequence
  Description of Artificial Sequence: Synthetic oligonucleotide
  Target: LAMA2; (-) strand; PAM type: YTN; PAM sequence: CTT
catgaatcaagaaacagtaa

SEQ ID NO: 191268 - DNA, 20 bp, Artificial Sequence
  Description of Artificial Sequence: Synthetic oligonucleotide
  Target: LAMA2; (-) strand; PAM type: YTN; PAM sequence: TTC
ttcatgaatcaagaaacagt

SEQ ID NO: 191269 - DNA, 20 bp, Artificial Sequence
  Description of Artificial Sequence: Synthetic oligonucleotide
  Target: LAMA2; (-) strand; PAM type: YTN; PAM sequence: TTG
gcatgtattcttcatgaatc

SEQ ID NO: 191270 - DNA, 20 bp, Artificial Sequence
  Description of Artificial Sequence: Synthetic oligonucleotide
  Target: LAMA2; (-) strand; PAM type: YTN; PAM sequence: CTT
ggcatgtattcttcatgaat

SEQ ID NO: 191271 - DNA, 20 bp, Artificial Sequence
  Description of Artificial Sequence: Synthetic oligonucleotide
  Target: LAMA2; (-) strand; PAM type: YTN; PAM sequence: CTA
atacacttggcatgtattct

SEQ ID NO: 191272 - DNA, 20 bp, Artificial Sequence
  Description of Artificial Sequence: Synthetic oligonucleotide
  Target: LAMA2; (-) strand; PAM type: YTN; PAM sequence: TTA
cagcagtgtgagaacagact

SEQ ID NO: 191273 - DNA, 20 bp, Artificial Sequence
  Description of Artificial Sequence: Synthetic oligonucleotide
  Target: LAMA2; (-) strand; PAM type: YTN; PAM sequence: TTT
acagcagtgtgagaacagac

SEQ ID NO: 191274 - DNA, 20 bp, Artificial Sequence
  Description of Artificial Sequence: Synthetic oligonucleotide
  Target: LAMA2; (-) strand; PAM type: YTN; PAM sequence: CTT
tacagcagtgtgagaacaga

SEQ ID NO: 191275 - DNA, 20 bp, Artificial Sequence
  Description of Artificial Sequence: Synthetic oligonucleotide
  Target: LAMA2; (-) strand; PAM type: YTN; PAM sequence: TTC
tttacagcagtgtgagaaca

SEQ ID NO: 191276 - DNA, 20 bp, Artificial Sequence
  Description of Artificial Sequence: Synthetic oligonucleotide
  Target: LAMA2; (-) strand; PAM type: YTN; PAM sequence: TTG
gccagttctttacagcagtg

SEQ ID NO: 191277 - DNA, 20 bp, Artificial Sequence
  Description of Artificial Sequence: Synthetic oligonucleotide
  Target: LAMA2; (-) strand; PAM type: YTN; PAM sequence: CTT
ggccagttctttacagcagt

SEQ ID NO: 191278 - DNA, 20 bp, Artificial Sequence
  Description of Artificial Sequence: Synthetic oligonucleotide
  Target: LAMA2; (-) strand; PAM type: YTN; PAM sequence: TTG
cccagtcttggccagttctt

SEQ ID NO: 191279 - DNA, 20 bp, Artificial Sequence
  Description of Artificial Sequence: Synthetic oligonucleotide
  Target: LAMA2; (-) strand; PAM type: YTN; PAM sequence: TTG
taaattgcccagtcttggcc

SEQ ID NO: 191280 - DNA, 20 bp, Artificial Sequence
  Description of Artificial Sequence: Synthetic oligonucleotide
  Target: LAMA2; (-) strand; PAM type: YTN; PAM sequence: TTT
gtaaattgcccagtcttggc

SEQ ID NO: 191281 - DNA, 20 bp, Artificial Sequence
  Description of Artificial Sequence: Synthetic oligonucleotide
  Target: LAMA2; (-) strand; PAM type: YTN; PAM sequence: CTT
tgtaaattgcccagtcttgg

SEQ ID NO: 191282 - DNA, 20 bp, Artificial Sequence
  Description of Artificial Sequence: Synthetic oligonucleotide
  Target: LAMA2; (-) strand; PAM type: YTN; PAM sequence: CTC
tttgtaaattgcccagtctt

SEQ ID NO: 191283 - DNA, 20 bp, Artificial Sequence
  Description of Artificial Sequence: Synthetic oligonucleotide
  Target: LAMA2; (-) strand; PAM type: YTN; PAM sequence: TTA
aacctctttgtaaattgccc

SEQ ID NO: 191284 - DNA, 20 bp, Artificial Sequence
  Description of Artificial Sequence: Synthetic oligonucleotide
  Target: LAMA2; (-) strand; PAM type: YTN; PAM sequence: CTG
agtcaattaaacctctttgt

SEQ ID NO: 191285 - DNA, 20 bp, Artificial Sequence
  Description of Artificial Sequence: Synthetic oligonucleotide
  Target: LAMA2; (-) strand; PAM type: YTN; PAM sequence: CTC
cccagccaggtggaactgag

SEQ ID NO: 191286 - DNA, 20 bp, Artificial Sequence
  Description of Artificial Sequence: Synthetic oligonucleotide
  Target: LAMA2; (-) strand; PAM type: YTN; PAM sequence: CTG
aggcctccccagccaggtgg

SEQ ID NO: 191287 - DNA, 20 bp, Artificial Sequence
  Description of Artificial Sequence: Synthetic oligonucleotide
  Target: LAMA2; (-) strand; PAM type: YTN; PAM sequence: TTC
ctgaggcctccccagccagg

SEQ ID NO: 191288 - DNA, 20 bp, Artificial Sequence
  Description of Artificial Sequence: Synthetic oligonucleotide
  Target: LAMA2; (-) strand; PAM type: YTN; PAM sequence: TTT
cctgaggcctccccagccag

SEQ ID NO: 191289 - DNA, 20 bp, Artificial Sequence
  Description of Artificial Sequence: Synthetic oligonucleotide
  Target: LAMA2; (-) strand; PAM type: YTN; PAM sequence: TTG
taagtttcctgaggcctccc

SEQ ID NO: 191290 - DNA, 20 bp, Artificial Sequence
  Description of Artificial Sequence: Synthetic oligonucleotide
  Target: LAMA2; (-) strand; PAM type: YTN; PAM sequence: CTG
tcatgattgtaagtttcctg

SEQ ID NO: 191291 - DNA, 20 bp, Artificial Sequence
  Description of Artificial Sequence: Synthetic oligonucleotide
  Target: LAMA2; (-) strand; PAM type: YTN; PAM sequence: TTC
tgtcatgattgtaagtttcc

SEQ ID NO: 191292 - DNA, 20 bp, Artificial Sequence
  Description of Artificial Sequence: Synthetic oligonucleotide
  Target: LAMA2; (-) strand; PAM type: YTN; PAM sequence: CTT
ctgtcatgattgtaagtttc

SEQ ID NO: 191293 - DNA, 20 bp, Artificial Sequence
  Description of Artificial Sequence: Synthetic oligonucleotide
  Target: LAMA2; (-) strand; PAM type: YTN; PAM sequence: TTC
ccttctgtcatgattgtaag

SEQ ID NO: 191294 - DNA, 20 bp, Artificial Sequence
  Description of Artificial Sequence: Synthetic oligonucleotide
  Target: LAMA2; (-) strand; PAM type: YTN; PAM sequence: TTT
cccttctgtcatgattgtaa

SEQ ID NO: 191295 - DNA, 20 bp, Artificial Sequence
  Description of Artificial Sequence: Synthetic oligonucleotide
  Target: LAMA2; (-) strand; PAM type: YTN; PAM sequence: CTT
tcccttctgtcatgattgta

SEQ ID NO: 191296 - DNA, 20 bp, Artificial Sequence
  Description of Artificial Sequence: Synthetic oligonucleotide
  Target: LAMA2; (-) strand; PAM type: YTN; PAM sequence: TTG
ctttcccttctgtcatgatt

SEQ ID NO: 191297 - DNA, 20 bp, Artificial Sequence
  Description of Artificial Sequence: Synthetic oligonucleotide
  Target: LAMA2; (-) strand; PAM type: YTN; PAM sequence: TTT
gctttcccttctgtcatgat

SEQ ID NO: 191298 - DNA, 20 bp, Artificial Sequence
  Description of Artificial Sequence: Synthetic oligonucleotide
  Target: LAMA2; (-) strand; PAM type: YTN; PAM sequence: CTG
acatcatgaagaagaatgtg

SEQ ID NO: 191299 - DNA, 20 bp, Artificial Sequence
  Description of Artificial Sequence: Synthetic oligonucleotide
  Target: LAMA2; (-) strand; PAM type: YTN; PAM sequence: TTC
ctgacatcatgaagaagaat

SEQ ID NO: 191300 - DNA, 20 bp, Artificial Sequence
  Description of Artificial Sequence: Synthetic oligonucleotide
  Target: LAMA2; (-) strand; PAM type: YTN; PAM sequence: CTT
cctgacatcatgaagaagaa

SEQ ID NO: 191301 - DNA, 20 bp, Artificial Sequence
  Description of Artificial Sequence: Synthetic oligonucleotide
  Target: LAMA2; (-) strand; PAM type: YTN; PAM sequence: CTC
cttcctgacatcatgaagaa

SEQ ID NO: 191302 - DNA, 20 bp, Artificial Sequence
  Description of Artificial Sequence: Synthetic oligonucleotide
  Target: LAMA2; (-) strand; PAM type: YTN; PAM sequence: TTC
tccttcctgacatcatgaag

SEQ ID NO: 191303 - DNA, 20 bp, Artificial Sequence
  Description of Artificial Sequence: Synthetic oligonucleotide
  Target: LAMA2; (-) strand; PAM type: YTN; PAM sequence: CTT
ctccttcctgacatcatgaa

SEQ ID NO: 191304 - DNA, 20 bp, Artificial Sequence
  Description of Artificial Sequence: Synthetic oligonucleotide
  Target: LAMA2; (-) strand; PAM type: YTN; PAM sequence: CTG
cacttctccttcctgacatc

SEQ ID NO: 191305 - DNA, 20 bp, Artificial Sequence
  Description of Artificial Sequence: Synthetic oligonucleotide
  Target: LAMA2; (-) strand; PAM type: YTN; PAM sequence: CTC
tgcacttctccttcctgaca

SEQ ID NO: 191306 - DNA, 20 bp, Artificial Sequence
  Description of Artificial Sequence: Synthetic oligonucleotide
  Target: LAMA2; (-) strand; PAM type: YTN; PAM sequence: TTC
gctctgcacttctccttcct

SEQ ID NO: 191307 - DNA, 20 bp, Artificial Sequence
  Description of Artificial Sequence: Synthetic oligonucleotide
  Target: LAMA2; (-) strand; PAM type: YTN; PAM sequence: CTT
cgctctgcacttctccttcc

SEQ ID NO: 191308 - DNA, 20 bp, Artificial Sequence
  Description of Artificial Sequence: Synthetic oligonucleotide
  Target: LAMA2; (-) strand; PAM type: YTN; PAM sequence: TTC
ccccacttcgctctgcactt

SEQ ID NO: 191309 - DNA, 20 bp, Artificial Sequence
  Description of Artificial Sequence: Synthetic oligonucleotide
  Target: LAMA2; (-) strand; PAM type: YTN; PAM sequence: TTT
cccccacttcgctctgcact

SEQ ID NO: 191310 - DNA, 20 bp, Artificial Sequence
  Description of Artificial Sequence: Synthetic oligonucleotide
  Target: LAMA2; (-) strand; PAM type: YTN; PAM sequence: TTT
tcccccacttcgctctgcac

SEQ ID NO: 191311 - DNA, 20 bp, Artificial Sequence
  Description of Artificial Sequence: Synthetic oligonucleotide
  Target: LAMA2; (-) strand; PAM type: YTN; PAM sequence: CTT
ttcccccacttcgctctgca

SEQ ID NO: 191312 - DNA, 20 bp, Artificial Sequence
  Description of Artificial Sequence: Synthetic oligonucleotide
  Target: LAMA2; (-) strand; PAM type: YTN; PAM sequence: TTA
taaggggcttttcccccact

SEQ ID NO: 191313 - DNA, 20 bp, Artificial Sequence
  Description of Artificial Sequence: Synthetic oligonucleotide
  Target: LAMA2; (-) strand; PAM type: YTN; PAM sequence: TTT
ataaggggcttttcccccac

SEQ ID NO: 191314 - DNA, 20 bp, Artificial Sequence
  Description of Artificial Sequence: Synthetic oligonucleotide
  Target: LAMA2; (-) strand; PAM type: YTN; PAM sequence: TTT
tataaggggcttttccccca

SEQ ID NO: 191315 - DNA, 20 bp, Artificial Sequence
  Description of Artificial Sequence: Synthetic oligonucleotide
  Target: LAMA2; (-) strand; PAM type: YTN; PAM sequence: CTG
atggttttataaggggcttt

SEQ ID NO: 191316 - DNA, 20 bp, Artificial Sequence
  Description of Artificial Sequence: Synthetic oligonucleotide
  Target: LAMA2; (-) strand; PAM type: YTN; PAM sequence: CTC
atgaggtctgatggttttat

SEQ ID NO: 191317 - DNA, 20 bp, Artificial Sequence
  Description of Artificial Sequence: Synthetic oligonucleotide
  Target: LAMA2; (-) strand; PAM type: YTN; PAM sequence: CTC
aggatagtgagtagtctcat

SEQ ID NO: 191318 - DNA, 20 bp, Artificial Sequence
  Description of Artificial Sequence: Synthetic oligonucleotide
  Target: LAMA2; (-) strand; PAM type: YTN; PAM sequence: TTC
tcaggatagtgagtagtctc

SEQ ID NO: 191319 - DNA, 20 bp, Artificial Sequence
  Description of Artificial Sequence: Synthetic oligonucleotide
  Target: LAMA2; (-) strand; PAM type: YTN; PAM sequence: CTG
ttctcaggatagtgagtagt

SEQ ID NO: 191320 - DNA, 20 bp, Artificial Sequence
  Description of Artificial Sequence: Synthetic oligonucleotide
  Target: LAMA2; (-) strand; PAM type: YTN; PAM sequence: TTC
ccccatgctgttctcaggat

SEQ ID NO: 191321 - DNA, 20 bp, Artificial Sequence
  Description of Artificial Sequence: Synthetic oligonucleotide
  Target: LAMA2; (-) strand; PAM type: YTN; PAM sequence: TTA
gatcatgagagtgattcccc

SEQ ID NO: 191322 - DNA, 20 bp, Artificial Sequence
  Description of Artificial Sequence: Synthetic oligonucleotide
  Target: LAMA2; (-) strand; PAM type: YTN; PAM sequence: CTG
gaaggtgattagatcatgag

SEQ ID NO: 191323 - DNA, 20 bp, Artificial Sequence
  Description of Artificial Sequence: Synthetic oligonucleotide
  Target: LAMA2; (-) strand; PAM type: YTN; PAM sequence: CTC
ctggaaggtgattagatcat

SEQ ID NO: 191324 - DNA, 20 bp, Artificial Sequence
  Description of Artificial Sequence: Synthetic oligonucleotide
  Target: LAMA2; (-) strand; PAM type: YTN; PAM sequence: TTG
ggggagggacctcctggaag

SEQ ID NO: 191325 - DNA, 20 bp, Artificial Sequence
  Description of Artificial Sequence: Synthetic oligonucleotide
  Target: LAMA2; (-) strand; PAM type: YTN; PAM sequence: TTG
taatccccatgtgttggggg

SEQ ID NO: 191326 - DNA, 20 bp, Artificial Sequence
  Description of Artificial Sequence: Synthetic oligonucleotide
  Target: LAMA2; (-) strand; PAM type: YTN; PAM sequence: TTG
taatccaaattgtaatcccc

SEQ ID NO: 191327 - DNA, 20 bp, Artificial Sequence
  Description of Artificial Sequence: Synthetic oligonucleotide
  Target: LAMA2; (-) strand; PAM type: YTN; PAM sequence: TTG
aattgtaatccaaattgtaa

SEQ ID NO: 191328 - DNA, 20 bp, Artificial Sequence
  Description of Artificial Sequence: Synthetic oligonucleotide
  Target: LAMA2; (-) strand; PAM type: YTN; PAM sequence: CTT
gaattgtaatccaaattgta

SEQ ID NO: 191329 - DNA, 20 bp, Artificial Sequence
  Description of Artificial Sequence: Synthetic oligonucleotide
  Target: LAMA2; (-) strand; PAM type: YTN; PAM sequence: CTC
atcttgaattgtaatccaaa

SEQ ID NO: 191330 - DNA, 20 bp, Artificial Sequence
  Description of Artificial Sequence: Synthetic oligonucleotide
  Target: LAMA2; (-) strand; PAM type: YTN; PAM sequence: CTC
acaaaatctcatcttgaatt

SEQ ID NO: 191331 - DNA, 20 bp, Artificial Sequence
  Description of Artificial Sequence: Synthetic oligonucleotide
  Target: LAMA2; (-) strand; PAM type: YTN; PAM sequence: CTC
agtgtcctcacaaaatctca

SEQ ID NO: 191332 - DNA, 20 bp, Artificial Sequence
  Description of Artificial Sequence: Synthetic oligonucleotide
  Target: LAMA2; (-) strand; PAM type: YTN; PAM sequence: CTG
gctcagtgtcctcacaaaat

SEQ ID NO: 191333 - DNA, 20 bp, Artificial Sequence
  Description of Artificial Sequence: Synthetic oligonucleotide
  Target: LAMA2; (-) strand; PAM type: YTN; PAM sequence: TTA
gtgatatggtctggctcagt

SEQ ID NO: 191334 - DNA, 20 bp, Artificial Sequence
  Description of Artificial Sequence: Synthetic oligonucleotide
  Target: LAMA2; (-) strand; PAM type: YTN; PAM sequence: CTT
agtgatatggtctggctcag

SEQ ID NO: 191335 - DNA, 20 bp, Artificial Sequence
  Description of Artificial Sequence: Synthetic oligonucleotide
  Target: LAMA2; (-) strand; PAM type: YTN; PAM sequence: CTC
ttagtgatatggtctggctc

SEQ ID NO: 191336 - DNA, 20 bp, Artificial Sequence
  Description of Artificial Sequence: Synthetic oligonucleotide
  Target: LAMA2; (-) strand; PAM type: YTN; PAM sequence: TTC
tcttagtgatatggtctggc

SEQ ID NO: 191337 - DNA, 20 bp, Artificial Sequence
  Description of Artificial Sequence: Synthetic oligonucleotide
  Target: LAMA2; (-) strand; PAM type: YTN; PAM sequence: TTA
ttctcttagtgatatggtct

SEQ ID NO: 191338 - DNA, 20 bp, Artificial Sequence
  Description of Artificial Sequence: Synthetic oligonucleotide
  Target: LAMA2; (-) strand; PAM type: YTN; PAM sequence: TTT
attctcttagtgatatggtc

SEQ ID NO: 191339 - DNA, 20 bp, Artificial Sequence
  Description of Artificial Sequence: Synthetic oligonucleotide
  Target: LAMA2; (-) strand; PAM type: YTN; PAM sequence: TTT
tattctcttagtgatatggt

SEQ ID NO: 191340 - DNA, 20 bp, Artificial Sequence
  Description of Artificial Sequence: Synthetic oligonucleotide
  Target: LAMA2; (-) strand; PAM type: YTN; PAM sequence: TTT
ttattctcttagtgatatgg

SEQ ID NO: 191341 - DNA, 20 bp, Artificial Sequence
  Description of Artificial Sequence: Synthetic oligonucleotide
  Target: LAMA2; (-) strand; PAM type: YTN; PAM sequence: CTG
tgtccatttttattctctta

SEQ ID NO: 191342 - DNA, 20 bp, Artificial Sequence
  Description of Artificial Sequence: Synthetic oligonucleotide
  Target: LAMA2; (-) strand; PAM type: YTN; PAM sequence: TTC
tgtgtccatttttattctct

SEQ ID NO: 191343 - DNA, 20 bp, Artificial Sequence
  Description of Artificial Sequence: Synthetic oligonucleotide
  Target: LAMA2; (-) strand; PAM type: YTN; PAM sequence: TTA
aagggaataggaaagtggca

SEQ ID NO: 191344 - DNA, 20 bp, Artificial Sequence
  Description of Artificial Sequence: Synthetic oligonucleotide
  Target: LAMA2; (-) strand; PAM type: YTN; PAM sequence: TTT
aaagggaataggaaagtggc

SEQ ID NO: 191345 - DNA, 20 bp, Artificial Sequence
  Description of Artificial Sequence: Synthetic oligonucleotide
  Target: LAMA2; (-) strand; PAM type: YTN; PAM sequence: CTG
gaaatatttaaagggaatag

SEQ ID NO: 191346 - DNA, 20 bp, Artificial Sequence
  Description of Artificial Sequence: Synthetic oligonucleotide
  Target: LAMA2; (-) strand; PAM type: YTN; PAM sequence: TTC
aactggaaatatttaaaggg

SEQ ID NO: 191347 - DNA, 20 bp, Artificial Sequence
  Description of Artificial Sequence: Synthetic oligonucleotide
  Target: LAMA2; (-) strand; PAM type: YTN; PAM sequence: TTT
caactggaaatatttaaagg

SEQ ID NO: 191348 - DNA, 20 bp, Artificial Sequence
  Description of Artificial Sequence: Synthetic oligonucleotide
  Target: LAMA2; (-) strand; PAM type: YTN; PAM sequence: CTT
tcaactggaaatatttaaag

SEQ ID NO: 191349 - DNA, 20 bp, Artificial Sequence
  Description of Artificial Sequence: Synthetic oligonucleotide
  Target: LAMA2; (-) strand; PAM type: YTN; PAM sequence: CTA
ggtcatggaaatactttcaa

SEQ ID NO: 191350 - DNA, 20 bp, Artificial Sequence
  Description of Artificial Sequence: Synthetic oligonucleotide
  Target: LAMA2; (-) strand; PAM type: YTN; PAM sequence: CTC
actaggtcatggaaatactt

SEQ ID NO: 191351 - DNA, 20 bp, Artificial Sequence
  Description of Artificial Sequence: Synthetic oligonucleotide
  Target: LAMA2; (-) strand; PAM type: YTN; PAM sequence: CTA
agaactcactaggtcatgga

SEQ ID NO: 191352 - DNA, 20 bp, Artificial Sequence
  Description of Artificial Sequence: Synthetic oligonucleotide
  Target: LAMA2; (-) strand; PAM type: YTN; PAM sequence: CTC
taagaactcactaggtcatg

SEQ ID NO: 191353 - DNA, 20 bp, Artificial Sequence
  Description of Artificial Sequence: Synthetic oligonucleotide
  Target: LAMA2; (-) strand; PAM type: YTN; PAM sequence: TTC
tctaagaactcactaggtca

SEQ ID NO: 191354 - DNA, 20 bp, Artificial Sequence
  Description of Artificial Sequence: Synthetic oligonucleotide
  Target: LAMA2; (-) strand; PAM type: YTN; PAM sequence: TTG
aattctctaagaactcacta

SEQ ID NO: 191355 - DNA, 20 bp, Artificial Sequence
  Description of Artificial Sequence: Synthetic oligonucleotide
  Target: LAMA2; (-) strand; PAM type: YTN; PAM sequence: TTG
ggacatcaatagtgattgaa

SEQ ID NO: 191356 - DNA, 20 bp, Artificial Sequence
  Description of Artificial Sequence: Synthetic oligonucleotide
  Target: LAMA2; (-) strand; PAM type: YTN; PAM sequence: TTA
taccagttgggacatcaata

SEQ ID NO: 191357 - DNA, 20 bp, Artificial Sequence
  Description of Artificial Sequence: Synthetic oligonucleotide
  Target: LAMA2; (-) strand; PAM type: YTN; PAM sequence: TTA
ttataccagttgggacatca

SEQ ID NO: 191358 - DNA, 20 bp, Artificial Sequence
  Description of Artificial Sequence: Synthetic oligonucleotide
  Target: LAMA2; (-) strand; PAM type: YTN; PAM sequence: TTT
attataccagttgggacatc

SEQ ID NO: 191359 - DNA, 20 bp, Artificial Sequence
  Description of Artificial Sequence: Synthetic oligonucleotide
  Target: LAMA2; (-) strand; PAM type: YTN; PAM sequence: TTT
tattataccagttgggacat

SEQ ID NO: 191360 - DNA, 20 bp, Artificial Sequence
  Description of Artificial Sequence: Synthetic oligonucleotide
  Target: LAMA2; (-) strand; PAM type: YTN; PAM sequence: CTT
ttattataccagttgggaca

SEQ ID NO: 191361 - DNA, 20 bp, Artificial Sequence
  Description of Artificial Sequence: Synthetic oligonucleotide
  Target: LAMA2; (-) strand; PAM type: YTN; PAM sequence: TTC
ttttattataccagttggga

SEQ ID NO: 191362 - DNA, 20 bp, Artificial Sequence
  Description of Artificial Sequence: Synthetic oligonucleotide
  Target: LAMA2; (-) strand; PAM type: YTN; PAM sequence: CTT
cttttattataccagttggg

SEQ ID NO: 191363 - DNA, 20 bp, Artificial Sequence
  Description of Artificial Sequence: Synthetic oligonucleotide
  Target: LAMA2; (-) strand; PAM type: YTN; PAM sequence: TTC
ttcttttattataccagttg

SEQ ID NO: 191364 - DNA, 20 bp, Artificial Sequence
  Description of Artificial Sequence: Synthetic oligonucleotide
  Target: LAMA2; (-) strand; PAM type: YTN; PAM sequence: TTT
cttcttttattataccagtt

SEQ ID NO: 191365 - DNA, 20 bp, Artificial Sequence
  Description of Artificial Sequence: Synthetic oligonucleotide
  Target: LAMA2; (-) strand; PAM type: YTN; PAM sequence: TTT
tcttcttttattataccagt

SEQ ID NO: 191366 - DNA, 20 bp, Artificial Sequence
  Description of Artificial Sequence: Synthetic oligonucleotide
  Target: LAMA2; (-) strand; PAM type: YTN; PAM sequence: TTA
tgtgttttcttcttttatta

SEQ ID NO: 191367 - DNA, 20 bp, Artificial Sequence
  Description of Artificial Sequence: Synthetic oligonucleotide
  Target: LAMA2; (-) strand; PAM type: YTN; PAM sequence: CTC
aaaattatgtgttttcttct

SEQ ID NO: 191368 - DNA, 20 bp, Artificial Sequence
  Description of Artificial Sequence: Synthetic oligonucleotide
  Target: LAMA2; (-) strand; PAM type: YTN; PAM sequence: TTG
tctcaaaattatgtgttttc

SEQ ID NO: 191369 - DNA, 20 bp, Artificial Sequence
  Description of Artificial Sequence: Synthetic oligonucleotide
  Target: LAMA2; (-) strand; PAM type: YTN; PAM sequence: TTT
gtctcaaaattatgtgtttt

SEQ ID NO: 191370 - DNA, 20 bp, Artificial Sequence
  Description of Artificial Sequence: Synthetic oligonucleotide
  Target: LAMA2; (-) strand; PAM type: YTN; PAM sequence: CTG
agagtgtgagaaaggtggaa

SEQ ID NO: 191371 - DNA, 20 bp, Artificial Sequence
  Description of Artificial Sequence: Synthetic oligonucleotide
  Target: LAMA2; (-) strand; PAM type: YTN; PAM sequence: TTA
tatgctgagagtgtgagaaa

SEQ ID NO: 191372 - DNA, 20 bp, Artificial Sequence
  Description of Artificial Sequence: Synthetic oligonucleotide
  Target: LAMA2; (-) strand; PAM type: YTN; PAM sequence: TTT
atatgctgagagtgtgagaa

SEQ ID NO: 191373 - DNA, 20 bp, Artificial Sequence
  Description of Artificial Sequence: Synthetic oligonucleotide
  Target: LAMA2; (-) strand; PAM type: YTN; PAM sequence: TTA
tgtgtttatatgctgagagt

SEQ ID NO: 191374 - DNA, 20 bp, Artificial Sequence
  Description of Artificial Sequence: Synthetic oligonucleotide
  Target: LAMA2; (-) strand; PAM type: YTN; PAM sequence: TTC
gattatgtgtttatatgctg

SEQ ID NO: 191375 - DNA, 20 bp, Artificial Sequence
  Description of Artificial Sequence: Synthetic oligonucleotide
  Target: LAMA2; (-) strand; PAM type: YTN; PAM sequence: CTT
cgattatgtgtttatatgct

SEQ ID NO: 191376 - DNA, 20 bp, Artificial Sequence
  Description of Artificial Sequence: Synthetic oligonucleotide
  Target: LAMA2; (-) strand; PAM type: YTN; PAM sequence: TTG
cttcgattatgtgtttatat

SEQ ID NO: 191377 - DNA, 20 bp, Artificial Sequence
  Description of Artificial Sequence: Synthetic oligonucleotide
  Target: LAMA2; (-) strand; PAM type: YTN; PAM sequence: CTT
gcttcgattatgtgtttata

SEQ ID NO: 191378 - DNA, 20 bp, Artificial Sequence
  Description of Artificial Sequence: Synthetic oligonucleotide
  Target: LAMA2; (-) strand; PAM type: YTN; PAM sequence: TTC
ttgcttcgattatgtgttta

SEQ ID NO: 191379 - DNA, 20 bp, Artificial Sequence
  Description of Artificial Sequence: Synthetic oligonucleotide
  Target: LAMA2; (-) strand; PAM type: YTN; PAM sequence: TTT
cttgcttcgattatgtgttt

SEQ ID NO: 191380 - DNA, 20 bp, Artificial Sequence
  Description of Artificial Sequence: Synthetic oligonucleotide
  Target: LAMA2; (-) strand; PAM type: YTN; PAM sequence: TTT
tcttgcttcgattatgtgtt

SEQ ID NO: 191381 - DNA, 20 bp, Artificial Sequence
  Description of Artificial Sequence: Synthetic oligonucleotide
  Target: LAMA2; (-) strand; PAM type: YTN; PAM sequence: TTT
ttcttgcttcgattatgtgt

SEQ ID NO: 191382 - DNA, 20 bp, Artificial Sequence
  Description of Artificial Sequence: Synthetic oligonucleotide
  Target: LAMA2; (-) strand; PAM type: YTN; PAM sequence: CTC
atttttcttgcttcgattat

SEQ ID NO: 191383 - DNA, 20 bp, Artificial Sequence
  Description of Artificial Sequence: Synthetic oligonucleotide
  Target: LAMA2; (-) strand; PAM type: YTN; PAM sequence: TTC
tcatttttcttgcttcgatt

SEQ ID NO: 191384 - DNA, 20 bp, Artificial Sequence
  Description of Artificial Sequence: Synthetic oligonucleotide
  Target: LAMA2; (-) strand; PAM type: YTN; PAM sequence: TTT
ctcatttttcttgcttcgat

SEQ ID NO: 191385 - DNA, 20 bp, Artificial Sequence
  Description of Artificial Sequence: Synthetic oligonucleotide
  Target: LAMA2; (-) strand; PAM type: YTN; PAM sequence: TTT
tctcatttttcttgcttcga

SEQ ID NO: 191386 - DNA, 20 bp, Artificial Sequence
  Description of Artificial Sequence: Synthetic oligonucleotide
  Target: LAMA2; (-) strand; PAM type: YTN; PAM sequence: TTT
ttctcatttttcttgcttcg

SEQ ID NO: 191387 - DNA, 20 bp, Artificial Sequence
  Description of Artificial Sequence: Synthetic oligonucleotide
  Target: LAMA2; (-) strand; PAM type: YTN; PAM sequence: TTT
tttctcatttttcttgcttc

SEQ ID NO: 191388 - DNA, 20 bp, Artificial Sequence
  Description of Artificial Sequence: Synthetic oligonucleotide
  Target: LAMA2; (-) strand; PAM type: YTN; PAM sequence: TTG
attttttctcatttttcttg

SEQ ID NO: 191389 - DNA, 20 bp, Artificial Sequence
  Description of Artificial Sequence: Synthetic oligonucleotide
  Target: LAMA2; (-) strand; PAM type: YTN; PAM sequence: TTT
gattttttctcatttttctt

SEQ ID NO: 191390 - DNA, 20 bp, Artificial Sequence
  Description of Artificial Sequence: Synthetic oligonucleotide
  Target: LAMA2; (-) strand; PAM type: YTN; PAM sequence: TTA
tatatttgattttttctcat

SEQ ID NO: 191391 - DNA, 20 bp, Artificial Sequence
  Description of Artificial Sequence: Synthetic oligonucleotide
  Target: LAMA2; (-) strand; PAM type: YTN; PAM sequence: TTC
atcatattatatatttgatt

SEQ ID NO: 191392 - DNA, 20 bp, Artificial Sequence
  Description of Artificial Sequence: Synthetic oligonucleotide
  Target: LAMA2; (-) strand; PAM type: YTN; PAM sequence: CTT
catcatattatatatttgat

SEQ ID NO: 191393 - DNA, 20 bp, Artificial Sequence
  Description of Artificial Sequence: Synthetic oligonucleotide
  Target: LAMA2; (-) strand; PAM type: YTN; PAM sequence: TTC
ttcatcatattatatatttg

SEQ ID NO: 191394 - DNA, 20 bp, Artificial Sequence
  Description of Artificial Sequence: Synthetic oligonucleotide
  Target: LAMA2; (-) strand; PAM type: YTN; PAM sequence: TTG
gccccacatgtcataatgaa

SEQ ID NO: 191395 - DNA, 20 bp, Artificial Sequence
  Description of Artificial Sequence: Synthetic oligonucleotide
  Target: LAMA2; (-) strand; PAM type: YTN; PAM sequence: TTT
ggccccacatgtcataatga

SEQ ID NO: 191396 - DNA, 20 bp, Artificial Sequence
  Description of Artificial Sequence: Synthetic oligonucleotide
  Target: LAMA2; (-) strand; PAM type: YTN; PAM sequence: CTT
tggccccacatgtcataatg

SEQ ID NO: 191397 - DNA, 20 bp, Artificial Sequence
  Description of Artificial Sequence: Synthetic oligonucleotide
  Target: LAMA2; (-) strand; PAM type: YTN; PAM sequence: TTG
tcactttggccccacatgtc

SEQ ID NO: 191398 - DNA, 20 bp, Artificial Sequence
  Description of Artificial Sequence: Synthetic oligonucleotide
  Target: LAMA2; (-) strand; PAM type: YTN; PAM sequence: TTT
gtcactttggccccacatgt

SEQ ID NO: 191399 - DNA, 20 bp, Artificial Sequence
  Description of Artificial Sequence: Synthetic oligonucleotide
  Target: LAMA2; (-) strand; PAM type: YTN; PAM sequence: TTT
tgtcactttggccccacatg

SEQ ID NO: 191400 - DNA, 20 bp, Artificial Sequence
  Description of Artificial Sequence: Synthetic oligonucleotide
  Target: LAMA2; (-) strand; PAM type: YTN; PAM sequence: CTT
ttgtcactttggccccacat

SEQ ID NO: 191401 - DNA, 20 bp, Artificial Sequence
  Description of Artificial Sequence: Synthetic oligonucleotide
  Target: LAMA2; (-) strand; PAM type: YTN; PAM sequence: TTA
cttttgtcactttggcccca

SEQ ID NO: 191402 - DNA, 20 bp, Artificial Sequence
  Description of Artificial Sequence: Synthetic oligonucleotide
  Target: LAMA2; (-) strand; PAM type: YTN; PAM sequence: TTG
tccaattacttttgtcactt

SEQ ID NO: 191403 - DNA, 20 bp, Artificial Sequence
  Description of Artificial Sequence: Synthetic oligonucleotide
  Target: LAMA2; (-) strand; PAM type: YTN; PAM sequence: TTT
gtccaattacttttgtcact

SEQ ID NO: 191404 - DNA, 20 bp, Artificial Sequence
  Description of Artificial Sequence: Synthetic oligonucleotide
  Target: LAMA2; (-) strand; PAM type: YTN; PAM sequence: CTT
tgtccaattacttttgtcac

SEQ ID NO: 191405 - DNA, 20 bp, Artificial Sequence
  Description of Artificial Sequence: Synthetic oligonucleotide
  Target: LAMA2; (-) strand; PAM type: YTN; PAM sequence: CTA
cctttgtccaattacttttg

SEQ ID NO: 191406 - DNA, 20 bp, Artificial Sequence
  Description of Artificial Sequence: Synthetic oligonucleotide
  Target: LAMA2; (-) strand; PAM type: YTN; PAM sequence: CTG
agtctacctttgtccaatta

SEQ ID NO: 191407 - DNA, 20 bp, Artificial Sequence
  Description of Artificial Sequence: Synthetic oligonucleotide
  Target: LAMA2; (-) strand; PAM type: YTN; PAM sequence: TTG
ctgagtctacctttgtccaa

SEQ ID NO: 191408 - DNA, 20 bp, Artificial Sequence
  Description of Artificial Sequence: Synthetic oligonucleotide
  Target: LAMA2; (-) strand; PAM type: YTN; PAM sequence: CTC
attgctgagtctacctttgt

SEQ ID NO: 191409 - DNA, 20 bp, Artificial Sequence
  Description of Artificial Sequence: Synthetic oligonucleotide
  Target: LAMA2; (-) strand; PAM type: YTN; PAM sequence: TTC
caagtcctcattgctgagtc

SEQ ID NO: 191410 - DNA, 20 bp, Artificial Sequence
  Description of Artificial Sequence: Synthetic oligonucleotide
  Target: LAMA2; (-) strand; PAM type: YTN; PAM sequence: CTT
ccaagtcctcattgctgagt

SEQ ID NO: 191411 - DNA, 20 bp, Artificial Sequence
  Description of Artificial Sequence: Synthetic oligonucleotide
  Target: LAMA2; (-) strand; PAM type: YTN; PAM sequence: TTC
ttccaagtcctcattgctga

SEQ ID NO: 191412 - DNA, 20 bp, Artificial Sequence
  Description of Artificial Sequence: Synthetic oligonucleotide
  Target: LAMA2; (-) strand; PAM type: YTN; PAM sequence: TTT
cttccaagtcctcattgctg

SEQ ID NO: 191413 - DNA, 20 bp, Artificial Sequence
  Description of Artificial Sequence: Synthetic oligonucleotide
  Target: LAMA2; (-) strand; PAM type: YTN; PAM sequence: CTC
atttcttccaagtcctcatt

SEQ ID NO: 191414 - DNA, 20 bp, Artificial Sequence
  Description of Artificial Sequence: Synthetic oligonucleotide
  Target: LAMA2; (-) strand; PAM type: YTN; PAM sequence: CTG
aaagctcatttcttccaagt

SEQ ID NO: 191415 - DNA, 20 bp, Artificial Sequence
  Description of Artificial Sequence: Synthetic oligonucleotide
  Target: LAMA2; (-) strand; PAM type: YTN; PAM sequence: TTA
aaatgggactgaaagctcat

SEQ ID NO: 191416 - DNA, 20 bp, Artificial Sequence
  Description of Artificial Sequence: Synthetic oligonucleotide
  Target: LAMA2; (-) strand; PAM type: YTN; PAM sequence: TTT
aaaatgggactgaaagctca

SEQ ID NO: 191417 - DNA, 20 bp, Artificial Sequence
  Description of Artificial Sequence: Synthetic oligonucleotide
  Target: LAMA2; (-) strand; PAM type: YTN; PAM sequence: CTT
taaaatgggactgaaagctc

SEQ ID NO: 191418 - DNA, 20 bp, Artificial Sequence
  Description of Artificial Sequence: Synthetic oligonucleotide
  Target: LAMA2; (-) strand; PAM type: YTN; PAM sequence: CTA
ctttaaaatgggactgaaag

SEQ ID NO: 191419 - DNA, 20 bp, Artificial Sequence
  Description of Artificial Sequence: Synthetic oligonucleotide
  Target: LAMA2; (-) strand; PAM type: YTN; PAM sequence: TTC
tactttaaaatgggactgaa

SEQ ID NO: 191420 - DNA, 20 bp, Artificial Sequence
  Description of Artificial Sequence: Synthetic oligonucleotide
  Target: LAMA2; (-) strand; PAM type: YTN; PAM sequence: CTT
ctactttaaaatgggactga

SEQ ID NO: 191421 - DNA, 20 bp, Artificial Sequence
  Description of Artificial Sequence: Synthetic oligonucleotide
  Target: LAMA2; (-) strand; PAM type: YTN; PAM sequence: CTC
ttctactttaaaatgggact

SEQ ID NO: 191422 - DNA, 20 bp, Artificial Sequence
  Description of Artificial Sequence: Synthetic oligonucleotide
  Target: LAMA2; (-) strand; PAM type: YTN; PAM sequence: TTC
tcttctactttaaaatggga

SEQ ID NO: 191423 - DNA, 20 bp, Artificial Sequence
  Description of Artificial Sequence: Synthetic oligonucleotide
  Target: LAMA2; (-) strand; PAM type: YTN; PAM sequence: CTT
ctcttctactttaaaatggg

SEQ ID NO: 191424 - DNA, 20 bp, Artificial Sequence
  Description of Artificial Sequence: Synthetic oligonucleotide
  Target: LAMA2; (-) strand; PAM type: YTN; PAM sequence: CTA
ccttctcttctactttaaaa

SEQ ID NO: 191425 - DNA, 20 bp, Artificial Sequence
  Description of Artificial Sequence: Synthetic oligonucleotide
  Target: LAMA2; (-) strand; PAM type: YTN; PAM sequence: TTG
ataccctaccttctcttcta

SEQ ID NO: 191426 - DNA, 20 bp, Artificial Sequence
  Description of Artificial Sequence: Synthetic oligonucleotide
  Target: LAMA2; (-) strand; PAM type: YTN; PAM sequence: TTT
gataccctaccttctcttct

SEQ ID NO: 191427 - DNA, 20 bp, Artificial Sequence
  Description of Artificial Sequence: Synthetic oligonucleotide
  Target: LAMA2; (-) strand; PAM type: YTN; PAM sequence: TTT
tgataccctaccttctcttc

SEQ ID NO: 191428 - DNA, 20 bp, Artificial Sequence
  Description of Artificial Sequence: Synthetic oligonucleotide
  Target: LAMA2; (-) strand; PAM type: YTN; PAM sequence: CTT
ttgataccctaccttctctt

SEQ ID NO: 191429 - DNA, 20 bp, Artificial Sequence
  Description of Artificial Sequence: Synthetic oligonucleotide
  Target: LAMA2; (-) strand; PAM type: YTN; PAM sequence: CTA
cttttgataccctaccttct

SEQ ID NO: 191430 - DNA, 20 bp, Artificial Sequence
  Description of Artificial Sequence: Synthetic oligonucleotide
  Target: LAMA2; (-) strand; PAM type: YTN; PAM sequence: TTG
cgtagcgcaccctacttttg

SEQ ID NO: 191431 - DNA, 20 bp, Artificial Sequence
  Description of Artificial Sequence: Synthetic oligonucleotide
  Target: LAMA2; (-) strand; PAM type: YTN; PAM sequence: TTT
gcgtagcgcaccctactttt

SEQ ID NO: 191432 - DNA, 20 bp, Artificial Sequence
  Description of Artificial Sequence: Synthetic oligonucleotide
  Target: LAMA2; (-) strand; PAM type: YTN; PAM sequence: CTT
tgcgtagcgcaccctacttt

SEQ ID NO: 191433 - DNA, 20 bp, Artificial Sequence
  Description of Artificial Sequence: Synthetic oligonucleotide
  Target: LAMA2; (-) strand; PAM type: YTN; PAM sequence: CTC
cactttgcgtagcgcaccct

SEQ ID NO: 191434 - DNA, 20 bp, Artificial Sequence
  Description of Artificial Sequence: Synthetic oligonucleotide
  Target: LAMA2; (-) strand; PAM type: YTN; PAM sequence: CTA
aaaacaacaacaacaaaaac

SEQ ID NO: 191435 - DNA, 20 bp, Artificial Sequence
  Description of Artificial Sequence: Synthetic oligonucleotide
  Target: LAMA2; (-) strand; PAM type: YTN; PAM sequence: CTC
taaaaacaacaacaacaaaa

SEQ ID NO: 191436 - DNA, 20 bp, Artificial Sequence
  Description of Artificial Sequence: Synthetic oligonucleotide
  Target: LAMA2; (-) strand; PAM type: YTN; PAM sequence: CTG
tctctaaaaacaacaacaac

SEQ ID NO: 191437 - DNA, 20 bp, Artificial Sequence
  Description of Artificial Sequence: Synthetic oligonucleotide
  Target: LAMA2; (-) strand; PAM type: YTN; PAM sequence: CTG
cagtgggcaaagatgggtga

SEQ ID NO: 191438 - DNA, 20 bp, Artificial Sequence
  Description of Artificial Sequence: Synthetic oligonucleotide
  Target: LAMA2; (-) strand; PAM type: YTN; PAM sequence: TTC
aaggctgcagtgggcaaaga

SEQ ID NO: 191439 - DNA, 20 bp, Artificial Sequence
  Description of Artificial Sequence: Synthetic oligonucleotide
  Target: LAMA2; (-) strand; PAM type: YTN; PAM sequence: TTG
agcccagtagttcaaggctg

SEQ ID NO: 191440 - DNA, 20 bp, Artificial Sequence
  Description of Artificial Sequence: Synthetic oligonucleotide
  Target: LAMA2; (-) strand; PAM type: YTN; PAM sequence: CTT
gagcccagtagttcaaggct

SEQ ID NO: 191441 - DNA, 20 bp, Artificial Sequence
  Description of Artificial Sequence: Synthetic oligonucleotide
  Target: LAMA2; (-) strand; PAM type: YTN; PAM sequence: CTG
aggcaggaggatcacttgag

SEQ ID NO: 191442 - DNA, 20 bp, Artificial Sequence
  Description of Artificial Sequence: Synthetic oligonucleotide
  Target: LAMA2; (-) strand; PAM type: YTN; PAM sequence: CTG
agggagactgaggcaggagg

SEQ ID NO: 191443 - DNA, 20 bp, Artificial Sequence
  Description of Artificial Sequence: Synthetic oligonucleotide
  Target: LAMA2; (-) strand; PAM type: YTN; PAM sequence: TTG
taatcccagcactgagggag

SEQ ID NO: 191444 - DNA, 20 bp, Artificial Sequence
  Description of Artificial Sequence: Synthetic oligonucleotide
  Target: LAMA2; (-) strand; PAM type: YTN; PAM sequence: TTT
gtaatcccagcactgaggga

SEQ ID NO: 191445 - DNA, 20 bp, Artificial Sequence
  Description of Artificial Sequence: Synthetic oligonucleotide
  Target: LAMA2; (-) strand; PAM type: YTN; PAM sequence: CTC
acatttgtaatcccagcact

SEQ ID NO: 191446 - DNA, 20 bp, Artificial Sequence
  Description of Artificial Sequence: Synthetic oligonucleotide
  Target: LAMA2; (-) strand; PAM type: YTN; PAM sequence: TTG
ggtagctcacatttgtaatc

SEQ ID NO: 191447 - DNA, 20 bp, Artificial Sequence
  Description of Artificial Sequence: Synthetic oligonucleotide
  Target: LAMA2; (-) strand; PAM type: YTN; PAM sequence: TTG
ggtgttgggtagctcacatt

SEQ ID NO: 191448 - DNA, 20 bp, Artificial Sequence
  Description of Artificial Sequence: Synthetic oligonucleotide
  Target: LAMA2; (-) strand; PAM type: YTN; PAM sequence: TTA
caatcaagaaaacattgggt

SEQ ID NO: 191449 - DNA, 20 bp, Artificial Sequence
  Description of Artificial Sequence: Synthetic oligonucleotide
  Target: LAMA2; (-) strand; PAM type: YTN; PAM sequence: TTT
acaatcaagaaaacattggg

SEQ ID NO: 191450 - DNA, 20 bp, Artificial Sequence
  Description of Artificial Sequence: Synthetic oligonucleotide
  Target: LAMA2; (-) strand; PAM type: YTN; PAM sequence: TTT
tacaatcaagaaaacattgg

SEQ ID NO: 191451 - DNA, 20 bp, Artificial Sequence
  Description of Artificial Sequence: Synthetic oligonucleotide
  Target: LAMA2; (-) strand; PAM type: YTN; PAM sequence: CTT
ttacaatcaagaaaacattg

SEQ ID NO: 191452 - DNA, 20 bp, Artificial Sequence
  Description of Artificial Sequence: Synthetic oligonucleotide
  Target: LAMA2; (-) strand; PAM type: YTN; PAM sequence: TTC
ttttacaatcaagaaaacat

SEQ ID NO: 191453 - DNA, 20 bp, Artificial Sequence
  Description of Artificial Sequence: Synthetic oligonucleotide
  Target: LAMA2; (-) strand; PAM type: YTN; PAM sequence: TTT
cttttacaatcaagaaaaca

SEQ ID NO: 191454 - DNA, 20 bp, Artificial Sequence
  Description of Artificial Sequence: Synthetic oligonucleotide
  Target: LAMA2; (-) strand; PAM type: YTN; PAM sequence: TTT
tcttttacaatcaagaaaac

SEQ ID NO: 191455 - DNA, 20 bp, Artificial Sequence
  Description of Artificial Sequence: Synthetic oligonucleotide
  Target: LAMA2; (-) strand; PAM type: YTN; PAM sequence: CTG
gtgaacatgagaaaccatca

SEQ ID NO: 191456 - DNA, 20 bp, Artificial Sequence
  Description of Artificial Sequence: Synthetic oligonucleotide
  Target: LAMA2; (-) strand; PAM type: YTN; PAM sequence: CTC
tggtgaacatgagaaaccat

SEQ ID NO: 191457 - DNA, 20 bp, Artificial Sequence
  Description of Artificial Sequence: Synthetic oligonucleotide
  Target: LAMA2; (-) strand; PAM type: YTN; PAM sequence: TTC
cctctggtgaacatgagaaa

SEQ ID NO: 191458 - DNA, 20 bp, Artificial Sequence
  Description of Artificial Sequence: Synthetic oligonucleotide
  Target: LAMA2; (-) strand; PAM type: YTN; PAM sequence: TTT
ccctctggtgaacatgagaa

SEQ ID NO: 191459 - DNA, 20 bp, Artificial Sequence
  Description of Artificial Sequence: Synthetic oligonucleotide
  Target: LAMA2; (-) strand; PAM type: YTN; PAM sequence: TTG
ataaaatgaatggatgtttc

SEQ ID NO: 191460 - DNA, 20 bp, Artificial Sequence
  Description of Artificial Sequence: Synthetic oligonucleotide
  Target: LAMA2; (-) strand; PAM type: YTN; PAM sequence: TTA
aacacattgataaaatgaat

SEQ ID NO: 191461 - DNA, 20 bp, Artificial Sequence
  Description of Artificial Sequence: Synthetic oligonucleotide
  Target: LAMA2; (-) strand; PAM type: YTN; PAM sequence: TTT
aaacacattgataaaatgaa

SEQ ID NO: 191462 - DNA, 20 bp, Artificial Sequence
  Description of Artificial Sequence: Synthetic oligonucleotide
  Target: LAMA2; (-) strand; PAM type: YTN; PAM sequence: TTT
taaacacattgataaaatga

SEQ ID NO: 191463 - DNA, 20 bp, Artificial Sequence
  Description of Artificial Sequence: Synthetic oligonucleotide
  Target: LAMA2; (-) strand; PAM type: YTN; PAM sequence: TTA
ttttaaacacattgataaaa

SEQ ID NO: 191464 - DNA, 20 bp, Artificial Sequence
  Description of Artificial Sequence: Synthetic oligonucleotide
  Target: LAMA2; (-) strand; PAM type: YTN; PAM sequence: TTA
aagtgaaagaaggagtaaga

SEQ ID NO: 191465 - DNA, 20 bp, Artificial Sequence
  Description of Artificial Sequence: Synthetic oligonucleotide
  Target: LAMA2; (-) strand; PAM type: YTN; PAM sequence: TTT
aaagtgaaagaaggagtaag

SEQ ID NO: 191466 - DNA, 20 bp, Artificial Sequence
  Description of Artificial Sequence: Synthetic oligonucleotide
  Target: LAMA2; (-) strand; PAM type: YTN; PAM sequence: CTT
taaagtgaaagaaggagtaa

SEQ ID NO: 191467 - DNA, 20 bp, Artificial Sequence
  Description of Artificial Sequence: Synthetic oligonucleotide
  Target: LAMA2; (-) strand; PAM type: YTN; PAM sequence: TTA
aacactttaaagtgaaagaa

SEQ ID NO: 191468 - DNA, 20 bp, Artificial Sequence
  Description of Artificial Sequence: Synthetic oligonucleotide
  Target: LAMA2; (-) strand; PAM type: YTN; PAM sequence: TTA
tgaatagaatgcaaaaatga

SEQ ID NO: 191469 - DNA, 20 bp, Artificial Sequence
  Description of Artificial Sequence: Synthetic oligonucleotide
  Target: LAMA2; (-) strand; PAM type: YTN; PAM sequence: TTT
atgaatagaatgcaaaaatg

SEQ ID NO: 191470 - DNA, 20 bp, Artificial Sequence
  Description of Artificial Sequence: Synthetic oligonucleotide
  Target: LAMA2; (-) strand; PAM type: YTN; PAM sequence: CTG
gtcatatttatgaatagaat

SEQ ID NO: 191471 - DNA, 20 bp, Artificial Sequence
  Description of Artificial Sequence: Synthetic oligonucleotide
  Target: LAMA2; (-) strand; PAM type: YTN; PAM sequence: TTG
tgactggtcatatttatgaa

SEQ ID NO: 191472 - DNA, 20 bp, Artificial Sequence
  Description of Artificial Sequence: Synthetic oligonucleotide
  Target: LAMA2; (-) strand; PAM type: YTN; PAM sequence: CTA
agttgtgactggtcatattt

SEQ ID NO: 191473 - DNA, 20 bp, Artificial Sequence
  Description of Artificial Sequence: Synthetic oligonucleotide
  Target: LAMA2; (-) strand; PAM type: YTN; PAM sequence: TTC
taagttgtgactggtcatat

SEQ ID NO: 191474 - DNA, 20 bp, Artificial Sequence
  Description of Artificial Sequence: Synthetic oligonucleotide
  Target: LAMA2; (-) strand; PAM type: YTN; PAM sequence: TTA
atatgaaataatacagtata

SEQ ID NO: 191475 - DNA, 20 bp, Artificial Sequence
  Description of Artificial Sequence: Synthetic oligonucleotide
  Target: LAMA2; (-) strand; PAM type: YTN; PAM sequence: TTA
tagaagaacaaaatgtgtgt

SEQ ID NO: 191476 - DNA, 20 bp, Artificial Sequence
  Description of Artificial Sequence: Synthetic oligonucleotide
  Target: LAMA2; (-) strand; PAM type: YTN; PAM sequence: CTA
ttatagaagaacaaaatgtg

SEQ ID NO: 191477 - DNA, 20 bp, Artificial Sequence
  Description of Artificial Sequence: Synthetic oligonucleotide
  Target: LAMA2; (-) strand; PAM type: YTN; PAM sequence: CTA
atatatgaaaccatacacaa

SEQ ID NO: 191478 - DNA, 20 bp, Artificial Sequence
  Description of Artificial Sequence: Synthetic oligonucleotide
  Target: LAMA2; (-) strand; PAM type: YTN; PAM sequence: CTC
taatatatgaaaccatacac

SEQ ID NO: 191479 - DNA, 20 bp, Artificial Sequence
  Description of Artificial Sequence: Synthetic oligonucleotide
  Target: LAMA2; (-) strand; PAM type: YTN; PAM sequence: TTA
acactctaatatatgaaacc

SEQ ID NO: 191480 - DNA, 20 bp, Artificial Sequence
  Description of Artificial Sequence: Synthetic oligonucleotide
  Target: LAMA2; (-) strand; PAM type: YTN; PAM sequence: TTT
aacactctaatatatgaaac

SEQ ID NO: 191481 - DNA, 20 bp, Artificial Sequence
  Description of Artificial Sequence: Synthetic oligonucleotide
  Target: LAMA2; (-) strand; PAM type: YTN; PAM sequence: TTC
aatatttaacactctaatat

SEQ ID NO: 191482 - DNA, 20 bp, Artificial Sequence
  Description of Artificial Sequence: Synthetic oligonucleotide
  Target: LAMA2; (-) strand; PAM type: YTN; PAM sequence: TTA
caataaattcaatatttaac

SEQ ID NO: 191483 - DNA, 20 bp, Artificial Sequence
  Description of Artificial Sequence: Synthetic oligonucleotide
  Target: LAMA2; (-) strand; PAM type: YTN; PAM sequence: CTA
agtaaattacaataaattca

SEQ ID NO: 191484 - DNA, 20 bp, Artificial Sequence
  Description of Artificial Sequence: Synthetic oligonucleotide
  Target: LAMA2; (-) strand; PAM type: YTN; PAM sequence: TTC
actaagtaaattacaataaa

SEQ ID NO: 191485 - DNA, 20 bp, Artificial Sequence
  Description of Artificial Sequence: Synthetic oligonucleotide
  Target: LAMA2; (-) strand; PAM type: YTN; PAM sequence: TTT
cactaagtaaattacaataa

SEQ ID NO: 191486 - DNA, 20 bp, Artificial Sequence
  Description of Artificial Sequence: Synthetic oligonucleotide
  Target: LAMA2; (-) strand; PAM type: YTN; PAM sequence: TTA
acatcagtatttcactaagt

SEQ ID NO: 191487 - DNA, 20 bp, Artificial Sequence
  Description of Artificial Sequence: Synthetic oligonucleotide
  Target: LAMA2; (-) strand; PAM type: YTN; PAM sequence: CTA
gatgttaacatcagtatttc

SEQ ID NO: 191488 - DNA, 20 bp, Artificial Sequence
  Description of Artificial Sequence: Synthetic oligonucleotide
  Target: LAMA2; (-) strand; PAM type: YTN; PAM sequence: CTC
aaataaacatactagatgtt

SEQ ID NO: 191489 - DNA, 20 bp, Artificial Sequence
  Description of Artificial Sequence: Synthetic oligonucleotide
  Target: LAMA2; (-) strand; PAM type: YTN; PAM sequence: CTA
tatccctcaaataaacatac

SEQ ID NO: 191490 - DNA, 20 bp, Artificial Sequence
  Description of Artificial Sequence: Synthetic oligonucleotide
  Target: LAMA2; (-) strand; PAM type: YTN; PAM sequence: CTC
ctatatccctcaaataaaca

SEQ ID NO: 191491 - DNA, 20 bp, Artificial Sequence
  Description of Artificial Sequence: Synthetic oligonucleotide
  Target: LAMA2; (-) strand; PAM type: YTN; PAM sequence: CTG
taagcctcctatatccctca

SEQ ID NO: 191492 - DNA, 20 bp, Artificial Sequence
  Description of Artificial Sequence: Synthetic oligonucleotide
  Target: LAMA2; (-) strand; PAM type: YTN; PAM sequence: TTC
actgtaagcctcctatatcc

SEQ ID NO: 191493 - DNA, 20 bp, Artificial Sequence
  Description of Artificial Sequence: Synthetic oligonucleotide
  Target: LAMA2; (-) strand; PAM type: YTN; PAM sequence: TTT
cactgtaagcctcctatatc

SEQ ID NO: 191494 - DNA, 20 bp, Artificial Sequence
  Description of Artificial Sequence: Synthetic oligonucleotide
  Target: LAMA2; (-) strand; PAM type: YTN; PAM sequence: TTG
gtgaaaggatgatttcactg

SEQ ID NO: 191495 - DNA, 20 bp, Artificial Sequence
  Description of Artificial Sequence: Synthetic oligonucleotide
  Target: LAMA2; (-) strand; PAM type: YTN; PAM sequence: CTT
ggtgaaaggatgatttcact

SEQ ID NO: 191496 - DNA, 20 bp, Artificial Sequence
  Description of Artificial Sequence: Synthetic oligonucleotide
  Target: LAMA2; (-) strand; PAM type: YTN; PAM sequence: TTA
caaagaaatcttggtgaaag

SEQ ID NO: 191497 - DNA, 20 bp, Artificial Sequence
  Description of Artificial Sequence: Synthetic oligonucleotide
  Target: LAMA2; (-) strand; PAM type: YTN; PAM sequence: CTT
acaaagaaatcttggtgaaa

SEQ ID NO: 191498 - DNA, 20 bp, Artificial Sequence
  Description of Artificial Sequence: Synthetic oligonucleotide
  Target: LAMA2; (-) strand; PAM type: YTN; PAM sequence: TTC
cagtaacagtgtcttacaaa

SEQ ID NO: 191499 - DNA, 20 bp, Artificial Sequence
  Description of Artificial Sequence: Synthetic oligonucleotide
  Target: LAMA2; (-) strand; PAM type: YTN; PAM sequence: TTA
cgtcaatgaaatgtaatgca

SEQ ID NO: 191500 - DNA, 20 bp, Artificial Sequence
  Description of Artificial Sequence: Synthetic oligonucleotide
  Target: LAMA2; (-) strand; PAM type: YTN; PAM sequence: TTA
aaattacgtcaatgaaatgt

SEQ ID NO: 191501 - DNA, 20 bp, Artificial Sequence
  Description of Artificial Sequence: Synthetic oligonucleotide
  Target: LAMA2; (-) strand; PAM type: YTN; PAM sequence: TTT
aaaattacgtcaatgaaatg

SEQ ID NO: 191502 - DNA, 20 bp, Artificial Sequence
  Description of Artificial Sequence: Synthetic oligonucleotide
  Target: LAMA2; (-) strand; PAM type: YTN; PAM sequence: TTG
tagtgaagtagaatggaagt

SEQ ID NO: 191503 - DNA, 20 bp, Artificial Sequence
  Description of Artificial Sequence: Synthetic oligonucleotide
  Target: LAMA2; (-) strand; PAM type: YTN; PAM sequence: TTT
gtagtgaagtagaatggaag

SEQ ID NO: 191504 - DNA, 20 bp, Artificial Sequence
  Description of Artificial Sequence: Synthetic oligonucleotide
  Target: LAMA2; (-) strand; PAM type: YTN; PAM sequence: TTC
catttgtagtgaagtagaat

SEQ ID NO: 191505 - DNA, 20 bp, Artificial Sequence
  Description of Artificial Sequence: Synthetic oligonucleotide
  Target: LAMA2; (-) strand; PAM type: YTN; PAM sequence: TTG
tggagtcagatataatgaaa

SEQ ID NO: 191506 - DNA, 20 bp, Artificial Sequence
  Description of Artificial Sequence: Synthetic oligonucleotide
  Target: LAMA2; (-) strand; PAM type: YTN; PAM sequence: TTA
ttgtggagtcagatataatg

SEQ ID NO: 191507 - DNA, 20 bp, Artificial Sequence
  Description of Artificial Sequence: Synthetic oligonucleotide
  Target: LAMA2; (-) strand; PAM type: YTN; PAM sequence: CTT
attgtggagtcagatataat

SEQ ID NO: 191508 - DNA, 20 bp, Artificial Sequence
  Description of Artificial Sequence: Synthetic oligonucleotide
  Target: LAMA2; (-) strand; PAM type: YTN; PAM sequence: CTG
gaacccacttattgtggagt

SEQ ID NO: 191509 - DNA, 20 bp, Artificial Sequence
  Description of Artificial Sequence: Synthetic oligonucleotide
  Target: LAMA2; (-) strand; PAM type: YTN; PAM sequence: TTC
tggaacccacttattgtgga

SEQ ID NO: 191510 - DNA, 20 bp, Artificial Sequence
  Description of Artificial Sequence: Synthetic oligonucleotide
  Target: LAMA2; (-) strand; PAM type: YTN; PAM sequence: CTA
aatgtcaacgattctggaac

SEQ ID NO: 191511 - DNA, 20 bp, Artificial Sequence
  Description of Artificial Sequence: Synthetic oligonucleotide
  Target: LAMA2; (-) strand; PAM type: YTN; PAM sequence: CTA
ctaaatgtcaacgattctgg

SEQ ID NO: 191512 - DNA, 20 bp, Artificial Sequence
  Description of Artificial Sequence: Synthetic oligonucleotide
  Target: LAMA2; (-) strand; PAM type: YTN; PAM sequence: TTC
tactaaatgtcaacgattct

SEQ ID NO: 191513 - DNA, 20 bp, Artificial Sequence
  Description of Artificial Sequence: Synthetic oligonucleotide
  Target: LAMA2; (-) strand; PAM type: YTN; PAM sequence: CTG
taattctactaaatgtcaac

SEQ ID NO: 191514 - DNA, 20 bp, Artificial Sequence
  Description of Artificial Sequence: Synthetic oligonucleotide
  Target: LAMA2; (-) strand; PAM type: YTN; PAM sequence: CTA
agatctgtaattctactaaa

SEQ ID NO: 191515 - DNA, 20 bp, Artificial Sequence
  Description of Artificial Sequence: Synthetic oligonucleotide
  Target: LAMA2; (-) strand; PAM type: YTN; PAM sequence: TTA
atacagaatgtacaaagaca

SEQ ID NO: 191516 - DNA, 20 bp, Artificial Sequence
  Description of Artificial Sequence: Synthetic oligonucleotide
  Target: LAMA2; (-) strand; PAM type: YTN; PAM sequence: TTT
aatacagaatgtacaaagac

SEQ ID NO: 191517 - DNA, 20 bp, Artificial Sequence
  Description of Artificial Sequence: Synthetic oligonucleotide
  Target: LAMA2; (-) strand; PAM type: YTN; PAM sequence: TTT
taatacagaatgtacaaaga

SEQ ID NO: 191518 - DNA, 20 bp, Artificial Sequence
  Description of Artificial Sequence: Synthetic oligonucleotide
  Target: LAMA2; (-) strand; PAM type: YTN; PAM sequence: TTG
aaagcacacataatgcattt

SEQ ID NO: 191519 - DNA, 20 bp, Artificial Sequence
  Description of Artificial Sequence: Synthetic oligonucleotide
  Target: LAMA2; (-) strand; PAM type: YTN; PAM sequence: TTA
aaacagaattgaaagcacac

SEQ ID NO: 191520 - DNA, 20 bp, Artificial Sequence
  Description of Artificial Sequence: Synthetic oligonucleotide
  Target: LAMA2; (-) strand; PAM type: YTN; PAM sequence: TTT
aaaacagaattgaaagcaca

SEQ ID NO: 191521 - DNA, 20 bp, Artificial Sequence
  Description of Artificial Sequence: Synthetic oligonucleotide
  Target: LAMA2; (-) strand; PAM type: YTN; PAM sequence: CTT
taaaacagaattgaaagcac

SEQ ID NO: 191522 - DNA, 20 bp, Artificial Sequence
  Description of Artificial Sequence: Synthetic oligonucleotide
  Target: LAMA2; (-) strand; PAM type: YTN; PAM sequence: TTC
tttaaaacagaattgaaagc

SEQ ID NO: 191523 - DNA, 20 bp, Artificial Sequence
  Description of Artificial Sequence: Synthetic oligonucleotide
  Target: LAMA2; (-) strand; PAM type: YTN; PAM sequence: TTT
ctttaaaacagaattgaaag

SEQ ID NO: 191524 - DNA, 20 bp, Artificial Sequence
  Description of Artificial Sequence: Synthetic oligonucleotide
  Target: LAMA2; (-) strand; PAM type: YTN; PAM sequence: TTC
catacaaccatgtaaatcaa

SEQ ID NO: 191525 - DNA, 20 bp, Artificial Sequence
  Description of Artificial Sequence: Synthetic oligonucleotide
  Target: LAMA2; (-) strand; PAM type: YTN; PAM sequence: CTT
ccatacaaccatgtaaatca

SEQ ID NO: 191526 - DNA, 20 bp, Artificial Sequence
  Description of Artificial Sequence: Synthetic oligonucleotide
  Target: LAMA2; (-) strand; PAM type: YTN; PAM sequence: CTC
ttccatacaaccatgtaaat

SEQ ID NO: 191527 - DNA, 20 bp, Artificial Sequence
  Description of Artificial Sequence: Synthetic oligonucleotide
  Target: LAMA2; (-) strand; PAM type: YTN; PAM sequence: TTA
aacaaaactcttccatacaa

SEQ ID NO: 191528 - DNA, 20 bp, Artificial Sequence
  Description of Artificial Sequence: Synthetic oligonucleotide
  Target: LAMA2; (-) strand; PAM type: YTN; PAM sequence: TTT
aaacaaaactcttccataca

SEQ ID NO: 191529 - DNA, 20 bp, Artificial Sequence
  Description of Artificial Sequence: Synthetic oligonucleotide
  Target: LAMA2; (-) strand; PAM type: YTN; PAM sequence: TTC
agaaggaaaataaaagccac

SEQ ID NO: 191530 - DNA, 20 bp, Artificial Sequence
  Description of Artificial Sequence: Synthetic oligonucleotide
  Target: LAMA2; (-) strand; PAM type: YTN; PAM sequence: TTT
cagaaggaaaataaaagcca

SEQ ID NO: 191531 - DNA, 20 bp, Artificial Sequence
  Description of Artificial Sequence: Synthetic oligonucleotide
  Target: LAMA2; (-) strand; PAM type: YTN; PAM sequence: TTG
taaatgatttcagaaggaaa

SEQ ID NO: 191532 - DNA, 20 bp, Artificial Sequence
  Description of Artificial Sequence: Synthetic oligonucleotide
  Target: LAMA2; (-) strand; PAM type: YTN; PAM sequence: TTT
gtaaatgatttcagaaggaa

SEQ ID NO: 191533 - DNA, 20 bp, Artificial Sequence
  Description of Artificial Sequence: Synthetic oligonucleotide
  Target: LAMA2; (-) strand; PAM type: YTN; PAM sequence: CTA
agaaatatttgtaaatgatt

SEQ ID NO: 191534 - DNA, 20 bp, Artificial Sequence
  Description of Artificial Sequence: Synthetic oligonucleotide
  Target: LAMA2; (-) strand; PAM type: YTN; PAM sequence: TTC
aaaccaacagtagccaatac

SEQ ID NO: 191535 - DNA, 20 bp, Artificial Sequence
  Description of Artificial Sequence: Synthetic oligonucleotide
  Target: LAMA2; (-) strand; PAM type: YTN; PAM sequence: TTT
caaaccaacagtagccaata

SEQ ID NO: 191536 - DNA, 20 bp, Artificial Sequence
  Description of Artificial Sequence: Synthetic oligonucleotide
  Target: LAMA2; (-) strand; PAM type: YTN; PAM sequence: CTC
atttcaaaccaacagtagcc

SEQ ID NO: 191537 - DNA, 20 bp, Artificial Sequence
  Description of Artificial Sequence: Synthetic oligonucleotide
  Target: LAMA2; (-) strand; PAM type: YTN; PAM sequence: TTG
tatctcatttcaaaccaaca

SEQ ID NO: 191538 - DNA, 20 bp, Artificial Sequence
  Description of Artificial Sequence: Synthetic oligonucleotide
  Target: LAMA2; (-) strand; PAM type: YTN; PAM sequence: TTA
taatccataagttgtatctc

SEQ ID NO: 191539 - DNA, 20 bp, Artificial Sequence
  Description of Artificial Sequence: Synthetic oligonucleotide
  Target: LAMA2; (-) strand; PAM type: YTN; PAM sequence: TTT
ataatccataagttgtatct

SEQ ID NO: 191540 - DNA, 20 bp, Artificial Sequence
  Description of Artificial Sequence: Synthetic oligonucleotide
  Target: LAMA2; (-) strand; PAM type: YTN; PAM sequence: TTG
cacaaacatatttataatcc

SEQ ID NO: 191541 - DNA, 20 bp, Artificial Sequence
  Description of Artificial Sequence: Synthetic oligonucleotide
  Target: LAMA2; (-) strand; PAM type: YTN; PAM sequence: TTT
gcacaaacatatttataatc

SEQ ID NO: 191542 - DNA, 20 bp, Artificial Sequence
  Description of Artificial Sequence: Synthetic oligonucleotide
  Target: LAMA2; (-) strand; PAM type: YTN; PAM sequence: CTA
gagaaaatttgcacaaacat

SEQ ID NO: 191543 - DNA, 20 bp, Artificial Sequence
  Description of Artificial Sequence: Synthetic oligonucleotide
  Target: LAMA2; (-) strand; PAM type: YTN; PAM sequence: CTG
ctagagaaaatttgcacaaa

SEQ ID NO: 191544 - DNA, 20 bp, Artificial Sequence
  Description of Artificial Sequence: Synthetic oligonucleotide
  Target: LAMA2; (-) strand; PAM type: YTN; PAM sequence: TTA
ctgctagagaaaatttgcac

SEQ ID NO: 191545 - DNA, 20 bp, Artificial Sequence
  Description of Artificial Sequence: Synthetic oligonucleotide
  Target: LAMA2; (-) strand; PAM type: YTN; PAM sequence: TTA
gaattactgctagagaaaat

SEQ ID NO: 191546 - DNA, 20 bp, Artificial Sequence
  Description of Artificial Sequence: Synthetic oligonucleotide
  Target: LAMA2; (-) strand; PAM type: YTN; PAM sequence: TTT
agaattactgctagagaaaa

SEQ ID NO: 191547 - DNA, 20 bp, Artificial Sequence
  Description of Artificial Sequence: Synthetic oligonucleotide
  Target: LAMA2; (-) strand; PAM type: YTN; PAM sequence: TTT
tagaattactgctagagaaa

SEQ ID NO: 191548 - DNA, 20 bp, Artificial Sequence
  Description of Artificial Sequence: Synthetic oligonucleotide
  Target: LAMA2; (-) strand; PAM type: YTN; PAM sequence: TTA
atgtccacaaaggttttaga

SEQ ID NO: 191549 - DNA, 20 bp, Artificial Sequence
  Description of Artificial Sequence: Synthetic oligonucleotide
  Target: LAMA2; (-) strand; PAM type: YTN; PAM sequence: CTT
aatgtccacaaaggttttag

SEQ ID NO: 191550 - DNA, 20 bp, Artificial Sequence
  Description of Artificial Sequence: Synthetic oligonucleotide
  Target: LAMA2; (-) strand; PAM type: YTN; PAM sequence: TTA
cagcttaatgtccacaaagg

SEQ ID NO: 191551 - DNA, 20 bp, Artificial Sequence
  Description of Artificial Sequence: Synthetic oligonucleotide
  Target: LAMA2; (-) strand; PAM type: YTN; PAM sequence: CTA
caattacagcttaatgtcca

SEQ ID NO: 191552 - DNA, 20 bp, Artificial Sequence
  Description of Artificial Sequence: Synthetic oligonucleotide
  Target: LAMA2; (-) strand; PAM type: YTN; PAM sequence: TTG
caagagaaagctacaattac

SEQ ID NO: 191553 - DNA, 20 bp, Artificial Sequence
  Description of Artificial Sequence: Synthetic oligonucleotide
  Target: LAMA2; (-) strand; PAM type: YTN; PAM sequence: CTT
gcaagagaaagctacaatta

SEQ ID NO: 191554 - DNA, 20 bp, Artificial Sequence
  Description of Artificial Sequence: Synthetic oligonucleotide
  Target: LAMA2; (-) strand; PAM type: YTN; PAM sequence: CTA
caagggaataataaagcaga

SEQ ID NO: 191555 - DNA, 20 bp, Artificial Sequence
  Description of Artificial Sequence: Synthetic oligonucleotide
  Target: LAMA2; (-) strand; PAM type: YTN; PAM sequence: TTC
ctacaagggaataataaagc

SEQ ID NO: 191556 - DNA, 20 bp, Artificial Sequence
  Description of Artificial Sequence: Synthetic oligonucleotide
  Target: LAMA2; (-) strand; PAM type: YTN; PAM sequence: TTT
cctacaagggaataataaag

SEQ ID NO: 191557 - DNA, 20 bp, Artificial Sequence
  Description of Artificial Sequence: Synthetic oligonucleotide
  Target: LAMA2; (-) strand; PAM type: YTN; PAM sequence: TTA
atttcctacaagggaataat

SEQ ID NO: 191558 - DNA, 20 bp, Artificial Sequence
  Description of Artificial Sequence: Synthetic oligonucleotide
  Target: LAMA2; (-) strand; PAM type: YTN; PAM sequence: CTT
aatttcctacaagggaataa

SEQ ID NO: 191559 - DNA, 20 bp, Artificial Sequence
  Description of Artificial Sequence: Synthetic oligonucleotide
  Target: LAMA2; (-) strand; PAM type: YTN; PAM sequence: TTA
tataaaatacttaatttcct

SEQ ID NO: 191560 - DNA, 20 bp, Artificial Sequence
  Description of Artificial Sequence: Synthetic oligonucleotide
  Target: LAMA2; (-) strand; PAM type: YTN; PAM sequence: TTA
ttatataaaatacttaattt

SEQ ID NO: 191561 - DNA, 20 bp, Artificial Sequence
  Description of Artificial Sequence: Synthetic oligonucleotide
  Target: LAMA2; (-) strand; PAM type: YTN; PAM sequence: CTA
agcattattatataaaatac

SEQ ID NO: 191562 - DNA, 20 bp, Artificial Sequence
  Description of Artificial Sequence: Synthetic oligonucleotide
  Target: LAMA2; (-) strand; PAM type: YTN; PAM sequence: TTC
taagcattattatataaaat

SEQ ID NO: 191563 - DNA, 20 bp, Artificial Sequence
  Description of Artificial Sequence: Synthetic oligonucleotide
  Target: LAMA2; (-) strand; PAM type: YTN; PAM sequence: TTA
aaagagaaagatgttctaag

SEQ ID NO: 191564 - DNA, 20 bp, Artificial Sequence
  Description of Artificial Sequence: Synthetic oligonucleotide
  Target: LAMA2; (-) strand; PAM type: YTN; PAM sequence: TTT
aaaagagaaagatgttctaa

SEQ ID NO: 191565 - DNA, 20 bp, Artificial Sequence
  Description of Artificial Sequence: Synthetic oligonucleotide
  Target: LAMA2; (-) strand; PAM type: YTN; PAM sequence: CTT
taaaagagaaagatgttcta

SEQ ID NO: 191566 - DNA, 20 bp, Artificial Sequence
  Description of Artificial Sequence: Synthetic oligonucleotide
  Target: LAMA2; (-) strand; PAM type: YTN; PAM sequence: CTC
tttaaaagagaaagatgttc

SEQ ID NO: 191567 - DNA, 20 bp, Artificial Sequence
  Description of Artificial Sequence: Synthetic oligonucleotide
  Target: LAMA2; (-) strand; PAM type: YTN; PAM sequence: TTC
cctctttaaaagagaaagat

SEQ ID NO: 191568 - DNA, 20 bp, Artificial Sequence
  Description of Artificial Sequence: Synthetic oligonucleotide
  Target: LAMA2; (-) strand; PAM type: YTN; PAM sequence: TTT
ccctctttaaaagagaaaga

SEQ ID NO: 191569 - DNA, 20 bp, Artificial Sequence
  Description of Artificial Sequence: Synthetic oligonucleotide
  Target: LAMA2; (-) strand; PAM type: YTN; PAM sequence: TTA
atttccctctttaaaagaga

SEQ ID NO: 191570 - DNA, 20 bp, Artificial Sequence
  Description of Artificial Sequence: Synthetic oligonucleotide
  Target: LAMA2; (-) strand; PAM type: YTN; PAM sequence: CTT
aatttccctctttaaaagag

SEQ ID NO: 191571 - DNA, 20 bp, Artificial Sequence
  Description of Artificial Sequence: Synthetic oligonucleotide
  Target: LAMA2; (-) strand; PAM type: YTN; PAM sequence: TTA
tcttaatttccctctttaaa

SEQ ID NO: 191572 - DNA, 20 bp, Artificial Sequence
  Description of Artificial Sequence: Synthetic oligonucleotide
  Target: LAMA2; (-) strand; PAM type: YTN; PAM sequence: TTT
atcttaatttccctctttaa

SEQ ID NO: 191573 - DNA, 20 bp, Artificial Sequence
  Description of Artificial Sequence: Synthetic oligonucleotide
  Target: LAMA2; (-) strand; PAM type: YTN; PAM sequence: CTT
tatcttaatttccctcttta

SEQ ID NO: 191574 - DNA, 20 bp, Artificial Sequence
  Description of Artificial Sequence: Synthetic oligonucleotide
  Target: LAMA2; (-) strand; PAM type: YTN; PAM sequence: CTC
tttatcttaatttccctctt

SEQ ID NO: 191575 - DNA, 20 bp, Artificial Sequence
  Description of Artificial Sequence: Synthetic oligonucleotide
  Target: LAMA2; (-) strand; PAM type: YTN; PAM sequence: TTG
ccaagctctttatcttaatt

SEQ ID NO: 191576 - DNA, 20 bp, Artificial Sequence
  Description of Artificial Sequence: Synthetic oligonucleotide
  Target: LAMA2; (-) strand; PAM type: YTN; PAM sequence: TTT
gccaagctctttatcttaat

SEQ ID NO: 191577 - DNA, 20 bp, Artificial Sequence
  Description of Artificial Sequence: Synthetic oligonucleotide
  Target: LAMA2; (-) strand; PAM type: YTN; PAM sequence: CTA
tatttgccaagctctttatc

SEQ ID NO: 191578 - DNA, 20 bp, Artificial Sequence
  Description of Artificial Sequence: Synthetic oligonucleotide
  Target: LAMA2; (-) strand; PAM type: YTN; PAM sequence: CTC
agaaacatacaatccaggaa

SEQ ID NO: 191579 - DNA, 20 bp, Artificial Sequence
  Description of Artificial Sequence: Synthetic oligonucleotide
  Target: LAMA2; (-) strand; PAM type: YTN; PAM sequence: CTG
tcaccaaatctcagaaacat

SEQ ID NO: 191580 - DNA, 20 bp, Artificial Sequence
  Description of Artificial Sequence: Synthetic oligonucleotide
  Target: LAMA2; (-) strand; PAM type: YTN; PAM sequence: CTC
tgtcaccaaatctcagaaac

SEQ ID NO: 191581 - DNA, 20 bp, Artificial Sequence
  Description of Artificial Sequence: Synthetic oligonucleotide
  Target: LAMA2; (-) strand; PAM type: YTN; PAM sequence: CTC
cacagcagacgctctgtcac

SEQ ID NO: 191582 - DNA, 20 bp, Artificial Sequence
  Description of Artificial Sequence: Synthetic oligonucleotide
  Target: LAMA2; (-) strand; PAM type: YTN; PAM sequence: TTC
cccatcctccacagcagacg

SEQ ID NO: 191583 - DNA, 20 bp, Artificial Sequence
  Description of Artificial Sequence: Synthetic oligonucleotide
  Target: LAMA2; (-) strand; PAM type: YTN; PAM sequence: CTT
ccccatcctccacagcagac

SEQ ID NO: 191584 - DNA, 20 bp, Artificial Sequence
  Description of Artificial Sequence: Synthetic oligonucleotide
  Target: LAMA2; (-) strand; PAM type: YTN; PAM sequence: TTC
agcccagatccgtccttccc

SEQ ID NO: 191585 - DNA, 20 bp, Artificial Sequence
  Description of Artificial Sequence: Synthetic oligonucleotide
  Target: LAMA2; (-) strand; PAM type: YTN; PAM sequence: CTT
cagcccagatccgtccttcc

SEQ ID NO: 191586 - DNA, 20 bp, Artificial Sequence
  Description of Artificial Sequence: Synthetic oligonucleotide
  Target: LAMA2; (-) strand; PAM type: YTN; PAM sequence: TTC
ttcagcccagatccgtcctt

SEQ ID NO: 191587 - DNA, 20 bp, Artificial Sequence
  Description of Artificial Sequence: Synthetic oligonucleotide
  Target: LAMA2; (-) strand; PAM type: YTN; PAM sequence: CTT
cttcagcccagatccgtcct

SEQ ID NO: 191588 - DNA, 20 bp, Artificial Sequence
  Description of Artificial Sequence: Synthetic oligonucleotide
  Target: LAMA2; (-) strand; PAM type: YTN; PAM sequence: CTA
cttcttcagcccagatccgt

SEQ ID NO: 191589 - DNA, 20 bp, Artificial Sequence
  Description of Artificial Sequence: Synthetic oligonucleotide
  Target: LAMA2; (-) strand; PAM type: YTN; PAM sequence: CTG
tctacttcttcagcccagat

SEQ ID NO: 191590 - DNA, 20 bp, Artificial Sequence
  Description of Artificial Sequence: Synthetic oligonucleotide
  Target: LAMA2; (-) strand; PAM type: YTN; PAM sequence: CTC
tgtctacttcttcagcccag

SEQ ID NO: 191591 - DNA, 20 bp, Artificial Sequence
  Description of Artificial Sequence: Synthetic oligonucleotide
  Target: LAMA2; (-) strand; PAM type: YTN; PAM sequence: CTG
tctctgtctacttcttcagc

SEQ ID NO: 191592 - DNA, 20 bp, Artificial Sequence
  Description of Artificial Sequence: Synthetic oligonucleotide
  Target: LAMA2; (-) strand; PAM type: YTN; PAM sequence: TTA
aaaccaaagtccactgtctc

SEQ ID NO: 191593 - DNA, 20 bp, Artificial Sequence
  Description of Artificial Sequence: Synthetic oligonucleotide
  Target: LAMA2; (-) strand; PAM type: YTN; PAM sequence: CTT
aaaaccaaagtccactgtct

SEQ ID NO: 191594 - DNA, 20 bp, Artificial Sequence
  Description of Artificial Sequence: Synthetic oligonucleotide
  Target: LAMA2; (-) strand; PAM type: YTN; PAM sequence: CTC
ttaaaaccaaagtccactgt

SEQ ID NO: 191595 - DNA, 20 bp, Artificial Sequence
  Description of Artificial Sequence: Synthetic oligonucleotide
  Target: LAMA2; (-) strand; PAM type: YTN; PAM sequence: CTA
gggatgggtgagaagatccc

SEQ ID NO: 191596 - DNA, 20 bp, Artificial Sequence
  Description of Artificial Sequence: Synthetic oligonucleotide
  Target: LAMA2; (-) strand; PAM type: YTN; PAM sequence: CTG
ctagggatgggtgagaagat

SEQ ID NO: 191597 - DNA, 20 bp, Artificial Sequence
  Description of Artificial Sequence: Synthetic oligonucleotide
  Target: LAMA2; (-) strand; PAM type: YTN; PAM sequence: CTC
tgctagggatgggtgagaag

SEQ ID NO: 191598 - DNA, 20 bp, Artificial Sequence
  Description of Artificial Sequence: Synthetic oligonucleotide
  Target: LAMA2; (-) strand; PAM type: YTN; PAM sequence: CTG
agctctgctagggatgggtg

SEQ ID NO: 191599 - DNA, 20 bp, Artificial Sequence
  Description of Artificial Sequence: Synthetic oligonucleotide
  Target: LAMA2; (-) strand; PAM type: YTN; PAM sequence: TTC
tgagctctgctagggatggg

SEQ ID NO: 191600 - DNA, 20 bp, Artificial Sequence
  Description of Artificial Sequence: Synthetic oligonucleotide
  Target: LAMA2; (-) strand; PAM type: YTN; PAM sequence: CTT
ctgagctctgctagggatgg

SEQ ID NO: 191601 - DNA, 20 bp, Artificial Sequence
  Description of Artificial Sequence: Synthetic oligonucleotide
  Target: LAMA2; (-) strand; PAM type: YTN; PAM sequence: CTA
cttctgagctctgctaggga

SEQ ID NO: 191602 - DNA, 20 bp, Artificial Sequence
  Description of Artificial Sequence: Synthetic oligonucleotide
  Target: LAMA2; (-) strand; PAM type: YTN; PAM sequence: CTG
gatgcctacttctgagctct

SEQ ID NO: 191603 - DNA, 20 bp, Artificial Sequence
  Description of Artificial Sequence: Synthetic oligonucleotide
  Target: LAMA2; (-) strand; PAM type: YTN; PAM sequence: CTG
cagctggatgcctacttctg

SEQ ID NO: 191604 - DNA, 20 bp, Artificial Sequence
  Description of Artificial Sequence: Synthetic oligonucleotide
  Target: LAMA2; (-) strand; PAM type: YTN; PAM sequence: TTA
cctgcagctggatgcctact

SEQ ID NO: 191605 - DNA, 20 bp, Artificial Sequence
  Description of Artificial Sequence: Synthetic oligonucleotide
  Target: LAMA2; (-) strand; PAM type: YTN; PAM sequence: TTG
agcccaaaacacaattacct

SEQ ID NO: 191606 - DNA, 20 bp, Artificial Sequence
  Description of Artificial Sequence: Synthetic oligonucleotide
  Target: LAMA2; (-) strand; PAM type: YTN; PAM sequence: TTT
gagcccaaaacacaattacc

SEQ ID NO: 191607 - DNA, 20 bp, Artificial Sequence
  Description of Artificial Sequence: Synthetic oligonucleotide
  Target: LAMA2; (-) strand; PAM type: YTN; PAM sequence: CTT
tgagcccaaaacacaattac

SEQ ID NO: 191608 - DNA, 20 bp, Artificial Sequence
  Description of Artificial Sequence: Synthetic oligonucleotide
  Target: LAMA2; (-) strand; PAM type: YTN; PAM sequence: CTC
ctttgagcccaaaacacaat

SEQ ID NO: 191609 - DNA, 20 bp, Artificial Sequence
  Description of Artificial Sequence: Synthetic oligonucleotide
  Target: LAMA2; (-) strand; PAM type: YTN; PAM sequence: CTA
agggctcctttgagcccaaa

SEQ ID NO: 191610 - DNA, 20 bp, Artificial Sequence
  Description of Artificial Sequence: Synthetic oligonucleotide
  Target: LAMA2; (-) strand; PAM type: YTN; PAM sequence: CTC
taagggctcctttgagccca

SEQ ID NO: 191611 - DNA, 20 bp, Artificial Sequence
  Description of Artificial Sequence: Synthetic oligonucleotide
  Target: LAMA2; (-) strand; PAM type: YTN; PAM sequence: CTG
gcactctaagggctcctttg

SEQ ID NO: 191612 - DNA, 20 bp, Artificial Sequence
  Description of Artificial Sequence: Synthetic oligonucleotide
  Target: LAMA2; (-) strand; PAM type: YTN; PAM sequence: TTA
ggtctggcactctaagggct

SEQ ID NO: 191613 - DNA, 20 bp, Artificial Sequence
  Description of Artificial Sequence: Synthetic oligonucleotide
  Target: LAMA2; (-) strand; PAM type: YTN; PAM sequence: TTT
aggtctggcactctaagggc

SEQ ID NO: 191614 - DNA, 20 bp, Artificial Sequence
  Description of Artificial Sequence: Synthetic oligonucleotide
  Target: LAMA2; (-) strand; PAM type: YTN; PAM sequence: CTT
taggtctggcactctaaggg

SEQ ID NO: 191615 - DNA, 20 bp, Artificial Sequence
  Description of Artificial Sequence: Synthetic oligonucleotide
  Target: LAMA2; (-) strand; PAM type: YTN; PAM sequence: CTC
tttaggtctggcactctaag

SEQ ID NO: 191616 - DNA, 20 bp, Artificial Sequence
  Description of Artificial Sequence: Synthetic oligonucleotide
  Target: LAMA2; (-) strand; PAM type: YTN; PAM sequence: TTG
cctctttaggtctggcactc

SEQ ID NO: 191617 - DNA, 20 bp, Artificial Sequence
  Description of Artificial Sequence: Synthetic oligonucleotide
  Target: LAMA2; (-) strand; PAM type: YTN; PAM sequence: TTA
tcgggagttgcctctttagg

SEQ ID NO: 191618 - DNA, 20 bp, Artificial Sequence
  Description of Artificial Sequence: Synthetic oligonucleotide
  Target: LAMA2; (-) strand; PAM type: YTN; PAM sequence: CTT
atcgggagttgcctctttag

SEQ ID NO: 191619 - DNA, 20 bp, Artificial Sequence
  Description of Artificial Sequence: Synthetic oligonucleotide
  Target: LAMA2; (-) strand; PAM type: YTN; PAM sequence: CTC
ttatcgggagttgcctcttt

SEQ ID NO: 191620 - DNA, 20 bp, Artificial Sequence
  Description of Artificial Sequence: Synthetic oligonucleotide
  Target: LAMA2; (-) strand; PAM type: YTN; PAM sequence: TTG
aaactcttatcgggagttgc

SEQ ID NO: 191621 - DNA, 20 bp, Artificial Sequence
  Description of Artificial Sequence: Synthetic oligonucleotide
  Target: LAMA2; (-) strand; PAM type: YTN; PAM sequence: CTA
ttgaaactcttatcgggagt

SEQ ID NO: 191622 - DNA, 20 bp, Artificial Sequence
  Description of Artificial Sequence: Synthetic oligonucleotide
  Target: LAMA2; (-) strand; PAM type: YTN; PAM sequence: CTA
gaatggataaaactattgaa

SEQ ID NO: 191623 - DNA, 20 bp, Artificial Sequence
  Description of Artificial Sequence: Synthetic oligonucleotide
  Target: LAMA2; (-) strand; PAM type: YTN; PAM sequence: TTC
tagaatggataaaactattg

SEQ ID NO: 191624 - DNA, 20 bp, Artificial Sequence
  Description of Artificial Sequence: Synthetic oligonucleotide
  Target: LAMA2; (-) strand; PAM type: YTN; PAM sequence: TTA
aggaaatggcggttctagaa

SEQ ID NO: 191625 - DNA, 20 bp, Artificial Sequence
  Description of Artificial Sequence: Synthetic oligonucleotide
  Target: LAMA2; (-) strand; PAM type: YTN; PAM sequence: CTT
aaggaaatggcggttctaga

SEQ ID NO: 191626 - DNA, 20 bp, Artificial Sequence
  Description of Artificial Sequence: Synthetic oligonucleotide
  Target: LAMA2; (-) strand; PAM type: YTN; PAM sequence: CTC
ttaaggaaatggcggttcta

SEQ ID NO: 191627 - DNA, 20 bp, Artificial Sequence
  Description of Artificial Sequence: Synthetic oligonucleotide
  Target: LAMA2; (-) strand; PAM type: YTN; PAM sequence: CTC
agactcttaaggaaatggcg

SEQ ID NO: 191628 - DNA, 20 bp, Artificial Sequence
  Description of Artificial Sequence: Synthetic oligonucleotide
  Target: LAMA2; (-) strand; PAM type: YTN; PAM sequence: CTG
ggcctcagactcttaaggaa

SEQ ID NO: 191629 - DNA, 20 bp, Artificial Sequence
  Description of Artificial Sequence: Synthetic oligonucleotide
  Target: LAMA2; (-) strand; PAM type: YTN; PAM sequence: TTG
gtccctgggcctcagactct

SEQ ID NO: 191630 - DNA, 20 bp, Artificial Sequence
  Description of Artificial Sequence: Synthetic oligonucleotide
  Target: LAMA2; (-) strand; PAM type: YTN; PAM sequence: CTG
ggcgttggtccctgggcctc

SEQ ID NO: 191631 - DNA, 20 bp, Artificial Sequence
  Description of Artificial Sequence: Synthetic oligonucleotide
  Target: LAMA2; (-) strand; PAM type: YTN; PAM sequence: CTA
tcaaagtgtatatatgtcct

SEQ ID NO: 191632 - DNA, 20 bp, Artificial Sequence
  Description of Artificial Sequence: Synthetic oligonucleotide
  Target: LAMA2; (-) strand; PAM type: YTN; PAM sequence: CTC
ctatcaaagtgtatatatgt

SEQ ID NO: 191633 - DNA, 20 bp, Artificial Sequence
  Description of Artificial Sequence: Synthetic oligonucleotide
  Target: LAMA2; (-) strand; PAM type: YTN; PAM sequence: TTC
ctcctatcaaagtgtatata

SEQ ID NO: 191634 - DNA, 20 bp, Artificial Sequence
  Description of Artificial Sequence: Synthetic oligonucleotide
  Target: LAMA2; (-) strand; PAM type: YTN; PAM sequence: TTG
aaatgttcctcctatcaaag

SEQ ID NO: 191635 - DNA, 20 bp, Artificial Sequence
  Description of Artificial Sequence: Synthetic oligonucleotide
  Target: LAMA2; (-) strand; PAM type: YTN; PAM sequence: TTT
gaaatgttcctcctatcaaa

SEQ ID NO: 191636 - DNA, 20 bp, Artificial Sequence
  Description of Artificial Sequence: Synthetic oligonucleotide
  Target: LAMA2; (-) strand; PAM type: YTN; PAM sequence: CTG
gatgaatttgaaatgttcct

SEQ ID NO: 191637 - DNA, 20 bp, Artificial Sequence
  Description of Artificial Sequence: Synthetic oligonucleotide
  Target: LAMA2; (-) strand; PAM type: YTN; PAM sequence: TTG
acctggatgaatttgaaatg

SEQ ID NO: 191638 - DNA, 20 bp, Artificial Sequence
  Description of Artificial Sequence: Synthetic oligonucleotide
  Target: LAMA2; (-) strand; PAM type: YTN; PAM sequence: CTT
gacctggatgaatttgaaat

SEQ ID NO: 191639 - DNA, 20 bp, Artificial Sequence
  Description of Artificial Sequence: Synthetic oligonucleotide
  Target: LAMA2; (-) strand; PAM type: YTN; PAM sequence: CTA
gtgagtgatcttgacctgga

SEQ ID NO: 191640 - DNA, 20 bp, Artificial Sequence
  Description of Artificial Sequence: Synthetic oligonucleotide
  Target: LAMA2; (-) strand; PAM type: YTN; PAM sequence: CTC
cagacagaaaagaggcggag

SEQ ID NO: 191641 - DNA, 20 bp, Artificial Sequence
  Description of Artificial Sequence: Synthetic oligonucleotide
  Target: LAMA2; (-) strand; PAM type: YTN; PAM sequence: CTA
actccagacagaaaagaggc

SEQ ID NO: 191642 - DNA, 20 bp, Artificial Sequence
  Description of Artificial Sequence: Synthetic oligonucleotide
  Target: LAMA2; (-) strand; PAM type: YTN; PAM sequence: TTA
ctaactccagacagaaaaga

SEQ ID NO: 191643 - DNA, 20 bp, Artificial Sequence
  Description of Artificial Sequence: Synthetic oligonucleotide
  Target: LAMA2; (-) strand; PAM type: YTN; PAM sequence: TTG
aggtggttactaactccaga

SEQ ID NO: 191644 - DNA, 20 bp, Artificial Sequence
  Description of Artificial Sequence: Synthetic oligonucleotide
  Target: LAMA2; (-) strand; PAM type: YTN; PAM sequence: TTT
gaggtggttactaactccag

SEQ ID NO: 191645 - DNA, 20 bp, Artificial Sequence
  Description of Artificial Sequence: Synthetic oligonucleotide
  Target: LAMA2; (-) strand; PAM type: YTN; PAM sequence: TTT
tgaggtggttactaactcca

SEQ ID NO: 191646 - DNA, 20 bp, Artificial Sequence
  Description of Artificial Sequence: Synthetic oligonucleotide
  Target: LAMA2; (-) strand; PAM type: YTN; PAM sequence: CTT
ttgaggtggttactaactcc

SEQ ID NO: 191647 - DNA, 20 bp, Artificial Sequence
  Description of Artificial Sequence: Synthetic oligonucleotide
  Target: LAMA2; (-) strand; PAM type: YTN; PAM sequence: CTG
tcttttgaggtggttactaa

SEQ ID NO: 191648 - DNA, 20 bp, Artificial Sequence
  Description of Artificial Sequence: Synthetic oligonucleotide
  Target: LAMA2; (-) strand; PAM type: YTN; PAM sequence: CTG
taggtggtataatgacgagt

SEQ ID NO: 191649 - DNA, 20 bp, Artificial Sequence
  Description of Artificial Sequence: Synthetic oligonucleotide
  Target: LAMA2; (-) strand; PAM type: YTN; PAM sequence: CTA
aaagtaagactgtaggtggt

SEQ ID NO: 191650 - DNA, 20 bp, Artificial Sequence
  Description of Artificial Sequence: Synthetic oligonucleotide
  Target: LAMA2; (-) strand; PAM type: YTN; PAM sequence: CTC
aaaccaagctaaaagtaaga

SEQ ID NO: 191651 - DNA, 20 bp, Artificial Sequence
  Description of Artificial Sequence: Synthetic oligonucleotide
  Target: LAMA2; (-) strand; PAM type: YTN; PAM sequence: CTG
taagtaatgaacaggacacc

SEQ ID NO: 191652 - DNA, 20 bp, Artificial Sequence
  Description of Artificial Sequence: Synthetic oligonucleotide
  Target: LAMA2; (-) strand; PAM type: YTN; PAM sequence: TTC
tgtaagtaatgaacaggaca

SEQ ID NO: 191653 - DNA, 20 bp, Artificial Sequence
  Description of Artificial Sequence: Synthetic oligonucleotide
  Target: LAMA2; (-) strand; PAM type: YTN; PAM sequence: TTT
ctgtaagtaatgaacaggac

SEQ ID NO: 191654 - DNA, 20 bp, Artificial Sequence
  Description of Artificial Sequence: Synthetic oligonucleotide
  Target: LAMA2; (-) strand; PAM type: YTN; PAM sequence: CTG
tttctgtaagtaatgaacag

SEQ ID NO: 191655 - DNA, 20 bp, Artificial Sequence
  Description of Artificial Sequence: Synthetic oligonucleotide
  Target: LAMA2; (-) strand; PAM type: YTN; PAM sequence: CTC
caaatctgtttctgtaagta

SEQ ID NO: 191656 - DNA, 20 bp, Artificial Sequence
  Description of Artificial Sequence: Synthetic oligonucleotide
  Target: LAMA2; (-) strand; PAM type: YTN; PAM sequence: TTC
acactccaaatctgtttctg

SEQ ID NO: 191657 - DNA, 20 bp, Artificial Sequence
  Description of Artificial Sequence: Synthetic oligonucleotide
  Target: LAMA2; (-) strand; PAM type: YTN; PAM sequence: TTA
agggcattcacactccaaat

SEQ ID NO: 191658 - DNA, 20 bp, Artificial Sequence
  Description of Artificial Sequence: Synthetic oligonucleotide
  Target: LAMA2; (-) strand; PAM type: YTN; PAM sequence: CTG
gtgttaagggcattcacact

SEQ ID NO: 191659 - DNA, 20 bp, Artificial Sequence
  Description of Artificial Sequence: Synthetic oligonucleotide
  Target: LAMA2; (-) strand; PAM type: YTN; PAM sequence: TTA
aaactggtgttaagggcatt

SEQ ID NO: 191660 - DNA, 20 bp, Artificial Sequence
  Description of Artificial Sequence: Synthetic oligonucleotide
  Target: LAMA2; (-) strand; PAM type: YTN; PAM sequence: TTA
ttaaaactggtgttaagggc

SEQ ID NO: 191661 - DNA, 20 bp, Artificial Sequence
  Description of Artificial Sequence: Synthetic oligonucleotide
  Target: LAMA2; (-) strand; PAM type: YTN; PAM sequence: CTT
attaaaactggtgttaaggg

SEQ ID NO: 191662 - DNA, 20 bp, Artificial Sequence
  Description of Artificial Sequence: Synthetic oligonucleotide
  Target: LAMA2; (-) strand; PAM type: YTN; PAM sequence: TTA
aaaatgcttattaaaactgg

SEQ ID NO: 191663 - DNA, 20 bp, Artificial Sequence
  Description of Artificial Sequence: Synthetic oligonucleotide
  Target: LAMA2; (-) strand; PAM type: YTN; PAM sequence: TTG
tagaattaaaaatgcttatt

SEQ ID NO: 191664 - DNA, 20 bp, Artificial Sequence
  Description of Artificial Sequence: Synthetic oligonucleotide
  Target: LAMA2; (-) strand; PAM type: YTN; PAM sequence: TTA
ttgtagaattaaaaatgctt

SEQ ID NO: 191665 - DNA, 20 bp, Artificial Sequence
  Description of Artificial Sequence: Synthetic oligonucleotide
  Target: LAMA2; (-) strand; PAM type: YTN; PAM sequence: CTG
aatcacattattgtagaatt

SEQ ID NO: 191666 - DNA, 20 bp, Artificial Sequence
  Description of Artificial Sequence: Synthetic oligonucleotide
  Target: LAMA2; (-) strand; PAM type: YTN; PAM sequence: CTC
tgaatcacattattgtagaa

SEQ ID NO: 191667 - DNA, 20 bp, Artificial Sequence
  Description of Artificial Sequence: Synthetic oligonucleotide
  Target: LAMA2; (-) strand; PAM type: YTN; PAM sequence: TTC
tctgaatcacattattgtag

SEQ ID NO: 191668 - DNA, 20 bp, Artificial Sequence
  Description of Artificial Sequence: Synthetic oligonucleotide
  Target: LAMA2; (-) strand; PAM type: YTN; PAM sequence: CTA
gggagatagagacaaaggaa

SEQ ID NO: 191669 - DNA, 20 bp, Artificial Sequence
  Description of Artificial Sequence: Synthetic oligonucleotide
  Target: LAMA2; (-) strand; PAM type: YTN; PAM sequence: CTA
tctagggagatagagacaaa

SEQ ID NO: 191670 - DNA, 20 bp, Artificial Sequence
  Description of Artificial Sequence: Synthetic oligonucleotide
  Target: LAMA2; (-) strand; PAM type: YTN; PAM sequence: TTC
tatctagggagatagagaca

SEQ ID NO: 191671 - DNA, 20 bp, Artificial Sequence
  Description of Artificial Sequence: Synthetic oligonucleotide
  Target: LAMA2; (-) strand; PAM type: YTN; PAM sequence: TTT
ctatctagggagatagagac

SEQ ID NO: 191672 - DNA, 20 bp, Artificial Sequence
  Description of Artificial Sequence: Synthetic oligonucleotide
  Target: LAMA2; (-) strand; PAM type: YTN; PAM sequence: CTC
cacatatttctatctaggga

SEQ ID NO: 191673 - DNA, 20 bp, Artificial Sequence
  Description of Artificial Sequence: Synthetic oligonucleotide
  Target: LAMA2; (-) strand; PAM type: YTN; PAM sequence: CTC
agcaggaaatccaacctcca

SEQ ID NO: 191674 - DNA, 20 bp, Artificial Sequence
  Description of Artificial Sequence: Synthetic oligonucleotide
  Target: LAMA2; (-) strand; PAM type: YTN; PAM sequence: TTA
aaaaaaaaaaaaaaaaaaag

SEQ ID NO: 191675 - DNA, 20 bp, Artificial Sequence
  Description of Artificial Sequence: Synthetic oligonucleotide
  Target: LAMA2; (-) strand; PAM type: YTN; PAM sequence: CTT
aaaaaaaaaaaaaaaaaaaa

SEQ ID NO: 191676 - DNA, 20 bp, Artificial Sequence
  Description of Artificial Sequence: Synthetic oligonucleotide
  Target: LAMA2; (-) strand; PAM type: YTN; PAM sequence: CTC
catcttaaaaaaaaaaaaaa

SEQ ID NO: 191677 - DNA, 20 bp, Artificial Sequence
  Description of Artificial Sequence: Synthetic oligonucleotide
  Target: LAMA2; (-) strand; PAM type: YTN; PAM sequence: CTG
ggcaacagggtgagactcca

SEQ ID NO: 191678 - DNA, 20 bp, Artificial Sequence
  Description of Artificial Sequence: Synthetic oligonucleotide
  Target: LAMA2; (-) strand; PAM type: YTN; PAM sequence: CTC
cagcctgggcaacagggtga

SEQ ID NO: 191679 - DNA, 20 bp, Artificial Sequence
  Description of Artificial Sequence: Synthetic oligonucleotide
  Target: LAMA2; (-) strand; PAM type: YTN; PAM sequence: TTG
cactccagcctgggcaacag

SEQ ID NO: 191680 - DNA, 20 bp, Artificial Sequence
  Description of Artificial Sequence: Synthetic oligonucleotide
  Target: LAMA2; (-) strand; PAM type: YTN; PAM sequence: TTG
cagtgagccaagatcacgcc

SEQ ID NO: 191681 - DNA, 20 bp, Artificial Sequence
  Description of Artificial Sequence: Synthetic oligonucleotide
  Target: LAMA2; (-) strand; PAM type: YTN; PAM sequence: TTG
aacccgggaggcggaggttg

SEQ ID NO: 191682 - DNA, 20 bp, Artificial Sequence
  Description of Artificial Sequence: Synthetic oligonucleotide
  Target: LAMA2; (-) strand; PAM type: YTN; PAM sequence: CTT
gaacccgggaggcggaggtt

SEQ ID NO: 191683 - DNA, 20 bp, Artificial Sequence
  Description of Artificial Sequence: Synthetic oligonucleotide
  Target: LAMA2; (-) strand; PAM type: YTN; PAM sequence: CTG
aggcaggagaatcacttgaa

SEQ ID NO: 191684 - DNA, 20 bp, Artificial Sequence
  Description of Artificial Sequence: Synthetic oligonucleotide
  Target: LAMA2; (-) strand; PAM type: YTN; PAM sequence: CTC
aggaggctgaggcaggagaa

SEQ ID NO: 191685 - DNA, 20 bp, Artificial Sequence
  Description of Artificial Sequence: Synthetic oligonucleotide
  Target: LAMA2; (-) strand; PAM type: YTN; PAM sequence: CTA
ctcaggaggctgaggcagga

SEQ ID NO: 191686 - DNA, 20 bp, Artificial Sequence
  Description of Artificial Sequence: Synthetic oligonucleotide
  Target: LAMA2; (-) strand; PAM type: YTN; PAM sequence: CTG
taatcccagctactcaggag

SEQ ID NO: 191687 - DNA, 20 bp, Artificial Sequence
  Description of Artificial Sequence: Synthetic oligonucleotide
  Target: LAMA2; (-) strand; PAM type: YTN; PAM sequence: CTC
gcctgtaatcccagctactc

SEQ ID NO: 191688 - DNA, 20 bp, Artificial Sequence
  Description of Artificial Sequence: Synthetic oligonucleotide
  Target: LAMA2; (-) strand; PAM type: YTN; PAM sequence: TTA
gccaggcatggtggcgctcg

SEQ ID NO: 191689 - DNA, 20 bp, Artificial Sequence
  Description of Artificial Sequence: Synthetic oligonucleotide
  Target: LAMA2; (-) strand; PAM type: YTN; PAM sequence: CTA
aaaatacaagaataaattag

SEQ ID NO: 191690 - DNA, 20 bp, Artificial Sequence
  Description of Artificial Sequence: Synthetic oligonucleotide
  Target: LAMA2; (-) strand; PAM type: YTN; PAM sequence: CTA
ctaaaaatacaagaataaat

SEQ ID NO: 191691 - DNA, 20 bp, Artificial Sequence
  Description of Artificial Sequence: Synthetic oligonucleotide
  Target: LAMA2; (-) strand; PAM type: YTN; PAM sequence: CTG
gccaacatagtgaaacccca

SEQ ID NO: 191692 - DNA, 20 bp, Artificial Sequence
  Description of Artificial Sequence: Synthetic oligonucleotide
  Target: LAMA2; (-) strand; PAM type: YTN; PAM sequence: TTC
gagaccagcctggccaacat

SEQ ID NO: 191693 - DNA, 20 bp, Artificial Sequence
  Description of Artificial Sequence: Synthetic oligonucleotide
  Target: LAMA2; (-) strand; PAM type: YTN; PAM sequence: TTG
ggaggccaaggcaggcagat

SEQ ID NO: 191694 - DNA, 20 bp, Artificial Sequence
  Description of Artificial Sequence: Synthetic oligonucleotide
  Target: LAMA2; (-) strand; PAM type: YTN; PAM sequence: TTT
gggaggccaaggcaggcaga

SEQ ID NO: 191695 - DNA, 20 bp, Artificial Sequence
  Description of Artificial Sequence: Synthetic oligonucleotide
  Target: LAMA2; (-) strand; PAM type: YTN; PAM sequence: CTT
tgggaggccaaggcaggcag

SEQ ID NO: 191696 - DNA, 20 bp, Artificial Sequence
  Description of Artificial Sequence: Synthetic oligonucleotide
  Target: LAMA2; (-) strand; PAM type: YTN; PAM sequence: CTG
taatcccagaactttgggag

SEQ ID NO: 191697 - DNA, 20 bp, Artificial Sequence
  Description of Artificial Sequence: Synthetic oligonucleotide
  Target: LAMA2; (-) strand; PAM type: YTN; PAM sequence: TTC
acacctgtaatcccagaact

SEQ ID NO: 191698 - DNA, 20 bp, Artificial Sequence
  Description of Artificial Sequence: Synthetic oligonucleotide
  Target: LAMA2; (-) strand; PAM type: YTN; PAM sequence: CTG
tggttcacacctgtaatccc

SEQ ID NO: 191699 - DNA, 20 bp, Artificial Sequence
  Description of Artificial Sequence: Synthetic oligonucleotide
  Target: LAMA2; (-) strand; PAM type: YTN; PAM sequence: CTG
ggcactgtggttcacacctg

SEQ ID NO: 191700 - DNA, 20 bp, Artificial Sequence
  Description of Artificial Sequence: Synthetic oligonucleotide
  Target: LAMA2; (-) strand; PAM type: YTN; PAM sequence: CTC
agcaggaaggctgggcactg

SEQ ID NO: 191701 - DNA, 20 bp, Artificial Sequence
  Description of Artificial Sequence: Synthetic oligonucleotide
  Target: LAMA2; (-) strand; PAM type: YTN; PAM sequence: CTA
agaaactcagcaggaaggct

SEQ ID NO: 191702 - DNA, 20 bp, Artificial Sequence
  Description of Artificial Sequence: Synthetic oligonucleotide
  Target: LAMA2; (-) strand; PAM type: YTN; PAM sequence: CTG
gcaataatgctaagaaactc

SEQ ID NO: 191703 - DNA, 20 bp, Artificial Sequence
  Description of Artificial Sequence: Synthetic oligonucleotide
  Target: LAMA2; (-) strand; PAM type: YTN; PAM sequence: TTC
cgacctggcaataatgctaa

SEQ ID NO: 191704 - DNA, 20 bp, Artificial Sequence
  Description of Artificial Sequence: Synthetic oligonucleotide
  Target: LAMA2; (-) strand; PAM type: YTN; PAM sequence: CTA
agttccgacctggcaataat

SEQ ID NO: 191705 - DNA, 20 bp, Artificial Sequence
  Description of Artificial Sequence: Synthetic oligonucleotide
  Target: LAMA2; (-) strand; PAM type: YTN; PAM sequence: CTA
tgcctaagttccgacctggc

SEQ ID NO: 191706 - DNA, 20 bp, Artificial Sequence
  Description of Artificial Sequence: Synthetic oligonucleotide
  Target: LAMA2; (-) strand; PAM type: YTN; PAM sequence: TTA
ctatgcctaagttccgacct

SEQ ID NO: 191707 - DNA, 20 bp, Artificial Sequence
  Description of Artificial Sequence: Synthetic oligonucleotide
  Target: LAMA2; (-) strand; PAM type: YTN; PAM sequence: TTC
atgttactatgcctaagttc

SEQ ID NO: 191708 - DNA, 20 bp, Artificial Sequence
  Description of Artificial Sequence: Synthetic oligonucleotide
  Target: LAMA2; (-) strand; PAM type: YTN; PAM sequence: TTT
catgttactatgcctaagtt

SEQ ID NO: 191709 - DNA, 20 bp, Artificial Sequence
  Description of Artificial Sequence: Synthetic oligonucleotide
  Target: LAMA2; (-) strand; PAM type: YTN; PAM sequence: TTC
agatgcagaacatgtttcat

SEQ ID NO: 191710 - DNA, 20 bp, Artificial Sequence
  Description of Artificial Sequence: Synthetic oligonucleotide
  Target: LAMA2; (-) strand; PAM type: YTN; PAM sequence: CTT
cagatgcagaacatgtttca

SEQ ID NO: 191711 - DNA, 20 bp, Artificial Sequence
  Description of Artificial Sequence: Synthetic oligonucleotide
  Target: LAMA2; (-) strand; PAM type: YTN; PAM sequence: CTG
gccttcagatgcagaacatg

SEQ ID NO: 191712 - DNA, 20 bp, Artificial Sequence
  Description of Artificial Sequence: Synthetic oligonucleotide
  Target: LAMA2; (-) strand; PAM type: YTN; PAM sequence: TTC
tggccttcagatgcagaaca

SEQ ID NO: 191713 - DNA, 20 bp, Artificial Sequence
  Description of Artificial Sequence: Synthetic oligonucleotide
  Target: LAMA2; (-) strand; PAM type: YTN; PAM sequence: TTA
tattctggccttcagatgca

SEQ ID NO: 191714 - DNA, 20 bp, Artificial Sequence
  Description of Artificial Sequence: Synthetic oligonucleotide
  Target: LAMA2; (-) strand; PAM type: YTN; PAM sequence: TTA
ttatattctggccttcagat

SEQ ID NO: 191715 - DNA, 20 bp, Artificial Sequence
  Description of Artificial Sequence: Synthetic oligonucleotide
  Target: LAMA2; (-) strand; PAM type: YTN; PAM sequence: CTT
attatattctggccttcaga

SEQ ID NO: 191716 - DNA, 20 bp, Artificial Sequence
  Description of Artificial Sequence: Synthetic oligonucleotide
  Target: LAMA2; (-) strand; PAM type: YTN; PAM sequence: TTA
acaatgcttattatattctg

SEQ ID NO: 191717 - DNA, 20 bp, Artificial Sequence
  Description of Artificial Sequence: Synthetic oligonucleotide
  Target: LAMA2; (-) strand; PAM type: YTN; PAM sequence: CTA
aattaacaatgcttattata

SEQ ID NO: 191718 - DNA, 20 bp, Artificial Sequence
  Description of Artificial Sequence: Synthetic oligonucleotide
  Target: LAMA2; (-) strand; PAM type: YTN; PAM sequence: TTA
actaaattaacaatgcttat

SEQ ID NO: 191719 - DNA, 20 bp, Artificial Sequence
  Description of Artificial Sequence: Synthetic oligonucleotide
  Target: LAMA2; (-) strand; PAM type: YTN; PAM sequence: TTT
aactaaattaacaatgctta

SEQ ID NO: 191720 - DNA, 20 bp, Artificial Sequence
  Description of Artificial Sequence: Synthetic oligonucleotide
  Target: LAMA2; (-) strand; PAM type: YTN; PAM sequence: CTT
taactaaattaacaatgctt

SEQ ID NO: 191721 - DNA, 20 bp, Artificial Sequence
  Description of Artificial Sequence: Synthetic oligonucleotide
  Target: LAMA2; (-) strand; PAM type: YTN; PAM sequence: TTC
ctttaactaaattaacaatg

SEQ ID NO: 191722 - DNA, 20 bp, Artificial Sequence
  Description of Artificial Sequence: Synthetic oligonucleotide
  Target: LAMA2; (-) strand; PAM type: YTN; PAM sequence: TTT
cctttaactaaattaacaat

SEQ ID NO: 191723 - DNA, 20 bp, Artificial Sequence
  Description of Artificial Sequence: Synthetic oligonucleotide
  Target: LAMA2; (-) strand; PAM type: YTN; PAM sequence: TTT
tcctttaactaaattaacaa

SEQ ID NO: 191724 - DNA, 20 bp, Artificial Sequence
  Description of Artificial Sequence: Synthetic oligonucleotide
  Target: LAMA2; (-) strand; PAM type: YTN; PAM sequence: CTT
ttcctttaactaaattaaca

SEQ ID NO: 191725 - DNA, 20 bp, Artificial Sequence
  Description of Artificial Sequence: Synthetic oligonucleotide
  Target: LAMA2; (-) strand; PAM type: YTN; PAM sequence: TTC
aacagcagccttttccttta

SEQ ID NO: 191726 - DNA, 20 bp, Artificial Sequence
  Description of Artificial Sequence: Synthetic oligonucleotide
  Target: LAMA2; (-) strand; PAM type: YTN; PAM sequence: CTT
caacagcagccttttccttt

SEQ ID NO: 191727 - DNA, 20 bp, Artificial Sequence
  Description of Artificial Sequence: Synthetic oligonucleotide
  Target: LAMA2; (-) strand; PAM type: YTN; PAM sequence: CTA
accttcaacagcagcctttt

SEQ ID NO: 191728 - DNA, 20 bp, Artificial Sequence
  Description of Artificial Sequence: Synthetic oligonucleotide
  Target: LAMA2; (-) strand; PAM type: YTN; PAM sequence: CTC
ccacacatacacaagaagtc

SEQ ID NO: 191729 - DNA, 20 bp, Artificial Sequence
  Description of Artificial Sequence: Synthetic oligonucleotide
  Target: LAMA2; (-) strand; PAM type: YTN; PAM sequence: TTA
tctcccacacatacacaaga

SEQ ID NO: 191730 - DNA, 20 bp, Artificial Sequence
  Description of Artificial Sequence: Synthetic oligonucleotide
  Target: LAMA2; (-) strand; PAM type: YTN; PAM sequence: CTG
ttatctcccacacatacaca

SEQ ID NO: 191731 - DNA, 20 bp, Artificial Sequence
  Description of Artificial Sequence: Synthetic oligonucleotide
  Target: LAMA2; (-) strand; PAM type: YTN; PAM sequence: TTC
tgttatctcccacacataca

SEQ ID NO: 191732 - DNA, 20 bp, Artificial Sequence
  Description of Artificial Sequence: Synthetic oligonucleotide
  Target: LAMA2; (-) strand; PAM type: YTN; PAM sequence: TTA
ttctgttatctcccacacat

SEQ ID NO: 191733 - DNA, 20 bp, Artificial Sequence
  Description of Artificial Sequence: Synthetic oligonucleotide
  Target: LAMA2; (-) strand; PAM type: YTN; PAM sequence: TTG
gaaaagagacgttattctgt

SEQ ID NO: 191734 - DNA, 20 bp, Artificial Sequence
  Description of Artificial Sequence: Synthetic oligonucleotide
  Target: LAMA2; (-) strand; PAM type: YTN; PAM sequence: CTT
ggaaaagagacgttattctg

SEQ ID NO: 191735 - DNA, 20 bp, Artificial Sequence
  Description of Artificial Sequence: Synthetic oligonucleotide
  Target: LAMA2; (-) strand; PAM type: YTN; PAM sequence: TTG
gcacataagcaaaagaaaac

SEQ ID NO: 191736 - DNA, 20 bp, Artificial Sequence
  Description of Artificial Sequence: Synthetic oligonucleotide
  Target: LAMA2; (-) strand; PAM type: YTN; PAM sequence: TTA
aaattggcacataagcaaaa

SEQ ID NO: 191737 - DNA, 20 bp, Artificial Sequence
  Description of Artificial Sequence: Synthetic oligonucleotide
  Target: LAMA2; (-) strand; PAM type: YTN; PAM sequence: TTG
attaaaattggcacataagc

SEQ ID NO: 191738 - DNA, 20 bp, Artificial Sequence
  Description of Artificial Sequence: Synthetic oligonucleotide
  Target: LAMA2; (-) strand; PAM type: YTN; PAM sequence: CTC
cattgattaaaattggcaca

SEQ ID NO: 191739 - DNA, 20 bp, Artificial Sequence
  Description of Artificial Sequence: Synthetic oligonucleotide
  Target: LAMA2; (-) strand; PAM type: YTN; PAM sequence: TTC
tccattgattaaaattggca

SEQ ID NO: 191740 - DNA, 20 bp, Artificial Sequence
  Description of Artificial Sequence: Synthetic oligonucleotide
  Target: LAMA2; (-) strand; PAM type: YTN; PAM sequence: TTT
ctccattgattaaaattggc

SEQ ID NO: 191741 - DNA, 20 bp, Artificial Sequence
  Description of Artificial Sequence: Synthetic oligonucleotide
  Target: LAMA2; (-) strand; PAM type: YTN; PAM sequence: TTA
atttctccattgattaaaat

SEQ ID NO: 191742 - DNA, 20 bp, Artificial Sequence
  Description of Artificial Sequence: Synthetic oligonucleotide
  Target: LAMA2; (-) strand; PAM type: YTN; PAM sequence: TTA
acatattaatttctccattg

SEQ ID NO: 191743 - DNA, 20 bp, Artificial Sequence
  Description of Artificial Sequence: Synthetic oligonucleotide
  Target: LAMA2; (-) strand; PAM type: YTN; PAM sequence: TTT
aacatattaatttctccatt

SEQ ID NO: 191744 - DNA, 20 bp, Artificial Sequence
  Description of Artificial Sequence: Synthetic oligonucleotide
  Target: LAMA2; (-) strand; PAM type: YTN; PAM sequence: TTC
atttaacatattaatttctc

SEQ ID NO: 191745 - DNA, 20 bp, Artificial Sequence
  Description of Artificial Sequence: Synthetic oligonucleotide
  Target: LAMA2; (-) strand; PAM type: YTN; PAM sequence: TTT
catttaacatattaatttct

SEQ ID NO: 191746 - DNA, 20 bp, Artificial Sequence
  Description of Artificial Sequence: Synthetic oligonucleotide
  Target: LAMA2; (-) strand; PAM type: YTN; PAM sequence: TTA
tttcatttaacatattaatt

SEQ ID NO: 191747 - DNA, 20 bp, Artificial Sequence
  Description of Artificial Sequence: Synthetic oligonucleotide
  Target: LAMA2; (-) strand; PAM type: YTN; PAM sequence: TTA
attatttcatttaacatatt

SEQ ID NO: 191748 - DNA, 20 bp, Artificial Sequence
  Description of Artificial Sequence: Synthetic oligonucleotide
  Target: LAMA2; (-) strand; PAM type: YTN; PAM sequence: TTA
taaaatggttaattatttca

SEQ ID NO: 191749 - DNA, 20 bp, Artificial Sequence
  Description of Artificial Sequence: Synthetic oligonucleotide
  Target: LAMA2; (-) strand; PAM type: YTN; PAM sequence: CTA
aaattataaaatggttaatt

SEQ ID NO: 191750 - DNA, 20 bp, Artificial Sequence
  Description of Artificial Sequence: Synthetic oligonucleotide
  Target: LAMA2; (-) strand; PAM type: YTN; PAM sequence: CTG
gtcaaccaatatccgactaa

SEQ ID NO: 191751 - DNA, 20 bp, Artificial Sequence
  Description of Artificial Sequence: Synthetic oligonucleotide
  Target: LAMA2; (-) strand; PAM type: YTN; PAM sequence: TTA
taccatcatataagtactgg

SEQ ID NO: 191752 - DNA, 20 bp, Artificial Sequence
  Description of Artificial Sequence: Synthetic oligonucleotide
  Target: LAMA2; (-) strand; PAM type: YTN; PAM sequence: TTT
ataccatcatataagtactg

SEQ ID NO: 191753 - DNA, 20 bp, Artificial Sequence
  Description of Artificial Sequence: Synthetic oligonucleotide
  Target: LAMA2; (-) strand; PAM type: YTN; PAM sequence: CTT
tataccatcatataagtact

SEQ ID NO: 191754 - DNA, 20 bp, Artificial Sequence
  Description of Artificial Sequence: Synthetic oligonucleotide
  Target: LAMA2; (-) strand; PAM type: YTN; PAM sequence: CTA
gaactttataccatcatata

SEQ ID NO: 191755 - DNA, 20 bp, Artificial Sequence
  Description of Artificial Sequence: Synthetic oligonucleotide
  Target: LAMA2; (-) strand; PAM type: YTN; PAM sequence: TTC
tagaactttataccatcata

SEQ ID NO: 191756 - DNA, 20 bp, Artificial Sequence
  Description of Artificial Sequence: Synthetic oligonucleotide
  Target: LAMA2; (-) strand; PAM type: YTN; PAM sequence: TTT
ctagaactttataccatcat

SEQ ID NO: 191757 - DNA, 20 bp, Artificial Sequence
  Description of Artificial Sequence: Synthetic oligonucleotide
  Target: LAMA2; (-) strand; PAM type: YTN; PAM sequence: TTA
tccagtttctagaactttat

SEQ ID NO: 191758 - DNA, 20 bp, Artificial Sequence
  Description of Artificial Sequence: Synthetic oligonucleotide
  Target: LAMA2; (-) strand; PAM type: YTN; PAM sequence: TTA
aagttatccagtttctagaa

SEQ ID NO: 191759 - DNA, 20 bp, Artificial Sequence
  Description of Artificial Sequence: Synthetic oligonucleotide
  Target: LAMA2; (-) strand; PAM type: YTN; PAM sequence: TTT
aaagttatccagtttctaga

SEQ ID NO: 191760 - DNA, 20 bp, Artificial Sequence
  Description of Artificial Sequence: Synthetic oligonucleotide
  Target: LAMA2; (-) strand; PAM type: YTN; PAM sequence: TTT
taaagttatccagtttctag

SEQ ID NO: 191761 - DNA, 20 bp, Artificial Sequence
  Description of Artificial Sequence: Synthetic oligonucleotide
  Target: LAMA2; (-) strand; PAM type: YTN; PAM sequence: TTT
ttaaagttatccagtttcta

SEQ ID NO: 191762 - DNA, 20 bp, Artificial Sequence
  Description of Artificial Sequence: Synthetic oligonucleotide
  Target: LAMA2; (-) strand; PAM type: YTN; PAM sequence: TTA
tatggaaagatttttaaagt

SEQ ID NO: 191763 - DNA, 20 bp, Artificial Sequence
  Description of Artificial Sequence: Synthetic oligonucleotide
  Target: LAMA2; (-) strand; PAM type: YTN; PAM sequence: CTA
tgacccagaatataatgcat

SEQ ID NO: 191764 - DNA, 20 bp, Artificial Sequence
  Description of Artificial Sequence: Synthetic oligonucleotide
  Target: LAMA2; (-) strand; PAM type: YTN; PAM sequence: TTA
taatataggaaactatgacc

SEQ ID NO: 191765 - DNA, 20 bp, Artificial Sequence
  Description of Artificial Sequence: Synthetic oligonucleotide
  Target: LAMA2; (-) strand; PAM type: YTN; PAM sequence: TTA
gcagttataatataggaaac

SEQ ID NO: 191766 - DNA, 20 bp, Artificial Sequence
  Description of Artificial Sequence: Synthetic oligonucleotide
  Target: LAMA2; (-) strand; PAM type: YTN; PAM sequence: TTT
agcagttataatataggaaa

SEQ ID NO: 191767 - DNA, 20 bp, Artificial Sequence
  Description of Artificial Sequence: Synthetic oligonucleotide
  Target: LAMA2; (-) strand; PAM type: YTN; PAM sequence: TTG
tttagcagttataatatagg

SEQ ID NO: 191768 - DNA, 20 bp, Artificial Sequence
  Description of Artificial Sequence: Synthetic oligonucleotide
  Target: LAMA2; (-) strand; PAM type: YTN; PAM sequence: TTA
tgttgtttagcagttataat

SEQ ID NO: 191769 - DNA, 20 bp, Artificial Sequence
  Description of Artificial Sequence: Synthetic oligonucleotide
  Target: LAMA2; (-) strand; PAM type: YTN; PAM sequence: TTT
atgttgtttagcagttataa

SEQ ID NO: 191770 - DNA, 20 bp, Artificial Sequence
  Description of Artificial Sequence: Synthetic oligonucleotide
  Target: LAMA2; (-) strand; PAM type: YTN; PAM sequence: TTG
gtttatgttgtttagcagtt

SEQ ID NO: 191771 - DNA, 20 bp, Artificial Sequence
  Description of Artificial Sequence: Synthetic oligonucleotide
  Target: LAMA2; (-) strand; PAM type: YTN; PAM sequence: TTG
aaaataaaattggtttatgt

SEQ ID NO: 191772 - DNA, 20 bp, Artificial Sequence
  Description of Artificial Sequence: Synthetic oligonucleotide
  Target: LAMA2; (-) strand; PAM type: YTN; PAM sequence: TTT
gaaaataaaattggtttatg

SEQ ID NO: 191773 - DNA, 20 bp, Artificial Sequence
  Description of Artificial Sequence: Synthetic oligonucleotide
  Target: LAMA2; (-) strand; PAM type: YTN; PAM sequence: TTT
tgaaaataaaattggtttat

SEQ ID NO: 191774 - DNA, 20 bp, Artificial Sequence
  Description of Artificial Sequence: Synthetic oligonucleotide
  Target: LAMA2; (-) strand; PAM type: YTN; PAM sequence: TTG
attttgaaaataaaattggt

SEQ ID NO: 191775 - DNA, 20 bp, Artificial Sequence
  Description of Artificial Sequence: Synthetic oligonucleotide
  Target: LAMA2; (-) strand; PAM type: YTN; PAM sequence: TTA
ccccaaagattgattttgaa

SEQ ID NO: 191776 - DNA, 20 bp, Artificial Sequence
  Description of Artificial Sequence: Synthetic oligonucleotide
  Target: LAMA2; (-) strand; PAM type: YTN; PAM sequence: CTA
agtagaagttaccccaaaga

SEQ ID NO: 191777 - DNA, 20 bp, Artificial Sequence
  Description of Artificial Sequence: Synthetic oligonucleotide
  Target: LAMA2; (-) strand; PAM type: YTN; PAM sequence: CTC
taagtagaagttaccccaaa

SEQ ID NO: 191778 - DNA, 20 bp, Artificial Sequence
  Description of Artificial Sequence: Synthetic oligonucleotide
  Target: LAMA2; (-) strand; PAM type: YTN; PAM sequence: TTA
ggtcagggctctaagtagaa

SEQ ID NO: 191779 - DNA, 20 bp, Artificial Sequence
  Description of Artificial Sequence: Synthetic oligonucleotide
  Target: LAMA2; (-) strand; PAM type: YTN; PAM sequence: TTA
ttaggtcagggctctaagta

SEQ ID NO: 191780 - DNA, 20 bp, Artificial Sequence
  Description of Artificial Sequence: Synthetic oligonucleotide
  Target: LAMA2; (-) strand; PAM type: YTN; PAM sequence: TTT
attaggtcagggctctaagt

SEQ ID NO: 191781 - DNA, 20 bp, Artificial Sequence
  Description of Artificial Sequence: Synthetic oligonucleotide
  Target: LAMA2; (-) strand; PAM type: YTN; PAM sequence: TTA
tcaaaatacgtgtcagaaat

SEQ ID NO: 191782 - DNA, 20 bp, Artificial Sequence
  Description of Artificial Sequence: Synthetic oligonucleotide
  Target: LAMA2; (-) strand; PAM type: YTN; PAM sequence: CTA
aatgattatcaaaatacgtg

SEQ ID NO: 191783 - DNA, 20 bp, Artificial Sequence
  Description of Artificial Sequence: Synthetic oligonucleotide
  Target: LAMA2; (-) strand; PAM type: YTN; PAM sequence: CTA
atctaaatgattatcaaaat

SEQ ID NO: 191784 - DNA, 20 bp, Artificial Sequence
  Description of Artificial Sequence: Synthetic oligonucleotide
  Target: LAMA2; (-) strand; PAM type: YTN; PAM sequence: TTA
cacatatccacataaataag

SEQ ID NO: 191785 - DNA, 20 bp, Artificial Sequence
  Description of Artificial Sequence: Synthetic oligonucleotide
  Target: LAMA2; (-) strand; PAM type: YTN; PAM sequence: TTA
ttacacatatccacataaat

SEQ ID NO: 191786 - DNA, 20 bp, Artificial Sequence
  Description of Artificial Sequence: Synthetic oligonucleotide
  Target: LAMA2; (-) strand; PAM type: YTN; PAM sequence: TTT
attacacatatccacataaa

SEQ ID NO: 191787 - DNA, 20 bp, Artificial Sequence
  Description of Artificial Sequence: Synthetic oligonucleotide
  Target: LAMA2; (-) strand; PAM type: YTN; PAM sequence: TTT
tattacacatatccacataa

SEQ ID NO: 191788 - DNA, 20 bp, Artificial Sequence
  Description of Artificial Sequence: Synthetic oligonucleotide
  Target: LAMA2; (-) strand; PAM type: YTN; PAM sequence: TTC
caaagaaattttattacaca

SEQ ID NO: 191789 - DNA, 20 bp, Artificial Sequence
  Description of Artificial Sequence: Synthetic oligonucleotide
  Target: LAMA2; (-) strand; PAM type: YTN; PAM sequence: TTT
ccaaagaaattttattacac

SEQ ID NO: 191790 - DNA, 20 bp, Artificial Sequence
  Description of Artificial Sequence: Synthetic oligonucleotide
  Target: LAMA2; (-) strand; PAM type: YTN; PAM sequence: TTT
tccaaagaaattttattaca

SEQ ID NO: 191791 - DNA, 20 bp, Artificial Sequence
  Description of Artificial Sequence: Synthetic oligonucleotide
  Target: LAMA2; (-) strand; PAM type: YTN; PAM sequence: CTC
aataaaccatattttccaaa

SEQ ID NO: 191792 - DNA, 20 bp, Artificial Sequence
  Description of Artificial Sequence: Synthetic oligonucleotide
  Target: LAMA2; (-) strand; PAM type: YTN; PAM sequence: TTA
aactcaataaaccatatttt

SEQ ID NO: 191793 - DNA, 20 bp, Artificial Sequence
  Description of Artificial Sequence: Synthetic oligonucleotide
  Target: LAMA2; (-) strand; PAM type: YTN; PAM sequence: TTT
aaactcaataaaccatattt

SEQ ID NO: 191794 - DNA, 20 bp, Artificial Sequence
  Description of Artificial Sequence: Synthetic oligonucleotide
  Target: LAMA2; (-) strand; PAM type: YTN; PAM sequence: TTA
ggaaagtgaaatggaggtaa

SEQ ID NO: 191795 - DNA, 20 bp, Artificial Sequence
  Description of Artificial Sequence: Synthetic oligonucleotide
  Target: LAMA2; (-) strand; PAM type: YTN; PAM sequence: TTT
aggaaagtgaaatggaggta

SEQ ID NO: 191796 - DNA, 20 bp, Artificial Sequence
  Description of Artificial Sequence: Synthetic oligonucleotide
  Target: LAMA2; (-) strand; PAM type: YTN; PAM sequence: TTA
aaatttaggaaagtgaaatg

SEQ ID NO: 191797 - DNA, 20 bp, Artificial Sequence
  Description of Artificial Sequence: Synthetic oligonucleotide
  Target: LAMA2; (-) strand; PAM type: YTN; PAM sequence: CTG
caatggaacagaaaaaaata

SEQ ID NO: 191798 - DNA, 20 bp, Artificial Sequence
  Description of Artificial Sequence: Synthetic oligonucleotide
  Target: LAMA2; (-) strand; PAM type: YTN; PAM sequence: CTA
tgcctgcaatggaacagaaa

SEQ ID NO: 191799 - DNA, 20 bp, Artificial Sequence
  Description of Artificial Sequence: Synthetic oligonucleotide
  Target: LAMA2; (-) strand; PAM type: YTN; PAM sequence: TTG
gtactatgcctgcaatggaa

SEQ ID NO: 191800 - DNA, 20 bp, Artificial Sequence
  Description of Artificial Sequence: Synthetic oligonucleotide
  Target: LAMA2; (-) strand; PAM type: YTN; PAM sequence: CTG
acacagaattggtactatgc

SEQ ID NO: 191801 - DNA, 20 bp, Artificial Sequence
  Description of Artificial Sequence: Synthetic oligonucleotide
  Target: LAMA2; (-) strand; PAM type: YTN; PAM sequence: TTG
aaacaaagtgaataaaatgc

SEQ ID NO: 191802 - DNA, 20 bp, Artificial Sequence
  Description of Artificial Sequence: Synthetic oligonucleotide
  Target: LAMA2; (-) strand; PAM type: YTN; PAM sequence: CTC
aagaacagttgaaacaaagt

SEQ ID NO: 191803 - DNA, 20 bp, Artificial Sequence
  Description of Artificial Sequence: Synthetic oligonucleotide
  Target: LAMA2; (-) strand; PAM type: YTN; PAM sequence: CTC
cgggatctcaagaacagttg

SEQ ID NO: 191804 - DNA, 20 bp, Artificial Sequence
  Description of Artificial Sequence: Synthetic oligonucleotide
  Target: LAMA2; (-) strand; PAM type: YTN; PAM sequence: CTA
atcctccgggatctcaagaa

SEQ ID NO: 191805 - DNA, 20 bp, Artificial Sequence
  Description of Artificial Sequence: Synthetic oligonucleotide
  Target: LAMA2; (-) strand; PAM type: YTN; PAM sequence: CTG
caatagtcctaatcctccgg

SEQ ID NO: 191806 - DNA, 20 bp, Artificial Sequence
  Description of Artificial Sequence: Synthetic oligonucleotide
  Target: LAMA2; (-) strand; PAM type: YTN; PAM sequence: TTA
taactgcaatagtcctaatc

SEQ ID NO: 191807 - DNA, 20 bp, Artificial Sequence
  Description of Artificial Sequence: Synthetic oligonucleotide
  Target: LAMA2; (-) strand; PAM type: YTN; PAM sequence: CTT
ataactgcaatagtcctaat

SEQ ID NO: 191808 - DNA, 20 bp, Artificial Sequence
  Description of Artificial Sequence: Synthetic oligonucleotide
  Target: LAMA2; (-) strand; PAM type: YTN; PAM sequence: TTA
tagacttataactgcaatag

SEQ ID NO: 191809 - DNA, 20 bp, Artificial Sequence
  Description of Artificial Sequence: Synthetic oligonucleotide
  Target: LAMA2; (-) strand; PAM type: YTN; PAM sequence: CTC
agttatagacttataactgc

SEQ ID NO: 191810 - DNA, 20 bp, Artificial Sequence
  Description of Artificial Sequence: Synthetic oligonucleotide
  Target: LAMA2; (-) strand; PAM type: YTN; PAM sequence: TTC
ctcagttatagacttataac

SEQ ID NO: 191811 - DNA, 20 bp, Artificial Sequence
  Description of Artificial Sequence: Synthetic oligonucleotide
  Target: LAMA2; (-) strand; PAM type: YTN; PAM sequence: TTT
cctcagttatagacttataa

SEQ ID NO: 191812 - DNA, 20 bp, Artificial Sequence
  Description of Artificial Sequence: Synthetic oligonucleotide
  Target: LAMA2; (-) strand; PAM type: YTN; PAM sequence: CTT
tcctcagttatagacttata

SEQ ID NO: 191813 - DNA, 20 bp, Artificial Sequence
  Description of Artificial Sequence: Synthetic oligonucleotide
  Target: LAMA2; (-) strand; PAM type: YTN; PAM sequence: TTC
ctttcctcagttatagactt

SEQ ID NO: 191814 - DNA, 20 bp, Artificial Sequence
  Description of Artificial Sequence: Synthetic oligonucleotide
  Target: LAMA2; (-) strand; PAM type: YTN; PAM sequence: CTT
cctttcctcagttatagact

SEQ ID NO: 191815 - DNA, 20 bp, Artificial Sequence
  Description of Artificial Sequence: Synthetic oligonucleotide
  Target: LAMA2; (-) strand; PAM type: YTN; PAM sequence: CTG
tccagataagcttcctttcc

SEQ ID NO: 191816 - DNA, 20 bp, Artificial Sequence
  Description of Artificial Sequence: Synthetic oligonucleotide
  Target: LAMA2; (-) strand; PAM type: YTN; PAM sequence: TTC
ctgtccagataagcttcctt

SEQ ID NO: 191817 - DNA, 20 bp, Artificial Sequence
  Description of Artificial Sequence: Synthetic oligonucleotide
  Target: LAMA2; (-) strand; PAM type: YTN; PAM sequence: CTT
cctgtccagataagcttcct

SEQ ID NO: 191818 - DNA, 20 bp, Artificial Sequence
  Description of Artificial Sequence: Synthetic oligonucleotide
  Target: LAMA2; (-) strand; PAM type: YTN; PAM sequence: CTA
aatatcttcctgtccagata

SEQ ID NO: 191819 - DNA, 20 bp, Artificial Sequence
  Description of Artificial Sequence: Synthetic oligonucleotide
  Target: LAMA2; (-) strand; PAM type: YTN; PAM sequence: CTC
taaatatcttcctgtccaga

SEQ ID NO: 191820 - DNA, 20 bp, Artificial Sequence
  Description of Artificial Sequence: Synthetic oligonucleotide
  Target: LAMA2; (-) strand; PAM type: YTN; PAM sequence: TTA
tatcatactctaaatatctt

SEQ ID NO: 191821 - DNA, 20 bp, Artificial Sequence
  Description of Artificial Sequence: Synthetic oligonucleotide
  Target: LAMA2; (-) strand; PAM type: YTN; PAM sequence: TTT
atatcatactctaaatatct

SEQ ID NO: 191822 - DNA, 20 bp, Artificial Sequence
  Description of Artificial Sequence: Synthetic oligonucleotide
  Target: LAMA2; (-) strand; PAM type: YTN; PAM sequence: CTT
tatatcatactctaaatatc

SEQ ID NO: 191823 - DNA, 20 bp, Artificial Sequence
  Description of Artificial Sequence: Synthetic oligonucleotide
  Target: LAMA2; (-) strand; PAM type: YTN; PAM sequence: CTG
tctttatatcatactctaaa

SEQ ID NO: 191824 - DNA, 20 bp, Artificial Sequence
  Description of Artificial Sequence: Synthetic oligonucleotide
  Target: LAMA2; (-) strand; PAM type: YTN; PAM sequence: TTA
aaaagagactgtctttatat

SEQ ID NO: 191825 - DNA, 20 bp, Artificial Sequence
  Description of Artificial Sequence: Synthetic oligonucleotide
  Target: LAMA2; (-) strand; PAM type: YTN; PAM sequence: TTT
aaaaagagactgtctttata

SEQ ID NO: 191826 - DNA, 20 bp, Artificial Sequence
  Description of Artificial Sequence: Synthetic oligonucleotide
  Target: LAMA2; (-) strand; PAM type: YTN; PAM sequence: TTT
taaaaagagactgtctttat

SEQ ID NO: 191827 - DNA, 20 bp, Artificial Sequence
  Description of Artificial Sequence: Synthetic oligonucleotide
  Target: LAMA2; (-) strand; PAM type: YTN; PAM sequence: TTT
ttaaaaagagactgtcttta

SEQ ID NO: 191828 - DNA, 20 bp, Artificial Sequence
  Description of Artificial Sequence: Synthetic oligonucleotide
  Target: LAMA2; (-) strand; PAM type: YTN; PAM sequence: CTG
tttttaaaaagagactgtct

SEQ ID NO: 191829 - DNA, 20 bp, Artificial Sequence
  Description of Artificial Sequence: Synthetic oligonucleotide
  Target: LAMA2; (-) strand; PAM type: YTN; PAM sequence: TTA
aaatgctgtttttaaaaaga

SEQ ID NO: 191830 - DNA, 20 bp, Artificial Sequence
  Description of Artificial Sequence: Synthetic oligonucleotide
  Target: LAMA2; (-) strand; PAM type: YTN; PAM sequence: TTT
aaaatgctgtttttaaaaag

SEQ ID NO: 191831 - DNA, 20 bp, Artificial Sequence
  Description of Artificial Sequence: Synthetic oligonucleotide
  Target: LAMA2; (-) strand; PAM type: YTN; PAM sequence: CTT
taaaatgctgtttttaaaaa

SEQ ID NO: 191832 - DNA, 20 bp, Artificial Sequence
  Description of Artificial Sequence: Synthetic oligonucleotide
  Target: LAMA2; (-) strand; PAM type: YTN; PAM sequence: TTA
tacctttaaaatgctgtttt

SEQ ID NO: 191833 - DNA, 20 bp, Artificial Sequence
  Description of Artificial Sequence: Synthetic oligonucleotide
  Target: LAMA2; (-) strand; PAM type: YTN; PAM sequence: TTA
aagtataataataaaagaaa

SEQ ID NO: 191834 - DNA, 20 bp, Artificial Sequence
  Description of Artificial Sequence: Synthetic oligonucleotide
  Target: LAMA2; (-) strand; PAM type: YTN; PAM sequence: CTT
aaagtataataataaaagaa

SEQ ID NO: 191835 - DNA, 20 bp, Artificial Sequence
  Description of Artificial Sequence: Synthetic oligonucleotide
  Target: LAMA2; (-) strand; PAM type: YTN; PAM sequence: CTA
aaacttaaagtataataata

SEQ ID NO: 191836 - DNA, 20 bp, Artificial Sequence
  Description of Artificial Sequence: Synthetic oligonucleotide
  Target: LAMA2; (-) strand; PAM type: YTN; PAM sequence: CTG
cacaatgtgcacatgtaccc

SEQ ID NO: 191837 - DNA, 20 bp, Artificial Sequence
  Description of Artificial Sequence: Synthetic oligonucleotide
  Target: LAMA2; (-) strand; PAM type: YTN; PAM sequence: CTA
acctgcacaatgtgcacatg

SEQ ID NO: 191838 - DNA, 20 bp, Artificial Sequence
  Description of Artificial Sequence: Synthetic oligonucleotide
  Target: LAMA2; (-) strand; PAM type: YTN; PAM sequence: TTA
gtgggtgcagcgcaccagca

SEQ ID NO: 191839 - DNA, 20 bp, Artificial Sequence
  Description of Artificial Sequence: Synthetic oligonucleotide
  Target: LAMA2; (-) strand; PAM type: YTN; PAM sequence: CTA
gatgacgagttagtgggtgc

SEQ ID NO: 191840 - DNA, 20 bp, Artificial Sequence
  Description of Artificial Sequence: Synthetic oligonucleotide
  Target: LAMA2; (-) strand; PAM type: YTN; PAM sequence: CTA
atgctagatgacgagttagt

SEQ ID NO: 191841 - DNA, 20 bp, Artificial Sequence
  Description of Artificial Sequence: Synthetic oligonucleotide
  Target: LAMA2; (-) strand; PAM type: YTN; PAM sequence: TTG
ggagatatacctaatgctag

SEQ ID NO: 191842 - DNA, 20 bp, Artificial Sequence
  Description of Artificial Sequence: Synthetic oligonucleotide
  Target: LAMA2; (-) strand; PAM type: YTN; PAM sequence: TTG
tggggtggggggagtgggga

SEQ ID NO: 191843 - DNA, 20 bp, Artificial Sequence
  Description of Artificial Sequence: Synthetic oligonucleotide
  Target: LAMA2; (-) strand; PAM type: YTN; PAM sequence: CTG
ttgtggggtggggggagtgg

SEQ ID NO: 191844 - DNA, 20 bp, Artificial Sequence
  Description of Artificial Sequence: Synthetic oligonucleotide
  Target: LAMA2; (-) strand; PAM type: YTN; PAM sequence: CTG
gggactgttgtggggtgggg

SEQ ID NO: 191845 - DNA, 20 bp, Artificial Sequence
  Description of Artificial Sequence: Synthetic oligonucleotide
  Target: LAMA2; (-) strand; PAM type: YTN; PAM sequence: CTC
tggggactgttgtggggtgg

SEQ ID NO: 191846 - DNA, 20 bp, Artificial Sequence
  Description of Artificial Sequence: Synthetic oligonucleotide
  Target: LAMA2; (-) strand; PAM type: YTN; PAM sequence: TTG
aacaatgagatcacatggac

SEQ ID NO: 191847 - DNA, 20 bp, Artificial Sequence
  Description of Artificial Sequence: Synthetic oligonucleotide
  Target: LAMA2; (-) strand; PAM type: YTN; PAM sequence: CTC
aatcataggtgggaattgaa

SEQ ID NO: 191848 - DNA, 20 bp, Artificial Sequence
  Description of Artificial Sequence: Synthetic oligonucleotide
  Target: LAMA2; (-) strand; PAM type: YTN; PAM sequence: TTC
tcaatcataggtgggaattg

SEQ ID NO: 191849 - DNA, 20 bp, Artificial Sequence
  Description of Artificial Sequence: Synthetic oligonucleotide
  Target: LAMA2; (-) strand; PAM type: YTN; PAM sequence: CTA
tcacaagaataaaaaaccaa

SEQ ID NO: 191850 - DNA, 20 bp, Artificial Sequence
  Description of Artificial Sequence: Synthetic oligonucleotide
  Target: LAMA2; (-) strand; PAM type: YTN; PAM sequence: CTC
agcaaactatcacaagaata

SEQ ID NO: 191851 - DNA, 20 bp, Artificial Sequence
  Description of Artificial Sequence: Synthetic oligonucleotide
  Target: LAMA2; (-) strand; PAM type: YTN; PAM sequence: TTC
tcagcaaactatcacaagaa

SEQ ID NO: 191852 - DNA, 20 bp, Artificial Sequence
  Description of Artificial Sequence: Synthetic oligonucleotide
  Target: LAMA2; (-) strand; PAM type: YTN; PAM sequence: TTG
gaaatcatcattctcagcaa

SEQ ID NO: 191853 - DNA, 20 bp, Artificial Sequence
  Description of Artificial Sequence: Synthetic oligonucleotide
  Target: LAMA2; (-) strand; PAM type: YTN; PAM sequence: TTG
tagggacatggatgaaattg

SEQ ID NO: 191854 - DNA, 20 bp, Artificial Sequence
  Description of Artificial Sequence: Synthetic oligonucleotide
  Target: LAMA2; (-) strand; PAM type: YTN; PAM sequence: TTT
gtagggacatggatgaaatt

SEQ ID NO: 191855 - DNA, 20 bp, Artificial Sequence
  Description of Artificial Sequence: Synthetic oligonucleotide
  Target: LAMA2; (-) strand; PAM type: YTN; PAM sequence: CTT
tgtagggacatggatgaaat

SEQ ID NO: 191856 - DNA, 20 bp, Artificial Sequence
  Description of Artificial Sequence: Synthetic oligonucleotide
  Target: LAMA2; (-) strand; PAM type: YTN; PAM sequence: TTC
atgtcctttgtagggacatg

SEQ ID NO: 191857 - DNA, 20 bp, Artificial Sequence
  Description of Artificial Sequence: Synthetic oligonucleotide
  Target: LAMA2; (-) strand; PAM type: YTN; PAM sequence: CTA
tgcagccataaaaaatgatg

SEQ ID NO: 191858 - DNA, 20 bp, Artificial Sequence
  Description of Artificial Sequence: Synthetic oligonucleotide
  Target: LAMA2; (-) strand; PAM type: YTN; PAM sequence: TTA
agaaaatgtggcacatatac

SEQ ID NO: 191859 - DNA, 20 bp, Artificial Sequence
  Description of Artificial Sequence: Synthetic oligonucleotide
  Target: LAMA2; (-) strand; PAM type: YTN; PAM sequence: CTG
gattaagaaaatgtggcaca

SEQ ID NO: 191860 - DNA, 20 bp, Artificial Sequence
  Description of Artificial Sequence: Synthetic oligonucleotide
  Target: LAMA2; (-) strand; PAM type: YTN; PAM sequence: TTG
gaaccaacccaaatgtccaa

SEQ ID NO: 191861 - DNA, 20 bp, Artificial Sequence
  Description of Artificial Sequence: Synthetic oligonucleotide
  Target: LAMA2; (-) strand; PAM type: YTN; PAM sequence: CTT
ggaaccaacccaaatgtcca

SEQ ID NO: 191862 - DNA, 20 bp, Artificial Sequence
  Description of Artificial Sequence: Synthetic oligonucleotide
  Target: LAMA2; (-) strand; PAM type: YTN; PAM sequence: TTC
acaatagcaaagacttggaa

SEQ ID NO: 191863 - DNA, 20 bp, Artificial Sequence
  Description of Artificial Sequence: Synthetic oligonucleotide
  Target: LAMA2; (-) strand; PAM type: YTN; PAM sequence: CTA
ttcacaatagcaaagacttg

SEQ ID NO: 191864 - DNA, 20 bp, Artificial Sequence
  Description of Artificial Sequence: Synthetic oligonucleotide
  Target: LAMA2; (-) strand; PAM type: YTN; PAM sequence: TTG
cggcactattcacaatagca

SEQ ID NO: 191865 - DNA, 20 bp, Artificial Sequence
  Description of Artificial Sequence: Synthetic oligonucleotide
  Target: LAMA2; (-) strand; PAM type: YTN; PAM sequence: TTA
ttgcggcactattcacaata

SEQ ID NO: 191866 - DNA, 20 bp, Artificial Sequence
  Description of Artificial Sequence: Synthetic oligonucleotide
  Target: LAMA2; (-) strand; PAM type: YTN; PAM sequence: TTT
attgcggcactattcacaat

SEQ ID NO: 191867 - DNA, 20 bp, Artificial Sequence
  Description of Artificial Sequence: Synthetic oligonucleotide
  Target: LAMA2; (-) strand; PAM type: YTN; PAM sequence: CTA
taaagacacatgcacacata

SEQ ID NO: 191868 - DNA, 20 bp, Artificial Sequence
  Description of Artificial Sequence: Synthetic oligonucleotide
  Target: LAMA2; (-) strand; PAM type: YTN; PAM sequence: CTG
ctataaagacacatgcacac

SEQ ID NO: 191869 - DNA, 20 bp, Artificial Sequence
  Description of Artificial Sequence: Synthetic oligonucleotide
  Target: LAMA2; (-) strand; PAM type: YTN; PAM sequence: CTA
taaatcatgctgctataaag

SEQ ID NO: 191870 - DNA, 20 bp, Artificial Sequence
  Description of Artificial Sequence: Synthetic oligonucleotide
  Target: LAMA2; (-) strand; PAM type: YTN; PAM sequence: CTG
ggtatatacccaaaggacta

SEQ ID NO: 191871 - DNA, 20 bp, Artificial Sequence
  Description of Artificial Sequence: Synthetic oligonucleotide
  Target: LAMA2; (-) strand; PAM type: YTN; PAM sequence: TTA
ctgggtatatacccaaagga

SEQ ID NO: 191872 - DNA, 20 bp, Artificial Sequence
  Description of Artificial Sequence: Synthetic oligonucleotide
  Target: LAMA2; (-) strand; PAM type: YTN; PAM sequence: TTG
acccagccatcccattactg

SEQ ID NO: 191873 - DNA, 20 bp, Artificial Sequence
  Description of Artificial Sequence: Synthetic oligonucleotide
  Target: LAMA2; (-) strand; PAM type: YTN; PAM sequence: TTT
gacccagccatcccattact

SEQ ID NO: 191874 - DNA, 20 bp, Artificial Sequence
  Description of Artificial Sequence: Synthetic oligonucleotide
  Target: LAMA2; (-) strand; PAM type: YTN; PAM sequence: CTA
gaaataccatttgacccagc

SEQ ID NO: 191875 - DNA, 20 bp, Artificial Sequence
  Description of Artificial Sequence: Synthetic oligonucleotide
  Target: LAMA2; (-) strand; PAM type: YTN; PAM sequence: CTA
gaactagaaataccatttga

SEQ ID NO: 191876 - DNA, 20 bp, Artificial Sequence
  Description of Artificial Sequence: Synthetic oligonucleotide
  Target: LAMA2; (-) strand; PAM type: YTN; PAM sequence: CTC
agggatctagaactagaaat

SEQ ID NO: 191877 - DNA, 20 bp, Artificial Sequence
  Description of Artificial Sequence: Synthetic oligonucleotide
  Target: LAMA2; (-) strand; PAM type: YTN; PAM sequence: TTC
ctcagggatctagaactaga

SEQ ID NO: 191878 - DNA, 20 bp, Artificial Sequence
  Description of Artificial Sequence: Synthetic oligonucleotide
  Target: LAMA2; (-) strand; PAM type: YTN; PAM sequence: TTG
tggaagtcagtgtggcgatt

SEQ ID NO: 191879 - DNA, 20 bp, Artificial Sequence
  Description of Artificial Sequence: Synthetic oligonucleotide
  Target: LAMA2; (-) strand; PAM type: YTN; PAM sequence: TTC
aaccattgtggaagtcagtg

SEQ ID NO: 191880 - DNA, 20 bp, Artificial Sequence
  Description of Artificial Sequence: Synthetic oligonucleotide
  Target: LAMA2; (-) strand; PAM type: YTN; PAM sequence: CTA
gttcaaccattgtggaagtc

SEQ ID NO: 191881 - DNA, 20 bp, Artificial Sequence
  Description of Artificial Sequence: Synthetic oligonucleotide
  Target: LAMA2; (-) strand; PAM type: YTN; PAM sequence: CTG
taaactagttcaaccattgt

SEQ ID NO: 191882 - DNA, 20 bp, Artificial Sequence
  Description of Artificial Sequence: Synthetic oligonucleotide
  Target: LAMA2; (-) strand; PAM type: YTN; PAM sequence: TTG
gtgggactgtaaactagttc

SEQ ID NO: 191883 - DNA, 20 bp, Artificial Sequence
  Description of Artificial Sequence: Synthetic oligonucleotide
  Target: LAMA2; (-) strand; PAM type: YTN; PAM sequence: CTG
ttggtgggactgtaaactag

SEQ ID NO: 191884 - DNA, 20 bp, Artificial Sequence
  Description of Artificial Sequence: Synthetic oligonucleotide
  Target: LAMA2; (-) strand; PAM type: YTN; PAM sequence: TTA
cactgttggtgggactgtaa

SEQ ID NO: 191885 - DNA, 20 bp, Artificial Sequence
  Description of Artificial Sequence: Synthetic oligonucleotide
  Target: LAMA2; (-) strand; PAM type: YTN; PAM sequence: TTT
acactgttggtgggactgta

SEQ ID NO: 191886 - DNA, 20 bp, Artificial Sequence
  Description of Artificial Sequence: Synthetic oligonucleotide
  Target: LAMA2; (-) strand; PAM type: YTN; PAM sequence: TTT
tacactgttggtgggactgt

SEQ ID NO: 191887 - DNA, 20 bp, Artificial Sequence
  Description of Artificial Sequence: Synthetic oligonucleotide
  Target: LAMA2; (-) strand; PAM type: YTN; PAM sequence: CTT
ttacactgttggtgggactg

SEQ ID NO: 191888 - DNA, 20 bp, Artificial Sequence
  Description of Artificial Sequence: Synthetic oligonucleotide
  Target: LAMA2; (-) strand; PAM type: YTN; PAM sequence: CTG
gagaggatgtggagaaatag

SEQ ID NO: 191889 - DNA, 20 bp, Artificial Sequence
  Description of Artificial Sequence: Synthetic oligonucleotide
  Target: LAMA2; (-) strand; PAM type: YTN; PAM sequence: TTA
aaaagtcaggaaacaacagg

SEQ ID NO: 191890 - DNA, 20 bp, Artificial Sequence
  Description of Artificial Sequence: Synthetic oligonucleotide
  Target: LAMA2; (-) strand; PAM type: YTN; PAM sequence: TTA
gaatggcagtcattaaaaag

SEQ ID NO: 191891 - DNA, 20 bp, Artificial Sequence
  Description of Artificial Sequence: Synthetic oligonucleotide
  Target: LAMA2; (-) strand; PAM type: YTN; PAM sequence: CTC
acaccagttagaatggcagt

SEQ ID NO: 191892 - DNA, 20 bp, Artificial Sequence
  Description of Artificial Sequence: Synthetic oligonucleotide
  Target: LAMA2; (-) strand; PAM type: YTN; PAM sequence: CTG
gccatcagagaaatgcaaat

SEQ ID NO: 191893 - DNA, 20 bp, Artificial Sequence
  Description of Artificial Sequence: Synthetic oligonucleotide
  Target: LAMA2; (-) strand; PAM type: YTN; PAM sequence: CTC
atcatcactggccatcagag

SEQ ID NO: 191894 - DNA, 20 bp, Artificial Sequence
  Description of Artificial Sequence: Synthetic oligonucleotide
  Target: LAMA2; (-) strand; PAM type: YTN; PAM sequence: TTA
tgcagccaaaaaacacatga

SEQ ID NO: 191895 - DNA, 20 bp, Artificial Sequence
  Description of Artificial Sequence: Synthetic oligonucleotide
  Target: LAMA2; (-) strand; PAM type: YTN; PAM sequence: TTT
atgcagccaaaaaacacatg

SEQ ID NO: 191896 - DNA, 20 bp, Artificial Sequence
  Description of Artificial Sequence: Synthetic oligonucleotide
  Target: LAMA2; (-) strand; PAM type: YTN; PAM sequence: CTC
aaaagaagacatttatgcag

SEQ ID NO: 191897 - DNA, 20 bp, Artificial Sequence
  Description of Artificial Sequence: Synthetic oligonucleotide
  Target: LAMA2; (-) strand; PAM type: YTN; PAM sequence: TTC
tcaaaagaagacatttatgc

SEQ ID NO: 191898 - DNA, 20 bp, Artificial Sequence
  Description of Artificial Sequence: Synthetic oligonucleotide
  Target: LAMA2; (-) strand; PAM type: YTN; PAM sequence: CTT
ctcaaaagaagacatttatg

SEQ ID NO: 191899 - DNA, 20 bp, Artificial Sequence
  Description of Artificial Sequence: Synthetic oligonucleotide
  Target: LAMA2; (-) strand; PAM type: YTN; PAM sequence: TTA
caagaaaaaaacaaacaacc

SEQ ID NO: 191900 - DNA, 20 bp, Artificial Sequence
  Description of Artificial Sequence: Synthetic oligonucleotide
  Target: LAMA2; (-) strand; PAM type: YTN; PAM sequence: TTT
acaagaaaaaaacaaacaac

SEQ ID NO: 191901 - DNA, 20 bp, Artificial Sequence
  Description of Artificial Sequence: Synthetic oligonucleotide
  Target: LAMA2; (-) strand; PAM type: YTN; PAM sequence: CTC
aaacaaatttacaagaaaaa

SEQ ID NO: 191902 - DNA, 20 bp, Artificial Sequence
  Description of Artificial Sequence: Synthetic oligonucleotide
  Target: LAMA2; (-) strand; PAM type: YTN; PAM sequence: CTA
caatgaactcaaacaaattt

SEQ ID NO: 191903 - DNA, 20 bp, Artificial Sequence
  Description of Artificial Sequence: Synthetic oligonucleotide
  Target: LAMA2; (-) strand; PAM type: YTN; PAM sequence: CTA
atatccagaatctacaatga

SEQ ID NO: 191904 - DNA, 20 bp, Artificial Sequence
  Description of Artificial Sequence: Synthetic oligonucleotide
  Target: LAMA2; (-) strand; PAM type: YTN; PAM sequence: CTG
acaaagggctaatatccaga

SEQ ID NO: 191905 - DNA, 20 bp, Artificial Sequence
  Description of Artificial Sequence: Synthetic oligonucleotide
  Target: LAMA2; (-) strand; PAM type: YTN; PAM sequence: CTC
atctgacaaagggctaatat

SEQ ID NO: 191906 - DNA, 20 bp, Artificial Sequence
  Description of Artificial Sequence: Synthetic oligonucleotide
  Target: LAMA2; (-) strand; PAM type: YTN; PAM sequence: CTA
ctcatctgacaaagggctaa

SEQ ID NO: 191907 - DNA, 20 bp, Artificial Sequence
  Description of Artificial Sequence: Synthetic oligonucleotide
  Target: LAMA2; (-) strand; PAM type: YTN; PAM sequence: TTC
gcaacctactcatctgacaa

SEQ ID NO: 191908 - DNA, 20 bp, Artificial Sequence
  Description of Artificial Sequence: Synthetic oligonucleotide
  Target: LAMA2; (-) strand; PAM type: YTN; PAM sequence: TTT
cgcaacctactcatctgaca

SEQ ID NO: 191909 - DNA, 20 bp, Artificial Sequence
  Description of Artificial Sequence: Synthetic oligonucleotide
  Target: LAMA2; (-) strand; PAM type: YTN; PAM sequence: TTT
tcgcaacctactcatctgac

SEQ ID NO: 191910 - DNA, 20 bp, Artificial Sequence
  Description of Artificial Sequence: Synthetic oligonucleotide
  Target: LAMA2; (-) strand; PAM type: YTN; PAM sequence: CTA
caaaatgggagaaaattttc

SEQ ID NO: 191911 - DNA, 20 bp, Artificial Sequence
  Description of Artificial Sequence: Synthetic oligonucleotide
  Target: LAMA2; (-) strand; PAM type: YTN; PAM sequence: CTA
ccatcagagtgaacaggcaa

SEQ ID NO: 191912 - DNA, 20 bp, Artificial Sequence
  Description of Artificial Sequence: Synthetic oligonucleotide
  Target: LAMA2; (-) strand; PAM type: YTN; PAM sequence: CTG
tgcagcaaaagaaactacca

SEQ ID NO: 191913 - DNA, 20 bp, Artificial Sequence
  Description of Artificial Sequence: Synthetic oligonucleotide
  Target: LAMA2; (-) strand; PAM type: YTN; PAM sequence: TTC
tgtgcagcaaaagaaactac

SEQ ID NO: 191914 - DNA, 20 bp, Artificial Sequence
  Description of Artificial Sequence: Synthetic oligonucleotide
  Target: LAMA2; (-) strand; PAM type: YTN; PAM sequence: CTT
ctgtgcagcaaaagaaacta

SEQ ID NO: 191915 - DNA, 20 bp, Artificial Sequence
  Description of Artificial Sequence: Synthetic oligonucleotide
  Target: LAMA2; (-) strand; PAM type: YTN; PAM sequence: CTA
aagagcttctgtgcagcaaa

SEQ ID NO: 191916 - DNA, 20 bp, Artificial Sequence
  Description of Artificial Sequence: Synthetic oligonucleotide
  Target: LAMA2; (-) strand; PAM type: YTN; PAM sequence: TTA
aactaaagagcttctgtgca

SEQ ID NO: 191917 - DNA, 20 bp, Artificial Sequence
  Description of Artificial Sequence: Synthetic oligonucleotide
  Target: LAMA2; (-) strand; PAM type: YTN; PAM sequence: CTA
attaaactaaagagcttctg

SEQ ID NO: 191918 - DNA, 20 bp, Artificial Sequence
  Description of Artificial Sequence: Synthetic oligonucleotide
  Target: LAMA2; (-) strand; PAM type: YTN; PAM sequence: CTA
aaacaccaaaagcaatggca

SEQ ID NO: 191919 - DNA, 20 bp, Artificial Sequence
  Description of Artificial Sequence: Synthetic oligonucleotide
  Target: LAMA2; (-) strand; PAM type: YTN; PAM sequence: TTC
atgtctaaaacaccaaaagc

SEQ ID NO: 191920 - DNA, 20 bp, Artificial Sequence
  Description of Artificial Sequence: Synthetic oligonucleotide
  Target: LAMA2; (-) strand; PAM type: YTN; PAM sequence: CTT
catgtctaaaacaccaaaag

SEQ ID NO: 191921 - DNA, 20 bp, Artificial Sequence
  Description of Artificial Sequence: Synthetic oligonucleotide
  Target: LAMA2; (-) strand; PAM type: YTN; PAM sequence: TTC
aggacataggcatgggtaag

SEQ ID NO: 191922 - DNA, 20 bp, Artificial Sequence
  Description of Artificial Sequence: Synthetic oligonucleotide
  Target: LAMA2; (-) strand; PAM type: YTN; PAM sequence: CTA
ggcagtaccattcaggacat

SEQ ID NO: 191923 - DNA, 20 bp, Artificial Sequence
  Description of Artificial Sequence: Synthetic oligonucleotide
  Target: LAMA2; (-) strand; PAM type: YTN; PAM sequence: CTA
gaagaaaacctaggcagtac

SEQ ID NO: 191924 - DNA, 20 bp, Artificial Sequence
  Description of Artificial Sequence: Synthetic oligonucleotide
  Target: LAMA2; (-) strand; PAM type: YTN; PAM sequence: CTA
aaaccataaaaaccctagaa

SEQ ID NO: 191925 - DNA, 20 bp, Artificial Sequence
  Description of Artificial Sequence: Synthetic oligonucleotide
  Target: LAMA2; (-) strand; PAM type: YTN; PAM sequence: TTA
gacctaaaaccataaaaacc

SEQ ID NO: 191926 - DNA, 20 bp, Artificial Sequence
  Description of Artificial Sequence: Synthetic oligonucleotide
  Target: LAMA2; (-) strand; PAM type: YTN; PAM sequence: TTA
aacgttagacctaaaaccat

SEQ ID NO: 191927 - DNA, 20 bp, Artificial Sequence
  Description of Artificial Sequence: Synthetic oligonucleotide
  Target: LAMA2; (-) strand; PAM type: YTN; PAM sequence: CTT
aaacgttagacctaaaacca

SEQ ID NO: 191928 - DNA, 20 bp, Artificial Sequence
  Description of Artificial Sequence: Synthetic oligonucleotide
  Target: LAMA2; (-) strand; PAM type: YTN; PAM sequence: TTA
aagacttaaacgttagacct

SEQ ID NO: 191929 - DNA, 20 bp, Artificial Sequence
  Description of Artificial Sequence: Synthetic oligonucleotide
  Target: LAMA2; (-) strand; PAM type: YTN; PAM sequence: TTC
aagatggattaaagacttaa

SEQ ID NO: 191930 - DNA, 20 bp, Artificial Sequence
  Description of Artificial Sequence: Synthetic oligonucleotide
  Target: LAMA2; (-) strand; PAM type: YTN; PAM sequence: TTA
tacaaaaatcaattcaagat

SEQ ID NO: 191931 - DNA, 20 bp, Artificial Sequence
  Description of Artificial Sequence: Synthetic oligonucleotide
  Target: LAMA2; (-) strand; PAM type: YTN; PAM sequence: CTT
atacaaaaatcaattcaaga

SEQ ID NO: 191932 - DNA, 20 bp, Artificial Sequence
  Description of Artificial Sequence: Synthetic oligonucleotide
  Target: LAMA2; (-) strand; PAM type: YTN; PAM sequence: TTA
caccttatacaaaaatcaat

SEQ ID NO: 191933 - DNA, 20 bp, Artificial Sequence
  Description of Artificial Sequence: Synthetic oligonucleotide
  Target: LAMA2; (-) strand; PAM type: YTN; PAM sequence: CTT
acaccttatacaaaaatcaa

SEQ ID NO: 191934 - DNA, 20 bp, Artificial Sequence
  Description of Artificial Sequence: Synthetic oligonucleotide
  Target: LAMA2; (-) strand; PAM type: YTN; PAM sequence: TTC
cttacaccttatacaaaaat

SEQ ID NO: 191935 - DNA, 20 bp, Artificial Sequence
  Description of Artificial Sequence: Synthetic oligonucleotide
  Target: LAMA2; (-) strand; PAM type: YTN; PAM sequence: CTT
ccttacaccttatacaaaaa

SEQ ID NO: 191936 - DNA, 20 bp, Artificial Sequence
  Description of Artificial Sequence: Synthetic oligonucleotide
  Target: LAMA2; (-) strand; PAM type: YTN; PAM sequence: CTG
gatcccttccttacacctta

SEQ ID NO: 191937 - DNA, 20 bp, Artificial Sequence
  Description of Artificial Sequence: Synthetic oligonucleotide
  Target: LAMA2; (-) strand; PAM type: YTN; PAM sequence: CTG
aaactggatcccttccttac

SEQ ID NO: 191938 - DNA, 20 bp, Artificial Sequence
  Description of Artificial Sequence: Synthetic oligonucleotide
  Target: LAMA2; (-) strand; PAM type: YTN; PAM sequence: CTA
gccatatgtagaaagctgaa

SEQ ID NO: 191939 - DNA, 20 bp, Artificial Sequence
  Description of Artificial Sequence: Synthetic oligonucleotide
  Target: LAMA2; (-) strand; PAM type: YTN; PAM sequence: CTG
gctagccatatgtagaaagc

SEQ ID NO: 191940 - DNA, 20 bp, Artificial Sequence
  Description of Artificial Sequence: Synthetic oligonucleotide
  Target: LAMA2; (-) strand; PAM type: YTN; PAM sequence: CTG
gggaaactggctagccatat

SEQ ID NO: 191941 - DNA, 20 bp, Artificial Sequence
  Description of Artificial Sequence: Synthetic oligonucleotide
  Target: LAMA2; (-) strand; PAM type: YTN; PAM sequence: TTA
ataaatggtgctggggaaac

SEQ ID NO: 191942 - DNA, 20 bp, Artificial Sequence
  Description of Artificial Sequence: Synthetic oligonucleotide
  Target: LAMA2; (-) strand; PAM type: YTN; PAM sequence: TTT
aataaatggtgctggggaaa

SEQ ID NO: 191943 - DNA, 20 bp, Artificial Sequence
  Description of Artificial Sequence: Synthetic oligonucleotide
  Target: LAMA2; (-) strand; PAM type: YTN; PAM sequence: CTA
tttaataaatggtgctgggg

SEQ ID NO: 191944 - DNA, 20 bp, Artificial Sequence
  Description of Artificial Sequence: Synthetic oligonucleotide
  Target: LAMA2; (-) strand; PAM type: YTN; PAM sequence: TTC
cctatttaataaatggtgct

SEQ ID NO: 191945 - DNA, 20 bp, Artificial Sequence
  Description of Artificial Sequence: Synthetic oligonucleotide
  Target: LAMA2; (-) strand; PAM type: YTN; PAM sequence: CTG
agaaaaacaagcaatgggga

SEQ ID NO: 191946 - DNA, 20 bp, Artificial Sequence
  Description of Artificial Sequence: Synthetic oligonucleotide
  Target: LAMA2; (-) strand; PAM type: YTN; PAM sequence: TTG
acaaacctgagaaaaacaag

SEQ ID NO: 191947 - DNA, 20 bp, Artificial Sequence
  Description of Artificial Sequence: Synthetic oligonucleotide
  Target: LAMA2; (-) strand; PAM type: YTN; PAM sequence: TTT
gacaaacctgagaaaaacaa

SEQ ID NO: 191948 - DNA, 20 bp, Artificial Sequence
  Description of Artificial Sequence: Synthetic oligonucleotide
  Target: LAMA2; (-) strand; PAM type: YTN; PAM sequence: CTT
tgacaaacctgagaaaaaca

SEQ ID NO: 191949 - DNA, 20 bp, Artificial Sequence
  Description of Artificial Sequence: Synthetic oligonucleotide
  Target: LAMA2; (-) strand; PAM type: YTN; PAM sequence: CTG
atctttgacaaacctgagaa

SEQ ID NO: 191950 - DNA, 20 bp, Artificial Sequence
  Description of Artificial Sequence: Synthetic oligonucleotide
  Target: LAMA2; (-) strand; PAM type: YTN; PAM sequence: CTA
tctgatctttgacaaacctg

SEQ ID NO: 191951 - DNA, 20 bp, Artificial Sequence
  Description of Artificial Sequence: Synthetic oligonucleotide
  Target: LAMA2; (-) strand; PAM type: YTN; PAM sequence: CTA
caactatctgatctttgaca

SEQ ID NO: 191952 - DNA, 20 bp, Artificial Sequence
  Description of Artificial Sequence: Synthetic oligonucleotide
  Target: LAMA2; (-) strand; PAM type: YTN; PAM sequence: CTG
catatctacaactatctgat

SEQ ID NO: 191953 - DNA, 20 bp, Artificial Sequence
  Description of Artificial Sequence: Synthetic oligonucleotide
  Target: LAMA2; (-) strand; PAM type: YTN; PAM sequence: CTC
agaaataacactgcatatct

SEQ ID NO: 191954 - DNA, 20 bp, Artificial Sequence
  Description of Artificial Sequence: Synthetic oligonucleotide
  Target: LAMA2; (-) strand; PAM type: YTN; PAM sequence: CTG
gtaccaaaacagagatatag

SEQ ID NO: 191955 - DNA, 20 bp, Artificial Sequence
  Description of Artificial Sequence: Synthetic oligonucleotide
  Target: LAMA2; (-) strand; PAM type: YTN; PAM sequence: CTA
cagtaaccaaaacagcatgg

SEQ ID NO: 191956 - DNA, 20 bp, Artificial Sequence
  Description of Artificial Sequence: Synthetic oligonucleotide
  Target: LAMA2; (-) strand; PAM type: YTN; PAM sequence: CTA
caagtctacagtaaccaaaa

SEQ ID NO: 191957 - DNA, 20 bp, Artificial Sequence
  Description of Artificial Sequence: Synthetic oligonucleotide
  Target: LAMA2; (-) strand; PAM type: YTN; PAM sequence: CTA
tactacaagtctacagtaac

SEQ ID NO: 191958 - DNA, 20 bp, Artificial Sequence
  Description of Artificial Sequence: Synthetic oligonucleotide
  Target: LAMA2; (-) strand; PAM type: YTN; PAM sequence: TTC
aaactatactacaagtctac

SEQ ID NO: 191959 - DNA, 20 bp, Artificial Sequence
  Description of Artificial Sequence: Synthetic oligonucleotide
  Target: LAMA2; (-) strand; PAM type: YTN; PAM sequence: CTT
caaactatactacaagtcta

SEQ ID NO: 191960 - DNA, 20 bp, Artificial Sequence
  Description of Artificial Sequence: Synthetic oligonucleotide
  Target: LAMA2; (-) strand; PAM type: YTN; PAM sequence: CTG
acttcaaactatactacaag

SEQ ID NO: 191961 - DNA, 20 bp, Artificial Sequence
  Description of Artificial Sequence: Synthetic oligonucleotide
  Target: LAMA2; (-) strand; PAM type: YTN; PAM sequence: CTA
cctgacttcaaactatacta

SEQ ID NO: 191962 - DNA, 20 bp, Artificial Sequence
  Description of Artificial Sequence: Synthetic oligonucleotide
  Target: LAMA2; (-) strand; PAM type: YTN; PAM sequence: CTG
gaggcatcacactacctgac

SEQ ID NO: 191963 - DNA, 20 bp, Artificial Sequence
  Description of Artificial Sequence: Synthetic oligonucleotide
  Target: LAMA2; (-) strand; PAM type: YTN; PAM sequence: CTA
agccaaaagaacaaagctgg

SEQ ID NO: 191964 - DNA, 20 bp, Artificial Sequence
  Description of Artificial Sequence: Synthetic oligonucleotide
  Target: LAMA2; (-) strand; PAM type: YTN; PAM sequence: TTC
atatggaaccaaaaaagagc

SEQ ID NO: 191965 - DNA, 20 bp, Artificial Sequence
  Description of Artificial Sequence: Synthetic oligonucleotide
  Target: LAMA2; (-) strand; PAM type: YTN; PAM sequence: TTA
aagttcatatggaaccaaaa

SEQ ID NO: 191966 - DNA, 20 bp, Artificial Sequence
  Description of Artificial Sequence: Synthetic oligonucleotide
  Target: LAMA2; (-) strand; PAM type: YTN; PAM sequence: TTT
aaagttcatatggaaccaaa

SEQ ID NO: 191967 - DNA, 20 bp, Artificial Sequence
  Description of Artificial Sequence: Synthetic oligonucleotide
  Target: LAMA2; (-) strand; PAM type: YTN; PAM sequence: CTT
taaagttcatatggaaccaa

SEQ ID NO: 191968 - DNA, 20 bp, Artificial Sequence
  Description of Artificial Sequence: Synthetic oligonucleotide
  Target: LAMA2; (-) strand; PAM type: YTN; PAM sequence: CTA
ctttaaagttcatatggaac

SEQ ID NO: 191969 - DNA, 20 bp, Artificial Sequence
  Description of Artificial Sequence: Synthetic oligonucleotide
  Target: LAMA2; (-) strand; PAM type: YTN; PAM sequence: TTG
gaaaaaactactttaaagtt

SEQ ID NO: 191970 - DNA, 20 bp, Artificial Sequence
  Description of Artificial Sequence: Synthetic oligonucleotide
  Target: LAMA2; (-) strand; PAM type: YTN; PAM sequence: TTC
acagaattggaaaaaactac

SEQ ID NO: 191971 - DNA, 20 bp, Artificial Sequence
  Description of Artificial Sequence: Synthetic oligonucleotide
  Target: LAMA2; (-) strand; PAM type: YTN; PAM sequence: CTT
cacagaattggaaaaaacta

SEQ ID NO: 191972 - DNA, 20 bp, Artificial Sequence
  Description of Artificial Sequence: Synthetic oligonucleotide
  Target: LAMA2; (-) strand; PAM type: YTN; PAM sequence: TTC
ttcacagaattggaaaaaac

SEQ ID NO: 191973 - DNA, 20 bp, Artificial Sequence
  Description of Artificial Sequence: Synthetic oligonucleotide
  Target: LAMA2; (-) strand; PAM type: YTN; PAM sequence: TTT
cttcacagaattggaaaaaa

SEQ ID NO: 191974 - DNA, 20 bp, Artificial Sequence
  Description of Artificial Sequence: Synthetic oligonucleotide
  Target: LAMA2; (-) strand; PAM type: YTN; PAM sequence: CTT
tcttcacagaattggaaaaa

SEQ ID NO: 191975 - DNA, 20 bp, Artificial Sequence
  Description of Artificial Sequence: Synthetic oligonucleotide
  Target: LAMA2; (-) strand; PAM type: YTN; PAM sequence: CTA
ccaatgcctttcttcacaga

SEQ ID NO: 191976 - DNA, 20 bp, Artificial Sequence
  Description of Artificial Sequence: Synthetic oligonucleotide
  Target: LAMA2; (-) strand; PAM type: YTN; PAM sequence: TTC
aatgccatccccatcaagct

SEQ ID NO: 191977 - DNA, 20 bp, Artificial Sequence
  Description of Artificial Sequence: Synthetic oligonucleotide
  Target: LAMA2; (-) strand; PAM type: YTN; PAM sequence: TTA
cagattcaatgccatcccca

SEQ ID NO: 191978 - DNA, 20 bp, Artificial Sequence
  Description of Artificial Sequence: Synthetic oligonucleotide
  Target: LAMA2; (-) strand; PAM type: YTN; PAM sequence: TTT
acagattcaatgccatcccc

SEQ ID NO: 191979 - DNA, 20 bp, Artificial Sequence
  Description of Artificial Sequence: Synthetic oligonucleotide
  Target: LAMA2; (-) strand; PAM type: YTN; PAM sequence: CTG
cccaaggtaatttacagatt

SEQ ID NO: 191980 - DNA, 20 bp, Artificial Sequence
  Description of Artificial Sequence: Synthetic oligonucleotide
  Target: LAMA2; (-) strand; PAM type: YTN; PAM sequence: CTC
atgggtaggaagaatcaata

SEQ ID NO: 191981 - DNA, 20 bp, Artificial Sequence
  Description of Artificial Sequence: Synthetic oligonucleotide
  Target: LAMA2; (-) strand; PAM type: YTN; PAM sequence: TTC
catgctcatgggtaggaaga

SEQ ID NO: 191982 - DNA, 20 bp, Artificial Sequence
  Description of Artificial Sequence: Synthetic oligonucleotide
  Target: LAMA2; (-) strand; PAM type: YTN; PAM sequence: CTC
aaggaaataaaagaggatac

SEQ ID NO: 191983 - DNA, 20 bp, Artificial Sequence
  Description of Artificial Sequence: Synthetic oligonucleotide
  Target: LAMA2; (-) strand; PAM type: YTN; PAM sequence: CTG
ctcaaggaaataaaagagga

SEQ ID NO: 191984 - DNA, 20 bp, Artificial Sequence
  Description of Artificial Sequence: Synthetic oligonucleotide
  Target: LAMA2; (-) strand; PAM type: YTN; PAM sequence: CTA
caaaccactgctcaaggaaa

SEQ ID NO: 191985 - DNA, 20 bp, Artificial Sequence
  Description of Artificial Sequence: Synthetic oligonucleotide
  Target: LAMA2; (-) strand; PAM type: YTN; PAM sequence: TTC
aaggagaactacaaaccact

SEQ ID NO: 191986 - DNA, 20 bp, Artificial Sequence
  Description of Artificial Sequence: Synthetic oligonucleotide
  Target: LAMA2; (-) strand; PAM type: YTN; PAM sequence: CTT
caaggagaactacaaaccac

SEQ ID NO: 191987 - DNA, 20 bp, Artificial Sequence
  Description of Artificial Sequence: Synthetic oligonucleotide
  Target: LAMA2; (-) strand; PAM type: YTN; PAM sequence: CTC
ttcaaggagaactacaaacc

SEQ ID NO: 191988 - DNA, 20 bp, Artificial Sequence
  Description of Artificial Sequence: Synthetic oligonucleotide
  Target: LAMA2; (-) strand; PAM type: YTN; PAM sequence: TTA
caagggatgtgaaggacctc

SEQ ID NO: 191989 - DNA, 20 bp, Artificial Sequence
  Description of Artificial Sequence: Synthetic oligonucleotide
  Target: LAMA2; (-) strand; PAM type: YTN; PAM sequence: CTT
acaagggatgtgaaggacct

SEQ ID NO: 191990 - DNA, 20 bp, Artificial Sequence
  Description of Artificial Sequence: Synthetic oligonucleotide
  Target: LAMA2; (-) strand; PAM type: YTN; PAM sequence: CTA
ggaatccaacttacaaggga

SEQ ID NO: 191991 - DNA, 20 bp, Artificial Sequence
  Description of Artificial Sequence: Synthetic oligonucleotide
  Target: LAMA2; (-) strand; PAM type: YTN; PAM sequence: TTC
aaagagaataaaatacctag

SEQ ID NO: 191992 - DNA, 20 bp, Artificial Sequence
  Description of Artificial Sequence: Synthetic oligonucleotide
  Target: LAMA2; (-) strand; PAM type: YTN; PAM sequence: CTT
caaagagaataaaataccta

SEQ ID NO: 191993 - DNA, 20 bp, Artificial Sequence
  Description of Artificial Sequence: Synthetic oligonucleotide
  Target: LAMA2; (-) strand; PAM type: YTN; PAM sequence: TTG
cttcaaagagaataaaatac

SEQ ID NO: 191994 - DNA, 20 bp, Artificial Sequence
  Description of Artificial Sequence: Synthetic oligonucleotide
  Target: LAMA2; (-) strand; PAM type: YTN; PAM sequence: TTC
acaattgcttcaaagagaat

SEQ ID NO: 191995 - DNA, 20 bp, Artificial Sequence
  Description of Artificial Sequence: Synthetic oligonucleotide
  Target: LAMA2; (-) strand; PAM type: YTN; PAM sequence: CTC
ccattcacaattgcttcaaa

SEQ ID NO: 191996 - DNA, 20 bp, Artificial Sequence
  Description of Artificial Sequence: Synthetic oligonucleotide
  Target: LAMA2; (-) strand; PAM type: YTN; PAM sequence: TTA
tacaccaacaacagacaaac

SEQ ID NO: 191997 - DNA, 20 bp, Artificial Sequence
  Description of Artificial Sequence: Synthetic oligonucleotide
  Target: LAMA2; (-) strand; PAM type: YTN; PAM sequence: CTT
atacaccaacaacagacaaa

SEQ ID NO: 191998 - DNA, 20 bp, Artificial Sequence
  Description of Artificial Sequence: Synthetic oligonucleotide
  Target: LAMA2; (-) strand; PAM type: YTN; PAM sequence: TTC
ttatacaccaacaacagaca

SEQ ID NO: 191999 - DNA, 20 bp, Artificial Sequence
  Description of Artificial Sequence: Synthetic oligonucleotide
  Target: LAMA2; (-) strand; PAM type: YTN; PAM sequence: CTC
aggatacaaaatcaatgtgc

SEQ ID NO: 192000 - DNA, 20 bp, Artificial Sequence
  Description of Artificial Sequence: Synthetic oligonucleotide
  Target: LAMA2; (-) strand; PAM type: YTN; PAM sequence: TTC
agcaaagtctcaggatacaa

SEQ ID NO: 192001 - DNA, 20 bp, Artificial Sequence
  Description of Artificial Sequence: Synthetic oligonucleotide
  Target: LAMA2; (-) strand; PAM type: YTN; PAM sequence: CTT
cagcaaagtctcaggataca

SEQ ID NO: 192002 - DNA, 20 bp, Artificial Sequence
  Description of Artificial Sequence: Synthetic oligonucleotide
  Target: LAMA2; (-) strand; PAM type: YTN; PAM sequence: CTG
ataagcaacttcagcaaagt

SEQ ID NO: 192003 - DNA, 20 bp, Artificial Sequence
  Description of Artificial Sequence: Synthetic oligonucleotide
  Target: LAMA2; (-) strand; PAM type: YTN; PAM sequence: TTA
agctgataagcaacttcagc

SEQ ID NO: 192004 - DNA, 20 bp, Artificial Sequence
  Description of Artificial Sequence: Synthetic oligonucleotide
  Target: LAMA2; (-) strand; PAM type: YTN; PAM sequence: CTT
aagctgataagcaacttcag

SEQ ID NO: 192005 - DNA, 20 bp, Artificial Sequence
  Description of Artificial Sequence: Synthetic oligonucleotide
  Target: LAMA2; (-) strand; PAM type: YTN; PAM sequence: CTC
cttaagctgataagcaactt

SEQ ID NO: 192006 - DNA, 20 bp, Artificial Sequence
  Description of Artificial Sequence: Synthetic oligonucleotide
  Target: LAMA2; (-) strand; PAM type: YTN; PAM sequence: CTC
agtccaaaatctccttaagc

SEQ ID NO: 192007 - DNA, 20 bp, Artificial Sequence
  Description of Artificial Sequence: Synthetic oligonucleotide
  Target: LAMA2; (-) strand; PAM type: YTN; PAM sequence: TTG
tctcagtccaaaatctcctt

SEQ ID NO: 192008 - DNA, 20 bp, Artificial Sequence
  Description of Artificial Sequence: Synthetic oligonucleotide
  Target: LAMA2; (-) strand; PAM type: YTN; PAM sequence: CTA
gaaaaccccattgtctcagt

SEQ ID NO: 192009 - DNA, 20 bp, Artificial Sequence
  Description of Artificial Sequence: Synthetic oligonucleotide
  Target: LAMA2; (-) strand; PAM type: YTN; PAM sequence: TTG
tatatctagaaaaccccatt

SEQ ID NO: 192010 - DNA, 20 bp, Artificial Sequence
  Description of Artificial Sequence: Synthetic oligonucleotide
  Target: LAMA2; (-) strand; PAM type: YTN; PAM sequence: TTG
cagacgacatgattgtatat

SEQ ID NO: 192011 - DNA, 20 bp, Artificial Sequence
  Description of Artificial Sequence: Synthetic oligonucleotide
  Target: LAMA2; (-) strand; PAM type: YTN; PAM sequence: TTT
gcagacgacatgattgtata

SEQ ID NO: 192012 - DNA, 20 bp, Artificial Sequence
  Description of Artificial Sequence: Synthetic oligonucleotide
  Target: LAMA2; (-) strand; PAM type: YTN; PAM sequence: CTT
tgcagacgacatgattgtat

SEQ ID NO: 192013 - DNA, 20 bp, Artificial Sequence
  Description of Artificial Sequence: Synthetic oligonucleotide
  Target: LAMA2; (-) strand; PAM type: YTN; PAM sequence: CTC
tttgcagacgacatgattgt

SEQ ID NO: 192014 - DNA, 20 bp, Artificial Sequence
  Description of Artificial Sequence: Synthetic oligonucleotide
  Target: LAMA2; (-) strand; PAM type: YTN; PAM sequence: TTG
tccctctttgcagacgacat

SEQ ID NO: 192015 - DNA, 20 bp, Artificial Sequence
  Description of Artificial Sequence: Synthetic oligonucleotide
  Target: LAMA2; (-) strand; PAM type: YTN; PAM sequence: TTA
ggaaaagaggaagtcaaatt

SEQ ID NO: 192016 - DNA, 20 bp, Artificial Sequence
  Description of Artificial Sequence: Synthetic oligonucleotide
  Target: LAMA2; (-) strand; PAM type: YTN; PAM sequence: TTC
aattaggaaaagaggaagtc

SEQ ID NO: 192017 - DNA, 20 bp, Artificial Sequence
  Description of Artificial Sequence: Synthetic oligonucleotide
  Target: LAMA2; (-) strand; PAM type: YTN; PAM sequence: TTA
ggcaggagaaggaaataaag

SEQ ID NO: 192018 - DNA, 20 bp, Artificial Sequence
  Description of Artificial Sequence: Synthetic oligonucleotide
  Target: LAMA2; (-) strand; PAM type: YTN; PAM sequence: CTG
gccagggcaattaggcagga

SEQ ID NO: 192019 - DNA, 20 bp, Artificial Sequence
  Description of Artificial Sequence: Synthetic oligonucleotide
  Target: LAMA2; (-) strand; PAM type: YTN; PAM sequence: TTC
tggccagggcaattaggcag

SEQ ID NO: 192020 - DNA, 20 bp, Artificial Sequence
  Description of Artificial Sequence: Synthetic oligonucleotide
  Target: LAMA2; (-) strand; PAM type: YTN; PAM sequence: TTG
gaagttctggccagggcaat

SEQ ID NO: 192021 - DNA, 20 bp, Artificial Sequence
  Description of Artificial Sequence: Synthetic oligonucleotide
  Target: LAMA2; (-) strand; PAM type: YTN; PAM sequence: TTC
aatatagtgttggaagttct

SEQ ID NO: 192022 - DNA, 20 bp, Artificial Sequence
  Description of Artificial Sequence: Synthetic oligonucleotide
  Target: LAMA2; (-) strand; PAM type: YTN; PAM sequence: CTA
ttcaatatagtgttggaagt

SEQ ID NO: 192023 - DNA, 20 bp, Artificial Sequence
  Description of Artificial Sequence: Synthetic oligonucleotide
  Target: LAMA2; (-) strand; PAM type: YTN; PAM sequence: CTC
ctattcaatatagtgttgga

SEQ ID NO: 192024 - DNA, 20 bp, Artificial Sequence
  Description of Artificial Sequence: Synthetic oligonucleotide
  Target: LAMA2; (-) strand; PAM type: YTN; PAM sequence: CTC
accactcctattcaatatag

SEQ ID NO: 192025 - DNA, 20 bp, Artificial Sequence
  Description of Artificial Sequence: Synthetic oligonucleotide
  Target: LAMA2; (-) strand; PAM type: YTN; PAM sequence: CTC
tcaccactcctattcaatat

SEQ ID NO: 192026 - DNA, 20 bp, Artificial Sequence
  Description of Artificial Sequence: Synthetic oligonucleotide
  Target: LAMA2; (-) strand; PAM type: YTN; PAM sequence: CTC
tctcaccactcctattcaat

SEQ ID NO: 192027 - DNA, 20 bp, Artificial Sequence
  Description of Artificial Sequence: Synthetic oligonucleotide
  Target: LAMA2; (-) strand; PAM type: YTN; PAM sequence: CTG
gcacaagacagggatgccct

SEQ ID NO: 192028 - DNA, 20 bp, Artificial Sequence
  Description of Artificial Sequence: Synthetic oligonucleotide
  Target: LAMA2; (-) strand; PAM type: YTN; PAM sequence: TTG
aaaactggcacaagacaggg

SEQ ID NO: 192029 - DNA, 20 bp, Artificial Sequence
  Description of Artificial Sequence: Synthetic oligonucleotide
  Target: LAMA2; (-) strand; PAM type: YTN; PAM sequence: TTT
gaaaactggcacaagacagg

SEQ ID NO: 192030 - DNA, 20 bp, Artificial Sequence
  Description of Artificial Sequence: Synthetic oligonucleotide
  Target: LAMA2; (-) strand; PAM type: YTN; PAM sequence: CTT
tgaaaactggcacaagacag

SEQ ID NO: 192031 - DNA, 20 bp, Artificial Sequence
  Description of Artificial Sequence: Synthetic oligonucleotide
  Target: LAMA2; (-) strand; PAM type: YTN; PAM sequence: TTC
cctttgaaaactggcacaag

SEQ ID NO: 192032 - DNA, 20 bp, Artificial Sequence
  Description of Artificial Sequence: Synthetic oligonucleotide
  Target: LAMA2; (-) strand; PAM type: YTN; PAM sequence: CTG
gaagcattccctttgaaaac

SEQ ID NO: 192033 - DNA, 20 bp, Artificial Sequence
  Description of Artificial Sequence: Synthetic oligonucleotide
  Target: LAMA2; (-) strand; PAM type: YTN; PAM sequence: TTG
gcaaaaactggaagcattcc

SEQ ID NO: 192034 - DNA, 20 bp, Artificial Sequence
  Description of Artificial Sequence: Synthetic oligonucleotide
  Target: LAMA2; (-) strand; PAM type: YTN; PAM sequence: CTG
aattggcaaaaactggaagc

SEQ ID NO: 192035 - DNA, 20 bp, Artificial Sequence
  Description of Artificial Sequence: Synthetic oligonucleotide
  Target: LAMA2; (-) strand; PAM type: YTN; PAM sequence: CTA
tgacaaacccacagcgaata

SEQ ID NO: 192036 - DNA, 20 bp, Artificial Sequence
  Description of Artificial Sequence: Synthetic oligonucleotide
  Target: LAMA2; (-) strand; PAM type: YTN; PAM sequence: CTA
tctatgacaaacccacagcg

SEQ ID NO: 192037 - DNA, 20 bp, Artificial Sequence
  Description of Artificial Sequence: Synthetic oligonucleotide
  Target: LAMA2; (-) strand; PAM type: YTN; PAM sequence: TTC
aaaataataagagctatcta

SEQ ID NO: 192038 - DNA, 20 bp, Artificial Sequence
  Description of Artificial Sequence: Synthetic oligonucleotide
  Target: LAMA2; (-) strand; PAM type: YTN; PAM sequence: TTT
caaaataataagagctatct

SEQ ID NO: 192039 - DNA, 20 bp, Artificial Sequence
  Description of Artificial Sequence: Synthetic oligonucleotide
  Target: LAMA2; (-) strand; PAM type: YTN; PAM sequence: TTG
atgggacatatttcaaaata

SEQ ID NO: 192040 - DNA, 20 bp, Artificial Sequence
  Description of Artificial Sequence: Synthetic oligonucleotide
  Target: LAMA2; (-) strand; PAM type: YTN; PAM sequence: TTA
ggtattgatgggacatattt

SEQ ID NO: 192041 - DNA, 20 bp, Artificial Sequence
  Description of Artificial Sequence: Synthetic oligonucleotide
  Target: LAMA2; (-) strand; PAM type: YTN; PAM sequence: CTC
aataaattaggtattgatgg

SEQ ID NO: 192042 - DNA, 20 bp, Artificial Sequence
  Description of Artificial Sequence: Synthetic oligonucleotide
  Target: LAMA2; (-) strand; PAM type: YTN; PAM sequence: CTC
tcaataaattaggtattgat

SEQ ID NO: 192043 - DNA, 20 bp, Artificial Sequence
  Description of Artificial Sequence: Synthetic oligonucleotide
  Target: LAMA2; (-) strand; PAM type: YTN; PAM sequence: CTA
aaaactctcaataaattagg

SEQ ID NO: 192044 - DNA, 20 bp, Artificial Sequence
  Description of Artificial Sequence: Synthetic oligonucleotide
  Target: LAMA2; (-) strand; PAM type: YTN; PAM sequence: TTC
atgctaaaaactctcaataa

SEQ ID NO: 192045 - DNA, 20 bp, Artificial Sequence
  Description of Artificial Sequence: Synthetic oligonucleotide
  Target: LAMA2; (-) strand; PAM type: YTN; PAM sequence: CTT
catgctaaaaactctcaata

SEQ ID NO: 192046 - DNA, 20 bp, Artificial Sequence
  Description of Artificial Sequence: Synthetic oligonucleotide
  Target: LAMA2; (-) strand; PAM type: YTN; PAM sequence: TTC
aaccacacttcatgctaaaa

SEQ ID NO: 192047 - DNA, 20 bp, Artificial Sequence
  Description of Artificial Sequence: Synthetic oligonucleotide
  Target: LAMA2; (-) strand; PAM type: YTN; PAM sequence: TTG
acaaaattcaaccacacttc

SEQ ID NO: 192048 - DNA, 20 bp, Artificial Sequence
  Description of Artificial Sequence: Synthetic oligonucleotide
  Target: LAMA2; (-) strand; PAM type: YTN; PAM sequence: CTC
aatagatgcagaaaaggccg

SEQ ID NO: 192049 - DNA, 20 bp, Artificial Sequence
  Description of Artificial Sequence: Synthetic oligonucleotide
  Target: LAMA2; (-) strand; PAM type: YTN; PAM sequence: TTA
tctcaatagatgcagaaaag

SEQ ID NO: 192050 - DNA, 20 bp, Artificial Sequence
  Description of Artificial Sequence: Synthetic oligonucleotide
  Target: LAMA2; (-) strand; PAM type: YTN; PAM sequence: TTC
aatatacgcaaatcagtaaa

SEQ ID NO: 192051 - DNA, 20 bp, Artificial Sequence
  Description of Artificial Sequence: Synthetic oligonucleotide
  Target: LAMA2; (-) strand; PAM type: YTN; PAM sequence: CTG
gttcaatatacgcaaatcag

SEQ ID NO: 192052 - DNA, 20 bp, Artificial Sequence
  Description of Artificial Sequence: Synthetic oligonucleotide
  Target: LAMA2; (-) strand; PAM type: YTN; PAM sequence: CTG
ggatgcaaggctggttcaat

SEQ ID NO: 192053 - DNA, 20 bp, Artificial Sequence
  Description of Artificial Sequence: Synthetic oligonucleotide
  Target: LAMA2; (-) strand; PAM type: YTN; PAM sequence: TTC
atccctgggatgcaaggctg

SEQ ID NO: 192054 - DNA, 20 bp, Artificial Sequence
  Description of Artificial Sequence: Synthetic oligonucleotide
  Target: LAMA2; (-) strand; PAM type: YTN; PAM sequence: CTT
catccctgggatgcaaggct

SEQ ID NO: 192055 - DNA, 20 bp, Artificial Sequence
  Description of Artificial Sequence: Synthetic oligonucleotide
  Target: LAMA2; (-) strand; PAM type: YTN; PAM sequence: TTA
tccaccatgatcaagtgggc

SEQ ID NO: 192056 - DNA, 20 bp, Artificial Sequence
  Description of Artificial Sequence: Synthetic oligonucleotide
  Target: LAMA2; (-) strand; PAM type: YTN; PAM sequence: CTT
atccaccatgatcaagtggg

SEQ ID NO: 192057 - DNA, 20 bp, Artificial Sequence
  Description of Artificial Sequence: Synthetic oligonucleotide
  Target: LAMA2; (-) strand; PAM type: YTN; PAM sequence: CTG
gcaaaacaaatccagcagca

SEQ ID NO: 192058 - DNA, 20 bp, Artificial Sequence
  Description of Artificial Sequence: Synthetic oligonucleotide
  Target: LAMA2; (-) strand; PAM type: YTN; PAM sequence: CTC
aataaaatactggcaaaaca

SEQ ID NO: 192059 - DNA, 20 bp, Artificial Sequence
  Description of Artificial Sequence: Synthetic oligonucleotide
  Target: LAMA2; (-) strand; PAM type: YTN; PAM sequence: TTG
atgcaaaaatcctcaataaa

SEQ ID NO: 192060 - DNA, 20 bp, Artificial Sequence
  Description of Artificial Sequence: Synthetic oligonucleotide
  Target: LAMA2; (-) strand; PAM type: YTN; PAM sequence: TTG
atgaacattgatgcaaaaat

SEQ ID NO: 192061 - DNA, 20 bp, Artificial Sequence
  Description of Artificial Sequence: Synthetic oligonucleotide
  Target: LAMA2; (-) strand; PAM type: YTN; PAM sequence: CTT
gatgaacattgatgcaaaaa

SEQ ID NO: 192062 - DNA, 20 bp, Artificial Sequence
  Description of Artificial Sequence: Synthetic oligonucleotide
  Target: LAMA2; (-) strand; PAM type: YTN; PAM sequence: TTA
gaccaatatccttgatgaac

SEQ ID NO: 192063 - DNA, 20 bp, Artificial Sequence
  Description of Artificial Sequence: Synthetic oligonucleotide
  Target: LAMA2; (-) strand; PAM type: YTN; PAM sequence: TTT
agaccaatatccttgatgaa

SEQ ID NO: 192064 - DNA, 20 bp, Artificial Sequence
  Description of Artificial Sequence: Synthetic oligonucleotide
  Target: LAMA2; (-) strand; PAM type: YTN; PAM sequence: TTT
tagaccaatatccttgatga

SEQ ID NO: 192065 - DNA, 20 bp, Artificial Sequence
  Description of Artificial Sequence: Synthetic oligonucleotide
  Target: LAMA2; (-) strand; PAM type: YTN; PAM sequence: CTG
ataccaaagccaggcagaga

SEQ ID NO: 192066 - DNA, 20 bp, Artificial Sequence
  Description of Artificial Sequence: Synthetic oligonucleotide
  Target: LAMA2; (-) strand; PAM type: YTN; PAM sequence: TTC
tgataccaaagccaggcaga

SEQ ID NO: 192067 - DNA, 20 bp, Artificial Sequence
  Description of Artificial Sequence: Synthetic oligonucleotide
  Target: LAMA2; (-) strand; PAM type: YTN; PAM sequence: TTA
tgaggccagcatcattctga

SEQ ID NO: 192068 - DNA, 20 bp, Artificial Sequence
  Description of Artificial Sequence: Synthetic oligonucleotide
  Target: LAMA2; (-) strand; PAM type: YTN; PAM sequence: TTT
atgaggccagcatcattctg

SEQ ID NO: 192069 - DNA, 20 bp, Artificial Sequence
  Description of Artificial Sequence: Synthetic oligonucleotide
  Target: LAMA2; (-) strand; PAM type: YTN; PAM sequence: TTT
tatgaggccagcatcattct

SEQ ID NO: 192070 - DNA, 20 bp, Artificial Sequence
  Description of Artificial Sequence: Synthetic oligonucleotide
  Target: LAMA2; (-) strand; PAM type: YTN; PAM sequence: CTC
attttatgaggccagcatca

SEQ ID NO: 192071 - DNA, 20 bp, Artificial Sequence
  Description of Artificial Sequence: Synthetic oligonucleotide
  Target: LAMA2; (-) strand; PAM type: YTN; PAM sequence: CTA
actcattttatgaggccagc

SEQ ID NO: 192072 - DNA, 20 bp, Artificial Sequence
  Description of Artificial Sequence: Synthetic oligonucleotide
  Target: LAMA2; (-) strand; PAM type: YTN; PAM sequence: CTC
cctaactcattttatgaggc

SEQ ID NO: 192073 - DNA, 20 bp, Artificial Sequence
  Description of Artificial Sequence: Synthetic oligonucleotide
  Target: LAMA2; (-) strand; PAM type: YTN; PAM sequence: TTC
caatcaatagaaaaagaggg

SEQ ID NO: 192074 - DNA, 20 bp, Artificial Sequence
  Description of Artificial Sequence: Synthetic oligonucleotide
  Target: LAMA2; (-) strand; PAM type: YTN; PAM sequence: CTA
ttccaatcaatagaaaaaga

SEQ ID NO: 192075 - DNA, 20 bp, Artificial Sequence
  Description of Artificial Sequence: Synthetic oligonucleotide
  Target: LAMA2; (-) strand; PAM type: YTN; PAM sequence: CTG
aaactattccaatcaataga

SEQ ID NO: 192076 - DNA, 20 bp, Artificial Sequence
  Description of Artificial Sequence: Synthetic oligonucleotide
  Target: LAMA2; (-) strand; PAM type: YTN; PAM sequence: TTC
tgaaactattccaatcaata

SEQ ID NO: 192077 - DNA, 20 bp, Artificial Sequence
  Description of Artificial Sequence: Synthetic oligonucleotide
  Target: LAMA2; (-) strand; PAM type: YTN; PAM sequence: CTT
ctgaaactattccaatcaat

SEQ ID NO: 192078 - DNA, 20 bp, Artificial Sequence
  Description of Artificial Sequence: Synthetic oligonucleotide
  Target: LAMA2; (-) strand; PAM type: YTN; PAM sequence: TTC
cttctgaaactattccaatc

SEQ ID NO: 192079 - DNA, 20 bp, Artificial Sequence
  Description of Artificial Sequence: Synthetic oligonucleotide
  Target: LAMA2; (-) strand; PAM type: YTN; PAM sequence: CTG
gtaccattccttctgaaact

SEQ ID NO: 192080 - DNA, 20 bp, Artificial Sequence
  Description of Artificial Sequence: Synthetic oligonucleotide
  Target: LAMA2; (-) strand; PAM type: YTN; PAM sequence: CTA
ccagaggtacaaggaggaac

SEQ ID NO: 192081 - DNA, 20 bp, Artificial Sequence
  Description of Artificial Sequence: Synthetic oligonucleotide
  Target: LAMA2; (-) strand; PAM type: YTN; PAM sequence: TTC
taccagaggtacaaggagga

SEQ ID NO: 192082 - DNA, 20 bp, Artificial Sequence
  Description of Artificial Sequence: Synthetic oligonucleotide
  Target: LAMA2; (-) strand; PAM type: YTN; PAM sequence: TTC
acagccgaattctaccagag

SEQ ID NO: 192083 - DNA, 20 bp, Artificial Sequence
  Description of Artificial Sequence: Synthetic oligonucleotide
  Target: LAMA2; (-) strand; PAM type: YTN; PAM sequence: TTA
ccaaccaaaaagagtccagg

SEQ ID NO: 192084 - DNA, 20 bp, Artificial Sequence
  Description of Artificial Sequence: Synthetic oligonucleotide
  Target: LAMA2; (-) strand; PAM type: YTN; PAM sequence: CTT
accaaccaaaaagagtccag

SEQ ID NO: 192085 - DNA, 20 bp, Artificial Sequence
  Description of Artificial Sequence: Synthetic oligonucleotide
  Target: LAMA2; (-) strand; PAM type: YTN; PAM sequence: TTG
tgacaataatcaatagctta

SEQ ID NO: 192086 - DNA, 20 bp, Artificial Sequence
  Description of Artificial Sequence: Synthetic oligonucleotide
  Target: LAMA2; (-) strand; PAM type: YTN; PAM sequence: CTG
aaattgtgacaataatcaat

SEQ ID NO: 192087 - DNA, 20 bp, Artificial Sequence
  Description of Artificial Sequence: Synthetic oligonucleotide
  Target: LAMA2; (-) strand; PAM type: YTN; PAM sequence: CTG
aatagacaaataacaggatc

SEQ ID NO: 192088 - DNA, 20 bp, Artificial Sequence
  Description of Artificial Sequence: Synthetic oligonucleotide
  Target: LAMA2; (-) strand; PAM type: YTN; PAM sequence: CTC
tgaatagacaaataacagga

SEQ ID NO: 192089 - DNA, 20 bp, Artificial Sequence
  Description of Artificial Sequence: Synthetic oligonucleotide
  Target: LAMA2; (-) strand; PAM type: YTN; PAM sequence: TTG
aatctctgaatagacaaata

SEQ ID NO: 192090 - DNA, 20 bp, Artificial Sequence
  Description of Artificial Sequence: Synthetic oligonucleotide
  Target: LAMA2; (-) strand; PAM type: YTN; PAM sequence: CTA
aaccaggaagaagttgaatc

SEQ ID NO: 192091 - DNA, 20 bp, Artificial Sequence
  Description of Artificial Sequence: Synthetic oligonucleotide
  Target: LAMA2; (-) strand; PAM type: YTN; PAM sequence: CTC
ccaagactaaaccaggaaga

SEQ ID NO: 192092 - DNA, 20 bp, Artificial Sequence
  Description of Artificial Sequence: Synthetic oligonucleotide
  Target: LAMA2; (-) strand; PAM type: YTN; PAM sequence: CTC
tcccaagactaaaccaggaa

SEQ ID NO: 192093 - DNA, 20 bp, Artificial Sequence
  Description of Artificial Sequence: Synthetic oligonucleotide
  Target: LAMA2; (-) strand; PAM type: YTN; PAM sequence: CTC
gacacatacactctcccaag

SEQ ID NO: 192094 - DNA, 20 bp, Artificial Sequence
  Description of Artificial Sequence: Synthetic oligonucleotide
  Target: LAMA2; (-) strand; PAM type: YTN; PAM sequence: TTC
ctcgacacatacactctccc

SEQ ID NO: 192095 - DNA, 20 bp, Artificial Sequence
  Description of Artificial Sequence: Synthetic oligonucleotide
  Target: LAMA2; (-) strand; PAM type: YTN; PAM sequence: CTA
gaagaaatggataaattcct

SEQ ID NO: 192096 - DNA, 20 bp, Artificial Sequence
  Description of Artificial Sequence: Synthetic oligonucleotide
  Target: LAMA2; (-) strand; PAM type: YTN; PAM sequence: CTA
gaaaatctagaagaaatgga

SEQ ID NO: 192097 - DNA, 20 bp, Artificial Sequence
  Description of Artificial Sequence: Synthetic oligonucleotide
  Target: LAMA2; (-) strand; PAM type: YTN; PAM sequence: CTA
cgcaaataaactagaaaatc

SEQ ID NO: 192098 - DNA, 20 bp, Artificial Sequence
  Description of Artificial Sequence: Synthetic oligonucleotide
  Target: LAMA2; (-) strand; PAM type: YTN; PAM sequence: CTC
tacgcaaataaactagaaaa

SEQ ID NO: 192099 - DNA, 20 bp, Artificial Sequence
  Description of Artificial Sequence: Synthetic oligonucleotide
  Target: LAMA2; (-) strand; PAM type: YTN; PAM sequence: CTA
taaacacctctacgcaaata

SEQ ID NO: 192100 - DNA, 20 bp, Artificial Sequence
  Description of Artificial Sequence: Synthetic oligonucleotide
  Target: LAMA2; (-) strand; PAM type: YTN; PAM sequence: CTA
ccatcagagaatactataaa

SEQ ID NO: 192101 - DNA, 20 bp, Artificial Sequence
  Description of Artificial Sequence: Synthetic oligonucleotide
  Target: LAMA2; (-) strand; PAM type: YTN; PAM sequence: CTA
ataaagaaaaaaagagagaa

SEQ ID NO: 192102 - DNA, 20 bp, Artificial Sequence
  Description of Artificial Sequence: Synthetic oligonucleotide
  Target: LAMA2; (-) strand; PAM type: YTN; PAM sequence: CTA
gcaagactaataaagaaaaa

SEQ ID NO: 192103 - DNA, 20 bp, Artificial Sequence
  Description of Artificial Sequence: Synthetic oligonucleotide
  Target: LAMA2; (-) strand; PAM type: YTN; PAM sequence: TTG
atagaccgctagcaagacta

SEQ ID NO: 192104 - DNA, 20 bp, Artificial Sequence
  Description of Artificial Sequence: Synthetic oligonucleotide
  Target: LAMA2; (-) strand; PAM type: YTN; PAM sequence: TTG
aaaggatcaacaaaattgat

SEQ ID NO: 192105 - DNA, 20 bp, Artificial Sequence
  Description of Artificial Sequence: Synthetic oligonucleotide
  Target: LAMA2; (-) strand; PAM type: YTN; PAM sequence: TTT
gaaaggatcaacaaaattga

SEQ ID NO: 192106 - DNA, 20 bp, Artificial Sequence
  Description of Artificial Sequence: Synthetic oligonucleotide
  Target: LAMA2; (-) strand; PAM type: YTN; PAM sequence: TTT
tgaaaggatcaacaaaattg

SEQ ID NO: 192107 - DNA, 20 bp, Artificial Sequence
  Description of Artificial Sequence: Synthetic oligonucleotide
  Target: LAMA2; (-) strand; PAM type: YTN; PAM sequence: TTT
ttgaaaggatcaacaaaatt

SEQ ID NO: 192108 - DNA, 20 bp, Artificial Sequence
  Description of Artificial Sequence: Synthetic oligonucleotide
  Target: LAMA2; (-) strand; PAM type: YTN; PAM sequence: TTT
tttgaaaggatcaacaaaat

SEQ ID NO: 192109 - DNA, 20 bp, Artificial Sequence
  Description of Artificial Sequence: Synthetic oligonucleotide
  Target: LAMA2; (-) strand; PAM type: YTN; PAM sequence: CTG
gttttttgaaaggatcaaca

SEQ ID NO: 192110 - DNA, 20 bp, Artificial Sequence
  Description of Artificial Sequence: Synthetic oligonucleotide
  Target: LAMA2; (-) strand; PAM type: YTN; PAM sequence: TTA
atgaatccaggagctggttt

SEQ ID NO: 192111 - DNA, 20 bp, Artificial Sequence
  Description of Artificial Sequence: Synthetic oligonucleotide
  Target: LAMA2; (-) strand; PAM type: YTN; PAM sequence: TTC
aaaaaattaatgaatccagg

SEQ ID NO: 192112 - DNA, 20 bp, Artificial Sequence
  Description of Artificial Sequence: Synthetic oligonucleotide
  Target: LAMA2; (-) strand; PAM type: YTN; PAM sequence: CTT
caaaaaattaatgaatccag

SEQ ID NO: 192113 - DNA, 20 bp, Artificial Sequence
  Description of Artificial Sequence: Synthetic oligonucleotide
  Target: LAMA2; (-) strand; PAM type: YTN; PAM sequence: CTG
aaggaaatagagacacaaaa

SEQ ID NO: 192114 - DNA, 20 bp, Artificial Sequence
  Description of Artificial Sequence: Synthetic oligonucleotide
  Target: LAMA2; (-) strand; PAM type: YTN; PAM sequence: CTA
aaatcagagcagaactgaag

SEQ ID NO: 192115 - DNA, 20 bp, Artificial Sequence
  Description of Artificial Sequence: Synthetic oligonucleotide
  Target: LAMA2; (-) strand; PAM type: YTN; PAM sequence: CTA
gcagaaggcaagaaataact

SEQ ID NO: 192116 - DNA, 20 bp, Artificial Sequence
  Description of Artificial Sequence: Synthetic oligonucleotide
  Target: LAMA2; (-) strand; PAM type: YTN; PAM sequence: TTC
aaaagctagcagaaggcaag

SEQ ID NO: 192117 - DNA, 20 bp, Artificial Sequence
  Description of Artificial Sequence: Synthetic oligonucleotide
  Target: LAMA2; (-) strand; PAM type: YTN; PAM sequence: CTA
gaaaagcaagagcaaacaca

SEQ ID NO: 192118 - DNA, 20 bp, Artificial Sequence
  Description of Artificial Sequence: Synthetic oligonucleotide
  Target: LAMA2; (-) strand; PAM type: YTN; PAM sequence: TTA
aaagaactagaaaagcaaga

SEQ ID NO: 192119 - DNA, 20 bp, Artificial Sequence
  Description of Artificial Sequence: Synthetic oligonucleotide
  Target: LAMA2; (-) strand; PAM type: YTN; PAM sequence: CTA
acatcacaattaaaagaact

SEQ ID NO: 192120 - DNA, 20 bp, Artificial Sequence
  Description of Artificial Sequence: Synthetic oligonucleotide
  Target: LAMA2; (-) strand; PAM type: YTN; PAM sequence: TTG
acaccctaacatcacaatta

SEQ ID NO: 192121 - DNA, 20 bp, Artificial Sequence
  Description of Artificial Sequence: Synthetic oligonucleotide
  Target: LAMA2; (-) strand; PAM type: YTN; PAM sequence: CTA
aatgcccacaagagacagca

SEQ ID NO: 192122 - DNA, 20 bp, Artificial Sequence
  Description of Artificial Sequence: Synthetic oligonucleotide
  Target: LAMA2; (-) strand; PAM type: YTN; PAM sequence: TTA
tagcactaaatgcccacaag

SEQ ID NO: 192123 - DNA, 20 bp, Artificial Sequence
  Description of Artificial Sequence: Synthetic oligonucleotide
  Target: LAMA2; (-) strand; PAM type: YTN; PAM sequence: TTT
atagcactaaatgcccacaa

SEQ ID NO: 192124 - DNA, 20 bp, Artificial Sequence
  Description of Artificial Sequence: Synthetic oligonucleotide
  Target: LAMA2; (-) strand; PAM type: YTN; PAM sequence: TTC
aaagcagtgtgtagagggaa

SEQ ID NO: 192125 - DNA, 20 bp, Artificial Sequence
  Description of Artificial Sequence: Synthetic oligonucleotide
  Target: LAMA2; (-) strand; PAM type: YTN; PAM sequence: CTG
ggacacattcaaagcagtgt

SEQ ID NO: 192126 - DNA, 20 bp, Artificial Sequence
  Description of Artificial Sequence: Synthetic oligonucleotide
  Target: LAMA2; (-) strand; PAM type: YTN; PAM sequence: CTC
tgggacacattcaaagcagt

SEQ ID NO: 192127 - DNA, 20 bp, Artificial Sequence
  Description of Artificial Sequence: Synthetic oligonucleotide
  Target: LAMA2; (-) strand; PAM type: YTN; PAM sequence: TTG
aaaccgacaagaacaaagac

SEQ ID NO: 192128 - DNA, 20 bp, Artificial Sequence
  Description of Artificial Sequence: Synthetic oligonucleotide
  Target: LAMA2; (-) strand; PAM type: YTN; PAM sequence: TTT
gaaaccgacaagaacaaaga

SEQ ID NO: 192129 - DNA, 20 bp, Artificial Sequence
  Description of Artificial Sequence: Synthetic oligonucleotide
  Target: LAMA2; (-) strand; PAM type: YTN; PAM sequence: CTT
tgaaaccgacaagaacaaag

SEQ ID NO: 192130 - DNA, 20 bp, Artificial Sequence
  Description of Artificial Sequence: Synthetic oligonucleotide
  Target: LAMA2; (-) strand; PAM type: YTN; PAM sequence: TTC
tttgaaaccgacaagaacaa

SEQ ID NO: 192131 - DNA, 20 bp, Artificial Sequence
  Description of Artificial Sequence: Synthetic oligonucleotide
  Target: LAMA2; (-) strand; PAM type: YTN; PAM sequence: CTG
ggtacataacgaaatgaagg

SEQ ID NO: 192132 - DNA, 20 bp, Artificial Sequence
  Description of Artificial Sequence: Synthetic oligonucleotide
  Target: LAMA2; (-) strand; PAM type: YTN; PAM sequence: CTA
ctgggtacataacgaaatga

SEQ ID NO: 192133 - DNA, 20 bp, Artificial Sequence
  Description of Artificial Sequence: Synthetic oligonucleotide
  Target: LAMA2; (-) strand; PAM type: YTN; PAM sequence: CTG
aatgactactgggtacataa

SEQ ID NO: 192134 - DNA, 20 bp, Artificial Sequence
  Description of Artificial Sequence: Synthetic oligonucleotide
  Target: LAMA2; (-) strand; PAM type: YTN; PAM sequence: CTC
ctgaatgactactgggtaca

SEQ ID NO: 192135 - DNA, 20 bp, Artificial Sequence
  Description of Artificial Sequence: Synthetic oligonucleotide
  Target: LAMA2; (-) strand; PAM type: YTN; PAM sequence: CTG
ctcctgaatgactactgggt

SEQ ID NO: 192136 - DNA, 20 bp, Artificial Sequence
  Description of Artificial Sequence: Synthetic oligonucleotide
  Target: LAMA2; (-) strand; PAM type: YTN; PAM sequence: CTG
aacaacctgctcctgaatga

SEQ ID NO: 192137 - DNA, 20 bp, Artificial Sequence
  Description of Artificial Sequence: Synthetic oligonucleotide
  Target: LAMA2; (-) strand; PAM type: YTN; PAM sequence: CTA
catggaaactgaacaacctg

SEQ ID NO: 192138 - DNA, 20 bp, Artificial Sequence
  Description of Artificial Sequence: Synthetic oligonucleotide
  Target: LAMA2; (-) strand; PAM type: YTN; PAM sequence: CTC
aactacatggaaactgaaca

SEQ ID NO: 192139 - DNA, 20 bp, Artificial Sequence
  Description of Artificial Sequence: Synthetic oligonucleotide
  Target: LAMA2; (-) strand; PAM type: YTN; PAM sequence: CTG
ctcaactacatggaaactga

SEQ ID NO: 192140 - DNA, 20 bp, Artificial Sequence
  Description of Artificial Sequence: Synthetic oligonucleotide
  Target: LAMA2; (-) strand; PAM type: YTN; PAM sequence: CTC
aaaactgctcaactacatgg

SEQ ID NO: 192141 - DNA, 20 bp, Artificial Sequence
  Description of Artificial Sequence: Synthetic oligonucleotide
  Target: LAMA2; (-) strand; PAM type: YTN; PAM sequence: CTC
actcaaaactgctcaactac

SEQ ID NO: 192142 - DNA, 20 bp, Artificial Sequence
  Description of Artificial Sequence: Synthetic oligonucleotide
  Target: LAMA2; (-) strand; PAM type: YTN; PAM sequence: TTA
agaatctcactcaaaactgc

SEQ ID NO: 192143 - DNA, 20 bp, Artificial Sequence
  Description of Artificial Sequence: Synthetic oligonucleotide
  Target: LAMA2; (-) strand; PAM type: YTN; PAM sequence: CTC
aggattaagaatctcactca

SEQ ID NO: 192144 - DNA, 20 bp, Artificial Sequence
  Description of Artificial Sequence: Synthetic oligonucleotide
  Target: LAMA2; (-) strand; PAM type: YTN; PAM sequence: CTA
gaactcaggattaagaatct

SEQ ID NO: 192145 - DNA, 20 bp, Artificial Sequence
  Description of Artificial Sequence: Synthetic oligonucleotide
  Target: LAMA2; (-) strand; PAM type: YTN; PAM sequence: CTC
agaccacagtgcaatcaaac

SEQ ID NO: 192146 - DNA, 20 bp, Artificial Sequence
  Description of Artificial Sequence: Synthetic oligonucleotide
  Target: LAMA2; (-) strand; PAM type: YTN; PAM sequence: CTC
tcagaccacagtgcaatcaa

SEQ ID NO: 192147 - DNA, 20 bp, Artificial Sequence
  Description of Artificial Sequence: Synthetic oligonucleotide
  Target: LAMA2; (-) strand; PAM type: YTN; PAM sequence: CTA
tctctcagaccacagtgcaa

SEQ ID NO: 192148 - DNA, 20 bp, Artificial Sequence
  Description of Artificial Sequence: Synthetic oligonucleotide
  Target: LAMA2; (-) strand; PAM type: YTN; PAM sequence: TTA
taacaaactatctctcagac

SEQ ID NO: 192149 - DNA, 20 bp, Artificial Sequence
  Description of Artificial Sequence: Synthetic oligonucleotide
  Target: LAMA2; (-) strand; PAM type: YTN; PAM sequence: CTC
agcaaatgtaaaagaacaga

SEQ ID NO: 192150 - DNA, 20 bp, Artificial Sequence
  Description of Artificial Sequence: Synthetic oligonucleotide
  Target: LAMA2; (-) strand; PAM type: YTN; PAM sequence: CTC
ctcagcaaatgtaaaagaac

SEQ ID NO: 192151 - DNA, 20 bp, Artificial Sequence
  Description of Artificial Sequence: Synthetic oligonucleotide
  Target: LAMA2; (-) strand; PAM type: YTN; PAM sequence: CTC
tcctcagcaaatgtaaaaga

SEQ ID NO: 192152 - DNA, 20 bp, Artificial Sequence
  Description of Artificial Sequence: Synthetic oligonucleotide
  Target: LAMA2; (-) strand; PAM type: YTN; PAM sequence: TTG
gaagtaaagctctcctcagc

SEQ ID NO: 192153 - DNA, 20 bp, Artificial Sequence
  Description of Artificial Sequence: Synthetic oligonucleotide
  Target: LAMA2; (-) strand; PAM type: YTN; PAM sequence: CTT
ggaagtaaagctctcctcag

SEQ ID NO: 192154 - DNA, 20 bp, Artificial Sequence
  Description of Artificial Sequence: Synthetic oligonucleotide
  Target: LAMA2; (-) strand; PAM type: YTN; PAM sequence: TTG
accacatacttggaagtaaa

SEQ ID NO: 192155 - DNA, 20 bp, Artificial Sequence
  Description of Artificial Sequence: Synthetic oligonucleotide
  Target: LAMA2; (-) strand; PAM type: YTN; PAM sequence: TTC
caaaattgaccacatacttg

SEQ ID NO: 192156 - DNA, 20 bp, Artificial Sequence
  Description of Artificial Sequence: Synthetic oligonucleotide
  Target: LAMA2; (-) strand; PAM type: YTN; PAM sequence: CTA
ttccaaaattgaccacatac

SEQ ID NO: 192157 - DNA, 20 bp, Artificial Sequence
  Description of Artificial Sequence: Synthetic oligonucleotide
  Target: LAMA2; (-) strand; PAM type: YTN; PAM sequence: TTC
agcaccacaccacacctatt

SEQ ID NO: 192158 - DNA, 20 bp, Artificial Sequence
  Description of Artificial Sequence: Synthetic oligonucleotide
  Target: LAMA2; (-) strand; PAM type: YTN; PAM sequence: TTT
cagcaccacaccacacctat

SEQ ID NO: 192159 - DNA, 20 bp, Artificial Sequence
  Description of Artificial Sequence: Synthetic oligonucleotide
  Target: LAMA2; (-) strand; PAM type: YTN; PAM sequence: TTT
tcagcaccacaccacaccta

SEQ ID NO: 192160 - DNA, 20 bp, Artificial Sequence
  Description of Artificial Sequence: Synthetic oligonucleotide
  Target: LAMA2; (-) strand; PAM type: YTN; PAM sequence: TTT
ttcagcaccacaccacacct

SEQ ID NO: 192161 - DNA, 20 bp, Artificial Sequence
  Description of Artificial Sequence: Synthetic oligonucleotide
  Target: LAMA2; (-) strand; PAM type: YTN; PAM sequence: TTT
tttcagcaccacaccacacc

SEQ ID NO: 192162 - DNA, 20 bp, Artificial Sequence
  Description of Artificial Sequence: Synthetic oligonucleotide
  Target: LAMA2; (-) strand; PAM type: YTN; PAM sequence: TTT
ttttcagcaccacaccacac

SEQ ID NO: 192163 - DNA, 20 bp, Artificial Sequence
  Description of Artificial Sequence: Synthetic oligonucleotide
  Target: LAMA2; (-) strand; PAM type: YTN; PAM sequence: CTC
caccccaaatcaacagaata

SEQ ID NO: 192164 - DNA, 20 bp, Artificial Sequence
  Description of Artificial Sequence: Synthetic oligonucleotide
  Target: LAMA2; (-) strand; PAM type: YTN; PAM sequence: CTC
tccaccccaaatcaacagaa

SEQ ID NO: 192165 - DNA, 20 bp, Artificial Sequence
  Description of Artificial Sequence: Synthetic oligonucleotide
  Target: LAMA2; (-) strand; PAM type: YTN; PAM sequence: CTA
cagaactctccaccccaaat

SEQ ID NO: 192166 - DNA, 20 bp, Artificial Sequence
  Description of Artificial Sequence: Synthetic oligonucleotide
  Target: LAMA2; (-) strand; PAM type: YTN; PAM sequence: CTG
atagacatctacagaactct

SEQ ID NO: 192167 - DNA, 20 bp, Artificial Sequence
  Description of Artificial Sequence: Synthetic oligonucleotide
  Target: LAMA2; (-) strand; PAM type: YTN; PAM sequence: CTG
caccaagcggacctgataga

SEQ ID NO: 192168 - DNA, 20 bp, Artificial Sequence
  Description of Artificial Sequence: Synthetic oligonucleotide
  Target: LAMA2; (-) strand; PAM type: YTN; PAM sequence: CTC
tgcaccaagcggacctgata

SEQ ID NO: 192169 - DNA, 20 bp, Artificial Sequence
  Description of Artificial Sequence: Synthetic oligonucleotide
  Target: LAMA2; (-) strand; PAM type: YTN; PAM sequence: CTC
agctctgcaccaagcggacc

SEQ ID NO: 192170 - DNA, 20 bp, Artificial Sequence
  Description of Artificial Sequence: Synthetic oligonucleotide
  Target: LAMA2; (-) strand; PAM type: YTN; PAM sequence: TTG
aactcagctctgcaccaagc

SEQ ID NO: 192171 - DNA, 20 bp, Artificial Sequence
  Description of Artificial Sequence: Synthetic oligonucleotide
  Target: LAMA2; (-) strand; PAM type: YTN; PAM sequence: CTA
gacagatcaacgagacagaa

SEQ ID NO: 192172 - DNA, 20 bp, Artificial Sequence
  Description of Artificial Sequence: Synthetic oligonucleotide
  Target: LAMA2; (-) strand; PAM type: YTN; PAM sequence: CTG
tcaacactagacagatcaac

SEQ ID NO: 192173 - DNA, 20 bp, Artificial Sequence
  Description of Artificial Sequence: Synthetic oligonucleotide
  Target: LAMA2; (-) strand; PAM type: YTN; PAM sequence: TTA
ataccccactgtcaacacta

SEQ ID NO: 192174 - DNA, 20 bp, Artificial Sequence
  Description of Artificial Sequence: Synthetic oligonucleotide
  Target: LAMA2; (-) strand; PAM type: YTN; PAM sequence: TTT
aataccccactgtcaacact

SEQ ID NO: 192175 - DNA, 20 bp, Artificial Sequence
  Description of Artificial Sequence: Synthetic oligonucleotide
  Target: LAMA2; (-) strand; PAM type: YTN; PAM sequence: CTT
taataccccactgtcaacac

SEQ ID NO: 192176 - DNA, 20 bp, Artificial Sequence
  Description of Artificial Sequence: Synthetic oligonucleotide
  Target: LAMA2; (-) strand; PAM type: YTN; PAM sequence: TTA
ataatgggagactttaatac

SEQ ID NO: 192177 - DNA, 20 bp, Artificial Sequence
  Description of Artificial Sequence: Synthetic oligonucleotide
  Target: LAMA2; (-) strand; PAM type: YTN; PAM sequence: CTC
ccacacattaataatgggag

SEQ ID NO: 192178 - DNA, 20 bp, Artificial Sequence
  Description of Artificial Sequence: Synthetic oligonucleotide
  Target: LAMA2; (-) strand; PAM type: YTN; PAM sequence: TTA
gactcccacacattaataat

SEQ ID NO: 192179 - DNA, 20 bp, Artificial Sequence
  Description of Artificial Sequence: Synthetic oligonucleotide
  Target: LAMA2; (-) strand; PAM type: YTN; PAM sequence: CTT
agactcccacacattaataa

SEQ ID NO: 192180 - DNA, 20 bp, Artificial Sequence
  Description of Artificial Sequence: Synthetic oligonucleotide
  Target: LAMA2; (-) strand; PAM type: YTN; PAM sequence: CTA
caaagagacttagactccca

SEQ ID NO: 192181 - DNA, 20 bp, Artificial Sequence
  Description of Artificial Sequence: Synthetic oligonucleotide
  Target: LAMA2; (-) strand; PAM type: YTN; PAM sequence: CTG
agtgacctacaaagagactt

SEQ ID NO: 192182 - DNA, 20 bp, Artificial Sequence
  Description of Artificial Sequence: Synthetic oligonucleotide
  Target: LAMA2; (-) strand; PAM type: YTN; PAM sequence: TTC
ataaagcaagtcctgagtga

SEQ ID NO: 192183 - DNA, 20 bp, Artificial Sequence
  Description of Artificial Sequence: Synthetic oligonucleotide
  Target: LAMA2; (-) strand; PAM type: YTN; PAM sequence: CTA
aatatatacgcacccaacac

SEQ ID NO: 192184 - DNA, 20 bp, Artificial Sequence
  Description of Artificial Sequence: Synthetic oligonucleotide
  Target: LAMA2; (-) strand; PAM type: YTN; PAM sequence: CTA
acctaaatatatacgcaccc

SEQ ID NO: 192185 - DNA, 20 bp, Artificial Sequence
  Description of Artificial Sequence: Synthetic oligonucleotide
  Target: LAMA2; (-) strand; PAM type: YTN; PAM sequence: CTA
actaacctaaatatatacgc

SEQ ID NO: 192186 - DNA, 20 bp, Artificial Sequence
  Description of Artificial Sequence: Synthetic oligonucleotide
  Target: LAMA2; (-) strand; PAM type: YTN; PAM sequence: TTC
aacaagaagagctaactaac

SEQ ID NO: 192187 - DNA, 20 bp, Artificial Sequence
  Description of Artificial Sequence: Synthetic oligonucleotide
  Target: LAMA2; (-) strand; PAM type: YTN; PAM sequence: TTA
cataatggtaaagggatcaa

SEQ ID NO: 192188 - DNA, 20 bp, Artificial Sequence
  Description of Artificial Sequence: Synthetic oligonucleotide
  Target: LAMA2; (-) strand; PAM type: YTN; PAM sequence: TTA
aaccaacaaagatcaaaaga

SEQ ID NO: 192189 - DNA, 20 bp, Artificial Sequence
  Description of Artificial Sequence: Synthetic oligonucleotide
  Target: LAMA2; (-) strand; PAM type: YTN; PAM sequence: TTT
aaaccaacaaagatcaaaag

SEQ ID NO: 192190 - DNA, 20 bp, Artificial Sequence
  Description of Artificial Sequence: Synthetic oligonucleotide
  Target: LAMA2; (-) strand; PAM type: YTN; PAM sequence: TTT
taaaccaacaaagatcaaaa

SEQ ID NO: 192191 - DNA, 20 bp, Artificial Sequence
  Description of Artificial Sequence: Synthetic oligonucleotide
  Target: LAMA2; (-) strand; PAM type: YTN; PAM sequence: CTG
ataaaacagattttaaacca

SEQ ID NO: 192192 - DNA, 20 bp, Artificial Sequence
  Description of Artificial Sequence: Synthetic oligonucleotide
  Target: LAMA2; (-) strand; PAM type: YTN; PAM sequence: CTC
tgataaaacagattttaaac

SEQ ID NO: 192193 - DNA, 20 bp, Artificial Sequence
  Description of Artificial Sequence: Synthetic oligonucleotide
  Target: LAMA2; (-) strand; PAM type: YTN; PAM sequence: CTA
gtctctgataaaacagattt

SEQ ID NO: 192194 - DNA, 20 bp, Artificial Sequence
  Description of Artificial Sequence: Synthetic oligonucleotide
  Target: LAMA2; (-) strand; PAM type: YTN; PAM sequence: TTG
caatcctagtctctgataaa

SEQ ID NO: 192195 - DNA, 20 bp, Artificial Sequence
  Description of Artificial Sequence: Synthetic oligonucleotide
  Target: LAMA2; (-) strand; PAM type: YTN; PAM sequence: CTA
ccaagcaaatggaaaacaaa

SEQ ID NO: 192196 - DNA, 20 bp, Artificial Sequence
  Description of Artificial Sequence: Synthetic oligonucleotide
  Target: LAMA2; (-) strand; PAM type: YTN; PAM sequence: CTC
aaaataaaaggatggaggaa

SEQ ID NO: 192197 - DNA, 20 bp, Artificial Sequence
  Description of Artificial Sequence: Synthetic oligonucleotide
  Target: LAMA2; (-) strand; PAM type: YTN; PAM sequence: CTC
acgtgcagagacacacatag

SEQ ID NO: 192198 - DNA, 20 bp, Artificial Sequence
  Description of Artificial Sequence: Synthetic oligonucleotide
  Target: LAMA2; (-) strand; PAM type: YTN; PAM sequence: TTC
aggaaacccatctcacgtgc

SEQ ID NO: 192199 - DNA, 20 bp, Artificial Sequence
  Description of Artificial Sequence: Synthetic oligonucleotide
  Target: LAMA2; (-) strand; PAM type: YTN; PAM sequence: CTG
tattcaggaaacccatctca

SEQ ID NO: 192200 - DNA, 20 bp, Artificial Sequence
  Description of Artificial Sequence: Synthetic oligonucleotide
  Target: LAMA2; (-) strand; PAM type: YTN; PAM sequence: TTG
gataaagagtcaagacccat

SEQ ID NO: 192201 - DNA, 20 bp, Artificial Sequence
  Description of Artificial Sequence: Synthetic oligonucleotide
  Target: LAMA2; (-) strand; PAM type: YTN; PAM sequence: CTG
gcaaattggataaagagtca

SEQ ID NO: 192202 - DNA, 20 bp, Artificial Sequence
  Description of Artificial Sequence: Synthetic oligonucleotide
  Target: LAMA2; (-) strand; PAM type: YTN; PAM sequence: TTA
aaagacacagactggcaaat

SEQ ID NO: 192203 - DNA, 20 bp, Artificial Sequence
  Description of Artificial Sequence: Synthetic oligonucleotide
  Target: LAMA2; (-) strand; PAM type: YTN; PAM sequence: CTC
caattaaaagacacagactg

SEQ ID NO: 192204 - DNA, 20 bp, Artificial Sequence
  Description of Artificial Sequence: Synthetic oligonucleotide
  Target: LAMA2; (-) strand; PAM type: YTN; PAM sequence: CTA
aatgctccaattaaaagaca

SEQ ID NO: 192205 - DNA, 20 bp, Artificial Sequence
  Description of Artificial Sequence: Synthetic oligonucleotide
  Target: LAMA2; (-) strand; PAM type: YTN; PAM sequence: TTA
aatgtaaatggactaaatgc

SEQ ID NO: 192206 - DNA, 20 bp, Artificial Sequence
  Description of Artificial Sequence: Synthetic oligonucleotide
  Target: LAMA2; (-) strand; PAM type: YTN; PAM sequence: TTT
aaatgtaaatggactaaatg

SEQ ID NO: 192207 - DNA, 20 bp, Artificial Sequence
  Description of Artificial Sequence: Synthetic oligonucleotide
  Target: LAMA2; (-) strand; PAM type: YTN; PAM sequence: CTT
taaatgtaaatggactaaat

SEQ ID NO: 192208 - DNA, 20 bp, Artificial Sequence
  Description of Artificial Sequence: Synthetic oligonucleotide
  Target: LAMA2; (-) strand; PAM type: YTN; PAM sequence: TTA
actttaaatgtaaatggact

SEQ ID NO: 192209 - DNA, 20 bp, Artificial Sequence
  Description of Artificial Sequence: Synthetic oligonucleotide
  Target: LAMA2; (-) strand; PAM type: YTN; PAM sequence: TTC
acacataacaatattaactt

SEQ ID NO: 192210 - DNA, 20 bp, Artificial Sequence
  Description of Artificial Sequence: Synthetic oligonucleotide
  Target: LAMA2; (-) strand; PAM type: YTN; PAM sequence: CTA
acatcatcatgacaggatca

SEQ ID NO: 192211 - DNA, 20 bp, Artificial Sequence
  Description of Artificial Sequence: Synthetic oligonucleotide
  Target: LAMA2; (-) strand; PAM type: YTN; PAM sequence: CTA
acgagcaaaataaccagcta

SEQ ID NO: 192212 - DNA, 20 bp, Artificial Sequence
  Description of Artificial Sequence: Synthetic oligonucleotide
  Target: LAMA2; (-) strand; PAM type: YTN; PAM sequence: CTG
catcaactaacgagcaaaat

SEQ ID NO: 192213 - DNA, 20 bp, Artificial Sequence
  Description of Artificial Sequence: Synthetic oligonucleotide
  Target: LAMA2; (-) strand; PAM type: YTN; PAM sequence: CTA
ggaagaaactgcatcaacta

SEQ ID NO: 192214 - DNA, 20 bp, Artificial Sequence
  Description of Artificial Sequence: Synthetic oligonucleotide
  Target: LAMA2; (-) strand; PAM type: YTN; PAM sequence: CTG
caaaatcatgccaaaatgta

SEQ ID NO: 192215 - DNA, 20 bp, Artificial Sequence
  Description of Artificial Sequence: Synthetic oligonucleotide
  Target: LAMA2; (-) strand; PAM type: YTN; PAM sequence: CTA
aacatggaaaggaacaacca

SEQ ID NO: 192216 - DNA, 20 bp, Artificial Sequence
  Description of Artificial Sequence: Synthetic oligonucleotide
  Target: LAMA2; (-) strand; PAM type: YTN; PAM sequence: CTG
aaggaagcactaaacatgga

SEQ ID NO: 192217 - DNA, 20 bp, Artificial Sequence
  Description of Artificial Sequence: Synthetic oligonucleotide
  Target: LAMA2; (-) strand; PAM type: YTN; PAM sequence: CTC
ctgaaggaagcactaaacat

SEQ ID NO: 192218 - DNA, 20 bp, Artificial Sequence
  Description of Artificial Sequence: Synthetic oligonucleotide
  Target: LAMA2; (-) strand; PAM type: YTN; PAM sequence: CTA
aaagagctcctgaaggaagc

SEQ ID NO: 192219 - DNA, 20 bp, Artificial Sequence
  Description of Artificial Sequence: Synthetic oligonucleotide
  Target: LAMA2; (-) strand; PAM type: YTN; PAM sequence: CTG
ccctaaaagagctcctgaag

SEQ ID NO: 192220 - DNA, 20 bp, Artificial Sequence
  Description of Artificial Sequence: Synthetic oligonucleotide
  Target: LAMA2; (-) strand; PAM type: YTN; PAM sequence: TTG
tcaccaccaggcctgcccta

SEQ ID NO: 192221 - DNA, 20 bp, Artificial Sequence
  Description of Artificial Sequence: Synthetic oligonucleotide
  Target: LAMA2; (-) strand; PAM type: YTN; PAM sequence: TTT
gtcaccaccaggcctgccct

SEQ ID NO: 192222 - DNA, 20 bp, Artificial Sequence
  Description of Artificial Sequence: Synthetic oligonucleotide
  Target: LAMA2; (-) strand; PAM type: YTN; PAM sequence: TTT
tgtcaccaccaggcctgccc

SEQ ID NO: 192223 - DNA, 20 bp, Artificial Sequence
  Description of Artificial Sequence: Synthetic oligonucleotide
  Target: LAMA2; (-) strand; PAM type: YTN; PAM sequence: CTG
agagattttgtcaccaccag

SEQ ID NO: 192224 - DNA, 20 bp, Artificial Sequence
  Description of Artificial Sequence: Synthetic oligonucleotide
  Target: LAMA2; (-) strand; PAM type: YTN; PAM sequence: TTA
cagacaagcaaatgctgaga

SEQ ID NO: 192225 - DNA, 20 bp, Artificial Sequence
  Description of Artificial Sequence: Synthetic oligonucleotide
  Target: LAMA2; (-) strand; PAM type: YTN; PAM sequence: TTT
acagacaagcaaatgctgag

SEQ ID NO: 192226 - DNA, 20 bp, Artificial Sequence
  Description of Artificial Sequence: Synthetic oligonucleotide
  Target: LAMA2; (-) strand; PAM type: YTN; PAM sequence: CTT
tacagacaagcaaatgctga

SEQ ID NO: 192227 - DNA, 20 bp, Artificial Sequence
  Description of Artificial Sequence: Synthetic oligonucleotide
  Target: LAMA2; (-) strand; PAM type: YTN; PAM sequence: TTC
ataagcgaaggagaaataaa

SEQ ID NO: 192228 - DNA, 20 bp, Artificial Sequence
  Description of Artificial Sequence: Synthetic oligonucleotide
  Target: LAMA2; (-) strand; PAM type: YTN; PAM sequence: CTT
cataagcgaaggagaaataa

SEQ ID NO: 192229 - DNA, 20 bp, Artificial Sequence
  Description of Artificial Sequence: Synthetic oligonucleotide
  Target: LAMA2; (-) strand; PAM type: YTN; PAM sequence: CTA
agcttcataagcgaaggaga

SEQ ID NO: 192230 - DNA, 20 bp, Artificial Sequence
  Description of Artificial Sequence: Synthetic oligonucleotide
  Target: LAMA2; (-) strand; PAM type: YTN; PAM sequence: TTC
atatccagccaaactaagct

SEQ ID NO: 192231 - DNA, 20 bp, Artificial Sequence
  Description of Artificial Sequence: Synthetic oligonucleotide
  Target: LAMA2; (-) strand; PAM type: YTN; PAM sequence: TTT
catatccagccaaactaagc

SEQ ID NO: 192232 - DNA, 20 bp, Artificial Sequence
  Description of Artificial Sequence: Synthetic oligonucleotide
  Target: LAMA2; (-) strand; PAM type: YTN; PAM sequence: TTC
aacccagaatttcatatcca

SEQ ID NO: 192233 - DNA, 20 bp, Artificial Sequence
  Description of Artificial Sequence: Synthetic oligonucleotide
  Target: LAMA2; (-) strand; PAM type: YTN; PAM sequence: TTT
caacccagaatttcatatcc

SEQ ID NO: 192234 - DNA, 20 bp, Artificial Sequence
  Description of Artificial Sequence: Synthetic oligonucleotide
  Target: LAMA2; (-) strand; PAM type: YTN; PAM sequence: TTT
tcaacccagaatttcatatc

SEQ ID NO: 192235 - DNA, 20 bp, Artificial Sequence
  Description of Artificial Sequence: Synthetic oligonucleotide
  Target: LAMA2; (-) strand; PAM type: YTN; PAM sequence: TTA
aagaaaagaattttcaaccc

SEQ ID NO: 192236 - DNA, 20 bp, Artificial Sequence
  Description of Artificial Sequence: Synthetic oligonucleotide
  Target: LAMA2; (-) strand; PAM type: YTN; PAM sequence: CTT
aaagaaaagaattttcaacc

SEQ ID NO: 192237 - DNA, 20 bp, Artificial Sequence
  Description of Artificial Sequence: Synthetic oligonucleotide
  Target: LAMA2; (-) strand; PAM type: YTN; PAM sequence: TTC
ttaaagaaaagaattttcaa

SEQ ID NO: 192238 - DNA, 20 bp, Artificial Sequence
  Description of Artificial Sequence: Synthetic oligonucleotide
  Target: LAMA2; (-) strand; PAM type: YTN; PAM sequence: TTC
aacattcttaaagaaaagaa

SEQ ID NO: 192239 - DNA, 20 bp, Artificial Sequence
  Description of Artificial Sequence: Synthetic oligonucleotide
  Target: LAMA2; (-) strand; PAM type: YTN; PAM sequence: CTA
caagccagaagagagtgggg

SEQ ID NO: 192240 - DNA, 20 bp, Artificial Sequence
  Description of Artificial Sequence: Synthetic oligonucleotide
  Target: LAMA2; (-) strand; PAM type: YTN; PAM sequence: CTC
ggcagaaaccctacaagcca

SEQ ID NO: 192241 - DNA, 20 bp, Artificial Sequence
  Description of Artificial Sequence: Synthetic oligonucleotide
  Target: LAMA2; (-) strand; PAM type: YTN; PAM sequence: CTC
tcggcagaaaccctacaagc

SEQ ID NO: 192242 - DNA, 20 bp, Artificial Sequence
  Description of Artificial Sequence: Synthetic oligonucleotide
  Target: LAMA2; (-) strand; PAM type: YTN; PAM sequence: CTA
acagcagatctctcggcaga

SEQ ID NO: 192243 - DNA, 20 bp, Artificial Sequence
  Description of Artificial Sequence: Synthetic oligonucleotide
  Target: LAMA2; (-) strand; PAM type: YTN; PAM sequence: CTG
gaagggaagcccatcagact

SEQ ID NO: 192244 - DNA, 20 bp, Artificial Sequence
  Description of Artificial Sequence: Synthetic oligonucleotide
  Target: LAMA2; (-) strand; PAM type: YTN; PAM sequence: TTA
ccctggaagggaagcccatc

SEQ ID NO: 192245 - DNA, 20 bp, Artificial Sequence
  Description of Artificial Sequence: Synthetic oligonucleotide
  Target: LAMA2; (-) strand; PAM type: YTN; PAM sequence: TTA
agggcagccagagagaaagc

SEQ ID NO: 192246 - DNA, 20 bp, Artificial Sequence
  Description of Artificial Sequence: Synthetic oligonucleotide
  Target: LAMA2; (-) strand; PAM type: YTN; PAM sequence: TTG
aaatgaaggaaaaaatgtta

SEQ ID NO: 192247 - DNA, 20 bp, Artificial Sequence
  Description of Artificial Sequence: Synthetic oligonucleotide
  Target: LAMA2; (-) strand; PAM type: YTN; PAM sequence: TTC
accaaagttgaaatgaagga

SEQ ID NO: 192248 - DNA, 20 bp, Artificial Sequence
  Description of Artificial Sequence: Synthetic oligonucleotide
  Target: LAMA2; (-) strand; PAM type: YTN; PAM sequence: TTG
tcagattcaccaaagttgaa

SEQ ID NO: 192249 - DNA, 20 bp, Artificial Sequence
  Description of Artificial Sequence: Synthetic oligonucleotide
  Target: LAMA2; (-) strand; PAM type: YTN; PAM sequence: CTC
caagacacataattgtcaga

SEQ ID NO: 192250 - DNA, 20 bp, Artificial Sequence
  Description of Artificial Sequence: Synthetic oligonucleotide
  Target: LAMA2; (-) strand; PAM type: YTN; PAM sequence: CTC
gagaaaagcaactccaagac

SEQ ID NO: 192251 - DNA, 20 bp, Artificial Sequence
  Description of Artificial Sequence: Synthetic oligonucleotide
  Target: LAMA2; (-) strand; PAM type: YTN; PAM sequence: TTC
tcgagaaaagcaactccaag

SEQ ID NO: 192252 - DNA, 20 bp, Artificial Sequence
  Description of Artificial Sequence: Synthetic oligonucleotide
  Target: LAMA2; (-) strand; PAM type: YTN; PAM sequence: CTT
ctcgagaaaagcaactccaa

SEQ ID NO: 192253 - DNA, 20 bp, Artificial Sequence
  Description of Artificial Sequence: Synthetic oligonucleotide
  Target: LAMA2; (-) strand; PAM type: YTN; PAM sequence: TTC
aggaaatacagagaaggcca

SEQ ID NO: 192254 - DNA, 20 bp, Artificial Sequence
  Description of Artificial Sequence: Synthetic oligonucleotide
  Target: LAMA2; (-) strand; PAM type: YTN; PAM sequence: TTC
agattcaggaaatacagaga

SEQ ID NO: 192255 - DNA, 20 bp, Artificial Sequence
  Description of Artificial Sequence: Synthetic oligonucleotide
  Target: LAMA2; (-) strand; PAM type: YTN; PAM sequence: CTA
gcaaggcaggccaacgttca

SEQ ID NO: 192256 - DNA, 20 bp, Artificial Sequence
  Description of Artificial Sequence: Synthetic oligonucleotide
  Target: LAMA2; (-) strand; PAM type: YTN; PAM sequence: TTC
cccaatctagcaaggcaggc

SEQ ID NO: 192257 - DNA, 20 bp, Artificial Sequence
  Description of Artificial Sequence: Synthetic oligonucleotide
  Target: LAMA2; (-) strand; PAM type: YTN; PAM sequence: CTT
ccccaatctagcaaggcagg

SEQ ID NO: 192258 - DNA, 20 bp, Artificial Sequence
  Description of Artificial Sequence: Synthetic oligonucleotide
  Target: LAMA2; (-) strand; PAM type: YTN; PAM sequence: TTA
tccaggagaacttccccaat

SEQ ID NO: 192259 - DNA, 20 bp, Artificial Sequence
  Description of Artificial Sequence: Synthetic oligonucleotide
  Target: LAMA2; (-) strand; PAM type: YTN; PAM sequence: CTG
caggatattatccaggagaa

SEQ ID NO: 192260 - DNA, 20 bp, Artificial Sequence
  Description of Artificial Sequence: Synthetic oligonucleotide
  Target: LAMA2; (-) strand; PAM type: YTN; PAM sequence: CTC
tgcaggatattatccaggag

SEQ ID NO: 192261 - DNA, 20 bp, Artificial Sequence
  Description of Artificial Sequence: Synthetic oligonucleotide
  Target: LAMA2; (-) strand; PAM type: YTN; PAM sequence: TTG
gaaaacactctgcaggatat

SEQ ID NO: 192262 - DNA, 20 bp, Artificial Sequence
  Description of Artificial Sequence: Synthetic oligonucleotide
  Target: LAMA2; (-) strand; PAM type: YTN; PAM sequence: CTG
aaagtgacggggagaatgaa

SEQ ID NO: 192263 - DNA, 20 bp, Artificial Sequence
  Description of Artificial Sequence: Synthetic oligonucleotide
  Target: LAMA2; (-) strand; PAM type: YTN; PAM sequence: TTG
gtgtacctgaaagtgacggg

SEQ ID NO: 192264 - DNA, 20 bp, Artificial Sequence
  Description of Artificial Sequence: Synthetic oligonucleotide
  Target: LAMA2; (-) strand; PAM type: YTN; PAM sequence: CTG
attggtgtacctgaaagtga

SEQ ID NO: 192265 - DNA, 20 bp, Artificial Sequence
  Description of Artificial Sequence: Synthetic oligonucleotide
  Target: LAMA2; (-) strand; PAM type: YTN; PAM sequence: CTA
tgtgaaaagaccaaatccac

SEQ ID NO: 192266 - DNA, 20 bp, Artificial Sequence
  Description of Artificial Sequence: Synthetic oligonucleotide
  Target: LAMA2; (-) strand; PAM type: YTN; PAM sequence: CTC
caagaaatatgggactatgt

SEQ ID NO: 192267 - DNA, 20 bp, Artificial Sequence
  Description of Artificial Sequence: Synthetic oligonucleotide
  Target: LAMA2; (-) strand; PAM type: YTN; PAM sequence: TTA
gagaaaaaagaataaaaaga

SEQ ID NO: 192268 - DNA, 20 bp, Artificial Sequence
  Description of Artificial Sequence: Synthetic oligonucleotide
  Target: LAMA2; (-) strand; PAM type: YTN; PAM sequence: TTT
agagaaaaaagaataaaaag

SEQ ID NO: 192269 - DNA, 20 bp, Artificial Sequence
  Description of Artificial Sequence: Synthetic oligonucleotide
  Target: LAMA2; (-) strand; PAM type: YTN; PAM sequence: CTG
gaagaaagggtatcagcaat

SEQ ID NO: 192270 - DNA, 20 bp, Artificial Sequence
  Description of Artificial Sequence: Synthetic oligonucleotide
  Target: LAMA2; (-) strand; PAM type: YTN; PAM sequence: CTC
aggagccgatgcgatcaact

SEQ ID NO: 192271 - DNA, 20 bp, Artificial Sequence
  Description of Artificial Sequence: Synthetic oligonucleotide
  Target: LAMA2; (-) strand; PAM type: YTN; PAM sequence: CTA
cgtgaagaatgcagaagcct

SEQ ID NO: 192272 - DNA, 20 bp, Artificial Sequence
  Description of Artificial Sequence: Synthetic oligonucleotide
  Target: LAMA2; (-) strand; PAM type: YTN; PAM sequence: CTC
gagaactacgtgaagaatgc

SEQ ID NO: 192273 - DNA, 20 bp, Artificial Sequence
  Description of Artificial Sequence: Synthetic oligonucleotide
  Target: LAMA2; (-) strand; PAM type: YTN; PAM sequence: CTG
aaaaccaaggctcgagaact

SEQ ID NO: 192274 - DNA, 20 bp, Artificial Sequence
  Description of Artificial Sequence: Synthetic oligonucleotide
  Target: LAMA2; (-) strand; PAM type: YTN; PAM sequence: CTG
atggagctgaaaaccaaggc

SEQ ID NO: 192275 - DNA, 20 bp, Artificial Sequence
  Description of Artificial Sequence: Synthetic oligonucleotide
  Target: LAMA2; (-) strand; PAM type: YTN; PAM sequence: TTA
aaggagctgatggagctgaa

SEQ ID NO: 192276 - DNA, 20 bp, Artificial Sequence
  Description of Artificial Sequence: Synthetic oligonucleotide
  Target: LAMA2; (-) strand; PAM type: YTN; PAM sequence: CTT
aaaggagctgatggagctga

SEQ ID NO: 192277 - DNA, 20 bp, Artificial Sequence
  Description of Artificial Sequence: Synthetic oligonucleotide
  Target: LAMA2; (-) strand; PAM type: YTN; PAM sequence: CTA
gaataaccaatacagagaaa

SEQ ID NO: 192278 - DNA, 20 bp, Artificial Sequence
  Description of Artificial Sequence: Synthetic oligonucleotide
  Target: LAMA2; (-) strand; PAM type: YTN; PAM sequence: TTA
gaagaatgtataactagaat

SEQ ID NO: 192279 - DNA, 20 bp, Artificial Sequence
  Description of Artificial Sequence: Synthetic oligonucleotide
  Target: LAMA2; (-) strand; PAM type: YTN; PAM sequence: TTT
agaagaatgtataactagaa

SEQ ID NO: 192280 - DNA, 20 bp, Artificial Sequence
  Description of Artificial Sequence: Synthetic oligonucleotide
  Target: LAMA2; (-) strand; PAM type: YTN; PAM sequence: TTG
aaaaaaatttagaagaatgt

SEQ ID NO: 192281 - DNA, 20 bp, Artificial Sequence
  Description of Artificial Sequence: Synthetic oligonucleotide
  Target: LAMA2; (-) strand; PAM type: YTN; PAM sequence: TTT
gaaaaaaatttagaagaatg

SEQ ID NO: 192282 - DNA, 20 bp, Artificial Sequence
  Description of Artificial Sequence: Synthetic oligonucleotide
  Target: LAMA2; (-) strand; PAM type: YTN; PAM sequence: CTT
tgaaaaaaatttagaagaat

SEQ ID NO: 192283 - DNA, 20 bp, Artificial Sequence
  Description of Artificial Sequence: Synthetic oligonucleotide
  Target: LAMA2; (-) strand; PAM type: YTN; PAM sequence: TTG
aaaactttgaaaaaaattta

SEQ ID NO: 192284 - DNA, 20 bp, Artificial Sequence
  Description of Artificial Sequence: Synthetic oligonucleotide
  Target: LAMA2; (-) strand; PAM type: YTN; PAM sequence: TTC
aaaccaaaggcaaagaagtt

SEQ ID NO: 192285 - DNA, 20 bp, Artificial Sequence
  Description of Artificial Sequence: Synthetic oligonucleotide
  Target: LAMA2; (-) strand; PAM type: YTN; PAM sequence: CTA
cgggaggacattcaaaccaa

SEQ ID NO: 192286 - DNA, 20 bp, Artificial Sequence
  Description of Artificial Sequence: Synthetic oligonucleotide
  Target: LAMA2; (-) strand; PAM type: YTN; PAM sequence: CTG
agctacgggaggacattcaa

SEQ ID NO: 192287 - DNA, 20 bp, Artificial Sequence
  Description of Artificial Sequence: Synthetic oligonucleotide
  Target: LAMA2; (-) strand; PAM type: YTN; PAM sequence: CTC
tgagctacgggaggacattc

SEQ ID NO: 192288 - DNA, 20 bp, Artificial Sequence
  Description of Artificial Sequence: Synthetic oligonucleotide
  Target: LAMA2; (-) strand; PAM type: YTN; PAM sequence: TTA
ctctgagctacgggaggaca

SEQ ID NO: 192289 - DNA, 20 bp, Artificial Sequence
  Description of Artificial Sequence: Synthetic oligonucleotide
  Target: LAMA2; (-) strand; PAM type: YTN; PAM sequence: TTC
agatgatcaaattactctga

SEQ ID NO: 192290 - DNA, 20 bp, Artificial Sequence
  Description of Artificial Sequence: Synthetic oligonucleotide
  Target: LAMA2; (-) strand; PAM type: YTN; PAM sequence: CTT
cagatgatcaaattactctg

SEQ ID NO: 192291 - DNA, 20 bp, Artificial Sequence
  Description of Artificial Sequence: Synthetic oligonucleotide
  Target: LAMA2; (-) strand; PAM type: YTN; PAM sequence: CTG
agagaagaaggcttcagatg

SEQ ID NO: 192292 - DNA, 20 bp, Artificial Sequence
  Description of Artificial Sequence: Synthetic oligonucleotide
  Target: LAMA2; (-) strand; PAM type: YTN; PAM sequence: TTG
acgagctgagagaagaaggc

SEQ ID NO: 192293 - DNA, 20 bp, Artificial Sequence
  Description of Artificial Sequence: Synthetic oligonucleotide
  Target: LAMA2; (-) strand; PAM type: YTN; PAM sequence: TTT
gacgagctgagagaagaagg

SEQ ID NO: 192294 - DNA, 20 bp, Artificial Sequence
  Description of Artificial Sequence: Synthetic oligonucleotide
  Target: LAMA2; (-) strand; PAM type: YTN; PAM sequence: CTT
tgacgagctgagagaagaag

SEQ ID NO: 192295 - DNA, 20 bp, Artificial Sequence
  Description of Artificial Sequence: Synthetic oligonucleotide
  Target: LAMA2; (-) strand; PAM type: YTN; PAM sequence: CTA
gacggagaacgactttgacg

SEQ ID NO: 192296 - DNA, 20 bp, Artificial Sequence
  Description of Artificial Sequence: Synthetic oligonucleotide
  Target: LAMA2; (-) strand; PAM type: YTN; PAM sequence: CTC
accaacaacagaacgaagct

SEQ ID NO: 192297 - DNA, 20 bp, Artificial Sequence
  Description of Artificial Sequence: Synthetic oligonucleotide
  Target: LAMA2; (-) strand; PAM type: YTN; PAM sequence: TTC
ctcaccaacaacagaacgaa

SEQ ID NO: 192298 - DNA, 20 bp, Artificial Sequence
  Description of Artificial Sequence: Synthetic oligonucleotide
  Target: LAMA2; (-) strand; PAM type: YTN; PAM sequence: CTC
caaaggaacgcagttcctca

SEQ ID NO: 192299 - DNA, 20 bp, Artificial Sequence
  Description of Artificial Sequence: Synthetic oligonucleotide
  Target: LAMA2; (-) strand; PAM type: YTN; PAM sequence: CTC
ctccaaaggaacgcagttcc

SEQ ID NO: 192300 - DNA, 20 bp, Artificial Sequence
  Description of Artificial Sequence: Synthetic oligonucleotide
  Target: LAMA2; (-) strand; PAM type: YTN; PAM sequence: CTC
ctcctccaaaggaacgcagt

SEQ ID NO: 192301 - DNA, 20 bp, Artificial Sequence
  Description of Artificial Sequence: Synthetic oligonucleotide
  Target: LAMA2; (-) strand; PAM type: YTN; PAM sequence: CTC
tcctcctccaaaggaacgca

SEQ ID NO: 192302 - DNA, 20 bp, Artificial Sequence
  Description of Artificial Sequence: Synthetic oligonucleotide
  Target: LAMA2; (-) strand; PAM type: YTN; PAM sequence: CTA
aaaagcagagcgcctctcct

SEQ ID NO: 192303 - DNA, 20 bp, Artificial Sequence
  Description of Artificial Sequence: Synthetic oligonucleotide
  Target: LAMA2; (-) strand; PAM type: YTN; PAM sequence: CTC
taaaaagcagagcgcctctc

SEQ ID NO: 192304 - DNA, 20 bp, Artificial Sequence
  Description of Artificial Sequence: Synthetic oligonucleotide
  Target: LAMA2; (-) strand; PAM type: YTN; PAM sequence: CTG
gaaactctaaaaagcagagc

SEQ ID NO: 192305 - DNA, 20 bp, Artificial Sequence
  Description of Artificial Sequence: Synthetic oligonucleotide
  Target: LAMA2; (-) strand; PAM type: YTN; PAM sequence: CTG
tacatcaccatcatcaaaga

SEQ ID NO: 192306 - DNA, 20 bp, Artificial Sequence
  Description of Artificial Sequence: Synthetic oligonucleotide
  Target: LAMA2; (-) strand; PAM type: YTN; PAM sequence: CTA
ataaacagaaaggacatcca

SEQ ID NO: 192307 - DNA, 20 bp, Artificial Sequence
  Description of Artificial Sequence: Synthetic oligonucleotide
  Target: LAMA2; (-) strand; PAM type: YTN; PAM sequence: TTA
gaaggaaaactaataaacag

SEQ ID NO: 192308 - DNA, 20 bp, Artificial Sequence
  Description of Artificial Sequence: Synthetic oligonucleotide
  Target: LAMA2; (-) strand; PAM type: YTN; PAM sequence: CTG
ttagaaggaaaactaataaa

SEQ ID NO: 192309 - DNA, 20 bp, Artificial Sequence
  Description of Artificial Sequence: Synthetic oligonucleotide
  Target: LAMA2; (-) strand; PAM type: YTN; PAM sequence: CTG
tctgttagaaggaaaactaa

SEQ ID NO: 192310 - DNA, 20 bp, Artificial Sequence
  Description of Artificial Sequence: Synthetic oligonucleotide
  Target: LAMA2; (-) strand; PAM type: YTN; PAM sequence: TTG
agggtcctgtctgttagaag

SEQ ID NO: 192311 - DNA, 20 bp, Artificial Sequence
  Description of Artificial Sequence: Synthetic oligonucleotide
  Target: LAMA2; (-) strand; PAM type: YTN; PAM sequence: CTG
cagttgagggtcctgtctgt

SEQ ID NO: 192312 - DNA, 20 bp, Artificial Sequence
  Description of Artificial Sequence: Synthetic oligonucleotide
  Target: LAMA2; (-) strand; PAM type: YTN; PAM sequence: CTC
caacagacctgcagttgagg

SEQ ID NO: 192313 - DNA, 20 bp, Artificial Sequence
  Description of Artificial Sequence: Synthetic oligonucleotide
  Target: LAMA2; (-) strand; PAM type: YTN; PAM sequence: CTC
acatggcagggtactccaac

SEQ ID NO: 192314 - DNA, 20 bp, Artificial Sequence
  Description of Artificial Sequence: Synthetic oligonucleotide
  Target: LAMA2; (-) strand; PAM type: YTN; PAM sequence: CTG
acacctcacatggcagggta

SEQ ID NO: 192315 - DNA, 20 bp, Artificial Sequence
  Description of Artificial Sequence: Synthetic oligonucleotide
  Target: LAMA2; (-) strand; PAM type: YTN; PAM sequence: CTG
ggaggcaccccccagcaggg

SEQ ID NO: 192316 - DNA, 20 bp, Artificial Sequence
  Description of Artificial Sequence: Synthetic oligonucleotide
  Target: LAMA2; (-) strand; PAM type: YTN; PAM sequence: CTA
actgggaggcaccccccagc

SEQ ID NO: 192317 - DNA, 20 bp, Artificial Sequence
  Description of Artificial Sequence: Synthetic oligonucleotide
  Target: LAMA2; (-) strand; PAM type: YTN; PAM sequence: CTG
acccccgagcagcctaactg

SEQ ID NO: 192318 - DNA, 20 bp, Artificial Sequence
  Description of Artificial Sequence: Synthetic oligonucleotide
  Target: LAMA2; (-) strand; PAM type: YTN; PAM sequence: CTG
acccctgacccccgagcagc

SEQ ID NO: 192319 - DNA, 20 bp, Artificial Sequence
  Description of Artificial Sequence: Synthetic oligonucleotide
  Target: LAMA2; (-) strand; PAM type: YTN; PAM sequence: CTC
aagtgggtccctgacccctg

SEQ ID NO: 192320 - DNA, 20 bp, Artificial Sequence
  Description of Artificial Sequence: Synthetic oligonucleotide
  Target: LAMA2; (-) strand; PAM type: YTN; PAM sequence: CTC
ctcaagtgggtccctgaccc

SEQ ID NO: 192321 - DNA, 20 bp, Artificial Sequence
  Description of Artificial Sequence: Synthetic oligonucleotide
  Target: LAMA2; (-) strand; PAM type: YTN; PAM sequence: CTG
cctcctcaagtgggtccctg

SEQ ID NO: 192322 - DNA, 20 bp, Artificial Sequence
  Description of Artificial Sequence: Synthetic oligonucleotide
  Target: LAMA2; (-) strand; PAM type: YTN; PAM sequence: CTA
agaacgggcagactgcctcc

SEQ ID NO: 192323 - DNA, 20 bp, Artificial Sequence
  Description of Artificial Sequence: Synthetic oligonucleotide
  Target: LAMA2; (-) strand; PAM type: YTN; PAM sequence: CTG
gagatctaagaacgggcaga

SEQ ID NO: 192324 - DNA, 20 bp, Artificial Sequence
  Description of Artificial Sequence: Synthetic oligonucleotide
  Target: LAMA2; (-) strand; PAM type: YTN; PAM sequence: CTC
ccagtacgcagctggagatc

SEQ ID NO: 192325 - DNA, 20 bp, Artificial Sequence
  Description of Artificial Sequence: Synthetic oligonucleotide
  Target: LAMA2; (-) strand; PAM type: YTN; PAM sequence: TTC
tcccagtacgcagctggaga

SEQ ID NO: 192326 - DNA, 20 bp, Artificial Sequence
  Description of Artificial Sequence: Synthetic oligonucleotide
  Target: LAMA2; (-) strand; PAM type: YTN; PAM sequence: TTG
aagagagcagtggttctccc

SEQ ID NO: 192327 - DNA, 20 bp, Artificial Sequence
  Description of Artificial Sequence: Synthetic oligonucleotide
  Target: LAMA2; (-) strand; PAM type: YTN; PAM sequence: TTT
gaagagagcagtggttctcc

SEQ ID NO: 192328 - DNA, 20 bp, Artificial Sequence
  Description of Artificial Sequence: Synthetic oligonucleotide
  Target: LAMA2; (-) strand; PAM type: YTN; PAM sequence: CTT
tgaagagagcagtggttctc

SEQ ID NO: 192329 - DNA, 20 bp, Artificial Sequence
  Description of Artificial Sequence: Synthetic oligonucleotide
  Target: LAMA2; (-) strand; PAM type: YTN; PAM sequence: CTG
acagctttgaagagagcagt

SEQ ID NO: 192330 - DNA, 20 bp, Artificial Sequence
  Description of Artificial Sequence: Synthetic oligonucleotide
  Target: LAMA2; (-) strand; PAM type: YTN; PAM sequence: CTG
tctgacagctttgaagagag

SEQ ID NO: 192331 - DNA, 20 bp, Artificial Sequence
  Description of Artificial Sequence: Synthetic oligonucleotide
  Target: LAMA2; (-) strand; PAM type: YTN; PAM sequence: TTA
aatgtccctgtctgacagct

SEQ ID NO: 192332 - DNA, 20 bp, Artificial Sequence
  Description of Artificial Sequence: Synthetic oligonucleotide
  Target: LAMA2; (-) strand; PAM type: YTN; PAM sequence: CTT
aaatgtccctgtctgacagc

SEQ ID NO: 192333 - DNA, 20 bp, Artificial Sequence
  Description of Artificial Sequence: Synthetic oligonucleotide
  Target: LAMA2; (-) strand; PAM type: YTN; PAM sequence: CTG
cagacttaaatgtccctgtc

SEQ ID NO: 192334 - DNA, 20 bp, Artificial Sequence
  Description of Artificial Sequence: Synthetic oligonucleotide
  Target: LAMA2; (-) strand; PAM type: YTN; PAM sequence: CTC
tgcagacttaaatgtccctg

SEQ ID NO: 192335 - DNA, 20 bp, Artificial Sequence
  Description of Artificial Sequence: Synthetic oligonucleotide
  Target: LAMA2; (-) strand; PAM type: YTN; PAM sequence: CTG
ggggcagggcacagacaaac

SEQ ID NO: 192336 - DNA, 20 bp, Artificial Sequence
  Description of Artificial Sequence: Synthetic oligonucleotide
  Target: LAMA2; (-) strand; PAM type: YTN; PAM sequence: CTC
tgggggcagggcacagacaa

SEQ ID NO: 192337 - DNA, 20 bp, Artificial Sequence
  Description of Artificial Sequence: Synthetic oligonucleotide
  Target: LAMA2; (-) strand; PAM type: YTN; PAM sequence: CTC
cacctctgggggcagggcac

SEQ ID NO: 192338 - DNA, 20 bp, Artificial Sequence
  Description of Artificial Sequence: Synthetic oligonucleotide
  Target: LAMA2; (-) strand; PAM type: YTN; PAM sequence: TTG
taggctccacctctgggggc

SEQ ID NO: 192339 - DNA, 20 bp, Artificial Sequence
  Description of Artificial Sequence: Synthetic oligonucleotide
  Target: LAMA2; (-) strand; PAM type: YTN; PAM sequence: TTT
gtaggctccacctctggggg

SEQ ID NO: 192340 - DNA, 20 bp, Artificial Sequence
  Description of Artificial Sequence: Synthetic oligonucleotide
  Target: LAMA2; (-) strand; PAM type: YTN; PAM sequence: CTT
tgtaggctccacctctgggg

SEQ ID NO: 192341 - DNA, 20 bp, Artificial Sequence
  Description of Artificial Sequence: Synthetic oligonucleotide
  Target: LAMA2; (-) strand; PAM type: YTN; PAM sequence: CTG
cctttgtaggctccacctct

SEQ ID NO: 192342 - DNA, 20 bp, Artificial Sequence
  Description of Artificial Sequence: Synthetic oligonucleotide
  Target: LAMA2; (-) strand; PAM type: YTN; PAM sequence: CTG
cctgcctttgtaggctccac

SEQ ID NO: 192343 - DNA, 20 bp, Artificial Sequence
  Description of Artificial Sequence: Synthetic oligonucleotide
  Target: LAMA2; (-) strand; PAM type: YTN; PAM sequence: CTC
aaggaggcctgcctgccttt

SEQ ID NO: 192344 - DNA, 20 bp, Artificial Sequence
  Description of Artificial Sequence: Synthetic oligonucleotide
  Target: LAMA2; (-) strand; PAM type: YTN; PAM sequence: CTG
ggtgtagcccaccacagctc

SEQ ID NO: 192345 - DNA, 20 bp, Artificial Sequence
  Description of Artificial Sequence: Synthetic oligonucleotide
  Target: LAMA2; (-) strand; PAM type: YTN; PAM sequence: CTC
gaactgggtgtagcccacca

SEQ ID NO: 192346 - DNA, 20 bp, Artificial Sequence
  Description of Artificial Sequence: Synthetic oligonucleotide
  Target: LAMA2; (-) strand; PAM type: YTN; PAM sequence: TTA
ggtaaacaaagcagccggga

SEQ ID NO: 192347 - DNA, 20 bp, Artificial Sequence
  Description of Artificial Sequence: Synthetic oligonucleotide
  Target: LAMA2; (-) strand; PAM type: YTN; PAM sequence: TTG
attaggtaaacaaagcagcc

SEQ ID NO: 192348 - DNA, 20 bp, Artificial Sequence
  Description of Artificial Sequence: Synthetic oligonucleotide
  Target: LAMA2; (-) strand; PAM type: YTN; PAM sequence: CTT
gattaggtaaacaaagcagc

SEQ ID NO: 192349 - DNA, 20 bp, Artificial Sequence
  Description of Artificial Sequence: Synthetic oligonucleotide
  Target: LAMA2; (-) strand; PAM type: YTN; PAM sequence: TTG
cccaggcttgattaggtaaa

SEQ ID NO: 192350 - DNA, 20 bp, Artificial Sequence
  Description of Artificial Sequence: Synthetic oligonucleotide
  Target: LAMA2; (-) strand; PAM type: YTN; PAM sequence: CTG
ccattgcccaggcttgatta

SEQ ID NO: 192351 - DNA, 20 bp, Artificial Sequence
  Description of Artificial Sequence: Synthetic oligonucleotide
  Target: LAMA2; (-) strand; PAM type: YTN; PAM sequence: CTG
ggggaggggcgtctgccatt

SEQ ID NO: 192352 - DNA, 20 bp, Artificial Sequence
  Description of Artificial Sequence: Synthetic oligonucleotide
  Target: LAMA2; (-) strand; PAM type: YTN; PAM sequence: CTG
caaggcggcagcgaggctgg

SEQ ID NO: 192353 - DNA, 20 bp, Artificial Sequence
  Description of Artificial Sequence: Synthetic oligonucleotide
  Target: LAMA2; (-) strand; PAM type: YTN; PAM sequence: CTG
agatcaaactgcaaggcggc

SEQ ID NO: 192354 - DNA, 20 bp, Artificial Sequence
  Description of Artificial Sequence: Synthetic oligonucleotide
  Target: LAMA2; (-) strand; PAM type: YTN; PAM sequence: CTA
gcacagcagtctgagatcaa

SEQ ID NO: 192355 - DNA, 20 bp, Artificial Sequence
  Description of Artificial Sequence: Synthetic oligonucleotide
  Target: LAMA2; (-) strand; PAM type: YTN; PAM sequence: TTG
ctagcacagcagtctgagat

SEQ ID NO: 192356 - DNA, 20 bp, Artificial Sequence
  Description of Artificial Sequence: Synthetic oligonucleotide
  Target: LAMA2; (-) strand; PAM type: YTN; PAM sequence: CTG
attgctagcacagcagtctg

SEQ ID NO: 192357 - DNA, 20 bp, Artificial Sequence
  Description of Artificial Sequence: Synthetic oligonucleotide
  Target: LAMA2; (-) strand; PAM type: YTN; PAM sequence: CTC
actgattgctagcacagcag

SEQ ID NO: 192358 - DNA, 20 bp, Artificial Sequence
  Description of Artificial Sequence: Synthetic oligonucleotide
  Target: LAMA2; (-) strand; PAM type: YTN; PAM sequence: CTA
cgcccacggagtctcactga

SEQ ID NO: 192359 - DNA, 20 bp, Artificial Sequence
  Description of Artificial Sequence: Synthetic oligonucleotide
  Target: LAMA2; (-) strand; PAM type: YTN; PAM sequence: CTG
ggaaggtactacgcccacgg

SEQ ID NO: 192360 - DNA, 20 bp, Artificial Sequence
  Description of Artificial Sequence: Synthetic oligonucleotide
  Target: LAMA2; (-) strand; PAM type: YTN; PAM sequence: CTG
gctgggaaggtactacgccc

SEQ ID NO: 192361 - DNA, 20 bp, Artificial Sequence
  Description of Artificial Sequence: Synthetic oligonucleotide
  Target: LAMA2; (-) strand; PAM type: YTN; PAM sequence: CTG
cacctggctgggaaggtact

SEQ ID NO: 192362 - DNA, 20 bp, Artificial Sequence
  Description of Artificial Sequence: Synthetic oligonucleotide
  Target: LAMA2; (-) strand; PAM type: YTN; PAM sequence: TTA
tatcctgcacctggctggga

SEQ ID NO: 192363 - DNA, 20 bp, Artificial Sequence
  Description of Artificial Sequence: Synthetic oligonucleotide
  Target: LAMA2; (-) strand; PAM type: YTN; PAM sequence: TTA
aaaaacggcgaaccacgaga

SEQ ID NO: 192364 - DNA, 20 bp, Artificial Sequence
  Description of Artificial Sequence: Synthetic oligonucleotide
  Target: LAMA2; (-) strand; PAM type: YTN; PAM sequence: CTT
aaaaaacggcgaaccacgag

SEQ ID NO: 192365 - DNA, 20 bp, Artificial Sequence
  Description of Artificial Sequence: Synthetic oligonucleotide
  Target: LAMA2; (-) strand; PAM type: YTN; PAM sequence: TTC
cgacgggcttaaaaaacggc

SEQ ID NO: 192366 - DNA, 20 bp, Artificial Sequence
  Description of Artificial Sequence: Synthetic oligonucleotide
  Target: LAMA2; (-) strand; PAM type: YTN; PAM sequence: TTT
ccgacgggcttaaaaaacgg

SEQ ID NO: 192367 - DNA, 20 bp, Artificial Sequence
  Description of Artificial Sequence: Synthetic oligonucleotide
  Target: LAMA2; (-) strand; PAM type: YTN; PAM sequence: CTT
tccgacgggcttaaaaaacg

SEQ ID NO: 192368 - DNA, 20 bp, Artificial Sequence
  Description of Artificial Sequence: Synthetic oligonucleotide
  Target: LAMA2; (-) strand; PAM type: YTN; PAM sequence: CTG
cgcctttccgacgggcttaa

SEQ ID NO: 192369 - DNA, 20 bp, Artificial Sequence
  Description of Artificial Sequence: Synthetic oligonucleotide
  Target: LAMA2; (-) strand; PAM type: YTN; PAM sequence: CTC
ccacccgaatactgcgcctt

SEQ ID NO: 192370 - DNA, 20 bp, Artificial Sequence
  Description of Artificial Sequence: Synthetic oligonucleotide
  Target: LAMA2; (-) strand; PAM type: YTN; PAM sequence: CTG
gtcactcccacccgaatact

SEQ ID NO: 192371 - DNA, 20 bp, Artificial Sequence
  Description of Artificial Sequence: Synthetic oligonucleotide
  Target: LAMA2; (-) strand; PAM type: YTN; PAM sequence: CTG
gaaaatctggtcactcccac

SEQ ID NO: 192372 - DNA, 20 bp, Artificial Sequence
  Description of Artificial Sequence: Synthetic oligonucleotide
  Target: LAMA2; (-) strand; PAM type: YTN; PAM sequence: CTA
gtcaaagaaaggggtgatgg

SEQ ID NO: 192373 - DNA, 20 bp, Artificial Sequence
  Description of Artificial Sequence: Synthetic oligonucleotide
  Target: LAMA2; (-) strand; PAM type: YTN; PAM sequence: TTC
ctagtcaaagaaaggggtga

SEQ ID NO: 192374 - DNA, 20 bp, Artificial Sequence
  Description of Artificial Sequence: Synthetic oligonucleotide
  Target: LAMA2; (-) strand; PAM type: YTN; PAM sequence: TTT
cctagtcaaagaaaggggtg

SEQ ID NO: 192375 - DNA, 20 bp, Artificial Sequence
  Description of Artificial Sequence: Synthetic oligonucleotide
  Target: LAMA2; (-) strand; PAM type: YTN; PAM sequence: CTT
tcctagtcaaagaaaggggt

SEQ ID NO: 192376 - DNA, 20 bp, Artificial Sequence
  Description of Artificial Sequence: Synthetic oligonucleotide
  Target: LAMA2; (-) strand; PAM type: YTN; PAM sequence: TTC
cctttcctagtcaaagaaag

SEQ ID NO: 192377 - DNA, 20 bp, Artificial Sequence
  Description of Artificial Sequence: Synthetic oligonucleotide
  Target: LAMA2; (-) strand; PAM type: YTN; PAM sequence: CTC
gggaagcgcaaggggtcagg

SEQ ID NO: 192378 - DNA, 20 bp, Artificial Sequence
  Description of Artificial Sequence: Synthetic oligonucleotide
  Target: LAMA2; (-) strand; PAM type: YTN; PAM sequence: CTC
actcgggaagcgcaaggggt

SEQ ID NO: 192379 - DNA, 20 bp, Artificial Sequence
  Description of Artificial Sequence: Synthetic oligonucleotide
  Target: LAMA2; (-) strand; PAM type: YTN; PAM sequence: TTG
cctcactcgggaagcgcaag

SEQ ID NO: 192380 - DNA, 20 bp, Artificial Sequence
  Description of Artificial Sequence: Synthetic oligonucleotide
  Target: LAMA2; (-) strand; PAM type: YTN; PAM sequence: CTA
aggaatgccagacagtgggc

SEQ ID NO: 192381 - DNA, 20 bp, Artificial Sequence
  Description of Artificial Sequence: Synthetic oligonucleotide
  Target: LAMA2; (-) strand; PAM type: YTN; PAM sequence: CTC
actaaggaatgccagacagt

SEQ ID NO: 192382 - DNA, 20 bp, Artificial Sequence
  Description of Artificial Sequence: Synthetic oligonucleotide
  Target: LAMA2; (-) strand; PAM type: YTN; PAM sequence: TTC
atctcactaaggaatgccag

SEQ ID NO: 192383 - DNA, 20 bp, Artificial Sequence
  Description of Artificial Sequence: Synthetic oligonucleotide
  Target: LAMA2; (-) strand; PAM type: YTN; PAM sequence: CTG
aggtaccgggttcatctcac

SEQ ID NO: 192384 - DNA, 20 bp, Artificial Sequence
  Description of Artificial Sequence: Synthetic oligonucleotide
  Target: LAMA2; (-) strand; PAM type: YTN; PAM sequence: TTC
catctgaggtaccgggttca

SEQ ID NO: 192385 - DNA, 20 bp, Artificial Sequence
  Description of Artificial Sequence: Synthetic oligonucleotide
  Target: LAMA2; (-) strand; PAM type: YTN; PAM sequence: TTT
ccatctgaggtaccgggttc

SEQ ID NO: 192386 - DNA, 20 bp, Artificial Sequence
  Description of Artificial Sequence: Synthetic oligonucleotide
  Target: LAMA2; (-) strand; PAM type: YTN; PAM sequence: TTT
tccatctgaggtaccgggtt

SEQ ID NO: 192387 - DNA, 20 bp, Artificial Sequence
  Description of Artificial Sequence: Synthetic oligonucleotide
  Target: LAMA2; (-) strand; PAM type: YTN; PAM sequence: CTT
ttccatctgaggtaccgggt

SEQ ID NO: 192388 - DNA, 20 bp, Artificial Sequence
  Description of Artificial Sequence: Synthetic oligonucleotide
  Target: LAMA2; (-) strand; PAM type: YTN; PAM sequence: CTG
cttttccatctgaggtaccg

SEQ ID NO: 192389 - DNA, 20 bp, Artificial Sequence
  Description of Artificial Sequence: Synthetic oligonucleotide
  Target: LAMA2; (-) strand; PAM type: YTN; PAM sequence: TTC
tgcttttccatctgaggtac

SEQ ID NO: 192390 - DNA, 20 bp, Artificial Sequence
  Description of Artificial Sequence: Synthetic oligonucleotide
  Target: LAMA2; (-) strand; PAM type: YTN; PAM sequence: TTT
ctgcttttccatctgaggta

SEQ ID NO: 192391 - DNA, 20 bp, Artificial Sequence
  Description of Artificial Sequence: Synthetic oligonucleotide
  Target: LAMA2; (-) strand; PAM type: YTN; PAM sequence: CTC
ccagcgtgagcgacgcagaa

SEQ ID NO: 192392 - DNA, 20 bp, Artificial Sequence
  Description of Artificial Sequence: Synthetic oligonucleotide
  Target: LAMA2; (-) strand; PAM type: YTN; PAM sequence: CTA
cagctcccagcgtgagcgac

SEQ ID NO: 192393 - DNA, 20 bp, Artificial Sequence
  Description of Artificial Sequence: Synthetic oligonucleotide
  Target: LAMA2; (-) strand; PAM type: YTN; PAM sequence: CTC
cggtctacagctcccagcgt

SEQ ID NO: 192394 - DNA, 20 bp, Artificial Sequence
  Description of Artificial Sequence: Synthetic oligonucleotide
  Target: LAMA2; (-) strand; PAM type: YTN; PAM sequence: TTA
ggggaggagccaagatggcc

SEQ ID NO: 192395 - DNA, 20 bp, Artificial Sequence
  Description of Artificial Sequence: Synthetic oligonucleotide
  Target: LAMA2; (-) strand; PAM type: YTN; PAM sequence: TTT
aggggaggagccaagatggc

SEQ ID NO: 192396 - DNA, 20 bp, Artificial Sequence
  Description of Artificial Sequence: Synthetic oligonucleotide
  Target: LAMA2; (-) strand; PAM type: YTN; PAM sequence: CTT
taggggaggagccaagatgg

SEQ ID NO: 192397 - DNA, 20 bp, Artificial Sequence
  Description of Artificial Sequence: Synthetic oligonucleotide
  Target: LAMA2; (-) strand; PAM type: YTN; PAM sequence: TTA
tacctttaggggaggagcca

SEQ ID NO: 192398 - DNA, 20 bp, Artificial Sequence
  Description of Artificial Sequence: Synthetic oligonucleotide
  Target: LAMA2; (-) strand; PAM type: YTN; PAM sequence: TTA
tagaaattatacctttaggg

SEQ ID NO: 192399 - DNA, 20 bp, Artificial Sequence
  Description of Artificial Sequence: Synthetic oligonucleotide
  Target: LAMA2; (-) strand; PAM type: YTN; PAM sequence: TTT
atagaaattatacctttagg

SEQ ID NO: 192400 - DNA, 20 bp, Artificial Sequence
  Description of Artificial Sequence: Synthetic oligonucleotide
  Target: LAMA2; (-) strand; PAM type: YTN; PAM sequence: TTT
tatagaaattatacctttag

SEQ ID NO: 192401 - DNA, 20 bp, Artificial Sequence
  Description of Artificial Sequence: Synthetic oligonucleotide
  Target: LAMA2; (-) strand; PAM type: YTN; PAM sequence: TTA
ttttatagaaattatacctt

SEQ ID NO: 192402 - DNA, 20 bp, Artificial Sequence
  Description of Artificial Sequence: Synthetic oligonucleotide
  Target: LAMA2; (-) strand; PAM type: YTN; PAM sequence: TTT
attttatagaaattatacct

SEQ ID NO: 192403 - DNA, 20 bp, Artificial Sequence
  Description of Artificial Sequence: Synthetic oligonucleotide
  Target: LAMA2; (-) strand; PAM type: YTN; PAM sequence: CTT
tattttatagaaattatacc

SEQ ID NO: 192404 - DNA, 20 bp, Artificial Sequence
  Description of Artificial Sequence: Synthetic oligonucleotide
  Target: LAMA2; (-) strand; PAM type: YTN; PAM sequence: TTA
tgtgtaaaaaaactttattt

SEQ ID NO: 192405 - DNA, 20 bp, Artificial Sequence
  Description of Artificial Sequence: Synthetic oligonucleotide
  Target: LAMA2; (-) strand; PAM type: YTN; PAM sequence: CTT
atgtgtaaaaaaactttatt

SEQ ID NO: 192406 - DNA, 20 bp, Artificial Sequence
  Description of Artificial Sequence: Synthetic oligonucleotide
  Target: LAMA2; (-) strand; PAM type: YTN; PAM sequence: TTC
ttatgtgtaaaaaaacttta

SEQ ID NO: 192407 - DNA, 20 bp, Artificial Sequence
  Description of Artificial Sequence: Synthetic oligonucleotide
  Target: LAMA2; (-) strand; PAM type: YTN; PAM sequence: TTT
cttatgtgtaaaaaaacttt

SEQ ID NO: 192408 - DNA, 20 bp, Artificial Sequence
  Description of Artificial Sequence: Synthetic oligonucleotide
  Target: LAMA2; (-) strand; PAM type: YTN; PAM sequence: TTG
tcaaatgtcacatacatttc

SEQ ID NO: 192409 - DNA, 20 bp, Artificial Sequence
  Description of Artificial Sequence: Synthetic oligonucleotide
  Target: LAMA2; (-) strand; PAM type: YTN; PAM sequence: TTT
gtcaaatgtcacatacattt

SEQ ID NO: 192410 - DNA, 20 bp, Artificial Sequence
  Description of Artificial Sequence: Synthetic oligonucleotide
  Target: LAMA2; (-) strand; PAM type: YTN; PAM sequence: TTA
tatgggtatatatatatttg

SEQ ID NO: 192411 - DNA, 20 bp, Artificial Sequence
  Description of Artificial Sequence: Synthetic oligonucleotide
  Target: LAMA2; (-) strand; PAM type: YTN; PAM sequence: CTG
acggttatatgggtatatat

SEQ ID NO: 192412 - DNA, 20 bp, Artificial Sequence
  Description of Artificial Sequence: Synthetic oligonucleotide
  Target: LAMA2; (-) strand; PAM type: YTN; PAM sequence: TTG
ggctgacggttatatgggta

SEQ ID NO: 192413 - DNA, 20 bp, Artificial Sequence
  Description of Artificial Sequence: Synthetic oligonucleotide
  Target: LAMA2; (-) strand; PAM type: YTN; PAM sequence: TTG
ttgggctgacggttatatgg

SEQ ID NO: 192414 - DNA, 20 bp, Artificial Sequence
  Description of Artificial Sequence: Synthetic oligonucleotide
  Target: LAMA2; (-) strand; PAM type: YTN; PAM sequence: TTG
ttgttgggctgacggttata

SEQ ID NO: 192415 - DNA, 20 bp, Artificial Sequence
  Description of Artificial Sequence: Synthetic oligonucleotide
  Target: LAMA2; (-) strand; PAM type: YTN; PAM sequence: TTG
ttgttgttgggctgacggtt

SEQ ID NO: 192416 - DNA, 20 bp, Artificial Sequence
  Description of Artificial Sequence: Synthetic oligonucleotide
  Target: LAMA2; (-) strand; PAM type: YTN; PAM sequence: TTT
gttgttgttgggctgacggt

SEQ ID NO: 192417 - DNA, 20 bp, Artificial Sequence
  Description of Artificial Sequence: Synthetic oligonucleotide
  Target: LAMA2; (-) strand; PAM type: YTN; PAM sequence: TTT
tgttgttgttgggctgacgg

SEQ ID NO: 192418 - DNA, 20 bp, Artificial Sequence
  Description of Artificial Sequence: Synthetic oligonucleotide
  Target: LAMA2; (-) strand; PAM type: YTN; PAM sequence: TTT
ttgttgttgttgggctgacg

SEQ ID NO: 192419 - DNA, 20 bp, Artificial Sequence
  Description of Artificial Sequence: Synthetic oligonucleotide
  Target: LAMA2; (-) strand; PAM type: YTN; PAM sequence: TTT
tttgttgttgttgggctgac

SEQ ID NO: 192420 - DNA, 20 bp, Artificial Sequence
  Description of Artificial Sequence: Synthetic oligonucleotide
  Target: LAMA2; (-) strand; PAM type: YTN; PAM sequence: CTA
ttttttgttgttgttgggct

SEQ ID NO: 192421 - DNA, 20 bp, Artificial Sequence
  Description of Artificial Sequence: Synthetic oligonucleotide
  Target: LAMA2; (-) strand; PAM type: YTN; PAM sequence: TTC
tattttttgttgttgttggg

SEQ ID NO: 192422 - DNA, 20 bp, Artificial Sequence
  Description of Artificial Sequence: Synthetic oligonucleotide
  Target: LAMA2; (-) strand; PAM type: YTN; PAM sequence: CTG
ggaaaggagaaatgttctat

SEQ ID NO: 192423 - DNA, 20 bp, Artificial Sequence
  Description of Artificial Sequence: Synthetic oligonucleotide
  Target: LAMA2; (-) strand; PAM type: YTN; PAM sequence: TTC
tgggaaaggagaaatgttct

SEQ ID NO: 192424 - DNA, 20 bp, Artificial Sequence
  Description of Artificial Sequence: Synthetic oligonucleotide
  Target: LAMA2; (-) strand; PAM type: YTN; PAM sequence: CTT
ctgggaaaggagaaatgttc

SEQ ID NO: 192425 - DNA, 20 bp, Artificial Sequence
  Description of Artificial Sequence: Synthetic oligonucleotide
  Target: LAMA2; (-) strand; PAM type: YTN; PAM sequence: CTG
tggaagaagacagcaaaaaa

SEQ ID NO: 192426 - DNA, 20 bp, Artificial Sequence
  Description of Artificial Sequence: Synthetic oligonucleotide
  Target: LAMA2; (-) strand; PAM type: YTN; PAM sequence: TTC
agggctgtggaagaagacag

SEQ ID NO: 192427 - DNA, 20 bp, Artificial Sequence
  Description of Artificial Sequence: Synthetic oligonucleotide
  Target: LAMA2; (-) strand; PAM type: YTN; PAM sequence: TTT
cagggctgtggaagaagaca

SEQ ID NO: 192428 - DNA, 20 bp, Artificial Sequence
  Description of Artificial Sequence: Synthetic oligonucleotide
  Target: LAMA2; (-) strand; PAM type: YTN; PAM sequence: CTA
atcagataagagtttcaggg

SEQ ID NO: 192429 - DNA, 20 bp, Artificial Sequence
  Description of Artificial Sequence: Synthetic oligonucleotide
  Target: LAMA2; (-) strand; PAM type: YTN; PAM sequence: CTA
agacagatgaaactaatcag

SEQ ID NO: 192430 - DNA, 20 bp, Artificial Sequence
  Description of Artificial Sequence: Synthetic oligonucleotide
  Target: LAMA2; (-) strand; PAM type: YTN; PAM sequence: TTC
taagacagatgaaactaatc

SEQ ID NO: 192431 - DNA, 20 bp, Artificial Sequence
  Description of Artificial Sequence: Synthetic oligonucleotide
  Target: LAMA2; (-) strand; PAM type: YTN; PAM sequence: TTC
atataaaggaaattctaaga

SEQ ID NO: 192432 - DNA, 20 bp, Artificial Sequence
  Description of Artificial Sequence: Synthetic oligonucleotide
  Target: LAMA2; (-) strand; PAM type: YTN; PAM sequence: TTT
catataaaggaaattctaag

SEQ ID NO: 192433 - DNA, 20 bp, Artificial Sequence
  Description of Artificial Sequence: Synthetic oligonucleotide
  Target: LAMA2; (-) strand; PAM type: YTN; PAM sequence: TTG
gtgtttcatataaaggaaat

SEQ ID NO: 192434 - DNA, 20 bp, Artificial Sequence
  Description of Artificial Sequence: Synthetic oligonucleotide
  Target: LAMA2; (-) strand; PAM type: YTN; PAM sequence: TTA
gttggtgtttcatataaagg

SEQ ID NO: 192435 - DNA, 20 bp, Artificial Sequence
  Description of Artificial Sequence: Synthetic oligonucleotide
  Target: LAMA2; (-) strand; PAM type: YTN; PAM sequence: CTT
agttggtgtttcatataaag

SEQ ID NO: 192436 - DNA, 20 bp, Artificial Sequence
  Description of Artificial Sequence: Synthetic oligonucleotide
  Target: LAMA2; (-) strand; PAM type: YTN; PAM sequence: CTG
ggtgaaagaaggcagacaga

SEQ ID NO: 192437 - DNA, 20 bp, Artificial Sequence
  Description of Artificial Sequence: Synthetic oligonucleotide
  Target: LAMA2; (-) strand; PAM type: YTN; PAM sequence: TTA
cagacagtagactgggtgaa

SEQ ID NO: 192438 - DNA, 20 bp, Artificial Sequence
  Description of Artificial Sequence: Synthetic oligonucleotide
  Target: LAMA2; (-) strand; PAM type: YTN; PAM sequence: TTT
acagacagtagactgggtga

SEQ ID NO: 192439 - DNA, 20 bp, Artificial Sequence
  Description of Artificial Sequence: Synthetic oligonucleotide
  Target: LAMA2; (-) strand; PAM type: YTN; PAM sequence: TTT
tacagacagtagactgggtg

SEQ ID NO: 192440 - DNA, 20 bp, Artificial Sequence
  Description of Artificial Sequence: Synthetic oligonucleotide
  Target: LAMA2; (-) strand; PAM type: YTN; PAM sequence: TTT
ttacagacagtagactgggt

SEQ ID NO: 192441 - DNA, 20 bp, Artificial Sequence
  Description of Artificial Sequence: Synthetic oligonucleotide
  Target: LAMA2; (-) strand; PAM type: YTN; PAM sequence: TTG
atggatgcaaaaacatgaat

SEQ ID NO: 192442 - DNA, 20 bp, Artificial Sequence
  Description of Artificial Sequence: Synthetic oligonucleotide
  Target: LAMA2; (-) strand; PAM type: YTN; PAM sequence: TTA
aaaggagcaaaatattgatg

SEQ ID NO: 192443 - DNA, 20 bp, Artificial Sequence
  Description of Artificial Sequence: Synthetic oligonucleotide
  Target: LAMA2; (-) strand; PAM type: YTN; PAM sequence: TTA
gcgattaaaaggagcaaaat

SEQ ID NO: 192444 - DNA, 20 bp, Artificial Sequence
  Description of Artificial Sequence: Synthetic oligonucleotide
  Target: LAMA2; (-) strand; PAM type: YTN; PAM sequence: TTC
aacggaaaatgttagcgatt

SEQ ID NO: 192445 - DNA, 20 bp, Artificial Sequence
  Description of Artificial Sequence: Synthetic oligonucleotide
  Target: LAMA2; (-) strand; PAM type: YTN; PAM sequence: TTC
attcaacggaaaatgttagc

SEQ ID NO: 192446 - DNA, 20 bp, Artificial Sequence
  Description of Artificial Sequence: Synthetic oligonucleotide
  Target: LAMA2; (-) strand; PAM type: YTN; PAM sequence: TTA
atgtcatcaacaggccaata

SEQ ID NO: 192447 - DNA, 20 bp, Artificial Sequence
  Description of Artificial Sequence: Synthetic oligonucleotide
  Target: LAMA2; (-) strand; PAM type: YTN; PAM sequence: CTT
aatgtcatcaacaggccaat

SEQ ID NO: 192448 - DNA, 20 bp, Artificial Sequence
  Description of Artificial Sequence: Synthetic oligonucleotide
  Target: LAMA2; (-) strand; PAM type: YTN; PAM sequence: CTG
gaaacagtcttaatgtcatc

SEQ ID NO: 192449 - DNA, 20 bp, Artificial Sequence
  Description of Artificial Sequence: Synthetic oligonucleotide
  Target: LAMA2; (-) strand; PAM type: YTN; PAM sequence: TTA
aaaactggaaacagtcttaa

SEQ ID NO: 192450 - DNA, 20 bp, Artificial Sequence
  Description of Artificial Sequence: Synthetic oligonucleotide
  Target: LAMA2; (-) strand; PAM type: YTN; PAM sequence: TTC
atgataattaaaaactggaa

SEQ ID NO: 192451 - DNA, 20 bp, Artificial Sequence
  Description of Artificial Sequence: Synthetic oligonucleotide
  Target: LAMA2; (-) strand; PAM type: YTN; PAM sequence: TTA
ttcatgataattaaaaactg

SEQ ID NO: 192452 - DNA, 20 bp, Artificial Sequence
  Description of Artificial Sequence: Synthetic oligonucleotide
  Target: LAMA2; (-) strand; PAM type: YTN; PAM sequence: TTT
attcatgataattaaaaact

SEQ ID NO: 192453 - DNA, 20 bp, Artificial Sequence
  Description of Artificial Sequence: Synthetic oligonucleotide
  Target: LAMA2; (-) strand; PAM type: YTN; PAM sequence: CTT
tattcatgataattaaaaac

SEQ ID NO: 192454 - DNA, 20 bp, Artificial Sequence
  Description of Artificial Sequence: Synthetic oligonucleotide
  Target: LAMA2; (-) strand; PAM type: YTN; PAM sequence: TTG
tatatagcaactttattcat

SEQ ID NO: 192455 - DNA, 20 bp, Artificial Sequence
  Description of Artificial Sequence: Synthetic oligonucleotide
  Target: LAMA2; (-) strand; PAM type: YTN; PAM sequence: CTT
gtatatagcaactttattca

SEQ ID NO: 192456 - DNA, 20 bp, Artificial Sequence
  Description of Artificial Sequence: Synthetic oligonucleotide
  Target: LAMA2; (-) strand; PAM type: YTN; PAM sequence: TTG
tacatgacttgtatatagca

SEQ ID NO: 192457 - DNA, 20 bp, Artificial Sequence
  Description of Artificial Sequence: Synthetic oligonucleotide
  Target: LAMA2; (-) strand; PAM type: YTN; PAM sequence: CTT
gtacatgacttgtatatagc

SEQ ID NO: 192458 - DNA, 20 bp, Artificial Sequence
  Description of Artificial Sequence: Synthetic oligonucleotide
  Target: LAMA2; (-) strand; PAM type: YTN; PAM sequence: CTC
ccagataaacatgacaaatg

SEQ ID NO: 192459 - DNA, 20 bp, Artificial Sequence
  Description of Artificial Sequence: Synthetic oligonucleotide
  Target: LAMA2; (-) strand; PAM type: YTN; PAM sequence: TTA
ctcccagataaacatgacaa

SEQ ID NO: 192460 - DNA, 20 bp, Artificial Sequence
  Description of Artificial Sequence: Synthetic oligonucleotide
  Target: LAMA2; (-) strand; PAM type: YTN; PAM sequence: TTT
actcccagataaacatgaca

SEQ ID NO: 192461 - DNA, 20 bp, Artificial Sequence
  Description of Artificial Sequence: Synthetic oligonucleotide
  Target: LAMA2; (-) strand; PAM type: YTN; PAM sequence: TTT
tactcccagataaacatgac

SEQ ID NO: 192462 - DNA, 20 bp, Artificial Sequence
  Description of Artificial Sequence: Synthetic oligonucleotide
  Target: LAMA2; (-) strand; PAM type: YTN; PAM sequence: TTC
catgcaacccaggaatttta

SEQ ID NO: 192463 - DNA, 20 bp, Artificial Sequence
  Description of Artificial Sequence: Synthetic oligonucleotide
  Target: LAMA2; (-) strand; PAM type: YTN; PAM sequence: TTT
ccatgcaacccaggaatttt

SEQ ID NO: 192464 - DNA, 20 bp, Artificial Sequence
  Description of Artificial Sequence: Synthetic oligonucleotide
  Target: LAMA2; (-) strand; PAM type: YTN; PAM sequence: TTT
tccatgcaacccaggaattt

SEQ ID NO: 192465 - DNA, 20 bp, Artificial Sequence
  Description of Artificial Sequence: Synthetic oligonucleotide
  Target: LAMA2; (-) strand; PAM type: YTN; PAM sequence: TTT
ttccatgcaacccaggaatt

SEQ ID NO: 192466 - DNA, 20 bp, Artificial Sequence
  Description of Artificial Sequence: Synthetic oligonucleotide
  Target: LAMA2; (-) strand; PAM type: YTN; PAM sequence: TTT
tttccatgcaacccaggaat

SEQ ID NO: 192467 - DNA, 20 bp, Artificial Sequence
  Description of Artificial Sequence: Synthetic oligonucleotide
  Target: LAMA2; (-) strand; PAM type: YTN; PAM sequence: TTA
aacgaacattttttccatgc

SEQ ID NO: 192468 - DNA, 20 bp, Artificial Sequence
  Description of Artificial Sequence: Synthetic oligonucleotide
  Target: LAMA2; (-) strand; PAM type: YTN; PAM sequence: TTA
taaaattaaacgaacatttt

SEQ ID NO: 192469 - DNA, 20 bp, Artificial Sequence
  Description of Artificial Sequence: Synthetic oligonucleotide
  Target: LAMA2; (-) strand; PAM type: YTN; PAM sequence: CTA
ttataaaattaaacgaacat

SEQ ID NO: 192470 - DNA, 20 bp, Artificial Sequence
  Description of Artificial Sequence: Synthetic oligonucleotide
  Target: LAMA2; (-) strand; PAM type: YTN; PAM sequence: TTG
tctattataaaattaaacga

SEQ ID NO: 192471 - DNA, 20 bp, Artificial Sequence
  Description of Artificial Sequence: Synthetic oligonucleotide
  Target: LAMA2; (-) strand; PAM type: YTN; PAM sequence: TTT
gtctattataaaattaaacg

SEQ ID NO: 192472 - DNA, 20 bp, Artificial Sequence
  Description of Artificial Sequence: Synthetic oligonucleotide
  Target: LAMA2; (-) strand; PAM type: YTN; PAM sequence: TTA
gaaaacaatttgtctattat

SEQ ID NO: 192473 - DNA, 20 bp, Artificial Sequence
  Description of Artificial Sequence: Synthetic oligonucleotide
  Target: LAMA2; (-) strand; PAM type: YTN; PAM sequence: TTT
agaaaacaatttgtctatta

SEQ ID NO: 192474 - DNA, 20 bp, Artificial Sequence
  Description of Artificial Sequence: Synthetic oligonucleotide
  Target: LAMA2; (-) strand; PAM type: YTN; PAM sequence: TTC
atttagaaaacaatttgtct

SEQ ID NO: 192475 - DNA, 20 bp, Artificial Sequence
  Description of Artificial Sequence: Synthetic oligonucleotide
  Target: LAMA2; (-) strand; PAM type: YTN; PAM sequence: CTT
catttagaaaacaatttgtc

SEQ ID NO: 192476 - DNA, 20 bp, Artificial Sequence
  Description of Artificial Sequence: Synthetic oligonucleotide
  Target: LAMA2; (-) strand; PAM type: YTN; PAM sequence: CTA
agatcatgccttcatttaga

SEQ ID NO: 192477 - DNA, 20 bp, Artificial Sequence
  Description of Artificial Sequence: Synthetic oligonucleotide
  Target: LAMA2; (-) strand; PAM type: YTN; PAM sequence: CTA
gactaagatcatgccttcat

SEQ ID NO: 192478 - DNA, 20 bp, Artificial Sequence
  Description of Artificial Sequence: Synthetic oligonucleotide
  Target: LAMA2; (-) strand; PAM type: YTN; PAM sequence: TTA
ctagactaagatcatgcctt

SEQ ID NO: 192479 - DNA, 20 bp, Artificial Sequence
  Description of Artificial Sequence: Synthetic oligonucleotide
  Target: LAMA2; (-) strand; PAM type: YTN; PAM sequence: TTG
atagaagtaaataaacatta

SEQ ID NO: 192480 - DNA, 20 bp, Artificial Sequence
  Description of Artificial Sequence: Synthetic oligonucleotide
  Target: LAMA2; (-) strand; PAM type: YTN; PAM sequence: TTA
ccaaacacatatgttgatag

SEQ ID NO: 192481 - DNA, 20 bp, Artificial Sequence
  Description of Artificial Sequence: Synthetic oligonucleotide
  Target: LAMA2; (-) strand; PAM type: YTN; PAM sequence: CTT
accaaacacatatgttgata

SEQ ID NO: 192482 - DNA, 20 bp, Artificial Sequence
  Description of Artificial Sequence: Synthetic oligonucleotide
  Target: LAMA2; (-) strand; PAM type: YTN; PAM sequence: TTA
acttaccaaacacatatgtt

SEQ ID NO: 192483 - DNA, 20 bp, Artificial Sequence
  Description of Artificial Sequence: Synthetic oligonucleotide
  Target: LAMA2; (-) strand; PAM type: YTN; PAM sequence: TTA
tccaaaaaattaacttacca

SEQ ID NO: 192484 - DNA, 20 bp, Artificial Sequence
  Description of Artificial Sequence: Synthetic oligonucleotide
  Target: LAMA2; (-) strand; PAM type: YTN; PAM sequence: TTC
attatccaaaaaattaactt

SEQ ID NO: 192485 - DNA, 20 bp, Artificial Sequence
  Description of Artificial Sequence: Synthetic oligonucleotide
  Target: LAMA2; (-) strand; PAM type: YTN; PAM sequence: TTA
cggtatcattcattatccaa

SEQ ID NO: 192486 - DNA, 20 bp, Artificial Sequence
  Description of Artificial Sequence: Synthetic oligonucleotide
  Target: LAMA2; (-) strand; PAM type: YTN; PAM sequence: TTG
tgtaaaaagagggagaaagg

SEQ ID NO: 192487 - DNA, 20 bp, Artificial Sequence
  Description of Artificial Sequence: Synthetic oligonucleotide
  Target: LAMA2; (-) strand; PAM type: YTN; PAM sequence: TTA
attgtgtaaaaagagggaga

SEQ ID NO: 192488 - DNA, 20 bp, Artificial Sequence
  Description of Artificial Sequence: Synthetic oligonucleotide
  Target: LAMA2; (-) strand; PAM type: YTN; PAM sequence: TTT
aattgtgtaaaaagagggag

SEQ ID NO: 192489 - DNA, 20 bp, Artificial Sequence
  Description of Artificial Sequence: Synthetic oligonucleotide
  Target: LAMA2; (-) strand; PAM type: YTN; PAM sequence: TTT
taattgtgtaaaaagaggga

SEQ ID NO: 192490 - DNA, 20 bp, Artificial Sequence
  Description of Artificial Sequence: Synthetic oligonucleotide
  Target: LAMA2; (-) strand; PAM type: YTN; PAM sequence: TTT
ttaattgtgtaaaaagaggg

SEQ ID NO: 192491 - DNA, 20 bp, Artificial Sequence
  Description of Artificial Sequence: Synthetic oligonucleotide
  Target: LAMA2; (-) strand; PAM type: YTN; PAM sequence: TTT
tttaattgtgtaaaaagagg

SEQ ID NO: 192492 - DNA, 20 bp, Artificial Sequence
  Description of Artificial Sequence: Synthetic oligonucleotide
  Target: LAMA2; (-) strand; PAM type: YTN; PAM sequence: TTA
gttttttaattgtgtaaaaa

SEQ ID NO: 192493 - DNA, 20 bp, Artificial Sequence
  Description of Artificial Sequence: Synthetic oligonucleotide
  Target: LAMA2; (-) strand; PAM type: YTN; PAM sequence: TTT
agttttttaattgtgtaaaa

SEQ ID NO: 192494 - DNA, 20 bp, Artificial Sequence
  Description of Artificial Sequence: Synthetic oligonucleotide
  Target: LAMA2; (-) strand; PAM type: YTN; PAM sequence: CTT
tagttttttaattgtgtaaa

SEQ ID NO: 192495 - DNA, 20 bp, Artificial Sequence
  Description of Artificial Sequence: Synthetic oligonucleotide
  Target: LAMA2; (-) strand; PAM type: YTN; PAM sequence: TTA
tctttagttttttaattgtg

SEQ ID NO: 192496 - DNA, 20 bp, Artificial Sequence
  Description of Artificial Sequence: Synthetic oligonucleotide
  Target: LAMA2; (-) strand; PAM type: YTN; PAM sequence: TTT
atctttagttttttaattgt

SEQ ID NO: 192497 - DNA, 20 bp, Artificial Sequence
  Description of Artificial Sequence: Synthetic oligonucleotide
  Target: LAMA2; (-) strand; PAM type: YTN; PAM sequence: TTT
tatctttagttttttaattg

SEQ ID NO: 192498 - DNA, 20 bp, Artificial Sequence
  Description of Artificial Sequence: Synthetic oligonucleotide
  Target: LAMA2; (-) strand; PAM type: YTN; PAM sequence: CTT
ttatctttagttttttaatt

SEQ ID NO: 192499 - DNA, 20 bp, Artificial Sequence
  Description of Artificial Sequence: Synthetic oligonucleotide
  Target: LAMA2; (-) strand; PAM type: YTN; PAM sequence: CTA
tagagccaacttttatcttt

SEQ ID NO: 192500 - DNA, 20 bp, Artificial Sequence
  Description of Artificial Sequence: Synthetic oligonucleotide
  Target: LAMA2; (-) strand; PAM type: YTN; PAM sequence: TTC
cctatagagccaacttttat

SEQ ID NO: 192501 - DNA, 20 bp, Artificial Sequence
  Description of Artificial Sequence: Synthetic oligonucleotide
  Target: LAMA2; (-) strand; PAM type: YTN; PAM sequence: TTT
ccctatagagccaactttta

SEQ ID NO: 192502 - DNA, 20 bp, Artificial Sequence
  Description of Artificial Sequence: Synthetic oligonucleotide
  Target: LAMA2; (-) strand; PAM type: YTN; PAM sequence: CTT
tccctatagagccaactttt

SEQ ID NO: 192503 - DNA, 20 bp, Artificial Sequence
  Description of Artificial Sequence: Synthetic oligonucleotide
  Target: LAMA2; (-) strand; PAM type: YTN; PAM sequence: TTG
ccagaaatgtaaaaaataaa

SEQ ID NO: 192504 - DNA, 20 bp, Artificial Sequence
  Description of Artificial Sequence: Synthetic oligonucleotide
  Target: LAMA2; (-) strand; PAM type: YTN; PAM sequence: TTT
gccagaaatgtaaaaaataa

SEQ ID NO: 192505 - DNA, 20 bp, Artificial Sequence
  Description of Artificial Sequence: Synthetic oligonucleotide
  Target: LAMA2; (-) strand; PAM type: YTN; PAM sequence: CTC
aaatttgccagaaatgtaaa

SEQ ID NO: 192506 - DNA, 20 bp, Artificial Sequence
  Description of Artificial Sequence: Synthetic oligonucleotide
  Target: LAMA2; (-) strand; PAM type: YTN; PAM sequence: TTA
tagaaatctcaaatttgcca

SEQ ID NO: 192507 - DNA, 20 bp, Artificial Sequence
  Description of Artificial Sequence: Synthetic oligonucleotide
  Target: LAMA2; (-) strand; PAM type: YTN; PAM sequence: TTT
atagaaatctcaaatttgcc

SEQ ID NO: 192508 - DNA, 20 bp, Artificial Sequence
  Description of Artificial Sequence: Synthetic oligonucleotide
  Target: LAMA2; (-) strand; PAM type: YTN; PAM sequence: TTT
tatagaaatctcaaatttgc

SEQ ID NO: 192509 - DNA, 20 bp, Artificial Sequence
  Description of Artificial Sequence: Synthetic oligonucleotide
  Target: LAMA2; (-) strand; PAM type: YTN; PAM sequence: CTA
tgaagaattttatagaaatc

SEQ ID NO: 192510 - DNA, 20 bp, Artificial Sequence
  Description of Artificial Sequence: Synthetic oligonucleotide
  Target: LAMA2; (-) strand; PAM type: YTN; PAM sequence: TTA
tatacctatgaagaatttta

SEQ ID NO: 192511 - DNA, 20 bp, Artificial Sequence
  Description of Artificial Sequence: Synthetic oligonucleotide
  Target: LAMA2; (-) strand; PAM type: YTN; PAM sequence: TTT
atatacctatgaagaatttt

SEQ ID NO: 192512 - DNA, 20 bp, Artificial Sequence
  Description of Artificial Sequence: Synthetic oligonucleotide
  Target: LAMA2; (-) strand; PAM type: YTN; PAM sequence: TTT
tatatacctatgaagaattt

SEQ ID NO: 192513 - DNA, 20 bp, Artificial Sequence
  Description of Artificial Sequence: Synthetic oligonucleotide
  Target: LAMA2; (-) strand; PAM type: YTN; PAM sequence: CTG
ttttatatacctatgaagaa

SEQ ID NO: 192514 - DNA, 20 bp, Artificial Sequence
  Description of Artificial Sequence: Synthetic oligonucleotide
  Target: LAMA2; (-) strand; PAM type: YTN; PAM sequence: CTC
tgttttatatacctatgaag

SEQ ID NO: 192515 - DNA, 20 bp, Artificial Sequence
  Description of Artificial Sequence: Synthetic oligonucleotide
  Target: LAMA2; (-) strand; PAM type: YTN; PAM sequence: TTA
ctctgttttatatacctatg

SEQ ID NO: 192516 - DNA, 20 bp, Artificial Sequence
  Description of Artificial Sequence: Synthetic oligonucleotide
  Target: LAMA2; (-) strand; PAM type: YTN; PAM sequence: CTT
actctgttttatatacctat

SEQ ID NO: 192517 - DNA, 20 bp, Artificial Sequence
  Description of Artificial Sequence: Synthetic oligonucleotide
  Target: LAMA2; (-) strand; PAM type: YTN; PAM sequence: TTA
aacaaaatatacttactctg

SEQ ID NO: 192518 - DNA, 20 bp, Artificial Sequence
  Description of Artificial Sequence: Synthetic oligonucleotide
  Target: LAMA2; (-) strand; PAM type: YTN; PAM sequence: TTA
aaagttaaacaaaatatact

SEQ ID NO: 192519 - DNA, 20 bp, Artificial Sequence
  Description of Artificial Sequence: Synthetic oligonucleotide
  Target: LAMA2; (-) strand; PAM type: YTN; PAM sequence: TTT
aaaagttaaacaaaatatac

SEQ ID NO: 192520 - DNA, 20 bp, Artificial Sequence
  Description of Artificial Sequence: Synthetic oligonucleotide
  Target: LAMA2; (-) strand; PAM type: YTN; PAM sequence: CTT
taaaagttaaacaaaatata

SEQ ID NO: 192521 - DNA, 20 bp, Artificial Sequence
  Description of Artificial Sequence: Synthetic oligonucleotide
  Target: LAMA2; (-) strand; PAM type: YTN; PAM sequence: CTG
ctttaaaagttaaacaaaat

SEQ ID NO: 192522 - DNA, 20 bp, Artificial Sequence
  Description of Artificial Sequence: Synthetic oligonucleotide
  Target: LAMA2; (-) strand; PAM type: YTN; PAM sequence: CTA
acaaatgaataataccctgc

SEQ ID NO: 192523 - DNA, 20 bp, Artificial Sequence
  Description of Artificial Sequence: Synthetic oligonucleotide
  Target: LAMA2; (-) strand; PAM type: YTN; PAM sequence: TTA
aacaactaacaaatgaataa

SEQ ID NO: 192524 - DNA, 20 bp, Artificial Sequence
  Description of Artificial Sequence: Synthetic oligonucleotide
  Target: LAMA2; (-) strand; PAM type: YTN; PAM sequence: TTT
aaacaactaacaaatgaata

SEQ ID NO: 192525 - DNA, 20 bp, Artificial Sequence
  Description of Artificial Sequence: Synthetic oligonucleotide
  Target: LAMA2; (-) strand; PAM type: YTN; PAM sequence: TTT
taaacaactaacaaatgaat

SEQ ID NO: 192526 - DNA, 20 bp, Artificial Sequence
  Description of Artificial Sequence: Synthetic oligonucleotide
  Target: LAMA2; (-) strand; PAM type: YTN; PAM sequence: TTA
tagtagattttaaacaacta

SEQ ID NO: 192527 - DNA, 20 bp, Artificial Sequence
  Description of Artificial Sequence: Synthetic oligonucleotide
  Target: LAMA2; (-) strand; PAM type: YTN; PAM sequence: TTA
cccataattatagtagattt

SEQ ID NO: 192528 - DNA, 20 bp, Artificial Sequence
  Description of Artificial Sequence: Synthetic oligonucleotide
  Target: LAMA2; (-) strand; PAM type: YTN; PAM sequence: CTT
acccataattatagtagatt

SEQ ID NO: 192529 - DNA, 20 bp, Artificial Sequence
  Description of Artificial Sequence: Synthetic oligonucleotide
  Target: LAMA2; (-) strand; PAM type: YTN; PAM sequence: CTG
ccttacccataattatagta

SEQ ID NO: 192530 - DNA, 20 bp, Artificial Sequence
  Description of Artificial Sequence: Synthetic oligonucleotide
  Target: LAMA2; (-) strand; PAM type: YTN; PAM sequence: TTG
tatcactgccttacccataa

SEQ ID NO: 192531 - DNA, 20 bp, Artificial Sequence
  Description of Artificial Sequence: Synthetic oligonucleotide
  Target: LAMA2; (-) strand; PAM type: YTN; PAM sequence: TTT
gtatcactgccttacccata

SEQ ID NO: 192532 - DNA, 20 bp, Artificial Sequence
  Description of Artificial Sequence: Synthetic oligonucleotide
  Target: LAMA2; (-) strand; PAM type: YTN; PAM sequence: TTT
tgtatcactgccttacccat

SEQ ID NO: 192533 - DNA, 20 bp, Artificial Sequence
  Description of Artificial Sequence: Synthetic oligonucleotide
  Target: LAMA2; (-) strand; PAM type: YTN; PAM sequence: CTT
ttgtatcactgccttaccca

SEQ ID NO: 192534 - DNA, 20 bp, Artificial Sequence
  Description of Artificial Sequence: Synthetic oligonucleotide
  Target: LAMA2; (-) strand; PAM type: YTN; PAM sequence: TTC
cttttgtatcactgccttac

SEQ ID NO: 192535 - DNA, 20 bp, Artificial Sequence
  Description of Artificial Sequence: Synthetic oligonucleotide
  Target: LAMA2; (-) strand; PAM type: YTN; PAM sequence: CTT
ccttttgtatcactgcctta

SEQ ID NO: 192536 - DNA, 20 bp, Artificial Sequence
  Description of Artificial Sequence: Synthetic oligonucleotide
  Target: LAMA2; (-) strand; PAM type: YTN; PAM sequence: TTC
ttccttttgtatcactgcct

SEQ ID NO: 192537 - DNA, 20 bp, Artificial Sequence
  Description of Artificial Sequence: Synthetic oligonucleotide
  Target: LAMA2; (-) strand; PAM type: YTN; PAM sequence: TTT
cttccttttgtatcactgcc

SEQ ID NO: 192538 - DNA, 20 bp, Artificial Sequence
  Description of Artificial Sequence: Synthetic oligonucleotide
  Target: LAMA2; (-) strand; PAM type: YTN; PAM sequence: TTT
tcttccttttgtatcactgc

SEQ ID NO: 192539 - DNA, 20 bp, Artificial Sequence
  Description of Artificial Sequence: Synthetic oligonucleotide
  Target: LAMA2; (-) strand; PAM type: YTN; PAM sequence: CTT
ttcttccttttgtatcactg

SEQ ID NO: 192540 - DNA, 20 bp, Artificial Sequence
  Description of Artificial Sequence: Synthetic oligonucleotide
  Target: LAMA2; (-) strand; PAM type: YTN; PAM sequence: TTC
ttttcttccttttgtatcac

SEQ ID NO: 192541 - DNA, 20 bp, Artificial Sequence
  Description of Artificial Sequence: Synthetic oligonucleotide
  Target: LAMA2; (-) strand; PAM type: YTN; PAM sequence: TTT
cttttcttccttttgtatca

SEQ ID NO: 192542 - DNA, 20 bp, Artificial Sequence
  Description of Artificial Sequence: Synthetic oligonucleotide
  Target: LAMA2; (-) strand; PAM type: YTN; PAM sequence: TTT
tcttttcttccttttgtatc

SEQ ID NO: 192543 - DNA, 20 bp, Artificial Sequence
  Description of Artificial Sequence: Synthetic oligonucleotide
  Target: LAMA2; (-) strand; PAM type: YTN; PAM sequence: TTT
ttcttttcttccttttgtat

SEQ ID NO: 192544 - DNA, 20 bp, Artificial Sequence
  Description of Artificial Sequence: Synthetic oligonucleotide
  Target: LAMA2; (-) strand; PAM type: YTN; PAM sequence: TTG
ggatttttcttttcttcctt

SEQ ID NO: 192545 - DNA, 20 bp, Artificial Sequence
  Description of Artificial Sequence: Synthetic oligonucleotide
  Target: LAMA2; (-) strand; PAM type: YTN; PAM sequence: TTA
atgaataaattgggattttt

SEQ ID NO: 192546 - DNA, 20 bp, Artificial Sequence
  Description of Artificial Sequence: Synthetic oligonucleotide
  Target: LAMA2; (-) strand; PAM type: YTN; PAM sequence: TTT
aatgaataaattgggatttt

SEQ ID NO: 192547 - DNA, 20 bp, Artificial Sequence
  Description of Artificial Sequence: Synthetic oligonucleotide
  Target: LAMA2; (-) strand; PAM type: YTN; PAM sequence: TTA
tttaatgaataaattgggat

SEQ ID NO: 192548 - DNA, 20 bp, Artificial Sequence
  Description of Artificial Sequence: Synthetic oligonucleotide
  Target: LAMA2; (-) strand; PAM type: YTN; PAM sequence: CTT
atttaatgaataaattggga

SEQ ID NO: 192549 - DNA, 20 bp, Artificial Sequence
  Description of Artificial Sequence: Synthetic oligonucleotide
  Target: LAMA2; (-) strand; PAM type: YTN; PAM sequence: TTC
ttatttaatgaataaattgg

SEQ ID NO: 192550 - DNA, 20 bp, Artificial Sequence
  Description of Artificial Sequence: Synthetic oligonucleotide
  Target: LAMA2; (-) strand; PAM type: YTN; PAM sequence: TTG
acacattcttatttaatgaa

SEQ ID NO: 192551 - DNA, 20 bp, Artificial Sequence
  Description of Artificial Sequence: Synthetic oligonucleotide
  Target: LAMA2; (-) strand; PAM type: YTN; PAM sequence: TTC
aaaatgcattgacacattct

SEQ ID NO: 192552 - DNA, 20 bp, Artificial Sequence
  Description of Artificial Sequence: Synthetic oligonucleotide
  Target: LAMA2; (-) strand; PAM type: YTN; PAM sequence: CTC
attcaaaatgcattgacaca

SEQ ID NO: 192553 - DNA, 20 bp, Artificial Sequence
  Description of Artificial Sequence: Synthetic oligonucleotide
  Target: LAMA2; (-) strand; PAM type: YTN; PAM sequence: TTC
tcattcaaaatgcattgaca

SEQ ID NO: 192554 - DNA, 20 bp, Artificial Sequence
  Description of Artificial Sequence: Synthetic oligonucleotide
  Target: LAMA2; (-) strand; PAM type: YTN; PAM sequence: CTT
ctcattcaaaatgcattgac

SEQ ID NO: 192555 - DNA, 20 bp, Artificial Sequence
  Description of Artificial Sequence: Synthetic oligonucleotide
  Target: LAMA2; (-) strand; PAM type: YTN; PAM sequence: TTA
aaatgacttctcattcaaaa

SEQ ID NO: 192556 - DNA, 20 bp, Artificial Sequence
  Description of Artificial Sequence: Synthetic oligonucleotide
  Target: LAMA2; (-) strand; PAM type: YTN; PAM sequence: TTT
aaaatgacttctcattcaaa

SEQ ID NO: 192557 - DNA, 20 bp, Artificial Sequence
  Description of Artificial Sequence: Synthetic oligonucleotide
  Target: LAMA2; (-) strand; PAM type: YTN; PAM sequence: TTG
gagtttaaaatgacttctca

SEQ ID NO: 192558 - DNA, 20 bp, Artificial Sequence
  Description of Artificial Sequence: Synthetic oligonucleotide
  Target: LAMA2; (-) strand; PAM type: YTN; PAM sequence: TTT
ggagtttaaaatgacttctc

SEQ ID NO: 192559 - DNA, 20 bp, Artificial Sequence
  Description of Artificial Sequence: Synthetic oligonucleotide
  Target: LAMA2; (-) strand; PAM type: YTN; PAM sequence: TTG
tatttggagtttaaaatgac

SEQ ID NO: 192560 - DNA, 20 bp, Artificial Sequence
  Description of Artificial Sequence: Synthetic oligonucleotide
  Target: LAMA2; (-) strand; PAM type: YTN; PAM sequence: TTT
gtatttggagtttaaaatga

SEQ ID NO: 192561 - DNA, 20 bp, Artificial Sequence
  Description of Artificial Sequence: Synthetic oligonucleotide
  Target: LAMA2; (-) strand; PAM type: YTN; PAM sequence: CTT
tgtatttggagtttaaaatg

SEQ ID NO: 192562 - DNA, 20 bp, Artificial Sequence
  Description of Artificial Sequence: Synthetic oligonucleotide
  Target: LAMA2; (-) strand; PAM type: YTN; PAM sequence: CTC
atctttgtatttggagttta

SEQ ID NO: 192563 - DNA, 20 bp, Artificial Sequence
  Description of Artificial Sequence: Synthetic oligonucleotide
  Target: LAMA2; (-) strand; PAM type: YTN; PAM sequence: TTG
ctcatctttgtatttggagt

SEQ ID NO: 192564 - DNA, 20 bp, Artificial Sequence
  Description of Artificial Sequence: Synthetic oligonucleotide
  Target: LAMA2; (-) strand; PAM type: YTN; PAM sequence: CTT
gctcatctttgtatttggag

SEQ ID NO: 192565 - DNA, 20 bp, Artificial Sequence
  Description of Artificial Sequence: Synthetic oligonucleotide
  Target: LAMA2; (-) strand; PAM type: YTN; PAM sequence: TTA
aaaaatcgtcttgctcatct

SEQ ID NO: 192566 - DNA, 20 bp, Artificial Sequence
  Description of Artificial Sequence: Synthetic oligonucleotide
  Target: LAMA2; (-) strand; PAM type: YTN; PAM sequence: CTG
aggttaaaaaatcgtcttgc

SEQ ID NO: 192567 - DNA, 20 bp, Artificial Sequence
  Description of Artificial Sequence: Synthetic oligonucleotide
  Target: LAMA2; (-) strand; PAM type: YTN; PAM sequence: TTC
ctgaggttaaaaaatcgtct

SEQ ID NO: 192568 - DNA, 20 bp, Artificial Sequence
  Description of Artificial Sequence: Synthetic oligonucleotide
  Target: LAMA2; (-) strand; PAM type: YTN; PAM sequence: CTA
tgccattcctgaggttaaaa

SEQ ID NO: 192569 - DNA, 20 bp, Artificial Sequence
  Description of Artificial Sequence: Synthetic oligonucleotide
  Target: LAMA2; (-) strand; PAM type: YTN; PAM sequence: CTA
ctatgccattcctgaggtta

SEQ ID NO: 192570 - DNA, 20 bp, Artificial Sequence
  Description of Artificial Sequence: Synthetic oligonucleotide
  Target: LAMA2; (-) strand; PAM type: YTN; PAM sequence: TTC
cctactatgccattcctgag

SEQ ID NO: 192571 - DNA, 20 bp, Artificial Sequence
  Description of Artificial Sequence: Synthetic oligonucleotide
  Target: LAMA2; (-) strand; PAM type: YTN; PAM sequence: TTT
ccctactatgccattcctga

SEQ ID NO: 192572 - DNA, 20 bp, Artificial Sequence
  Description of Artificial Sequence: Synthetic oligonucleotide
  Target: LAMA2; (-) strand; PAM type: YTN; PAM sequence: TTT
tccctactatgccattcctg

SEQ ID NO: 192573 - DNA, 20 bp, Artificial Sequence
  Description of Artificial Sequence: Synthetic oligonucleotide
  Target: LAMA2; (-) strand; PAM type: YTN; PAM sequence: TTT
ttccctactatgccattcct

SEQ ID NO: 192574 - DNA, 20 bp, Artificial Sequence
  Description of Artificial Sequence: Synthetic oligonucleotide
  Target: LAMA2; (-) strand; PAM type: YTN; PAM sequence: TTT
tttccctactatgccattcc

SEQ ID NO: 192575 - DNA, 20 bp, Artificial Sequence
  Description of Artificial Sequence: Synthetic oligonucleotide
  Target: LAMA2; (-) strand; PAM type: YTN; PAM sequence: CTT
ttttccctactatgccattc

SEQ ID NO: 192576 - DNA, 20 bp, Artificial Sequence
  Description of Artificial Sequence: Synthetic oligonucleotide
  Target: LAMA2; (-) strand; PAM type: YTN; PAM sequence: TTA
cttttttccctactatgcca

SEQ ID NO: 192577 - DNA, 20 bp, Artificial Sequence
  Description of Artificial Sequence: Synthetic oligonucleotide
  Target: LAMA2; (-) strand; PAM type: YTN; PAM sequence: CTT
acttttttccctactatgcc

SEQ ID NO: 192578 - DNA, 20 bp, Artificial Sequence
  Description of Artificial Sequence: Synthetic oligonucleotide
  Target: LAMA2; (-) strand; PAM type: YTN; PAM sequence: CTA
atgatatacatacacttact

SEQ ID NO: 192579 - DNA, 20 bp, Artificial Sequence
  Description of Artificial Sequence: Synthetic oligonucleotide
  Target: LAMA2; (-) strand; PAM type: YTN; PAM sequence: CTG
tatgaatctaatgatataca

SEQ ID NO: 192580 - DNA, 20 bp, Artificial Sequence
  Description of Artificial Sequence: Synthetic oligonucleotide
  Target: LAMA2; (-) strand; PAM type: YTN; PAM sequence: CTG
actgtatgaatctaatgata

SEQ ID NO: 192581 - DNA, 20 bp, Artificial Sequence
  Description of Artificial Sequence: Synthetic oligonucleotide
  Target: LAMA2; (-) strand; PAM type: YTN; PAM sequence: TTC
agcctgactgtatgaatcta

SEQ ID NO: 192582 - DNA, 20 bp, Artificial Sequence
  Description of Artificial Sequence: Synthetic oligonucleotide
  Target: LAMA2; (-) strand; PAM type: YTN; PAM sequence: TTC
cacattcagcctgactgtat

SEQ ID NO: 192583 - DNA, 20 bp, Artificial Sequence
  Description of Artificial Sequence: Synthetic oligonucleotide
  Target: LAMA2; (-) strand; PAM type: YTN; PAM sequence: TTT
ccacattcagcctgactgta

SEQ ID NO: 192584 - DNA, 20 bp, Artificial Sequence
  Description of Artificial Sequence: Synthetic oligonucleotide
  Target: LAMA2; (-) strand; PAM type: YTN; PAM sequence: CTT
tccacattcagcctgactgt

SEQ ID NO: 192585 - DNA, 20 bp, Artificial Sequence
  Description of Artificial Sequence: Synthetic oligonucleotide
  Target: LAMA2; (-) strand; PAM type: YTN; PAM sequence: TTA
aagccctttccacattcagc

SEQ ID NO: 192586 - DNA, 20 bp, Artificial Sequence
  Description of Artificial Sequence: Synthetic oligonucleotide
  Target: LAMA2; (-) strand; PAM type: YTN; PAM sequence: CTT
aaagccctttccacattcag

SEQ ID NO: 192587 - DNA, 20 bp, Artificial Sequence
  Description of Artificial Sequence: Synthetic oligonucleotide
  Target: LAMA2; (-) strand; PAM type: YTN; PAM sequence: TTC
ttaaagccctttccacattc

SEQ ID NO: 192588 - DNA, 20 bp, Artificial Sequence
  Description of Artificial Sequence: Synthetic oligonucleotide
  Target: LAMA2; (-) strand; PAM type: YTN; PAM sequence: TTT
cttaaagccctttccacatt

SEQ ID NO: 192589 - DNA, 20 bp, Artificial Sequence
  Description of Artificial Sequence: Synthetic oligonucleotide
  Target: LAMA2; (-) strand; PAM type: YTN; PAM sequence: CTT
tcttaaagccctttccacat

SEQ ID NO: 192590 - DNA, 20 bp, Artificial Sequence
  Description of Artificial Sequence: Synthetic oligonucleotide
  Target: LAMA2; (-) strand; PAM type: YTN; PAM sequence: TTA
ataactttcttaaagccctt

SEQ ID NO: 192591 - DNA, 20 bp, Artificial Sequence
  Description of Artificial Sequence: Synthetic oligonucleotide
  Target: LAMA2; (-) strand; PAM type: YTN; PAM sequence: TTT
aataactttcttaaagccct

SEQ ID NO: 192592 - DNA, 20 bp, Artificial Sequence
  Description of Artificial Sequence: Synthetic oligonucleotide
  Target: LAMA2; (-) strand; PAM type: YTN; PAM sequence: TTT
taataactttcttaaagccc

SEQ ID NO: 192593 - DNA, 20 bp, Artificial Sequence
  Description of Artificial Sequence: Synthetic oligonucleotide
  Target: LAMA2; (-) strand; PAM type: YTN; PAM sequence: TTC
cccagaatgtaaaaacaatt

SEQ ID NO: 192594 - DNA, 20 bp, Artificial Sequence
  Description of Artificial Sequence: Synthetic oligonucleotide
  Target: LAMA2; (-) strand; PAM type: YTN; PAM sequence: CTT
ccccagaatgtaaaaacaat

SEQ ID NO: 192595 - DNA, 20 bp, Artificial Sequence
  Description of Artificial Sequence: Synthetic oligonucleotide
  Target: LAMA2; (-) strand; PAM type: YTN; PAM sequence: CTA
cttccccagaatgtaaaaac

SEQ ID NO: 192596 - DNA, 20 bp, Artificial Sequence
  Description of Artificial Sequence: Synthetic oligonucleotide
  Target: LAMA2; (-) strand; PAM type: YTN; PAM sequence: TTC
tacttccccagaatgtaaaa

SEQ ID NO: 192597 - DNA, 20 bp, Artificial Sequence
  Description of Artificial Sequence: Synthetic oligonucleotide
  Target: LAMA2; (-) strand; PAM type: YTN; PAM sequence: TTT
ctacttccccagaatgtaaa

SEQ ID NO: 192598 - DNA, 20 bp, Artificial Sequence
  Description of Artificial Sequence: Synthetic oligonucleotide
  Target: LAMA2; (-) strand; PAM type: YTN; PAM sequence: TTA
gatggaaatgtttctacttc

SEQ ID NO: 192599 - DNA, 20 bp, Artificial Sequence
  Description of Artificial Sequence: Synthetic oligonucleotide
  Target: LAMA2; (-) strand; PAM type: YTN; PAM sequence: CTG
ttagatggaaatgtttctac

SEQ ID NO: 192600 - DNA, 20 bp, Artificial Sequence
  Description of Artificial Sequence: Synthetic oligonucleotide
  Target: LAMA2; (-) strand; PAM type: YTN; PAM sequence: TTC
ctgttagatggaaatgtttc

SEQ ID NO: 192601 - DNA, 20 bp, Artificial Sequence
  Description of Artificial Sequence: Synthetic oligonucleotide
  Target: LAMA2; (-) strand; PAM type: YTN; PAM sequence: CTG
ttcctgttagatggaaatgt

SEQ ID NO: 192602 - DNA, 20 bp, Artificial Sequence
  Description of Artificial Sequence: Synthetic oligonucleotide
  Target: LAMA2; (-) strand; PAM type: YTN; PAM sequence: CTG
ccctgttcctgttagatgga

SEQ ID NO: 192603 - DNA, 20 bp, Artificial Sequence
  Description of Artificial Sequence: Synthetic oligonucleotide
  Target: LAMA2; (-) strand; PAM type: YTN; PAM sequence: CTG
tgaaactgccctgttcctgt

SEQ ID NO: 192604 - DNA, 20 bp, Artificial Sequence
  Description of Artificial Sequence: Synthetic oligonucleotide
  Target: LAMA2; (-) strand; PAM type: YTN; PAM sequence: CTC
tgtgaaactgccctgttcct

SEQ ID NO: 192605 - DNA, 20 bp, Artificial Sequence
  Description of Artificial Sequence: Synthetic oligonucleotide
  Target: LAMA2; (-) strand; PAM type: YTN; PAM sequence: CTC
ctctgtgaaactgccctgtt

SEQ ID NO: 192606 - DNA, 20 bp, Artificial Sequence
  Description of Artificial Sequence: Synthetic oligonucleotide
  Target: LAMA2; (-) strand; PAM type: YTN; PAM sequence: TTC
caactcctctgtgaaactgc

SEQ ID NO: 192607 - DNA, 20 bp, Artificial Sequence
  Description of Artificial Sequence: Synthetic oligonucleotide
  Target: LAMA2; (-) strand; PAM type: YTN; PAM sequence: CTC
agtccaaattccaactcctc

SEQ ID NO: 192608 - DNA, 20 bp, Artificial Sequence
  Description of Artificial Sequence: Synthetic oligonucleotide
  Target: LAMA2; (-) strand; PAM type: YTN; PAM sequence: TTC
aaaactcagtccaaattcca

SEQ ID NO: 192609 - DNA, 20 bp, Artificial Sequence
  Description of Artificial Sequence: Synthetic oligonucleotide
  Target: LAMA2; (-) strand; PAM type: YTN; PAM sequence: CTG
ttcaaaactcagtccaaatt

SEQ ID NO: 192610 - DNA, 20 bp, Artificial Sequence
  Description of Artificial Sequence: Synthetic oligonucleotide
  Target: LAMA2; (-) strand; PAM type: YTN; PAM sequence: TTC
tgttcaaaactcagtccaaa

SEQ ID NO: 192611 - DNA, 20 bp, Artificial Sequence
  Description of Artificial Sequence: Synthetic oligonucleotide
  Target: LAMA2; (-) strand; PAM type: YTN; PAM sequence: CTT
ctgttcaaaactcagtccaa

SEQ ID NO: 192612 - DNA, 20 bp, Artificial Sequence
  Description of Artificial Sequence: Synthetic oligonucleotide
  Target: LAMA2; (-) strand; PAM type: YTN; PAM sequence: CTC
ttctgttcaaaactcagtcc

SEQ ID NO: 192613 - DNA, 20 bp, Artificial Sequence
  Description of Artificial Sequence: Synthetic oligonucleotide
  Target: LAMA2; (-) strand; PAM type: YTN; PAM sequence: TTC
tcttctgttcaaaactcagt

SEQ ID NO: 192614 - DNA, 20 bp, Artificial Sequence
  Description of Artificial Sequence: Synthetic oligonucleotide
  Target: LAMA2; (-) strand; PAM type: YTN; PAM sequence: CTG
cccatcgaaattctcttctg

SEQ ID NO: 192615 - DNA, 20 bp, Artificial Sequence
  Description of Artificial Sequence: Synthetic oligonucleotide
  Target: LAMA2; (-) strand; PAM type: YTN; PAM sequence: CTG
atctgcccatcgaaattctc

SEQ ID NO: 192616 - DNA, 20 bp, Artificial Sequence
  Description of Artificial Sequence: Synthetic oligonucleotide
  Target: LAMA2; (-) strand; PAM type: YTN; PAM sequence: TTC
ctgatctgcccatcgaaatt

SEQ ID NO: 192617 - DNA, 20 bp, Artificial Sequence
  Description of Artificial Sequence: Synthetic oligonucleotide
  Target: LAMA2; (-) strand; PAM type: YTN; PAM sequence: TTT
cctgatctgcccatcgaaat

SEQ ID NO: 192618 - DNA, 20 bp, Artificial Sequence
  Description of Artificial Sequence: Synthetic oligonucleotide
  Target: LAMA2; (-) strand; PAM type: YTN; PAM sequence: TTT
tcctgatctgcccatcgaaa

SEQ ID NO: 192619 - DNA, 20 bp, Artificial Sequence
  Description of Artificial Sequence: Synthetic oligonucleotide
  Target: LAMA2; (-) strand; PAM type: YTN; PAM sequence: CTT
ttcctgatctgcccatcgaa

SEQ ID NO: 192620 - DNA, 20 bp, Artificial Sequence
  Description of Artificial Sequence: Synthetic oligonucleotide
  Target: LAMA2; (-) strand; PAM type: YTN; PAM sequence: CTC
ttttcctgatctgcccatcg

SEQ ID NO: 192621 - DNA, 20 bp, Artificial Sequence
  Description of Artificial Sequence: Synthetic oligonucleotide
  Target: LAMA2; (-) strand; PAM type: YTN; PAM sequence: CTG
ctcttttcctgatctgccca

SEQ ID NO: 192622 - DNA, 20 bp, Artificial Sequence
  Description of Artificial Sequence: Synthetic oligonucleotide
  Target: LAMA2; (-) strand; PAM type: YTN; PAM sequence: CTG
aactgctcttttcctgatct

SEQ ID NO: 192623 - DNA, 20 bp, Artificial Sequence
  Description of Artificial Sequence: Synthetic oligonucleotide
  Target: LAMA2; (-) strand; PAM type: YTN; PAM sequence: CTC
ctgaactgctcttttcctga

SEQ ID NO: 192624 - DNA, 20 bp, Artificial Sequence
  Description of Artificial Sequence: Synthetic oligonucleotide
  Target: LAMA2; (-) strand; PAM type: YTN; PAM sequence: CTC
ctcctgaactgctcttttcc

SEQ ID NO: 192625 - DNA, 20 bp, Artificial Sequence
  Description of Artificial Sequence: Synthetic oligonucleotide
  Target: LAMA2; (-) strand; PAM type: YTN; PAM sequence: TTC
cctcctcctgaactgctctt

SEQ ID NO: 192626 - DNA, 20 bp, Artificial Sequence
  Description of Artificial Sequence: Synthetic oligonucleotide
  Target: LAMA2; (-) strand; PAM type: YTN; PAM sequence: CTC
cacagcccaccattccctcc

SEQ ID NO: 192627 - DNA, 20 bp, Artificial Sequence
  Description of Artificial Sequence: Synthetic oligonucleotide
  Target: LAMA2; (-) strand; PAM type: YTN; PAM sequence: CTG
gtcgcccatgctccacagcc

SEQ ID NO: 192628 - DNA, 20 bp, Artificial Sequence
  Description of Artificial Sequence: Synthetic oligonucleotide
  Target: LAMA2; (-) strand; PAM type: YTN; PAM sequence: TTC
tggtcgcccatgctccacag

SEQ ID NO: 192629 - DNA, 20 bp, Artificial Sequence
  Description of Artificial Sequence: Synthetic oligonucleotide
  Target: LAMA2; (-) strand; PAM type: YTN; PAM sequence: TTT
ctggtcgcccatgctccaca

SEQ ID NO: 192630 - DNA, 20 bp, Artificial Sequence
  Description of Artificial Sequence: Synthetic oligonucleotide
  Target: LAMA2; (-) strand; PAM type: YTN; PAM sequence: CTT
tctggtcgcccatgctccac

SEQ ID NO: 192631 - DNA, 20 bp, Artificial Sequence
  Description of Artificial Sequence: Synthetic oligonucleotide
  Target: LAMA2; (-) strand; PAM type: YTN; PAM sequence: CTG
cctttctggtcgcccatgct

SEQ ID NO: 192632 - DNA, 20 bp, Artificial Sequence
  Description of Artificial Sequence: Synthetic oligonucleotide
  Target: LAMA2; (-) strand; PAM type: YTN; PAM sequence: TTA
atctgcctttctggtcgccc

SEQ ID NO: 192633 - DNA, 20 bp, Artificial Sequence
  Description of Artificial Sequence: Synthetic oligonucleotide
  Target: LAMA2; (-) strand; PAM type: YTN; PAM sequence: CTT
aatctgcctttctggtcgcc

SEQ ID NO: 192634 - DNA, 20 bp, Artificial Sequence
  Description of Artificial Sequence: Synthetic oligonucleotide
  Target: LAMA2; (-) strand; PAM type: YTN; PAM sequence: TTA
acttaatctgcctttctggt

SEQ ID NO: 192635 - DNA, 20 bp, Artificial Sequence
  Description of Artificial Sequence: Synthetic oligonucleotide
  Target: LAMA2; (-) strand; PAM type: YTN; PAM sequence: TTT
aacttaatctgcctttctgg

SEQ ID NO: 192636 - DNA, 20 bp, Artificial Sequence
  Description of Artificial Sequence: Synthetic oligonucleotide
  Target: LAMA2; (-) strand; PAM type: YTN; PAM sequence: TTT
taacttaatctgcctttctg

SEQ ID NO: 192637 - DNA, 20 bp, Artificial Sequence
  Description of Artificial Sequence: Synthetic oligonucleotide
  Target: LAMA2; (-) strand; PAM type: YTN; PAM sequence: CTG
ttttaacttaatctgccttt

SEQ ID NO: 192638 - DNA, 20 bp, Artificial Sequence
  Description of Artificial Sequence: Synthetic oligonucleotide
  Target: LAMA2; (-) strand; PAM type: YTN; PAM sequence: TTG
tcaaccctgttttaacttaa

SEQ ID NO: 192639 - DNA, 20 bp, Artificial Sequence
  Description of Artificial Sequence: Synthetic oligonucleotide
  Target: LAMA2; (-) strand; PAM type: YTN; PAM sequence: TTT
gtcaaccctgttttaactta

SEQ ID NO: 192640 - DNA, 20 bp, Artificial Sequence
  Description of Artificial Sequence: Synthetic oligonucleotide
  Target: LAMA2; (-) strand; PAM type: YTN; PAM sequence: CTC
ccaatttgtcaaccctgttt

SEQ ID NO: 192641 - DNA, 20 bp, Artificial Sequence
  Description of Artificial Sequence: Synthetic oligonucleotide
  Target: LAMA2; (-) strand; PAM type: YTN; PAM sequence: TTC
tcccaatttgtcaaccctgt

SEQ ID NO: 192642 - DNA, 20 bp, Artificial Sequence
  Description of Artificial Sequence: Synthetic oligonucleotide
  Target: LAMA2; (-) strand; PAM type: YTN; PAM sequence: CTG
tgttctcccaatttgtcaac

SEQ ID NO: 192643 - DNA, 20 bp, Artificial Sequence
  Description of Artificial Sequence: Synthetic oligonucleotide
  Target: LAMA2; (-) strand; PAM type: YTN; PAM sequence: TTA
atcctgtgttctcccaattt

SEQ ID NO: 192644 - DNA, 20 bp, Artificial Sequence
  Description of Artificial Sequence: Synthetic oligonucleotide
  Target: LAMA2; (-) strand; PAM type: YTN; PAM sequence: CTT
aatcctgtgttctcccaatt

SEQ ID NO: 192645 - DNA, 20 bp, Artificial Sequence
  Description of Artificial Sequence: Synthetic oligonucleotide
  Target: LAMA2; (-) strand; PAM type: YTN; PAM sequence: TTC
cagtcccttaatcctgtgtt

SEQ ID NO: 192646 - DNA, 20 bp, Artificial Sequence
  Description of Artificial Sequence: Synthetic oligonucleotide
  Target: LAMA2; (-) strand; PAM type: YTN; PAM sequence: TTA
aattccagtcccttaatcct

SEQ ID NO: 192647 - DNA, 20 bp, Artificial Sequence
  Description of Artificial Sequence: Synthetic oligonucleotide
  Target: LAMA2; (-) strand; PAM type: YTN; PAM sequence: CTT
aaattccagtcccttaatcc

SEQ ID NO: 192648 - DNA, 20 bp, Artificial Sequence
  Description of Artificial Sequence: Synthetic oligonucleotide
  Target: LAMA2; (-) strand; PAM type: YTN; PAM sequence: CTA
aacttaaattccagtccctt

SEQ ID NO: 192649 - DNA, 20 bp, Artificial Sequence
  Description of Artificial Sequence: Synthetic oligonucleotide
  Target: LAMA2; (-) strand; PAM type: YTN; PAM sequence: TTA
aagcaaatctaaacttaaat

SEQ ID NO: 192650 - DNA, 20 bp, Artificial Sequence
  Description of Artificial Sequence: Synthetic oligonucleotide
  Target: LAMA2; (-) strand; PAM type: YTN; PAM sequence: TTA
ttaaagcaaatctaaactta

SEQ ID NO: 192651 - DNA, 20 bp, Artificial Sequence
  Description of Artificial Sequence: Synthetic oligonucleotide
  Target: LAMA2; (-) strand; PAM type: YTN; PAM sequence: TTT
attaaagcaaatctaaactt

SEQ ID NO: 192652 - DNA, 20 bp, Artificial Sequence
  Description of Artificial Sequence: Synthetic oligonucleotide
  Target: LAMA2; (-) strand; PAM type: YTN; PAM sequence: CTT
tattaaagcaaatctaaact

SEQ ID NO: 192653 - DNA, 20 bp, Artificial Sequence
  Description of Artificial Sequence: Synthetic oligonucleotide
  Target: LAMA2; (-) strand; PAM type: YTN; PAM sequence: TTC
tttattaaagcaaatctaaa

SEQ ID NO: 192654 - DNA, 20 bp, Artificial Sequence
  Description of Artificial Sequence: Synthetic oligonucleotide
  Target: LAMA2; (-) strand; PAM type: YTN; PAM sequence: TTT
ctttattaaagcaaatctaa

SEQ ID NO: 192655 - DNA, 20 bp, Artificial Sequence
  Description of Artificial Sequence: Synthetic oligonucleotide
  Target: LAMA2; (-) strand; PAM type: YTN; PAM sequence: TTT
tctttattaaagcaaatcta

SEQ ID NO: 192656 - DNA, 20 bp, Artificial Sequence
  Description of Artificial Sequence: Synthetic oligonucleotide
  Target: LAMA2; (-) strand; PAM type: YTN; PAM sequence: TTT
ttctttattaaagcaaatct

SEQ ID NO: 192657 - DNA, 20 bp, Artificial Sequence
  Description of Artificial Sequence: Synthetic oligonucleotide
  Target: LAMA2; (-) strand; PAM type: YTN; PAM sequence: CTC
atcacaaagtaacatttttc

SEQ ID NO: 192658 - DNA, 20 bp, Artificial Sequence
  Description of Artificial Sequence: Synthetic oligonucleotide
  Target: LAMA2; (-) strand; PAM type: YTN; PAM sequence: CTC
tcatcacaaagtaacatttt

SEQ ID NO: 192659 - DNA, 20 bp, Artificial Sequence
  Description of Artificial Sequence: Synthetic oligonucleotide
  Target: LAMA2; (-) strand; PAM type: YTN; PAM sequence: TTC
tctcatcacaaagtaacatt

SEQ ID NO: 192660 - DNA, 20 bp, Artificial Sequence
  Description of Artificial Sequence: Synthetic oligonucleotide
  Target: LAMA2; (-) strand; PAM type: YTN; PAM sequence: TTT
ctctcatcacaaagtaacat

SEQ ID NO: 192661 - DNA, 20 bp, Artificial Sequence
  Description of Artificial Sequence: Synthetic oligonucleotide
  Target: LAMA2; (-) strand; PAM type: YTN; PAM sequence: TTT
tctctcatcacaaagtaaca

SEQ ID NO: 192662 - DNA, 20 bp, Artificial Sequence
  Description of Artificial Sequence: Synthetic oligonucleotide
  Target: LAMA2; (-) strand; PAM type: YTN; PAM sequence: TTA
ttttctctcatcacaaagta

SEQ ID NO: 192663 - DNA, 20 bp, Artificial Sequence
  Description of Artificial Sequence: Synthetic oligonucleotide
  Target: LAMA2; (-) strand; PAM type: YTN; PAM sequence: CTT
attttctctcatcacaaagt

SEQ ID NO: 192664 - DNA, 20 bp, Artificial Sequence
  Description of Artificial Sequence: Synthetic oligonucleotide
  Target: LAMA2; (-) strand; PAM type: YTN; PAM sequence: TTA
gcttattttctctcatcaca

SEQ ID NO: 192665 - DNA, 20 bp, Artificial Sequence
  Description of Artificial Sequence: Synthetic oligonucleotide
  Target: LAMA2; (-) strand; PAM type: YTN; PAM sequence: TTT
agcttattttctctcatcac

SEQ ID NO: 192666 - DNA, 20 bp, Artificial Sequence
  Description of Artificial Sequence: Synthetic oligonucleotide
  Target: LAMA2; (-) strand; PAM type: YTN; PAM sequence: TTT
tagcttattttctctcatca

SEQ ID NO: 192667 - DNA, 20 bp, Artificial Sequence
  Description of Artificial Sequence: Synthetic oligonucleotide
  Target: LAMA2; (-) strand; PAM type: YTN; PAM sequence: TTT
ttagcttattttctctcatc

SEQ ID NO: 192668 - DNA, 20 bp, Artificial Sequence
  Description of Artificial Sequence: Synthetic oligonucleotide
  Target: LAMA2; (-) strand; PAM type: YTN; PAM sequence: TTA
atttttagcttattttctct

SEQ ID NO: 192669 - DNA, 20 bp, Artificial Sequence
  Description of Artificial Sequence: Synthetic oligonucleotide
  Target: LAMA2; (-) strand; PAM type: YTN; PAM sequence: TTT
aatttttagcttattttctc

SEQ ID NO: 192670 - DNA, 20 bp, Artificial Sequence
  Description of Artificial Sequence: Synthetic oligonucleotide
  Target: LAMA2; (-) strand; PAM type: YTN; PAM sequence: TTT
taatttttagcttattttct

SEQ ID NO: 192671 - DNA, 20 bp, Artificial Sequence
  Description of Artificial Sequence: Synthetic oligonucleotide
  Target: LAMA2; (-) strand; PAM type: YTN; PAM sequence: TTT
ttaatttttagcttattttc

SEQ ID NO: 192672 - DNA, 20 bp, Artificial Sequence
  Description of Artificial Sequence: Synthetic oligonucleotide
  Target: LAMA2; (-) strand; PAM type: YTN; PAM sequence: TTA
aatttttaatttttagctta

SEQ ID NO: 192673 - DNA, 20 bp, Artificial Sequence
  Description of Artificial Sequence: Synthetic oligonucleotide
  Target: LAMA2; (-) strand; PAM type: YTN; PAM sequence: TTT
aaatttttaatttttagctt

SEQ ID NO: 192674 - DNA, 20 bp, Artificial Sequence
  Description of Artificial Sequence: Synthetic oligonucleotide
  Target: LAMA2; (-) strand; PAM type: YTN; PAM sequence: TTT
taaatttttaatttttagct

SEQ ID NO: 192675 - DNA, 20 bp, Artificial Sequence
  Description of Artificial Sequence: Synthetic oligonucleotide
  Target: LAMA2; (-) strand; PAM type: YTN; PAM sequence: TTT
ttaaatttttaatttttagc

SEQ ID NO: 192676 - DNA, 20 bp, Artificial Sequence
  Description of Artificial Sequence: Synthetic oligonucleotide
  Target: LAMA2; (-) strand; PAM type: YTN; PAM sequence: TTG
gtttttaaatttttaatttt

SEQ ID NO: 192677 - DNA, 20 bp, Artificial Sequence
  Description of Artificial Sequence: Synthetic oligonucleotide
  Target: LAMA2; (-) strand; PAM type: YTN; PAM sequence: CTC
agagtggattggtttttaaa

SEQ ID NO: 192678 - DNA, 20 bp, Artificial Sequence
  Description of Artificial Sequence: Synthetic oligonucleotide
  Target: LAMA2; (-) strand; PAM type: YTN; PAM sequence: CTC
tcagagtggattggttttta

SEQ ID NO: 192679 - DNA, 20 bp, Artificial Sequence
  Description of Artificial Sequence: Synthetic oligonucleotide
  Target: LAMA2; (-) strand; PAM type: YTN; PAM sequence: TTA
atctctcagagtggattggt

SEQ ID NO: 192680 - DNA, 20 bp, Artificial Sequence
  Description of Artificial Sequence: Synthetic oligonucleotide
  Target: LAMA2; (-) strand; PAM type: YTN; PAM sequence: TTA
attaatctctcagagtggat

SEQ ID NO: 192681 - DNA, 20 bp, Artificial Sequence
  Description of Artificial Sequence: Synthetic oligonucleotide
  Target: LAMA2; (-) strand; PAM type: YTN; PAM sequence: TTT
aattaatctctcagagtgga

SEQ ID NO: 192682 - DNA, 20 bp, Artificial Sequence
  Description of Artificial Sequence: Synthetic oligonucleotide
  Target: LAMA2; (-) strand; PAM type: YTN; PAM sequence: CTT
taattaatctctcagagtgg

SEQ ID NO: 192683 - DNA, 20 bp, Artificial Sequence
  Description of Artificial Sequence: Synthetic oligonucleotide
  Target: LAMA2; (-) strand; PAM type: YTN; PAM sequence: TTC
actttaattaatctctcaga

SEQ ID NO: 192684 - DNA, 20 bp, Artificial Sequence
  Description of Artificial Sequence: Synthetic oligonucleotide
  Target: LAMA2; (-) strand; PAM type: YTN; PAM sequence: CTT
cactttaattaatctctcag

SEQ ID NO: 192685 - DNA, 20 bp, Artificial Sequence
  Description of Artificial Sequence: Synthetic oligonucleotide
  Target: LAMA2; (-) strand; PAM type: YTN; PAM sequence: TTA
gcagaccccatcttcacttt

SEQ ID NO: 192686 - DNA, 20 bp, Artificial Sequence
  Description of Artificial Sequence: Synthetic oligonucleotide
  Target: LAMA2; (-) strand; PAM type: YTN; PAM sequence: TTC
agtaacacattagcagaccc

SEQ ID NO: 192687 - DNA, 20 bp, Artificial Sequence
  Description of Artificial Sequence: Synthetic oligonucleotide
  Target: LAMA2; (-) strand; PAM type: YTN; PAM sequence: CTT
cagtaacacattagcagacc

SEQ ID NO: 192688 - DNA, 20 bp, Artificial Sequence
  Description of Artificial Sequence: Synthetic oligonucleotide
  Target: LAMA2; (-) strand; PAM type: YTN; PAM sequence: TTC
acttcagtaacacattagca

SEQ ID NO: 192689 - DNA, 20 bp, Artificial Sequence
  Description of Artificial Sequence: Synthetic oligonucleotide
  Target: LAMA2; (-) strand; PAM type: YTN; PAM sequence: CTG
cagttcacttcagtaacaca

SEQ ID NO: 192690 - DNA, 20 bp, Artificial Sequence
  Description of Artificial Sequence: Synthetic oligonucleotide
  Target: LAMA2; (-) strand; PAM type: YTN; PAM sequence: CTC
tgcagttcacttcagtaaca

SEQ ID NO: 192691 - DNA, 20 bp, Artificial Sequence
  Description of Artificial Sequence: Synthetic oligonucleotide
  Target: LAMA2; (-) strand; PAM type: YTN; PAM sequence: CTG
tactctgcagttcacttcag

SEQ ID NO: 192692 - DNA, 20 bp, Artificial Sequence
  Description of Artificial Sequence: Synthetic oligonucleotide
  Target: LAMA2; (-) strand; PAM type: YTN; PAM sequence: CTC
atcaatgccagtgactgtac

SEQ ID NO: 192693 - DNA, 20 bp, Artificial Sequence
  Description of Artificial Sequence: Synthetic oligonucleotide
  Target: LAMA2; (-) strand; PAM type: YTN; PAM sequence: CTA
gactcatcaatgccagtgac

SEQ ID NO: 192694 - DNA, 20 bp, Artificial Sequence
  Description of Artificial Sequence: Synthetic oligonucleotide
  Target: LAMA2; (-) strand; PAM type: YTN; PAM sequence: CTC
acagcatctagactcatcaa

SEQ ID NO: 192695 - DNA, 20 bp, Artificial Sequence
  Description of Artificial Sequence: Synthetic oligonucleotide
  Target: LAMA2; (-) strand; PAM type: YTN; PAM sequence: TTC
tcacagcatctagactcatc

SEQ ID NO: 192696 - DNA, 20 bp, Artificial Sequence
  Description of Artificial Sequence: Synthetic oligonucleotide
  Target: LAMA2; (-) strand; PAM type: YTN; PAM sequence: TTT
ctcacagcatctagactcat

SEQ ID NO: 192697 - DNA, 20 bp, Artificial Sequence
  Description of Artificial Sequence: Synthetic oligonucleotide
  Target: LAMA2; (-) strand; PAM type: YTN; PAM sequence: CTT
tctcacagcatctagactca

SEQ ID NO: 192698 - DNA, 20 bp, Artificial Sequence
  Description of Artificial Sequence: Synthetic oligonucleotide
  Target: LAMA2; (-) strand; PAM type: YTN; PAM sequence: CTA
atgatctttctcacagcatc

SEQ ID NO: 192699 - DNA, 20 bp, Artificial Sequence
  Description of Artificial Sequence: Synthetic oligonucleotide
  Target: LAMA2; (-) strand; PAM type: YTN; PAM sequence: TTG
tcaatgcgctaatgatcttt

SEQ ID NO: 192700 - DNA, 20 bp, Artificial Sequence
  Description of Artificial Sequence: Synthetic oligonucleotide
  Target: LAMA2; (-) strand; PAM type: YTN; PAM sequence: TTA
gaattgtcaatgcgctaatg

SEQ ID NO: 192701 - DNA, 20 bp, Artificial Sequence
  Description of Artificial Sequence: Synthetic oligonucleotide
  Target: LAMA2; (-) strand; PAM type: YTN; PAM sequence: CTT
agaattgtcaatgcgctaat

SEQ ID NO: 192702 - DNA, 20 bp, Artificial Sequence
  Description of Artificial Sequence: Synthetic oligonucleotide
  Target: LAMA2; (-) strand; PAM type: YTN; PAM sequence: CTA
cttagaattgtcaatgcgct

SEQ ID NO: 192703 - DNA, 20 bp, Artificial Sequence
  Description of Artificial Sequence: Synthetic oligonucleotide
  Target: LAMA2; (-) strand; PAM type: YTN; PAM sequence: CTC
cagctacttagaattgtcaa

SEQ ID NO: 192704 - DNA, 20 bp, Artificial Sequence
  Description of Artificial Sequence: Synthetic oligonucleotide
  Target: LAMA2; (-) strand; PAM type: YTN; PAM sequence: TTA
aaaggtctccagctacttag

SEQ ID NO: 192705 - DNA, 20 bp, Artificial Sequence
  Description of Artificial Sequence: Synthetic oligonucleotide
  Target: LAMA2; (-) strand; PAM type: YTN; PAM sequence: TTT
aaaaggtctccagctactta

SEQ ID NO: 192706 - DNA, 20 bp, Artificial Sequence
  Description of Artificial Sequence: Synthetic oligonucleotide
  Target: LAMA2; (-) strand; PAM type: YTN; PAM sequence: TTG
aaagtttaaaaggtctccag

SEQ ID NO: 192707 - DNA, 20 bp, Artificial Sequence
  Description of Artificial Sequence: Synthetic oligonucleotide
  Target: LAMA2; (-) strand; PAM type: YTN; PAM sequence: CTA
aaaatatggaagttgaaagt

SEQ ID NO: 192708 - DNA, 20 bp, Artificial Sequence
  Description of Artificial Sequence: Synthetic oligonucleotide
  Target: LAMA2; (-) strand; PAM type: YTN; PAM sequence: TTA
ctaaaaatatggaagttgaa

SEQ ID NO: 192709 - DNA, 20 bp, Artificial Sequence
  Description of Artificial Sequence: Synthetic oligonucleotide
  Target: LAMA2; (-) strand; PAM type: YTN; PAM sequence: TTG
aaaaattactaaaaatatgg

SEQ ID NO: 192710 - DNA, 20 bp, Artificial Sequence
  Description of Artificial Sequence: Synthetic oligonucleotide
  Target: LAMA2; (-) strand; PAM type: YTN; PAM sequence: TTT
gaaaaattactaaaaatatg

SEQ ID NO: 192711 - DNA, 20 bp, Artificial Sequence
  Description of Artificial Sequence: Synthetic oligonucleotide
  Target: LAMA2; (-) strand; PAM type: YTN; PAM sequence: TTA
atcacatttgaaaaattact

SEQ ID NO: 192712 - DNA, 20 bp, Artificial Sequence
  Description of Artificial Sequence: Synthetic oligonucleotide
  Target: LAMA2; (-) strand; PAM type: YTN; PAM sequence: CTA
aattaatcacatttgaaaaa

SEQ ID NO: 192713 - DNA, 20 bp, Artificial Sequence
  Description of Artificial Sequence: Synthetic oligonucleotide
  Target: LAMA2; (-) strand; PAM type: YTN; PAM sequence: TTC
atgggctaaattaatcacat

SEQ ID NO: 192714 - DNA, 20 bp, Artificial Sequence
  Description of Artificial Sequence: Synthetic oligonucleotide
  Target: LAMA2; (-) strand; PAM type: YTN; PAM sequence: TTT
catgggctaaattaatcaca

SEQ ID NO: 192715 - DNA, 20 bp, Artificial Sequence
  Description of Artificial Sequence: Synthetic oligonucleotide
  Target: LAMA2; (-) strand; PAM type: YTN; PAM sequence: TTT
tcatgggctaaattaatcac

SEQ ID NO: 192716 - DNA, 20 bp, Artificial Sequence
  Description of Artificial Sequence: Synthetic oligonucleotide
  Target: LAMA2; (-) strand; PAM type: YTN; PAM sequence: TTA
tatcaatgatggggtgtgtt

SEQ ID NO: 192717 - DNA, 20 bp, Artificial Sequence
  Description of Artificial Sequence: Synthetic oligonucleotide
  Target: LAMA2; (-) strand; PAM type: YTN; PAM sequence: TTG
gttatatcaatgatggggtg

SEQ ID NO: 192718 - DNA, 20 bp, Artificial Sequence
  Description of Artificial Sequence: Synthetic oligonucleotide
  Target: LAMA2; (-) strand; PAM type: YTN; PAM sequence: TTA
taatgattggttatatcaat

SEQ ID NO: 192719 - DNA, 20 bp, Artificial Sequence
  Description of Artificial Sequence: Synthetic oligonucleotide
  Target: LAMA2; (-) strand; PAM type: YTN; PAM sequence: TTA
gagacaaagtacaccagtcg

SEQ ID NO: 192720 - DNA, 20 bp, Artificial Sequence
  Description of Artificial Sequence: Synthetic oligonucleotide
  Target: LAMA2; (-) strand; PAM type: YTN; PAM sequence: TTT
agagacaaagtacaccagtc

SEQ ID NO: 192721 - DNA, 20 bp, Artificial Sequence
  Description of Artificial Sequence: Synthetic oligonucleotide
  Target: LAMA2; (-) strand; PAM type: YTN; PAM sequence: TTC
atagaaatgtgtcatttaga

SEQ ID NO: 192722 - DNA, 20 bp, Artificial Sequence
  Description of Artificial Sequence: Synthetic oligonucleotide
  Target: LAMA2; (-) strand; PAM type: YTN; PAM sequence: TTT
catagaaatgtgtcatttag

SEQ ID NO: 192723 - DNA, 20 bp, Artificial Sequence
  Description of Artificial Sequence: Synthetic oligonucleotide
  Target: LAMA2; (-) strand; PAM type: YTN; PAM sequence: TTT
tcatagaaatgtgtcattta

SEQ ID NO: 192724 - DNA, 20 bp, Artificial Sequence
  Description of Artificial Sequence: Synthetic oligonucleotide
  Target: LAMA2; (-) strand; PAM type: YTN; PAM sequence: TTT
ttcatagaaatgtgtcattt

SEQ ID NO: 192725 - DNA, 20 bp, Artificial Sequence
  Description of Artificial Sequence: Synthetic oligonucleotide
  Target: LAMA2; (-) strand; PAM type: YTN; PAM sequence: TTT
tttcatagaaatgtgtcatt

SEQ ID NO: 192726 - DNA, 20 bp, Artificial Sequence
  Description of Artificial Sequence: Synthetic oligonucleotide
  Target: LAMA2; (-) strand; PAM type: YTN; PAM sequence: TTT
ttttcatagaaatgtgtcat

SEQ ID NO: 192727 - DNA, 20 bp, Artificial Sequence
  Description of Artificial Sequence: Synthetic oligonucleotide
  Target: LAMA2; (-) strand; PAM type: YTN; PAM sequence: CTT
tttttcatagaaatgtgtca

SEQ ID NO: 192728 - DNA, 20 bp, Artificial Sequence
  Description of Artificial Sequence: Synthetic oligonucleotide
  Target: LAMA2; (-) strand; PAM type: YTN; PAM sequence: CTG
atctttttttcatagaaatg

SEQ ID NO: 192729 - DNA, 20 bp, Artificial Sequence
  Description of Artificial Sequence: Synthetic oligonucleotide
  Target: LAMA2; (-) strand; PAM type: YTN; PAM sequence: TTA
gtgaaactgatctttttttc

SEQ ID NO: 192730 - DNA, 20 bp, Artificial Sequence
  Description of Artificial Sequence: Synthetic oligonucleotide
  Target: LAMA2; (-) strand; PAM type: YTN; PAM sequence: CTG
aggagttagtgaaactgatc

SEQ ID NO: 192731 - DNA, 20 bp, Artificial Sequence
  Description of Artificial Sequence: Synthetic oligonucleotide
  Target: LAMA2; (-) strand; PAM type: YTN; PAM sequence: TTA
tgaaaagtcacagccagaag

SEQ ID NO: 192732 - DNA, 20 bp, Artificial Sequence
  Description of Artificial Sequence: Synthetic oligonucleotide
  Target: LAMA2; (-) strand; PAM type: YTN; PAM sequence: TTT
atgaaaagtcacagccagaa

SEQ ID NO: 192733 - DNA, 20 bp, Artificial Sequence
  Description of Artificial Sequence: Synthetic oligonucleotide
  Target: LAMA2; (-) strand; PAM type: YTN; PAM sequence: TTC
atacagacatttatgaaaag

SEQ ID NO: 192734 - DNA, 20 bp, Artificial Sequence
  Description of Artificial Sequence: Synthetic oligonucleotide
  Target: LAMA2; (-) strand; PAM type: YTN; PAM sequence: TTA
cgttcatacagacatttatg

SEQ ID NO: 192735 - DNA, 20 bp, Artificial Sequence
  Description of Artificial Sequence: Synthetic oligonucleotide
  Target: LAMA2; (-) strand; PAM type: YTN; PAM sequence: CTT
acgttcatacagacatttat

SEQ ID NO: 192736 - DNA, 20 bp, Artificial Sequence
  Description of Artificial Sequence: Synthetic oligonucleotide
  Target: LAMA2; (-) strand; PAM type: YTN; PAM sequence: TTA
tagcttacgttcatacagac

SEQ ID NO: 192737 - DNA, 20 bp, Artificial Sequence
  Description of Artificial Sequence: Synthetic oligonucleotide
  Target: LAMA2; (-) strand; PAM type: YTN; PAM sequence: CTA
aacaacaatgaagcaaagtt

SEQ ID NO: 192738 - DNA, 20 bp, Artificial Sequence
  Description of Artificial Sequence: Synthetic oligonucleotide
  Target: LAMA2; (-) strand; PAM type: YTN; PAM sequence: TTA
atgtcatctaaacaacaatg

SEQ ID NO: 192739 - DNA, 20 bp, Artificial Sequence
  Description of Artificial Sequence: Synthetic oligonucleotide
  Target: LAMA2; (-) strand; PAM type: YTN; PAM sequence: TTA
ttaatgtcatctaaacaaca

SEQ ID NO: 192740 - DNA, 20 bp, Artificial Sequence
  Description of Artificial Sequence: Synthetic oligonucleotide
  Target: LAMA2; (-) strand; PAM type: YTN; PAM sequence: TTA
aaatgcccatagtcagtaag

SEQ ID NO: 192741 - DNA, 20 bp, Artificial Sequence
  Description of Artificial Sequence: Synthetic oligonucleotide
  Target: LAMA2; (-) strand; PAM type: YTN; PAM sequence: TTG
tattaaaatgcccatagtca

SEQ ID NO: 192742 - DNA, 20 bp, Artificial Sequence
  Description of Artificial Sequence: Synthetic oligonucleotide
  Target: LAMA2; (-) strand; PAM type: YTN; PAM sequence: CTT
gtattaaaatgcccatagtc

SEQ ID NO: 192743 - DNA, 20 bp, Artificial Sequence
  Description of Artificial Sequence: Synthetic oligonucleotide
  Target: LAMA2; (-) strand; PAM type: YTN; PAM sequence: TTA
aaatggaatcttgtattaaa

SEQ ID NO: 192744 - DNA, 20 bp, Artificial Sequence
  Description of Artificial Sequence: Synthetic oligonucleotide
  Target: LAMA2; (-) strand; PAM type: YTN; PAM sequence: TTT
aaaatggaatcttgtattaa

SEQ ID NO: 192745 - DNA, 20 bp, Artificial Sequence
  Description of Artificial Sequence: Synthetic oligonucleotide
  Target: LAMA2; (-) strand; PAM type: YTN; PAM sequence: TTT
taaaatggaatcttgtatta

SEQ ID NO: 192746 - DNA, 20 bp, Artificial Sequence
  Description of Artificial Sequence: Synthetic oligonucleotide
  Target: LAMA2; (-) strand; PAM type: YTN; PAM sequence: CTT
ttaaaatggaatcttgtatt

SEQ ID NO: 192747 - DNA, 20 bp, Artificial Sequence
  Description of Artificial Sequence: Synthetic oligonucleotide
  Target: LAMA2; (-) strand; PAM type: YTN; PAM sequence: CTA
caagtacacacttttaaaat

SEQ ID NO: 192748 - DNA, 20 bp, Artificial Sequence
  Description of Artificial Sequence: Synthetic oligonucleotide
  Target: LAMA2; (-) strand; PAM type: YTN; PAM sequence: TTG
caataagctacaagtacaca

SEQ ID NO: 192749 - DNA, 20 bp, Artificial Sequence
  Description of Artificial Sequence: Synthetic oligonucleotide
  Target: LAMA2; (-) strand; PAM type: YTN; PAM sequence: CTG
tgttgcaataagctacaagt

SEQ ID NO: 192750 - DNA, 20 bp, Artificial Sequence
  Description of Artificial Sequence: Synthetic oligonucleotide
  Target: LAMA2; (-) strand; PAM type: YTN; PAM sequence: TTG
gtcactgtgttgcaataagc

SEQ ID NO: 192751 - DNA, 20 bp, Artificial Sequence
  Description of Artificial Sequence: Synthetic oligonucleotide
  Target: LAMA2; (-) strand; PAM type: YTN; PAM sequence: TTT
ggtcactgtgttgcaataag

SEQ ID NO: 192752 - DNA, 20 bp, Artificial Sequence
  Description of Artificial Sequence: Synthetic oligonucleotide
  Target: LAMA2; (-) strand; PAM type: YTN; PAM sequence: CTT
tggtcactgtgttgcaataa

SEQ ID NO: 192753 - DNA, 20 bp, Artificial Sequence
  Description of Artificial Sequence: Synthetic oligonucleotide
  Target: LAMA2; (-) strand; PAM type: YTN; PAM sequence: TTC
cagaagtaagaatatggtgt

SEQ ID NO: 192754 - DNA, 20 bp, Artificial Sequence
  Description of Artificial Sequence: Synthetic oligonucleotide
  Target: LAMA2; (-) strand; PAM type: YTN; PAM sequence: TTG
attccagaagtaagaatatg

SEQ ID NO: 192755 - DNA, 20 bp, Artificial Sequence
  Description of Artificial Sequence: Synthetic oligonucleotide
  Target: LAMA2; (-) strand; PAM type: YTN; PAM sequence: TTA
acaatgcccacaaattgatt

SEQ ID NO: 192756 - DNA, 20 bp, Artificial Sequence
  Description of Artificial Sequence: Synthetic oligonucleotide
  Target: LAMA2; (-) strand; PAM type: YTN; PAM sequence: CTG
ttaacaatgcccacaaattg

SEQ ID NO: 192757 - DNA, 20 bp, Artificial Sequence
  Description of Artificial Sequence: Synthetic oligonucleotide
  Target: LAMA2; (-) strand; PAM type: YTN; PAM sequence: TTG
tgaagatactgttaacaatg

SEQ ID NO: 192758 - DNA, 20 bp, Artificial Sequence
  Description of Artificial Sequence: Synthetic oligonucleotide
  Target: LAMA2; (-) strand; PAM type: YTN; PAM sequence: CTA
gtgcagttgtgaagatactg

SEQ ID NO: 192759 - DNA, 20 bp, Artificial Sequence
  Description of Artificial Sequence: Synthetic oligonucleotide
  Target: LAMA2; (-) strand; PAM type: YTN; PAM sequence: TTG
actagtgcagttgtgaagat

SEQ ID NO: 192760 - DNA, 20 bp, Artificial Sequence
  Description of Artificial Sequence: Synthetic oligonucleotide
  Target: LAMA2; (-) strand; PAM type: YTN; PAM sequence: CTT
gactagtgcagttgtgaaga

SEQ ID NO: 192761 - DNA, 20 bp, Artificial Sequence
  Description of Artificial Sequence: Synthetic oligonucleotide
  Target: LAMA2; (-) strand; PAM type: YTN; PAM sequence: TTG
cttgactagtgcagttgtga

SEQ ID NO: 192762 - DNA, 20 bp, Artificial Sequence
  Description of Artificial Sequence: Synthetic oligonucleotide
  Target: LAMA2; (-) strand; PAM type: YTN; PAM sequence: CTG
attgcttgactagtgcagtt

SEQ ID NO: 192763 - DNA, 20 bp, Artificial Sequence
  Description of Artificial Sequence: Synthetic oligonucleotide
  Target: LAMA2; (-) strand; PAM type: YTN; PAM sequence: CTC
tgattgcttgactagtgcag

SEQ ID NO: 192764 - DNA, 20 bp, Artificial Sequence
  Description of Artificial Sequence: Synthetic oligonucleotide
  Target: LAMA2; (-) strand; PAM type: YTN; PAM sequence: TTA
gctctgattgcttgactagt

SEQ ID NO: 192765 - DNA, 20 bp, Artificial Sequence
  Description of Artificial Sequence: Synthetic oligonucleotide
  Target: LAMA2; (-) strand; PAM type: YTN; PAM sequence: CTT
agctctgattgcttgactag

SEQ ID NO: 192766 - DNA, 20 bp, Artificial Sequence
  Description of Artificial Sequence: Synthetic oligonucleotide
  Target: LAMA2; (-) strand; PAM type: YTN; PAM sequence: TTG
aaagcttagctctgattgct

SEQ ID NO: 192767 - DNA, 20 bp, Artificial Sequence
  Description of Artificial Sequence: Synthetic oligonucleotide
  Target: LAMA2; (-) strand; PAM type: YTN; PAM sequence: TTT
gaaagcttagctctgattgc

SEQ ID NO: 192768 - DNA, 20 bp, Artificial Sequence
  Description of Artificial Sequence: Synthetic oligonucleotide
  Target: LAMA2; (-) strand; PAM type: YTN; PAM sequence: CTT
tgaaagcttagctctgattg

SEQ ID NO: 192769 - DNA, 20 bp, Artificial Sequence
  Description of Artificial Sequence: Synthetic oligonucleotide
  Target: LAMA2; (-) strand; PAM type: YTN; PAM sequence: CTG
ctttgaaagcttagctctga

SEQ ID NO: 192770 - DNA, 20 bp, Artificial Sequence
  Description of Artificial Sequence: Synthetic oligonucleotide
  Target: LAMA2; (-) strand; PAM type: YTN; PAM sequence: CTA
atctgctttgaaagcttagc

SEQ ID NO: 192771 - DNA, 20 bp, Artificial Sequence
  Description of Artificial Sequence: Synthetic oligonucleotide
  Target: LAMA2; (-) strand; PAM type: YTN; PAM sequence: CTC
taatctgctttgaaagctta

SEQ ID NO: 192772 - DNA, 20 bp, Artificial Sequence
  Description of Artificial Sequence: Synthetic oligonucleotide
  Target: LAMA2; (-) strand; PAM type: YTN; PAM sequence: TTC
ctctaatctgctttgaaagc

SEQ ID NO: 192773 - DNA, 20 bp, Artificial Sequence
  Description of Artificial Sequence: Synthetic oligonucleotide
  Target: LAMA2; (-) strand; PAM type: YTN; PAM sequence: CTT
cctctaatctgctttgaaag

SEQ ID NO: 192774 - DNA, 20 bp, Artificial Sequence
  Description of Artificial Sequence: Synthetic oligonucleotide
  Target: LAMA2; (-) strand; PAM type: YTN; PAM sequence: CTA
ataagcttcctctaatctgc

SEQ ID NO: 192775 - DNA, 20 bp, Artificial Sequence
  Description of Artificial Sequence: Synthetic oligonucleotide
  Target: LAMA2; (-) strand; PAM type: YTN; PAM sequence: TTG
ctaataagcttcctctaatc

SEQ ID NO: 192776 - DNA, 20 bp, Artificial Sequence
  Description of Artificial Sequence: Synthetic oligonucleotide
  Target: LAMA2; (-) strand; PAM type: YTN; PAM sequence: TTA
ttgctaataagcttcctcta

SEQ ID NO: 192777 - DNA, 20 bp, Artificial Sequence
  Description of Artificial Sequence: Synthetic oligonucleotide
  Target: LAMA2; (-) strand; PAM type: YTN; PAM sequence: TTT
attgctaataagcttcctct

SEQ ID NO: 192778 - DNA, 20 bp, Artificial Sequence
  Description of Artificial Sequence: Synthetic oligonucleotide
  Target: LAMA2; (-) strand; PAM type: YTN; PAM sequence: TTT
tattgctaataagcttcctc

SEQ ID NO: 192779 - DNA, 20 bp, Artificial Sequence
  Description of Artificial Sequence: Synthetic oligonucleotide
  Target: LAMA2; (-) strand; PAM type: YTN; PAM sequence: CTA
tattttattgctaataagct

SEQ ID NO: 192780 - DNA, 20 bp, Artificial Sequence
  Description of Artificial Sequence: Synthetic oligonucleotide
  Target: LAMA2; (-) strand; PAM type: YTN; PAM sequence: TTG
actatattttattgctaata

SEQ ID NO: 192781 - DNA, 20 bp, Artificial Sequence
  Description of Artificial Sequence: Synthetic oligonucleotide
  Target: LAMA2; (-) strand; PAM type: YTN; PAM sequence: TTT
gactatattttattgctaat

SEQ ID NO: 192782 - DNA, 20 bp, Artificial Sequence
  Description of Artificial Sequence: Synthetic oligonucleotide
  Target: LAMA2; (-) strand; PAM type: YTN; PAM sequence: TTT
tgactatattttattgctaa

SEQ ID NO: 192783 - DNA, 20 bp, Artificial Sequence
  Description of Artificial Sequence: Synthetic oligonucleotide
  Target: LAMA2; (-) strand; PAM type: YTN; PAM sequence: CTG
gtatattttgactatatttt

SEQ ID NO: 192784 - DNA, 20 bp, Artificial Sequence
  Description of Artificial Sequence: Synthetic oligonucleotide
  Target: LAMA2; (-) strand; PAM type: YTN; PAM sequence: TTA
tgcctggtatattttgacta

SEQ ID NO: 192785 - DNA, 20 bp, Artificial Sequence
  Description of Artificial Sequence: Synthetic oligonucleotide
  Target: LAMA2; (-) strand; PAM type: YTN; PAM sequence: CTA
cataaaaatatgattatgcc

SEQ ID NO: 192786 - DNA, 20 bp, Artificial Sequence
  Description of Artificial Sequence: Synthetic oligonucleotide
  Target: LAMA2; (-) strand; PAM type: YTN; PAM sequence: TTC
cactacataaaaatatgatt

SEQ ID NO: 192787 - DNA, 20 bp, Artificial Sequence
  Description of Artificial Sequence: Synthetic oligonucleotide
  Target: LAMA2; (-) strand; PAM type: YTN; PAM sequence: CTG
aggtaattccactacataaa

SEQ ID NO: 192788 - DNA, 20 bp, Artificial Sequence
  Description of Artificial Sequence: Synthetic oligonucleotide
  Target: LAMA2; (-) strand; PAM type: YTN; PAM sequence: CTC
catgtgctgaggtaattcca

SEQ ID NO: 192789 - DNA, 20 bp, Artificial Sequence
  Description of Artificial Sequence: Synthetic oligonucleotide
  Target: LAMA2; (-) strand; PAM type: YTN; PAM sequence: TTC
tccatgtgctgaggtaattc

SEQ ID NO: 192790 - DNA, 20 bp, Artificial Sequence
  Description of Artificial Sequence: Synthetic oligonucleotide
  Target: LAMA2; (-) strand; PAM type: YTN; PAM sequence: TTA
gattctccatgtgctgaggt

SEQ ID NO: 192791 - DNA, 20 bp, Artificial Sequence
  Description of Artificial Sequence: Synthetic oligonucleotide
  Target: LAMA2; (-) strand; PAM type: YTN; PAM sequence: TTT
agattctccatgtgctgagg

SEQ ID NO: 192792 - DNA, 20 bp, Artificial Sequence
  Description of Artificial Sequence: Synthetic oligonucleotide
  Target: LAMA2; (-) strand; PAM type: YTN; PAM sequence: TTA
atttagattctccatgtgct

SEQ ID NO: 192793 - DNA, 20 bp, Artificial Sequence
  Description of Artificial Sequence: Synthetic oligonucleotide
  Target: LAMA2; (-) strand; PAM type: YTN; PAM sequence: TTT
aatttagattctccatgtgc

SEQ ID NO: 192794 - DNA, 20 bp, Artificial Sequence
  Description of Artificial Sequence: Synthetic oligonucleotide
  Target: LAMA2; (-) strand; PAM type: YTN; PAM sequence: CTC
atttaatttagattctccat

SEQ ID NO: 192795 - DNA, 20 bp, Artificial Sequence
  Description of Artificial Sequence: Synthetic oligonucleotide
  Target: LAMA2; (-) strand; PAM type: YTN; PAM sequence: TTA
taaactcatttaatttagat

SEQ ID NO: 192796 - DNA, 20 bp, Artificial Sequence
  Description of Artificial Sequence: Synthetic oligonucleotide
  Target: LAMA2; (-) strand; PAM type: YTN; PAM sequence: CTC
aattataaactcatttaatt

SEQ ID NO: 192797 - DNA, 20 bp, Artificial Sequence
  Description of Artificial Sequence: Synthetic oligonucleotide
  Target: LAMA2; (-) strand; PAM type: YTN; PAM sequence: TTG
cacacaaacctcaattataa

SEQ ID NO: 192798 - DNA, 20 bp, Artificial Sequence
  Description of Artificial Sequence: Synthetic oligonucleotide
  Target: LAMA2; (-) strand; PAM type: YTN; PAM sequence: CTT
gcacacaaacctcaattata

SEQ ID NO: 192799 - DNA, 20 bp, Artificial Sequence
  Description of Artificial Sequence: Synthetic oligonucleotide
  Target: LAMA2; (-) strand; PAM type: YTN; PAM sequence: TTC
ccttgcacacaaacctcaat

SEQ ID NO: 192800 - DNA, 20 bp, Artificial Sequence
  Description of Artificial Sequence: Synthetic oligonucleotide
  Target: LAMA2; (-) strand; PAM type: YTN; PAM sequence: TTT
cccttgcacacaaacctcaa

SEQ ID NO: 192801 - DNA, 20 bp, Artificial Sequence
  Description of Artificial Sequence: Synthetic oligonucleotide
  Target: LAMA2; (-) strand; PAM type: YTN; PAM sequence: TTT
tcccttgcacacaaacctca

SEQ ID NO: 192802 - DNA, 20 bp, Artificial Sequence
  Description of Artificial Sequence: Synthetic oligonucleotide
  Target: LAMA2; (-) strand; PAM type: YTN; PAM sequence: CTT
ttcccttgcacacaaacctc

SEQ ID NO: 192803 - DNA, 20 bp, Artificial Sequence
  Description of Artificial Sequence: Synthetic oligonucleotide
  Target: LAMA2; (-) strand; PAM type: YTN; PAM sequence: TTC
ttttcccttgcacacaaacc

SEQ ID NO: 192804 - DNA, 20 bp, Artificial Sequence
  Description of Artificial Sequence: Synthetic oligonucleotide
  Target: LAMA2; (-) strand; PAM type: YTN; PAM sequence: TTT
cttttcccttgcacacaaac

SEQ ID NO: 192805 - DNA, 20 bp, Artificial Sequence
  Description of Artificial Sequence: Synthetic oligonucleotide
  Target: LAMA2; (-) strand; PAM type: YTN; PAM sequence: TTT
tcttttcccttgcacacaaa

SEQ ID NO: 192806 - DNA, 20 bp, Artificial Sequence
  Description of Artificial Sequence: Synthetic oligonucleotide
  Target: LAMA2; (-) strand; PAM type: YTN; PAM sequence: TTC
cataacagacgaattttctt

SEQ ID NO: 192807 - DNA, 20 bp, Artificial Sequence
  Description of Artificial Sequence: Synthetic oligonucleotide
  Target: LAMA2; (-) strand; PAM type: YTN; PAM sequence: TTT
ccataacagacgaattttct

SEQ ID NO: 192808 - DNA, 20 bp, Artificial Sequence
  Description of Artificial Sequence: Synthetic oligonucleotide
  Target: LAMA2; (-) strand; PAM type: YTN; PAM sequence: CTA
taatgtaaaaaatatagagc

SEQ ID NO: 192809 - DNA, 20 bp, Artificial Sequence
  Description of Artificial Sequence: Synthetic oligonucleotide
  Target: LAMA2; (-) strand; PAM type: YTN; PAM sequence: TTG
gctataatgtaaaaaatata

SEQ ID NO: 192810 - DNA, 20 bp, Artificial Sequence
  Description of Artificial Sequence: Synthetic oligonucleotide
  Target: LAMA2; (-) strand; PAM type: YTN; PAM sequence: TTT
ggctataatgtaaaaaatat

SEQ ID NO: 192811 - DNA, 20 bp, Artificial Sequence
  Description of Artificial Sequence: Synthetic oligonucleotide
  Target: LAMA2; (-) strand; PAM type: YTN; PAM sequence: CTT
tggctataatgtaaaaaata

SEQ ID NO: 192812 - DNA, 20 bp, Artificial Sequence
  Description of Artificial Sequence: Synthetic oligonucleotide
  Target: LAMA2; (-) strand; PAM type: YTN; PAM sequence: CTA
agactttggctataatgtaa

SEQ ID NO: 192813 - DNA, 20 bp, Artificial Sequence
  Description of Artificial Sequence: Synthetic oligonucleotide
  Target: LAMA2; (-) strand; PAM type: YTN; PAM sequence: CTC
aaaaggtaactaagactttg

SEQ ID NO: 192814 - DNA, 20 bp, Artificial Sequence
  Description of Artificial Sequence: Synthetic oligonucleotide
  Target: LAMA2; (-) strand; PAM type: YTN; PAM sequence: CTA
cagataccctcaaaaggtaa

SEQ ID NO: 192815 - DNA, 20 bp, Artificial Sequence
  Description of Artificial Sequence: Synthetic oligonucleotide
  Target: LAMA2; (-) strand; PAM type: YTN; PAM sequence: TTA
atggcacctacagataccct

SEQ ID NO: 192816 - DNA, 20 bp, Artificial Sequence
  Description of Artificial Sequence: Synthetic oligonucleotide
  Target: LAMA2; (-) strand; PAM type: YTN; PAM sequence: TTT
aatggcacctacagataccc

SEQ ID NO: 192817 - DNA, 20 bp, Artificial Sequence
  Description of Artificial Sequence: Synthetic oligonucleotide
  Target: LAMA2; (-) strand; PAM type: YTN; PAM sequence: CTG
aatttaatggcacctacaga

SEQ ID NO: 192818 - DNA, 20 bp, Artificial Sequence
  Description of Artificial Sequence: Synthetic oligonucleotide
  Target: LAMA2; (-) strand; PAM type: YTN; PAM sequence: TTA
tacccacagcagaagaggat

SEQ ID NO: 192819 - DNA, 20 bp, Artificial Sequence
  Description of Artificial Sequence: Synthetic oligonucleotide
  Target: LAMA2; (-) strand; PAM type: YTN; PAM sequence: CTT
atacccacagcagaagagga

SEQ ID NO: 192820 - DNA, 20 bp, Artificial Sequence
  Description of Artificial Sequence: Synthetic oligonucleotide
  Target: LAMA2; (-) strand; PAM type: YTN; PAM sequence: TTG
ccatgtgcttatacccacag

SEQ ID NO: 192821 - DNA, 20 bp, Artificial Sequence
  Description of Artificial Sequence: Synthetic oligonucleotide
  Target: LAMA2; (-) strand; PAM type: YTN; PAM sequence: TTT
gccatgtgcttatacccaca

SEQ ID NO: 192822 - DNA, 20 bp, Artificial Sequence
  Description of Artificial Sequence: Synthetic oligonucleotide
  Target: LAMA2; (-) strand; PAM type: YTN; PAM sequence: CTG
ggtttgccatgtgcttatac

SEQ ID NO: 192823 - DNA, 20 bp, Artificial Sequence
  Description of Artificial Sequence: Synthetic oligonucleotide
  Target: LAMA2; (-) strand; PAM type: YTN; PAM sequence: TTG
cctgggtttgccatgtgctt

SEQ ID NO: 192824 - DNA, 20 bp, Artificial Sequence
  Description of Artificial Sequence: Synthetic oligonucleotide
  Target: LAMA2; (-) strand; PAM type: YTN; PAM sequence: TTT
gcctgggtttgccatgtgct

SEQ ID NO: 192825 - DNA, 20 bp, Artificial Sequence
  Description of Artificial Sequence: Synthetic oligonucleotide
  Target: LAMA2; (-) strand; PAM type: YTN; PAM sequence: TTT
tgcctgggtttgccatgtgc

SEQ ID NO: 192826 - DNA, 20 bp, Artificial Sequence
  Description of Artificial Sequence: Synthetic oligonucleotide
  Target: LAMA2; (-) strand; PAM type: YTN; PAM sequence: TTT
ttgcctgggtttgccatgtg

SEQ ID NO: 192827 - DNA, 20 bp, Artificial Sequence
  Description of Artificial Sequence: Synthetic oligonucleotide
  Target: LAMA2; (-) strand; PAM type: YTN; PAM sequence: CTA
atttttgcctgggtttgcca

SEQ ID NO: 192828 - DNA, 20 bp, Artificial Sequence
  Description of Artificial Sequence: Synthetic oligonucleotide
  Target: LAMA2; (-) strand; PAM type: YTN; PAM sequence: TTC
taatttttgcctgggtttgc

SEQ ID NO: 192829 - DNA, 20 bp, Artificial Sequence
  Description of Artificial Sequence: Synthetic oligonucleotide
  Target: LAMA2; (-) strand; PAM type: YTN; PAM sequence: TTT
ctaatttttgcctgggtttg

SEQ ID NO: 192830 - DNA, 20 bp, Artificial Sequence
  Description of Artificial Sequence: Synthetic oligonucleotide
  Target: LAMA2; (-) strand; PAM type: YTN; PAM sequence: TTT
tctaatttttgcctgggttt

SEQ ID NO: 192831 - DNA, 20 bp, Artificial Sequence
  Description of Artificial Sequence: Synthetic oligonucleotide
  Target: LAMA2; (-) strand; PAM type: YTN; PAM sequence: TTT
ttctaatttttgcctgggtt

SEQ ID NO: 192832 - DNA, 20 bp, Artificial Sequence
  Description of Artificial Sequence: Synthetic oligonucleotide
  Target: LAMA2; (-) strand; PAM type: YTN; PAM sequence: TTA
tttttctaatttttgcctgg

SEQ ID NO: 192833 - DNA, 20 bp, Artificial Sequence
  Description of Artificial Sequence: Synthetic oligonucleotide
  Target: LAMA2; (-) strand; PAM type: YTN; PAM sequence: TTT
atttttctaatttttgcctg

SEQ ID NO: 192834 - DNA, 20 bp, Artificial Sequence
  Description of Artificial Sequence: Synthetic oligonucleotide
  Target: LAMA2; (-) strand; PAM type: YTN; PAM sequence: TTT
tatttttctaatttttgcct

SEQ ID NO: 192835 - DNA, 20 bp, Artificial Sequence
  Description of Artificial Sequence: Synthetic oligonucleotide
  Target: LAMA2; (-) strand; PAM type: YTN; PAM sequence: TTT
ttatttttctaatttttgcc

SEQ ID NO: 192836 - DNA, 20 bp, Artificial Sequence
  Description of Artificial Sequence: Synthetic oligonucleotide
  Target: LAMA2; (-) strand; PAM type: YTN; PAM sequence: CTT
tttatttttctaatttttgc

SEQ ID NO: 192837 - DNA, 20 bp, Artificial Sequence
  Description of Artificial Sequence: Synthetic oligonucleotide
  Target: LAMA2; (-) strand; PAM type: YTN; PAM sequence: CTA
caatcctttttatttttcta

SEQ ID NO: 192838 - DNA, 20 bp, Artificial Sequence
  Description of Artificial Sequence: Synthetic oligonucleotide
  Target: LAMA2; (-) strand; PAM type: YTN; PAM sequence: CTC
tacaatcctttttatttttc

SEQ ID NO: 192839 - DNA, 20 bp, Artificial Sequence
  Description of Artificial Sequence: Synthetic oligonucleotide
  Target: LAMA2; (-) strand; PAM type: YTN; PAM sequence: TTC
tctacaatcctttttatttt

SEQ ID NO: 192840 - DNA, 20 bp, Artificial Sequence
  Description of Artificial Sequence: Synthetic oligonucleotide
  Target: LAMA2; (-) strand; PAM type: YTN; PAM sequence: TTT
ctctacaatcctttttattt

SEQ ID NO: 192841 - DNA, 20 bp, Artificial Sequence
  Description of Artificial Sequence: Synthetic oligonucleotide
  Target: LAMA2; (-) strand; PAM type: YTN; PAM sequence: CTC
catttctctacaatcctttt

SEQ ID NO: 192842 - DNA, 20 bp, Artificial Sequence
  Description of Artificial Sequence: Synthetic oligonucleotide
  Target: LAMA2; (-) strand; PAM type: YTN; PAM sequence: TTA
tatctccatttctctacaat

SEQ ID NO: 192843 - DNA, 20 bp, Artificial Sequence
  Description of Artificial Sequence: Synthetic oligonucleotide
  Target: LAMA2; (-) strand; PAM type: YTN; PAM sequence: TTT
atatctccatttctctacaa

SEQ ID NO: 192844 - DNA, 20 bp, Artificial Sequence
  Description of Artificial Sequence: Synthetic oligonucleotide
  Target: LAMA2; (-) strand; PAM type: YTN; PAM sequence: TTT
tatatctccatttctctaca

SEQ ID NO: 192845 - DNA, 20 bp, Artificial Sequence
  Description of Artificial Sequence: Synthetic oligonucleotide
  Target: LAMA2; (-) strand; PAM type: YTN; PAM sequence: TTT
ttatatctccatttctctac

SEQ ID NO: 192846 - DNA, 20 bp, Artificial Sequence
  Description of Artificial Sequence: Synthetic oligonucleotide
  Target: LAMA2; (-) strand; PAM type: YTN; PAM sequence: TTT
tttatatctccatttctcta

SEQ ID NO: 192847 - DNA, 20 bp, Artificial Sequence
  Description of Artificial Sequence: Synthetic oligonucleotide
  Target: LAMA2; (-) strand; PAM type: YTN; PAM sequence: TTA
attttttatatctccatttc

SEQ ID NO: 192848 - DNA, 20 bp, Artificial Sequence
  Description of Artificial Sequence: Synthetic oligonucleotide
  Target: LAMA2; (-) strand; PAM type: YTN; PAM sequence: TTA
ttaattttttatatctccat

SEQ ID NO: 192849 - DNA, 20 bp, Artificial Sequence
  Description of Artificial Sequence: Synthetic oligonucleotide
  Target: LAMA2; (-) strand; PAM type: YTN; PAM sequence: CTT
attaattttttatatctcca

SEQ ID NO: 192850 - DNA, 20 bp, Artificial Sequence
  Description of Artificial Sequence: Synthetic oligonucleotide
  Target: LAMA2; (-) strand; PAM type: YTN; PAM sequence: CTC
ttattaattttttatatctc

SEQ ID NO: 192851 - DNA, 20 bp, Artificial Sequence
  Description of Artificial Sequence: Synthetic oligonucleotide
  Target: LAMA2; (-) strand; PAM type: YTN; PAM sequence: TTC
tcttattaattttttatatc

SEQ ID NO: 192852 - DNA, 20 bp, Artificial Sequence
  Description of Artificial Sequence: Synthetic oligonucleotide
  Target: LAMA2; (-) strand; PAM type: YTN; PAM sequence: CTT
ctcttattaattttttatat

SEQ ID NO: 192853 - DNA, 20 bp, Artificial Sequence
  Description of Artificial Sequence: Synthetic oligonucleotide
  Target: LAMA2; (-) strand; PAM type: YTN; PAM sequence: CTC
ttctcttattaattttttat

SEQ ID NO: 192854 - DNA, 20 bp, Artificial Sequence
  Description of Artificial Sequence: Synthetic oligonucleotide
  Target: LAMA2; (-) strand; PAM type: YTN; PAM sequence: TTG
cctcttctcttattaatttt

SEQ ID NO: 192855 - DNA, 20 bp, Artificial Sequence
  Description of Artificial Sequence: Synthetic oligonucleotide
  Target: LAMA2; (-) strand; PAM type: YTN; PAM sequence: CTT
gcctcttctcttattaattt

SEQ ID NO: 192856 - DNA, 20 bp, Artificial Sequence
  Description of Artificial Sequence: Synthetic oligonucleotide
  Target: LAMA2; (-) strand; PAM type: YTN; PAM sequence: TTA
gcttgcctcttctcttatta

SEQ ID NO: 192857 - DNA, 20 bp, Artificial Sequence
  Description of Artificial Sequence: Synthetic oligonucleotide
  Target: LAMA2; (-) strand; PAM type: YTN; PAM sequence: TTG
aggaaaaaaatggataaggg

SEQ ID NO: 192858 - DNA, 20 bp, Artificial Sequence
  Description of Artificial Sequence: Synthetic oligonucleotide
  Target: LAMA2; (-) strand; PAM type: YTN; PAM sequence: CTT
gaggaaaaaaatggataagg

SEQ ID NO: 192859 - DNA, 20 bp, Artificial Sequence
  Description of Artificial Sequence: Synthetic oligonucleotide
  Target: LAMA2; (-) strand; PAM type: YTN; PAM sequence: TTA
ataaccttgaggaaaaaaat

SEQ ID NO: 192860 - DNA, 20 bp, Artificial Sequence
  Description of Artificial Sequence: Synthetic oligonucleotide
  Target: LAMA2; (-) strand; PAM type: YTN; PAM sequence: CTG
ttaataaccttgaggaaaaa

SEQ ID NO: 192861 - DNA, 20 bp, Artificial Sequence
  Description of Artificial Sequence: Synthetic oligonucleotide
  Target: LAMA2; (-) strand; PAM type: YTN; PAM sequence: TTC
tgttaataaccttgaggaaa

SEQ ID NO: 192862 - DNA, 20 bp, Artificial Sequence
  Description of Artificial Sequence: Synthetic oligonucleotide
  Target: LAMA2; (-) strand; PAM type: YTN; PAM sequence: TTT
ctgttaataaccttgaggaa

SEQ ID NO: 192863 - DNA, 20 bp, Artificial Sequence
  Description of Artificial Sequence: Synthetic oligonucleotide
  Target: LAMA2; (-) strand; PAM type: YTN; PAM sequence: TTG
gaaataatttctgttaataa

SEQ ID NO: 192864 - DNA, 20 bp, Artificial Sequence
  Description of Artificial Sequence: Synthetic oligonucleotide
  Target: LAMA2; (-) strand; PAM type: YTN; PAM sequence: TTA
tgttggaaataatttctgtt

SEQ ID NO: 192865 - DNA, 20 bp, Artificial Sequence
  Description of Artificial Sequence: Synthetic oligonucleotide
  Target: LAMA2; (-) strand; PAM type: YTN; PAM sequence: TTT
atgttggaaataatttctgt

SEQ ID NO: 192866 - DNA, 20 bp, Artificial Sequence
  Description of Artificial Sequence: Synthetic oligonucleotide
  Target: LAMA2; (-) strand; PAM type: YTN; PAM sequence: TTA
tggacatttatgttggaaat

SEQ ID NO: 192867 - DNA, 20 bp, Artificial Sequence
  Description of Artificial Sequence: Synthetic oligonucleotide
  Target: LAMA2; (-) strand; PAM type: YTN; PAM sequence: TTT
atggacatttatgttggaaa

SEQ ID NO: 192868 - DNA, 20 bp, Artificial Sequence
  Description of Artificial Sequence: Synthetic oligonucleotide
  Target: LAMA2; (-) strand; PAM type: YTN; PAM sequence: TTA
tttatggacatttatgttgg

SEQ ID NO: 192869 - DNA, 20 bp, Artificial Sequence
  Description of Artificial Sequence: Synthetic oligonucleotide
  Target: LAMA2; (-) strand; PAM type: YTN; PAM sequence: TTC
aaaattatttatggacattt

SEQ ID NO: 192870 - DNA, 20 bp, Artificial Sequence
  Description of Artificial Sequence: Synthetic oligonucleotide
  Target: LAMA2; (-) strand; PAM type: YTN; PAM sequence: TTT
caaaattatttatggacatt

SEQ ID NO: 192871 - DNA, 20 bp, Artificial Sequence
  Description of Artificial Sequence: Synthetic oligonucleotide
  Target: LAMA2; (-) strand; PAM type: YTN; PAM sequence: TTT
tcaaaattatttatggacat

SEQ ID NO: 192872 - DNA, 20 bp, Artificial Sequence
  Description of Artificial Sequence: Synthetic oligonucleotide
  Target: LAMA2; (-) strand; PAM type: YTN; PAM sequence: CTA
gattttcaaaattatttatg

SEQ ID NO: 192873 - DNA, 20 bp, Artificial Sequence
  Description of Artificial Sequence: Synthetic oligonucleotide
  Target: LAMA2; (-) strand; PAM type: YTN; PAM sequence: TTC
tagattttcaaaattattta

SEQ ID NO: 192874 - DNA, 20 bp, Artificial Sequence
  Description of Artificial Sequence: Synthetic oligonucleotide
  Target: LAMA2; (-) strand; PAM type: YTN; PAM sequence: TTT
ctagattttcaaaattattt

SEQ ID NO: 192875 - DNA, 20 bp, Artificial Sequence
  Description of Artificial Sequence: Synthetic oligonucleotide
  Target: LAMA2; (-) strand; PAM type: YTN; PAM sequence: CTT
tctagattttcaaaattatt

SEQ ID NO: 192876 - DNA, 20 bp, Artificial Sequence
  Description of Artificial Sequence: Synthetic oligonucleotide
  Target: LAMA2; (-) strand; PAM type: YTN; PAM sequence: TTC
tttctagattttcaaaatta

SEQ ID NO: 192877 - DNA, 20 bp, Artificial Sequence
  Description of Artificial Sequence: Synthetic oligonucleotide
  Target: LAMA2; (-) strand; PAM type: YTN; PAM sequence: TTT
ctttctagattttcaaaatt

SEQ ID NO: 192878 - DNA, 20 bp, Artificial Sequence
  Description of Artificial Sequence: Synthetic oligonucleotide
  Target: LAMA2; (-) strand; PAM type: YTN; PAM sequence: TTA
aagtagaaatgcaatttctt

SEQ ID NO: 192879 - DNA, 20 bp, Artificial Sequence
  Description of Artificial Sequence: Synthetic oligonucleotide
  Target: LAMA2; (-) strand; PAM type: YTN; PAM sequence: TTT
aaagtagaaatgcaatttct

SEQ ID NO: 192880 - DNA, 20 bp, Artificial Sequence
  Description of Artificial Sequence: Synthetic oligonucleotide
  Target: LAMA2; (-) strand; PAM type: YTN; PAM sequence: TTT
taaagtagaaatgcaatttc

SEQ ID NO: 192881 - DNA, 20 bp, Artificial Sequence
  Description of Artificial Sequence: Synthetic oligonucleotide
  Target: LAMA2; (-) strand; PAM type: YTN; PAM sequence: TTT
ttaaagtagaaatgcaattt

SEQ ID NO: 192882 - DNA, 20 bp, Artificial Sequence
  Description of Artificial Sequence: Synthetic oligonucleotide
  Target: LAMA2; (-) strand; PAM type: YTN; PAM sequence: CTA
tttttaaagtagaaatgcaa

SEQ ID NO: 192883 - DNA, 20 bp, Artificial Sequence
  Description of Artificial Sequence: Synthetic oligonucleotide
  Target: LAMA2; (-) strand; PAM type: YTN; PAM sequence: TTC
agccatagaaagctattttt

SEQ ID NO: 192884 - DNA, 20 bp, Artificial Sequence
  Description of Artificial Sequence: Synthetic oligonucleotide
  Target: LAMA2; (-) strand; PAM type: YTN; PAM sequence: CTT
cagccatagaaagctatttt

SEQ ID NO: 192885 - DNA, 20 bp, Artificial Sequence
  Description of Artificial Sequence: Synthetic oligonucleotide
  Target: LAMA2; (-) strand; PAM type: YTN; PAM sequence: CTG
aagcaaaccttcagccatag

SEQ ID NO: 192886 - DNA, 20 bp, Artificial Sequence
  Description of Artificial Sequence: Synthetic oligonucleotide
  Target: LAMA2; (-) strand; PAM type: YTN; PAM sequence: TTG
tgacagtaaaacaactgaag

SEQ ID NO: 192887 - DNA, 20 bp, Artificial Sequence
  Description of Artificial Sequence: Synthetic oligonucleotide
  Target: LAMA2; (-) strand; PAM type: YTN; PAM sequence: TTG
ggagttgtgacagtaaaaca

SEQ ID NO: 192888 - DNA, 20 bp, Artificial Sequence
  Description of Artificial Sequence: Synthetic oligonucleotide
  Target: LAMA2; (-) strand; PAM type: YTN; PAM sequence: TTT
gggagttgtgacagtaaaac

SEQ ID NO: 192889 - DNA, 20 bp, Artificial Sequence
  Description of Artificial Sequence: Synthetic oligonucleotide
  Target: LAMA2; (-) strand; PAM type: YTN; PAM sequence: TTT
tgggagttgtgacagtaaaa

SEQ ID NO: 192890 - DNA, 20 bp, Artificial Sequence
  Description of Artificial Sequence: Synthetic oligonucleotide
  Target: LAMA2; (-) strand; PAM type: YTN; PAM sequence: TTT
ttgggagttgtgacagtaaa

SEQ ID NO: 192891 - DNA, 20 bp, Artificial Sequence
  Description of Artificial Sequence: Synthetic oligonucleotide
  Target: LAMA2; (-) strand; PAM type: YTN; PAM sequence: CTG
gtttttgggagttgtgacag

SEQ ID NO: 192892 - DNA, 20 bp, Artificial Sequence
  Description of Artificial Sequence: Synthetic oligonucleotide
  Target: LAMA2; (-) strand; PAM type: YTN; PAM sequence: TTA
cgacatcccagaaccagctg

SEQ ID NO: 192893 - DNA, 20 bp, Artificial Sequence
  Description of Artificial Sequence: Synthetic oligonucleotide
  Target: LAMA2; (-) strand; PAM type: YTN; PAM sequence: TTG
ttacgacatcccagaaccag

SEQ ID NO: 192894 - DNA, 20 bp, Artificial Sequence
  Description of Artificial Sequence: Synthetic oligonucleotide
  Target: LAMA2; (-) strand; PAM type: YTN; PAM sequence: TTG
aagtatcaaattgttacgac

SEQ ID NO: 192895 - DNA, 20 bp, Artificial Sequence
  Description of Artificial Sequence: Synthetic oligonucleotide
  Target: LAMA2; (-) strand; PAM type: YTN; PAM sequence: TTT
gaagtatcaaattgttacga

SEQ ID NO: 192896 - DNA, 20 bp, Artificial Sequence
  Description of Artificial Sequence: Synthetic oligonucleotide
  Target: LAMA2; (-) strand; PAM type: YTN; PAM sequence: TTG
gtttgaagtatcaaattgtt

SEQ ID NO: 192897 - DNA, 20 bp, Artificial Sequence
  Description of Artificial Sequence: Synthetic oligonucleotide
  Target: LAMA2; (-) strand; PAM type: YTN; PAM sequence: TTG
caccagggagccaatgagca

SEQ ID NO: 192898 - DNA, 20 bp, Artificial Sequence
  Description of Artificial Sequence: Synthetic oligonucleotide
  Target: LAMA2; (-) strand; PAM type: YTN; PAM sequence: TTT
gcaccagggagccaatgagc

SEQ ID NO: 192899 - DNA, 20 bp, Artificial Sequence
  Description of Artificial Sequence: Synthetic oligonucleotide
  Target: LAMA2; (-) strand; PAM type: YTN; PAM sequence: CTG
tttgcaccagggagccaatg

SEQ ID NO: 192900 - DNA, 20 bp, Artificial Sequence
  Description of Artificial Sequence: Synthetic oligonucleotide
  Target: LAMA2; (-) strand; PAM type: YTN; PAM sequence: CTC
cctgtttgcaccagggagcc

SEQ ID NO: 192901 - DNA, 20 bp, Artificial Sequence
  Description of Artificial Sequence: Synthetic oligonucleotide
  Target: LAMA2; (-) strand; PAM type: YTN; PAM sequence: TTA
tctccctgtttgcaccaggg

SEQ ID NO: 192902 - DNA, 20 bp, Artificial Sequence
  Description of Artificial Sequence: Synthetic oligonucleotide
  Target: LAMA2; (-) strand; PAM type: YTN; PAM sequence: TTT
atctccctgtttgcaccagg

SEQ ID NO: 192903 - DNA, 20 bp, Artificial Sequence
  Description of Artificial Sequence: Synthetic oligonucleotide
  Target: LAMA2; (-) strand; PAM type: YTN; PAM sequence: TTA
agtagcatttatctccctgt

SEQ ID NO: 192904 - DNA, 20 bp, Artificial Sequence
  Description of Artificial Sequence: Synthetic oligonucleotide
  Target: LAMA2; (-) strand; PAM type: YTN; PAM sequence: TTT
aagtagcatttatctccctg

SEQ ID NO: 192905 - DNA, 20 bp, Artificial Sequence
  Description of Artificial Sequence: Synthetic oligonucleotide
  Target: LAMA2; (-) strand; PAM type: YTN; PAM sequence: CTA
tttaagtagcatttatctcc

SEQ ID NO: 192906 - DNA, 20 bp, Artificial Sequence
  Description of Artificial Sequence: Synthetic oligonucleotide
  Target: LAMA2; (-) strand; PAM type: YTN; PAM sequence: CTA
ctatttaagtagcatttatc

SEQ ID NO: 192907 - DNA, 20 bp, Artificial Sequence
  Description of Artificial Sequence: Synthetic oligonucleotide
  Target: LAMA2; (-) strand; PAM type: YTN; PAM sequence: TTC
acctactatttaagtagcat

SEQ ID NO: 192908 - DNA, 20 bp, Artificial Sequence
  Description of Artificial Sequence: Synthetic oligonucleotide
  Target: LAMA2; (-) strand; PAM type: YTN; PAM sequence: TTA
cattcacctactatttaagt

SEQ ID NO: 192909 - DNA, 20 bp, Artificial Sequence
  Description of Artificial Sequence: Synthetic oligonucleotide
  Target: LAMA2; (-) strand; PAM type: YTN; PAM sequence: CTA
aagtgcaaaattacattcac

SEQ ID NO: 192910 - DNA, 20 bp, Artificial Sequence
  Description of Artificial Sequence: Synthetic oligonucleotide
  Target: LAMA2; (-) strand; PAM type: YTN; PAM sequence: TTC
taaagtgcaaaattacattc

SEQ ID NO: 192911 - DNA, 20 bp, Artificial Sequence
  Description of Artificial Sequence: Synthetic oligonucleotide
  Target: LAMA2; (-) strand; PAM type: YTN; PAM sequence: TTT
ctaaagtgcaaaattacatt

SEQ ID NO: 192912 - DNA, 20 bp, Artificial Sequence
  Description of Artificial Sequence: Synthetic oligonucleotide
  Target: LAMA2; (-) strand; PAM type: YTN; PAM sequence: TTT
tctaaagtgcaaaattacat

SEQ ID NO: 192913 - DNA, 20 bp, Artificial Sequence
  Description of Artificial Sequence: Synthetic oligonucleotide
  Target: LAMA2; (-) strand; PAM type: YTN; PAM sequence: CTA
ataaacatgcagacattttc

SEQ ID NO: 192914 - DNA, 20 bp, Artificial Sequence
  Description of Artificial Sequence: Synthetic oligonucleotide
  Target: LAMA2; (-) strand; PAM type: YTN; PAM sequence: CTC
taataaacatgcagacattt

SEQ ID NO: 192915 - DNA, 20 bp, Artificial Sequence
  Description of Artificial Sequence: Synthetic oligonucleotide
  Target: LAMA2; (-) strand; PAM type: YTN; PAM sequence: TTC
tctaataaacatgcagacat

SEQ ID NO: 192916 - DNA, 20 bp, Artificial Sequence
  Description of Artificial Sequence: Synthetic oligonucleotide
  Target: LAMA2; (-) strand; PAM type: YTN; PAM sequence: CTT
ctctaataaacatgcagaca

SEQ ID NO: 192917 - DNA, 20 bp, Artificial Sequence
  Description of Artificial Sequence: Synthetic oligonucleotide
  Target: LAMA2; (-) strand; PAM type: YTN; PAM sequence: TTC
acttctctaataaacatgca

SEQ ID NO: 192918 - DNA, 20 bp, Artificial Sequence
  Description of Artificial Sequence: Synthetic oligonucleotide
  Target: LAMA2; (-) strand; PAM type: YTN; PAM sequence: TTC
agcattcacttctctaataa

SEQ ID NO: 192919 - DNA, 20 bp, Artificial Sequence
  Description of Artificial Sequence: Synthetic oligonucleotide
  Target: LAMA2; (-) strand; PAM type: YTN; PAM sequence: TTT
cagcattcacttctctaata

SEQ ID NO: 192920 - DNA, 20 bp, Artificial Sequence
  Description of Artificial Sequence: Synthetic oligonucleotide
  Target: LAMA2; (-) strand; PAM type: YTN; PAM sequence: CTG
atttcagcattcacttctct

SEQ ID NO: 192921 - DNA, 20 bp, Artificial Sequence
  Description of Artificial Sequence: Synthetic oligonucleotide
  Target: LAMA2; (-) strand; PAM type: YTN; PAM sequence: TTC
gctgatttcagcattcactt

SEQ ID NO: 192922 - DNA, 20 bp, Artificial Sequence
  Description of Artificial Sequence: Synthetic oligonucleotide
  Target: LAMA2; (-) strand; PAM type: YTN; PAM sequence: TTG
ttcgctgatttcagcattca

SEQ ID NO: 192923 - DNA, 20 bp, Artificial Sequence
  Description of Artificial Sequence: Synthetic oligonucleotide
  Target: LAMA2; (-) strand; PAM type: YTN; PAM sequence: TTT
gttcgctgatttcagcattc

SEQ ID NO: 192924 - DNA, 20 bp, Artificial Sequence
  Description of Artificial Sequence: Synthetic oligonucleotide
  Target: LAMA2; (-) strand; PAM type: YTN; PAM sequence: TTT
tgttcgctgatttcagcatt

SEQ ID NO: 192925 - DNA, 20 bp, Artificial Sequence
  Description of Artificial Sequence: Synthetic oligonucleotide
  Target: LAMA2; (-) strand; PAM type: YTN; PAM sequence: TTA
cattttgttcgctgatttca

SEQ ID NO: 192926 - DNA, 20 bp, Artificial Sequence
  Description of Artificial Sequence: Synthetic oligonucleotide
  Target: LAMA2; (-) strand; PAM type: YTN; PAM sequence: TTT
acattttgttcgctgatttc

SEQ ID NO: 192927 - DNA, 20 bp, Artificial Sequence
  Description of Artificial Sequence: Synthetic oligonucleotide
  Target: LAMA2; (-) strand; PAM type: YTN; PAM sequence: CTT
tacattttgttcgctgattt

SEQ ID NO: 192928 - DNA, 20 bp, Artificial Sequence
  Description of Artificial Sequence: Synthetic oligonucleotide
  Target: LAMA2; (-) strand; PAM type: YTN; PAM sequence: CTC
actttacattttgttcgctg

SEQ ID NO: 192929 - DNA, 20 bp, Artificial Sequence
  Description of Artificial Sequence: Synthetic oligonucleotide
  Target: LAMA2; (-) strand; PAM type: YTN; PAM sequence: TTG
ctcactttacattttgttcg

SEQ ID NO: 192930 - DNA, 20 bp, Artificial Sequence
  Description of Artificial Sequence: Synthetic oligonucleotide
  Target: LAMA2; (-) strand; PAM type: YTN; PAM sequence: TTA
gttgctcactttacattttg

SEQ ID NO: 192931 - DNA, 20 bp, Artificial Sequence
  Description of Artificial Sequence: Synthetic oligonucleotide
  Target: LAMA2; (-) strand; PAM type: YTN; PAM sequence: CTT
agttgctcactttacatttt

SEQ ID NO: 192932 - DNA, 20 bp, Artificial Sequence
  Description of Artificial Sequence: Synthetic oligonucleotide
  Target: LAMA2; (-) strand; PAM type: YTN; PAM sequence: TTC
ttagttgctcactttacatt

SEQ ID NO: 192933 - DNA, 20 bp, Artificial Sequence
  Description of Artificial Sequence: Synthetic oligonucleotide
  Target: LAMA2; (-) strand; PAM type: YTN; PAM sequence: TTT
cttagttgctcactttacat

SEQ ID NO: 192934 - DNA, 20 bp, Artificial Sequence
  Description of Artificial Sequence: Synthetic oligonucleotide
  Target: LAMA2; (-) strand; PAM type: YTN; PAM sequence: TTA
taagtatttcttagttgctc

SEQ ID NO: 192935 - DNA, 20 bp, Artificial Sequence
  Description of Artificial Sequence: Synthetic oligonucleotide
  Target: LAMA2; (-) strand; PAM type: YTN; PAM sequence: CTT
ataagtatttcttagttgct

SEQ ID NO: 192936 - DNA, 20 bp, Artificial Sequence
  Description of Artificial Sequence: Synthetic oligonucleotide
  Target: LAMA2; (-) strand; PAM type: YTN; PAM sequence: TTA
aataatacaagtgagccctt

SEQ ID NO: 192937 - DNA, 20 bp, Artificial Sequence
  Description of Artificial Sequence: Synthetic oligonucleotide
  Target: LAMA2; (-) strand; PAM type: YTN; PAM sequence: TTA
cacagttaaataatacaagt

SEQ ID NO: 192938 - DNA, 20 bp, Artificial Sequence
  Description of Artificial Sequence: Synthetic oligonucleotide
  Target: LAMA2; (-) strand; PAM type: YTN; PAM sequence: TTA
catatatatgagatagagga

SEQ ID NO: 192939 - DNA, 20 bp, Artificial Sequence
  Description of Artificial Sequence: Synthetic oligonucleotide
  Target: LAMA2; (-) strand; PAM type: YTN; PAM sequence: TTG
aagaaagtattacatatata

SEQ ID NO: 192940 - DNA, 20 bp, Artificial Sequence
  Description of Artificial Sequence: Synthetic oligonucleotide
  Target: LAMA2; (-) strand; PAM type: YTN; PAM sequence: CTT
gaagaaagtattacatatat

SEQ ID NO: 192941 - DNA, 20 bp, Artificial Sequence
  Description of Artificial Sequence: Synthetic oligonucleotide
  Target: LAMA2; (-) strand; PAM type: YTN; PAM sequence: CTA
taatgaacttgaagaaagta

SEQ ID NO: 192942 - DNA, 20 bp, Artificial Sequence
  Description of Artificial Sequence: Synthetic oligonucleotide
  Target: LAMA2; (-) strand; PAM type: YTN; PAM sequence: CTG
ggcccgggagctataatgaa

SEQ ID NO: 192943 - DNA, 20 bp, Artificial Sequence
  Description of Artificial Sequence: Synthetic oligonucleotide
  Target: LAMA2; (-) strand; PAM type: YTN; PAM sequence: CTA
ggatgtactgggcccgggag

SEQ ID NO: 192944 - DNA, 20 bp, Artificial Sequence
  Description of Artificial Sequence: Synthetic oligonucleotide
  Target: LAMA2; (-) strand; PAM type: YTN; PAM sequence: CTG
gactaggatgtactgggccc

SEQ ID NO: 192945 - DNA, 20 bp, Artificial Sequence
  Description of Artificial Sequence: Synthetic oligonucleotide
  Target: LAMA2; (-) strand; PAM type: YTN; PAM sequence: TTG
gaactggactaggatgtact

SEQ ID NO: 192946 - DNA, 20 bp, Artificial Sequence
  Description of Artificial Sequence: Synthetic oligonucleotide
  Target: LAMA2; (-) strand; PAM type: YTN; PAM sequence: TTA
gacatggttggaactggact

SEQ ID NO: 192947 - DNA, 20 bp, Artificial Sequence
  Description of Artificial Sequence: Synthetic oligonucleotide
  Target: LAMA2; (-) strand; PAM type: YTN; PAM sequence: TTA
aaattagacatggttggaac

SEQ ID NO: 192948 - DNA, 20 bp, Artificial Sequence
  Description of Artificial Sequence: Synthetic oligonucleotide
  Target: LAMA2; (-) strand; PAM type: YTN; PAM sequence: TTT
aaaattagacatggttggaa

SEQ ID NO: 192949 - DNA, 20 bp, Artificial Sequence
  Description of Artificial Sequence: Synthetic oligonucleotide
  Target: LAMA2; (-) strand; PAM type: YTN; PAM sequence: TTT
taaaattagacatggttgga

SEQ ID NO: 192950 - DNA, 20 bp, Artificial Sequence
  Description of Artificial Sequence: Synthetic oligonucleotide
  Target: LAMA2; (-) strand; PAM type: YTN; PAM sequence: CTA
ttttaaaattagacatggtt

SEQ ID NO: 192951 - DNA, 20 bp, Artificial Sequence
  Description of Artificial Sequence: Synthetic oligonucleotide
  Target: LAMA2; (-) strand; PAM type: YTN; PAM sequence: TTG
aagtgagcatagctatttta

SEQ ID NO: 192952 - DNA, 20 bp, Artificial Sequence
  Description of Artificial Sequence: Synthetic oligonucleotide
  Target: LAMA2; (-) strand; PAM type: YTN; PAM sequence: TTT
gaagtgagcatagctatttt

SEQ ID NO: 192953 - DNA, 20 bp, Artificial Sequence
  Description of Artificial Sequence: Synthetic oligonucleotide
  Target: LAMA2; (-) strand; PAM type: YTN; PAM sequence: TTC
gtttgaagtgagcatagcta

SEQ ID NO: 192954 - DNA, 20 bp, Artificial Sequence
  Description of Artificial Sequence: Synthetic oligonucleotide
  Target: LAMA2; (-) strand; PAM type: YTN; PAM sequence: CTT
cgtttgaagtgagcatagct

SEQ ID NO: 192955 - DNA, 20 bp, Artificial Sequence
  Description of Artificial Sequence: Synthetic oligonucleotide
  Target: LAMA2; (-) strand; PAM type: YTN; PAM sequence: CTA
tagcaacatcttcgtttgaa

SEQ ID NO: 192956 - DNA, 20 bp, Artificial Sequence
  Description of Artificial Sequence: Synthetic oligonucleotide
  Target: LAMA2; (-) strand; PAM type: YTN; PAM sequence: CTA
taaaataaaataaagctata

SEQ ID NO: 192957 - DNA, 20 bp, Artificial Sequence
  Description of Artificial Sequence: Synthetic oligonucleotide
  Target: LAMA2; (-) strand; PAM type: YTN; PAM sequence: TTG
aagcctataaaataaaataa

SEQ ID NO: 192958 - DNA, 20 bp, Artificial Sequence
  Description of Artificial Sequence: Synthetic oligonucleotide
  Target: LAMA2; (-) strand; PAM type: YTN; PAM sequence: TTA
aaattgaagcctataaaata

SEQ ID NO: 192959 - DNA, 20 bp, Artificial Sequence
  Description of Artificial Sequence: Synthetic oligonucleotide
  Target: LAMA2; (-) strand; PAM type: YTN; PAM sequence: TTT
aaaattgaagcctataaaat

SEQ ID NO: 192960 - DNA, 20 bp, Artificial Sequence
  Description of Artificial Sequence: Synthetic oligonucleotide
  Target: LAMA2; (-) strand; PAM type: YTN; PAM sequence: CTT
taaaattgaagcctataaaa

SEQ ID NO: 192961 - DNA, 20 bp, Artificial Sequence
  Description of Artificial Sequence: Synthetic oligonucleotide
  Target: LAMA2; (-) strand; PAM type: YTN; PAM sequence: CTA
taggtgatacaactttaaaa

SEQ ID NO: 192962 - DNA, 20 bp, Artificial Sequence
  Description of Artificial Sequence: Synthetic oligonucleotide
  Target: LAMA2; (-) strand; PAM type: YTN; PAM sequence: TTA
tctataggtgatacaacttt

SEQ ID NO: 192963 - DNA, 20 bp, Artificial Sequence
  Description of Artificial Sequence: Synthetic oligonucleotide
  Target: LAMA2; (-) strand; PAM type: YTN; PAM sequence: TTG
ttatctataggtgatacaac

SEQ ID NO: 192964 - DNA, 20 bp, Artificial Sequence
  Description of Artificial Sequence: Synthetic oligonucleotide
  Target: LAMA2; (-) strand; PAM type: YTN; PAM sequence: TTT
gttatctataggtgatacaa

SEQ ID NO: 192965 - DNA, 20 bp, Artificial Sequence
  Description of Artificial Sequence: Synthetic oligonucleotide
  Target: LAMA2; (-) strand; PAM type: YTN; PAM sequence: CTT
tgttatctataggtgataca

SEQ ID NO: 192966 - DNA, 20 bp, Artificial Sequence
  Description of Artificial Sequence: Synthetic oligonucleotide
  Target: LAMA2; (-) strand; PAM type: YTN; PAM sequence: CTG
tctttgttatctataggtga

SEQ ID NO: 192967 - DNA, 20 bp, Artificial Sequence
  Description of Artificial Sequence: Synthetic oligonucleotide
  Target: LAMA2; (-) strand; PAM type: YTN; PAM sequence: TTG
aggtgtccatgaaagctgtc

SEQ ID NO: 192968 - DNA, 20 bp, Artificial Sequence
  Description of Artificial Sequence: Synthetic oligonucleotide
  Target: LAMA2; (-) strand; PAM type: YTN; PAM sequence: CTA
aattgaggtgtccatgaaag

SEQ ID NO: 192969 - DNA, 20 bp, Artificial Sequence
  Description of Artificial Sequence: Synthetic oligonucleotide
  Target: LAMA2; (-) strand; PAM type: YTN; PAM sequence: TTC
taaattgaggtgtccatgaa

SEQ ID NO: 192970 - DNA, 20 bp, Artificial Sequence
  Description of Artificial Sequence: Synthetic oligonucleotide
  Target: LAMA2; (-) strand; PAM type: YTN; PAM sequence: CTT
ctaaattgaggtgtccatga

SEQ ID NO: 192971 - DNA, 20 bp, Artificial Sequence
  Description of Artificial Sequence: Synthetic oligonucleotide
  Target: LAMA2; (-) strand; PAM type: YTN; PAM sequence: CTC
ttctaaattgaggtgtccat

SEQ ID NO: 192972 - DNA, 20 bp, Artificial Sequence
  Description of Artificial Sequence: Synthetic oligonucleotide
  Target: LAMA2; (-) strand; PAM type: YTN; PAM sequence: CTA
taagactcttctaaattgag

SEQ ID NO: 192973 - DNA, 20 bp, Artificial Sequence
  Description of Artificial Sequence: Synthetic oligonucleotide
  Target: LAMA2; (-) strand; PAM type: YTN; PAM sequence: CTC
acaaagtgcctataagactc

SEQ ID NO: 192974 - DNA, 20 bp, Artificial Sequence
  Description of Artificial Sequence: Synthetic oligonucleotide
  Target: LAMA2; (-) strand; PAM type: YTN; PAM sequence: TTA
tctcacaaagtgcctataag

SEQ ID NO: 192975 - DNA, 20 bp, Artificial Sequence
  Description of Artificial Sequence: Synthetic oligonucleotide
  Target: LAMA2; (-) strand; PAM type: YTN; PAM sequence: TTT
atctcacaaagtgcctataa

SEQ ID NO: 192976 - DNA, 20 bp, Artificial Sequence
  Description of Artificial Sequence: Synthetic oligonucleotide
  Target: LAMA2; (-) strand; PAM type: YTN; PAM sequence: TTA
cagtttatctcacaaagtgc

SEQ ID NO: 192977 - DNA, 20 bp, Artificial Sequence
  Description of Artificial Sequence: Synthetic oligonucleotide
  Target: LAMA2; (-) strand; PAM type: YTN; PAM sequence: CTT
acagtttatctcacaaagtg

SEQ ID NO: 192978 - DNA, 20 bp, Artificial Sequence
  Description of Artificial Sequence: Synthetic oligonucleotide
  Target: LAMA2; (-) strand; PAM type: YTN; PAM sequence: TTA
gcacatacacttacagttta

SEQ ID NO: 192979 - DNA, 20 bp, Artificial Sequence
  Description of Artificial Sequence: Synthetic oligonucleotide
  Target: LAMA2; (-) strand; PAM type: YTN; PAM sequence: CTG
attagcacatacacttacag

SEQ ID NO: 192980 - DNA, 20 bp, Artificial Sequence
  Description of Artificial Sequence: Synthetic oligonucleotide
  Target: LAMA2; (-) strand; PAM type: YTN; PAM sequence: TTA
tctgattagcacatacactt

SEQ ID NO: 192981 - DNA, 20 bp, Artificial Sequence
  Description of Artificial Sequence: Synthetic oligonucleotide
  Target: LAMA2; (-) strand; PAM type: YTN; PAM sequence: CTA
gtaaaagaattatctgatta

SEQ ID NO: 192982 - DNA, 20 bp, Artificial Sequence
  Description of Artificial Sequence: Synthetic oligonucleotide
  Target: LAMA2; (-) strand; PAM type: YTN; PAM sequence: CTC
tagtaaaagaattatctgat

SEQ ID NO: 192983 - DNA, 20 bp, Artificial Sequence
  Description of Artificial Sequence: Synthetic oligonucleotide
  Target: LAMA2; (-) strand; PAM type: YTN; PAM sequence: CTA
aagtctctagtaaaagaatt

SEQ ID NO: 192984 - DNA, 20 bp, Artificial Sequence
  Description of Artificial Sequence: Synthetic oligonucleotide
  Target: LAMA2; (-) strand; PAM type: YTN; PAM sequence: TTC
acctaaagtctctagtaaaa

SEQ ID NO: 192985 - DNA, 20 bp, Artificial Sequence
  Description of Artificial Sequence: Synthetic oligonucleotide
  Target: LAMA2; (-) strand; PAM type: YTN; PAM sequence: CTT
cacctaaagtctctagtaaa

SEQ ID NO: 192986 - DNA, 20 bp, Artificial Sequence
  Description of Artificial Sequence: Synthetic oligonucleotide
  Target: LAMA2; (-) strand; PAM type: YTN; PAM sequence: CTA
tcttcacctaaagtctctag

SEQ ID NO: 192987 - DNA, 20 bp, Artificial Sequence
  Description of Artificial Sequence: Synthetic oligonucleotide
  Target: LAMA2; (-) strand; PAM type: YTN; PAM sequence: TTG
ctatcttcacctaaagtctc

SEQ ID NO: 192988 - DNA, 20 bp, Artificial Sequence
  Description of Artificial Sequence: Synthetic oligonucleotide
  Target: LAMA2; (-) strand; PAM type: YTN; PAM sequence: TTT
gctatcttcacctaaagtct

SEQ ID NO: 192989 - DNA, 20 bp, Artificial Sequence
  Description of Artificial Sequence: Synthetic oligonucleotide
  Target: LAMA2; (-) strand; PAM type: YTN; PAM sequence: TTA
gaagatttgctatcttcacc

SEQ ID NO: 192990 - DNA, 20 bp, Artificial Sequence
  Description of Artificial Sequence: Synthetic oligonucleotide
  Target: LAMA2; (-) strand; PAM type: YTN; PAM sequence: TTT
agaagatttgctatcttcac

SEQ ID NO: 192991 - DNA, 20 bp, Artificial Sequence
  Description of Artificial Sequence: Synthetic oligonucleotide
  Target: LAMA2; (-) strand; PAM type: YTN; PAM sequence: TTT
tagaagatttgctatcttca

SEQ ID NO: 192992 - DNA, 20 bp, Artificial Sequence
  Description of Artificial Sequence: Synthetic oligonucleotide
  Target: LAMA2; (-) strand; PAM type: YTN; PAM sequence: CTG
ttttagaagatttgctatct

SEQ ID NO: 192993 - DNA, 20 bp, Artificial Sequence
  Description of Artificial Sequence: Synthetic oligonucleotide
  Target: LAMA2; (-) strand; PAM type: YTN; PAM sequence: TTA
tcagtctgttttagaagatt

SEQ ID NO: 192994 - DNA, 20 bp, Artificial Sequence
  Description of Artificial Sequence: Synthetic oligonucleotide
  Target: LAMA2; (-) strand; PAM type: YTN; PAM sequence: TTA
attatcagtctgttttagaa

SEQ ID NO: 192995 - DNA, 20 bp, Artificial Sequence
  Description of Artificial Sequence: Synthetic oligonucleotide
  Target: LAMA2; (-) strand; PAM type: YTN; PAM sequence: TTT
aattatcagtctgttttaga

SEQ ID NO: 192996 - DNA, 20 bp, Artificial Sequence
  Description of Artificial Sequence: Synthetic oligonucleotide
  Target: LAMA2; (-) strand; PAM type: YTN; PAM sequence: TTG
ataataatgaacccaataat

SEQ ID NO: 192997 - DNA, 20 bp, Artificial Sequence
  Description of Artificial Sequence: Synthetic oligonucleotide
  Target: LAMA2; (-) strand; PAM type: YTN; PAM sequence: TTT
gataataatgaacccaataa

SEQ ID NO: 192998 - DNA, 20 bp, Artificial Sequence
  Description of Artificial Sequence: Synthetic oligonucleotide
  Target: LAMA2; (-) strand; PAM type: YTN; PAM sequence: TTC
aatttgataataatgaaccc

SEQ ID NO: 192999 - DNA, 20 bp, Artificial Sequence
  Description of Artificial Sequence: Synthetic oligonucleotide
  Target: LAMA2; (-) strand; PAM type: YTN; PAM sequence: TTT
caatttgataataatgaacc

SEQ ID NO: 193000 - DNA, 20 bp, Artificial Sequence
  Description of Artificial Sequence: Synthetic oligonucleotide
  Target: LAMA2; (-) strand; PAM type: YTN; PAM sequence: TTA
caaaataaagcatatttcaa

SEQ ID NO: 193001 - DNA, 20 bp, Artificial Sequence
  Description of Artificial Sequence: Synthetic oligonucleotide
  Target: LAMA2; (-) strand; PAM type: YTN; PAM sequence: TTA
aacattacaaaataaagcat

SEQ ID NO: 193002 - DNA, 20 bp, Artificial Sequence
  Description of Artificial Sequence: Synthetic oligonucleotide
  Target: LAMA2; (-) strand; PAM type: YTN; PAM sequence: TTT
aaacattacaaaataaagca

SEQ ID NO: 193003 - DNA, 20 bp, Artificial Sequence
  Description of Artificial Sequence: Synthetic oligonucleotide
  Target: LAMA2; (-) strand; PAM type: YTN; PAM sequence: TTT
taaacattacaaaataaagc

SEQ ID NO: 193004 - DNA, 20 bp, Artificial Sequence
  Description of Artificial Sequence: Synthetic oligonucleotide
  Target: LAMA2; (-) strand; PAM type: YTN; PAM sequence: TTA
agaacacattttaaacatta

SEQ ID NO: 193005 - DNA, 20 bp, Artificial Sequence
  Description of Artificial Sequence: Synthetic oligonucleotide
  Target: LAMA2; (-) strand; PAM type: YTN; PAM sequence: TTT
aagaacacattttaaacatt

SEQ ID NO: 193006 - DNA, 20 bp, Artificial Sequence
  Description of Artificial Sequence: Synthetic oligonucleotide
  Target: LAMA2; (-) strand; PAM type: YTN; PAM sequence: CTG
aatttaagaacacattttaa

SEQ ID NO: 193007 - DNA, 20 bp, Artificial Sequence
  Description of Artificial Sequence: Synthetic oligonucleotide
  Target: LAMA2; (-) strand; PAM type: YTN; PAM sequence: CTA
ctgaatttaagaacacattt

SEQ ID NO: 193008 - DNA, 20 bp, Artificial Sequence
  Description of Artificial Sequence: Synthetic oligonucleotide
  Target: LAMA2; (-) strand; PAM type: YTN; PAM sequence: TTC
tactgaatttaagaacacat

SEQ ID NO: 193009 - DNA, 20 bp, Artificial Sequence
  Description of Artificial Sequence: Synthetic oligonucleotide
  Target: LAMA2; (-) strand; PAM type: YTN; PAM sequence: TTA
atattctactgaatttaaga

SEQ ID NO: 193010 - DNA, 20 bp, Artificial Sequence
  Description of Artificial Sequence: Synthetic oligonucleotide
  Target: LAMA2; (-) strand; PAM type: YTN; PAM sequence: TTA
aaaatggaaaagtataatat

SEQ ID NO: 193011 - DNA, 20 bp, Artificial Sequence
  Description of Artificial Sequence: Synthetic oligonucleotide
  Target: LAMA2; (-) strand; PAM type: YTN; PAM sequence: TTT
aaaaatggaaaagtataata

SEQ ID NO: 193012 - DNA, 20 bp, Artificial Sequence
  Description of Artificial Sequence: Synthetic oligonucleotide
  Target: LAMA2; (-) strand; PAM type: YTN; PAM sequence: TTA
atatgatttaaaaatggaaa

SEQ ID NO: 193013 - DNA, 20 bp, Artificial Sequence
  Description of Artificial Sequence: Synthetic oligonucleotide
  Target: LAMA2; (-) strand; PAM type: YTN; PAM sequence: TTT
aatatgatttaaaaatggaa

SEQ ID NO: 193014 - DNA, 20 bp, Artificial Sequence
  Description of Artificial Sequence: Synthetic oligonucleotide
  Target: LAMA2; (-) strand; PAM type: YTN; PAM sequence: TTT
taatatgatttaaaaatgga

SEQ ID NO: 193015 - DNA, 20 bp, Artificial Sequence
  Description of Artificial Sequence: Synthetic oligonucleotide
  Target: LAMA2; (-) strand; PAM type: YTN; PAM sequence: TTT
ttaatatgatttaaaaatgg

SEQ ID NO: 193016 - DNA, 20 bp, Artificial Sequence
  Description of Artificial Sequence: Synthetic oligonucleotide
  Target: LAMA2; (-) strand; PAM type: YTN; PAM sequence: CTA
tttttaatatgatttaaaaa

SEQ ID NO: 193017 - DNA, 20 bp, Artificial Sequence
  Description of Artificial Sequence: Synthetic oligonucleotide
  Target: LAMA2; (-) strand; PAM type: YTN; PAM sequence: TTG
ctatttttaatatgatttaa

SEQ ID NO: 193018 - DNA, 20 bp, Artificial Sequence
  Description of Artificial Sequence: Synthetic oligonucleotide
  Target: LAMA2; (-) strand; PAM type: YTN; PAM sequence: TTT
gctatttttaatatgattta

SEQ ID NO: 193019 - DNA, 20 bp, Artificial Sequence
  Description of Artificial Sequence: Synthetic oligonucleotide
  Target: LAMA2; (-) strand; PAM type: YTN; PAM sequence: TTT
tgctatttttaatatgattt

SEQ ID NO: 193020 - DNA, 20 bp, Artificial Sequence
  Description of Artificial Sequence: Synthetic oligonucleotide
  Target: LAMA2; (-) strand; PAM type: YTN; PAM sequence: TTT
ttgctatttttaatatgatt

SEQ ID NO: 193021 - DNA, 20 bp, Artificial Sequence
  Description of Artificial Sequence: Synthetic oligonucleotide
  Target: LAMA2; (-) strand; PAM type: YTN; PAM sequence: TTG
aagaagtaatatttttgcta

SEQ ID NO: 193022 - DNA, 20 bp, Artificial Sequence
  Description of Artificial Sequence: Synthetic oligonucleotide
  Target: LAMA2; (-) strand; PAM type: YTN; PAM sequence: TTT
gaagaagtaatatttttgct

SEQ ID NO: 193023 - DNA, 20 bp, Artificial Sequence
  Description of Artificial Sequence: Synthetic oligonucleotide
  Target: LAMA2; (-) strand; PAM type: YTN; PAM sequence: TTT
tgaagaagtaatatttttgc

SEQ ID NO: 193024 - DNA, 20 bp, Artificial Sequence
  Description of Artificial Sequence: Synthetic oligonucleotide
  Target: LAMA2; (-) strand; PAM type: YTN; PAM sequence: TTT
ttgaagaagtaatatttttg

SEQ ID NO: 193025 - DNA, 20 bp, Artificial Sequence
  Description of Artificial Sequence: Synthetic oligonucleotide
  Target: LAMA2; (-) strand; PAM type: YTN; PAM sequence: TTA
aaatcagtaatatacatgaa

SEQ ID NO: 193026 - DNA, 20 bp, Artificial Sequence
  Description of Artificial Sequence: Synthetic oligonucleotide
  Target: LAMA2; (-) strand; PAM type: YTN; PAM sequence: CTT
aaaatcagtaatatacatga

SEQ ID NO: 193027 - DNA, 20 bp, Artificial Sequence
  Description of Artificial Sequence: Synthetic oligonucleotide
  Target: LAMA2; (-) strand; PAM type: YTN; PAM sequence: TTA
cttaaaatcagtaatataca

SEQ ID NO: 193028 - DNA, 20 bp, Artificial Sequence
  Description of Artificial Sequence: Synthetic oligonucleotide
  Target: LAMA2; (-) strand; PAM type: YTN; PAM sequence: TTT
acttaaaatcagtaatatac

SEQ ID NO: 193029 - DNA, 20 bp, Artificial Sequence
  Description of Artificial Sequence: Synthetic oligonucleotide
  Target: LAMA2; (-) strand; PAM type: YTN; PAM sequence: TTT
tacttaaaatcagtaatata

SEQ ID NO: 193030 - DNA, 20 bp, Artificial Sequence
  Description of Artificial Sequence: Synthetic oligonucleotide
  Target: LAMA2; (-) strand; PAM type: YTN; PAM sequence: CTT
ttacttaaaatcagtaatat

SEQ ID NO: 193031 - DNA, 20 bp, Artificial Sequence
  Description of Artificial Sequence: Synthetic oligonucleotide
  Target: LAMA2; (-) strand; PAM type: YTN; PAM sequence: TTG
tacttttacttaaaatcagt

SEQ ID NO: 193032 - DNA, 20 bp, Artificial Sequence
  Description of Artificial Sequence: Synthetic oligonucleotide
  Target: LAMA2; (-) strand; PAM type: YTN; PAM sequence: TTA
attgtacttttacttaaaat

SEQ ID NO: 193033 - DNA, 20 bp, Artificial Sequence
  Description of Artificial Sequence: Synthetic oligonucleotide
  Target: LAMA2; (-) strand; PAM type: YTN; PAM sequence: CTT
aattgtacttttacttaaaa

SEQ ID NO: 193034 - DNA, 20 bp, Artificial Sequence
  Description of Artificial Sequence: Synthetic oligonucleotide
  Target: LAMA2; (-) strand; PAM type: YTN; PAM sequence: TTG
tcttaattgtacttttactt

SEQ ID NO: 193035 - DNA, 20 bp, Artificial Sequence
  Description of Artificial Sequence: Synthetic oligonucleotide
  Target: LAMA2; (-) strand; PAM type: YTN; PAM sequence: CTA
attgtcttaattgtactttt

SEQ ID NO: 193036 - DNA, 20 bp, Artificial Sequence
  Description of Artificial Sequence: Synthetic oligonucleotide
  Target: LAMA2; (-) strand; PAM type: YTN; PAM sequence: CTG
gctaattgtcttaattgtac

SEQ ID NO: 193037 - DNA, 20 bp, Artificial Sequence
  Description of Artificial Sequence: Synthetic oligonucleotide
  Target: LAMA2; (-) strand; PAM type: YTN; PAM sequence: CTC
ataaataggtctggctaatt

SEQ ID NO: 193038 - DNA, 20 bp, Artificial Sequence
  Description of Artificial Sequence: Synthetic oligonucleotide
  Target: LAMA2; (-) strand; PAM type: YTN; PAM sequence: CTA
ctcataaataggtctggcta

SEQ ID NO: 193039 - DNA, 20 bp, Artificial Sequence
  Description of Artificial Sequence: Synthetic oligonucleotide
  Target: LAMA2; (-) strand; PAM type: YTN; PAM sequence: TTA
gagctactcataaataggtc

SEQ ID NO: 193040 - DNA, 20 bp, Artificial Sequence
  Description of Artificial Sequence: Synthetic oligonucleotide
  Target: LAMA2; (-) strand; PAM type: YTN; PAM sequence: CTC
caattagagctactcataaa

SEQ ID NO: 193041 - DNA, 20 bp, Artificial Sequence
  Description of Artificial Sequence: Synthetic oligonucleotide
  Target: LAMA2; (-) strand; PAM type: YTN; PAM sequence: CTG
ctccaattagagctactcat

SEQ ID NO: 193042 - DNA, 20 bp, Artificial Sequence
  Description of Artificial Sequence: Synthetic oligonucleotide
  Target: LAMA2; (-) strand; PAM type: YTN; PAM sequence: CTG
aatagggtccagcaacaagc

SEQ ID NO: 193043 - DNA, 20 bp, Artificial Sequence
  Description of Artificial Sequence: Synthetic oligonucleotide
  Target: LAMA2; (-) strand; PAM type: YTN; PAM sequence: CTA
ccactgaatagggtccagca

SEQ ID NO: 193044 - DNA, 20 bp, Artificial Sequence
  Description of Artificial Sequence: Synthetic oligonucleotide
  Target: LAMA2; (-) strand; PAM type: YTN; PAM sequence: CTC
taccactgaatagggtccag

SEQ ID NO: 193045 - DNA, 20 bp, Artificial Sequence
  Description of Artificial Sequence: Synthetic oligonucleotide
  Target: LAMA2; (-) strand; PAM type: YTN; PAM sequence: TTA
tctctaccactgaatagggt

SEQ ID NO: 193046 - DNA, 20 bp, Artificial Sequence
  Description of Artificial Sequence: Synthetic oligonucleotide
  Target: LAMA2; (-) strand; PAM type: YTN; PAM sequence: CTT
atctctaccactgaataggg

SEQ ID NO: 193047 - DNA, 20 bp, Artificial Sequence
  Description of Artificial Sequence: Synthetic oligonucleotide
  Target: LAMA2; (-) strand; PAM type: YTN; PAM sequence: CTC
aaccttatctctaccactga

SEQ ID NO: 193048 - DNA, 20 bp, Artificial Sequence
  Description of Artificial Sequence: Synthetic oligonucleotide
  Target: LAMA2; (-) strand; PAM type: YTN; PAM sequence: TTC
agccatctcaaccttatctc

SEQ ID NO: 193049 - DNA, 20 bp, Artificial Sequence
  Description of Artificial Sequence: Synthetic oligonucleotide
  Target: LAMA2; (-) strand; PAM type: YTN; PAM sequence: CTA
ttcagccatctcaaccttat

SEQ ID NO: 193050 - DNA, 20 bp, Artificial Sequence
  Description of Artificial Sequence: Synthetic oligonucleotide
  Target: LAMA2; (-) strand; PAM type: YTN; PAM sequence: TTA
gatgaactattcagccatct

SEQ ID NO: 193051 - DNA, 20 bp, Artificial Sequence
  Description of Artificial Sequence: Synthetic oligonucleotide
  Target: LAMA2; (-) strand; PAM type: YTN; PAM sequence: TTC
aaattagatgaactattcag

SEQ ID NO: 193052 - DNA, 20 bp, Artificial Sequence
  Description of Artificial Sequence: Synthetic oligonucleotide
  Target: LAMA2; (-) strand; PAM type: YTN; PAM sequence: TTT
caaattagatgaactattca

SEQ ID NO: 193053 - DNA, 20 bp, Artificial Sequence
  Description of Artificial Sequence: Synthetic oligonucleotide
  Target: LAMA2; (-) strand; PAM type: YTN; PAM sequence: TTC
aggaaaaggtccatgtgaca

SEQ ID NO: 193054 - DNA, 20 bp, Artificial Sequence
  Description of Artificial Sequence: Synthetic oligonucleotide
  Target: LAMA2; (-) strand; PAM type: YTN; PAM sequence: TTG
gccaaatagtgagtacatag

SEQ ID NO: 193055 - DNA, 20 bp, Artificial Sequence
  Description of Artificial Sequence: Synthetic oligonucleotide
  Target: LAMA2; (-) strand; PAM type: YTN; PAM sequence: TTT
ggccaaatagtgagtacata

SEQ ID NO: 193056 - DNA, 20 bp, Artificial Sequence
  Description of Artificial Sequence: Synthetic oligonucleotide
  Target: LAMA2; (-) strand; PAM type: YTN; PAM sequence: TTC
agcatttggccaaatagtga

SEQ ID NO: 193057 - DNA, 20 bp, Artificial Sequence
  Description of Artificial Sequence: Synthetic oligonucleotide
  Target: LAMA2; (-) strand; PAM type: YTN; PAM sequence: TTT
cagcatttggccaaatagtg

SEQ ID NO: 193058 - DNA, 20 bp, Artificial Sequence
  Description of Artificial Sequence: Synthetic oligonucleotide
  Target: LAMA2; (-) strand; PAM type: YTN; PAM sequence: TTT
tcagcatttggccaaatagt

SEQ ID NO: 193059 - DNA, 20 bp, Artificial Sequence
  Description of Artificial Sequence: Synthetic oligonucleotide
  Target: LAMA2; (-) strand; PAM type: YTN; PAM sequence: TTC
attttcagcatttggccaaa

SEQ ID NO: 193060 - DNA, 20 bp, Artificial Sequence
  Description of Artificial Sequence: Synthetic oligonucleotide
  Target: LAMA2; (-) strand; PAM type: YTN; PAM sequence: TTG
acggaggcaaatatatgttc

SEQ ID NO: 193061 - DNA, 20 bp, Artificial Sequence
  Description of Artificial Sequence: Synthetic oligonucleotide
  Target: LAMA2; (-) strand; PAM type: YTN; PAM sequence: TTT
gacggaggcaaatatatgtt

SEQ ID NO: 193062 - DNA, 20 bp, Artificial Sequence
  Description of Artificial Sequence: Synthetic oligonucleotide
  Target: LAMA2; (-) strand; PAM type: YTN; PAM sequence: TTT
tgacggaggcaaatatatgt

SEQ ID NO: 193063 - DNA, 20 bp, Artificial Sequence
  Description of Artificial Sequence: Synthetic oligonucleotide
  Target: LAMA2; (-) strand; PAM type: YTN; PAM sequence: TTA
caaaacattttgacggaggc

SEQ ID NO: 193064 - DNA, 20 bp, Artificial Sequence
  Description of Artificial Sequence: Synthetic oligonucleotide
  Target: LAMA2; (-) strand; PAM type: YTN; PAM sequence: TTT
acaaaacattttgacggagg

SEQ ID NO: 193065 - DNA, 20 bp, Artificial Sequence
  Description of Artificial Sequence: Synthetic oligonucleotide
  Target: LAMA2; (-) strand; PAM type: YTN; PAM sequence: CTG
agtgaacatttacaaaacat

SEQ ID NO: 193066 - DNA, 20 bp, Artificial Sequence
  Description of Artificial Sequence: Synthetic oligonucleotide
  Target: LAMA2; (-) strand; PAM type: YTN; PAM sequence: TTA
tgtcaatgtctgagtgaaca

SEQ ID NO: 193067 - DNA, 20 bp, Artificial Sequence
  Description of Artificial Sequence: Synthetic oligonucleotide
  Target: LAMA2; (-) strand; PAM type: YTN; PAM sequence: TTT
atgtcaatgtctgagtgaac

SEQ ID NO: 193068 - DNA, 20 bp, Artificial Sequence
  Description of Artificial Sequence: Synthetic oligonucleotide
  Target: LAMA2; (-) strand; PAM type: YTN; PAM sequence: TTG
tttatgtcaatgtctgagtg

SEQ ID NO: 193069 - DNA, 20 bp, Artificial Sequence
  Description of Artificial Sequence: Synthetic oligonucleotide
  Target: LAMA2; (-) strand; PAM type: YTN; PAM sequence: CTT
gtttatgtcaatgtctgagt

SEQ ID NO: 193070 - DNA, 20 bp, Artificial Sequence
  Description of Artificial Sequence: Synthetic oligonucleotide
  Target: LAMA2; (-) strand; PAM type: YTN; PAM sequence: CTG
ccttgtttatgtcaatgtct

SEQ ID NO: 193071 - DNA, 20 bp, Artificial Sequence
  Description of Artificial Sequence: Synthetic oligonucleotide
  Target: LAMA2; (-) strand; PAM type: YTN; PAM sequence: TTC
tgccttgtttatgtcaatgt

SEQ ID NO: 193072 - DNA, 20 bp, Artificial Sequence
  Description of Artificial Sequence: Synthetic oligonucleotide
  Target: LAMA2; (-) strand; PAM type: YTN; PAM sequence: TTT
ctgccttgtttatgtcaatg

SEQ ID NO: 193073 - DNA, 20 bp, Artificial Sequence
  Description of Artificial Sequence: Synthetic oligonucleotide
  Target: LAMA2; (-) strand; PAM type: YTN; PAM sequence: CTT
tctgccttgtttatgtcaat

SEQ ID NO: 193074 - DNA, 20 bp, Artificial Sequence
  Description of Artificial Sequence: Synthetic oligonucleotide
  Target: LAMA2; (-) strand; PAM type: YTN; PAM sequence: TTA
acctttctgccttgtttatg

SEQ ID NO: 193075 - DNA, 20 bp, Artificial Sequence
  Description of Artificial Sequence: Synthetic oligonucleotide
  Target: LAMA2; (-) strand; PAM type: YTN; PAM sequence: TTA
tccattaacctttctgcctt

SEQ ID NO: 193076 - DNA, 20 bp, Artificial Sequence
  Description of Artificial Sequence: Synthetic oligonucleotide
  Target: LAMA2; (-) strand; PAM type: YTN; PAM sequence: TTT
atccattaacctttctgcct

SEQ ID NO: 193077 - DNA, 20 bp, Artificial Sequence
  Description of Artificial Sequence: Synthetic oligonucleotide
  Target: LAMA2; (-) strand; PAM type: YTN; PAM sequence: TTT
tatccattaacctttctgcc

SEQ ID NO: 193078 - DNA, 20 bp, Artificial Sequence
  Description of Artificial Sequence: Synthetic oligonucleotide
  Target: LAMA2; (-) strand; PAM type: YTN; PAM sequence: TTT
ttatccattaacctttctgc

SEQ ID NO: 193079 - DNA, 20 bp, Artificial Sequence
  Description of Artificial Sequence: Synthetic oligonucleotide
  Target: LAMA2; (-) strand; PAM type: YTN; PAM sequence: TTT
tttatccattaacctttctg

SEQ ID NO: 193080 - DNA, 20 bp, Artificial Sequence
  Description of Artificial Sequence: Synthetic oligonucleotide
  Target: LAMA2; (-) strand; PAM type: YTN; PAM sequence: TTA
aagaaaaagaattttttatc

SEQ ID NO: 193081 - DNA, 20 bp, Artificial Sequence
  Description of Artificial Sequence: Synthetic oligonucleotide
  Target: LAMA2; (-) strand; PAM type: YTN; PAM sequence: TTT
aaagaaaaagaattttttat

SEQ ID NO: 193082 - DNA, 20 bp, Artificial Sequence
  Description of Artificial Sequence: Synthetic oligonucleotide
  Target: LAMA2; (-) strand; PAM type: YTN; PAM sequence: TTT
taaagaaaaagaatttttta

SEQ ID NO: 193083 - DNA, 20 bp, Artificial Sequence
  Description of Artificial Sequence: Synthetic oligonucleotide
  Target: LAMA2; (-) strand; PAM type: YTN; PAM sequence: TTT
ttaaagaaaaagaatttttt

SEQ ID NO: 193084 - DNA, 20 bp, Artificial Sequence
  Description of Artificial Sequence: Synthetic oligonucleotide
  Target: LAMA2; (-) strand; PAM type: YTN; PAM sequence: TTT
tttaaagaaaaagaattttt

SEQ ID NO: 193085 - DNA, 20 bp, Artificial Sequence
  Description of Artificial Sequence: Synthetic oligonucleotide
  Target: LAMA2; (-) strand; PAM type: YTN; PAM sequence: TTT
ttttaaagaaaaagaatttt

SEQ ID NO: 193086 - DNA, 20 bp, Artificial Sequence
  Description of Artificial Sequence: Synthetic oligonucleotide
  Target: LAMA2; (-) strand; PAM type: YTN; PAM sequence: TTC
gtatgtgtatgtattttttt

SEQ ID NO: 193087 - DNA, 20 bp, Artificial Sequence
  Description of Artificial Sequence: Synthetic oligonucleotide
  Target: LAMA2; (-) strand; PAM type: YTN; PAM sequence: CTA
aaagagagaaaattcgtatg

SEQ ID NO: 193088 - DNA, 20 bp, Artificial Sequence
  Description of Artificial Sequence: Synthetic oligonucleotide
  Target: LAMA2; (-) strand; PAM type: YTN; PAM sequence: TTA
gcaactaaaagagagaaaat

SEQ ID NO: 193089 - DNA, 20 bp, Artificial Sequence
  Description of Artificial Sequence: Synthetic oligonucleotide
  Target: LAMA2; (-) strand; PAM type: YTN; PAM sequence: CTA
aaaagcaggttagcaactaa

SEQ ID NO: 193090 - DNA, 20 bp, Artificial Sequence
  Description of Artificial Sequence: Synthetic oligonucleotide
  Target: LAMA2; (-) strand; PAM type: YTN; PAM sequence: CTA
atctaaaaagcaggttagca

SEQ ID NO: 193091 - DNA, 20 bp, Artificial Sequence
  Description of Artificial Sequence: Synthetic oligonucleotide
  Target: LAMA2; (-) strand; PAM type: YTN; PAM sequence: TTC
caagataaccatggactaat

SEQ ID NO: 193092 - DNA, 20 bp, Artificial Sequence
  Description of Artificial Sequence: Synthetic oligonucleotide
  Target: LAMA2; (-) strand; PAM type: YTN; PAM sequence: CTT
ccaagataaccatggactaa

SEQ ID NO: 193093 - DNA, 20 bp, Artificial Sequence
  Description of Artificial Sequence: Synthetic oligonucleotide
  Target: LAMA2; (-) strand; PAM type: YTN; PAM sequence: CTC
ttccaagataaccatggact

SEQ ID NO: 193094 - DNA, 20 bp, Artificial Sequence
  Description of Artificial Sequence: Synthetic oligonucleotide
  Target: LAMA2; (-) strand; PAM type: YTN; PAM sequence: CTC
ccacacctcttccaagataa

SEQ ID NO: 193095 - DNA, 20 bp, Artificial Sequence
  Description of Artificial Sequence: Synthetic oligonucleotide
  Target: LAMA2; (-) strand; PAM type: YTN; PAM sequence: TTC
tcccacacctcttccaagat

SEQ ID NO: 193096 - DNA, 20 bp, Artificial Sequence
  Description of Artificial Sequence: Synthetic oligonucleotide
  Target: LAMA2; (-) strand; PAM type: YTN; PAM sequence: TTG
ttctcccacacctcttccaa

SEQ ID NO: 193097 - DNA, 20 bp, Artificial Sequence
  Description of Artificial Sequence: Synthetic oligonucleotide
  Target: LAMA2; (-) strand; PAM type: YTN; PAM sequence: CTT
gttctcccacacctcttcca

SEQ ID NO: 193098 - DNA, 20 bp, Artificial Sequence
  Description of Artificial Sequence: Synthetic oligonucleotide
  Target: LAMA2; (-) strand; PAM type: YTN; PAM sequence: CTC
accttgttctcccacacctc

SEQ ID NO: 193099 - DNA, 20 bp, Artificial Sequence
  Description of Artificial Sequence: Synthetic oligonucleotide
  Target: LAMA2; (-) strand; PAM type: YTN; PAM sequence: CTC
tcaccttgttctcccacacc

SEQ ID NO: 193100 - DNA, 20 bp, Artificial Sequence
  Description of Artificial Sequence: Synthetic oligonucleotide
  Target: LAMA2; (-) strand; PAM type: YTN; PAM sequence: TTA
gctctcaccttgttctccca

SEQ ID NO: 193101 - DNA, 20 bp, Artificial Sequence
  Description of Artificial Sequence: Synthetic oligonucleotide
  Target: LAMA2; (-) strand; PAM type: YTN; PAM sequence: CTT
agctctcaccttgttctccc

SEQ ID NO: 193102 - DNA, 20 bp, Artificial Sequence
  Description of Artificial Sequence: Synthetic oligonucleotide
  Target: LAMA2; (-) strand; PAM type: YTN; PAM sequence: TTC
cttagctctcaccttgttct

SEQ ID NO: 193103 - DNA, 20 bp, Artificial Sequence
  Description of Artificial Sequence: Synthetic oligonucleotide
  Target: LAMA2; (-) strand; PAM type: YTN; PAM sequence: CTT
ccttagctctcaccttgttc

SEQ ID NO: 193104 - DNA, 20 bp, Artificial Sequence
  Description of Artificial Sequence: Synthetic oligonucleotide
  Target: LAMA2; (-) strand; PAM type: YTN; PAM sequence: TTC
cttccttagctctcaccttg

SEQ ID NO: 193105 - DNA, 20 bp, Artificial Sequence
  Description of Artificial Sequence: Synthetic oligonucleotide
  Target: LAMA2; (-) strand; PAM type: YTN; PAM sequence: TTG
catagaattccttccttagc

SEQ ID NO: 193106 - DNA, 20 bp, Artificial Sequence
  Description of Artificial Sequence: Synthetic oligonucleotide
  Target: LAMA2; (-) strand; PAM type: YTN; PAM sequence: TTT
gcatagaattccttccttag

SEQ ID NO: 193107 - DNA, 20 bp, Artificial Sequence
  Description of Artificial Sequence: Synthetic oligonucleotide
  Target: LAMA2; (-) strand; PAM type: YTN; PAM sequence: CTT
tgcatagaattccttcctta

SEQ ID NO: 193108 - DNA, 20 bp, Artificial Sequence
  Description of Artificial Sequence: Synthetic oligonucleotide
  Target: LAMA2; (-) strand; PAM type: YTN; PAM sequence: CTA
agagaatcagaaacgctttg

SEQ ID NO: 193109 - DNA, 20 bp, Artificial Sequence
  Description of Artificial Sequence: Synthetic oligonucleotide
  Target: LAMA2; (-) strand; PAM type: YTN; PAM sequence: TTC
cacaaaatactaagagaatc

SEQ ID NO: 193110 - DNA, 20 bp, Artificial Sequence
  Description of Artificial Sequence: Synthetic oligonucleotide
  Target: LAMA2; (-) strand; PAM type: YTN; PAM sequence: CTG
ttccacaaaatactaagaga

SEQ ID NO: 193111 - DNA, 20 bp, Artificial Sequence
  Description of Artificial Sequence: Synthetic oligonucleotide
  Target: LAMA2; (-) strand; PAM type: YTN; PAM sequence: CTC
atgctgttccacaaaatact

SEQ ID NO: 193112 - DNA, 20 bp, Artificial Sequence
  Description of Artificial Sequence: Synthetic oligonucleotide
  Target: LAMA2; (-) strand; PAM type: YTN; PAM sequence: CTG
gaagacatgtctcatgctgt

SEQ ID NO: 193113 - DNA, 20 bp, Artificial Sequence
  Description of Artificial Sequence: Synthetic oligonucleotide
  Target: LAMA2; (-) strand; PAM type: YTN; PAM sequence: CTA
cacaactggaagacatgtct

SEQ ID NO: 193114 - DNA, 20 bp, Artificial Sequence
  Description of Artificial Sequence: Synthetic oligonucleotide
  Target: LAMA2; (-) strand; PAM type: YTN; PAM sequence: TTA
tcctacacaactggaagaca

SEQ ID NO: 193115 - DNA, 20 bp, Artificial Sequence
  Description of Artificial Sequence: Synthetic oligonucleotide
  Target: LAMA2; (-) strand; PAM type: YTN; PAM sequence: CTT
atcctacacaactggaagac

SEQ ID NO: 193116 - DNA, 20 bp, Artificial Sequence
  Description of Artificial Sequence: Synthetic oligonucleotide
  Target: LAMA2; (-) strand; PAM type: YTN; PAM sequence: CTG
tacttatcctacacaactgg

SEQ ID NO: 193117 - DNA, 20 bp, Artificial Sequence
  Description of Artificial Sequence: Synthetic oligonucleotide
  Target: LAMA2; (-) strand; PAM type: YTN; PAM sequence: TTC
agtgggctgtacttatccta

SEQ ID NO: 193118 - DNA, 20 bp, Artificial Sequence
  Description of Artificial Sequence: Synthetic oligonucleotide
  Target: LAMA2; (-) strand; PAM type: YTN; PAM sequence: CTG
gtaagcagtgttcagtgggc

SEQ ID NO: 193119 - DNA, 20 bp, Artificial Sequence
  Description of Artificial Sequence: Synthetic oligonucleotide
  Target: LAMA2; (-) strand; PAM type: YTN; PAM sequence: CTG
ctggtaagcagtgttcagtg

SEQ ID NO: 193120 - DNA, 20 bp, Artificial Sequence
  Description of Artificial Sequence: Synthetic oligonucleotide
  Target: LAMA2; (-) strand; PAM type: YTN; PAM sequence: TTG
tggtaaactgctggtaagca

SEQ ID NO: 193121 - DNA, 20 bp, Artificial Sequence
  Description of Artificial Sequence: Synthetic oligonucleotide
  Target: LAMA2; (-) strand; PAM type: YTN; PAM sequence: CTT
gtggtaaactgctggtaagc

SEQ ID NO: 193122 - DNA, 20 bp, Artificial Sequence
  Description of Artificial Sequence: Synthetic oligonucleotide
  Target: LAMA2; (-) strand; PAM type: YTN; PAM sequence: CTG
gcttgtggtaaactgctggt

SEQ ID NO: 193123 - DNA, 20 bp, Artificial Sequence
  Description of Artificial Sequence: Synthetic oligonucleotide
  Target: LAMA2; (-) strand; PAM type: YTN; PAM sequence: TTA
taactggcttgtggtaaact

SEQ ID NO: 193124 - DNA, 20 bp, Artificial Sequence
  Description of Artificial Sequence: Synthetic oligonucleotide
  Target: LAMA2; (-) strand; PAM type: YTN; PAM sequence: TTG
atgttataactggcttgtgg

SEQ ID NO: 193125 - DNA, 20 bp, Artificial Sequence
  Description of Artificial Sequence: Synthetic oligonucleotide
  Target: LAMA2; (-) strand; PAM type: YTN; PAM sequence: TTT
gatgttataactggcttgtg

SEQ ID NO: 193126 - DNA, 20 bp, Artificial Sequence
  Description of Artificial Sequence: Synthetic oligonucleotide
  Target: LAMA2; (-) strand; PAM type: YTN; PAM sequence: TTT
tgatgttataactggcttgt

SEQ ID NO: 193127 - DNA, 20 bp, Artificial Sequence
  Description of Artificial Sequence: Synthetic oligonucleotide
  Target: LAMA2; (-) strand; PAM type: YTN; PAM sequence: TTT
ttgatgttataactggcttg

SEQ ID NO: 193128 - DNA, 20 bp, Artificial Sequence
  Description of Artificial Sequence: Synthetic oligonucleotide
  Target: LAMA2; (-) strand; PAM type: YTN; PAM sequence: TTC
cgatgtttttgatgttataa

SEQ ID NO: 193129 - DNA, 20 bp, Artificial Sequence
  Description of Artificial Sequence: Synthetic oligonucleotide
  Target: LAMA2; (-) strand; PAM type: YTN; PAM sequence: TTC
aaatatagaagaaaagaaag

SEQ ID NO: 193130 - DNA, 20 bp, Artificial Sequence
  Description of Artificial Sequence: Synthetic oligonucleotide
  Target: LAMA2; (-) strand; PAM type: YTN; PAM sequence: TTA
ttcaaatatagaagaaaaga

SEQ ID NO: 193131 - DNA, 20 bp, Artificial Sequence
  Description of Artificial Sequence: Synthetic oligonucleotide
  Target: LAMA2; (-) strand; PAM type: YTN; PAM sequence: TTA
tcattattcaaatatagaag

SEQ ID NO: 193132 - DNA, 20 bp, Artificial Sequence
  Description of Artificial Sequence: Synthetic oligonucleotide
  Target: LAMA2; (-) strand; PAM type: YTN; PAM sequence: TTT
atcattattcaaatatagaa

SEQ ID NO: 193133 - DNA, 20 bp, Artificial Sequence
  Description of Artificial Sequence: Synthetic oligonucleotide
  Target: LAMA2; (-) strand; PAM type: YTN; PAM sequence: CTC
acacagcatgaaggcattta

SEQ ID NO: 193134 - DNA, 20 bp, Artificial Sequence
  Description of Artificial Sequence: Synthetic oligonucleotide
  Target: LAMA2; (-) strand; PAM type: YTN; PAM sequence: TTC
aatagtgctcacacagcatg

SEQ ID NO: 193135 - DNA, 20 bp, Artificial Sequence
  Description of Artificial Sequence: Synthetic oligonucleotide
  Target: LAMA2; (-) strand; PAM type: YTN; PAM sequence: CTT
caatagtgctcacacagcat

SEQ ID NO: 193136 - DNA, 20 bp, Artificial Sequence
  Description of Artificial Sequence: Synthetic oligonucleotide
  Target: LAMA2; (-) strand; PAM type: YTN; PAM sequence: CTG
cagagaaacacacttcaata

SEQ ID NO: 193137 - DNA, 20 bp, Artificial Sequence
  Description of Artificial Sequence: Synthetic oligonucleotide
  Target: LAMA2; (-) strand; PAM type: YTN; PAM sequence: TTA
cctgcagagaaacacacttc

SEQ ID NO: 193138 - DNA, 20 bp, Artificial Sequence
  Description of Artificial Sequence: Synthetic oligonucleotide
  Target: LAMA2; (-) strand; PAM type: YTN; PAM sequence: TTT
acctgcagagaaacacactt

SEQ ID NO: 193139 - DNA, 20 bp, Artificial Sequence
  Description of Artificial Sequence: Synthetic oligonucleotide
  Target: LAMA2; (-) strand; PAM type: YTN; PAM sequence: CTG
ccaagtttacctgcagagaa

SEQ ID NO: 193140 - DNA, 20 bp, Artificial Sequence
  Description of Artificial Sequence: Synthetic oligonucleotide
  Target: LAMA2; (-) strand; PAM type: YTN; PAM sequence: TTA
tataagacactgccaagttt

SEQ ID NO: 193141 - DNA, 20 bp, Artificial Sequence
  Description of Artificial Sequence: Synthetic oligonucleotide
  Target: LAMA2; (-) strand; PAM type: YTN; PAM sequence: CTC
ccatcgagtgtagttatata

SEQ ID NO: 193142 - DNA, 20 bp, Artificial Sequence
  Description of Artificial Sequence: Synthetic oligonucleotide
  Target: LAMA2; (-) strand; PAM type: YTN; PAM sequence: TTA
agtaatactcccatcgagtg

SEQ ID NO: 193143 - DNA, 20 bp, Artificial Sequence
  Description of Artificial Sequence: Synthetic oligonucleotide
  Target: LAMA2; (-) strand; PAM type: YTN; PAM sequence: TTT
aagtaatactcccatcgagt

SEQ ID NO: 193144 - DNA, 20 bp, Artificial Sequence
  Description of Artificial Sequence: Synthetic oligonucleotide
  Target: LAMA2; (-) strand; PAM type: YTN; PAM sequence: CTG
tttaagtaatactcccatcg

SEQ ID NO: 193145 - DNA, 20 bp, Artificial Sequence
  Description of Artificial Sequence: Synthetic oligonucleotide
  Target: LAMA2; (-) strand; PAM type: YTN; PAM sequence: TTC
acactgtttaagtaatactc

SEQ ID NO: 193146 - DNA, 20 bp, Artificial Sequence
  Description of Artificial Sequence: Synthetic oligonucleotide
  Target: LAMA2; (-) strand; PAM type: YTN; PAM sequence: TTT
cacactgtttaagtaatact

SEQ ID NO: 193147 - DNA, 20 bp, Artificial Sequence
  Description of Artificial Sequence: Synthetic oligonucleotide
  Target: LAMA2; (-) strand; PAM type: YTN; PAM sequence: TTA
tcagacaatgtatttcacac

SEQ ID NO: 193148 - DNA, 20 bp, Artificial Sequence
  Description of Artificial Sequence: Synthetic oligonucleotide
  Target: LAMA2; (-) strand; PAM type: YTN; PAM sequence: TTT
atcagacaatgtatttcaca

SEQ ID NO: 193149 - DNA, 20 bp, Artificial Sequence
  Description of Artificial Sequence: Synthetic oligonucleotide
  Target: LAMA2; (-) strand; PAM type: YTN; PAM sequence: TTT
tatcagacaatgtatttcac

SEQ ID NO: 193150 - DNA, 20 bp, Artificial Sequence
  Description of Artificial Sequence: Synthetic oligonucleotide
  Target: LAMA2; (-) strand; PAM type: YTN; PAM sequence: TTT
ttatcagacaatgtatttca

SEQ ID NO: 193151 - DNA, 20 bp, Artificial Sequence
  Description of Artificial Sequence: Synthetic oligonucleotide
  Target: LAMA2; (-) strand; PAM type: YTN; PAM sequence: TTG
tgatacaatttttatcagac

SEQ ID NO: 193152 - DNA, 20 bp, Artificial Sequence
  Description of Artificial Sequence: Synthetic oligonucleotide
  Target: LAMA2; (-) strand; PAM type: YTN; PAM sequence: TTC
caaattgtgatacaattttt

SEQ ID NO: 193153 - DNA, 20 bp, Artificial Sequence
  Description of Artificial Sequence: Synthetic oligonucleotide
  Target: LAMA2; (-) strand; PAM type: YTN; PAM sequence: TTG
cataaacgtcattccaaatt

SEQ ID NO: 193154 - DNA, 20 bp, Artificial Sequence
  Description of Artificial Sequence: Synthetic oligonucleotide
  Target: LAMA2; (-) strand; PAM type: YTN; PAM sequence: CTT
gcataaacgtcattccaaat

SEQ ID NO: 193155 - DNA, 20 bp, Artificial Sequence
  Description of Artificial Sequence: Synthetic oligonucleotide
  Target: LAMA2; (-) strand; PAM type: YTN; PAM sequence: CTA
tccacttgcataaacgtcat

SEQ ID NO: 193156 - DNA, 20 bp, Artificial Sequence
  Description of Artificial Sequence: Synthetic oligonucleotide
  Target: LAMA2; (-) strand; PAM type: YTN; PAM sequence: CTG
gcagactatccacttgcata

SEQ ID NO: 193157 - DNA, 20 bp, Artificial Sequence
  Description of Artificial Sequence: Synthetic oligonucleotide
  Target: LAMA2; (-) strand; PAM type: YTN; PAM sequence: CTA
taaaataactggcagactat

SEQ ID NO: 193158 - DNA, 20 bp, Artificial Sequence
  Description of Artificial Sequence: Synthetic oligonucleotide
  Target: LAMA2; (-) strand; PAM type: YTN; PAM sequence: TTA
gactataaaataactggcag

SEQ ID NO: 193159 - DNA, 20 bp, Artificial Sequence
  Description of Artificial Sequence: Synthetic oligonucleotide
  Target: LAMA2; (-) strand; PAM type: YTN; PAM sequence: TTT
agactataaaataactggca

SEQ ID NO: 193160 - DNA, 20 bp, Artificial Sequence
  Description of Artificial Sequence: Synthetic oligonucleotide
  Target: LAMA2; (-) strand; PAM type: YTN; PAM sequence: TTT
tagactataaaataactggc

SEQ ID NO: 193161 - DNA, 20 bp, Artificial Sequence
  Description of Artificial Sequence: Synthetic oligonucleotide
  Target: LAMA2; (-) strand; PAM type: YTN; PAM sequence: TTT
ttagactataaaataactgg

SEQ ID NO: 193162 - DNA, 20 bp, Artificial Sequence
  Description of Artificial Sequence: Synthetic oligonucleotide
  Target: LAMA2; (-) strand; PAM type: YTN; PAM sequence: TTT
tttagactataaaataactg

SEQ ID NO: 193163 - DNA, 20 bp, Artificial Sequence
  Description of Artificial Sequence: Synthetic oligonucleotide
  Target: LAMA2; (-) strand; PAM type: YTN; PAM sequence: TTT
ttttagactataaaataact

SEQ ID NO: 193164 - DNA, 20 bp, Artificial Sequence
  Description of Artificial Sequence: Synthetic oligonucleotide
  Target: LAMA2; (-) strand; PAM type: YTN; PAM sequence: TTC
atttttttagactataaaat

SEQ ID NO: 193165 - DNA, 20 bp, Artificial Sequence
  Description of Artificial Sequence: Synthetic oligonucleotide
  Target: LAMA2; (-) strand; PAM type: YTN; PAM sequence: TTA
caggttcatttttttagact

SEQ ID NO: 193166 - DNA, 20 bp, Artificial Sequence
  Description of Artificial Sequence: Synthetic oligonucleotide
  Target: LAMA2; (-) strand; PAM type: YTN; PAM sequence: CTT
acaggttcatttttttagac

SEQ ID NO: 193167 - DNA, 20 bp, Artificial Sequence
  Description of Artificial Sequence: Synthetic oligonucleotide
  Target: LAMA2; (-) strand; PAM type: YTN; PAM sequence: CTG
tagccttacaggttcatttt

SEQ ID NO: 193168 - DNA, 20 bp, Artificial Sequence
  Description of Artificial Sequence: Synthetic oligonucleotide
  Target: LAMA2; (-) strand; PAM type: YTN; PAM sequence: TTA
tactgtagccttacaggttc

SEQ ID NO: 193169 - DNA, 20 bp, Artificial Sequence
  Description of Artificial Sequence: Synthetic oligonucleotide
  Target: LAMA2; (-) strand; PAM type: YTN; PAM sequence: TTT
atactgtagccttacaggtt

SEQ ID NO: 193170 - DNA, 20 bp, Artificial Sequence
  Description of Artificial Sequence: Synthetic oligonucleotide
  Target: LAMA2; (-) strand; PAM type: YTN; PAM sequence: TTT
tatactgtagccttacaggt

SEQ ID NO: 193171 - DNA, 20 bp, Artificial Sequence
  Description of Artificial Sequence: Synthetic oligonucleotide
  Target: LAMA2; (-) strand; PAM type: YTN; PAM sequence: TTG
gattttatactgtagcctta

SEQ ID NO: 193172 - DNA, 20 bp, Artificial Sequence
  Description of Artificial Sequence: Synthetic oligonucleotide
  Target: LAMA2; (-) strand; PAM type: YTN; PAM sequence: CTT
ggattttatactgtagcctt

SEQ ID NO: 193173 - DNA, 20 bp, Artificial Sequence
  Description of Artificial Sequence: Synthetic oligonucleotide
  Target: LAMA2; (-) strand; PAM type: YTN; PAM sequence: CTA
taaagacttggattttatac

SEQ ID NO: 193174 - DNA, 20 bp, Artificial Sequence
  Description of Artificial Sequence: Synthetic oligonucleotide
  Target: LAMA2; (-) strand; PAM type: YTN; PAM sequence: CTA
caaatatacaactataaaga

SEQ ID NO: 193175 - DNA, 20 bp, Artificial Sequence
  Description of Artificial Sequence: Synthetic oligonucleotide
  Target: LAMA2; (-) strand; PAM type: YTN; PAM sequence: TTC
actacaaatatacaactata

SEQ ID NO: 193176 - DNA, 20 bp, Artificial Sequence
  Description of Artificial Sequence: Synthetic oligonucleotide
  Target: LAMA2; (-) strand; PAM type: YTN; PAM sequence: TTT
cactacaaatatacaactat

SEQ ID NO: 193177 - DNA, 20 bp, Artificial Sequence
  Description of Artificial Sequence: Synthetic oligonucleotide
  Target: LAMA2; (-) strand; PAM type: YTN; PAM sequence: TTT
tcactacaaatatacaacta

SEQ ID NO: 193178 - DNA, 20 bp, Artificial Sequence
  Description of Artificial Sequence: Synthetic oligonucleotide
  Target: LAMA2; (-) strand; PAM type: YTN; PAM sequence: TTG
ttttcactacaaatatacaa

SEQ ID NO: 193179 - DNA, 20 bp, Artificial Sequence
  Description of Artificial Sequence: Synthetic oligonucleotide
  Target: LAMA2; (-) strand; PAM type: YTN; PAM sequence: TTC
ccccacggttgttttcacta

SEQ ID NO: 193180 - DNA, 20 bp, Artificial Sequence
  Description of Artificial Sequence: Synthetic oligonucleotide
  Target: LAMA2; (-) strand; PAM type: YTN; PAM sequence: TTA
ttcccccacggttgttttca

SEQ ID NO: 193181 - DNA, 20 bp, Artificial Sequence
  Description of Artificial Sequence: Synthetic oligonucleotide
  Target: LAMA2; (-) strand; PAM type: YTN; PAM sequence: TTA
tattattcccccacggttgt

SEQ ID NO: 193182 - DNA, 20 bp, Artificial Sequence
  Description of Artificial Sequence: Synthetic oligonucleotide
  Target: LAMA2; (-) strand; PAM type: YTN; PAM sequence: CTT
atattattcccccacggttg

SEQ ID NO: 193183 - DNA, 20 bp, Artificial Sequence
  Description of Artificial Sequence: Synthetic oligonucleotide
  Target: LAMA2; (-) strand; PAM type: YTN; PAM sequence: TTA
agcttatattattcccccac

SEQ ID NO: 193184 - DNA, 20 bp, Artificial Sequence
  Description of Artificial Sequence: Synthetic oligonucleotide
  Target: LAMA2; (-) strand; PAM type: YTN; PAM sequence: CTA
atcaccaaatgattaagctt

SEQ ID NO: 193185 - DNA, 20 bp, Artificial Sequence
  Description of Artificial Sequence: Synthetic oligonucleotide
  Target: LAMA2; (-) strand; PAM type: YTN; PAM sequence: TTG
gtagactaatcaccaaatga

SEQ ID NO: 193186 - DNA, 20 bp, Artificial Sequence
  Description of Artificial Sequence: Synthetic oligonucleotide
  Target: LAMA2; (-) strand; PAM type: YTN; PAM sequence: TTA
atagttggtagactaatcac

SEQ ID NO: 193187 - DNA, 20 bp, Artificial Sequence
  Description of Artificial Sequence: Synthetic oligonucleotide
  Target: LAMA2; (-) strand; PAM type: YTN; PAM sequence: CTC
atcattaatagttggtagac

SEQ ID NO: 193188 - DNA, 20 bp, Artificial Sequence
  Description of Artificial Sequence: Synthetic oligonucleotide
  Target: LAMA2; (-) strand; PAM type: YTN; PAM sequence: CTC
tcatcattaatagttggtag

SEQ ID NO: 193189 - DNA, 20 bp, Artificial Sequence
  Description of Artificial Sequence: Synthetic oligonucleotide
  Target: LAMA2; (-) strand; PAM type: YTN; PAM sequence: TTA
tctctcatcattaatagttg

SEQ ID NO: 193190 - DNA, 20 bp, Artificial Sequence
  Description of Artificial Sequence: Synthetic oligonucleotide
  Target: LAMA2; (-) strand; PAM type: YTN; PAM sequence: TTA
gaaataaagaacagataggt

SEQ ID NO: 193191 - DNA, 20 bp, Artificial Sequence
  Description of Artificial Sequence: Synthetic oligonucleotide
  Target: LAMA2; (-) strand; PAM type: YTN; PAM sequence: TTT
agaaataaagaacagatagg

SEQ ID NO: 193192 - DNA, 20 bp, Artificial Sequence
  Description of Artificial Sequence: Synthetic oligonucleotide
  Target: LAMA2; (-) strand; PAM type: YTN; PAM sequence: TTT
tagaaataaagaacagatag

SEQ ID NO: 193193 - DNA, 20 bp, Artificial Sequence
  Description of Artificial Sequence: Synthetic oligonucleotide
  Target: LAMA2; (-) strand; PAM type: YTN; PAM sequence: TTA
ttttagaaataaagaacaga

SEQ ID NO: 193194 - DNA, 20 bp, Artificial Sequence
  Description of Artificial Sequence: Synthetic oligonucleotide
  Target: LAMA2; (-) strand; PAM type: YTN; PAM sequence: CTT
attttagaaataaagaacag

SEQ ID NO: 193195 - DNA, 20 bp, Artificial Sequence
  Description of Artificial Sequence: Synthetic oligonucleotide
  Target: LAMA2; (-) strand; PAM type: YTN; PAM sequence: TTA
cacatcttattttagaaata

SEQ ID NO: 193196 - DNA, 20 bp, Artificial Sequence
  Description of Artificial Sequence: Synthetic oligonucleotide
  Target: LAMA2; (-) strand; PAM type: YTN; PAM sequence: CTG
tattacacatcttattttag

SEQ ID NO: 193197 - DNA, 20 bp, Artificial Sequence
  Description of Artificial Sequence: Synthetic oligonucleotide
  Target: LAMA2; (-) strand; PAM type: YTN; PAM sequence: TTA
gctgtattacacatcttatt

SEQ ID NO: 193198 - DNA, 20 bp, Artificial Sequence
  Description of Artificial Sequence: Synthetic oligonucleotide
  Target: LAMA2; (-) strand; PAM type: YTN; PAM sequence: CTA
attagctgtattacacatct

SEQ ID NO: 193199 - DNA, 20 bp, Artificial Sequence
  Description of Artificial Sequence: Synthetic oligonucleotide
  Target: LAMA2; (-) strand; PAM type: YTN; PAM sequence: TTA
aaatagtgactaattagctg

SEQ ID NO: 193200 - DNA, 20 bp, Artificial Sequence
  Description of Artificial Sequence: Synthetic oligonucleotide
  Target: LAMA2; (-) strand; PAM type: YTN; PAM sequence: TTT
aaaatagtgactaattagct

SEQ ID NO: 193201 - DNA, 20 bp, Artificial Sequence
  Description of Artificial Sequence: Synthetic oligonucleotide
  Target: LAMA2; (-) strand; PAM type: YTN; PAM sequence: TTT
taaaatagtgactaattagc

SEQ ID NO: 193202 - DNA, 20 bp, Artificial Sequence
  Description of Artificial Sequence: Synthetic oligonucleotide
  Target: LAMA2; (-) strand; PAM type: YTN; PAM sequence: CTT
ttaaaatagtgactaattag

SEQ ID NO: 193203 - DNA, 20 bp, Artificial Sequence
  Description of Artificial Sequence: Synthetic oligonucleotide
  Target: LAMA2; (-) strand; PAM type: YTN; PAM sequence: TTC
cttttaaaatagtgactaat

SEQ ID NO: 193204 - DNA, 20 bp, Artificial Sequence
  Description of Artificial Sequence: Synthetic oligonucleotide
  Target: LAMA2; (-) strand; PAM type: YTN; PAM sequence: TTA
aattccttttaaaatagtga

SEQ ID NO: 193205 - DNA, 20 bp, Artificial Sequence
  Description of Artificial Sequence: Synthetic oligonucleotide
  Target: LAMA2; (-) strand; PAM type: YTN; PAM sequence: TTT
aaattccttttaaaatagtg

SEQ ID NO: 193206 - DNA, 20 bp, Artificial Sequence
  Description of Artificial Sequence: Synthetic oligonucleotide
  Target: LAMA2; (-) strand; PAM type: YTN; PAM sequence: CTA
tatttaaattccttttaaaa

SEQ ID NO: 193207 - DNA, 20 bp, Artificial Sequence
  Description of Artificial Sequence: Synthetic oligonucleotide
  Target: LAMA2; (-) strand; PAM type: YTN; PAM sequence: TTC
aatgaaaactatatttaaat

SEQ ID NO: 193208 - DNA, 20 bp, Artificial Sequence
  Description of Artificial Sequence: Synthetic oligonucleotide
  Target: LAMA2; (-) strand; PAM type: YTN; PAM sequence: TTT
caatgaaaactatatttaaa

SEQ ID NO: 193209 - DNA, 20 bp, Artificial Sequence
  Description of Artificial Sequence: Synthetic oligonucleotide
  Target: LAMA2; (-) strand; PAM type: YTN; PAM sequence: TTG
aatttcaatgaaaactatat

SEQ ID NO: 193210 - DNA, 20 bp, Artificial Sequence
  Description of Artificial Sequence: Synthetic oligonucleotide
  Target: LAMA2; (-) strand; PAM type: YTN; PAM sequence: TTT
gaatttcaatgaaaactata

SEQ ID NO: 193211 - DNA, 20 bp, Artificial Sequence
  Description of Artificial Sequence: Synthetic oligonucleotide
  Target: LAMA2; (-) strand; PAM type: YTN; PAM sequence: TTA
aatatttgaatttcaatgaa

SEQ ID NO: 193212 - DNA, 20 bp, Artificial Sequence
  Description of Artificial Sequence: Synthetic oligonucleotide
  Target: LAMA2; (-) strand; PAM type: YTN; PAM sequence: TTA
ggtacacatgcaattaaata

SEQ ID NO: 193213 - DNA, 20 bp, Artificial Sequence
  Description of Artificial Sequence: Synthetic oligonucleotide
  Target: LAMA2; (-) strand; PAM type: YTN; PAM sequence: TTA
ggcattaggtacacatgcaa

SEQ ID NO: 193214 - DNA, 20 bp, Artificial Sequence
  Description of Artificial Sequence: Synthetic oligonucleotide
  Target: LAMA2; (-) strand; PAM type: YTN; PAM sequence: TTA
gataatagagaacatcagcc

SEQ ID NO: 193215 - DNA, 20 bp, Artificial Sequence
  Description of Artificial Sequence: Synthetic oligonucleotide
  Target: LAMA2; (-) strand; PAM type: YTN; PAM sequence: TTA
agaacagcacagcagttaga

SEQ ID NO: 193216 - DNA, 20 bp, Artificial Sequence
  Description of Artificial Sequence: Synthetic oligonucleotide
  Target: LAMA2; (-) strand; PAM type: YTN; PAM sequence: CTA
gcagcaattaagaacagcac

SEQ ID NO: 193217 - DNA, 20 bp, Artificial Sequence
  Description of Artificial Sequence: Synthetic oligonucleotide
  Target: LAMA2; (-) strand; PAM type: YTN; PAM sequence: CTA
tcatcaccaagggagatggg

SEQ ID NO: 193218 - DNA, 20 bp, Artificial Sequence
  Description of Artificial Sequence: Synthetic oligonucleotide
  Target: LAMA2; (-) strand; PAM type: YTN; PAM sequence: TTG
ccatgaaatgcaggactatc

SEQ ID NO: 193219 - DNA, 20 bp, Artificial Sequence
  Description of Artificial Sequence: Synthetic oligonucleotide
  Target: LAMA2; (-) strand; PAM type: YTN; PAM sequence: TTG
aaaattgccatgaaatgcag

SEQ ID NO: 193220 - DNA, 20 bp, Artificial Sequence
  Description of Artificial Sequence: Synthetic oligonucleotide
  Target: LAMA2; (-) strand; PAM type: YTN; PAM sequence: CTA
ttgaaaattgccatgaaatg

SEQ ID NO: 193221 - DNA, 20 bp, Artificial Sequence
  Description of Artificial Sequence: Synthetic oligonucleotide
  Target: LAMA2; (-) strand; PAM type: YTN; PAM sequence: CTG
ctattgaaaattgccatgaa

SEQ ID NO: 193222 - DNA, 20 bp, Artificial Sequence
  Description of Artificial Sequence: Synthetic oligonucleotide
  Target: LAMA2; (-) strand; PAM type: YTN; PAM sequence: TTA
aactgctattgaaaattgcc

SEQ ID NO: 193223 - DNA, 20 bp, Artificial Sequence
  Description of Artificial Sequence: Synthetic oligonucleotide
  Target: LAMA2; (-) strand; PAM type: YTN; PAM sequence: TTA
agaccattaaactgctattg

SEQ ID NO: 193224 - DNA, 20 bp, Artificial Sequence
  Description of Artificial Sequence: Synthetic oligonucleotide
  Target: LAMA2; (-) strand; PAM type: YTN; PAM sequence: CTT
aagaccattaaactgctatt

SEQ ID NO: 193225 - DNA, 20 bp, Artificial Sequence
  Description of Artificial Sequence: Synthetic oligonucleotide
  Target: LAMA2; (-) strand; PAM type: YTN; PAM sequence: CTA
cccacttaagaccattaaac

SEQ ID NO: 193226 - DNA, 20 bp, Artificial Sequence
  Description of Artificial Sequence: Synthetic oligonucleotide
  Target: LAMA2; (-) strand; PAM type: YTN; PAM sequence: TTA
tgctacccacttaagaccat

SEQ ID NO: 193227 - DNA, 20 bp, Artificial Sequence
  Description of Artificial Sequence: Synthetic oligonucleotide
  Target: LAMA2; (-) strand; PAM type: YTN; PAM sequence: CTA
ttatgctacccacttaagac

SEQ ID NO: 193228 - DNA, 20 bp, Artificial Sequence
  Description of Artificial Sequence: Synthetic oligonucleotide
  Target: LAMA2; (-) strand; PAM type: YTN; PAM sequence: CTG
gctattatgctacccactta

SEQ ID NO: 193229 - DNA, 20 bp, Artificial Sequence
  Description of Artificial Sequence: Synthetic oligonucleotide
  Target: LAMA2; (-) strand; PAM type: YTN; PAM sequence: TTC
acctggctattatgctaccc

SEQ ID NO: 193230 - DNA, 20 bp, Artificial Sequence
  Description of Artificial Sequence: Synthetic oligonucleotide
  Target: LAMA2; (-) strand; PAM type: YTN; PAM sequence: TTG
ttcacctggctattatgcta

SEQ ID NO: 193231 - DNA, 20 bp, Artificial Sequence
  Description of Artificial Sequence: Synthetic oligonucleotide
  Target: LAMA2; (-) strand; PAM type: YTN; PAM sequence: TTG
ttgttcacctggctattatg

SEQ ID NO: 193232 - DNA, 20 bp, Artificial Sequence
  Description of Artificial Sequence: Synthetic oligonucleotide
  Target: LAMA2; (-) strand; PAM type: YTN; PAM sequence: TTT
gttgttcacctggctattat

SEQ ID NO: 193233 - DNA, 20 bp, Artificial Sequence
  Description of Artificial Sequence: Synthetic oligonucleotide
  Target: LAMA2; (-) strand; PAM type: YTN; PAM sequence: TTT
tgttgttcacctggctatta

SEQ ID NO: 193234 - DNA, 20 bp, Artificial Sequence
  Description of Artificial Sequence: Synthetic oligonucleotide
  Target: LAMA2; (-) strand; PAM type: YTN; PAM sequence: TTT
ttgttgttcacctggctatt

SEQ ID NO: 193235 - DNA, 20 bp, Artificial Sequence
  Description of Artificial Sequence: Synthetic oligonucleotide
  Target: LAMA2; (-) strand; PAM type: YTN; PAM sequence: TTT
tttgttgttcacctggctat

SEQ ID NO: 193236 - DNA, 20 bp, Artificial Sequence
  Description of Artificial Sequence: Synthetic oligonucleotide
  Target: LAMA2; (-) strand; PAM type: YTN; PAM sequence: TTT
ttttgttgttcacctggcta

SEQ ID NO: 193237 - DNA, 20 bp, Artificial Sequence
  Description of Artificial Sequence: Synthetic oligonucleotide
  Target: LAMA2; (-) strand; PAM type: YTN; PAM sequence: TTT
tttttgttgttcacctggct

SEQ ID NO: 193238 - DNA, 20 bp, Artificial Sequence
  Description of Artificial Sequence: Synthetic oligonucleotide
  Target: LAMA2; (-) strand; PAM type: YTN; PAM sequence: TTG
ttttttttgttgttcacctg

SEQ ID NO: 193239 - DNA, 20 bp, Artificial Sequence
  Description of Artificial Sequence: Synthetic oligonucleotide
  Target: LAMA2; (-) strand; PAM type: YTN; PAM sequence: TTT
gttttttttgttgttcacct

SEQ ID NO: 193240 - DNA, 20 bp, Artificial Sequence
  Description of Artificial Sequence: Synthetic oligonucleotide
  Target: LAMA2; (-) strand; PAM type: YTN; PAM sequence: TTT
tgttttttttgttgttcacc

SEQ ID NO: 193241 - DNA, 20 bp, Artificial Sequence
  Description of Artificial Sequence: Synthetic oligonucleotide
  Target: LAMA2; (-) strand; PAM type: YTN; PAM sequence: TTT
ttgttttttttgttgttcac

SEQ ID NO: 193242 - DNA, 20 bp, Artificial Sequence
  Description of Artificial Sequence: Synthetic oligonucleotide
  Target: LAMA2; (-) strand; PAM type: YTN; PAM sequence: TTG
tttttgttttttttgttgtt

SEQ ID NO: 193243 - DNA, 20 bp, Artificial Sequence
  Description of Artificial Sequence: Synthetic oligonucleotide
  Target: LAMA2; (-) strand; PAM type: YTN; PAM sequence: TTT
gtttttgttttttttgttgt

SEQ ID NO: 193244 - DNA, 20 bp, Artificial Sequence
  Description of Artificial Sequence: Synthetic oligonucleotide
  Target: LAMA2; (-) strand; PAM type: YTN; PAM sequence: TTT
tgtttttgttttttttgttg

SEQ ID NO: 193245 - DNA, 20 bp, Artificial Sequence
  Description of Artificial Sequence: Synthetic oligonucleotide
  Target: LAMA2; (-) strand; PAM type: YTN; PAM sequence: TTT
ttgtttttgttttttttgtt

SEQ ID NO: 193246 - DNA, 20 bp, Artificial Sequence
  Description of Artificial Sequence: Synthetic oligonucleotide
  Target: LAMA2; (-) strand; PAM type: YTN; PAM sequence: TTG
tttttgtttttgtttttttt

SEQ ID NO: 193247 - DNA, 20 bp, Artificial Sequence
  Description of Artificial Sequence: Synthetic oligonucleotide
  Target: LAMA2; (-) strand; PAM type: YTN; PAM sequence: TTT
gtttttgtttttgttttttt

SEQ ID NO: 193248 - DNA, 20 bp, Artificial Sequence
  Description of Artificial Sequence: Synthetic oligonucleotide
  Target: LAMA2; (-) strand; PAM type: YTN; PAM sequence: TTT
tgtttttgtttttgtttttt

SEQ ID NO: 193249 - DNA, 20 bp, Artificial Sequence
  Description of Artificial Sequence: Synthetic oligonucleotide
  Target: LAMA2; (-) strand; PAM type: YTN; PAM sequence: TTT
ttgtttttgtttttgttttt

SEQ ID NO: 193250 - DNA, 20 bp, Artificial Sequence
  Description of Artificial Sequence: Synthetic oligonucleotide
  Target: LAMA2; (-) strand; PAM type: YTN; PAM sequence: TTT
tttgtttttgtttttgtttt

SEQ ID NO: 193251 - DNA, 20 bp, Artificial Sequence
  Description of Artificial Sequence: Synthetic oligonucleotide
  Target: LAMA2; (-) strand; PAM type: YTN; PAM sequence: TTT
ttttgtttttgtttttgttt

SEQ ID NO: 193252 - DNA, 20 bp, Artificial Sequence
  Description of Artificial Sequence: Synthetic oligonucleotide
  Target: LAMA2; (-) strand; PAM type: YTN; PAM sequence: TTG
ccaaatagtttttttgtttt

SEQ ID NO: 193253 - DNA, 20 bp, Artificial Sequence
  Description of Artificial Sequence: Synthetic oligonucleotide
  Target: LAMA2; (-) strand; PAM type: YTN; PAM sequence: TTT
gccaaatagtttttttgttt

SEQ ID NO: 193254 - DNA, 20 bp, Artificial Sequence
  Description of Artificial Sequence: Synthetic oligonucleotide
  Target: LAMA2; (-) strand; PAM type: YTN; PAM sequence: CTC
atatcccaatttgccaaata

SEQ ID NO: 193255 - DNA, 20 bp, Artificial Sequence
  Description of Artificial Sequence: Synthetic oligonucleotide
  Target: LAMA2; (-) strand; PAM type: YTN; PAM sequence: TTC
tcatatcccaatttgccaaa

SEQ ID NO: 193256 - DNA, 20 bp, Artificial Sequence
  Description of Artificial Sequence: Synthetic oligonucleotide
  Target: LAMA2; (-) strand; PAM type: YTN; PAM sequence: CTC
aattctcatatcccaatttg

SEQ ID NO: 193257 - DNA, 20 bp, Artificial Sequence
  Description of Artificial Sequence: Synthetic oligonucleotide
  Target: LAMA2; (-) strand; PAM type: YTN; PAM sequence: TTG
gcctcaattctcatatccca

SEQ ID NO: 193258 - DNA, 20 bp, Artificial Sequence
  Description of Artificial Sequence: Synthetic oligonucleotide
  Target: LAMA2; (-) strand; PAM type: YTN; PAM sequence: TTT
ggcctcaattctcatatccc

SEQ ID NO: 193259 - DNA, 20 bp, Artificial Sequence
  Description of Artificial Sequence: Synthetic oligonucleotide
  Target: LAMA2; (-) strand; PAM type: YTN; PAM sequence: TTT
tggcctcaattctcatatcc

SEQ ID NO: 193260 - DNA, 20 bp, Artificial Sequence
  Description of Artificial Sequence: Synthetic oligonucleotide
  Target: LAMA2; (-) strand; PAM type: YTN; PAM sequence: CTA
aaagttttggcctcaattct

SEQ ID NO: 193261 - DNA, 20 bp, Artificial Sequence
  Description of Artificial Sequence: Synthetic oligonucleotide
  Target: LAMA2; (-) strand; PAM type: YTN; PAM sequence: TTG
gcaaggactaaaagttttgg

SEQ ID NO: 193262 - DNA, 20 bp, Artificial Sequence
  Description of Artificial Sequence: Synthetic oligonucleotide
  Target: LAMA2; (-) strand; PAM type: YTN; PAM sequence: TTA
aaaaaaattggcaaggacta

SEQ ID NO: 193263 - DNA, 20 bp, Artificial Sequence
  Description of Artificial Sequence: Synthetic oligonucleotide
  Target: LAMA2; (-) strand; PAM type: YTN; PAM sequence: TTT
aaaaaaaattggcaaggact

SEQ ID NO: 193264 - DNA, 20 bp, Artificial Sequence
  Description of Artificial Sequence: Synthetic oligonucleotide
  Target: LAMA2; (-) strand; PAM type: YTN; PAM sequence: TTT
taaaaaaaattggcaaggac

SEQ ID NO: 193265 - DNA, 20 bp, Artificial Sequence
  Description of Artificial Sequence: Synthetic oligonucleotide
  Target: LAMA2; (-) strand; PAM type: YTN; PAM sequence: TTG
aagttttaaaaaaaattggc

SEQ ID NO: 193266 - DNA, 20 bp, Artificial Sequence
  Description of Artificial Sequence: Synthetic oligonucleotide
  Target: LAMA2; (-) strand; PAM type: YTN; PAM sequence: CTA
ccaacccaacaaatgggaat

SEQ ID NO: 193267 - DNA, 20 bp, Artificial Sequence
  Description of Artificial Sequence: Synthetic oligonucleotide
  Target: LAMA2; (-) strand; PAM type: YTN; PAM sequence: TTG
gagtgcctaccaacccaaca

SEQ ID NO: 193268 - DNA, 20 bp, Artificial Sequence
  Description of Artificial Sequence: Synthetic oligonucleotide
  Target: LAMA2; (-) strand; PAM type: YTN; PAM sequence: TTT
ggagtgcctaccaacccaac

SEQ ID NO: 193269 - DNA, 20 bp, Artificial Sequence
  Description of Artificial Sequence: Synthetic oligonucleotide
  Target: LAMA2; (-) strand; PAM type: YTN; PAM sequence: TTT
tggagtgcctaccaacccaa

SEQ ID NO: 193270 - DNA, 20 bp, Artificial Sequence
  Description of Artificial Sequence: Synthetic oligonucleotide
  Target: LAMA2; (-) strand; PAM type: YTN; PAM sequence: TTA
ttttggagtgcctaccaacc

SEQ ID NO: 193271 - DNA, 20 bp, Artificial Sequence
  Description of Artificial Sequence: Synthetic oligonucleotide
  Target: LAMA2; (-) strand; PAM type: YTN; PAM sequence: TTT
attttggagtgcctaccaac

SEQ ID NO: 193272 - DNA, 20 bp, Artificial Sequence
  Description of Artificial Sequence: Synthetic oligonucleotide
  Target: LAMA2; (-) strand; PAM type: YTN; PAM sequence: TTA
tatttattttggagtgccta

SEQ ID NO: 193273 - DNA, 20 bp, Artificial Sequence
  Description of Artificial Sequence: Synthetic oligonucleotide
  Target: LAMA2; (-) strand; PAM type: YTN; PAM sequence: TTA
ttatatttattttggagtgc

SEQ ID NO: 193274 - DNA, 20 bp, Artificial Sequence
  Description of Artificial Sequence: Synthetic oligonucleotide
  Target: LAMA2; (-) strand; PAM type: YTN; PAM sequence: CTG
attattatatttattttgga

SEQ ID NO: 193275 - DNA, 20 bp, Artificial Sequence
  Description of Artificial Sequence: Synthetic oligonucleotide
  Target: LAMA2; (-) strand; PAM type: YTN; PAM sequence: CTC
tgattattatatttattttg

SEQ ID NO: 193276 - DNA, 20 bp, Artificial Sequence
  Description of Artificial Sequence: Synthetic oligonucleotide
  Target: LAMA2; (-) strand; PAM type: YTN; PAM sequence: CTC
tctgattattatatttattt

SEQ ID NO: 193277 - DNA, 20 bp, Artificial Sequence
  Description of Artificial Sequence: Synthetic oligonucleotide
  Target: LAMA2; (-) strand; PAM type: YTN; PAM sequence: TTC
tctctgattattatatttat

SEQ ID NO: 193278 - DNA, 20 bp, Artificial Sequence
  Description of Artificial Sequence: Synthetic oligonucleotide
  Target: LAMA2; (-) strand; PAM type: YTN; PAM sequence: TTG
gtgttctctctgattattat

SEQ ID NO: 193279 - DNA, 20 bp, Artificial Sequence
  Description of Artificial Sequence: Synthetic oligonucleotide
  Target: LAMA2; (-) strand; PAM type: YTN; PAM sequence: CTA
cagttggtgttctctctgat

SEQ ID NO: 193280 - DNA, 20 bp, Artificial Sequence
  Description of Artificial Sequence: Synthetic oligonucleotide
  Target: LAMA2; (-) strand; PAM type: YTN; PAM sequence: CTA
gtacctacagttggtgttct

SEQ ID NO: 193281 - DNA, 20 bp, Artificial Sequence
  Description of Artificial Sequence: Synthetic oligonucleotide
  Target: LAMA2; (-) strand; PAM type: YTN; PAM sequence: CTA
aaactagtacctacagttgg

SEQ ID NO: 193282 - DNA, 20 bp, Artificial Sequence
  Description of Artificial Sequence: Synthetic oligonucleotide
  Target: LAMA2; (-) strand; PAM type: YTN; PAM sequence: TTG
ctaaaactagtacctacagt

SEQ ID NO: 193283 - DNA, 20 bp, Artificial Sequence
  Description of Artificial Sequence: Synthetic oligonucleotide
  Target: LAMA2; (-) strand; PAM type: YTN; PAM sequence: TTC
agttgctaaaactagtacct

SEQ ID NO: 193284 - DNA, 20 bp, Artificial Sequence
  Description of Artificial Sequence: Synthetic oligonucleotide
  Target: LAMA2; (-) strand; PAM type: YTN; PAM sequence: TTT
cagttgctaaaactagtacc

SEQ ID NO: 193285 - DNA, 20 bp, Artificial Sequence
  Description of Artificial Sequence: Synthetic oligonucleotide
  Target: LAMA2; (-) strand; PAM type: YTN; PAM sequence: TTG
tttcagttgctaaaactagt

SEQ ID NO: 193286 - DNA, 20 bp, Artificial Sequence
  Description of Artificial Sequence: Synthetic oligonucleotide
  Target: LAMA2; (-) strand; PAM type: YTN; PAM sequence: TTA
acgccagttgtttcagttgc

SEQ ID NO: 193287 - DNA, 20 bp, Artificial Sequence
  Description of Artificial Sequence: Synthetic oligonucleotide
  Target: LAMA2; (-) strand; PAM type: YTN; PAM sequence: TTT
aacgccagttgtttcagttg

SEQ ID NO: 193288 - DNA, 20 bp, Artificial Sequence
  Description of Artificial Sequence: Synthetic oligonucleotide
  Target: LAMA2; (-) strand; PAM type: YTN; PAM sequence: TTT
taacgccagttgtttcagtt

SEQ ID NO: 193289 - DNA, 20 bp, Artificial Sequence
  Description of Artificial Sequence: Synthetic oligonucleotide
  Target: LAMA2; (-) strand; PAM type: YTN; PAM sequence: CTC
agtgattttaacgccagttg

SEQ ID NO: 193290 - DNA, 20 bp, Artificial Sequence
  Description of Artificial Sequence: Synthetic oligonucleotide
  Target: LAMA2; (-) strand; PAM type: YTN; PAM sequence: TTC
atgtaacagaagctcagtga

SEQ ID NO: 193291 - DNA, 20 bp, Artificial Sequence
  Description of Artificial Sequence: Synthetic oligonucleotide
  Target: LAMA2; (-) strand; PAM type: YTN; PAM sequence: CTC
aggtattcatgtaacagaag

SEQ ID NO: 193292 - DNA, 20 bp, Artificial Sequence
  Description of Artificial Sequence: Synthetic oligonucleotide
  Target: LAMA2; (-) strand; PAM type: YTN; PAM sequence: TTC
agaagtagccacataatact

SEQ ID NO: 193293 - DNA, 20 bp, Artificial Sequence
  Description of Artificial Sequence: Synthetic oligonucleotide
  Target: LAMA2; (-) strand; PAM type: YTN; PAM sequence: TTT
cagaagtagccacataatac

SEQ ID NO: 193294 - DNA, 20 bp, Artificial Sequence
  Description of Artificial Sequence: Synthetic oligonucleotide
  Target: LAMA2; (-) strand; PAM type: YTN; PAM sequence: CTC
catttcagaagtagccacat

SEQ ID NO: 193295 - DNA, 20 bp, Artificial Sequence
  Description of Artificial Sequence: Synthetic oligonucleotide
  Target: LAMA2; (-) strand; PAM type: YTN; PAM sequence: CTG
catactccatttcagaagta

SEQ ID NO: 193296 - DNA, 20 bp, Artificial Sequence
  Description of Artificial Sequence: Synthetic oligonucleotide
  Target: LAMA2; (-) strand; PAM type: YTN; PAM sequence: TTA
taagagcactgcatactcca

SEQ ID NO: 193297 - DNA, 20 bp, Artificial Sequence
  Description of Artificial Sequence: Synthetic oligonucleotide
  Target: LAMA2; (-) strand; PAM type: YTN; PAM sequence: CTG
aaatgcccaattataagagc

SEQ ID NO: 193298 - DNA, 20 bp, Artificial Sequence
  Description of Artificial Sequence: Synthetic oligonucleotide
  Target: LAMA2; (-) strand; PAM type: YTN; PAM sequence: TTC
aactgaaatgcccaattata

SEQ ID NO: 193299 - DNA, 20 bp, Artificial Sequence
  Description of Artificial Sequence: Synthetic oligonucleotide
  Target: LAMA2; (-) strand; PAM type: YTN; PAM sequence: CTG
aagcagtgttcaactgaaat

SEQ ID NO: 193300 - DNA, 20 bp, Artificial Sequence
  Description of Artificial Sequence: Synthetic oligonucleotide
  Target: LAMA2; (-) strand; PAM type: YTN; PAM sequence: TTA
ctgaagcagtgttcaactga

SEQ ID NO: 193301 - DNA, 20 bp, Artificial Sequence
  Description of Artificial Sequence: Synthetic oligonucleotide
  Target: LAMA2; (-) strand; PAM type: YTN; PAM sequence: TTT
actgaagcagtgttcaactg

SEQ ID NO: 193302 - DNA, 20 bp, Artificial Sequence
  Description of Artificial Sequence: Synthetic oligonucleotide
  Target: LAMA2; (-) strand; PAM type: YTN; PAM sequence: CTT
tactgaagcagtgttcaact

SEQ ID NO: 193303 - DNA, 20 bp, Artificial Sequence
  Description of Artificial Sequence: Synthetic oligonucleotide
  Target: LAMA2; (-) strand; PAM type: YTN; PAM sequence: TTA
ctttactgaagcagtgttca

SEQ ID NO: 193304 - DNA, 20 bp, Artificial Sequence
  Description of Artificial Sequence: Synthetic oligonucleotide
  Target: LAMA2; (-) strand; PAM type: YTN; PAM sequence: TTG
aaatgccagttactttactg

SEQ ID NO: 193305 - DNA, 20 bp, Artificial Sequence
  Description of Artificial Sequence: Synthetic oligonucleotide
  Target: LAMA2; (-) strand; PAM type: YTN; PAM sequence: CTT
gaaatgccagttactttact

SEQ ID NO: 193306 - DNA, 20 bp, Artificial Sequence
  Description of Artificial Sequence: Synthetic oligonucleotide
  Target: LAMA2; (-) strand; PAM type: YTN; PAM sequence: CTA
cagaaggaagacttgaaatg

SEQ ID NO: 193307 - DNA, 20 bp, Artificial Sequence
  Description of Artificial Sequence: Synthetic oligonucleotide
  Target: LAMA2; (-) strand; PAM type: YTN; PAM sequence: TTG
aataaagacaaagcaatcac

SEQ ID NO: 193308 - DNA, 20 bp, Artificial Sequence
  Description of Artificial Sequence: Synthetic oligonucleotide
  Target: LAMA2; (-) strand; PAM type: YTN; PAM sequence: TTA
aaaaagcaatcattgaataa

SEQ ID NO: 193309 - DNA, 20 bp, Artificial Sequence
  Description of Artificial Sequence: Synthetic oligonucleotide
  Target: LAMA2; (-) strand; PAM type: YTN; PAM sequence: CTT
aaaaaagcaatcattgaata

SEQ ID NO: 193310 - DNA, 20 bp, Artificial Sequence
  Description of Artificial Sequence: Synthetic oligonucleotide
  Target: LAMA2; (-) strand; PAM type: YTN; PAM sequence: CTA
acttaaaaaagcaatcattg

SEQ ID NO: 193311 - DNA, 20 bp, Artificial Sequence
  Description of Artificial Sequence: Synthetic oligonucleotide
  Target: LAMA2; (-) strand; PAM type: YTN; PAM sequence: TTC
taacttaaaaaagcaatcat

SEQ ID NO: 193312 - DNA, 20 bp, Artificial Sequence
  Description of Artificial Sequence: Synthetic oligonucleotide
  Target: LAMA2; (-) strand; PAM type: YTN; PAM sequence: CTA
tgcaaccagattctaactta

SEQ ID NO: 193313 - DNA, 20 bp, Artificial Sequence
  Description of Artificial Sequence: Synthetic oligonucleotide
  Target: LAMA2; (-) strand; PAM type: YTN; PAM sequence: CTG
cataggaaagaaccatggag

SEQ ID NO: 193314 - DNA, 20 bp, Artificial Sequence
  Description of Artificial Sequence: Synthetic oligonucleotide
  Target: LAMA2; (-) strand; PAM type: YTN; PAM sequence: CTG
agaaacaccactgcatagga

SEQ ID NO: 193315 - DNA, 20 bp, Artificial Sequence
  Description of Artificial Sequence: Synthetic oligonucleotide
  Target: LAMA2; (-) strand; PAM type: YTN; PAM sequence: CTC
cacatcaacactgagaaaca

SEQ ID NO: 193316 - DNA, 20 bp, Artificial Sequence
  Description of Artificial Sequence: Synthetic oligonucleotide
  Target: LAMA2; (-) strand; PAM type: YTN; PAM sequence: TTC
tccacatcaacactgagaaa

SEQ ID NO: 193317 - DNA, 20 bp, Artificial Sequence
  Description of Artificial Sequence: Synthetic oligonucleotide
  Target: LAMA2; (-) strand; PAM type: YTN; PAM sequence: CTT
ctccacatcaacactgagaa

SEQ ID NO: 193318 - DNA, 20 bp, Artificial Sequence
  Description of Artificial Sequence: Synthetic oligonucleotide
  Target: LAMA2; (-) strand; PAM type: YTN; PAM sequence: CTG
gcttctccacatcaacactg

SEQ ID NO: 193319 - DNA, 20 bp, Artificial Sequence
  Description of Artificial Sequence: Synthetic oligonucleotide
  Target: LAMA2; (-) strand; PAM type: YTN; PAM sequence: CTC
ctggcttctccacatcaaca

SEQ ID NO: 193320 - DNA, 20 bp, Artificial Sequence
  Description of Artificial Sequence: Synthetic oligonucleotide
  Target: LAMA2; (-) strand; PAM type: YTN; PAM sequence: TTG
taggatgtctcctggcttct

SEQ ID NO: 193321 - DNA, 20 bp, Artificial Sequence
  Description of Artificial Sequence: Synthetic oligonucleotide
  Target: LAMA2; (-) strand; PAM type: YTN; PAM sequence: CTC
agagttgtaggatgtctcct

SEQ ID NO: 193322 - DNA, 20 bp, Artificial Sequence
  Description of Artificial Sequence: Synthetic oligonucleotide
  Target: LAMA2; (-) strand; PAM type: YTN; PAM sequence: TTC
tcagagttgtaggatgtctc

SEQ ID NO: 193323 - DNA, 20 bp, Artificial Sequence
  Description of Artificial Sequence: Synthetic oligonucleotide
  Target: LAMA2; (-) strand; PAM type: YTN; PAM sequence: CTT
ctcagagttgtaggatgtct

SEQ ID NO: 193324 - DNA, 20 bp, Artificial Sequence
  Description of Artificial Sequence: Synthetic oligonucleotide
  Target: LAMA2; (-) strand; PAM type: YTN; PAM sequence: CTG
ccaacatcaaatgcttctca

SEQ ID NO: 193325 - DNA, 20 bp, Artificial Sequence
  Description of Artificial Sequence: Synthetic oligonucleotide
  Target: LAMA2; (-) strand; PAM type: YTN; PAM sequence: CTG
ctgccaacatcaaatgcttc

SEQ ID NO: 193326 - DNA, 20 bp, Artificial Sequence
  Description of Artificial Sequence: Synthetic oligonucleotide
  Target: LAMA2; (-) strand; PAM type: YTN; PAM sequence: CTC
acagccactgctgccaacat

SEQ ID NO: 193327 - DNA, 20 bp, Artificial Sequence
  Description of Artificial Sequence: Synthetic oligonucleotide
  Target: LAMA2; (-) strand; PAM type: YTN; PAM sequence: CTA
acctcacagccactgctgcc

SEQ ID NO: 193328 - DNA, 20 bp, Artificial Sequence
  Description of Artificial Sequence: Synthetic oligonucleotide
  Target: LAMA2; (-) strand; PAM type: YTN; PAM sequence: TTC
atgggctaacctcacagcca

SEQ ID NO: 193329 - DNA, 20 bp, Artificial Sequence
  Description of Artificial Sequence: Synthetic oligonucleotide
  Target: LAMA2; (-) strand; PAM type: YTN; PAM sequence: CTA
agttcatgggctaacctcac

SEQ ID NO: 193330 - DNA, 20 bp, Artificial Sequence
  Description of Artificial Sequence: Synthetic oligonucleotide
  Target: LAMA2; (-) strand; PAM type: YTN; PAM sequence: CTA
gccctaagttcatgggctaa

SEQ ID NO: 193331 - DNA, 20 bp, Artificial Sequence
  Description of Artificial Sequence: Synthetic oligonucleotide
  Target: LAMA2; (-) strand; PAM type: YTN; PAM sequence: CTC
tagccctaagttcatgggct

SEQ ID NO: 193332 - DNA, 20 bp, Artificial Sequence
  Description of Artificial Sequence: Synthetic oligonucleotide
  Target: LAMA2; (-) strand; PAM type: YTN; PAM sequence: CTC
acctctagccctaagttcat

SEQ ID NO: 193333 - DNA, 20 bp, Artificial Sequence
  Description of Artificial Sequence: Synthetic oligonucleotide
  Target: LAMA2; (-) strand; PAM type: YTN; PAM sequence: TTA
agactcacctctagccctaa

SEQ ID NO: 193334 - DNA, 20 bp, Artificial Sequence
  Description of Artificial Sequence: Synthetic oligonucleotide
  Target: LAMA2; (-) strand; PAM type: YTN; PAM sequence: TTG
gaaggttaagactcacctct

SEQ ID NO: 193335 - DNA, 20 bp, Artificial Sequence
  Description of Artificial Sequence: Synthetic oligonucleotide
  Target: LAMA2; (-) strand; PAM type: YTN; PAM sequence: CTG
aattggaaggttaagactca

SEQ ID NO: 193336 - DNA, 20 bp, Artificial Sequence
  Description of Artificial Sequence: Synthetic oligonucleotide
  Target: LAMA2; (-) strand; PAM type: YTN; PAM sequence: TTC
agatggaaaagatgctgaat

SEQ ID NO: 193337 - DNA, 20 bp, Artificial Sequence
  Description of Artificial Sequence: Synthetic oligonucleotide
  Target: LAMA2; (-) strand; PAM type: YTN; PAM sequence: TTG
aatgttcagatggaaaagat

SEQ ID NO: 193338 - DNA, 20 bp, Artificial Sequence
  Description of Artificial Sequence: Synthetic oligonucleotide
  Target: LAMA2; (-) strand; PAM type: YTN; PAM sequence: CTT
gaatgttcagatggaaaaga

SEQ ID NO: 193339 - DNA, 20 bp, Artificial Sequence
  Description of Artificial Sequence: Synthetic oligonucleotide
  Target: LAMA2; (-) strand; PAM type: YTN; PAM sequence: TTG
acttgaatgttcagatggaa

SEQ ID NO: 193340 - DNA, 20 bp, Artificial Sequence
  Description of Artificial Sequence: Synthetic oligonucleotide
  Target: LAMA2; (-) strand; PAM type: YTN; PAM sequence: TTT
gacttgaatgttcagatgga

SEQ ID NO: 193341 - DNA, 20 bp, Artificial Sequence
  Description of Artificial Sequence: Synthetic oligonucleotide
  Target: LAMA2; (-) strand; PAM type: YTN; PAM sequence: TTC
ccatttgacttgaatgttca

SEQ ID NO: 193342 - DNA, 20 bp, Artificial Sequence
  Description of Artificial Sequence: Synthetic oligonucleotide
  Target: LAMA2; (-) strand; PAM type: YTN; PAM sequence: TTT
cccatttgacttgaatgttc

SEQ ID NO: 193343 - DNA, 20 bp, Artificial Sequence
  Description of Artificial Sequence: Synthetic oligonucleotide
  Target: LAMA2; (-) strand; PAM type: YTN; PAM sequence: CTG
gagggccaacaggtttccca

SEQ ID NO: 193344 - DNA, 20 bp, Artificial Sequence
  Description of Artificial Sequence: Synthetic oligonucleotide
  Target: LAMA2; (-) strand; PAM type: YTN; PAM sequence: TTA
aaacagtggaaagatccagc

SEQ ID NO: 193345 - DNA, 20 bp, Artificial Sequence
  Description of Artificial Sequence: Synthetic oligonucleotide
  Target: LAMA2; (-) strand; PAM type: YTN; PAM sequence: TTC
cagttaaaacagtggaaaga

SEQ ID NO: 193346 - DNA, 20 bp, Artificial Sequence
  Description of Artificial Sequence: Synthetic oligonucleotide
  Target: LAMA2; (-) strand; PAM type: YTN; PAM sequence: TTC
attccagttaaaacagtgga

SEQ ID NO: 193347 - DNA, 20 bp, Artificial Sequence
  Description of Artificial Sequence: Synthetic oligonucleotide
  Target: LAMA2; (-) strand; PAM type: YTN; PAM sequence: TTA
tccaattcattccagttaaa

SEQ ID NO: 193348 - DNA, 20 bp, Artificial Sequence
  Description of Artificial Sequence: Synthetic oligonucleotide
  Target: LAMA2; (-) strand; PAM type: YTN; PAM sequence: CTT
atccaattcattccagttaa

SEQ ID NO: 193349 - DNA, 20 bp, Artificial Sequence
  Description of Artificial Sequence: Synthetic oligonucleotide
  Target: LAMA2; (-) strand; PAM type: YTN; PAM sequence: TTA
taacttatccaattcattcc

SEQ ID NO: 193350 - DNA, 20 bp, Artificial Sequence
  Description of Artificial Sequence: Synthetic oligonucleotide
  Target: LAMA2; (-) strand; PAM type: YTN; PAM sequence: CTT
ataacttatccaattcattc

SEQ ID NO: 193351 - DNA, 20 bp, Artificial Sequence
  Description of Artificial Sequence: Synthetic oligonucleotide
  Target: LAMA2; (-) strand; PAM type: YTN; PAM sequence: CTG
ccttataacttatccaattc

SEQ ID NO: 193352 - DNA, 20 bp, Artificial Sequence
  Description of Artificial Sequence: Synthetic oligonucleotide
  Target: LAMA2; (-) strand; PAM type: YTN; PAM sequence: TTA
ccatctgccttataacttat

SEQ ID NO: 193353 - DNA, 20 bp, Artificial Sequence
  Description of Artificial Sequence: Synthetic oligonucleotide
  Target: LAMA2; (-) strand; PAM type: YTN; PAM sequence: CTT
accatctgccttataactta

SEQ ID NO: 193354 - DNA, 20 bp, Artificial Sequence
  Description of Artificial Sequence: Synthetic oligonucleotide
  Target: LAMA2; (-) strand; PAM type: YTN; PAM sequence: CTC
catcccatcagatccaatct

SEQ ID NO: 193355 - DNA, 20 bp, Artificial Sequence
  Description of Artificial Sequence: Synthetic oligonucleotide
  Target: LAMA2; (-) strand; PAM type: YTN; PAM sequence: TTC
accaaactccatcccatcag

SEQ ID NO: 193356 - DNA, 20 bp, Artificial Sequence
  Description of Artificial Sequence: Synthetic oligonucleotide
  Target: LAMA2; (-) strand; PAM type: YTN; PAM sequence: CTT
caccaaactccatcccatca

SEQ ID NO: 193357 - DNA, 20 bp, Artificial Sequence
  Description of Artificial Sequence: Synthetic oligonucleotide
  Target: LAMA2; (-) strand; PAM type: YTN; PAM sequence: TTC
cacttcaccaaactccatcc

SEQ ID NO: 193358 - DNA, 20 bp, Artificial Sequence
  Description of Artificial Sequence: Synthetic oligonucleotide
  Target: LAMA2; (-) strand; PAM type: YTN; PAM sequence: TTT
ccacttcaccaaactccatc

SEQ ID NO: 193359 - DNA, 20 bp, Artificial Sequence
  Description of Artificial Sequence: Synthetic oligonucleotide
  Target: LAMA2; (-) strand; PAM type: YTN; PAM sequence: TTA
aaagtttccacttcaccaaa

SEQ ID NO: 193360 - DNA, 20 bp, Artificial Sequence
  Description of Artificial Sequence: Synthetic oligonucleotide
  Target: LAMA2; (-) strand; PAM type: YTN; PAM sequence: CTT
aaaagtttccacttcaccaa

SEQ ID NO: 193361 - DNA, 20 bp, Artificial Sequence
  Description of Artificial Sequence: Synthetic oligonucleotide
  Target: LAMA2; (-) strand; PAM type: YTN; PAM sequence: CTA
atgcttaaaagtttccactt

SEQ ID NO: 193362 - DNA, 20 bp, Artificial Sequence
  Description of Artificial Sequence: Synthetic oligonucleotide
  Target: LAMA2; (-) strand; PAM type: YTN; PAM sequence: CTC
aaacctaatgcttaaaagtt

SEQ ID NO: 193363 - DNA, 20 bp, Artificial Sequence
  Description of Artificial Sequence: Synthetic oligonucleotide
  Target: LAMA2; (-) strand; PAM type: YTN; PAM sequence: CTA
tctcaaacctaatgcttaaa

SEQ ID NO: 193364 - DNA, 20 bp, Artificial Sequence
  Description of Artificial Sequence: Synthetic oligonucleotide
  Target: LAMA2; (-) strand; PAM type: YTN; PAM sequence: CTA
gctatctcaaacctaatgct

SEQ ID NO: 193365 - DNA, 20 bp, Artificial Sequence
  Description of Artificial Sequence: Synthetic oligonucleotide
  Target: LAMA2; (-) strand; PAM type: YTN; PAM sequence: CTC
cctagctatctcaaacctaa

SEQ ID NO: 193366 - DNA, 20 bp, Artificial Sequence
  Description of Artificial Sequence: Synthetic oligonucleotide
  Target: LAMA2; (-) strand; PAM type: YTN; PAM sequence: TTA
aaaaaggaaagaaagccagc

SEQ ID NO: 193367 - DNA, 20 bp, Artificial Sequence
  Description of Artificial Sequence: Synthetic oligonucleotide
  Target: LAMA2; (-) strand; PAM type: YTN; PAM sequence: TTT
aaaaaaggaaagaaagccag

SEQ ID NO: 193368 - DNA, 20 bp, Artificial Sequence
  Description of Artificial Sequence: Synthetic oligonucleotide
  Target: LAMA2; (-) strand; PAM type: YTN; PAM sequence: TTT
taaaaaaggaaagaaagcca

SEQ ID NO: 193369 - DNA, 20 bp, Artificial Sequence
  Description of Artificial Sequence: Synthetic oligonucleotide
  Target: LAMA2; (-) strand; PAM type: YTN; PAM sequence: TTG
tagaatgggaggacaagaag

SEQ ID NO: 193370 - DNA, 20 bp, Artificial Sequence
  Description of Artificial Sequence: Synthetic oligonucleotide
  Target: LAMA2; (-) strand; PAM type: YTN; PAM sequence: TTT
gtagaatgggaggacaagaa

SEQ ID NO: 193371 - DNA, 20 bp, Artificial Sequence
  Description of Artificial Sequence: Synthetic oligonucleotide
  Target: LAMA2; (-) strand; PAM type: YTN; PAM sequence: CTA
tttgtagaatgggaggacaa

SEQ ID NO: 193372 - DNA, 20 bp, Artificial Sequence
  Description of Artificial Sequence: Synthetic oligonucleotide
  Target: LAMA2; (-) strand; PAM type: YTN; PAM sequence: TTC
tatttgtagaatgggaggac

SEQ ID NO: 193373 - DNA, 20 bp, Artificial Sequence
  Description of Artificial Sequence: Synthetic oligonucleotide
  Target: LAMA2; (-) strand; PAM type: YTN; PAM sequence: TTC
atgttctatttgtagaatgg

SEQ ID NO: 193374 - DNA, 20 bp, Artificial Sequence
  Description of Artificial Sequence: Synthetic oligonucleotide
  Target: LAMA2; (-) strand; PAM type: YTN; PAM sequence: TTT
catgttctatttgtagaatg

SEQ ID NO: 193375 - DNA, 20 bp, Artificial Sequence
  Description of Artificial Sequence: Synthetic oligonucleotide
  Target: LAMA2; (-) strand; PAM type: YTN; PAM sequence: TTC
aatttcatgttctatttgta

SEQ ID NO: 193376 - DNA, 20 bp, Artificial Sequence
  Description of Artificial Sequence: Synthetic oligonucleotide
  Target: LAMA2; (-) strand; PAM type: YTN; PAM sequence: CTT
caatttcatgttctatttgt

SEQ ID NO: 193377 - DNA, 20 bp, Artificial Sequence
  Description of Artificial Sequence: Synthetic oligonucleotide
  Target: LAMA2; (-) strand; PAM type: YTN; PAM sequence: TTA
aaaaaggcttcaatttcatg

SEQ ID NO: 193378 - DNA, 20 bp, Artificial Sequence
  Description of Artificial Sequence: Synthetic oligonucleotide
  Target: LAMA2; (-) strand; PAM type: YTN; PAM sequence: TTT
aaaaaaggcttcaatttcat

SEQ ID NO: 193379 - DNA, 20 bp, Artificial Sequence
  Description of Artificial Sequence: Synthetic oligonucleotide
  Target: LAMA2; (-) strand; PAM type: YTN; PAM sequence: TTT
taaaaaaggcttcaatttca

SEQ ID NO: 193380 - DNA, 20 bp, Artificial Sequence
  Description of Artificial Sequence: Synthetic oligonucleotide
  Target: LAMA2; (-) strand; PAM type: YTN; PAM sequence: TTT
ttaaaaaaggcttcaatttc

SEQ ID NO: 193381 - DNA, 20 bp, Artificial Sequence
  Description of Artificial Sequence: Synthetic oligonucleotide
  Target: LAMA2; (-) strand; PAM type: YTN; PAM sequence: TTT
tttaaaaaaggcttcaattt

SEQ ID NO: 193382 - DNA, 20 bp, Artificial Sequence
  Description of Artificial Sequence: Synthetic oligonucleotide
  Target: LAMA2; (-) strand; PAM type: YTN; PAM sequence: TTT
ttttaaaaaaggcttcaatt

SEQ ID NO: 193383 - DNA, 20 bp, Artificial Sequence
  Description of Artificial Sequence: Synthetic oligonucleotide
  Target: LAMA2; (-) strand; PAM type: YTN; PAM sequence: TTT
tttttaaaaaaggcttcaat

SEQ ID NO: 193384 - DNA, 20 bp, Artificial Sequence
  Description of Artificial Sequence: Synthetic oligonucleotide
  Target: LAMA2; (-) strand; PAM type: YTN; PAM sequence: TTT
ttttttaaaaaaggcttcaa

SEQ ID NO: 193385 - DNA, 20 bp, Artificial Sequence
  Description of Artificial Sequence: Synthetic oligonucleotide
  Target: LAMA2; (-) strand; PAM type: YTN; PAM sequence: TTT
tttttttaaaaaaggcttca

SEQ ID NO: 193386 - DNA, 20 bp, Artificial Sequence
  Description of Artificial Sequence: Synthetic oligonucleotide
  Target: LAMA2; (-) strand; PAM type: YTN; PAM sequence: TTT
ttttttttaaaaaaggcttc

SEQ ID NO: 193387 - DNA, 20 bp, Artificial Sequence
  Description of Artificial Sequence: Synthetic oligonucleotide
  Target: LAMA2; (-) strand; PAM type: YTN; PAM sequence: TTT
tttttttttaaaaaaggctt

SEQ ID NO: 193388 - DNA, 20 bp, Artificial Sequence
  Description of Artificial Sequence: Synthetic oligonucleotide
  Target: LAMA2; (-) strand; PAM type: YTN; PAM sequence: TTT
ttttttttttaaaaaaggct

SEQ ID NO: 193389 - DNA, 20 bp, Artificial Sequence
  Description of Artificial Sequence: Synthetic oligonucleotide
  Target: LAMA2; (-) strand; PAM type: YTN; PAM sequence: TTT
tttttttttttaaaaaaggc

SEQ ID NO: 193390 - DNA, 20 bp, Artificial Sequence
  Description of Artificial Sequence: Synthetic oligonucleotide
  Target: LAMA2; (-) strand; PAM type: YTN; PAM sequence: TTA
gttttttttttttttaaaaa

SEQ ID NO: 193391 - DNA, 20 bp, Artificial Sequence
  Description of Artificial Sequence: Synthetic oligonucleotide
  Target: LAMA2; (-) strand; PAM type: YTN; PAM sequence: CTG
taattagttttttttttttt

SEQ ID NO: 193392 - DNA, 20 bp, Artificial Sequence
  Description of Artificial Sequence: Synthetic oligonucleotide
  Target: LAMA2; (-) strand; PAM type: YTN; PAM sequence: TTC
tgtaattagttttttttttt

SEQ ID NO: 193393 - DNA, 20 bp, Artificial Sequence
  Description of Artificial Sequence: Synthetic oligonucleotide
  Target: LAMA2; (-) strand; PAM type: YTN; PAM sequence: TTA
attctgtaattagttttttt

SEQ ID NO: 193394 - DNA, 20 bp, Artificial Sequence
  Description of Artificial Sequence: Synthetic oligonucleotide
  Target: LAMA2; (-) strand; PAM type: YTN; PAM sequence: TTG
tagtaagtacatagtaaaca

SEQ ID NO: 193395 - DNA, 20 bp, Artificial Sequence
  Description of Artificial Sequence: Synthetic oligonucleotide
  Target: LAMA2; (-) strand; PAM type: YTN; PAM sequence: CTA
attgtagtaagtacatagta

SEQ ID NO: 193396 - DNA, 20 bp, Artificial Sequence
  Description of Artificial Sequence: Synthetic oligonucleotide
  Target: LAMA2; (-) strand; PAM type: YTN; PAM sequence: TTC
taattgtagtaagtacatag

SEQ ID NO: 193397 - DNA, 20 bp, Artificial Sequence
  Description of Artificial Sequence: Synthetic oligonucleotide
  Target: LAMA2; (-) strand; PAM type: YTN; PAM sequence: TTT
ctaattgtagtaagtacata

SEQ ID NO: 193398 - DNA, 20 bp, Artificial Sequence
  Description of Artificial Sequence: Synthetic oligonucleotide
  Target: LAMA2; (-) strand; PAM type: YTN; PAM sequence: TTA
tatatagtttctaattgtag

SEQ ID NO: 193399 - DNA, 20 bp, Artificial Sequence
  Description of Artificial Sequence: Synthetic oligonucleotide
  Target: LAMA2; (-) strand; PAM type: YTN; PAM sequence: TTT
atatatagtttctaattgta

SEQ ID NO: 193400 - DNA, 20 bp, Artificial Sequence
  Description of Artificial Sequence: Synthetic oligonucleotide
  Target: LAMA2; (-) strand; PAM type: YTN; PAM sequence: TTG
tttatatatagtttctaatt

SEQ ID NO: 193401 - DNA, 20 bp, Artificial Sequence
  Description of Artificial Sequence: Synthetic oligonucleotide
  Target: LAMA2; (-) strand; PAM type: YTN; PAM sequence: TTT
gtttatatatagtttctaat

SEQ ID NO: 193402 - DNA, 20 bp, Artificial Sequence
  Description of Artificial Sequence: Synthetic oligonucleotide
  Target: LAMA2; (-) strand; PAM type: YTN; PAM sequence: TTT
tgtttatatatagtttctaa

SEQ ID NO: 193403 - DNA, 20 bp, Artificial Sequence
  Description of Artificial Sequence: Synthetic oligonucleotide
  Target: LAMA2; (-) strand; PAM type: YTN; PAM sequence: TTT
ttgtttatatatagtttcta

SEQ ID NO: 193404 - DNA, 20 bp, Artificial Sequence
  Description of Artificial Sequence: Synthetic oligonucleotide
  Target: LAMA2; (-) strand; PAM type: YTN; PAM sequence: TTT
tttgtttatatatagtttct

SEQ ID NO: 193405 - DNA, 20 bp, Artificial Sequence
  Description of Artificial Sequence: Synthetic oligonucleotide
  Target: LAMA2; (-) strand; PAM type: YTN; PAM sequence: CTT
ttttgtttatatatagtttc

SEQ ID NO: 193406 - DNA, 20 bp, Artificial Sequence
  Description of Artificial Sequence: Synthetic oligonucleotide
  Target: LAMA2; (-) strand; PAM type: YTN; PAM sequence: CTC
ttttttgtttatatatagtt

SEQ ID NO: 193407 - DNA, 20 bp, Artificial Sequence
  Description of Artificial Sequence: Synthetic oligonucleotide
  Target: LAMA2; (-) strand; PAM type: YTN; PAM sequence: CTC
tcttttttgtttatatatag

SEQ ID NO: 193408 - DNA, 20 bp, Artificial Sequence
  Description of Artificial Sequence: Synthetic oligonucleotide
  Target: LAMA2; (-) strand; PAM type: YTN; PAM sequence: TTG
atgggcaagctctctttttt

SEQ ID NO: 193409 - DNA, 20 bp, Artificial Sequence
  Description of Artificial Sequence: Synthetic oligonucleotide
  Target: LAMA2; (-) strand; PAM type: YTN; PAM sequence: TTG
catgtggattgatgggcaag

SEQ ID NO: 193410 - DNA, 20 bp, Artificial Sequence
  Description of Artificial Sequence: Synthetic oligonucleotide
  Target: LAMA2; (-) strand; PAM type: YTN; PAM sequence: TTT
gcatgtggattgatgggcaa

SEQ ID NO: 193411 - DNA, 20 bp, Artificial Sequence
  Description of Artificial Sequence: Synthetic oligonucleotide
  Target: LAMA2; (-) strand; PAM type: YTN; PAM sequence: TTT
tgcatgtggattgatgggca

SEQ ID NO: 193412 - DNA, 20 bp, Artificial Sequence
  Description of Artificial Sequence: Synthetic oligonucleotide
  Target: LAMA2; (-) strand; PAM type: YTN; PAM sequence: CTC
aaccaattttgcatgtggat

SEQ ID NO: 193413 - DNA, 20 bp, Artificial Sequence
  Description of Artificial Sequence: Synthetic oligonucleotide
  Target: LAMA2; (-) strand; PAM type: YTN; PAM sequence: TTC
aaggtactcaaccaattttg

SEQ ID NO: 193414 - DNA, 20 bp, Artificial Sequence
  Description of Artificial Sequence: Synthetic oligonucleotide
  Target: LAMA2; (-) strand; PAM type: YTN; PAM sequence: CTT
caaggtactcaaccaatttt

SEQ ID NO: 193415 - DNA, 20 bp, Artificial Sequence
  Description of Artificial Sequence: Synthetic oligonucleotide
  Target: LAMA2; (-) strand; PAM type: YTN; PAM sequence: TTA
caaatcttcaaggtactcaa

SEQ ID NO: 193416 - DNA, 20 bp, Artificial Sequence
  Description of Artificial Sequence: Synthetic oligonucleotide
  Target: LAMA2; (-) strand; PAM type: YTN; PAM sequence: CTA
ttacaaatcttcaaggtact

SEQ ID NO: 193417 - DNA, 20 bp, Artificial Sequence
  Description of Artificial Sequence: Synthetic oligonucleotide
  Target: LAMA2; (-) strand; PAM type: YTN; PAM sequence: CTA
tatactattacaaatcttca

SEQ ID NO: 193418 - DNA, 20 bp, Artificial Sequence
  Description of Artificial Sequence: Synthetic oligonucleotide
  Target: LAMA2; (-) strand; PAM type: YTN; PAM sequence: CTC
tatatactattacaaatctt

SEQ ID NO: 193419 - DNA, 20 bp, Artificial Sequence
  Description of Artificial Sequence: Synthetic oligonucleotide
  Target: LAMA2; (-) strand; PAM type: YTN; PAM sequence: TTC
tctatatactattacaaatc

SEQ ID NO: 193420 - DNA, 20 bp, Artificial Sequence
  Description of Artificial Sequence: Synthetic oligonucleotide
  Target: LAMA2; (-) strand; PAM type: YTN; PAM sequence: CTT
ctctatatactattacaaat

SEQ ID NO: 193421 - DNA, 20 bp, Artificial Sequence
  Description of Artificial Sequence: Synthetic oligonucleotide
  Target: LAMA2; (-) strand; PAM type: YTN; PAM sequence: TTC
ttctctatatactattacaa

SEQ ID NO: 193422 - DNA, 20 bp, Artificial Sequence
  Description of Artificial Sequence: Synthetic oligonucleotide
  Target: LAMA2; (-) strand; PAM type: YTN; PAM sequence: TTA
agaaaaataatgttcttctc

SEQ ID NO: 193423 - DNA, 20 bp, Artificial Sequence
  Description of Artificial Sequence: Synthetic oligonucleotide
  Target: LAMA2; (-) strand; PAM type: YTN; PAM sequence: TTA
aatagttaagaaaaataatg

SEQ ID NO: 193424 - DNA, 20 bp, Artificial Sequence
  Description of Artificial Sequence: Synthetic oligonucleotide
  Target: LAMA2; (-) strand; PAM type: YTN; PAM sequence: TTT
aaatagttaagaaaaataat

SEQ ID NO: 193425 - DNA, 20 bp, Artificial Sequence
  Description of Artificial Sequence: Synthetic oligonucleotide
  Target: LAMA2; (-) strand; PAM type: YTN; PAM sequence: TTT
taaatagttaagaaaaataa

SEQ ID NO: 193426 - DNA, 20 bp, Artificial Sequence
  Description of Artificial Sequence: Synthetic oligonucleotide
  Target: LAMA2; (-) strand; PAM type: YTN; PAM sequence: CTT
ttaaatagttaagaaaaata

SEQ ID NO: 193427 - DNA, 20 bp, Artificial Sequence
  Description of Artificial Sequence: Synthetic oligonucleotide
  Target: LAMA2; (-) strand; PAM type: YTN; PAM sequence: TTG
agaatgcagaatacactttt

SEQ ID NO: 193428 - DNA, 20 bp, Artificial Sequence
  Description of Artificial Sequence: Synthetic oligonucleotide
  Target: LAMA2; (-) strand; PAM type: YTN; PAM sequence: TTA
attgagaatgcagaatacac

SEQ ID NO: 193429 - DNA, 20 bp, Artificial Sequence
  Description of Artificial Sequence: Synthetic oligonucleotide
  Target: LAMA2; (-) strand; PAM type: YTN; PAM sequence: TTT
aattgagaatgcagaataca

SEQ ID NO: 193430 - DNA, 20 bp, Artificial Sequence
  Description of Artificial Sequence: Synthetic oligonucleotide
  Target: LAMA2; (-) strand; PAM type: YTN; PAM sequence: TTT
taattgagaatgcagaatac

SEQ ID NO: 193431 - DNA, 20 bp, Artificial Sequence
  Description of Artificial Sequence: Synthetic oligonucleotide
  Target: LAMA2; (-) strand; PAM type: YTN; PAM sequence: CTT
ttaattgagaatgcagaata

SEQ ID NO: 193432 - DNA, 20 bp, Artificial Sequence
  Description of Artificial Sequence: Synthetic oligonucleotide
  Target: LAMA2; (-) strand; PAM type: YTN; PAM sequence: TTA
aaaaggaataaaagaaaaag

SEQ ID NO: 193433 - DNA, 20 bp, Artificial Sequence
  Description of Artificial Sequence: Synthetic oligonucleotide
  Target: LAMA2; (-) strand; PAM type: YTN; PAM sequence: CTT
aaaaaggaataaaagaaaaa

SEQ ID NO: 193434 - DNA, 20 bp, Artificial Sequence
  Description of Artificial Sequence: Synthetic oligonucleotide
  Target: LAMA2; (-) strand; PAM type: YTN; PAM sequence: TTG
cttaaaaaggaataaaagaa

SEQ ID NO: 193435 - DNA, 20 bp, Artificial Sequence
  Description of Artificial Sequence: Synthetic oligonucleotide
  Target: LAMA2; (-) strand; PAM type: YTN; PAM sequence: TTG
ttgcttaaaaaggaataaaa

SEQ ID NO: 193436 - DNA, 20 bp, Artificial Sequence
  Description of Artificial Sequence: Synthetic oligonucleotide
  Target: LAMA2; (-) strand; PAM type: YTN; PAM sequence: TTT
gttgcttaaaaaggaataaa

SEQ ID NO: 193437 - DNA, 20 bp, Artificial Sequence
  Description of Artificial Sequence: Synthetic oligonucleotide
  Target: LAMA2; (-) strand; PAM type: YTN; PAM sequence: TTC
atttgttgcttaaaaaggaa

SEQ ID NO: 193438 - DNA, 20 bp, Artificial Sequence
  Description of Artificial Sequence: Synthetic oligonucleotide
  Target: LAMA2; (-) strand; PAM type: YTN; PAM sequence: TTA
attcatttgttgcttaaaaa

SEQ ID NO: 193439 - DNA, 20 bp, Artificial Sequence
  Description of Artificial Sequence: Synthetic oligonucleotide
  Target: LAMA2; (-) strand; PAM type: YTN; PAM sequence: TTT
aattcatttgttgcttaaaa

SEQ ID NO: 193440 - DNA, 20 bp, Artificial Sequence
  Description of Artificial Sequence: Synthetic oligonucleotide
  Target: LAMA2; (-) strand; PAM type: YTN; PAM sequence: TTA
ataggtcatatataaaacaa

SEQ ID NO: 193441 - DNA, 20 bp, Artificial Sequence
  Description of Artificial Sequence: Synthetic oligonucleotide
  Target: LAMA2; (-) strand; PAM type: YTN; PAM sequence: TTG
aggttaataggtcatatata

SEQ ID NO: 193442 - DNA, 20 bp, Artificial Sequence
  Description of Artificial Sequence: Synthetic oligonucleotide
  Target: LAMA2; (-) strand; PAM type: YTN; PAM sequence: CTC
cattgaggttaataggtcat

SEQ ID NO: 193443 - DNA, 20 bp, Artificial Sequence
  Description of Artificial Sequence: Synthetic oligonucleotide
  Target: LAMA2; (-) strand; PAM type: YTN; PAM sequence: TTC
tccattgaggttaataggtc

SEQ ID NO: 193444 - DNA, 20 bp, Artificial Sequence
  Description of Artificial Sequence: Synthetic oligonucleotide
  Target: LAMA2; (-) strand; PAM type: YTN; PAM sequence: TTT
ctccattgaggttaataggt

SEQ ID NO: 193445 - DNA, 20 bp, Artificial Sequence
  Description of Artificial Sequence: Synthetic oligonucleotide
  Target: LAMA2; (-) strand; PAM type: YTN; PAM sequence: CTT
tctccattgaggttaatagg

SEQ ID NO: 193446 - DNA, 20 bp, Artificial Sequence
  Description of Artificial Sequence: Synthetic oligonucleotide
  Target: LAMA2; (-) strand; PAM type: YTN; PAM sequence: CTC
tttctccattgaggttaata

SEQ ID NO: 193447 - DNA, 20 bp, Artificial Sequence
  Description of Artificial Sequence: Synthetic oligonucleotide
  Target: LAMA2; (-) strand; PAM type: YTN; PAM sequence: CTG
aagcaaacaaagggagcctc

SEQ ID NO: 193448 - DNA, 20 bp, Artificial Sequence
  Description of Artificial Sequence: Synthetic oligonucleotide
  Target: LAMA2; (-) strand; PAM type: YTN; PAM sequence: CTG
taacaatatgtaagtcctga

SEQ ID NO: 193449 - DNA, 20 bp, Artificial Sequence
  Description of Artificial Sequence: Synthetic oligonucleotide
  Target: LAMA2; (-) strand; PAM type: YTN; PAM sequence: CTA
actgtaacaatatgtaagtc

SEQ ID NO: 193450 - DNA, 20 bp, Artificial Sequence
  Description of Artificial Sequence: Synthetic oligonucleotide
  Target: LAMA2; (-) strand; PAM type: YTN; PAM sequence: CTA
aggactaactgtaacaatat

SEQ ID NO: 193451 - DNA, 20 bp, Artificial Sequence
  Description of Artificial Sequence: Synthetic oligonucleotide
  Target: LAMA2; (-) strand; PAM type: YTN; PAM sequence: TTA
cctaaggactaactgtaaca

SEQ ID NO: 193452 - DNA, 20 bp, Artificial Sequence
  Description of Artificial Sequence: Synthetic oligonucleotide
  Target: LAMA2; (-) strand; PAM type: YTN; PAM sequence: TTT
acctaaggactaactgtaac

SEQ ID NO: 193453 - DNA, 20 bp, Artificial Sequence
  Description of Artificial Sequence: Synthetic oligonucleotide
  Target: LAMA2; (-) strand; PAM type: YTN; PAM sequence: TTC
atttacctaaggactaactg

SEQ ID NO: 193454 - DNA, 20 bp, Artificial Sequence
  Description of Artificial Sequence: Synthetic oligonucleotide
  Target: LAMA2; (-) strand; PAM type: YTN; PAM sequence: TTT
catttacctaaggactaact

SEQ ID NO: 193455 - DNA, 20 bp, Artificial Sequence
  Description of Artificial Sequence: Synthetic oligonucleotide
  Target: LAMA2; (-) strand; PAM type: YTN; PAM sequence: CTC
atttcatttacctaaggact

SEQ ID NO: 193456 - DNA, 20 bp, Artificial Sequence
  Description of Artificial Sequence: Synthetic oligonucleotide
  Target: LAMA2; (-) strand; PAM type: YTN; PAM sequence: TTC
tcatttcatttacctaagga

SEQ ID NO: 193457 - DNA, 20 bp, Artificial Sequence
  Description of Artificial Sequence: Synthetic oligonucleotide
  Target: LAMA2; (-) strand; PAM type: YTN; PAM sequence: CTT
ctcatttcatttacctaagg

SEQ ID NO: 193458 - DNA, 20 bp, Artificial Sequence
  Description of Artificial Sequence: Synthetic oligonucleotide
  Target: LAMA2; (-) strand; PAM type: YTN; PAM sequence: CTC
ttctcatttcatttacctaa

SEQ ID NO: 193459 - DNA, 20 bp, Artificial Sequence
  Description of Artificial Sequence: Synthetic oligonucleotide
  Target: LAMA2; (-) strand; PAM type: YTN; PAM sequence: CTG
atgtgaagctcttctcattt

SEQ ID NO: 193460 - DNA, 20 bp, Artificial Sequence
  Description of Artificial Sequence: Synthetic oligonucleotide
  Target: LAMA2; (-) strand; PAM type: YTN; PAM sequence: CTA
gtgctgatgtgaagctcttc

SEQ ID NO: 193461 - DNA, 20 bp, Artificial Sequence
  Description of Artificial Sequence: Synthetic oligonucleotide
  Target: LAMA2; (-) strand; PAM type: YTN; PAM sequence: TTC
catggggaagaactagtgct

SEQ ID NO: 193462 - DNA, 20 bp, Artificial Sequence
  Description of Artificial Sequence: Synthetic oligonucleotide
  Target: LAMA2; (-) strand; PAM type: YTN; PAM sequence: CTA
aaattccatggggaagaact

SEQ ID NO: 193463 - DNA, 20 bp, Artificial Sequence
  Description of Artificial Sequence: Synthetic oligonucleotide
  Target: LAMA2; (-) strand; PAM type: YTN; PAM sequence: TTG
tggagaaactaaaattccat

SEQ ID NO: 193464 - DNA, 20 bp, Artificial Sequence
  Description of Artificial Sequence: Synthetic oligonucleotide
  Target: LAMA2; (-) strand; PAM type: YTN; PAM sequence: TTC
agtaaagtggttgtggagaa

SEQ ID NO: 193465 - DNA, 20 bp, Artificial Sequence
  Description of Artificial Sequence: Synthetic oligonucleotide
  Target: LAMA2; (-) strand; PAM type: YTN; PAM sequence: TTA
tacacattcagtaaagtggt

SEQ ID NO: 193466 - DNA, 20 bp, Artificial Sequence
  Description of Artificial Sequence: Synthetic oligonucleotide
  Target: LAMA2; (-) strand; PAM type: YTN; PAM sequence: TTA
taattatacacattcagtaa

SEQ ID NO: 193467 - DNA, 20 bp, Artificial Sequence
  Description of Artificial Sequence: Synthetic oligonucleotide
  Target: LAMA2; (-) strand; PAM type: YTN; PAM sequence: CTT
ataattatacacattcagta

SEQ ID NO: 193468 - DNA, 20 bp, Artificial Sequence
  Description of Artificial Sequence: Synthetic oligonucleotide
  Target: LAMA2; (-) strand; PAM type: YTN; PAM sequence: TTC
ttataattatacacattcag

SEQ ID NO: 193469 - DNA, 20 bp, Artificial Sequence
  Description of Artificial Sequence: Synthetic oligonucleotide
  Target: LAMA2; (-) strand; PAM type: YTN; PAM sequence: TTG
taagaaaatgaaataattct

SEQ ID NO: 193470 - DNA, 20 bp, Artificial Sequence
  Description of Artificial Sequence: Synthetic oligonucleotide
  Target: LAMA2; (-) strand; PAM type: YTN; PAM sequence: CTC
aaaaaaaaaaaaaaaaagaa

SEQ ID NO: 193471 - DNA, 20 bp, Artificial Sequence
  Description of Artificial Sequence: Synthetic oligonucleotide
  Target: LAMA2; (-) strand; PAM type: YTN; PAM sequence: CTG
tctcaaaaaaaaaaaaaaaa

SEQ ID NO: 193472 - DNA, 20 bp, Artificial Sequence
  Description of Artificial Sequence: Synthetic oligonucleotide
  Target: LAMA2; (-) strand; PAM type: YTN; PAM sequence: CTG
ggcaacggagtaagagcctg

SEQ ID NO: 193473 - DNA, 20 bp, Artificial Sequence
  Description of Artificial Sequence: Synthetic oligonucleotide
  Target: LAMA2; (-) strand; PAM type: YTN; PAM sequence: TTC
agcctgggcaacggagtaag

SEQ ID NO: 193474 - DNA, 20 bp, Artificial Sequence
  Description of Artificial Sequence: Synthetic oligonucleotide
  Target: LAMA2; (-) strand; PAM type: YTN; PAM sequence: CTT
cagcctgggcaacggagtaa

SEQ ID NO: 193475 - DNA, 20 bp, Artificial Sequence
  Description of Artificial Sequence: Synthetic oligonucleotide
  Target: LAMA2; (-) strand; PAM type: YTN; PAM sequence: CTG
cacttcagcctgggcaacgg

SEQ ID NO: 193476 - DNA, 20 bp, Artificial Sequence
  Description of Artificial Sequence: Synthetic oligonucleotide
  Target: LAMA2; (-) strand; PAM type: YTN; PAM sequence: CTG
ccactgcacttcagcctggg

SEQ ID NO: 193477 - DNA, 20 bp, Artificial Sequence
  Description of Artificial Sequence: Synthetic oligonucleotide
  Target: LAMA2; (-) strand; PAM type: YTN; PAM sequence: CTG
agatgtcaagggcacaataa

SEQ ID NO: 193478 - DNA, 20 bp, Artificial Sequence
  Description of Artificial Sequence: Synthetic oligonucleotide
  Target: LAMA2; (-) strand; PAM type: YTN; PAM sequence: TTG
aaactgagatgtcaagggca

SEQ ID NO: 193479 - DNA, 20 bp, Artificial Sequence
  Description of Artificial Sequence: Synthetic oligonucleotide
  Target: LAMA2; (-) strand; PAM type: YTN; PAM sequence: CTT
gaaactgagatgtcaagggc

SEQ ID NO: 193480 - DNA, 20 bp, Artificial Sequence
  Description of Artificial Sequence: Synthetic oligonucleotide
  Target: LAMA2; (-) strand; PAM type: YTN; PAM sequence: CTG
aagtgggagtatcacttgaa

SEQ ID NO: 193481 - DNA, 20 bp, Artificial Sequence
  Description of Artificial Sequence: Synthetic oligonucleotide
  Target: LAMA2; (-) strand; PAM type: YTN; PAM sequence: CTA
gtgaagaggctgaagtggga

SEQ ID NO: 193482 - DNA, 20 bp, Artificial Sequence
  Description of Artificial Sequence: Synthetic oligonucleotide
  Target: LAMA2; (-) strand; PAM type: YTN; PAM sequence: CTG
tagtcccagctagtgaagag

SEQ ID NO: 193483 - DNA, 20 bp, Artificial Sequence
  Description of Artificial Sequence: Synthetic oligonucleotide
  Target: LAMA2; (-) strand; PAM type: YTN; PAM sequence: TTA
gccaggtggggtggcaagag

SEQ ID NO: 193484 - DNA, 20 bp, Artificial Sequence
  Description of Artificial Sequence: Synthetic oligonucleotide
  Target: LAMA2; (-) strand; PAM type: YTN; PAM sequence: TTA
caaaaaaaatagaaaaatta

SEQ ID NO: 193485 - DNA, 20 bp, Artificial Sequence
  Description of Artificial Sequence: Synthetic oligonucleotide
  Target: LAMA2; (-) strand; PAM type: YTN; PAM sequence: TTT
acaaaaaaaatagaaaaatt

SEQ ID NO: 193486 - DNA, 20 bp, Artificial Sequence
  Description of Artificial Sequence: Synthetic oligonucleotide
  Target: LAMA2; (-) strand; PAM type: YTN; PAM sequence: CTT
tacaaaaaaaatagaaaaat

SEQ ID NO: 193487 - DNA, 20 bp, Artificial Sequence
  Description of Artificial Sequence: Synthetic oligonucleotide
  Target: LAMA2; (-) strand; PAM type: YTN; PAM sequence: CTG
agcaacatggcaaagtacca

SEQ ID NO: 193488 - DNA, 20 bp, Artificial Sequence
  Description of Artificial Sequence: Synthetic oligonucleotide
  Target: LAMA2; (-) strand; PAM type: YTN; PAM sequence: TTC
agtctgagcaacatggcaaa

SEQ ID NO: 193489 - DNA, 20 bp, Artificial Sequence
  Description of Artificial Sequence: Synthetic oligonucleotide
  Target: LAMA2; (-) strand; PAM type: YTN; PAM sequence: TTG
agcccaggagttcagtctga

SEQ ID NO: 193490 - DNA, 20 bp, Artificial Sequence
  Description of Artificial Sequence: Synthetic oligonucleotide
  Target: LAMA2; (-) strand; PAM type: YTN; PAM sequence: TTT
gagcccaggagttcagtctg

SEQ ID NO: 193491 - DNA, 20 bp, Artificial Sequence
  Description of Artificial Sequence: Synthetic oligonucleotide
  Target: LAMA2; (-) strand; PAM type: YTN; PAM sequence: TTG
tttgagcccaggagttcagt

SEQ ID NO: 193492 - DNA, 20 bp, Artificial Sequence
  Description of Artificial Sequence: Synthetic oligonucleotide
  Target: LAMA2; (-) strand; PAM type: YTN; PAM sequence: CTA
tgggaggccgaggtggggag

SEQ ID NO: 193493 - DNA, 20 bp, Artificial Sequence
  Description of Artificial Sequence: Synthetic oligonucleotide
  Target: LAMA2; (-) strand; PAM type: YTN; PAM sequence: CTA
gcactatgggaggccgaggt

SEQ ID NO: 193494 - DNA, 20 bp, Artificial Sequence
  Description of Artificial Sequence: Synthetic oligonucleotide
  Target: LAMA2; (-) strand; PAM type: YTN; PAM sequence: CTA
taatcctagcactatgggag

SEQ ID NO: 193495 - DNA, 20 bp, Artificial Sequence
  Description of Artificial Sequence: Synthetic oligonucleotide
  Target: LAMA2; (-) strand; PAM type: YTN; PAM sequence: CTC
atgcctataatcctagcact

SEQ ID NO: 193496 - DNA, 20 bp, Artificial Sequence
  Description of Artificial Sequence: Synthetic oligonucleotide
  Target: LAMA2; (-) strand; PAM type: YTN; PAM sequence: TTA
agaatataaaagccaggtgc

SEQ ID NO: 193497 - DNA, 20 bp, Artificial Sequence
  Description of Artificial Sequence: Synthetic oligonucleotide
  Target: LAMA2; (-) strand; PAM type: YTN; PAM sequence: TTA
aagtaaagaaaataaataga

SEQ ID NO: 193498 - DNA, 20 bp, Artificial Sequence
  Description of Artificial Sequence: Synthetic oligonucleotide
  Target: LAMA2; (-) strand; PAM type: YTN; PAM sequence: TTT
aaagtaaagaaaataaatag

SEQ ID NO: 193499 - DNA, 20 bp, Artificial Sequence
  Description of Artificial Sequence: Synthetic oligonucleotide
  Target: LAMA2; (-) strand; PAM type: YTN; PAM sequence: TTA
taacaacgagtttaaagtaa

SEQ ID NO: 193500 - DNA, 20 bp, Artificial Sequence
  Description of Artificial Sequence: Synthetic oligonucleotide
  Target: LAMA2; (-) strand; PAM type: YTN; PAM sequence: TTT
ataacaacgagtttaaagta

SEQ ID NO: 193501 - DNA, 20 bp, Artificial Sequence
  Description of Artificial Sequence: Synthetic oligonucleotide
  Target: LAMA2; (-) strand; PAM type: YTN; PAM sequence: CTT
tataacaacgagtttaaagt

SEQ ID NO: 193502 - DNA, 20 bp, Artificial Sequence
  Description of Artificial Sequence: Synthetic oligonucleotide
  Target: LAMA2; (-) strand; PAM type: YTN; PAM sequence: TTA
acccataccactttataaca

SEQ ID NO: 193503 - DNA, 20 bp, Artificial Sequence
  Description of Artificial Sequence: Synthetic oligonucleotide
  Target: LAMA2; (-) strand; PAM type: YTN; PAM sequence: TTG
attaacccataccactttat

SEQ ID NO: 193504 - DNA, 20 bp, Artificial Sequence
  Description of Artificial Sequence: Synthetic oligonucleotide
  Target: LAMA2; (-) strand; PAM type: YTN; PAM sequence: CTT
gattaacccataccacttta

SEQ ID NO: 193505 - DNA, 20 bp, Artificial Sequence
  Description of Artificial Sequence: Synthetic oligonucleotide
  Target: LAMA2; (-) strand; PAM type: YTN; PAM sequence: CTC
ttgattaacccataccactt

SEQ ID NO: 193506 - DNA, 20 bp, Artificial Sequence
  Description of Artificial Sequence: Synthetic oligonucleotide
  Target: LAMA2; (-) strand; PAM type: YTN; PAM sequence: TTC
catcactcttgattaaccca

SEQ ID NO: 193507 - DNA, 20 bp, Artificial Sequence
  Description of Artificial Sequence: Synthetic oligonucleotide
  Target: LAMA2; (-) strand; PAM type: YTN; PAM sequence: TTT
ccatcactcttgattaaccc

SEQ ID NO: 193508 - DNA, 20 bp, Artificial Sequence
  Description of Artificial Sequence: Synthetic oligonucleotide
  Target: LAMA2; (-) strand; PAM type: YTN; PAM sequence: CTT
tccatcactcttgattaacc

SEQ ID NO: 193509 - DNA, 20 bp, Artificial Sequence
  Description of Artificial Sequence: Synthetic oligonucleotide
  Target: LAMA2; (-) strand; PAM type: YTN; PAM sequence: CTA
atctttccatcactcttgat

SEQ ID NO: 193510 - DNA, 20 bp, Artificial Sequence
  Description of Artificial Sequence: Synthetic oligonucleotide
  Target: LAMA2; (-) strand; PAM type: YTN; PAM sequence: CTC
acacacagaaaaacagagct

SEQ ID NO: 193511 - DNA, 20 bp, Artificial Sequence
  Description of Artificial Sequence: Synthetic oligonucleotide
  Target: LAMA2; (-) strand; PAM type: YTN; PAM sequence: TTC
actcacacacagaaaaacag

SEQ ID NO: 193512 - DNA, 20 bp, Artificial Sequence
  Description of Artificial Sequence: Synthetic oligonucleotide
  Target: LAMA2; (-) strand; PAM type: YTN; PAM sequence: TTT
cactcacacacagaaaaaca

SEQ ID NO: 193513 - DNA, 20 bp, Artificial Sequence
  Description of Artificial Sequence: Synthetic oligonucleotide
  Target: LAMA2; (-) strand; PAM type: YTN; PAM sequence: CTT
tcactcacacacagaaaaac

SEQ ID NO: 193514 - DNA, 20 bp, Artificial Sequence
  Description of Artificial Sequence: Synthetic oligonucleotide
  Target: LAMA2; (-) strand; PAM type: YTN; PAM sequence: CTA
aatctttcactcacacacag

SEQ ID NO: 193515 - DNA, 20 bp, Artificial Sequence
  Description of Artificial Sequence: Synthetic oligonucleotide
  Target: LAMA2; (-) strand; PAM type: YTN; PAM sequence: TTC
taaatctttcactcacacac

SEQ ID NO: 193516 - DNA, 20 bp, Artificial Sequence
  Description of Artificial Sequence: Synthetic oligonucleotide
  Target: LAMA2; (-) strand; PAM type: YTN; PAM sequence: CTT
ctaaatctttcactcacaca

SEQ ID NO: 193517 - DNA, 20 bp, Artificial Sequence
  Description of Artificial Sequence: Synthetic oligonucleotide
  Target: LAMA2; (-) strand; PAM type: YTN; PAM sequence: TTA
cttctaaatctttcactcac

SEQ ID NO: 193518 - DNA, 20 bp, Artificial Sequence
  Description of Artificial Sequence: Synthetic oligonucleotide
  Target: LAMA2; (-) strand; PAM type: YTN; PAM sequence: CTT
acttctaaatctttcactca

SEQ ID NO: 193519 - DNA, 20 bp, Artificial Sequence
  Description of Artificial Sequence: Synthetic oligonucleotide
  Target: LAMA2; (-) strand; PAM type: YTN; PAM sequence: TTC
ttacttctaaatctttcact

SEQ ID NO: 193520 - DNA, 20 bp, Artificial Sequence
  Description of Artificial Sequence: Synthetic oligonucleotide
  Target: LAMA2; (-) strand; PAM type: YTN; PAM sequence: TTT
cttacttctaaatctttcac

SEQ ID NO: 193521 - DNA, 20 bp, Artificial Sequence
  Description of Artificial Sequence: Synthetic oligonucleotide
  Target: LAMA2; (-) strand; PAM type: YTN; PAM sequence: TTT
tcttacttctaaatctttca

SEQ ID NO: 193522 - DNA, 20 bp, Artificial Sequence
  Description of Artificial Sequence: Synthetic oligonucleotide
  Target: LAMA2; (-) strand; PAM type: YTN; PAM sequence: TTA
tattttcttacttctaaatc

SEQ ID NO: 193523 - DNA, 20 bp, Artificial Sequence
  Description of Artificial Sequence: Synthetic oligonucleotide
  Target: LAMA2; (-) strand; PAM type: YTN; PAM sequence: TTG
ggaagaagaataattatatt

SEQ ID NO: 193524 - DNA, 20 bp, Artificial Sequence
  Description of Artificial Sequence: Synthetic oligonucleotide
  Target: LAMA2; (-) strand; PAM type: YTN; PAM sequence: TTT
gggaagaagaataattatat

SEQ ID NO: 193525 - DNA, 20 bp, Artificial Sequence
  Description of Artificial Sequence: Synthetic oligonucleotide
  Target: LAMA2; (-) strand; PAM type: YTN; PAM sequence: CTT
tgggaagaagaataattata

SEQ ID NO: 193526 - DNA, 20 bp, Artificial Sequence
  Description of Artificial Sequence: Synthetic oligonucleotide
  Target: LAMA2; (-) strand; PAM type: YTN; PAM sequence: TTA
ctttgggaagaagaataatt

SEQ ID NO: 193527 - DNA, 20 bp, Artificial Sequence
  Description of Artificial Sequence: Synthetic oligonucleotide
  Target: LAMA2; (-) strand; PAM type: YTN; PAM sequence: TTG
gtaaacatcattactttggg

SEQ ID NO: 193528 - DNA, 20 bp, Artificial Sequence
  Description of Artificial Sequence: Synthetic oligonucleotide
  Target: LAMA2; (-) strand; PAM type: YTN; PAM sequence: TTT
ggtaaacatcattactttgg

SEQ ID NO: 193529 - DNA, 20 bp, Artificial Sequence
  Description of Artificial Sequence: Synthetic oligonucleotide
  Target: LAMA2; (-) strand; PAM type: YTN; PAM sequence: TTT
tggtaaacatcattactttg

SEQ ID NO: 193530 - DNA, 20 bp, Artificial Sequence
  Description of Artificial Sequence: Synthetic oligonucleotide
  Target: LAMA2; (-) strand; PAM type: YTN; PAM sequence: TTA
ccagtgttttggtaaacatc

SEQ ID NO: 193531 - DNA, 20 bp, Artificial Sequence
  Description of Artificial Sequence: Synthetic oligonucleotide
  Target: LAMA2; (-) strand; PAM type: YTN; PAM sequence: TTA
aagtaatgttaccagtgttt

SEQ ID NO: 193532 - DNA, 20 bp, Artificial Sequence
  Description of Artificial Sequence: Synthetic oligonucleotide
  Target: LAMA2; (-) strand; PAM type: YTN; PAM sequence: TTT
aaagtaatgttaccagtgtt

SEQ ID NO: 193533 - DNA, 20 bp, Artificial Sequence
  Description of Artificial Sequence: Synthetic oligonucleotide
  Target: LAMA2; (-) strand; PAM type: YTN; PAM sequence: TTA
ggaaatttaaagtaatgtta

SEQ ID NO: 193534 - DNA, 20 bp, Artificial Sequence
  Description of Artificial Sequence: Synthetic oligonucleotide
  Target: LAMA2; (-) strand; PAM type: YTN; PAM sequence: TTT
aggaaatttaaagtaatgtt

SEQ ID NO: 193535 - DNA, 20 bp, Artificial Sequence
  Description of Artificial Sequence: Synthetic oligonucleotide
  Target: LAMA2; (-) strand; PAM type: YTN; PAM sequence: TTA
taaatttaggaaatttaaag

SEQ ID NO: 193536 - DNA, 20 bp, Artificial Sequence
  Description of Artificial Sequence: Synthetic oligonucleotide
  Target: LAMA2; (-) strand; PAM type: YTN; PAM sequence: TTG
aattataaatttaggaaatt

SEQ ID NO: 193537 - DNA, 20 bp, Artificial Sequence
  Description of Artificial Sequence: Synthetic oligonucleotide
  Target: LAMA2; (-) strand; PAM type: YTN; PAM sequence: CTA
aattgaattataaatttagg

SEQ ID NO: 193538 - DNA, 20 bp, Artificial Sequence
  Description of Artificial Sequence: Synthetic oligonucleotide
  Target: LAMA2; (-) strand; PAM type: YTN; PAM sequence: TTA
ctaaattgaattataaattt

SEQ ID NO: 193539 - DNA, 20 bp, Artificial Sequence
  Description of Artificial Sequence: Synthetic oligonucleotide
  Target: LAMA2; (-) strand; PAM type: YTN; PAM sequence: TTT
actaaattgaattataaatt

SEQ ID NO: 193540 - DNA, 20 bp, Artificial Sequence
  Description of Artificial Sequence: Synthetic oligonucleotide
  Target: LAMA2; (-) strand; PAM type: YTN; PAM sequence: CTT
tactaaattgaattataaat

SEQ ID NO: 193541 - DNA, 20 bp, Artificial Sequence
  Description of Artificial Sequence: Synthetic oligonucleotide
  Target: LAMA2; (-) strand; PAM type: YTN; PAM sequence: CTA
ctttactaaattgaattata

SEQ ID NO: 193542 - DNA, 20 bp, Artificial Sequence
  Description of Artificial Sequence: Synthetic oligonucleotide
  Target: LAMA2; (-) strand; PAM type: YTN; PAM sequence: TTC
agaagtcctactttactaaa

SEQ ID NO: 193543 - DNA, 20 bp, Artificial Sequence
  Description of Artificial Sequence: Synthetic oligonucleotide
  Target: LAMA2; (-) strand; PAM type: YTN; PAM sequence: TTT
cagaagtcctactttactaa

SEQ ID NO: 193544 - DNA, 20 bp, Artificial Sequence
  Description of Artificial Sequence: Synthetic oligonucleotide
  Target: LAMA2; (-) strand; PAM type: YTN; PAM sequence: CTA
aaaatccatttcagaagtcc

SEQ ID NO: 193545 - DNA, 20 bp, Artificial Sequence
  Description of Artificial Sequence: Synthetic oligonucleotide
  Target: LAMA2; (-) strand; PAM type: YTN; PAM sequence: TTC
cccaatatatctaaaaatcc

SEQ ID NO: 193546 - DNA, 20 bp, Artificial Sequence
  Description of Artificial Sequence: Synthetic oligonucleotide
  Target: LAMA2; (-) strand; PAM type: YTN; PAM sequence: TTT
ccccaatatatctaaaaatc

SEQ ID NO: 193547 - DNA, 20 bp, Artificial Sequence
  Description of Artificial Sequence: Synthetic oligonucleotide
  Target: LAMA2; (-) strand; PAM type: YTN; PAM sequence: TTT
tccccaatatatctaaaaat

SEQ ID NO: 193548 - DNA, 20 bp, Artificial Sequence
  Description of Artificial Sequence: Synthetic oligonucleotide
  Target: LAMA2; (-) strand; PAM type: YTN; PAM sequence: TTT
ttccccaatatatctaaaaa

SEQ ID NO: 193549 - DNA, 20 bp, Artificial Sequence
  Description of Artificial Sequence: Synthetic oligonucleotide
  Target: LAMA2; (-) strand; PAM type: YTN; PAM sequence: TTG
tttttccccaatatatctaa

SEQ ID NO: 193550 - DNA, 20 bp, Artificial Sequence
  Description of Artificial Sequence: Synthetic oligonucleotide
  Target: LAMA2; (-) strand; PAM type: YTN; PAM sequence: CTG
aattgtttttccccaatata

SEQ ID NO: 193551 - DNA, 20 bp, Artificial Sequence
  Description of Artificial Sequence: Synthetic oligonucleotide
  Target: LAMA2; (-) strand; PAM type: YTN; PAM sequence: TTA
gatcctgaattgtttttccc

SEQ ID NO: 193552 - DNA, 20 bp, Artificial Sequence
  Description of Artificial Sequence: Synthetic oligonucleotide
  Target: LAMA2; (-) strand; PAM type: YTN; PAM sequence: CTT
agatcctgaattgtttttcc

SEQ ID NO: 193553 - DNA, 20 bp, Artificial Sequence
  Description of Artificial Sequence: Synthetic oligonucleotide
  Target: LAMA2; (-) strand; PAM type: YTN; PAM sequence: TTA
ccttagatcctgaattgttt

SEQ ID NO: 193554 - DNA, 20 bp, Artificial Sequence
  Description of Artificial Sequence: Synthetic oligonucleotide
  Target: LAMA2; (-) strand; PAM type: YTN; PAM sequence: TTT
accttagatcctgaattgtt

SEQ ID NO: 193555 - DNA, 20 bp, Artificial Sequence
  Description of Artificial Sequence: Synthetic oligonucleotide
  Target: LAMA2; (-) strand; PAM type: YTN; PAM sequence: CTA
aaaagtttaccttagatcct

SEQ ID NO: 193556 - DNA, 20 bp, Artificial Sequence
  Description of Artificial Sequence: Synthetic oligonucleotide
  Target: LAMA2; (-) strand; PAM type: YTN; PAM sequence: TTC
agataaacacaaccatgaat

SEQ ID NO: 193557 - DNA, 20 bp, Artificial Sequence
  Description of Artificial Sequence: Synthetic oligonucleotide
  Target: LAMA2; (-) strand; PAM type: YTN; PAM sequence: TTT
cagataaacacaaccatgaa

SEQ ID NO: 193558 - DNA, 20 bp, Artificial Sequence
  Description of Artificial Sequence: Synthetic oligonucleotide
  Target: LAMA2; (-) strand; PAM type: YTN; PAM sequence: TTT
tcagataaacacaaccatga

SEQ ID NO: 193559 - DNA, 20 bp, Artificial Sequence
  Description of Artificial Sequence: Synthetic oligonucleotide
  Target: LAMA2; (-) strand; PAM type: YTN; PAM sequence: TTA
ggttttcagataaacacaac

SEQ ID NO: 193560 - DNA, 20 bp, Artificial Sequence
  Description of Artificial Sequence: Synthetic oligonucleotide
  Target: LAMA2; (-) strand; PAM type: YTN; PAM sequence: TTA
tgataaaaatgtattaggtt

SEQ ID NO: 193561 - DNA, 20 bp, Artificial Sequence
  Description of Artificial Sequence: Synthetic oligonucleotide
  Target: LAMA2; (-) strand; PAM type: YTN; PAM sequence: TTT
atgataaaaatgtattaggt

SEQ ID NO: 193562 - DNA, 20 bp, Artificial Sequence
  Description of Artificial Sequence: Synthetic oligonucleotide
  Target: LAMA2; (-) strand; PAM type: YTN; PAM sequence: TTT
tatgataaaaatgtattagg

SEQ ID NO: 193563 - DNA, 20 bp, Artificial Sequence
  Description of Artificial Sequence: Synthetic oligonucleotide
  Target: LAMA2; (-) strand; PAM type: YTN; PAM sequence: TTT
ttatgataaaaatgtattag

SEQ ID NO: 193564 - DNA, 20 bp, Artificial Sequence
  Description of Artificial Sequence: Synthetic oligonucleotide
  Target: LAMA2; (-) strand; PAM type: YTN; PAM sequence: TTA
tgtagatttttatgataaaa

SEQ ID NO: 193565 - DNA, 20 bp, Artificial Sequence
  Description of Artificial Sequence: Synthetic oligonucleotide
  Target: LAMA2; (-) strand; PAM type: YTN; PAM sequence: TTA
gaattatgtagatttttatg

SEQ ID NO: 193566 - DNA, 20 bp, Artificial Sequence
  Description of Artificial Sequence: Synthetic oligonucleotide
  Target: LAMA2; (-) strand; PAM type: YTN; PAM sequence: TTT
agaattatgtagatttttat

SEQ ID NO: 193567 - DNA, 20 bp, Artificial Sequence
  Description of Artificial Sequence: Synthetic oligonucleotide
  Target: LAMA2; (-) strand; PAM type: YTN; PAM sequence: TTG
agatgatttagaattatgta

SEQ ID NO: 193568 - DNA, 20 bp, Artificial Sequence
  Description of Artificial Sequence: Synthetic oligonucleotide
  Target: LAMA2; (-) strand; PAM type: YTN; PAM sequence: CTT
gagatgatttagaattatgt

SEQ ID NO: 193569 - DNA, 20 bp, Artificial Sequence
  Description of Artificial Sequence: Synthetic oligonucleotide
  Target: LAMA2; (-) strand; PAM type: YTN; PAM sequence: TTC
acttgagatgatttagaatt

SEQ ID NO: 193570 - DNA, 20 bp, Artificial Sequence
  Description of Artificial Sequence: Synthetic oligonucleotide
  Target: LAMA2; (-) strand; PAM type: YTN; PAM sequence: TTT
cacttgagatgatttagaat

SEQ ID NO: 193571 - DNA, 20 bp, Artificial Sequence
  Description of Artificial Sequence: Synthetic oligonucleotide
  Target: LAMA2; (-) strand; PAM type: YTN; PAM sequence: CTA
atttcacttgagatgattta

SEQ ID NO: 193572 - DNA, 20 bp, Artificial Sequence
  Description of Artificial Sequence: Synthetic oligonucleotide
  Target: LAMA2; (-) strand; PAM type: YTN; PAM sequence: TTC
taatttcacttgagatgatt

SEQ ID NO: 193573 - DNA, 20 bp, Artificial Sequence
  Description of Artificial Sequence: Synthetic oligonucleotide
  Target: LAMA2; (-) strand; PAM type: YTN; PAM sequence: TTA
attctaatttcacttgagat

SEQ ID NO: 193574 - DNA, 20 bp, Artificial Sequence
  Description of Artificial Sequence: Synthetic oligonucleotide
  Target: LAMA2; (-) strand; PAM type: YTN; PAM sequence: TTA
tattaattctaatttcactt

SEQ ID NO: 193575 - DNA, 20 bp, Artificial Sequence
  Description of Artificial Sequence: Synthetic oligonucleotide
  Target: LAMA2; (-) strand; PAM type: YTN; PAM sequence: TTT
atattaattctaatttcact

SEQ ID NO: 193576 - DNA, 20 bp, Artificial Sequence
  Description of Artificial Sequence: Synthetic oligonucleotide
  Target: LAMA2; (-) strand; PAM type: YTN; PAM sequence: CTT
tatattaattctaatttcac

SEQ ID NO: 193577 - DNA, 20 bp, Artificial Sequence
  Description of Artificial Sequence: Synthetic oligonucleotide
  Target: LAMA2; (-) strand; PAM type: YTN; PAM sequence: TTC
tttatattaattctaatttc

SEQ ID NO: 193578 - DNA, 20 bp, Artificial Sequence
  Description of Artificial Sequence: Synthetic oligonucleotide
  Target: LAMA2; (-) strand; PAM type: YTN; PAM sequence: TTT
ctttatattaattctaattt

SEQ ID NO: 193579 - DNA, 20 bp, Artificial Sequence
  Description of Artificial Sequence: Synthetic oligonucleotide
  Target: LAMA2; (-) strand; PAM type: YTN; PAM sequence: TTA
tttctttatattaattctaa

SEQ ID NO: 193580 - DNA, 20 bp, Artificial Sequence
  Description of Artificial Sequence: Synthetic oligonucleotide
  Target: LAMA2; (-) strand; PAM type: YTN; PAM sequence: TTT
atttctttatattaattcta

SEQ ID NO: 193581 - DNA, 20 bp, Artificial Sequence
  Description of Artificial Sequence: Synthetic oligonucleotide
  Target: LAMA2; (-) strand; PAM type: YTN; PAM sequence: TTG
tttatttctttatattaatt

SEQ ID NO: 193582 - DNA, 20 bp, Artificial Sequence
  Description of Artificial Sequence: Synthetic oligonucleotide
  Target: LAMA2; (-) strand; PAM type: YTN; PAM sequence: TTT
gtttatttctttatattaat

SEQ ID NO: 193583 - DNA, 20 bp, Artificial Sequence
  Description of Artificial Sequence: Synthetic oligonucleotide
  Target: LAMA2; (-) strand; PAM type: YTN; PAM sequence: TTC
caatatttgtttatttcttt

SEQ ID NO: 193584 - DNA, 20 bp, Artificial Sequence
  Description of Artificial Sequence: Synthetic oligonucleotide
  Target: LAMA2; (-) strand; PAM type: YTN; PAM sequence: CTT
ccaatatttgtttatttctt

SEQ ID NO: 193585 - DNA, 20 bp, Artificial Sequence
  Description of Artificial Sequence: Synthetic oligonucleotide
  Target: LAMA2; (-) strand; PAM type: YTN; PAM sequence: TTA
acttccaatatttgtttatt

SEQ ID NO: 193586 - DNA, 20 bp, Artificial Sequence
  Description of Artificial Sequence: Synthetic oligonucleotide
  Target: LAMA2; (-) strand; PAM type: YTN; PAM sequence: TTT
aacttccaatatttgtttat

SEQ ID NO: 193587 - DNA, 20 bp, Artificial Sequence
  Description of Artificial Sequence: Synthetic oligonucleotide
  Target: LAMA2; (-) strand; PAM type: YTN; PAM sequence: TTT
taacttccaatatttgttta

SEQ ID NO: 193588 - DNA, 20 bp, Artificial Sequence
  Description of Artificial Sequence: Synthetic oligonucleotide
  Target: LAMA2; (-) strand; PAM type: YTN; PAM sequence: CTG
aaaattttaacttccaatat

SEQ ID NO: 193589 - DNA, 20 bp, Artificial Sequence
  Description of Artificial Sequence: Synthetic oligonucleotide
  Target: LAMA2; (-) strand; PAM type: YTN; PAM sequence: CTA
ataaatctgaaaattttaac

SEQ ID NO: 193590 - DNA, 20 bp, Artificial Sequence
  Description of Artificial Sequence: Synthetic oligonucleotide
  Target: LAMA2; (-) strand; PAM type: YTN; PAM sequence: TTA
acacctaataaatctgaaaa

SEQ ID NO: 193591 - DNA, 20 bp, Artificial Sequence
  Description of Artificial Sequence: Synthetic oligonucleotide
  Target: LAMA2; (-) strand; PAM type: YTN; PAM sequence: TTT
aacacctaataaatctgaaa

SEQ ID NO: 193592 - DNA, 20 bp, Artificial Sequence
  Description of Artificial Sequence: Synthetic oligonucleotide
  Target: LAMA2; (-) strand; PAM type: YTN; PAM sequence: TTC
agtttaacacctaataaatc

SEQ ID NO: 193593 - DNA, 20 bp, Artificial Sequence
  Description of Artificial Sequence: Synthetic oligonucleotide
  Target: LAMA2; (-) strand; PAM type: YTN; PAM sequence: TTA
cgggaggataggagtagaag

SEQ ID NO: 193594 - DNA, 20 bp, Artificial Sequence
  Description of Artificial Sequence: Synthetic oligonucleotide
  Target: LAMA2; (-) strand; PAM type: YTN; PAM sequence: TTT
acgggaggataggagtagaa

SEQ ID NO: 193595 - DNA, 20 bp, Artificial Sequence
  Description of Artificial Sequence: Synthetic oligonucleotide
  Target: LAMA2; (-) strand; PAM type: YTN; PAM sequence: CTA
gatagtgtttacgggaggat

SEQ ID NO: 193596 - DNA, 20 bp, Artificial Sequence
  Description of Artificial Sequence: Synthetic oligonucleotide
  Target: LAMA2; (-) strand; PAM type: YTN; PAM sequence: TTC
tagatagtgtttacgggagg

SEQ ID NO: 193597 - DNA, 20 bp, Artificial Sequence
  Description of Artificial Sequence: Synthetic oligonucleotide
  Target: LAMA2; (-) strand; PAM type: YTN; PAM sequence: TTT
ctagatagtgtttacgggag

SEQ ID NO: 193598 - DNA, 20 bp, Artificial Sequence
  Description of Artificial Sequence: Synthetic oligonucleotide
  Target: LAMA2; (-) strand; PAM type: YTN; PAM sequence: TTT
tctagatagtgtttacggga

SEQ ID NO: 193599 - DNA, 20 bp, Artificial Sequence
  Description of Artificial Sequence: Synthetic oligonucleotide
  Target: LAMA2; (-) strand; PAM type: YTN; PAM sequence: TTG
ggtgacaattttctagatag

SEQ ID NO: 193600 - DNA, 20 bp, Artificial Sequence
  Description of Artificial Sequence: Synthetic oligonucleotide
  Target: LAMA2; (-) strand; PAM type: YTN; PAM sequence: CTA
caataggttgggtgacaatt

SEQ ID NO: 193601 - DNA, 20 bp, Artificial Sequence
  Description of Artificial Sequence: Synthetic oligonucleotide
  Target: LAMA2; (-) strand; PAM type: YTN; PAM sequence: TTC
tacaataggttgggtgacaa

SEQ ID NO: 193602 - DNA, 20 bp, Artificial Sequence
  Description of Artificial Sequence: Synthetic oligonucleotide
  Target: LAMA2; (-) strand; PAM type: YTN; PAM sequence: TTA
gttctacaataggttgggtg

SEQ ID NO: 193603 - DNA, 20 bp, Artificial Sequence
  Description of Artificial Sequence: Synthetic oligonucleotide
  Target: LAMA2; (-) strand; PAM type: YTN; PAM sequence: TTT
agttctacaataggttgggt

SEQ ID NO: 193604 - DNA, 20 bp, Artificial Sequence
  Description of Artificial Sequence: Synthetic oligonucleotide
  Target: LAMA2; (-) strand; PAM type: YTN; PAM sequence: TTT
tagttctacaataggttggg

SEQ ID NO: 193605 - DNA, 20 bp, Artificial Sequence
  Description of Artificial Sequence: Synthetic oligonucleotide
  Target: LAMA2; (-) strand; PAM type: YTN; PAM sequence: TTT
ttagttctacaataggttgg

SEQ ID NO: 193606 - DNA, 20 bp, Artificial Sequence
  Description of Artificial Sequence: Synthetic oligonucleotide
  Target: LAMA2; (-) strand; PAM type: YTN; PAM sequence: CTA
ggtttttagttctacaatag

SEQ ID NO: 193607 - DNA, 20 bp, Artificial Sequence
  Description of Artificial Sequence: Synthetic oligonucleotide
  Target: LAMA2; (-) strand; PAM type: YTN; PAM sequence: TTC
gtgtagtggaaataatgaag

SEQ ID NO: 193608 - DNA, 20 bp, Artificial Sequence
  Description of Artificial Sequence: Synthetic oligonucleotide
  Target: LAMA2; (-) strand; PAM type: YTN; PAM sequence: TTT
cgtgtagtggaaataatgaa

SEQ ID NO: 193609 - DNA, 20 bp, Artificial Sequence
  Description of Artificial Sequence: Synthetic oligonucleotide
  Target: LAMA2; (-) strand; PAM type: YTN; PAM sequence: TTA
caagggaatgtttcgtgtag

SEQ ID NO: 193610 - DNA, 20 bp, Artificial Sequence
  Description of Artificial Sequence: Synthetic oligonucleotide
  Target: LAMA2; (-) strand; PAM type: YTN; PAM sequence: TTG
ttacaagggaatgtttcgtg

SEQ ID NO: 193611 - DNA, 20 bp, Artificial Sequence
  Description of Artificial Sequence: Synthetic oligonucleotide
  Target: LAMA2; (-) strand; PAM type: YTN; PAM sequence: TTT
gttacaagggaatgtttcgt

SEQ ID NO: 193612 - DNA, 20 bp, Artificial Sequence
  Description of Artificial Sequence: Synthetic oligonucleotide
  Target: LAMA2; (-) strand; PAM type: YTN; PAM sequence: TTA
tatttgttacaagggaatgt

SEQ ID NO: 193613 - DNA, 20 bp, Artificial Sequence
  Description of Artificial Sequence: Synthetic oligonucleotide
  Target: LAMA2; (-) strand; PAM type: YTN; PAM sequence: CTG
tgaatattatatttgttaca

SEQ ID NO: 193614 - DNA, 20 bp, Artificial Sequence
  Description of Artificial Sequence: Synthetic oligonucleotide
  Target: LAMA2; (-) strand; PAM type: YTN; PAM sequence: TTG
cacaatgctgtgaatattat

SEQ ID NO: 193615 - DNA, 20 bp, Artificial Sequence
  Description of Artificial Sequence: Synthetic oligonucleotide
  Target: LAMA2; (-) strand; PAM type: YTN; PAM sequence: TTT
gcacaatgctgtgaatatta

SEQ ID NO: 193616 - DNA, 20 bp, Artificial Sequence
  Description of Artificial Sequence: Synthetic oligonucleotide
  Target: LAMA2; (-) strand; PAM type: YTN; PAM sequence: TTT
tgcacaatgctgtgaatatt

SEQ ID NO: 193617 - DNA, 20 bp, Artificial Sequence
  Description of Artificial Sequence: Synthetic oligonucleotide
  Target: LAMA2; (-) strand; PAM type: YTN; PAM sequence: TTT
ttgcacaatgctgtgaatat

SEQ ID NO: 193618 - DNA, 20 bp, Artificial Sequence
  Description of Artificial Sequence: Synthetic oligonucleotide
  Target: LAMA2; (-) strand; PAM type: YTN; PAM sequence: TTT
tttgcacaatgctgtgaata

SEQ ID NO: 193619 - DNA, 20 bp, Artificial Sequence
  Description of Artificial Sequence: Synthetic oligonucleotide
  Target: LAMA2; (-) strand; PAM type: YTN; PAM sequence: TTA
aaatgtacattttttgcaca

SEQ ID NO: 193620 - DNA, 20 bp, Artificial Sequence
  Description of Artificial Sequence: Synthetic oligonucleotide
  Target: LAMA2; (-) strand; PAM type: YTN; PAM sequence: TTT
aaaatgtacattttttgcac

SEQ ID NO: 193621 - DNA, 20 bp, Artificial Sequence
  Description of Artificial Sequence: Synthetic oligonucleotide
  Target: LAMA2; (-) strand; PAM type: YTN; PAM sequence: CTA
gaaatttaaaatgtacattt

SEQ ID NO: 193622 - DNA, 20 bp, Artificial Sequence
  Description of Artificial Sequence: Synthetic oligonucleotide
  Target: LAMA2; (-) strand; PAM type: YTN; PAM sequence: TTA
tactagaaatttaaaatgta

SEQ ID NO: 193623 - DNA, 20 bp, Artificial Sequence
  Description of Artificial Sequence: Synthetic oligonucleotide
  Target: LAMA2; (-) strand; PAM type: YTN; PAM sequence: TTT
atactagaaatttaaaatgt

SEQ ID NO: 193624 - DNA, 20 bp, Artificial Sequence
  Description of Artificial Sequence: Synthetic oligonucleotide
  Target: LAMA2; (-) strand; PAM type: YTN; PAM sequence: TTT
tatactagaaatttaaaatg

SEQ ID NO: 193625 - DNA, 20 bp, Artificial Sequence
  Description of Artificial Sequence: Synthetic oligonucleotide
  Target: LAMA2; (-) strand; PAM type: YTN; PAM sequence: CTC
agagtcacaaatcaaatttt

SEQ ID NO: 193626 - DNA, 20 bp, Artificial Sequence
  Description of Artificial Sequence: Synthetic oligonucleotide
  Target: LAMA2; (-) strand; PAM type: YTN; PAM sequence: CTG
ggggctcagagtcacaaatc

SEQ ID NO: 193627 - DNA, 20 bp, Artificial Sequence
  Description of Artificial Sequence: Synthetic oligonucleotide
  Target: LAMA2; (-) strand; PAM type: YTN; PAM sequence: CTA
aggaaactgggggctcagag

SEQ ID NO: 193628 - DNA, 20 bp, Artificial Sequence
  Description of Artificial Sequence: Synthetic oligonucleotide
  Target: LAMA2; (-) strand; PAM type: YTN; PAM sequence: TTG
ccctaaggaaactgggggct

SEQ ID NO: 193629 - DNA, 20 bp, Artificial Sequence
  Description of Artificial Sequence: Synthetic oligonucleotide
  Target: LAMA2; (-) strand; PAM type: YTN; PAM sequence: TTT
gccctaaggaaactgggggc

SEQ ID NO: 193630 - DNA, 20 bp, Artificial Sequence
  Description of Artificial Sequence: Synthetic oligonucleotide
  Target: LAMA2; (-) strand; PAM type: YTN; PAM sequence: TTG
tttgccctaaggaaactggg

SEQ ID NO: 193631 - DNA, 20 bp, Artificial Sequence
  Description of Artificial Sequence: Synthetic oligonucleotide
  Target: LAMA2; (-) strand; PAM type: YTN; PAM sequence: CTG
aaagcacccatattgtttgc

SEQ ID NO: 193632 - DNA, 20 bp, Artificial Sequence
  Description of Artificial Sequence: Synthetic oligonucleotide
  Target: LAMA2; (-) strand; PAM type: YTN; PAM sequence: TTA
actgaaagcacccatattgt

SEQ ID NO: 193633 - DNA, 20 bp, Artificial Sequence
  Description of Artificial Sequence: Synthetic oligonucleotide
  Target: LAMA2; (-) strand; PAM type: YTN; PAM sequence: CTA
aaattaactgaaagcaccca

SEQ ID NO: 193634 - DNA, 20 bp, Artificial Sequence
  Description of Artificial Sequence: Synthetic oligonucleotide
  Target: LAMA2; (-) strand; PAM type: YTN; PAM sequence: TTG
gactaaaattaactgaaagc

SEQ ID NO: 193635 - DNA, 20 bp, Artificial Sequence
  Description of Artificial Sequence: Synthetic oligonucleotide
  Target: LAMA2; (-) strand; PAM type: YTN; PAM sequence: CTG
gattggactaaaattaactg

SEQ ID NO: 193636 - DNA, 20 bp, Artificial Sequence
  Description of Artificial Sequence: Synthetic oligonucleotide
  Target: LAMA2; (-) strand; PAM type: YTN; PAM sequence: TTA
ctggattggactaaaattaa

SEQ ID NO: 193637 - DNA, 20 bp, Artificial Sequence
  Description of Artificial Sequence: Synthetic oligonucleotide
  Target: LAMA2; (-) strand; PAM type: YTN; PAM sequence: CTG
aaaaattactggattggact

SEQ ID NO: 193638 - DNA, 20 bp, Artificial Sequence
  Description of Artificial Sequence: Synthetic oligonucleotide
  Target: LAMA2; (-) strand; PAM type: YTN; PAM sequence: TTA
aatggaaaagtaactgaaaa

SEQ ID NO: 193639 - DNA, 20 bp, Artificial Sequence
  Description of Artificial Sequence: Synthetic oligonucleotide
  Target: LAMA2; (-) strand; PAM type: YTN; PAM sequence: TTT
aaatggaaaagtaactgaaa

SEQ ID NO: 193640 - DNA, 20 bp, Artificial Sequence
  Description of Artificial Sequence: Synthetic oligonucleotide
  Target: LAMA2; (-) strand; PAM type: YTN; PAM sequence: TTT
taaatggaaaagtaactgaa

SEQ ID NO: 193641 - DNA, 20 bp, Artificial Sequence
  Description of Artificial Sequence: Synthetic oligonucleotide
  Target: LAMA2; (-) strand; PAM type: YTN; PAM sequence: TTG
ttttaaatggaaaagtaact

SEQ ID NO: 193642 - DNA, 20 bp, Artificial Sequence
  Description of Artificial Sequence: Synthetic oligonucleotide
  Target: LAMA2; (-) strand; PAM type: YTN; PAM sequence: CTT
gttttaaatggaaaagtaac

SEQ ID NO: 193643 - DNA, 20 bp, Artificial Sequence
  Description of Artificial Sequence: Synthetic oligonucleotide
  Target: LAMA2; (-) strand; PAM type: YTN; PAM sequence: CTA
cttgttttaaatggaaaagt

SEQ ID NO: 193644 - DNA, 20 bp, Artificial Sequence
  Description of Artificial Sequence: Synthetic oligonucleotide
  Target: LAMA2; (-) strand; PAM type: YTN; PAM sequence: CTC
gaactacttgttttaaatgg

SEQ ID NO: 193645 - DNA, 20 bp, Artificial Sequence
  Description of Artificial Sequence: Synthetic oligonucleotide
  Target: LAMA2; (-) strand; PAM type: YTN; PAM sequence: CTG
aacctcgaactacttgtttt

SEQ ID NO: 193646 - DNA, 20 bp, Artificial Sequence
  Description of Artificial Sequence: Synthetic oligonucleotide
  Target: LAMA2; (-) strand; PAM type: YTN; PAM sequence: TTC
catatcaggaaaatgatcag

SEQ ID NO: 193647 - DNA, 20 bp, Artificial Sequence
  Description of Artificial Sequence: Synthetic oligonucleotide
  Target: LAMA2; (-) strand; PAM type: YTN; PAM sequence: CTC
ccagattccatatcaggaaa

SEQ ID NO: 193648 - DNA, 20 bp, Artificial Sequence
  Description of Artificial Sequence: Synthetic oligonucleotide
  Target: LAMA2; (-) strand; PAM type: YTN; PAM sequence: CTG
ctcccagattccatatcagg

SEQ ID NO: 193649 - DNA, 20 bp, Artificial Sequence
  Description of Artificial Sequence: Synthetic oligonucleotide
  Target: LAMA2; (-) strand; PAM type: YTN; PAM sequence: CTG
ctgctcccagattccatatc

SEQ ID NO: 193650 - DNA, 20 bp, Artificial Sequence
  Description of Artificial Sequence: Synthetic oligonucleotide
  Target: LAMA2; (-) strand; PAM type: YTN; PAM sequence: TTC
cctgctgctcccagattcca

SEQ ID NO: 193651 - DNA, 20 bp, Artificial Sequence
  Description of Artificial Sequence: Synthetic oligonucleotide
  Target: LAMA2; (-) strand; PAM type: YTN; PAM sequence: TTA
tgttccctgctgctcccaga

SEQ ID NO: 193652 - DNA, 20 bp, Artificial Sequence
  Description of Artificial Sequence: Synthetic oligonucleotide
  Target: LAMA2; (-) strand; PAM type: YTN; PAM sequence: CTT
atgttccctgctgctcccag

SEQ ID NO: 193653 - DNA, 20 bp, Artificial Sequence
  Description of Artificial Sequence: Synthetic oligonucleotide
  Target: LAMA2; (-) strand; PAM type: YTN; PAM sequence: TTA
cttatgttccctgctgctcc

SEQ ID NO: 193654 - DNA, 20 bp, Artificial Sequence
  Description of Artificial Sequence: Synthetic oligonucleotide
  Target: LAMA2; (-) strand; PAM type: YTN; PAM sequence: CTG
acaccgtgacattacttatg

SEQ ID NO: 193655 - DNA, 20 bp, Artificial Sequence
  Description of Artificial Sequence: Synthetic oligonucleotide
  Target: LAMA2; (-) strand; PAM type: YTN; PAM sequence: CTC
ccaatcctgacaccgtgaca

SEQ ID NO: 193656 - DNA, 20 bp, Artificial Sequence
  Description of Artificial Sequence: Synthetic oligonucleotide
  Target: LAMA2; (-) strand; PAM type: YTN; PAM sequence: TTA
atcaggatccaaaatgcaca

SEQ ID NO: 193657 - DNA, 20 bp, Artificial Sequence
  Description of Artificial Sequence: Synthetic oligonucleotide
  Target: LAMA2; (-) strand; PAM type: YTN; PAM sequence: TTT
aatcaggatccaaaatgcac

SEQ ID NO: 193658 - DNA, 20 bp, Artificial Sequence
  Description of Artificial Sequence: Synthetic oligonucleotide
  Target: LAMA2; (-) strand; PAM type: YTN; PAM sequence: TTG
atacatttaatcaggatcca

SEQ ID NO: 193659 - DNA, 20 bp, Artificial Sequence
  Description of Artificial Sequence: Synthetic oligonucleotide
  Target: LAMA2; (-) strand; PAM type: YTN; PAM sequence: CTA
cgttgatacatttaatcagg

SEQ ID NO: 193660 - DNA, 20 bp, Artificial Sequence
  Description of Artificial Sequence: Synthetic oligonucleotide
  Target: LAMA2; (-) strand; PAM type: YTN; PAM sequence: TTA
cctacgttgatacatttaat

SEQ ID NO: 193661 - DNA, 20 bp, Artificial Sequence
  Description of Artificial Sequence: Synthetic oligonucleotide
  Target: LAMA2; (-) strand; PAM type: YTN; PAM sequence: TTG
aaacaatcacaatatattac

SEQ ID NO: 193662 - DNA, 20 bp, Artificial Sequence
  Description of Artificial Sequence: Synthetic oligonucleotide
  Target: LAMA2; (-) strand; PAM type: YTN; PAM sequence: TTT
gaaacaatcacaatatatta

SEQ ID NO: 193663 - DNA, 20 bp, Artificial Sequence
  Description of Artificial Sequence: Synthetic oligonucleotide
  Target: LAMA2; (-) strand; PAM type: YTN; PAM sequence: CTA
tttgaaacaatcacaatata

SEQ ID NO: 193664 - DNA, 20 bp, Artificial Sequence
  Description of Artificial Sequence: Synthetic oligonucleotide
  Target: LAMA2; (-) strand; PAM type: YTN; PAM sequence: CTC
cactatttgaaacaatcaca

SEQ ID NO: 193665 - DNA, 20 bp, Artificial Sequence
  Description of Artificial Sequence: Synthetic oligonucleotide
  Target: LAMA2; (-) strand; PAM type: YTN; PAM sequence: CTG
atctccactatttgaaacaa

SEQ ID NO: 193666 - DNA, 20 bp, Artificial Sequence
  Description of Artificial Sequence: Synthetic oligonucleotide
  Target: LAMA2; (-) strand; PAM type: YTN; PAM sequence: TTC
ctgatctccactatttgaaa

SEQ ID NO: 193667 - DNA, 20 bp, Artificial Sequence
  Description of Artificial Sequence: Synthetic oligonucleotide
  Target: LAMA2; (-) strand; PAM type: YTN; PAM sequence: TTG
taccaggaaggattcctgat

SEQ ID NO: 193668 - DNA, 20 bp, Artificial Sequence
  Description of Artificial Sequence: Synthetic oligonucleotide
  Target: LAMA2; (-) strand; PAM type: YTN; PAM sequence: TTT
gtaccaggaaggattcctga

SEQ ID NO: 193669 - DNA, 20 bp, Artificial Sequence
  Description of Artificial Sequence: Synthetic oligonucleotide
  Target: LAMA2; (-) strand; PAM type: YTN; PAM sequence: CTG
aatttgtaccaggaaggatt

SEQ ID NO: 193670 - DNA, 20 bp, Artificial Sequence
  Description of Artificial Sequence: Synthetic oligonucleotide
  Target: LAMA2; (-) strand; PAM type: YTN; PAM sequence: CTG
tggggaactgaatttgtacc

SEQ ID NO: 193671 - DNA, 20 bp, Artificial Sequence
  Description of Artificial Sequence: Synthetic oligonucleotide
  Target: LAMA2; (-) strand; PAM type: YTN; PAM sequence: TTA
ctgtggggaactgaatttgt

SEQ ID NO: 193672 - DNA, 20 bp, Artificial Sequence
  Description of Artificial Sequence: Synthetic oligonucleotide
  Target: LAMA2; (-) strand; PAM type: YTN; PAM sequence: TTG
aggttactgtggggaactga

SEQ ID NO: 193673 - DNA, 20 bp, Artificial Sequence
  Description of Artificial Sequence: Synthetic oligonucleotide
  Target: LAMA2; (-) strand; PAM type: YTN; PAM sequence: TTT
gaggttactgtggggaactg

SEQ ID NO: 193674 - DNA, 20 bp, Artificial Sequence
  Description of Artificial Sequence: Synthetic oligonucleotide
  Target: LAMA2; (-) strand; PAM type: YTN; PAM sequence: TTT
tgaggttactgtggggaact

SEQ ID NO: 193675 - DNA, 20 bp, Artificial Sequence
  Description of Artificial Sequence: Synthetic oligonucleotide
  Target: LAMA2; (-) strand; PAM type: YTN; PAM sequence: TTG
aagtcaattttgaggttact

SEQ ID NO: 193676 - DNA, 20 bp, Artificial Sequence
  Description of Artificial Sequence: Synthetic oligonucleotide
  Target: LAMA2; (-) strand; PAM type: YTN; PAM sequence: TTT
gaagtcaattttgaggttac

SEQ ID NO: 193677 - DNA, 20 bp, Artificial Sequence
  Description of Artificial Sequence: Synthetic oligonucleotide
  Target: LAMA2; (-) strand; PAM type: YTN; PAM sequence: TTG
aagtcagtaggtttgaagtc

SEQ ID NO: 193678 - DNA, 20 bp, Artificial Sequence
  Description of Artificial Sequence: Synthetic oligonucleotide
  Target: LAMA2; (-) strand; PAM type: YTN; PAM sequence: TTT
gaagtcagtaggtttgaagt

SEQ ID NO: 193679 - DNA, 20 bp, Artificial Sequence
  Description of Artificial Sequence: Synthetic oligonucleotide
  Target: LAMA2; (-) strand; PAM type: YTN; PAM sequence: TTG
aggaaacagtatggagatca

SEQ ID NO: 193680 - DNA, 20 bp, Artificial Sequence
  Description of Artificial Sequence: Synthetic oligonucleotide
  Target: LAMA2; (-) strand; PAM type: YTN; PAM sequence: TTG
ggcccatcattgaggaaaca

SEQ ID NO: 193681 - DNA, 20 bp, Artificial Sequence
  Description of Artificial Sequence: Synthetic oligonucleotide
  Target: LAMA2; (-) strand; PAM type: YTN; PAM sequence: TTT
gggcccatcattgaggaaac

SEQ ID NO: 193682 - DNA, 20 bp, Artificial Sequence
  Description of Artificial Sequence: Synthetic oligonucleotide
  Target: LAMA2; (-) strand; PAM type: YTN; PAM sequence: TTT
tgggcccatcattgaggaaa

SEQ ID NO: 193683 - DNA, 20 bp, Artificial Sequence
  Description of Artificial Sequence: Synthetic oligonucleotide
  Target: LAMA2; (-) strand; PAM type: YTN; PAM sequence: TTT
ttgggcccatcattgaggaa

SEQ ID NO: 193684 - DNA, 20 bp, Artificial Sequence
  Description of Artificial Sequence: Synthetic oligonucleotide
  Target: LAMA2; (-) strand; PAM type: YTN; PAM sequence: TTT
tttgggcccatcattgagga

SEQ ID NO: 193685 - DNA, 20 bp, Artificial Sequence
  Description of Artificial Sequence: Synthetic oligonucleotide
  Target: LAMA2; (-) strand; PAM type: YTN; PAM sequence: TTC
cagcattttttgggcccatc

SEQ ID NO: 193686 - DNA, 20 bp, Artificial Sequence
  Description of Artificial Sequence: Synthetic oligonucleotide
  Target: LAMA2; (-) strand; PAM type: YTN; PAM sequence: CTT
ccagcattttttgggcccat

SEQ ID NO: 193687 - DNA, 20 bp, Artificial Sequence
  Description of Artificial Sequence: Synthetic oligonucleotide
  Target: LAMA2; (-) strand; PAM type: YTN; PAM sequence: CTC
aaagagagaaatagaagaaa

SEQ ID NO: 193688 - DNA, 20 bp, Artificial Sequence
  Description of Artificial Sequence: Synthetic oligonucleotide
  Target: LAMA2; (-) strand; PAM type: YTN; PAM sequence: TTC
tcaaagagagaaatagaaga

SEQ ID NO: 193689 - DNA, 20 bp, Artificial Sequence
  Description of Artificial Sequence: Synthetic oligonucleotide
  Target: LAMA2; (-) strand; PAM type: YTN; PAM sequence: CTC
atgattctcaaagagagaaa

SEQ ID NO: 193690 - DNA, 20 bp, Artificial Sequence
  Description of Artificial Sequence: Synthetic oligonucleotide
  Target: LAMA2; (-) strand; PAM type: YTN; PAM sequence: CTC
atacataaatacatacaaag

SEQ ID NO: 193691 - DNA, 20 bp, Artificial Sequence
  Description of Artificial Sequence: Synthetic oligonucleotide
  Target: LAMA2; (-) strand; PAM type: YTN; PAM sequence: TTG
tatatggctcatacataaat

SEQ ID NO: 193692 - DNA, 20 bp, Artificial Sequence
  Description of Artificial Sequence: Synthetic oligonucleotide
  Target: LAMA2; (-) strand; PAM type: YTN; PAM sequence: TTG
attgtatatggctcatacat

SEQ ID NO: 193693 - DNA, 20 bp, Artificial Sequence
  Description of Artificial Sequence: Synthetic oligonucleotide
  Target: LAMA2; (-) strand; PAM type: YTN; PAM sequence: TTG
agagaacagttgattgtata

SEQ ID NO: 193694 - DNA, 20 bp, Artificial Sequence
  Description of Artificial Sequence: Synthetic oligonucleotide
  Target: LAMA2; (-) strand; PAM type: YTN; PAM sequence: TTG
atattgagagaacagttgat

SEQ ID NO: 193695 - DNA, 20 bp, Artificial Sequence
  Description of Artificial Sequence: Synthetic oligonucleotide
  Target: LAMA2; (-) strand; PAM type: YTN; PAM sequence: CTT
gatattgagagaacagttga

SEQ ID NO: 193696 - DNA, 20 bp, Artificial Sequence
  Description of Artificial Sequence: Synthetic oligonucleotide
  Target: LAMA2; (-) strand; PAM type: YTN; PAM sequence: CTC
ttgatattgagagaacagtt

SEQ ID NO: 193697 - DNA, 20 bp, Artificial Sequence
  Description of Artificial Sequence: Synthetic oligonucleotide
  Target: LAMA2; (-) strand; PAM type: YTN; PAM sequence: CTA
cctcttgatattgagagaac

SEQ ID NO: 193698 - DNA, 20 bp, Artificial Sequence
  Description of Artificial Sequence: Synthetic oligonucleotide
  Target: LAMA2; (-) strand; PAM type: YTN; PAM sequence: TTG
ctacctcttgatattgagag

SEQ ID NO: 193699 - DNA, 20 bp, Artificial Sequence
  Description of Artificial Sequence: Synthetic oligonucleotide
  Target: LAMA2; (-) strand; PAM type: YTN; PAM sequence: TTA
aaattgctacctcttgatat

SEQ ID NO: 193700 - DNA, 20 bp, Artificial Sequence
  Description of Artificial Sequence: Synthetic oligonucleotide
  Target: LAMA2; (-) strand; PAM type: YTN; PAM sequence: TTT
aaaattgctacctcttgata

SEQ ID NO: 193701 - DNA, 20 bp, Artificial Sequence
  Description of Artificial Sequence: Synthetic oligonucleotide
  Target: LAMA2; (-) strand; PAM type: YTN; PAM sequence: TTA
aaacacagaacatttaaaat

SEQ ID NO: 193702 - DNA, 20 bp, Artificial Sequence
  Description of Artificial Sequence: Synthetic oligonucleotide
  Target: LAMA2; (-) strand; PAM type: YTN; PAM sequence: TTT
aaaacacagaacatttaaaa

SEQ ID NO: 193703 - DNA, 20 bp, Artificial Sequence
  Description of Artificial Sequence: Synthetic oligonucleotide
  Target: LAMA2; (-) strand; PAM type: YTN; PAM sequence: TTA
aagtttaaaacacagaacat

SEQ ID NO: 193704 - DNA, 20 bp, Artificial Sequence
  Description of Artificial Sequence: Synthetic oligonucleotide
  Target: LAMA2; (-) strand; PAM type: YTN; PAM sequence: TTA
tacattaaagtttaaaacac

SEQ ID NO: 193705 - DNA, 20 bp, Artificial Sequence
  Description of Artificial Sequence: Synthetic oligonucleotide
  Target: LAMA2; (-) strand; PAM type: YTN; PAM sequence: CTG
acgtaagttatacattaaag

SEQ ID NO: 193706 - DNA, 20 bp, Artificial Sequence
  Description of Artificial Sequence: Synthetic oligonucleotide
  Target: LAMA2; (-) strand; PAM type: YTN; PAM sequence: TTG
actgacgtaagttatacatt

SEQ ID NO: 193707 - DNA, 20 bp, Artificial Sequence
  Description of Artificial Sequence: Synthetic oligonucleotide
  Target: LAMA2; (-) strand; PAM type: YTN; PAM sequence: TTA
tcaggattgactgacgtaag

SEQ ID NO: 193708 - DNA, 20 bp, Artificial Sequence
  Description of Artificial Sequence: Synthetic oligonucleotide
  Target: LAMA2; (-) strand; PAM type: YTN; PAM sequence: CTA
gtgagaatagtggtattatc

SEQ ID NO: 193709 - DNA, 20 bp, Artificial Sequence
  Description of Artificial Sequence: Synthetic oligonucleotide
  Target: LAMA2; (-) strand; PAM type: YTN; PAM sequence: TTG
atgactagtgagaatagtgg

SEQ ID NO: 193710 - DNA, 20 bp, Artificial Sequence
  Description of Artificial Sequence: Synthetic oligonucleotide
  Target: LAMA2; (-) strand; PAM type: YTN; PAM sequence: TTA
catgatgatgacaatgatga

SEQ ID NO: 193711 - DNA, 20 bp, Artificial Sequence
  Description of Artificial Sequence: Synthetic oligonucleotide
  Target: LAMA2; (-) strand; PAM type: YTN; PAM sequence: TTG
ttacatgatgatgacaatga

SEQ ID NO: 193712 - DNA, 20 bp, Artificial Sequence
  Description of Artificial Sequence: Synthetic oligonucleotide
  Target: LAMA2; (-) strand; PAM type: YTN; PAM sequence: TTA
tataattgttacatgatgat

SEQ ID NO: 193713 - DNA, 20 bp, Artificial Sequence
  Description of Artificial Sequence: Synthetic oligonucleotide
  Target: LAMA2; (-) strand; PAM type: YTN; PAM sequence: TTA
accattatataattgttaca

SEQ ID NO: 193714 - DNA, 20 bp, Artificial Sequence
  Description of Artificial Sequence: Synthetic oligonucleotide
  Target: LAMA2; (-) strand; PAM type: YTN; PAM sequence: TTG
tggccaatattaaccattat

SEQ ID NO: 193715 - DNA, 20 bp, Artificial Sequence
  Description of Artificial Sequence: Synthetic oligonucleotide
  Target: LAMA2; (-) strand; PAM type: YTN; PAM sequence: TTT
gtggccaatattaaccatta

SEQ ID NO: 193716 - DNA, 20 bp, Artificial Sequence
  Description of Artificial Sequence: Synthetic oligonucleotide
  Target: LAMA2; (-) strand; PAM type: YTN; PAM sequence: TTG
atttgtggccaatattaacc

SEQ ID NO: 193717 - DNA, 20 bp, Artificial Sequence
  Description of Artificial Sequence: Synthetic oligonucleotide
  Target: LAMA2; (-) strand; PAM type: YTN; PAM sequence: CTA
ggattgatttgtggccaata

SEQ ID NO: 193718 - DNA, 20 bp, Artificial Sequence
  Description of Artificial Sequence: Synthetic oligonucleotide
  Target: LAMA2; (-) strand; PAM type: YTN; PAM sequence: TTA
aggaactaggattgatttgt

SEQ ID NO: 193719 - DNA, 20 bp, Artificial Sequence
  Description of Artificial Sequence: Synthetic oligonucleotide
  Target: LAMA2; (-) strand; PAM type: YTN; PAM sequence: TTT
aaggaactaggattgatttg

SEQ ID NO: 193720 - DNA, 20 bp, Artificial Sequence
  Description of Artificial Sequence: Synthetic oligonucleotide
  Target: LAMA2; (-) strand; PAM type: YTN; PAM sequence: TTT
taaggaactaggattgattt

SEQ ID NO: 193721 - DNA, 20 bp, Artificial Sequence
  Description of Artificial Sequence: Synthetic oligonucleotide
  Target: LAMA2; (-) strand; PAM type: YTN; PAM sequence: CTA
atagattttaaggaactagg

SEQ ID NO: 193722 - DNA, 20 bp, Artificial Sequence
  Description of Artificial Sequence: Synthetic oligonucleotide
  Target: LAMA2; (-) strand; PAM type: YTN; PAM sequence: CTC
aactaatagattttaaggaa

SEQ ID NO: 193723 - DNA, 20 bp, Artificial Sequence
  Description of Artificial Sequence: Synthetic oligonucleotide
  Target: LAMA2; (-) strand; PAM type: YTN; PAM sequence: TTC
ataaggctcaactaatagat

SEQ ID NO: 193724 - DNA, 20 bp, Artificial Sequence
  Description of Artificial Sequence: Synthetic oligonucleotide
  Target: LAMA2; (-) strand; PAM type: YTN; PAM sequence: TTT
cataaggctcaactaataga

SEQ ID NO: 193725 - DNA, 20 bp, Artificial Sequence
  Description of Artificial Sequence: Synthetic oligonucleotide
  Target: LAMA2; (-) strand; PAM type: YTN; PAM sequence: TTG
aaccgacaaaaagggcagtt

SEQ ID NO: 193726 - DNA, 20 bp, Artificial Sequence
  Description of Artificial Sequence: Synthetic oligonucleotide
  Target: LAMA2; (-) strand; PAM type: YTN; PAM sequence: TTT
gaaccgacaaaaagggcagt

SEQ ID NO: 193727 - DNA, 20 bp, Artificial Sequence
  Description of Artificial Sequence: Synthetic oligonucleotide
  Target: LAMA2; (-) strand; PAM type: YTN; PAM sequence: CTC
accatttgaaccgacaaaaa

SEQ ID NO: 193728 - DNA, 20 bp, Artificial Sequence
  Description of Artificial Sequence: Synthetic oligonucleotide
  Target: LAMA2; (-) strand; PAM type: YTN; PAM sequence: CTA
ctcaccatttgaaccgacaa

SEQ ID NO: 193729 - DNA, 20 bp, Artificial Sequence
  Description of Artificial Sequence: Synthetic oligonucleotide
  Target: LAMA2; (-) strand; PAM type: YTN; PAM sequence: TTC
tactcaccatttgaaccgac

SEQ ID NO: 193730 - DNA, 20 bp, Artificial Sequence
  Description of Artificial Sequence: Synthetic oligonucleotide
  Target: LAMA2; (-) strand; PAM type: YTN; PAM sequence: CTT
ctactcaccatttgaaccga

SEQ ID NO: 193731 - DNA, 20 bp, Artificial Sequence
  Description of Artificial Sequence: Synthetic oligonucleotide
  Target: LAMA2; (-) strand; PAM type: YTN; PAM sequence: TTG
cttctactcaccatttgaac

SEQ ID NO: 193732 - DNA, 20 bp, Artificial Sequence
  Description of Artificial Sequence: Synthetic oligonucleotide
  Target: LAMA2; (-) strand; PAM type: YTN; PAM sequence: TTG
aaccatatgaaattgcttct

SEQ ID NO: 193733 - DNA, 20 bp, Artificial Sequence
  Description of Artificial Sequence: Synthetic oligonucleotide
  Target: LAMA2; (-) strand; PAM type: YTN; PAM sequence: TTG
aagtaataataagttgaacc

SEQ ID NO: 193734 - DNA, 20 bp, Artificial Sequence
  Description of Artificial Sequence: Synthetic oligonucleotide
  Target: LAMA2; (-) strand; PAM type: YTN; PAM sequence: CTG
taaggaaattgaagtaataa

SEQ ID NO: 193735 - DNA, 20 bp, Artificial Sequence
  Description of Artificial Sequence: Synthetic oligonucleotide
  Target: LAMA2; (-) strand; PAM type: YTN; PAM sequence: CTG
taagcctgtaaggaaattga

SEQ ID NO: 193736 - DNA, 20 bp, Artificial Sequence
  Description of Artificial Sequence: Synthetic oligonucleotide
  Target: LAMA2; (-) strand; PAM type: YTN; PAM sequence: TTG
gctgtaagcctgtaaggaaa

SEQ ID NO: 193737 - DNA, 20 bp, Artificial Sequence
  Description of Artificial Sequence: Synthetic oligonucleotide
  Target: LAMA2; (-) strand; PAM type: YTN; PAM sequence: CTG
tgttggctgtaagcctgtaa

SEQ ID NO: 193738 - DNA, 20 bp, Artificial Sequence
  Description of Artificial Sequence: Synthetic oligonucleotide
  Target: LAMA2; (-) strand; PAM type: YTN; PAM sequence: CTG
aatcactgtgttggctgtaa

SEQ ID NO: 193739 - DNA, 20 bp, Artificial Sequence
  Description of Artificial Sequence: Synthetic oligonucleotide
  Target: LAMA2; (-) strand; PAM type: YTN; PAM sequence: TTG
tgagatgatggtggcctgaa

SEQ ID NO: 193740 - DNA, 20 bp, Artificial Sequence
  Description of Artificial Sequence: Synthetic oligonucleotide
  Target: LAMA2; (-) strand; PAM type: YTN; PAM sequence: CTA
gttgtgagatgatggtggcc

SEQ ID NO: 193741 - DNA, 20 bp, Artificial Sequence
  Description of Artificial Sequence: Synthetic oligonucleotide
  Target: LAMA2; (-) strand; PAM type: YTN; PAM sequence: TTC
tagttgtgagatgatggtgg

SEQ ID NO: 193742 - DNA, 20 bp, Artificial Sequence
  Description of Artificial Sequence: Synthetic oligonucleotide
  Target: LAMA2; (-) strand; PAM type: YTN; PAM sequence: TTT
ctagttgtgagatgatggtg

SEQ ID NO: 193743 - DNA, 20 bp, Artificial Sequence
  Description of Artificial Sequence: Synthetic oligonucleotide
  Target: LAMA2; (-) strand; PAM type: YTN; PAM sequence: TTA
gaaggccacagtgatgattt

SEQ ID NO: 193744 - DNA, 20 bp, Artificial Sequence
  Description of Artificial Sequence: Synthetic oligonucleotide
  Target: LAMA2; (-) strand; PAM type: YTN; PAM sequence: TTG
caagcaagaatatccattag

SEQ ID NO: 193745 - DNA, 20 bp, Artificial Sequence
  Description of Artificial Sequence: Synthetic oligonucleotide
  Target: LAMA2; (-) strand; PAM type: YTN; PAM sequence: CTA
aattgcaagcaagaatatcc

SEQ ID NO: 193746 - DNA, 20 bp, Artificial Sequence
  Description of Artificial Sequence: Synthetic oligonucleotide
  Target: LAMA2; (-) strand; PAM type: YTN; PAM sequence: CTG
aagtacaacaaacaaatggg

SEQ ID NO: 193747 - DNA, 20 bp, Artificial Sequence
  Description of Artificial Sequence: Synthetic oligonucleotide
  Target: LAMA2; (-) strand; PAM type: YTN; PAM sequence: CTA
gctgaagtacaacaaacaaa

SEQ ID NO: 193748 - DNA, 20 bp, Artificial Sequence
  Description of Artificial Sequence: Synthetic oligonucleotide
  Target: LAMA2; (-) strand; PAM type: YTN; PAM sequence: TTA
acctagctgaagtacaacaa

SEQ ID NO: 193749 - DNA, 20 bp, Artificial Sequence
  Description of Artificial Sequence: Synthetic oligonucleotide
  Target: LAMA2; (-) strand; PAM type: YTN; PAM sequence: CTT
aacctagctgaagtacaaca

SEQ ID NO: 193750 - DNA, 20 bp, Artificial Sequence
  Description of Artificial Sequence: Synthetic oligonucleotide
  Target: LAMA2; (-) strand; PAM type: YTN; PAM sequence: TTA
taaagcttaacctagctgaa

SEQ ID NO: 193751 - DNA, 20 bp, Artificial Sequence
  Description of Artificial Sequence: Synthetic oligonucleotide
  Target: LAMA2; (-) strand; PAM type: YTN; PAM sequence: TTT
ataaagcttaacctagctga

SEQ ID NO: 193752 - DNA, 20 bp, Artificial Sequence
  Description of Artificial Sequence: Synthetic oligonucleotide
  Target: LAMA2; (-) strand; PAM type: YTN; PAM sequence: TTT
tataaagcttaacctagctg

SEQ ID NO: 193753 - DNA, 20 bp, Artificial Sequence
  Description of Artificial Sequence: Synthetic oligonucleotide
  Target: LAMA2; (-) strand; PAM type: YTN; PAM sequence: TTG
tgttttataaagcttaacct

SEQ ID NO: 193754 - DNA, 20 bp, Artificial Sequence
  Description of Artificial Sequence: Synthetic oligonucleotide
  Target: LAMA2; (-) strand; PAM type: YTN; PAM sequence: CTA
ttgtgttttataaagcttaa

SEQ ID NO: 193755 - DNA, 20 bp, Artificial Sequence
  Description of Artificial Sequence: Synthetic oligonucleotide
  Target: LAMA2; (-) strand; PAM type: YTN; PAM sequence: CTC
aatactattgtgttttataa

SEQ ID NO: 193756 - DNA, 20 bp, Artificial Sequence
  Description of Artificial Sequence: Synthetic oligonucleotide
  Target: LAMA2; (-) strand; PAM type: YTN; PAM sequence: TTA
gagagaggaatagctcaata

SEQ ID NO: 193757 - DNA, 20 bp, Artificial Sequence
  Description of Artificial Sequence: Synthetic oligonucleotide
  Target: LAMA2; (-) strand; PAM type: YTN; PAM sequence: TTT
agagagaggaatagctcaat

SEQ ID NO: 193758 - DNA, 20 bp, Artificial Sequence
  Description of Artificial Sequence: Synthetic oligonucleotide
  Target: LAMA2; (-) strand; PAM type: YTN; PAM sequence: TTT
tagagagaggaatagctcaa

SEQ ID NO: 193759 - DNA, 20 bp, Artificial Sequence
  Description of Artificial Sequence: Synthetic oligonucleotide
  Target: LAMA2; (-) strand; PAM type: YTN; PAM sequence: CTA
aggtcaatcagatgccatga

SEQ ID NO: 193760 - DNA, 20 bp, Artificial Sequence
  Description of Artificial Sequence: Synthetic oligonucleotide
  Target: LAMA2; (-) strand; PAM type: YTN; PAM sequence: TTA
tactaaggtcaatcagatgc

SEQ ID NO: 193761 - DNA, 20 bp, Artificial Sequence
  Description of Artificial Sequence: Synthetic oligonucleotide
  Target: LAMA2; (-) strand; PAM type: YTN; PAM sequence: TTT
atactaaggtcaatcagatg

SEQ ID NO: 193762 - DNA, 20 bp, Artificial Sequence
  Description of Artificial Sequence: Synthetic oligonucleotide
  Target: LAMA2; (-) strand; PAM type: YTN; PAM sequence: TTT
tatactaaggtcaatcagat

SEQ ID NO: 193763 - DNA, 20 bp, Artificial Sequence
  Description of Artificial Sequence: Synthetic oligonucleotide
  Target: LAMA2; (-) strand; PAM type: YTN; PAM sequence: TTG
gattttatactaaggtcaat

SEQ ID NO: 193764 - DNA, 20 bp, Artificial Sequence
  Description of Artificial Sequence: Synthetic oligonucleotide
  Target: LAMA2; (-) strand; PAM type: YTN; PAM sequence: CTT
ggattttatactaaggtcaa

SEQ ID NO: 193765 - DNA, 20 bp, Artificial Sequence
  Description of Artificial Sequence: Synthetic oligonucleotide
  Target: LAMA2; (-) strand; PAM type: YTN; PAM sequence: TTA
acagagcttggattttatac

SEQ ID NO: 193766 - DNA, 20 bp, Artificial Sequence
  Description of Artificial Sequence: Synthetic oligonucleotide
  Target: LAMA2; (-) strand; PAM type: YTN; PAM sequence: TTA
taaatcacattaacagagct

SEQ ID NO: 193767 - DNA, 20 bp, Artificial Sequence
  Description of Artificial Sequence: Synthetic oligonucleotide
  Target: LAMA2; (-) strand; PAM type: YTN; PAM sequence: CTT
ataaatcacattaacagagc

SEQ ID NO: 193768 - DNA, 20 bp, Artificial Sequence
  Description of Artificial Sequence: Synthetic oligonucleotide
  Target: LAMA2; (-) strand; PAM type: YTN; PAM sequence: CTA
catgacttataaatcacatt

SEQ ID NO: 193769 - DNA, 20 bp, Artificial Sequence
  Description of Artificial Sequence: Synthetic oligonucleotide
  Target: LAMA2; (-) strand; PAM type: YTN; PAM sequence: CTG
ggatgtacggctacatgact

SEQ ID NO: 193770 - DNA, 20 bp, Artificial Sequence
  Description of Artificial Sequence: Synthetic oligonucleotide
  Target: LAMA2; (-) strand; PAM type: YTN; PAM sequence: CTA
actgggatgtacggctacat

SEQ ID NO: 193771 - DNA, 20 bp, Artificial Sequence
  Description of Artificial Sequence: Synthetic oligonucleotide
  Target: LAMA2; (-) strand; PAM type: YTN; PAM sequence: CTG
tcagagactaactgggatgt

SEQ ID NO: 193772 - DNA, 20 bp, Artificial Sequence
  Description of Artificial Sequence: Synthetic oligonucleotide
  Target: LAMA2; (-) strand; PAM type: YTN; PAM sequence: TTG
taaaccagggctgtcagaga

SEQ ID NO: 193773 - DNA, 20 bp, Artificial Sequence
  Description of Artificial Sequence: Synthetic oligonucleotide
  Target: LAMA2; (-) strand; PAM type: YTN; PAM sequence: CTG
gggcagcagttgtaaaccag

SEQ ID NO: 193774 - DNA, 20 bp, Artificial Sequence
  Description of Artificial Sequence: Synthetic oligonucleotide
  Target: LAMA2; (-) strand; PAM type: YTN; PAM sequence: TTA
ggctggggcagcagttgtaa

SEQ ID NO: 193775 - DNA, 20 bp, Artificial Sequence
  Description of Artificial Sequence: Synthetic oligonucleotide
  Target: LAMA2; (-) strand; PAM type: YTN; PAM sequence: TTA
attaggctggggcagcagtt

SEQ ID NO: 193776 - DNA, 20 bp, Artificial Sequence
  Description of Artificial Sequence: Synthetic oligonucleotide
  Target: LAMA2; (-) strand; PAM type: YTN; PAM sequence: CTA
ttaattaggctggggcagca

SEQ ID NO: 193777 - DNA, 20 bp, Artificial Sequence
  Description of Artificial Sequence: Synthetic oligonucleotide
  Target: LAMA2; (-) strand; PAM type: YTN; PAM sequence: CTG
agaataaagggaacaccact

SEQ ID NO: 193778 - DNA, 20 bp, Artificial Sequence
  Description of Artificial Sequence: Synthetic oligonucleotide
  Target: LAMA2; (-) strand; PAM type: YTN; PAM sequence: TTC
tgagaataaagggaacacca

SEQ ID NO: 193779 - DNA, 20 bp, Artificial Sequence
  Description of Artificial Sequence: Synthetic oligonucleotide
  Target: LAMA2; (-) strand; PAM type: YTN; PAM sequence: CTT
ctgagaataaagggaacacc

SEQ ID NO: 193780 - DNA, 20 bp, Artificial Sequence
  Description of Artificial Sequence: Synthetic oligonucleotide
  Target: LAMA2; (-) strand; PAM type: YTN; PAM sequence: CTA
aaccagtccacttctgagaa

SEQ ID NO: 193781 - DNA, 20 bp, Artificial Sequence
  Description of Artificial Sequence: Synthetic oligonucleotide
  Target: LAMA2; (-) strand; PAM type: YTN; PAM sequence: TTC
atcatctaaaccagtccact

SEQ ID NO: 193782 - DNA, 20 bp, Artificial Sequence
  Description of Artificial Sequence: Synthetic oligonucleotide
  Target: LAMA2; (-) strand; PAM type: YTN; PAM sequence: TTA
taaataaggtggtcatgtaa

SEQ ID NO: 193783 - DNA, 20 bp, Artificial Sequence
  Description of Artificial Sequence: Synthetic oligonucleotide
  Target: LAMA2; (-) strand; PAM type: YTN; PAM sequence: CTG
cacagggcagagcatgaggt

SEQ ID NO: 193784 - DNA, 20 bp, Artificial Sequence
  Description of Artificial Sequence: Synthetic oligonucleotide
  Target: LAMA2; (-) strand; PAM type: YTN; PAM sequence: CTG
gagagaactgcacagggcag

SEQ ID NO: 193785 - DNA, 20 bp, Artificial Sequence
  Description of Artificial Sequence: Synthetic oligonucleotide
  Target: LAMA2; (-) strand; PAM type: YTN; PAM sequence: TTA
aaaagtggtgagagatgagg

SEQ ID NO: 193786 - DNA, 20 bp, Artificial Sequence
  Description of Artificial Sequence: Synthetic oligonucleotide
  Target: LAMA2; (-) strand; PAM type: YTN; PAM sequence: TTT
aaaaagtggtgagagatgag

SEQ ID NO: 193787 - DNA, 20 bp, Artificial Sequence
  Description of Artificial Sequence: Synthetic oligonucleotide
  Target: LAMA2; (-) strand; PAM type: YTN; PAM sequence: TTA
tgatttaaaaagtggtgaga

SEQ ID NO: 193788 - DNA, 20 bp, Artificial Sequence
  Description of Artificial Sequence: Synthetic oligonucleotide
  Target: LAMA2; (-) strand; PAM type: YTN; PAM sequence: TTT
atgatttaaaaagtggtgag

SEQ ID NO: 193789 - DNA, 20 bp, Artificial Sequence
  Description of Artificial Sequence: Synthetic oligonucleotide
  Target: LAMA2; (-) strand; PAM type: YTN; PAM sequence: TTT
tatgatttaaaaagtggtga

SEQ ID NO: 193790 - DNA, 20 bp, Artificial Sequence
  Description of Artificial Sequence: Synthetic oligonucleotide
  Target: LAMA2; (-) strand; PAM type: YTN; PAM sequence: TTT
ttatgatttaaaaagtggtg

SEQ ID NO: 193791 - DNA, 20 bp, Artificial Sequence
  Description of Artificial Sequence: Synthetic oligonucleotide
  Target: LAMA2; (-) strand; PAM type: YTN; PAM sequence: CTC
atttttatgatttaaaaagt

SEQ ID NO: 193792 - DNA, 20 bp, Artificial Sequence
  Description of Artificial Sequence: Synthetic oligonucleotide
  Target: LAMA2; (-) strand; PAM type: YTN; PAM sequence: TTC
agaatggatacagctcattt

SEQ ID NO: 193793 - DNA, 20 bp, Artificial Sequence
  Description of Artificial Sequence: Synthetic oligonucleotide
  Target: LAMA2; (-) strand; PAM type: YTN; PAM sequence: TTC
cataaatccaaaggaattca

SEQ ID NO: 193794 - DNA, 20 bp, Artificial Sequence
  Description of Artificial Sequence: Synthetic oligonucleotide
  Target: LAMA2; (-) strand; PAM type: YTN; PAM sequence: CTG
aaagagacagtgatatattc

SEQ ID NO: 193795 - DNA, 20 bp, Artificial Sequence
  Description of Artificial Sequence: Synthetic oligonucleotide
  Target: LAMA2; (-) strand; PAM type: YTN; PAM sequence: TTG
aactgaaagagacagtgata

SEQ ID NO: 193796 - DNA, 20 bp, Artificial Sequence
  Description of Artificial Sequence: Synthetic oligonucleotide
  Target: LAMA2; (-) strand; PAM type: YTN; PAM sequence: TTT
gaactgaaagagacagtgat

SEQ ID NO: 193797 - DNA, 20 bp, Artificial Sequence
  Description of Artificial Sequence: Synthetic oligonucleotide
  Target: LAMA2; (-) strand; PAM type: YTN; PAM sequence: CTT
tgaactgaaagagacagtga

SEQ ID NO: 193798 - DNA, 20 bp, Artificial Sequence
  Description of Artificial Sequence: Synthetic oligonucleotide
  Target: LAMA2; (-) strand; PAM type: YTN; PAM sequence: TTA
tgggcacaggctttgaactg

SEQ ID NO: 193799 - DNA, 20 bp, Artificial Sequence
  Description of Artificial Sequence: Synthetic oligonucleotide
  Target: LAMA2; (-) strand; PAM type: YTN; PAM sequence: TTA
ggcagtgacaacattatggg

SEQ ID NO: 193800 - DNA, 20 bp, Artificial Sequence
  Description of Artificial Sequence: Synthetic oligonucleotide
  Target: LAMA2; (-) strand; PAM type: YTN; PAM sequence: TTT
aggcagtgacaacattatgg

SEQ ID NO: 193801 - DNA, 20 bp, Artificial Sequence
  Description of Artificial Sequence: Synthetic oligonucleotide
  Target: LAMA2; (-) strand; PAM type: YTN; PAM sequence: TTT
taggcagtgacaacattatg

SEQ ID NO: 193802 - DNA, 20 bp, Artificial Sequence
  Description of Artificial Sequence: Synthetic oligonucleotide
  Target: LAMA2; (-) strand; PAM type: YTN; PAM sequence: TTA
acagagagatattttaggca

SEQ ID NO: 193803 - DNA, 20 bp, Artificial Sequence
  Description of Artificial Sequence: Synthetic oligonucleotide
  Target: LAMA2; (-) strand; PAM type: YTN; PAM sequence: TTA
gtcaggttaacagagagata

SEQ ID NO: 193804 - DNA, 20 bp, Artificial Sequence
  Description of Artificial Sequence: Synthetic oligonucleotide
  Target: LAMA2; (-) strand; PAM type: YTN; PAM sequence: TTG
gtatgcattagtcaggttaa

SEQ ID NO: 193805 - DNA, 20 bp, Artificial Sequence
  Description of Artificial Sequence: Synthetic oligonucleotide
  Target: LAMA2; (-) strand; PAM type: YTN; PAM sequence: CTC
cgtcaaaaaaaaaaaaaaga

SEQ ID NO: 193806 - DNA, 20 bp, Artificial Sequence
  Description of Artificial Sequence: Synthetic oligonucleotide
  Target: LAMA2; (-) strand; PAM type: YTN; PAM sequence: CTG
ggtgacagagcaggactccg

SEQ ID NO: 193807 - DNA, 20 bp, Artificial Sequence
  Description of Artificial Sequence: Synthetic oligonucleotide
  Target: LAMA2; (-) strand; PAM type: YTN; PAM sequence: CTC
cagcctgggtgacagagcag

SEQ ID NO: 193808 - DNA, 20 bp, Artificial Sequence
  Description of Artificial Sequence: Synthetic oligonucleotide
  Target: LAMA2; (-) strand; PAM type: YTN; PAM sequence: CTG
cactccagcctgggtgacag

SEQ ID NO: 193809 - DNA, 20 bp, Artificial Sequence
  Description of Artificial Sequence: Synthetic oligonucleotide
  Target: LAMA2; (-) strand; PAM type: YTN; PAM sequence: CTG
agatcgcagcactgcactcc

SEQ ID NO: 193810 - DNA, 20 bp, Artificial Sequence
  Description of Artificial Sequence: Synthetic oligonucleotide
  Target: LAMA2; (-) strand; PAM type: YTN; PAM sequence: TTG
cagtgagctgagatcgcagc

SEQ ID NO: 193811 - DNA, 20 bp, Artificial Sequence
  Description of Artificial Sequence: Synthetic oligonucleotide
  Target: LAMA2; (-) strand; PAM type: YTN; PAM sequence: TTG
aacccgggaggtggaggttg

SEQ ID NO: 193812 - DNA, 20 bp, Artificial Sequence
  Description of Artificial Sequence: Synthetic oligonucleotide
  Target: LAMA2; (-) strand; PAM type: YTN; PAM sequence: CTT
gaacccgggaggtggaggtt

SEQ ID NO: 193813 - DNA, 20 bp, Artificial Sequence
  Description of Artificial Sequence: Synthetic oligonucleotide
  Target: LAMA2; (-) strand; PAM type: YTN; PAM sequence: CTG
aggaaggagaatcgcttgaa

SEQ ID NO: 193814 - DNA, 20 bp, Artificial Sequence
  Description of Artificial Sequence: Synthetic oligonucleotide
  Target: LAMA2; (-) strand; PAM type: YTN; PAM sequence: CTA
gaggctgaggaaggagaatc

SEQ ID NO: 193815 - DNA, 20 bp, Artificial Sequence
  Description of Artificial Sequence: Synthetic oligonucleotide
  Target: LAMA2; (-) strand; PAM type: YTN; PAM sequence: CTC
tagaggctgaggaaggagaa

SEQ ID NO: 193816 - DNA, 20 bp, Artificial Sequence
  Description of Artificial Sequence: Synthetic oligonucleotide
  Target: LAMA2; (-) strand; PAM type: YTN; PAM sequence: CTA
ctctagaggctgaggaagga

SEQ ID NO: 193817 - DNA, 20 bp, Artificial Sequence
  Description of Artificial Sequence: Synthetic oligonucleotide
  Target: LAMA2; (-) strand; PAM type: YTN; PAM sequence: CTG
tagtcccagctactctagag

SEQ ID NO: 193818 - DNA, 20 bp, Artificial Sequence
  Description of Artificial Sequence: Synthetic oligonucleotide
  Target: LAMA2; (-) strand; PAM type: YTN; PAM sequence: CTG
ggcgtggtggcacacgcctg

SEQ ID NO: 193819 - DNA, 20 bp, Artificial Sequence
  Description of Artificial Sequence: Synthetic oligonucleotide
  Target: LAMA2; (-) strand; PAM type: YTN; PAM sequence: TTA
gctgggcgtggtggcacacg

SEQ ID NO: 193820 - DNA, 20 bp, Artificial Sequence
  Description of Artificial Sequence: Synthetic oligonucleotide
  Target: LAMA2; (-) strand; PAM type: YTN; PAM sequence: CTA
aaaatacaaaaattagctgg

SEQ ID NO: 193821 - DNA, 20 bp, Artificial Sequence
  Description of Artificial Sequence: Synthetic oligonucleotide
  Target: LAMA2; (-) strand; PAM type: YTN; PAM sequence: CTA
ctaaaaatacaaaaattagc

SEQ ID NO: 193822 - DNA, 20 bp, Artificial Sequence
  Description of Artificial Sequence: Synthetic oligonucleotide
  Target: LAMA2; (-) strand; PAM type: YTN; PAM sequence: CTC
tactaaaaatacaaaaatta

SEQ ID NO: 193823 - DNA, 20 bp, Artificial Sequence
  Description of Artificial Sequence: Synthetic oligonucleotide
  Target: LAMA2; (-) strand; PAM type: YTN; PAM sequence: CTG
tctctactaaaaatacaaaa

SEQ ID NO: 193824 - DNA, 20 bp, Artificial Sequence
  Description of Artificial Sequence: Synthetic oligonucleotide
  Target: LAMA2; (-) strand; PAM type: YTN; PAM sequence: TTG
cgaggtcgagagatcgagac

SEQ ID NO: 193825 - DNA, 20 bp, Artificial Sequence
  Description of Artificial Sequence: Synthetic oligonucleotide
  Target: LAMA2; (-) strand; PAM type: YTN; PAM sequence: CTG
aggcgggcgaattgcgaggt

SEQ ID NO: 193826 - DNA, 20 bp, Artificial Sequence
  Description of Artificial Sequence: Synthetic oligonucleotide
  Target: LAMA2; (-) strand; PAM type: YTN; PAM sequence: TTG
ggagcctgaggcgggcgaat

SEQ ID NO: 193827 - DNA, 20 bp, Artificial Sequence
  Description of Artificial Sequence: Synthetic oligonucleotide
  Target: LAMA2; (-) strand; PAM type: YTN; PAM sequence: TTT
gggagcctgaggcgggcgaa

SEQ ID NO: 193828 - DNA, 20 bp, Artificial Sequence
  Description of Artificial Sequence: Synthetic oligonucleotide
  Target: LAMA2; (-) strand; PAM type: YTN; PAM sequence: CTT
tgggagcctgaggcgggcga

SEQ ID NO: 193829 - DNA, 20 bp, Artificial Sequence
  Description of Artificial Sequence: Synthetic oligonucleotide
  Target: LAMA2; (-) strand; PAM type: YTN; PAM sequence: CTG
taatcccagcactttgggag

SEQ ID NO: 193830 - DNA, 20 bp, Artificial Sequence
  Description of Artificial Sequence: Synthetic oligonucleotide
  Target: LAMA2; (-) strand; PAM type: YTN; PAM sequence: CTC
acgcctgtaatcccagcact

SEQ ID NO: 193831 - DNA, 20 bp, Artificial Sequence
  Description of Artificial Sequence: Synthetic oligonucleotide
  Target: LAMA2; (-) strand; PAM type: YTN; PAM sequence: CTA
taaaaatggagcatgaggga

SEQ ID NO: 193832 - DNA, 20 bp, Artificial Sequence
  Description of Artificial Sequence: Synthetic oligonucleotide
  Target: LAMA2; (-) strand; PAM type: YTN; PAM sequence: TTG
gagaaactataaaaatggag

SEQ ID NO: 193833 - DNA, 20 bp, Artificial Sequence
  Description of Artificial Sequence: Synthetic oligonucleotide
  Target: LAMA2; (-) strand; PAM type: YTN; PAM sequence: CTT
ggagaaactataaaaatgga

SEQ ID NO: 193834 - DNA, 20 bp, Artificial Sequence
  Description of Artificial Sequence: Synthetic oligonucleotide
  Target: LAMA2; (-) strand; PAM type: YTN; PAM sequence: TTC
ttggagaaactataaaaatg

SEQ ID NO: 193835 - DNA, 20 bp, Artificial Sequence
  Description of Artificial Sequence: Synthetic oligonucleotide
  Target: LAMA2; (-) strand; PAM type: YTN; PAM sequence: CTT
cttggagaaactataaaaat

SEQ ID NO: 193836 - DNA, 20 bp, Artificial Sequence
  Description of Artificial Sequence: Synthetic oligonucleotide
  Target: LAMA2; (-) strand; PAM type: YTN; PAM sequence: CTA
gaggtcagaaagtgcttctt

SEQ ID NO: 193837 - DNA, 20 bp, Artificial Sequence
  Description of Artificial Sequence: Synthetic oligonucleotide
  Target: LAMA2; (-) strand; PAM type: YTN; PAM sequence: CTA
gtctagaggtcagaaagtgc

SEQ ID NO: 193838 - DNA, 20 bp, Artificial Sequence
  Description of Artificial Sequence: Synthetic oligonucleotide
  Target: LAMA2; (-) strand; PAM type: YTN; PAM sequence: TTC
aaactagtctagaggtcaga

SEQ ID NO: 193839 - DNA, 20 bp, Artificial Sequence
  Description of Artificial Sequence: Synthetic oligonucleotide
  Target: LAMA2; (-) strand; PAM type: YTN; PAM sequence: TTA
ggggaagaatagagccaata

SEQ ID NO: 193840 - DNA, 20 bp, Artificial Sequence
  Description of Artificial Sequence: Synthetic oligonucleotide
  Target: LAMA2; (-) strand; PAM type: YTN; PAM sequence: TTG
attaggggaagaatagagcc

SEQ ID NO: 193841 - DNA, 20 bp, Artificial Sequence
  Description of Artificial Sequence: Synthetic oligonucleotide
  Target: LAMA2; (-) strand; PAM type: YTN; PAM sequence: TTT
gattaggggaagaatagagc

SEQ ID NO: 193842 - DNA, 20 bp, Artificial Sequence
  Description of Artificial Sequence: Synthetic oligonucleotide
  Target: LAMA2; (-) strand; PAM type: YTN; PAM sequence: TTG
ggaaaagggtttgattaggg

SEQ ID NO: 193843 - DNA, 20 bp, Artificial Sequence
  Description of Artificial Sequence: Synthetic oligonucleotide
  Target: LAMA2; (-) strand; PAM type: YTN; PAM sequence: TTA
attgggaaaagggtttgatt

SEQ ID NO: 193844 - DNA, 20 bp, Artificial Sequence
  Description of Artificial Sequence: Synthetic oligonucleotide
  Target: LAMA2; (-) strand; PAM type: YTN; PAM sequence: CTA
ggatataaacatggttaatt

SEQ ID NO: 193845 - DNA, 20 bp, Artificial Sequence
  Description of Artificial Sequence: Synthetic oligonucleotide
  Target: LAMA2; (-) strand; PAM type: YTN; PAM sequence: CTA
aaaggaagcacataaactag

SEQ ID NO: 193846 - DNA, 20 bp, Artificial Sequence
  Description of Artificial Sequence: Synthetic oligonucleotide
  Target: LAMA2; (-) strand; PAM type: YTN; PAM sequence: CTA
gagaaacaatggtacatgct

SEQ ID NO: 193847 - DNA, 20 bp, Artificial Sequence
  Description of Artificial Sequence: Synthetic oligonucleotide
  Target: LAMA2; (-) strand; PAM type: YTN; PAM sequence: TTA
taaggccctagagaaacaat

SEQ ID NO: 193848 - DNA, 20 bp, Artificial Sequence
  Description of Artificial Sequence: Synthetic oligonucleotide
  Target: LAMA2; (-) strand; PAM type: YTN; PAM sequence: CTT
ataaggccctagagaaacaa

SEQ ID NO: 193849 - DNA, 20 bp, Artificial Sequence
  Description of Artificial Sequence: Synthetic oligonucleotide
  Target: LAMA2; (-) strand; PAM type: YTN; PAM sequence: CTG
tataacaaatacttataagg

SEQ ID NO: 193850 - DNA, 20 bp, Artificial Sequence
  Description of Artificial Sequence: Synthetic oligonucleotide
  Target: LAMA2; (-) strand; PAM type: YTN; PAM sequence: CTC
atatacatgtgtgcatatat

SEQ ID NO: 193851 - DNA, 20 bp, Artificial Sequence
  Description of Artificial Sequence: Synthetic oligonucleotide
  Target: LAMA2; (-) strand; PAM type: YTN; PAM sequence: CTC
tcatatacatgtgtgcatat

SEQ ID NO: 193852 - DNA, 20 bp, Artificial Sequence
  Description of Artificial Sequence: Synthetic oligonucleotide
  Target: LAMA2; (-) strand; PAM type: YTN; PAM sequence: TTC
aacatgtgcacacacatact

SEQ ID NO: 193853 - DNA, 20 bp, Artificial Sequence
  Description of Artificial Sequence: Synthetic oligonucleotide
  Target: LAMA2; (-) strand; PAM type: YTN; PAM sequence: TTG
ttcaacatgtgcacacacat

SEQ ID NO: 193854 - DNA, 20 bp, Artificial Sequence
  Description of Artificial Sequence: Synthetic oligonucleotide
  Target: LAMA2; (-) strand; PAM type: YTN; PAM sequence: TTT
gttcaacatgtgcacacaca

SEQ ID NO: 193855 - DNA, 20 bp, Artificial Sequence
  Description of Artificial Sequence: Synthetic oligonucleotide
  Target: LAMA2; (-) strand; PAM type: YTN; PAM sequence: CTC
atgaatttgttcaacatgtg

SEQ ID NO: 193856 - DNA, 20 bp, Artificial Sequence
  Description of Artificial Sequence: Synthetic oligonucleotide
  Target: LAMA2; (-) strand; PAM type: YTN; PAM sequence: TTG
tctcatgaatttgttcaaca

SEQ ID NO: 193857 - DNA, 20 bp, Artificial Sequence
  Description of Artificial Sequence: Synthetic oligonucleotide
  Target: LAMA2; (-) strand; PAM type: YTN; PAM sequence: TTT
gtctcatgaatttgttcaac

SEQ ID NO: 193858 - DNA, 20 bp, Artificial Sequence
  Description of Artificial Sequence: Synthetic oligonucleotide
  Target: LAMA2; (-) strand; PAM type: YTN; PAM sequence: TTT
tgtctcatgaatttgttcaa

SEQ ID NO: 193859 - DNA, 20 bp, Artificial Sequence
  Description of Artificial Sequence: Synthetic oligonucleotide
  Target: LAMA2; (-) strand; PAM type: YTN; PAM sequence: TTG
tattttgtctcatgaatttg

SEQ ID NO: 193860 - DNA, 20 bp, Artificial Sequence
  Description of Artificial Sequence: Synthetic oligonucleotide
  Target: LAMA2; (-) strand; PAM type: YTN; PAM sequence: CTA
aagttgtattttgtctcatg

SEQ ID NO: 193861 - DNA, 20 bp, Artificial Sequence
  Description of Artificial Sequence: Synthetic oligonucleotide
  Target: LAMA2; (-) strand; PAM type: YTN; PAM sequence: CTC
aacataaaaagtcaagagca

SEQ ID NO: 193862 - DNA, 20 bp, Artificial Sequence
  Description of Artificial Sequence: Synthetic oligonucleotide
  Target: LAMA2; (-) strand; PAM type: YTN; PAM sequence: TTC
tcaacataaaaagtcaagag

SEQ ID NO: 193863 - DNA, 20 bp, Artificial Sequence
  Description of Artificial Sequence: Synthetic oligonucleotide
  Target: LAMA2; (-) strand; PAM type: YTN; PAM sequence: TTT
ctcaacataaaaagtcaaga

SEQ ID NO: 193864 - DNA, 20 bp, Artificial Sequence
  Description of Artificial Sequence: Synthetic oligonucleotide
  Target: LAMA2; (-) strand; PAM type: YTN; PAM sequence: CTT
tctcaacataaaaagtcaag

SEQ ID NO: 193865 - DNA, 20 bp, Artificial Sequence
  Description of Artificial Sequence: Synthetic oligonucleotide
  Target: LAMA2; (-) strand; PAM type: YTN; PAM sequence: CTC
aacatccctttctcaacata

SEQ ID NO: 193866 - DNA, 20 bp, Artificial Sequence
  Description of Artificial Sequence: Synthetic oligonucleotide
  Target: LAMA2; (-) strand; PAM type: YTN; PAM sequence: CTC
tcaacatccctttctcaaca

SEQ ID NO: 193867 - DNA, 20 bp, Artificial Sequence
  Description of Artificial Sequence: Synthetic oligonucleotide
  Target: LAMA2; (-) strand; PAM type: YTN; PAM sequence: TTC
atactctcaacatccctttc

SEQ ID NO: 193868 - DNA, 20 bp, Artificial Sequence
  Description of Artificial Sequence: Synthetic oligonucleotide
  Target: LAMA2; (-) strand; PAM type: YTN; PAM sequence: CTT
catactctcaacatcccttt

SEQ ID NO: 193869 - DNA, 20 bp, Artificial Sequence
  Description of Artificial Sequence: Synthetic oligonucleotide
  Target: LAMA2; (-) strand; PAM type: YTN; PAM sequence: CTA
tagtgcttcatactctcaac

SEQ ID NO: 193870 - DNA, 20 bp, Artificial Sequence
  Description of Artificial Sequence: Synthetic oligonucleotide
  Target: LAMA2; (-) strand; PAM type: YTN; PAM sequence: TTG
ctatagtgcttcatactctc

SEQ ID NO: 193871 - DNA, 20 bp, Artificial Sequence
  Description of Artificial Sequence: Synthetic oligonucleotide
  Target: LAMA2; (-) strand; PAM type: YTN; PAM sequence: CTT
gctatagtgcttcatactct

SEQ ID NO: 193872 - DNA, 20 bp, Artificial Sequence
  Description of Artificial Sequence: Synthetic oligonucleotide
  Target: LAMA2; (-) strand; PAM type: YTN; PAM sequence: CTC
ccttgctatagtgcttcata

SEQ ID NO: 193873 - DNA, 20 bp, Artificial Sequence
  Description of Artificial Sequence: Synthetic oligonucleotide
  Target: LAMA2; (-) strand; PAM type: YTN; PAM sequence: TTC
tcccttgctatagtgcttca

SEQ ID NO: 193874 - DNA, 20 bp, Artificial Sequence
  Description of Artificial Sequence: Synthetic oligonucleotide
  Target: LAMA2; (-) strand; PAM type: YTN; PAM sequence: CTT
ctcccttgctatagtgcttc

SEQ ID NO: 193875 - DNA, 20 bp, Artificial Sequence
  Description of Artificial Sequence: Synthetic oligonucleotide
  Target: LAMA2; (-) strand; PAM type: YTN; PAM sequence: TTC
ttctcccttgctatagtgct

SEQ ID NO: 193876 - DNA, 20 bp, Artificial Sequence
  Description of Artificial Sequence: Synthetic oligonucleotide
  Target: LAMA2; (-) strand; PAM type: YTN; PAM sequence: TTT
cttctcccttgctatagtgc

SEQ ID NO: 193877 - DNA, 20 bp, Artificial Sequence
  Description of Artificial Sequence: Synthetic oligonucleotide
  Target: LAMA2; (-) strand; PAM type: YTN; PAM sequence: TTT
tcttctcccttgctatagtg

SEQ ID NO: 193878 - DNA, 20 bp, Artificial Sequence
  Description of Artificial Sequence: Synthetic oligonucleotide
  Target: LAMA2; (-) strand; PAM type: YTN; PAM sequence: CTT
ttcttctcccttgctatagt

SEQ ID NO: 193879 - DNA, 20 bp, Artificial Sequence
  Description of Artificial Sequence: Synthetic oligonucleotide
  Target: LAMA2; (-) strand; PAM type: YTN; PAM sequence: TTC
ttttcttctcccttgctata

SEQ ID NO: 193880 - DNA, 20 bp, Artificial Sequence
  Description of Artificial Sequence: Synthetic oligonucleotide
  Target: LAMA2; (-) strand; PAM type: YTN; PAM sequence: TTT
cttttcttctcccttgctat

SEQ ID NO: 193881 - DNA, 20 bp, Artificial Sequence
  Description of Artificial Sequence: Synthetic oligonucleotide
  Target: LAMA2; (-) strand; PAM type: YTN; PAM sequence: CTT
tcttttcttctcccttgcta

SEQ ID NO: 193882 - DNA, 20 bp, Artificial Sequence
  Description of Artificial Sequence: Synthetic oligonucleotide
  Target: LAMA2; (-) strand; PAM type: YTN; PAM sequence: CTC
tttcttttcttctcccttgc

SEQ ID NO: 193883 - DNA, 20 bp, Artificial Sequence
  Description of Artificial Sequence: Synthetic oligonucleotide
  Target: LAMA2; (-) strand; PAM type: YTN; PAM sequence: CTC
tctttcttttcttctccctt

SEQ ID NO: 193884 - DNA, 20 bp, Artificial Sequence
  Description of Artificial Sequence: Synthetic oligonucleotide
  Target: LAMA2; (-) strand; PAM type: YTN; PAM sequence: CTG
gtctctctttcttttcttct

SEQ ID NO: 193885 - DNA, 20 bp, Artificial Sequence
  Description of Artificial Sequence: Synthetic oligonucleotide
  Target: LAMA2; (-) strand; PAM type: YTN; PAM sequence: TTC
tggtctctctttcttttctt

SEQ ID NO: 193886 - DNA, 20 bp, Artificial Sequence
  Description of Artificial Sequence: Synthetic oligonucleotide
  Target: LAMA2; (-) strand; PAM type: YTN; PAM sequence: TTT
ctggtctctctttcttttct

SEQ ID NO: 193887 - DNA, 20 bp, Artificial Sequence
  Description of Artificial Sequence: Synthetic oligonucleotide
  Target: LAMA2; (-) strand; PAM type: YTN; PAM sequence: TTT
tctggtctctctttcttttc

SEQ ID NO: 193888 - DNA, 20 bp, Artificial Sequence
  Description of Artificial Sequence: Synthetic oligonucleotide
  Target: LAMA2; (-) strand; PAM type: YTN; PAM sequence: CTT
ttctggtctctctttctttt

SEQ ID NO: 193889 - DNA, 20 bp, Artificial Sequence
  Description of Artificial Sequence: Synthetic oligonucleotide
  Target: LAMA2; (-) strand; PAM type: YTN; PAM sequence: TTC
aataatcagcccttttctgg

SEQ ID NO: 193890 - DNA, 20 bp, Artificial Sequence
  Description of Artificial Sequence: Synthetic oligonucleotide
  Target: LAMA2; (-) strand; PAM type: YTN; PAM sequence: TTG
atattcaataatcagccctt

SEQ ID NO: 193891 - DNA, 20 bp, Artificial Sequence
  Description of Artificial Sequence: Synthetic oligonucleotide
  Target: LAMA2; (-) strand; PAM type: YTN; PAM sequence: CTT
gatattcaataatcagccct

SEQ ID NO: 193892 - DNA, 20 bp, Artificial Sequence
  Description of Artificial Sequence: Synthetic oligonucleotide
  Target: LAMA2; (-) strand; PAM type: YTN; PAM sequence: TTC
ttgatattcaataatcagcc

SEQ ID NO: 193893 - DNA, 20 bp, Artificial Sequence
  Description of Artificial Sequence: Synthetic oligonucleotide
  Target: LAMA2; (-) strand; PAM type: YTN; PAM sequence: TTT
cttgatattcaataatcagc

SEQ ID NO: 193894 - DNA, 20 bp, Artificial Sequence
  Description of Artificial Sequence: Synthetic oligonucleotide
  Target: LAMA2; (-) strand; PAM type: YTN; PAM sequence: CTT
tcttgatattcaataatcag

SEQ ID NO: 193895 - DNA, 20 bp, Artificial Sequence
  Description of Artificial Sequence: Synthetic oligonucleotide
  Target: LAMA2; (-) strand; PAM type: YTN; PAM sequence: TTC
ctttcttgatattcaataat

SEQ ID NO: 193896 - DNA, 20 bp, Artificial Sequence
  Description of Artificial Sequence: Synthetic oligonucleotide
  Target: LAMA2; (-) strand; PAM type: YTN; PAM sequence: CTA
tgtgttcctttcttgatatt

SEQ ID NO: 193897 - DNA, 20 bp, Artificial Sequence
  Description of Artificial Sequence: Synthetic oligonucleotide
  Target: LAMA2; (-) strand; PAM type: YTN; PAM sequence: TTC
tatgtgttcctttcttgata

SEQ ID NO: 193898 - DNA, 20 bp, Artificial Sequence
  Description of Artificial Sequence: Synthetic oligonucleotide
  Target: LAMA2; (-) strand; PAM type: YTN; PAM sequence: TTT
ctatgtgttcctttcttgat

SEQ ID NO: 193899 - DNA, 20 bp, Artificial Sequence
  Description of Artificial Sequence: Synthetic oligonucleotide
  Target: LAMA2; (-) strand; PAM type: YTN; PAM sequence: TTT
tctatgtgttcctttcttga

SEQ ID NO: 193900 - DNA, 20 bp, Artificial Sequence
  Description of Artificial Sequence: Synthetic oligonucleotide
  Target: LAMA2; (-) strand; PAM type: YTN; PAM sequence: TTG
ttttctatgtgttcctttct

SEQ ID NO: 193901 - DNA, 20 bp, Artificial Sequence
  Description of Artificial Sequence: Synthetic oligonucleotide
  Target: LAMA2; (-) strand; PAM type: YTN; PAM sequence: CTT
gttttctatgtgttcctttc

SEQ ID NO: 193902 - DNA, 20 bp, Artificial Sequence
  Description of Artificial Sequence: Synthetic oligonucleotide
  Target: LAMA2; (-) strand; PAM type: YTN; PAM sequence: TTA
cttgttttctatgtgttcct

SEQ ID NO: 193903 - DNA, 20 bp, Artificial Sequence
  Description of Artificial Sequence: Synthetic oligonucleotide
  Target: LAMA2; (-) strand; PAM type: YTN; PAM sequence: CTT
acttgttttctatgtgttcc

SEQ ID NO: 193904 - DNA, 20 bp, Artificial Sequence
  Description of Artificial Sequence: Synthetic oligonucleotide
  Target: LAMA2; (-) strand; PAM type: YTN; PAM sequence: CTC
ttacttgttttctatgtgtt

SEQ ID NO: 193905 - DNA, 20 bp, Artificial Sequence
  Description of Artificial Sequence: Synthetic oligonucleotide
  Target: LAMA2; (-) strand; PAM type: YTN; PAM sequence: TTC
aaagcctcttacttgttttc

SEQ ID NO: 193906 - DNA, 20 bp, Artificial Sequence
  Description of Artificial Sequence: Synthetic oligonucleotide
  Target: LAMA2; (-) strand; PAM type: YTN; PAM sequence: TTG
tcagttcaaagcctcttact

SEQ ID NO: 193907 - DNA, 20 bp, Artificial Sequence
  Description of Artificial Sequence: Synthetic oligonucleotide
  Target: LAMA2; (-) strand; PAM type: YTN; PAM sequence: TTG
tccatccaaattgtcagttc

SEQ ID NO: 193908 - DNA, 20 bp, Artificial Sequence
  Description of Artificial Sequence: Synthetic oligonucleotide
  Target: LAMA2; (-) strand; PAM type: YTN; PAM sequence: CTA
agataagtgcaagcaatagt

SEQ ID NO: 193909 - DNA, 20 bp, Artificial Sequence
  Description of Artificial Sequence: Synthetic oligonucleotide
  Target: LAMA2; (-) strand; PAM type: YTN; PAM sequence: CTG
ctaagataagtgcaagcaat

SEQ ID NO: 193910 - DNA, 20 bp, Artificial Sequence
  Description of Artificial Sequence: Synthetic oligonucleotide
  Target: LAMA2; (-) strand; PAM type: YTN; PAM sequence: TTA
agtgcccctgctaagataag

SEQ ID NO: 193911 - DNA, 20 bp, Artificial Sequence
  Description of Artificial Sequence: Synthetic oligonucleotide
  Target: LAMA2; (-) strand; PAM type: YTN; PAM sequence: TTT
aagtgcccctgctaagataa

SEQ ID NO: 193912 - DNA, 20 bp, Artificial Sequence
  Description of Artificial Sequence: Synthetic oligonucleotide
  Target: LAMA2; (-) strand; PAM type: YTN; PAM sequence: TTT
taagtgcccctgctaagata

SEQ ID NO: 193913 - DNA, 20 bp, Artificial Sequence
  Description of Artificial Sequence: Synthetic oligonucleotide
  Target: LAMA2; (-) strand; PAM type: YTN; PAM sequence: TTT
ttaagtgcccctgctaagat

SEQ ID NO: 193914 - DNA, 20 bp, Artificial Sequence
  Description of Artificial Sequence: Synthetic oligonucleotide
  Target: LAMA2; (-) strand; PAM type: YTN; PAM sequence: CTT
tttaagtgcccctgctaaga

SEQ ID NO: 193915 - DNA, 20 bp, Artificial Sequence
  Description of Artificial Sequence: Synthetic oligonucleotide
  Target: LAMA2; (-) strand; PAM type: YTN; PAM sequence: TTC
aggctttttaagtgcccctg

SEQ ID NO: 193916 - DNA, 20 bp, Artificial Sequence
  Description of Artificial Sequence: Synthetic oligonucleotide
  Target: LAMA2; (-) strand; PAM type: YTN; PAM sequence: TTT
caggctttttaagtgcccct

SEQ ID NO: 193917 - DNA, 20 bp, Artificial Sequence
  Description of Artificial Sequence: Synthetic oligonucleotide
  Target: LAMA2; (-) strand; PAM type: YTN; PAM sequence: TTG
caggcaagatacgcgtttca

SEQ ID NO: 193918 - DNA, 20 bp, Artificial Sequence
  Description of Artificial Sequence: Synthetic oligonucleotide
  Target: LAMA2; (-) strand; PAM type: YTN; PAM sequence: TTG
tacattgcaggcaagatacg

SEQ ID NO: 193919 - DNA, 20 bp, Artificial Sequence
  Description of Artificial Sequence: Synthetic oligonucleotide
  Target: LAMA2; (-) strand; PAM type: YTN; PAM sequence: TTT
gtacattgcaggcaagatac

SEQ ID NO: 193920 - DNA, 20 bp, Artificial Sequence
  Description of Artificial Sequence: Synthetic oligonucleotide
  Target: LAMA2; (-) strand; PAM type: YTN; PAM sequence: CTG
ataagtttgtacattgcagg

SEQ ID NO: 193921 - DNA, 20 bp, Artificial Sequence
  Description of Artificial Sequence: Synthetic oligonucleotide
  Target: LAMA2; (-) strand; PAM type: YTN; PAM sequence: TTC
tgataagtttgtacattgca

SEQ ID NO: 193922 - DNA, 20 bp, Artificial Sequence
  Description of Artificial Sequence: Synthetic oligonucleotide
  Target: LAMA2; (-) strand; PAM type: YTN; PAM sequence: CTA
tatgagatgttctgataagt

SEQ ID NO: 193923 - DNA, 20 bp, Artificial Sequence
  Description of Artificial Sequence: Synthetic oligonucleotide
  Target: LAMA2; (-) strand; PAM type: YTN; PAM sequence: TTA
ctatatgagatgttctgata

SEQ ID NO: 193924 - DNA, 20 bp, Artificial Sequence
  Description of Artificial Sequence: Synthetic oligonucleotide
  Target: LAMA2; (-) strand; PAM type: YTN; PAM sequence: TTA
tgttactatatgagatgttc

SEQ ID NO: 193925 - DNA, 20 bp, Artificial Sequence
  Description of Artificial Sequence: Synthetic oligonucleotide
  Target: LAMA2; (-) strand; PAM type: YTN; PAM sequence: CTG
aaaattatgttactatatga

SEQ ID NO: 193926 - DNA, 20 bp, Artificial Sequence
  Description of Artificial Sequence: Synthetic oligonucleotide
  Target: LAMA2; (-) strand; PAM type: YTN; PAM sequence: TTA
tactgaaaattatgttacta

SEQ ID NO: 193927 - DNA, 20 bp, Artificial Sequence
  Description of Artificial Sequence: Synthetic oligonucleotide
  Target: LAMA2; (-) strand; PAM type: YTN; PAM sequence: CTT
atactgaaaattatgttact

SEQ ID NO: 193928 - DNA, 20 bp, Artificial Sequence
  Description of Artificial Sequence: Synthetic oligonucleotide
  Target: LAMA2; (-) strand; PAM type: YTN; PAM sequence: CTA
tacttatactgaaaattatg

SEQ ID NO: 193929 - DNA, 20 bp, Artificial Sequence
  Description of Artificial Sequence: Synthetic oligonucleotide
  Target: LAMA2; (-) strand; PAM type: YTN; PAM sequence: CTA
tctatacttatactgaaaat

SEQ ID NO: 193930 - DNA, 20 bp, Artificial Sequence
  Description of Artificial Sequence: Synthetic oligonucleotide
  Target: LAMA2; (-) strand; PAM type: YTN; PAM sequence: TTC
ctatctatacttatactgaa

SEQ ID NO: 193931 - DNA, 20 bp, Artificial Sequence
  Description of Artificial Sequence: Synthetic oligonucleotide
  Target: LAMA2; (-) strand; PAM type: YTN; PAM sequence: TTA
aacgtaattcctatctatac

SEQ ID NO: 193932 - DNA, 20 bp, Artificial Sequence
  Description of Artificial Sequence: Synthetic oligonucleotide
  Target: LAMA2; (-) strand; PAM type: YTN; PAM sequence: TTT
aaacgtaattcctatctata

SEQ ID NO: 193933 - DNA, 20 bp, Artificial Sequence
  Description of Artificial Sequence: Synthetic oligonucleotide
  Target: LAMA2; (-) strand; PAM type: YTN; PAM sequence: CTC
aaatttaaacgtaattccta

SEQ ID NO: 193934 - DNA, 20 bp, Artificial Sequence
  Description of Artificial Sequence: Synthetic oligonucleotide
  Target: LAMA2; (-) strand; PAM type: YTN; PAM sequence: TTA
ctcaaatttaaacgtaattc

SEQ ID NO: 193935 - DNA, 20 bp, Artificial Sequence
  Description of Artificial Sequence: Synthetic oligonucleotide
  Target: LAMA2; (-) strand; PAM type: YTN; PAM sequence: CTT
actcaaatttaaacgtaatt

SEQ ID NO: 193936 - DNA, 20 bp, Artificial Sequence
  Description of Artificial Sequence: Synthetic oligonucleotide
  Target: LAMA2; (-) strand; PAM type: YTN; PAM sequence: TTA
gtccaatacttactcaaatt

SEQ ID NO: 193937 - DNA, 20 bp, Artificial Sequence
  Description of Artificial Sequence: Synthetic oligonucleotide
  Target: LAMA2; (-) strand; PAM type: YTN; PAM sequence: CTT
agtccaatacttactcaaat

SEQ ID NO: 193938 - DNA, 20 bp, Artificial Sequence
  Description of Artificial Sequence: Synthetic oligonucleotide
  Target: LAMA2; (-) strand; PAM type: YTN; PAM sequence: TTA
aaaaaggagagataatctta

SEQ ID NO: 193939 - DNA, 20 bp, Artificial Sequence
  Description of Artificial Sequence: Synthetic oligonucleotide
  Target: LAMA2; (-) strand; PAM type: YTN; PAM sequence: TTT
aaaaaaggagagataatctt

SEQ ID NO: 193940 - DNA, 20 bp, Artificial Sequence
  Description of Artificial Sequence: Synthetic oligonucleotide
  Target: LAMA2; (-) strand; PAM type: YTN; PAM sequence: TTT
taaaaaaggagagataatct

SEQ ID NO: 193941 - DNA, 20 bp, Artificial Sequence
  Description of Artificial Sequence: Synthetic oligonucleotide
  Target: LAMA2; (-) strand; PAM type: YTN; PAM sequence: CTT
ttaaaaaaggagagataatc

SEQ ID NO: 193942 - DNA, 20 bp, Artificial Sequence
  Description of Artificial Sequence: Synthetic oligonucleotide
  Target: LAMA2; (-) strand; PAM type: YTN; PAM sequence: TTA
ccaacttttaaaaaaggaga

SEQ ID NO: 193943 - DNA, 20 bp, Artificial Sequence
  Description of Artificial Sequence: Synthetic oligonucleotide
  Target: LAMA2; (-) strand; PAM type: YTN; PAM sequence: CTT
accaacttttaaaaaaggag

SEQ ID NO: 193944 - DNA, 20 bp, Artificial Sequence
  Description of Artificial Sequence: Synthetic oligonucleotide
  Target: LAMA2; (-) strand; PAM type: YTN; PAM sequence: TTA
acataacttaccaactttta

SEQ ID NO: 193945 - DNA, 20 bp, Artificial Sequence
  Description of Artificial Sequence: Synthetic oligonucleotide
  Target: LAMA2; (-) strand; PAM type: YTN; PAM sequence: TTT
aacataacttaccaactttt

SEQ ID NO: 193946 - DNA, 20 bp, Artificial Sequence
  Description of Artificial Sequence: Synthetic oligonucleotide
  Target: LAMA2; (-) strand; PAM type: YTN; PAM sequence: TTG
tttaacataacttaccaact

SEQ ID NO: 193947 - DNA, 20 bp, Artificial Sequence
  Description of Artificial Sequence: Synthetic oligonucleotide
  Target: LAMA2; (-) strand; PAM type: YTN; PAM sequence: TTT
gtttaacataacttaccaac

SEQ ID NO: 193948 - DNA, 20 bp, Artificial Sequence
  Description of Artificial Sequence: Synthetic oligonucleotide
  Target: LAMA2; (-) strand; PAM type: YTN; PAM sequence: TTT
tgtttaacataacttaccaa

SEQ ID NO: 193949 - DNA, 20 bp, Artificial Sequence
  Description of Artificial Sequence: Synthetic oligonucleotide
  Target: LAMA2; (-) strand; PAM type: YTN; PAM sequence: TTT
ttgtttaacataacttacca

SEQ ID NO: 193950 - DNA, 20 bp, Artificial Sequence
  Description of Artificial Sequence: Synthetic oligonucleotide
  Target: LAMA2; (-) strand; PAM type: YTN; PAM sequence: TTG
tttttgtttaacataactta

SEQ ID NO: 193951 - DNA, 20 bp, Artificial Sequence
  Description of Artificial Sequence: Synthetic oligonucleotide
  Target: LAMA2; (-) strand; PAM type: YTN; PAM sequence: TTT
gtttttgtttaacataactt

SEQ ID NO: 193952 - DNA, 20 bp, Artificial Sequence
  Description of Artificial Sequence: Synthetic oligonucleotide
  Target: LAMA2; (-) strand; PAM type: YTN; PAM sequence: TTT
tgtttttgtttaacataact

SEQ ID NO: 193953 - DNA, 20 bp, Artificial Sequence
  Description of Artificial Sequence: Synthetic oligonucleotide
  Target: LAMA2; (-) strand; PAM type: YTN; PAM sequence: TTG
ttttgtttttgtttaacata

SEQ ID NO: 193954 - DNA, 20 bp, Artificial Sequence
  Description of Artificial Sequence: Synthetic oligonucleotide
  Target: LAMA2; (-) strand; PAM type: YTN; PAM sequence: TTA
gaaattgttttgtttttgtt

SEQ ID NO: 193955 - DNA, 20 bp, Artificial Sequence
  Description of Artificial Sequence: Synthetic oligonucleotide
  Target: LAMA2; (-) strand; PAM type: YTN; PAM sequence: TTT
agaaattgttttgtttttgt

SEQ ID NO: 193956 - DNA, 20 bp, Artificial Sequence
  Description of Artificial Sequence: Synthetic oligonucleotide
  Target: LAMA2; (-) strand; PAM type: YTN; PAM sequence: TTT
tagaaattgttttgtttttg

SEQ ID NO: 193957 - DNA, 20 bp, Artificial Sequence
  Description of Artificial Sequence: Synthetic oligonucleotide
  Target: LAMA2; (-) strand; PAM type: YTN; PAM sequence: TTA
gtcatcattttagaaattgt

SEQ ID NO: 193958 - DNA, 20 bp, Artificial Sequence
  Description of Artificial Sequence: Synthetic oligonucleotide
  Target: LAMA2; (-) strand; PAM type: YTN; PAM sequence: TTT
agtcatcattttagaaattg

SEQ ID NO: 193959 - DNA, 20 bp, Artificial Sequence
  Description of Artificial Sequence: Synthetic oligonucleotide
  Target: LAMA2; (-) strand; PAM type: YTN; PAM sequence: TTT
tagtcatcattttagaaatt

SEQ ID NO: 193960 - DNA, 20 bp, Artificial Sequence
  Description of Artificial Sequence: Synthetic oligonucleotide
  Target: LAMA2; (-) strand; PAM type: YTN; PAM sequence: CTT
ttagtcatcattttagaaat

SEQ ID NO: 193961 - DNA, 20 bp, Artificial Sequence
  Description of Artificial Sequence: Synthetic oligonucleotide
  Target: LAMA2; (-) strand; PAM type: YTN; PAM sequence: TTA
cttttagtcatcattttaga

SEQ ID NO: 193962 - DNA, 20 bp, Artificial Sequence
  Description of Artificial Sequence: Synthetic oligonucleotide
  Target: LAMA2; (-) strand; PAM type: YTN; PAM sequence: CTT
acttttagtcatcattttag

SEQ ID NO: 193963 - DNA, 20 bp, Artificial Sequence
  Description of Artificial Sequence: Synthetic oligonucleotide
  Target: LAMA2; (-) strand; PAM type: YTN; PAM sequence: TTA
aacaacccttacttttagtc

SEQ ID NO: 193964 - DNA, 20 bp, Artificial Sequence
  Description of Artificial Sequence: Synthetic oligonucleotide
  Target: LAMA2; (-) strand; PAM type: YTN; PAM sequence: TTT
aaacaacccttacttttagt

SEQ ID NO: 193965 - DNA, 20 bp, Artificial Sequence
  Description of Artificial Sequence: Synthetic oligonucleotide
  Target: LAMA2; (-) strand; PAM type: YTN; PAM sequence: TTA
taaaatggatttaaacaacc

SEQ ID NO: 193966 - DNA, 20 bp, Artificial Sequence
  Description of Artificial Sequence: Synthetic oligonucleotide
  Target: LAMA2; (-) strand; PAM type: YTN; PAM sequence: CTT
ataaaatggatttaaacaac

SEQ ID NO: 193967 - DNA, 20 bp, Artificial Sequence
  Description of Artificial Sequence: Synthetic oligonucleotide
  Target: LAMA2; (-) strand; PAM type: YTN; PAM sequence: CTG
gaagtaaatcttataaaatg

SEQ ID NO: 193968 - DNA, 20 bp, Artificial Sequence
  Description of Artificial Sequence: Synthetic oligonucleotide
  Target: LAMA2; (-) strand; PAM type: YTN; PAM sequence: TTC
tggaagtaaatcttataaaa

SEQ ID NO: 193969 - DNA, 20 bp, Artificial Sequence
  Description of Artificial Sequence: Synthetic oligonucleotide
  Target: LAMA2; (-) strand; PAM type: YTN; PAM sequence: CTT
ctggaagtaaatcttataaa

SEQ ID NO: 193970 - DNA, 20 bp, Artificial Sequence
  Description of Artificial Sequence: Synthetic oligonucleotide
  Target: LAMA2; (-) strand; PAM type: YTN; PAM sequence: TTC
atcttctggaagtaaatctt

SEQ ID NO: 193971 - DNA, 20 bp, Artificial Sequence
  Description of Artificial Sequence: Synthetic oligonucleotide
  Target: LAMA2; (-) strand; PAM type: YTN; PAM sequence: TTT
catcttctggaagtaaatct

SEQ ID NO: 193972 - DNA, 20 bp, Artificial Sequence
  Description of Artificial Sequence: Synthetic oligonucleotide
  Target: LAMA2; (-) strand; PAM type: YTN; PAM sequence: CTT
tcatcttctggaagtaaatc

SEQ ID NO: 193973 - DNA, 20 bp, Artificial Sequence
  Description of Artificial Sequence: Synthetic oligonucleotide
  Target: LAMA2; (-) strand; PAM type: YTN; PAM sequence: TTC
ccactttcatcttctggaag

SEQ ID NO: 193974 - DNA, 20 bp, Artificial Sequence
  Description of Artificial Sequence: Synthetic oligonucleotide
  Target: LAMA2; (-) strand; PAM type: YTN; PAM sequence: CTT
cccactttcatcttctggaa

SEQ ID NO: 193975 - DNA, 20 bp, Artificial Sequence
  Description of Artificial Sequence: Synthetic oligonucleotide
  Target: LAMA2; (-) strand; PAM type: YTN; PAM sequence: TTC
agcttcccactttcatcttc

SEQ ID NO: 193976 - DNA, 20 bp, Artificial Sequence
  Description of Artificial Sequence: Synthetic oligonucleotide
  Target: LAMA2; (-) strand; PAM type: YTN; PAM sequence: CTT
cagcttcccactttcatctt

SEQ ID NO: 193977 - DNA, 20 bp, Artificial Sequence
  Description of Artificial Sequence: Synthetic oligonucleotide
  Target: LAMA2; (-) strand; PAM type: YTN; PAM sequence: TTA
gaaatgatatgccacttcag

SEQ ID NO: 193978 - DNA, 20 bp, Artificial Sequence
  Description of Artificial Sequence: Synthetic oligonucleotide
  Target: LAMA2; (-) strand; PAM type: YTN; PAM sequence: CTT
agaaatgatatgccacttca

SEQ ID NO: 193979 - DNA, 20 bp, Artificial Sequence
  Description of Artificial Sequence: Synthetic oligonucleotide
  Target: LAMA2; (-) strand; PAM type: YTN; PAM sequence: CTA
caaaaatagcttagaaatga

SEQ ID NO: 193980 - DNA, 20 bp, Artificial Sequence
  Description of Artificial Sequence: Synthetic oligonucleotide
  Target: LAMA2; (-) strand; PAM type: YTN; PAM sequence: TTC
aacctacaaaaatagcttag

SEQ ID NO: 193981 - DNA, 20 bp, Artificial Sequence
  Description of Artificial Sequence: Synthetic oligonucleotide
  Target: LAMA2; (-) strand; PAM type: YTN; PAM sequence: TTG
aaggatgcaattcaacctac

SEQ ID NO: 193982 - DNA, 20 bp, Artificial Sequence
  Description of Artificial Sequence: Synthetic oligonucleotide
  Target: LAMA2; (-) strand; PAM type: YTN; PAM sequence: TTT
gaaggatgcaattcaaccta

SEQ ID NO: 193983 - DNA, 20 bp, Artificial Sequence
  Description of Artificial Sequence: Synthetic oligonucleotide
  Target: LAMA2; (-) strand; PAM type: YTN; PAM sequence: TTT
tgaaggatgcaattcaacct

SEQ ID NO: 193984 - DNA, 20 bp, Artificial Sequence
  Description of Artificial Sequence: Synthetic oligonucleotide
  Target: LAMA2; (-) strand; PAM type: YTN; PAM sequence: TTT
ttgaaggatgcaattcaacc

SEQ ID NO: 193985 - DNA, 20 bp, Artificial Sequence
  Description of Artificial Sequence: Synthetic oligonucleotide
  Target: LAMA2; (-) strand; PAM type: YTN; PAM sequence: CTT
tttgaaggatgcaattcaac

SEQ ID NO: 193986 - DNA, 20 bp, Artificial Sequence
  Description of Artificial Sequence: Synthetic oligonucleotide
  Target: LAMA2; (-) strand; PAM type: YTN; PAM sequence: TTC
tttttgaaggatgcaattca

SEQ ID NO: 193987 - DNA, 20 bp, Artificial Sequence
  Description of Artificial Sequence: Synthetic oligonucleotide
  Target: LAMA2; (-) strand; PAM type: YTN; PAM sequence: TTT
ctttttgaaggatgcaattc

SEQ ID NO: 193988 - DNA, 20 bp, Artificial Sequence
  Description of Artificial Sequence: Synthetic oligonucleotide
  Target: LAMA2; (-) strand; PAM type: YTN; PAM sequence: TTC
aacatttctttttgaaggat

SEQ ID NO: 193989 - DNA, 20 bp, Artificial Sequence
  Description of Artificial Sequence: Synthetic oligonucleotide
  Target: LAMA2; (-) strand; PAM type: YTN; PAM sequence: CTT
caacatttctttttgaagga

SEQ ID NO: 193990 - DNA, 20 bp, Artificial Sequence
  Description of Artificial Sequence: Synthetic oligonucleotide
  Target: LAMA2; (-) strand; PAM type: YTN; PAM sequence: TTA
agacttcaacatttcttttt

SEQ ID NO: 193991 - DNA, 20 bp, Artificial Sequence
  Description of Artificial Sequence: Synthetic oligonucleotide
  Target: LAMA2; (-) strand; PAM type: YTN; PAM sequence: CTG
gggttaagacttcaacattt

SEQ ID NO: 193992 - DNA, 20 bp, Artificial Sequence
  Description of Artificial Sequence: Synthetic oligonucleotide
  Target: LAMA2; (-) strand; PAM type: YTN; PAM sequence: TTA
cctggggttaagacttcaac

SEQ ID NO: 193993 - DNA, 20 bp, Artificial Sequence
  Description of Artificial Sequence: Synthetic oligonucleotide
  Target: LAMA2; (-) strand; PAM type: YTN; PAM sequence: TTC
atagttacctggggttaaga

SEQ ID NO: 193994 - DNA, 20 bp, Artificial Sequence
  Description of Artificial Sequence: Synthetic oligonucleotide
  Target: LAMA2; (-) strand; PAM type: YTN; PAM sequence: TTG
caaataaggtcacattcata

SEQ ID NO: 193995 - DNA, 20 bp, Artificial Sequence
  Description of Artificial Sequence: Synthetic oligonucleotide
  Target: LAMA2; (-) strand; PAM type: YTN; PAM sequence: TTT
gcaaataaggtcacattcat

SEQ ID NO: 193996 - DNA, 20 bp, Artificial Sequence
  Description of Artificial Sequence: Synthetic oligonucleotide
  Target: LAMA2; (-) strand; PAM type: YTN; PAM sequence: CTA
tttgcaaataaggtcacatt

SEQ ID NO: 193997 - DNA, 20 bp, Artificial Sequence
  Description of Artificial Sequence: Synthetic oligonucleotide
  Target: LAMA2; (-) strand; PAM type: YTN; PAM sequence: TTG
caaagaccctatttgcaaat

SEQ ID NO: 193998 - DNA, 20 bp, Artificial Sequence
  Description of Artificial Sequence: Synthetic oligonucleotide
  Target: LAMA2; (-) strand; PAM type: YTN; PAM sequence: TTT
gcaaagaccctatttgcaaa

SEQ ID NO: 193999 - DNA, 20 bp, Artificial Sequence
  Description of Artificial Sequence: Synthetic oligonucleotide
  Target: LAMA2; (-) strand; PAM type: YTN; PAM sequence: TTA
tatttgcaaagaccctattt

SEQ ID NO: 194000 - DNA, 20 bp, Artificial Sequence
  Description of Artificial Sequence: Synthetic oligonucleotide
  Target: LAMA2; (-) strand; PAM type: YTN; PAM sequence: TTA
attatatttgcaaagaccct

SEQ ID NO: 194001 - DNA, 20 bp, Artificial Sequence
  Description of Artificial Sequence: Synthetic oligonucleotide
  Target: LAMA2; (-) strand; PAM type: YTN; PAM sequence: CTT
aattatatttgcaaagaccc

SEQ ID NO: 194002 - DNA, 20 bp, Artificial Sequence
  Description of Artificial Sequence: Synthetic oligonucleotide
  Target: LAMA2; (-) strand; PAM type: YTN; PAM sequence: TTA
acttaattatatttgcaaag

SEQ ID NO: 194003 - DNA, 20 bp, Artificial Sequence
  Description of Artificial Sequence: Synthetic oligonucleotide
  Target: LAMA2; (-) strand; PAM type: YTN; PAM sequence: CTT
aacttaattatatttgcaaa

SEQ ID NO: 194004 - DNA, 20 bp, Artificial Sequence
  Description of Artificial Sequence: Synthetic oligonucleotide
  Target: LAMA2; (-) strand; PAM type: YTN; PAM sequence: CTA
aaccagtatgacatcacctt

SEQ ID NO: 194005 - DNA, 20 bp, Artificial Sequence
  Description of Artificial Sequence: Synthetic oligonucleotide
  Target: LAMA2; (-) strand; PAM type: YTN; PAM sequence: TTG
gatcagggtccaccctaaac

SEQ ID NO: 194006 - DNA, 20 bp, Artificial Sequence
  Description of Artificial Sequence: Synthetic oligonucleotide
  Target: LAMA2; (-) strand; PAM type: YTN; PAM sequence: CTA
tgataccagtcatattggat

SEQ ID NO: 194007 - DNA, 20 bp, Artificial Sequence
  Description of Artificial Sequence: Synthetic oligonucleotide
  Target: LAMA2; (-) strand; PAM type: YTN; PAM sequence: TTC
tatgataccagtcatattgg

SEQ ID NO: 194008 - DNA, 20 bp, Artificial Sequence
  Description of Artificial Sequence: Synthetic oligonucleotide
  Target: LAMA2; (-) strand; PAM type: YTN; PAM sequence: CTT
ctatgataccagtcatattg

SEQ ID NO: 194009 - DNA, 20 bp, Artificial Sequence
  Description of Artificial Sequence: Synthetic oligonucleotide
  Target: LAMA2; (-) strand; PAM type: YTN; PAM sequence: CTC
ttctatgataccagtcatat

SEQ ID NO: 194010 - DNA, 20 bp, Artificial Sequence
  Description of Artificial Sequence: Synthetic oligonucleotide
  Target: LAMA2; (-) strand; PAM type: YTN; PAM sequence: CTC
ccctcttctatgataccagt

SEQ ID NO: 194011 - DNA, 20 bp, Artificial Sequence
  Description of Artificial Sequence: Synthetic oligonucleotide
  Target: LAMA2; (-) strand; PAM type: YTN; PAM sequence: CTC
ctcccctcttctatgatacc

SEQ ID NO: 194012 - DNA, 20 bp, Artificial Sequence
  Description of Artificial Sequence: Synthetic oligonucleotide
  Target: LAMA2; (-) strand; PAM type: YTN; PAM sequence: CTG
tatctcctcccctcttctat

SEQ ID NO: 194013 - DNA, 20 bp, Artificial Sequence
  Description of Artificial Sequence: Synthetic oligonucleotide
  Target: LAMA2; (-) strand; PAM type: YTN; PAM sequence: TTC
tgtatctcctcccctcttct

SEQ ID NO: 194014 - DNA, 20 bp, Artificial Sequence
  Description of Artificial Sequence: Synthetic oligonucleotide
  Target: LAMA2; (-) strand; PAM type: YTN; PAM sequence: TTT
ctgtatctcctcccctcttc

SEQ ID NO: 194015 - DNA, 20 bp, Artificial Sequence
  Description of Artificial Sequence: Synthetic oligonucleotide
  Target: LAMA2; (-) strand; PAM type: YTN; PAM sequence: CTG
tatttctgtatctcctcccc

SEQ ID NO: 194016 - DNA, 20 bp, Artificial Sequence
  Description of Artificial Sequence: Synthetic oligonucleotide
  Target: LAMA2; (-) strand; PAM type: YTN; PAM sequence: CTC
cctgtatttctgtatctcct

SEQ ID NO: 194017 - DNA, 20 bp, Artificial Sequence
  Description of Artificial Sequence: Synthetic oligonucleotide
  Target: LAMA2; (-) strand; PAM type: YTN; PAM sequence: TTC
tccctgtatttctgtatctc

SEQ ID NO: 194018 - DNA, 20 bp, Artificial Sequence
  Description of Artificial Sequence: Synthetic oligonucleotide
  Target: LAMA2; (-) strand; PAM type: YTN; PAM sequence: TTT
ctccctgtatttctgtatct

SEQ ID NO: 194019 - DNA, 20 bp, Artificial Sequence
  Description of Artificial Sequence: Synthetic oligonucleotide
  Target: LAMA2; (-) strand; PAM type: YTN; PAM sequence: CTT
tctccctgtatttctgtatc

SEQ ID NO: 194020 - DNA, 20 bp, Artificial Sequence
  Description of Artificial Sequence: Synthetic oligonucleotide
  Target: LAMA2; (-) strand; PAM type: YTN; PAM sequence: TTA
cacagctttctccctgtatt

SEQ ID NO: 194021 - DNA, 20 bp, Artificial Sequence
  Description of Artificial Sequence: Synthetic oligonucleotide
  Target: LAMA2; (-) strand; PAM type: YTN; PAM sequence: TTT
acacagctttctccctgtat

SEQ ID NO: 194022 - DNA, 20 bp, Artificial Sequence
  Description of Artificial Sequence: Synthetic oligonucleotide
  Target: LAMA2; (-) strand; PAM type: YTN; PAM sequence: CTT
tacacagctttctccctgta

SEQ ID NO: 194023 - DNA, 20 bp, Artificial Sequence
  Description of Artificial Sequence: Synthetic oligonucleotide
  Target: LAMA2; (-) strand; PAM type: YTN; PAM sequence: CTC
catctttacacagctttctc

SEQ ID NO: 194024 - DNA, 20 bp, Artificial Sequence
  Description of Artificial Sequence: Synthetic oligonucleotide
  Target: LAMA2; (-) strand; PAM type: YTN; PAM sequence: CTG
cctccatctttacacagctt

SEQ ID NO: 194025 - DNA, 20 bp, Artificial Sequence
  Description of Artificial Sequence: Synthetic oligonucleotide
  Target: LAMA2; (-) strand; PAM type: YTN; PAM sequence: CTC
tgcctccatctttacacagc

SEQ ID NO: 194026 - DNA, 20 bp, Artificial Sequence
  Description of Artificial Sequence: Synthetic oligonucleotide
  Target: LAMA2; (-) strand; PAM type: YTN; PAM sequence: CTC
ccatctctgcctccatcttt

SEQ ID NO: 194027 - DNA, 20 bp, Artificial Sequence
  Description of Artificial Sequence: Synthetic oligonucleotide
  Target: LAMA2; (-) strand; PAM type: YTN; PAM sequence: TTG
tggatgcaccactcccatct

SEQ ID NO: 194028 - DNA, 20 bp, Artificial Sequence
  Description of Artificial Sequence: Synthetic oligonucleotide
  Target: LAMA2; (-) strand; PAM type: YTN; PAM sequence: CTT
gtggatgcaccactcccatc

SEQ ID NO: 194029 - DNA, 20 bp, Artificial Sequence
  Description of Artificial Sequence: Synthetic oligonucleotide
  Target: LAMA2; (-) strand; PAM type: YTN; PAM sequence: TTG
gcttgtggatgcaccactcc

SEQ ID NO: 194030 - DNA, 20 bp, Artificial Sequence
  Description of Artificial Sequence: Synthetic oligonucleotide
  Target: LAMA2; (-) strand; PAM type: YTN; PAM sequence: CTT
ggcttgtggatgcaccactc

SEQ ID NO: 194031 - DNA, 20 bp, Artificial Sequence
  Description of Artificial Sequence: Synthetic oligonucleotide
  Target: LAMA2; (-) strand; PAM type: YTN; PAM sequence: TTG
cttggcttgtggatgcacca

SEQ ID NO: 194032 - DNA, 20 bp, Artificial Sequence
  Description of Artificial Sequence: Synthetic oligonucleotide
  Target: LAMA2; (-) strand; PAM type: YTN; PAM sequence: TTG
gcattgcttggcttgtggat

SEQ ID NO: 194033 - DNA, 20 bp, Artificial Sequence
  Description of Artificial Sequence: Synthetic oligonucleotide
  Target: LAMA2; (-) strand; PAM type: YTN; PAM sequence: CTT
ggcattgcttggcttgtgga

SEQ ID NO: 194034 - DNA, 20 bp, Artificial Sequence
  Description of Artificial Sequence: Synthetic oligonucleotide
  Target: LAMA2; (-) strand; PAM type: YTN; PAM sequence: TTC
cttggcattgcttggcttgt

SEQ ID NO: 194035 - DNA, 20 bp, Artificial Sequence
  Description of Artificial Sequence: Synthetic oligonucleotide
  Target: LAMA2; (-) strand; PAM type: YTN; PAM sequence: TTT
ccttggcattgcttggcttg

SEQ ID NO: 194036 - DNA, 20 bp, Artificial Sequence
  Description of Artificial Sequence: Synthetic oligonucleotide
  Target: LAMA2; (-) strand; PAM type: YTN; PAM sequence: CTT
tccttggcattgcttggctt

SEQ ID NO: 194037 - DNA, 20 bp, Artificial Sequence
  Description of Artificial Sequence: Synthetic oligonucleotide
  Target: LAMA2; (-) strand; PAM type: YTN; PAM sequence: TTC
tttccttggcattgcttggc

SEQ ID NO: 194038 - DNA, 20 bp, Artificial Sequence
  Description of Artificial Sequence: Synthetic oligonucleotide
  Target: LAMA2; (-) strand; PAM type: YTN; PAM sequence: CTT
ctttccttggcattgcttgg

SEQ ID NO: 194039 - DNA, 20 bp, Artificial Sequence
  Description of Artificial Sequence: Synthetic oligonucleotide
  Target: LAMA2; (-) strand; PAM type: YTN; PAM sequence: CTA
gacacagtaagaaaaaatgt

SEQ ID NO: 194040 - DNA, 20 bp, Artificial Sequence
  Description of Artificial Sequence: Synthetic oligonucleotide
  Target: LAMA2; (-) strand; PAM type: YTN; PAM sequence: TTC
tagacacagtaagaaaaaat

SEQ ID NO: 194041 - DNA, 20 bp, Artificial Sequence
  Description of Artificial Sequence: Synthetic oligonucleotide
  Target: LAMA2; (-) strand; PAM type: YTN; PAM sequence: CTT
ctagacacagtaagaaaaaa

SEQ ID NO: 194042 - DNA, 20 bp, Artificial Sequence
  Description of Artificial Sequence: Synthetic oligonucleotide
  Target: LAMA2; (-) strand; PAM type: YTN; PAM sequence: TTC
cttctagacacagtaagaaa

SEQ ID NO: 194043 - DNA, 20 bp, Artificial Sequence
  Description of Artificial Sequence: Synthetic oligonucleotide
  Target: LAMA2; (-) strand; PAM type: YTN; PAM sequence: TTG
gttccttctagacacagtaa

SEQ ID NO: 194044 - DNA, 20 bp, Artificial Sequence
  Description of Artificial Sequence: Synthetic oligonucleotide
  Target: LAMA2; (-) strand; PAM type: YTN; PAM sequence: CTA
gttggttccttctagacaca

SEQ ID NO: 194045 - DNA, 20 bp, Artificial Sequence
  Description of Artificial Sequence: Synthetic oligonucleotide
  Target: LAMA2; (-) strand; PAM type: YTN; PAM sequence: CTG
aaaccaaaatgtcagcctag

SEQ ID NO: 194046 - DNA, 20 bp, Artificial Sequence
  Description of Artificial Sequence: Synthetic oligonucleotide
  Target: LAMA2; (-) strand; PAM type: YTN; PAM sequence: CTC
tgaaaccaaaatgtcagcct

SEQ ID NO: 194047 - DNA, 20 bp, Artificial Sequence
  Description of Artificial Sequence: Synthetic oligonucleotide
  Target: LAMA2; (-) strand; PAM type: YTN; PAM sequence: CTG
taactctgaaaccaaaatgt

SEQ ID NO: 194048 - DNA, 20 bp, Artificial Sequence
  Description of Artificial Sequence: Synthetic oligonucleotide
  Target: LAMA2; (-) strand; PAM type: YTN; PAM sequence: TTC
aggaggctgtaactctgaaa

SEQ ID NO: 194049 - DNA, 20 bp, Artificial Sequence
  Description of Artificial Sequence: Synthetic oligonucleotide
  Target: LAMA2; (-) strand; PAM type: YTN; PAM sequence: TTC
acagttcaggaggctgtaac

SEQ ID NO: 194050 - DNA, 20 bp, Artificial Sequence
  Description of Artificial Sequence: Synthetic oligonucleotide
  Target: LAMA2; (-) strand; PAM type: YTN; PAM sequence: TTT
cacagttcaggaggctgtaa

SEQ ID NO: 194051 - DNA, 20 bp, Artificial Sequence
  Description of Artificial Sequence: Synthetic oligonucleotide
  Target: LAMA2; (-) strand; PAM type: YTN; PAM sequence: TTC
atttcacagttcaggaggct

SEQ ID NO: 194052 - DNA, 20 bp, Artificial Sequence
  Description of Artificial Sequence: Synthetic oligonucleotide
  Target: LAMA2; (-) strand; PAM type: YTN; PAM sequence: TTA
aagtataataataataaaaa

SEQ ID NO: 194053 - DNA, 20 bp, Artificial Sequence
  Description of Artificial Sequence: Synthetic oligonucleotide
  Target: LAMA2; (-) strand; PAM type: YTN; PAM sequence: CTT
aaagtataataataataaaa

SEQ ID NO: 194054 - DNA, 20 bp, Artificial Sequence
  Description of Artificial Sequence: Synthetic oligonucleotide
  Target: LAMA2; (-) strand; PAM type: YTN; PAM sequence: CTA
aaacttaaagtataataata

SEQ ID NO: 194055 - DNA, 20 bp, Artificial Sequence
  Description of Artificial Sequence: Synthetic oligonucleotide
  Target: LAMA2; (-) strand; PAM type: YTN; PAM sequence: TTG
tgcacatgtaccctaaaact

SEQ ID NO: 194056 - DNA, 20 bp, Artificial Sequence
  Description of Artificial Sequence: Synthetic oligonucleotide
  Target: LAMA2; (-) strand; PAM type: YTN; PAM sequence: CTA
atcggcacattgtgcacatg

SEQ ID NO: 194057 - DNA, 20 bp, Artificial Sequence
  Description of Artificial Sequence: Synthetic oligonucleotide
  Target: LAMA2; (-) strand; PAM type: YTN; PAM sequence: TTA
gtgggtgcagcgcacaagca

SEQ ID NO: 194058 - DNA, 20 bp, Artificial Sequence
  Description of Artificial Sequence: Synthetic oligonucleotide
  Target: LAMA2; (-) strand; PAM type: YTN; PAM sequence: CTA
gatgacgagttagtgggtgc

SEQ ID NO: 194059 - DNA, 20 bp, Artificial Sequence
  Description of Artificial Sequence: Synthetic oligonucleotide
  Target: LAMA2; (-) strand; PAM type: YTN; PAM sequence: CTA
atgctagatgacgagttagt

SEQ ID NO: 194060 - DNA, 20 bp, Artificial Sequence
  Description of Artificial Sequence: Synthetic oligonucleotide
  Target: LAMA2; (-) strand; PAM type: YTN; PAM sequence: TTG
ggagatatacctaatgctag

SEQ ID NO: 194061 - DNA, 20 bp, Artificial Sequence
  Description of Artificial Sequence: Synthetic oligonucleotide
  Target: LAMA2; (-) strand; PAM type: YTN; PAM sequence: TTG
tggggtggggggagggggaa

SEQ ID NO: 194062 - DNA, 20 bp, Artificial Sequence
  Description of Artificial Sequence: Synthetic oligonucleotide
  Target: LAMA2; (-) strand; PAM type: YTN; PAM sequence: CTG
ttgtggggtggggggagggg

SEQ ID NO: 194063 - DNA, 20 bp, Artificial Sequence
  Description of Artificial Sequence: Synthetic oligonucleotide
  Target: LAMA2; (-) strand; PAM type: YTN; PAM sequence: CTG
gggactgttgtggggtgggg

SEQ ID NO: 194064 - DNA, 20 bp, Artificial Sequence
  Description of Artificial Sequence: Synthetic oligonucleotide
  Target: LAMA2; (-) strand; PAM type: YTN; PAM sequence: CTC
tggggactgttgtggggtgg

SEQ ID NO: 194065 - DNA, 20 bp, Artificial Sequence
  Description of Artificial Sequence: Synthetic oligonucleotide
  Target: LAMA2; (-) strand; PAM type: YTN; PAM sequence: TTG
aacaatgagaacacatggac

SEQ ID NO: 194066 - DNA, 20 bp, Artificial Sequence
  Description of Artificial Sequence: Synthetic oligonucleotide
  Target: LAMA2; (-) strand; PAM type: YTN; PAM sequence: CTC
ataggtgggaattgaacaat

SEQ ID NO: 194067 - DNA, 20 bp, Artificial Sequence
  Description of Artificial Sequence: Synthetic oligonucleotide
  Target: LAMA2; (-) strand; PAM type: YTN; PAM sequence: CTC
actcataggtgggaattgaa

SEQ ID NO: 194068 - DNA, 20 bp, Artificial Sequence
  Description of Artificial Sequence: Synthetic oligonucleotide
  Target: LAMA2; (-) strand; PAM type: YTN; PAM sequence: TTC
tcactcataggtgggaattg

SEQ ID NO: 194069 - DNA, 20 bp, Artificial Sequence
  Description of Artificial Sequence: Synthetic oligonucleotide
  Target: LAMA2; (-) strand; PAM type: YTN; PAM sequence: CTA
tcacaaggacaaaaaaccaa

SEQ ID NO: 194070 - DNA, 20 bp, Artificial Sequence
  Description of Artificial Sequence: Synthetic oligonucleotide
  Target: LAMA2; (-) strand; PAM type: YTN; PAM sequence: CTC
agtaaactatcacaaggaca

SEQ ID NO: 194071 - DNA, 20 bp, Artificial Sequence
  Description of Artificial Sequence: Synthetic oligonucleotide
  Target: LAMA2; (-) strand; PAM type: YTN; PAM sequence: TTC
tcagtaaactatcacaagga

SEQ ID NO: 194072 - DNA, 20 bp, Artificial Sequence
  Description of Artificial Sequence: Synthetic oligonucleotide
  Target: LAMA2; (-) strand; PAM type: YTN; PAM sequence: CTG
gaaatcatcattctcagtaa

SEQ ID NO: 194073 - DNA, 20 bp, Artificial Sequence
  Description of Artificial Sequence: Synthetic oligonucleotide
  Target: LAMA2; (-) strand; PAM type: YTN; PAM sequence: TTG
tagggccatggatgaaactg

SEQ ID NO: 194074 - DNA, 20 bp, Artificial Sequence
  Description of Artificial Sequence: Synthetic oligonucleotide
  Target: LAMA2; (-) strand; PAM type: YTN; PAM sequence: TTT
gtagggccatggatgaaact

SEQ ID NO: 194075 - DNA, 20 bp, Artificial Sequence
  Description of Artificial Sequence: Synthetic oligonucleotide
  Target: LAMA2; (-) strand; PAM type: YTN; PAM sequence: CTT
tgtagggccatggatgaaac

SEQ ID NO: 194076 - DNA, 20 bp, Artificial Sequence
  Description of Artificial Sequence: Synthetic oligonucleotide
  Target: LAMA2; (-) strand; PAM type: YTN; PAM sequence: TTC
atgtgctttgtagggccatg

SEQ ID NO: 194077 - DNA, 20 bp, Artificial Sequence
  Description of Artificial Sequence: Synthetic oligonucleotide
  Target: LAMA2; (-) strand; PAM type: YTN; PAM sequence: CTA
tgcagccataaaaaatgatg

SEQ ID NO: 194078 - DNA, 20 bp, Artificial Sequence
  Description of Artificial Sequence: Synthetic oligonucleotide
  Target: LAMA2; (-) strand; PAM type: YTN; PAM sequence: TTA
agaaaatgtggcacatatac

SEQ ID NO: 194079 - DNA, 20 bp, Artificial Sequence
  Description of Artificial Sequence: Synthetic oligonucleotide
  Target: LAMA2; (-) strand; PAM type: YTN; PAM sequence: CTA
gattaagaaaatgtggcaca

SEQ ID NO: 194080 - DNA, 20 bp, Artificial Sequence
  Description of Artificial Sequence: Synthetic oligonucleotide
  Target: LAMA2; (-) strand; PAM type: YTN; PAM sequence: TTG
gaaccaacccaaatgtccaa

SEQ ID NO: 194081 - DNA, 20 bp, Artificial Sequence
  Description of Artificial Sequence: Synthetic oligonucleotide
  Target: LAMA2; (-) strand; PAM type: YTN; PAM sequence: CTT
ggaaccaacccaaatgtcca

SEQ ID NO: 194082 - DNA, 20 bp, Artificial Sequence
  Description of Artificial Sequence: Synthetic oligonucleotide
  Target: LAMA2; (-) strand; PAM type: YTN; PAM sequence: TTC
acaatagcaaagacttggaa

SEQ ID NO: 194083 - DNA, 20 bp, Artificial Sequence
  Description of Artificial Sequence: Synthetic oligonucleotide
  Target: LAMA2; (-) strand; PAM type: YTN; PAM sequence: TTT
cacaatagcaaagacttgga

SEQ ID NO: 194084 - DNA, 20 bp, Artificial Sequence
  Description of Artificial Sequence: Synthetic oligonucleotide
  Target: LAMA2; (-) strand; PAM type: YTN; PAM sequence: TTT
tcacaatagcaaagacttgg

SEQ ID NO: 194085 - DNA, 20 bp, Artificial Sequence
  Description of Artificial Sequence: Synthetic oligonucleotide
  Target: LAMA2; (-) strand; PAM type: YTN; PAM sequence: TTT
ttcacaatagcaaagacttg

SEQ ID NO: 194086 - DNA, 20 bp, Artificial Sequence
  Description of Artificial Sequence: Synthetic oligonucleotide
  Target: LAMA2; (-) strand; PAM type: YTN; PAM sequence: TTG
tggcatttttcacaatagca

SEQ ID NO: 194087 - DNA, 20 bp, Artificial Sequence
  Description of Artificial Sequence: Synthetic oligonucleotide
  Target: LAMA2; (-) strand; PAM type: YTN; PAM sequence: TTA
ttgtggcatttttcacaata

SEQ ID NO: 194088 - DNA, 20 bp, Artificial Sequence
  Description of Artificial Sequence: Synthetic oligonucleotide
  Target: LAMA2; (-) strand; PAM type: YTN; PAM sequence: TTT
attgtggcatttttcacaat

SEQ ID NO: 194089 - DNA, 20 bp, Artificial Sequence
  Description of Artificial Sequence: Synthetic oligonucleotide
  Target: LAMA2; (-) strand; PAM type: YTN; PAM sequence: CTA
taaagacacatacacaggta

SEQ ID NO: 194090 - DNA, 20 bp, Artificial Sequence
  Description of Artificial Sequence: Synthetic oligonucleotide
  Target: LAMA2; (-) strand; PAM type: YTN; PAM sequence: CTG
ctataaagacacatacacag

SEQ ID NO: 194091 - DNA, 20 bp, Artificial Sequence
  Description of Artificial Sequence: Synthetic oligonucleotide
  Target: LAMA2; (-) strand; PAM type: YTN; PAM sequence: CTA
taaatcatgctgctataaag

SEQ ID NO: 194092 - DNA, 20 bp, Artificial Sequence
  Description of Artificial Sequence: Synthetic oligonucleotide
  Target: LAMA2; (-) strand; PAM type: YTN; PAM sequence: CTG
ggtatatacccaaaggacta

SEQ ID NO: 194093 - DNA, 20 bp, Artificial Sequence
  Description of Artificial Sequence: Synthetic oligonucleotide
  Target: LAMA2; (-) strand; PAM type: YTN; PAM sequence: TTA
ctgggtatatacccaaagga

SEQ ID NO: 194094 - DNA, 20 bp, Artificial Sequence
  Description of Artificial Sequence: Synthetic oligonucleotide
  Target: LAMA2; (-) strand; PAM type: YTN; PAM sequence: TTG
acccagccatcccattactg

SEQ ID NO: 194095 - DNA, 20 bp, Artificial Sequence
  Description of Artificial Sequence: Synthetic oligonucleotide
  Target: LAMA2; (-) strand; PAM type: YTN; PAM sequence: TTT
gacccagccatcccattact

SEQ ID NO: 194096 - DNA, 20 bp, Artificial Sequence
  Description of Artificial Sequence: Synthetic oligonucleotide
  Target: LAMA2; (-) strand; PAM type: YTN; PAM sequence: CTA
gaaataccatttgacccagc

SEQ ID NO: 194097 - DNA, 20 bp, Artificial Sequence
  Description of Artificial Sequence: Synthetic oligonucleotide
  Target: LAMA2; (-) strand; PAM type: YTN; PAM sequence: CTA
gaactagaaataccatttga

SEQ ID NO: 194098 - DNA, 20 bp, Artificial Sequence
  Description of Artificial Sequence: Synthetic oligonucleotide
  Target: LAMA2; (-) strand; PAM type: YTN; PAM sequence: CTC
agggatctagaactagaaat

SEQ ID NO: 194099 - DNA, 20 bp, Artificial Sequence
  Description of Artificial Sequence: Synthetic oligonucleotide
  Target: LAMA2; (-) strand; PAM type: YTN; PAM sequence: TTC
ctcagggatctagaactaga

SEQ ID NO: 194100 - DNA, 20 bp, Artificial Sequence
  Description of Artificial Sequence: Synthetic oligonucleotide
  Target: LAMA2; (-) strand; PAM type: YTN; PAM sequence: TTG
tggaagtcagtgtggcgatt

SEQ ID NO: 194101 - DNA, 20 bp, Artificial Sequence
  Description of Artificial Sequence: Synthetic oligonucleotide
  Target: LAMA2; (-) strand; PAM type: YTN; PAM sequence: TTC
aaccattgtggaagtcagtg

SEQ ID NO: 194102 - DNA, 20 bp, Artificial Sequence
  Description of Artificial Sequence: Synthetic oligonucleotide
  Target: LAMA2; (-) strand; PAM type: YTN; PAM sequence: CTA
gttcaaccattgtggaagtc

SEQ ID NO: 194103 - DNA, 20 bp, Artificial Sequence
  Description of Artificial Sequence: Synthetic oligonucleotide
  Target: LAMA2; (-) strand; PAM type: YTN; PAM sequence: CTG
taaactagttcaaccattgt

SEQ ID NO: 194104 - DNA, 20 bp, Artificial Sequence
  Description of Artificial Sequence: Synthetic oligonucleotide
  Target: LAMA2; (-) strand; PAM type: YTN; PAM sequence: TTG
gtgggactgtaaactagttc

SEQ ID NO: 194105 - DNA, 20 bp, Artificial Sequence
  Description of Artificial Sequence: Synthetic oligonucleotide
  Target: LAMA2; (-) strand; PAM type: YTN; PAM sequence: CTG
ttggtgggactgtaaactag

SEQ ID NO: 194106 - DNA, 20 bp, Artificial Sequence
  Description of Artificial Sequence: Synthetic oligonucleotide
  Target: LAMA2; (-) strand; PAM type: YTN; PAM sequence: TTA
cactgttggtgggactgtaa

SEQ ID NO: 194107 - DNA, 20 bp, Artificial Sequence
  Description of Artificial Sequence: Synthetic oligonucleotide
  Target: LAMA2; (-) strand; PAM type: YTN; PAM sequence: TTT
acactgttggtgggactgta

SEQ ID NO: 194108 - DNA, 20 bp, Artificial Sequence
  Description of Artificial Sequence: Synthetic oligonucleotide
  Target: LAMA2; (-) strand; PAM type: YTN; PAM sequence: TTT
tacactgttggtgggactgt

SEQ ID NO: 194109 - DNA, 20 bp, Artificial Sequence
  Description of Artificial Sequence: Synthetic oligonucleotide
  Target: LAMA2; (-) strand; PAM type: YTN; PAM sequence: CTT
ttacactgttggtgggactg

SEQ ID NO: 194110 - DNA, 20 bp, Artificial Sequence
  Description of Artificial Sequence: Synthetic oligonucleotide
  Target: LAMA2; (-) strand; PAM type: YTN; PAM sequence: CTG
gagaggatgtggagaaatag

SEQ ID NO: 194111 - DNA, 20 bp, Artificial Sequence
  Description of Artificial Sequence: Synthetic oligonucleotide
  Target: LAMA2; (-) strand; PAM type: YTN; PAM sequence: TTA
aaaagtcaggaaacaacagg

SEQ ID NO: 194112 - DNA, 20 bp, Artificial Sequence
  Description of Artificial Sequence: Synthetic oligonucleotide
  Target: LAMA2; (-) strand; PAM type: YTN; PAM sequence: TTA
gaatggcaatcattaaaaag

SEQ ID NO: 194113 - DNA, 20 bp, Artificial Sequence
  Description of Artificial Sequence: Synthetic oligonucleotide
  Target: LAMA2; (-) strand; PAM type: YTN; PAM sequence: CTC
acaccagttagaatggcaat

SEQ ID NO: 194114 - DNA, 20 bp, Artificial Sequence
  Description of Artificial Sequence: Synthetic oligonucleotide
  Target: LAMA2; (-) strand; PAM type: YTN; PAM sequence: CTG
gccatcagagaaatgcaaat

SEQ ID NO: 194115 - DNA, 20 bp, Artificial Sequence
  Description of Artificial Sequence: Synthetic oligonucleotide
  Target: LAMA2; (-) strand; PAM type: YTN; PAM sequence: CTC
accatcactggccatcagag

SEQ ID NO: 194116 - DNA, 20 bp, Artificial Sequence
  Description of Artificial Sequence: Synthetic oligonucleotide
  Target: LAMA2; (-) strand; PAM type: YTN; PAM sequence: TTA
tgcagccaaaagacacatga

SEQ ID NO: 194117 - DNA, 20 bp, Artificial Sequence
  Description of Artificial Sequence: Synthetic oligonucleotide
  Target: LAMA2; (-) strand; PAM type: YTN; PAM sequence: TTT
atgcagccaaaagacacatg

SEQ ID NO: 194118 - DNA, 20 bp, Artificial Sequence
  Description of Artificial Sequence: Synthetic oligonucleotide
  Target: LAMA2; (-) strand; PAM type: YTN; PAM sequence: CTC
aaaagaagacatttatgcag

SEQ ID NO: 194119 - DNA, 20 bp, Artificial Sequence
  Description of Artificial Sequence: Synthetic oligonucleotide
  Target: LAMA2; (-) strand; PAM type: YTN; PAM sequence: TTC
tcaaaagaagacatttatgc

SEQ ID NO: 194120 - DNA, 20 bp, Artificial Sequence
  Description of Artificial Sequence: Synthetic oligonucleotide
  Target: LAMA2; (-) strand; PAM type: YTN; PAM sequence: CTT
ctcaaaagaagacatttatg

SEQ ID NO: 194121 - DNA, 20 bp, Artificial Sequence
  Description of Artificial Sequence: Synthetic oligonucleotide
  Target: LAMA2; (-) strand; PAM type: YTN; PAM sequence: TTA
caagaaaaaaacaaacaacc

SEQ ID NO: 194122 - DNA, 20 bp, Artificial Sequence
  Description of Artificial Sequence: Synthetic oligonucleotide
  Target: LAMA2; (-) strand; PAM type: YTN; PAM sequence: TTT
acaagaaaaaaacaaacaac

SEQ ID NO: 194123 - DNA, 20 bp, Artificial Sequence
  Description of Artificial Sequence: Synthetic oligonucleotide
  Target: LAMA2; (-) strand; PAM type: YTN; PAM sequence: CTC
aaacaaatttacaagaaaaa

SEQ ID NO: 194124 - DNA, 20 bp, Artificial Sequence
  Description of Artificial Sequence: Synthetic oligonucleotide
  Target: LAMA2; (-) strand; PAM type: YTN; PAM sequence: CTA
caatgaactcaaacaaattt

SEQ ID NO: 194125 - DNA, 20 bp, Artificial Sequence
  Description of Artificial Sequence: Synthetic oligonucleotide
  Target: LAMA2; (-) strand; PAM type: YTN; PAM sequence: CTA
atatccagaatctacaatga

SEQ ID NO: 194126 - DNA, 20 bp, Artificial Sequence
  Description of Artificial Sequence: Synthetic oligonucleotide
  Target: LAMA2; (-) strand; PAM type: YTN; PAM sequence: CTG
acaaagggctaatatccaga

SEQ ID NO: 194127 - DNA, 20 bp, Artificial Sequence
  Description of Artificial Sequence: Synthetic oligonucleotide
  Target: LAMA2; (-) strand; PAM type: YTN; PAM sequence: CTC
atctgacaaagggctaatat

SEQ ID NO: 194128 - DNA, 20 bp, Artificial Sequence
  Description of Artificial Sequence: Synthetic oligonucleotide
  Target: LAMA2; (-) strand; PAM type: YTN; PAM sequence: CTG
ctcatctgacaaagggctaa

SEQ ID NO: 194129 - DNA, 20 bp, Artificial Sequence
  Description of Artificial Sequence: Synthetic oligonucleotide
  Target: LAMA2; (-) strand; PAM type: YTN; PAM sequence: TTC
gcaacctgctcatctgacaa

SEQ ID NO: 194130 - DNA, 20 bp, Artificial Sequence
  Description of Artificial Sequence: Synthetic oligonucleotide
  Target: LAMA2; (-) strand; PAM type: YTN; PAM sequence: TTT
cgcaacctgctcatctgaca

SEQ ID NO: 194131 - DNA, 20 bp, Artificial Sequence
  Description of Artificial Sequence: Synthetic oligonucleotide
  Target: LAMA2; (-) strand; PAM type: YTN; PAM sequence: TTT
tcgcaacctgctcatctgac

SEQ ID NO: 194132 - DNA, 20 bp, Artificial Sequence
  Description of Artificial Sequence: Synthetic oligonucleotide
  Target: LAMA2; (-) strand; PAM type: YTN; PAM sequence: CTA
ccagcagagtgaacaggcaa

SEQ ID NO: 194133 - DNA, 20 bp, Artificial Sequence
  Description of Artificial Sequence: Synthetic oligonucleotide
  Target: LAMA2; (-) strand; PAM type: YTN; PAM sequence: CTG
cacagcaaaagaaactacca

SEQ ID NO: 194134 - DNA, 20 bp, Artificial Sequence
  Description of Artificial Sequence: Synthetic oligonucleotide
  Target: LAMA2; (-) strand; PAM type: YTN; PAM sequence: TTC
tgcacagcaaaagaaactac

SEQ ID NO: 194135 - DNA, 20 bp, Artificial Sequence
  Description of Artificial Sequence: Synthetic oligonucleotide
  Target: LAMA2; (-) strand; PAM type: YTN; PAM sequence: CTT
ctgcacagcaaaagaaacta

SEQ ID NO: 194136 - DNA, 20 bp, Artificial Sequence
  Description of Artificial Sequence: Synthetic oligonucleotide
  Target: LAMA2; (-) strand; PAM type: YTN; PAM sequence: CTA
aagagcttctgcacagcaaa

SEQ ID NO: 194137 - DNA, 20 bp, Artificial Sequence
  Description of Artificial Sequence: Synthetic oligonucleotide
  Target: LAMA2; (-) strand; PAM type: YTN; PAM sequence: TTA
aactaaagagcttctgcaca

SEQ ID NO: 194138 - DNA, 20 bp, Artificial Sequence
  Description of Artificial Sequence: Synthetic oligonucleotide
  Target: LAMA2; (-) strand; PAM type: YTN; PAM sequence: CTA
attaaactaaagagcttctg

SEQ ID NO: 194139 - DNA, 20 bp, Artificial Sequence
  Description of Artificial Sequence: Synthetic oligonucleotide
  Target: LAMA2; (-) strand; PAM type: YTN; PAM sequence: CTA
aaacaccaaaagcaatggca

SEQ ID NO: 194140 - DNA, 20 bp, Artificial Sequence
  Description of Artificial Sequence: Synthetic oligonucleotide
  Target: LAMA2; (-) strand; PAM type: YTN; PAM sequence: TTC
atgtctaaaacaccaaaagc

SEQ ID NO: 194141 - DNA, 20 bp, Artificial Sequence
  Description of Artificial Sequence: Synthetic oligonucleotide
  Target: LAMA2; (-) strand; PAM type: YTN; PAM sequence: CTT
catgtctaaaacaccaaaag

SEQ ID NO: 194142 - DNA, 20 bp, Artificial Sequence
  Description of Artificial Sequence: Synthetic oligonucleotide
  Target: LAMA2; (-) strand; PAM type: YTN; PAM sequence: TTC
aggacataggcatgggcaaa

SEQ ID NO: 194143 - DNA, 20 bp, Artificial Sequence
  Description of Artificial Sequence: Synthetic oligonucleotide
  Target: LAMA2; (-) strand; PAM type: YTN; PAM sequence: TTA
ccattcaggacataggcatg

SEQ ID NO: 194144 - DNA, 20 bp, Artificial Sequence
  Description of Artificial Sequence: Synthetic oligonucleotide
  Target: LAMA2; (-) strand; PAM type: YTN; PAM sequence: CTA
ggcattaccattcaggacat

SEQ ID NO: 194145 - DNA, 20 bp, Artificial Sequence
  Description of Artificial Sequence: Synthetic oligonucleotide
  Target: LAMA2; (-) strand; PAM type: YTN; PAM sequence: CTA
gaagaaaacctaggcattac

SEQ ID NO: 194146 - DNA, 20 bp, Artificial Sequence
  Description of Artificial Sequence: Synthetic oligonucleotide
  Target: LAMA2; (-) strand; PAM type: YTN; PAM sequence: CTA
aaaccataaaaacactagaa

SEQ ID NO: 194147 - DNA, 20 bp, Artificial Sequence
  Description of Artificial Sequence: Synthetic oligonucleotide
  Target: LAMA2; (-) strand; PAM type: YTN; PAM sequence: TTA
gacctaaaaccataaaaaca

SEQ ID NO: 194148 - DNA, 20 bp, Artificial Sequence
  Description of Artificial Sequence: Synthetic oligonucleotide
  Target: LAMA2; (-) strand; PAM type: YTN; PAM sequence: TTA
aacgttagacctaaaaccat

SEQ ID NO: 194149 - DNA, 20 bp, Artificial Sequence
  Description of Artificial Sequence: Synthetic oligonucleotide
  Target: LAMA2; (-) strand; PAM type: YTN; PAM sequence: TTA
aagaattaaacgttagacct

SEQ ID NO: 194150 - DNA, 20 bp, Artificial Sequence
  Description of Artificial Sequence: Synthetic oligonucleotide
  Target: LAMA2; (-) strand; PAM type: YTN; PAM sequence: TTC
aagatggattaaagaattaa

SEQ ID NO: 194151 - DNA, 20 bp, Artificial Sequence
  Description of Artificial Sequence: Synthetic oligonucleotide
  Target: LAMA2; (-) strand; PAM type: YTN; PAM sequence: TTA
tacaaaaatcaattcaagat

SEQ ID NO: 194152 - DNA, 20 bp, Artificial Sequence
  Description of Artificial Sequence: Synthetic oligonucleotide
  Target: LAMA2; (-) strand; PAM type: YTN; PAM sequence: CTT
atacaaaaatcaattcaaga

SEQ ID NO: 194153 - DNA, 20 bp, Artificial Sequence
  Description of Artificial Sequence: Synthetic oligonucleotide
  Target: LAMA2; (-) strand; PAM type: YTN; PAM sequence: TTA
caccttatacaaaaatcaat

SEQ ID NO: 194154 - DNA, 20 bp, Artificial Sequence
  Description of Artificial Sequence: Synthetic oligonucleotide
  Target: LAMA2; (-) strand; PAM type: YTN; PAM sequence: CTT
acaccttatacaaaaatcaa

SEQ ID NO: 194155 - DNA, 20 bp, Artificial Sequence
  Description of Artificial Sequence: Synthetic oligonucleotide
  Target: LAMA2; (-) strand; PAM type: YTN; PAM sequence: TTC
cttacaccttatacaaaaat

SEQ ID NO: 194156 - DNA, 20 bp, Artificial Sequence
  Description of Artificial Sequence: Synthetic oligonucleotide
  Target: LAMA2; (-) strand; PAM type: YTN; PAM sequence: CTT
ccttacaccttatacaaaaa

SEQ ID NO: 194157 - DNA, 20 bp, Artificial Sequence
  Description of Artificial Sequence: Synthetic oligonucleotide
  Target: LAMA2; (-) strand; PAM type: YTN; PAM sequence: CTG
gatcccttccttacacctta

SEQ ID NO: 194158 - DNA, 20 bp, Artificial Sequence
  Description of Artificial Sequence: Synthetic oligonucleotide
  Target: LAMA2; (-) strand; PAM type: YTN; PAM sequence: CTG
aaactggatcccttccttac

SEQ ID NO: 194159 - DNA, 20 bp, Artificial Sequence
  Description of Artificial Sequence: Synthetic oligonucleotide
  Target: LAMA2; (-) strand; PAM type: YTN; PAM sequence: CTA
gccatatgtagaaagctgaa

SEQ ID NO: 194160 - DNA, 20 bp, Artificial Sequence
  Description of Artificial Sequence: Synthetic oligonucleotide
  Target: LAMA2; (-) strand; PAM type: YTN; PAM sequence: CTG
gctagccatatgtagaaagc

SEQ ID NO: 194161 - DNA, 20 bp, Artificial Sequence
  Description of Artificial Sequence: Synthetic oligonucleotide
  Target: LAMA2; (-) strand; PAM type: YTN; PAM sequence: CTG
ggaaaactggctagccatat

SEQ ID NO: 194162 - DNA, 20 bp, Artificial Sequence
  Description of Artificial Sequence: Synthetic oligonucleotide
  Target: LAMA2; (-) strand; PAM type: YTN; PAM sequence: TTA
ataaatggtgctgggaaaac

SEQ ID NO: 194163 - DNA, 20 bp, Artificial Sequence
  Description of Artificial Sequence: Synthetic oligonucleotide
  Target: LAMA2; (-) strand; PAM type: YTN; PAM sequence: TTT
aataaatggtgctgggaaaa

SEQ ID NO: 194164 - DNA, 20 bp, Artificial Sequence
  Description of Artificial Sequence: Synthetic oligonucleotide
  Target: LAMA2; (-) strand; PAM type: YTN; PAM sequence: CTA
tttaataaatggtgctggga

SEQ ID NO: 194165 - DNA, 20 bp, Artificial Sequence
  Description of Artificial Sequence: Synthetic oligonucleotide
  Target: LAMA2; (-) strand; PAM type: YTN; PAM sequence: TTC
cctatttaataaatggtgct

SEQ ID NO: 194166 - DNA, 20 bp, Artificial Sequence
  Description of Artificial Sequence: Synthetic oligonucleotide
  Target: LAMA2; (-) strand; PAM type: YTN; PAM sequence: CTG
agaaaaacaagcaatgcgga

SEQ ID NO: 194167 - DNA, 20 bp, Artificial Sequence
  Description of Artificial Sequence: Synthetic oligonucleotide
  Target: LAMA2; (-) strand; PAM type: YTN; PAM sequence: TTG
acaaacctgagaaaaacaag

SEQ ID NO: 194168 - DNA, 20 bp, Artificial Sequence
  Description of Artificial Sequence: Synthetic oligonucleotide
  Target: LAMA2; (-) strand; PAM type: YTN; PAM sequence: TTT
gacaaacctgagaaaaacaa

SEQ ID NO: 194169 - DNA, 20 bp, Artificial Sequence
  Description of Artificial Sequence: Synthetic oligonucleotide
  Target: LAMA2; (-) strand; PAM type: YTN; PAM sequence: CTT
tgacaaacctgagaaaaaca

SEQ ID NO: 194170 - DNA, 20 bp, Artificial Sequence
  Description of Artificial Sequence: Synthetic oligonucleotide
  Target: LAMA2; (-) strand; PAM type: YTN; PAM sequence: CTG
atctttgacaaacctgagaa

SEQ ID NO: 194171 - DNA, 20 bp, Artificial Sequence
  Description of Artificial Sequence: Synthetic oligonucleotide
  Target: LAMA2; (-) strand; PAM type: YTN; PAM sequence: CTA
tctgatctttgacaaacctg

SEQ ID NO: 194172 - DNA, 20 bp, Artificial Sequence
  Description of Artificial Sequence: Synthetic oligonucleotide
  Target: LAMA2; (-) strand; PAM type: YTN; PAM sequence: CTA
caactatctgatctttgaca

SEQ ID NO: 194173 - DNA, 20 bp, Artificial Sequence
  Description of Artificial Sequence: Synthetic oligonucleotide
  Target: LAMA2; (-) strand; PAM type: YTN; PAM sequence: CTC
agaaataatgccgcatatct

SEQ ID NO: 194174 - DNA, 20 bp, Artificial Sequence
  Description of Artificial Sequence: Synthetic oligonucleotide
  Target: LAMA2; (-) strand; PAM type: YTN; PAM sequence: CTG
gtaccaaaacagagatatag

SEQ ID NO: 194175 - DNA, 20 bp, Artificial Sequence
  Description of Artificial Sequence: Synthetic oligonucleotide
  Target: LAMA2; (-) strand; PAM type: YTN; PAM sequence: CTA
cagtaaccaaaacagcatgg

SEQ ID NO: 194176 - DNA, 20 bp, Artificial Sequence
  Description of Artificial Sequence: Synthetic oligonucleotide
  Target: LAMA2; (-) strand; PAM type: YTN; PAM sequence: CTA
caaggctacagtaaccaaaa

SEQ ID NO: 194177 - DNA, 20 bp, Artificial Sequence
  Description of Artificial Sequence: Synthetic oligonucleotide
  Target: LAMA2; (-) strand; PAM type: YTN; PAM sequence: CTA
tactacaaggctacagtaac

SEQ ID NO: 194178 - DNA, 20 bp, Artificial Sequence
  Description of Artificial Sequence: Synthetic oligonucleotide
  Target: LAMA2; (-) strand; PAM type: YTN; PAM sequence: TTC
aaactatactacaaggctac

SEQ ID NO: 194179 - DNA, 20 bp, Artificial Sequence
  Description of Artificial Sequence: Synthetic oligonucleotide
  Target: LAMA2; (-) strand; PAM type: YTN; PAM sequence: CTT
caaactatactacaaggcta

SEQ ID NO: 194180 - DNA, 20 bp, Artificial Sequence
  Description of Artificial Sequence: Synthetic oligonucleotide
  Target: LAMA2; (-) strand; PAM type: YTN; PAM sequence: CTG
acttcaaactatactacaag

SEQ ID NO: 194181 - DNA, 20 bp, Artificial Sequence
  Description of Artificial Sequence: Synthetic oligonucleotide
  Target: LAMA2; (-) strand; PAM type: YTN; PAM sequence: CTA
cctgacttcaaactatacta

SEQ ID NO: 194182 - DNA, 20 bp, Artificial Sequence
  Description of Artificial Sequence: Synthetic oligonucleotide
  Target: LAMA2; (-) strand; PAM type: YTN; PAM sequence: CTG
gaggcatcacactacctgac

SEQ ID NO: 194183 - DNA, 20 bp, Artificial Sequence
  Description of Artificial Sequence: Synthetic oligonucleotide
  Target: LAMA2; (-) strand; PAM type: YTN; PAM sequence: CTA
agccaaaagaacaaagctgg

SEQ ID NO: 194184 - DNA, 20 bp, Artificial Sequence
  Description of Artificial Sequence: Synthetic oligonucleotide
  Target: LAMA2; (-) strand; PAM type: YTN; PAM sequence: TTC
atatggaaccaaaaaagagc

SEQ ID NO: 194185 - DNA, 20 bp, Artificial Sequence
  Description of Artificial Sequence: Synthetic oligonucleotide
  Target: LAMA2; (-) strand; PAM type: YTN; PAM sequence: TTA
aagttcatatggaaccaaaa

SEQ ID NO: 194186 - DNA, 20 bp, Artificial Sequence
  Description of Artificial Sequence: Synthetic oligonucleotide
  Target: LAMA2; (-) strand; PAM type: YTN; PAM sequence: TTT
aaagttcatatggaaccaaa

SEQ ID NO: 194187 - DNA, 20 bp, Artificial Sequence
  Description of Artificial Sequence: Synthetic oligonucleotide
  Target: LAMA2; (-) strand; PAM type: YTN; PAM sequence: CTT
taaagttcatatggaaccaa

SEQ ID NO: 194188 - DNA, 20 bp, Artificial Sequence
  Description of Artificial Sequence: Synthetic oligonucleotide
  Target: LAMA2; (-) strand; PAM type: YTN; PAM sequence: CTA
ctttaaagttcatatggaac

SEQ ID NO: 194189 - DNA, 20 bp, Artificial Sequence
  Description of Artificial Sequence: Synthetic oligonucleotide
  Target: LAMA2; (-) strand; PAM type: YTN; PAM sequence: TTG
gaaaaaactactttaaagtt

SEQ ID NO: 194190 - DNA, 20 bp, Artificial Sequence
  Description of Artificial Sequence: Synthetic oligonucleotide
  Target: LAMA2; (-) strand; PAM type: YTN; PAM sequence: TTC
acagagttggaaaaaactac

SEQ ID NO: 194191 - DNA, 20 bp, Artificial Sequence
  Description of Artificial Sequence: Synthetic oligonucleotide
  Target: LAMA2; (-) strand; PAM type: YTN; PAM sequence: CTT
cacagagttggaaaaaacta

SEQ ID NO: 194192 - DNA, 20 bp, Artificial Sequence
  Description of Artificial Sequence: Synthetic oligonucleotide
  Target: LAMA2; (-) strand; PAM type: YTN; PAM sequence: TTC
ttcacagagttggaaaaaac

SEQ ID NO: 194193 - DNA, 20 bp, Artificial Sequence
  Description of Artificial Sequence: Synthetic oligonucleotide
  Target: LAMA2; (-) strand; PAM type: YTN; PAM sequence: TTT
cttcacagagttggaaaaaa

SEQ ID NO: 194194 - DNA, 20 bp, Artificial Sequence
  Description of Artificial Sequence: Synthetic oligonucleotide
  Target: LAMA2; (-) strand; PAM type: YTN; PAM sequence: CTT
tcttcacagagttggaaaaa

SEQ ID NO: 194195 - DNA, 20 bp, Artificial Sequence
  Description of Artificial Sequence: Synthetic oligonucleotide
  Target: LAMA2; (-) strand; PAM type: YTN; PAM sequence: CTA
ccaatgactttcttcacaga

SEQ ID NO: 194196 - DNA, 20 bp, Artificial Sequence
  Description of Artificial Sequence: Synthetic oligonucleotide
  Target: LAMA2; (-) strand; PAM type: YTN; PAM sequence: TTC
ccatcaagctaccaatgact

SEQ ID NO: 194197 - DNA, 20 bp, Artificial Sequence
  Description of Artificial Sequence: Synthetic oligonucleotide
  Target: LAMA2; (-) strand; PAM type: YTN; PAM sequence: TTC
aatgccattcccatcaagct

SEQ ID NO: 194198 - DNA, 20 bp, Artificial Sequence
  Description of Artificial Sequence: Synthetic oligonucleotide
  Target: LAMA2; (-) strand; PAM type: YTN; PAM sequence: TTA
cagattcaatgccattccca

SEQ ID NO: 194199 - DNA, 20 bp, Artificial Sequence
  Description of Artificial Sequence: Synthetic oligonucleotide
  Target: LAMA2; (-) strand; PAM type: YTN; PAM sequence: TTT
acagattcaatgccattccc

SEQ ID NO: 194200 - DNA, 20 bp, Artificial Sequence
  Description of Artificial Sequence: Synthetic oligonucleotide
  Target: LAMA2; (-) strand; PAM type: YTN; PAM sequence: CTG
cccaaggtaatttacagatt

SEQ ID NO: 194201 - DNA, 20 bp, Artificial Sequence
  Description of Artificial Sequence: Synthetic oligonucleotide
  Target: LAMA2; (-) strand; PAM type: YTN; PAM sequence: CTC
atgggtaggaagaatcaata

SEQ ID NO: 194202 - DNA, 20 bp, Artificial Sequence
  Description of Artificial Sequence: Synthetic oligonucleotide
  Target: LAMA2; (-) strand; PAM type: YTN; PAM sequence: TTC
catgctcatgggtaggaaga

SEQ ID NO: 194203 - DNA, 20 bp, Artificial Sequence
  Description of Artificial Sequence: Synthetic oligonucleotide
  Target: LAMA2; (-) strand; PAM type: YTN; PAM sequence: CTC
aaggaaataaaagaggatac

SEQ ID NO: 194204 - DNA, 20 bp, Artificial Sequence
  Description of Artificial Sequence: Synthetic oligonucleotide
  Target: LAMA2; (-) strand; PAM type: YTN; PAM sequence: CTG
ctcaaggaaataaaagagga

SEQ ID NO: 194205 - DNA, 20 bp, Artificial Sequence
  Description of Artificial Sequence: Synthetic oligonucleotide
  Target: LAMA2; (-) strand; PAM type: YTN; PAM sequence: CTA
caaaccactgctcaaggaaa

SEQ ID NO: 194206 - DNA, 20 bp, Artificial Sequence
  Description of Artificial Sequence: Synthetic oligonucleotide
  Target: LAMA2; (-) strand; PAM type: YTN; PAM sequence: TTC
aaggagaactacaaaccact

SEQ ID NO: 194207 - DNA, 20 bp, Artificial Sequence
  Description of Artificial Sequence: Synthetic oligonucleotide
  Target: LAMA2; (-) strand; PAM type: YTN; PAM sequence: CTT
caaggagaactacaaaccac

SEQ ID NO: 194208 - DNA, 20 bp, Artificial Sequence
  Description of Artificial Sequence: Synthetic oligonucleotide
  Target: LAMA2; (-) strand; PAM type: YTN; PAM sequence: CTC
ttcaaggagaactacaaacc

SEQ ID NO: 194209 - DNA, 20 bp, Artificial Sequence
  Description of Artificial Sequence: Synthetic oligonucleotide
  Target: LAMA2; (-) strand; PAM type: YTN; PAM sequence: TTA
caagggatgtgaaggacctc

SEQ ID NO: 194210 - DNA, 20 bp, Artificial Sequence
  Description of Artificial Sequence: Synthetic oligonucleotide
  Target: LAMA2; (-) strand; PAM type: YTN; PAM sequence: CTT
acaagggatgtgaaggacct

SEQ ID NO: 194211 - DNA, 20 bp, Artificial Sequence
  Description of Artificial Sequence: Synthetic oligonucleotide
  Target: LAMA2; (-) strand; PAM type: YTN; PAM sequence: CTA
ggaatccaacttacaaggga

SEQ ID NO: 194212 - DNA, 20 bp, Artificial Sequence
  Description of Artificial Sequence: Synthetic oligonucleotide
  Target: LAMA2; (-) strand; PAM type: YTN; PAM sequence: CTA
aaatacctaggaatccaact

SEQ ID NO: 194213 - DNA, 20 bp, Artificial Sequence
  Description of Artificial Sequence: Synthetic oligonucleotide
  Target: LAMA2; (-) strand; PAM type: YTN; PAM sequence: TTC
taaaatacctaggaatccaa

SEQ ID NO: 194214 - DNA, 20 bp, Artificial Sequence
  Description of Artificial Sequence: Synthetic oligonucleotide
  Target: LAMA2; (-) strand; PAM type: YTN; PAM sequence: TTA
aaacaacagacattctaaaa

SEQ ID NO: 194215 - DNA, 20 bp, Artificial Sequence
  Description of Artificial Sequence: Synthetic oligonucleotide
  Target: LAMA2; (-) strand; PAM type: YTN; PAM sequence: CTT
aaaacaacagacattctaaa

SEQ ID NO: 194216 - DNA, 20 bp, Artificial Sequence
  Description of Artificial Sequence: Synthetic oligonucleotide
  Target: LAMA2; (-) strand; PAM type: YTN; PAM sequence: CTA
ggtggcttaaaacaacagac

SEQ ID NO: 194217 - DNA, 20 bp, Artificial Sequence
  Description of Artificial Sequence: Synthetic oligonucleotide
  Target: LAMA2; (-) strand; PAM type: YTN; PAM sequence: CTG
ccataataaatgaccacaaa

SEQ ID NO: 194218 - DNA, 20 bp, Artificial Sequence
  Description of Artificial Sequence: Synthetic oligonucleotide
  Target: LAMA2; (-) strand; PAM type: YTN; PAM sequence: CTA
ggactgccataataaatgac

SEQ ID NO: 194219 - DNA, 20 bp, Artificial Sequence
  Description of Artificial Sequence: Synthetic oligonucleotide
  Target: LAMA2; (-) strand; PAM type: YTN; PAM sequence: TTC
taggactgccataataaatg

SEQ ID NO: 194220 - DNA, 20 bp, Artificial Sequence
  Description of Artificial Sequence: Synthetic oligonucleotide
  Target: LAMA2; (-) strand; PAM type: YTN; PAM sequence: TTT
ctaggactgccataataaat

SEQ ID NO: 194221 - DNA, 20 bp, Artificial Sequence
  Description of Artificial Sequence: Synthetic oligonucleotide
  Target: LAMA2; (-) strand; PAM type: YTN; PAM sequence: TTT
tctaggactgccataataaa

SEQ ID NO: 194222 - DNA, 20 bp, Artificial Sequence
  Description of Artificial Sequence: Synthetic oligonucleotide
  Target: LAMA2; (-) strand; PAM type: YTN; PAM sequence: TTA
gttttctaggactgccataa

SEQ ID NO: 194223 - DNA, 20 bp, Artificial Sequence
  Description of Artificial Sequence: Synthetic oligonucleotide
  Target: LAMA2; (-) strand; PAM type: YTN; PAM sequence: CTT
agttttctaggactgccata

SEQ ID NO: 194224 - DNA, 20 bp, Artificial Sequence
  Description of Artificial Sequence: Synthetic oligonucleotide
  Target: LAMA2; (-) strand; PAM type: YTN; PAM sequence: TTA
ggtatcttagttttctagga

SEQ ID NO: 194225 - DNA, 20 bp, Artificial Sequence
  Description of Artificial Sequence: Synthetic oligonucleotide
  Target: LAMA2; (-) strand; PAM type: YTN; PAM sequence: TTT
aggtatcttagttttctagg

SEQ ID NO: 194226 - DNA, 20 bp, Artificial Sequence
  Description of Artificial Sequence: Synthetic oligonucleotide
  Target: LAMA2; (-) strand; PAM type: YTN; PAM sequence: CTA
atttaggtatcttagttttc

SEQ ID NO: 194227 - DNA, 20 bp, Artificial Sequence
  Description of Artificial Sequence: Synthetic oligonucleotide
  Target: LAMA2; (-) strand; PAM type: YTN; PAM sequence: TTC
ctaatttaggtatcttagtt

SEQ ID NO: 194228 - DNA, 20 bp, Artificial Sequence
  Description of Artificial Sequence: Synthetic oligonucleotide
  Target: LAMA2; (-) strand; PAM type: YTN; PAM sequence: TTT
cctaatttaggtatcttagt

SEQ ID NO: 194229 - DNA, 20 bp, Artificial Sequence
  Description of Artificial Sequence: Synthetic oligonucleotide
  Target: LAMA2; (-) strand; PAM type: YTN; PAM sequence: TTG
tttcctaatttaggtatctt

SEQ ID NO: 194230 - DNA, 20 bp, Artificial Sequence
  Description of Artificial Sequence: Synthetic oligonucleotide
  Target: LAMA2; (-) strand; PAM type: YTN; PAM sequence: TTT
gtttcctaatttaggtatct

SEQ ID NO: 194231 - DNA, 20 bp, Artificial Sequence
  Description of Artificial Sequence: Synthetic oligonucleotide
  Target: LAMA2; (-) strand; PAM type: YTN; PAM sequence: TTA
tatttgtttcctaatttagg

SEQ ID NO: 194232 - DNA, 20 bp, Artificial Sequence
  Description of Artificial Sequence: Synthetic oligonucleotide
  Target: LAMA2; (-) strand; PAM type: YTN; PAM sequence: TTA
atatagttatatttgtttcc

SEQ ID NO: 194233 - DNA, 20 bp, Artificial Sequence
  Description of Artificial Sequence: Synthetic oligonucleotide
  Target: LAMA2; (-) strand; PAM type: YTN; PAM sequence: TTT
aatatagttatatttgtttc

SEQ ID NO: 194234 - DNA, 20 bp, Artificial Sequence
  Description of Artificial Sequence: Synthetic oligonucleotide
  Target: LAMA2; (-) strand; PAM type: YTN; PAM sequence: TTT
taatatagttatatttgttt

SEQ ID NO: 194235 - DNA, 20 bp, Artificial Sequence
  Description of Artificial Sequence: Synthetic oligonucleotide
  Target: LAMA2; (-) strand; PAM type: YTN; PAM sequence: CTT
ttaatatagttatatttgtt

SEQ ID NO: 194236 - DNA, 20 bp, Artificial Sequence
  Description of Artificial Sequence: Synthetic oligonucleotide
  Target: LAMA2; (-) strand; PAM type: YTN; PAM sequence: CTA
tccccttttaatatagttat

SEQ ID NO: 194237 - DNA, 20 bp, Artificial Sequence
  Description of Artificial Sequence: Synthetic oligonucleotide
  Target: LAMA2; (-) strand; PAM type: YTN; PAM sequence: TTG
gatatactatccccttttaa

SEQ ID NO: 194238 - DNA, 20 bp, Artificial Sequence
  Description of Artificial Sequence: Synthetic oligonucleotide
  Target: LAMA2; (-) strand; PAM type: YTN; PAM sequence: TTA
aatatattggatatactatc

SEQ ID NO: 194239 - DNA, 20 bp, Artificial Sequence
  Description of Artificial Sequence: Synthetic oligonucleotide
  Target: LAMA2; (-) strand; PAM type: YTN; PAM sequence: CTG
tattaaatatattggatata

SEQ ID NO: 194240 - DNA, 20 bp, Artificial Sequence
  Description of Artificial Sequence: Synthetic oligonucleotide
  Target: LAMA2; (-) strand; PAM type: YTN; PAM sequence: TTC
tgtattaaatatattggata

SEQ ID NO: 194241 - DNA, 20 bp, Artificial Sequence
  Description of Artificial Sequence: Synthetic oligonucleotide
  Target: LAMA2; (-) strand; PAM type: YTN; PAM sequence: TTT
ctgtattaaatatattggat

SEQ ID NO: 194242 - DNA, 20 bp, Artificial Sequence
  Description of Artificial Sequence: Synthetic oligonucleotide
  Target: LAMA2; (-) strand; PAM type: YTN; PAM sequence: CTT
tctgtattaaatatattgga

SEQ ID NO: 194243 - DNA, 20 bp, Artificial Sequence
  Description of Artificial Sequence: Synthetic oligonucleotide
  Target: LAMA2; (-) strand; PAM type: YTN; PAM sequence: TTC
atcctttctgtattaaatat

SEQ ID NO: 194244 - DNA, 20 bp, Artificial Sequence
  Description of Artificial Sequence: Synthetic oligonucleotide
  Target: LAMA2; (-) strand; PAM type: YTN; PAM sequence: CTT
catcctttctgtattaaata

SEQ ID NO: 194245 - DNA, 20 bp, Artificial Sequence
  Description of Artificial Sequence: Synthetic oligonucleotide
  Target: LAMA2; (-) strand; PAM type: YTN; PAM sequence: CTA
tatcttcatcctttctgtat

SEQ ID NO: 194246 - DNA, 20 bp, Artificial Sequence
  Description of Artificial Sequence: Synthetic oligonucleotide
  Target: LAMA2; (-) strand; PAM type: YTN; PAM sequence: CTA
tctatatcttcatcctttct

SEQ ID NO: 194247 - DNA, 20 bp, Artificial Sequence
  Description of Artificial Sequence: Synthetic oligonucleotide
  Target: LAMA2; (-) strand; PAM type: YTN; PAM sequence: CTA
ctatctatatcttcatcctt

SEQ ID NO: 194248 - DNA, 20 bp, Artificial Sequence
  Description of Artificial Sequence: Synthetic oligonucleotide
  Target: LAMA2; (-) strand; PAM type: YTN; PAM sequence: TTC
tactatctatatcttcatcc

SEQ ID NO: 194249 - DNA, 20 bp, Artificial Sequence
  Description of Artificial Sequence: Synthetic oligonucleotide
  Target: LAMA2; (-) strand; PAM type: YTN; PAM sequence: CTG
atcattctactatctatatc

SEQ ID NO: 194250 - DNA, 20 bp, Artificial Sequence
  Description of Artificial Sequence: Synthetic oligonucleotide
  Target: LAMA2; (-) strand; PAM type: YTN; PAM sequence: CTC
tgatcattctactatctata

SEQ ID NO: 194251 - DNA, 20 bp, Artificial Sequence
  Description of Artificial Sequence: Synthetic oligonucleotide
  Target: LAMA2; (-) strand; PAM type: YTN; PAM sequence: TTC
ctctgatcattctactatct

SEQ ID NO: 194252 - DNA, 20 bp, Artificial Sequence
  Description of Artificial Sequence: Synthetic oligonucleotide
  Target: LAMA2; (-) strand; PAM type: YTN; PAM sequence: TTA
ttcctctgatcattctacta

SEQ ID NO: 194253 - DNA, 20 bp, Artificial Sequence
  Description of Artificial Sequence: Synthetic oligonucleotide
  Target: LAMA2; (-) strand; PAM type: YTN; PAM sequence: TTA
ttattcctctgatcattcta

SEQ ID NO: 194254 - DNA, 20 bp, Artificial Sequence
  Description of Artificial Sequence: Synthetic oligonucleotide
  Target: LAMA2; (-) strand; PAM type: YTN; PAM sequence: TTG
agaacagtgggaaaaaaatt

SEQ ID NO: 194255 - DNA, 20 bp, Artificial Sequence
  Description of Artificial Sequence: Synthetic oligonucleotide
  Target: LAMA2; (-) strand; PAM type: YTN; PAM sequence: TTA
gcagtgatattgagaacagt

SEQ ID NO: 194256 - DNA, 20 bp, Artificial Sequence
  Description of Artificial Sequence: Synthetic oligonucleotide
  Target: LAMA2; (-) strand; PAM type: YTN; PAM sequence: TTA
taggaattagcagtgatatt

SEQ ID NO: 194257 - DNA, 20 bp, Artificial Sequence
  Description of Artificial Sequence: Synthetic oligonucleotide
  Target: LAMA2; (-) strand; PAM type: YTN; PAM sequence: CTT
ataggaattagcagtgatat

SEQ ID NO: 194258 - DNA, 20 bp, Artificial Sequence
  Description of Artificial Sequence: Synthetic oligonucleotide
  Target: LAMA2; (-) strand; PAM type: YTN; PAM sequence: TTC
ttataggaattagcagtgat

SEQ ID NO: 194259 - DNA, 20 bp, Artificial Sequence
  Description of Artificial Sequence: Synthetic oligonucleotide
  Target: LAMA2; (-) strand; PAM type: YTN; PAM sequence: TTG
tgttcttataggaattagca

SEQ ID NO: 194260 - DNA, 20 bp, Artificial Sequence
  Description of Artificial Sequence: Synthetic oligonucleotide
  Target: LAMA2; (-) strand; PAM type: YTN; PAM sequence: TTG
agtaattgtgttcttatagg

SEQ ID NO: 194261 - DNA, 20 bp, Artificial Sequence
  Description of Artificial Sequence: Synthetic oligonucleotide
  Target: LAMA2; (-) strand; PAM type: YTN; PAM sequence: TTA
gtgattgagtaattgtgttc

SEQ ID NO: 194262 - DNA, 20 bp, Artificial Sequence
  Description of Artificial Sequence: Synthetic oligonucleotide
  Target: LAMA2; (-) strand; PAM type: YTN; PAM sequence: CTA
cagcagattagtgattgagt

SEQ ID NO: 194263 - DNA, 20 bp, Artificial Sequence
  Description of Artificial Sequence: Synthetic oligonucleotide
  Target: LAMA2; (-) strand; PAM type: YTN; PAM sequence: CTA
ctacagcagattagtgattg

SEQ ID NO: 194264 - DNA, 20 bp, Artificial Sequence
  Description of Artificial Sequence: Synthetic oligonucleotide
  Target: LAMA2; (-) strand; PAM type: YTN; PAM sequence: TTA
gcatcaatcagactactaca

SEQ ID NO: 194265 - DNA, 20 bp, Artificial Sequence
  Description of Artificial Sequence: Synthetic oligonucleotide
  Target: LAMA2; (-) strand; PAM type: YTN; PAM sequence: CTT
agcatcaatcagactactac

SEQ ID NO: 194266 - DNA, 20 bp, Artificial Sequence
  Description of Artificial Sequence: Synthetic oligonucleotide
  Target: LAMA2; (-) strand; PAM type: YTN; PAM sequence: CTG
cagcatggcttagcatcaat

SEQ ID NO: 194267 - DNA, 20 bp, Artificial Sequence
  Description of Artificial Sequence: Synthetic oligonucleotide
  Target: LAMA2; (-) strand; PAM type: YTN; PAM sequence: TTC
ctgcagcatggcttagcatc

SEQ ID NO: 194268 - DNA, 20 bp, Artificial Sequence
  Description of Artificial Sequence: Synthetic oligonucleotide
  Target: LAMA2; (-) strand; PAM type: YTN; PAM sequence: TTC
attcctgcagcatggcttag

SEQ ID NO: 194269 - DNA, 20 bp, Artificial Sequence
  Description of Artificial Sequence: Synthetic oligonucleotide
  Target: LAMA2; (-) strand; PAM type: YTN; PAM sequence: TTA
ttcattcctgcagcatggct

SEQ ID NO: 194270 - DNA, 20 bp, Artificial Sequence
  Description of Artificial Sequence: Synthetic oligonucleotide
  Target: LAMA2; (-) strand; PAM type: YTN; PAM sequence: TTT
attcattcctgcagcatggc

SEQ ID NO: 194271 - DNA, 20 bp, Artificial Sequence
  Description of Artificial Sequence: Synthetic oligonucleotide
  Target: LAMA2; (-) strand; PAM type: YTN; PAM sequence: TTG
ggggtttattcattcctgca

SEQ ID NO: 194272 - DNA, 20 bp, Artificial Sequence
  Description of Artificial Sequence: Synthetic oligonucleotide
  Target: LAMA2; (-) strand; PAM type: YTN; PAM sequence: TTT
gggggtttattcattcctgc

SEQ ID NO: 194273 - DNA, 20 bp, Artificial Sequence
  Description of Artificial Sequence: Synthetic oligonucleotide
  Target: LAMA2; (-) strand; PAM type: YTN; PAM sequence: TTA
agatttgggggtttattcat

SEQ ID NO: 194274 - DNA, 20 bp, Artificial Sequence
  Description of Artificial Sequence: Synthetic oligonucleotide
  Target: LAMA2; (-) strand; PAM type: YTN; PAM sequence: TTT
aagatttgggggtttattca

SEQ ID NO: 194275 - DNA, 20 bp, Artificial Sequence
  Description of Artificial Sequence: Synthetic oligonucleotide
  Target: LAMA2; (-) strand; PAM type: YTN; PAM sequence: TTT
taagatttgggggtttattc

SEQ ID NO: 194276 - DNA, 20 bp, Artificial Sequence
  Description of Artificial Sequence: Synthetic oligonucleotide
  Target: LAMA2; (-) strand; PAM type: YTN; PAM sequence: CTA
agattttaagatttgggggt

SEQ ID NO: 194277 - DNA, 20 bp, Artificial Sequence
  Description of Artificial Sequence: Synthetic oligonucleotide
  Target: LAMA2; (-) strand; PAM type: YTN; PAM sequence: CTA
taatgctaagattttaagat

SEQ ID NO: 194278 - DNA, 20 bp, Artificial Sequence
  Description of Artificial Sequence: Synthetic oligonucleotide
  Target: LAMA2; (-) strand; PAM type: YTN; PAM sequence: CTC
tataatgctaagattttaag

SEQ ID NO: 194279 - DNA, 20 bp, Artificial Sequence
  Description of Artificial Sequence: Synthetic oligonucleotide
  Target: LAMA2; (-) strand; PAM type: YTN; PAM sequence: TTG
agaaataaacctctataatg

SEQ ID NO: 194280 - DNA, 20 bp, Artificial Sequence
  Description of Artificial Sequence: Synthetic oligonucleotide
  Target: LAMA2; (-) strand; PAM type: YTN; PAM sequence: TTG
catcattgagaaataaacct

SEQ ID NO: 194281 - DNA, 20 bp, Artificial Sequence
  Description of Artificial Sequence: Synthetic oligonucleotide
  Target: LAMA2; (-) strand; PAM type: YTN; PAM sequence: TTG
tcattgcatcattgagaaat

SEQ ID NO: 194282 - DNA, 20 bp, Artificial Sequence
  Description of Artificial Sequence: Synthetic oligonucleotide
  Target: LAMA2; (-) strand; PAM type: YTN; PAM sequence: TTT
gtcattgcatcattgagaaa

SEQ ID NO: 194283 - DNA, 20 bp, Artificial Sequence
  Description of Artificial Sequence: Synthetic oligonucleotide
  Target: LAMA2; (-) strand; PAM type: YTN; PAM sequence: CTG
tatttgtcattgcatcattg

SEQ ID NO: 194284 - DNA, 20 bp, Artificial Sequence
  Description of Artificial Sequence: Synthetic oligonucleotide
  Target: LAMA2; (-) strand; PAM type: YTN; PAM sequence: CTG
agtcaccagatggacctgta

SEQ ID NO: 194285 - DNA, 20 bp, Artificial Sequence
  Description of Artificial Sequence: Synthetic oligonucleotide
  Target: LAMA2; (-) strand; PAM type: YTN; PAM sequence: CTG
ggaccctgagtcaccagatg

SEQ ID NO: 194286 - DNA, 20 bp, Artificial Sequence
  Description of Artificial Sequence: Synthetic oligonucleotide
  Target: LAMA2; (-) strand; PAM type: YTN; PAM sequence: TTG
gaaacatcataagcggagga

SEQ ID NO: 194287 - DNA, 20 bp, Artificial Sequence
  Description of Artificial Sequence: Synthetic oligonucleotide
  Target: LAMA2; (-) strand; PAM type: YTN; PAM sequence: CTG
agttggaaacatcataagcg

SEQ ID NO: 194288 - DNA, 20 bp, Artificial Sequence
  Description of Artificial Sequence: Synthetic oligonucleotide
  Target: LAMA2; (-) strand; PAM type: YTN; PAM sequence: TTC
ctgagttggaaacatcataa

SEQ ID NO: 194289 - DNA, 20 bp, Artificial Sequence
  Description of Artificial Sequence: Synthetic oligonucleotide
  Target: LAMA2; (-) strand; PAM type: YTN; PAM sequence: TTT
cctgagttggaaacatcata

SEQ ID NO: 194290 - DNA, 20 bp, Artificial Sequence
  Description of Artificial Sequence: Synthetic oligonucleotide
  Target: LAMA2; (-) strand; PAM type: YTN; PAM sequence: CTG
ccatagcaaccataaaaggc

SEQ ID NO: 194291 - DNA, 20 bp, Artificial Sequence
  Description of Artificial Sequence: Synthetic oligonucleotide
  Target: LAMA2; (-) strand; PAM type: YTN; PAM sequence: CTC
tgccatagcaaccataaaag

SEQ ID NO: 194292 - DNA, 20 bp, Artificial Sequence
  Description of Artificial Sequence: Synthetic oligonucleotide
  Target: LAMA2; (-) strand; PAM type: YTN; PAM sequence: TTC
ctctgccatagcaaccataa

SEQ ID NO: 194293 - DNA, 20 bp, Artificial Sequence
  Description of Artificial Sequence: Synthetic oligonucleotide
  Target: LAMA2; (-) strand; PAM type: YTN; PAM sequence: CTT
cctctgccatagcaaccata

SEQ ID NO: 194294 - DNA, 20 bp, Artificial Sequence
  Description of Artificial Sequence: Synthetic oligonucleotide
  Target: LAMA2; (-) strand; PAM type: YTN; PAM sequence: CTC
ttcctctgccatagcaacca

SEQ ID NO: 194295 - DNA, 20 bp, Artificial Sequence
  Description of Artificial Sequence: Synthetic oligonucleotide
  Target: LAMA2; (-) strand; PAM type: YTN; PAM sequence: CTC
tcttcctctgccatagcaac

SEQ ID NO: 194296 - DNA, 20 bp, Artificial Sequence
  Description of Artificial Sequence: Synthetic oligonucleotide
  Target: LAMA2; (-) strand; PAM type: YTN; PAM sequence: CTC
ctctcttcctctgccatagc

SEQ ID NO: 194297 - DNA, 20 bp, Artificial Sequence
  Description of Artificial Sequence: Synthetic oligonucleotide
  Target: LAMA2; (-) strand; PAM type: YTN; PAM sequence: CTC
cccactcctctcttcctctg

SEQ ID NO: 194298 - DNA, 20 bp, Artificial Sequence
  Description of Artificial Sequence: Synthetic oligonucleotide
  Target: LAMA2; (-) strand; PAM type: YTN; PAM sequence: CTA
ggtgccagctccccactcct

SEQ ID NO: 194299 - DNA, 20 bp, Artificial Sequence
  Description of Artificial Sequence: Synthetic oligonucleotide
  Target: LAMA2; (-) strand; PAM type: YTN; PAM sequence: CTG
aagacctaggtgccagctcc

SEQ ID NO: 194300 - DNA, 20 bp, Artificial Sequence
  Description of Artificial Sequence: Synthetic oligonucleotide
  Target: LAMA2; (-) strand; PAM type: YTN; PAM sequence: CTG
aagcactgaagacctaggtg

SEQ ID NO: 194301 - DNA, 20 bp, Artificial Sequence
  Description of Artificial Sequence: Synthetic oligonucleotide
  Target: LAMA2; (-) strand; PAM type: YTN; PAM sequence: CTA
gctgaagcactgaagaccta

SEQ ID NO: 194302 - DNA, 20 bp, Artificial Sequence
  Description of Artificial Sequence: Synthetic oligonucleotide
  Target: LAMA2; (-) strand; PAM type: YTN; PAM sequence: TTC
ctagctgaagcactgaagac

SEQ ID NO: 194303 - DNA, 20 bp, Artificial Sequence
  Description of Artificial Sequence: Synthetic oligonucleotide
  Target: LAMA2; (-) strand; PAM type: YTN; PAM sequence: CTT
cctagctgaagcactgaaga

SEQ ID NO: 194304 - DNA, 20 bp, Artificial Sequence
  Description of Artificial Sequence: Synthetic oligonucleotide
  Target: LAMA2; (-) strand; PAM type: YTN; PAM sequence: CTA
tgacttcctagctgaagcac

SEQ ID NO: 194305 - DNA, 20 bp, Artificial Sequence
  Description of Artificial Sequence: Synthetic oligonucleotide
  Target: LAMA2; (-) strand; PAM type: YTN; PAM sequence: TTG
taaaaatgtggagcagagtc

SEQ ID NO: 194306 - DNA, 20 bp, Artificial Sequence
  Description of Artificial Sequence: Synthetic oligonucleotide
  Target: LAMA2; (-) strand; PAM type: YTN; PAM sequence: TTA
gattgtaaaaatgtggagca

SEQ ID NO: 194307 - DNA, 20 bp, Artificial Sequence
  Description of Artificial Sequence: Synthetic oligonucleotide
  Target: LAMA2; (-) strand; PAM type: YTN; PAM sequence: CTT
agattgtaaaaatgtggagc

SEQ ID NO: 194308 - DNA, 20 bp, Artificial Sequence
  Description of Artificial Sequence: Synthetic oligonucleotide
  Target: LAMA2; (-) strand; PAM type: YTN; PAM sequence: TTC
ttagattgtaaaaatgtgga

SEQ ID NO: 194309 - DNA, 20 bp, Artificial Sequence
  Description of Artificial Sequence: Synthetic oligonucleotide
  Target: LAMA2; (-) strand; PAM type: YTN; PAM sequence: CTA
ttcttagattgtaaaaatgt

SEQ ID NO: 194310 - DNA, 20 bp, Artificial Sequence
  Description of Artificial Sequence: Synthetic oligonucleotide
  Target: LAMA2; (-) strand; PAM type: YTN; PAM sequence: CTG
actattcttagattgtaaaa

SEQ ID NO: 194311 - DNA, 20 bp, Artificial Sequence
  Description of Artificial Sequence: Synthetic oligonucleotide
  Target: LAMA2; (-) strand; PAM type: YTN; PAM sequence: TTA
agaggggcatctgactattc

SEQ ID NO: 194312 - DNA, 20 bp, Artificial Sequence
  Description of Artificial Sequence: Synthetic oligonucleotide
  Target: LAMA2; (-) strand; PAM type: YTN; PAM sequence: TTG
cagttaagaggggcatctga

SEQ ID NO: 194313 - DNA, 20 bp, Artificial Sequence
  Description of Artificial Sequence: Synthetic oligonucleotide
  Target: LAMA2; (-) strand; PAM type: YTN; PAM sequence: CTT
gcagttaagaggggcatctg

SEQ ID NO: 194314 - DNA, 20 bp, Artificial Sequence
  Description of Artificial Sequence: Synthetic oligonucleotide
  Target: LAMA2; (-) strand; PAM type: YTN; PAM sequence: CTC
agccccttgcagttaagagg

SEQ ID NO: 194315 - DNA, 20 bp, Artificial Sequence
  Description of Artificial Sequence: Synthetic oligonucleotide
  Target: LAMA2; (-) strand; PAM type: YTN; PAM sequence: TTC
tcagccccttgcagttaaga

SEQ ID NO: 194316 - DNA, 20 bp, Artificial Sequence
  Description of Artificial Sequence: Synthetic oligonucleotide
  Target: LAMA2; (-) strand; PAM type: YTN; PAM sequence: CTT
ctcagccccttgcagttaag

SEQ ID NO: 194317 - DNA, 20 bp, Artificial Sequence
  Description of Artificial Sequence: Synthetic oligonucleotide
  Target: LAMA2; (-) strand; PAM type: YTN; PAM sequence: CTA
cacttctcagccccttgcag

SEQ ID NO: 194318 - DNA, 20 bp, Artificial Sequence
  Description of Artificial Sequence: Synthetic oligonucleotide
  Target: LAMA2; (-) strand; PAM type: YTN; PAM sequence: TTC
cctacacttctcagcccctt

SEQ ID NO: 194319 - DNA, 20 bp, Artificial Sequence
  Description of Artificial Sequence: Synthetic oligonucleotide
  Target: LAMA2; (-) strand; PAM type: YTN; PAM sequence: TTG
tgttccctacacttctcagc

SEQ ID NO: 194320 - DNA, 20 bp, Artificial Sequence
  Description of Artificial Sequence: Synthetic oligonucleotide
  Target: LAMA2; (-) strand; PAM type: YTN; PAM sequence: CTT
gtgttccctacacttctcag

SEQ ID NO: 194321 - DNA, 20 bp, Artificial Sequence
  Description of Artificial Sequence: Synthetic oligonucleotide
  Target: LAMA2; (-) strand; PAM type: YTN; PAM sequence: TTC
ttgtgttccctacacttctc

SEQ ID NO: 194322 - DNA, 20 bp, Artificial Sequence
  Description of Artificial Sequence: Synthetic oligonucleotide
  Target: LAMA2; (-) strand; PAM type: YTN; PAM sequence: CTC
aaaaaatattcttgtgttcc

SEQ ID NO: 194323 - DNA, 20 bp, Artificial Sequence
  Description of Artificial Sequence: Synthetic oligonucleotide
  Target: LAMA2; (-) strand; PAM type: YTN; PAM sequence: CTC
tcaaaaaatattcttgtgtt

SEQ ID NO: 194324 - DNA, 20 bp, Artificial Sequence
  Description of Artificial Sequence: Synthetic oligonucleotide
  Target: LAMA2; (-) strand; PAM type: YTN; PAM sequence: TTA
tatgtaagcagagatagtag

SEQ ID NO: 194325 - DNA, 20 bp, Artificial Sequence
  Description of Artificial Sequence: Synthetic oligonucleotide
  Target: LAMA2; (-) strand; PAM type: YTN; PAM sequence: CTG
ccattatatgtaagcagaga

SEQ ID NO: 194326 - DNA, 20 bp, Artificial Sequence
  Description of Artificial Sequence: Synthetic oligonucleotide
  Target: LAMA2; (-) strand; PAM type: YTN; PAM sequence: TTC
tgccattatatgtaagcaga

SEQ ID NO: 194327 - DNA, 20 bp, Artificial Sequence
  Description of Artificial Sequence: Synthetic oligonucleotide
  Target: LAMA2; (-) strand; PAM type: YTN; PAM sequence: CTT
ctgccattatatgtaagcag

SEQ ID NO: 194328 - DNA, 20 bp, Artificial Sequence
  Description of Artificial Sequence: Synthetic oligonucleotide
  Target: LAMA2; (-) strand; PAM type: YTN; PAM sequence: TTC
ttctgccattatatgtaagc

SEQ ID NO: 194329 - DNA, 20 bp, Artificial Sequence
  Description of Artificial Sequence: Synthetic oligonucleotide
  Target: LAMA2; (-) strand; PAM type: YTN; PAM sequence: TTT
cttctgccattatatgtaag

SEQ ID NO: 194330 - DNA, 20 bp, Artificial Sequence
  Description of Artificial Sequence: Synthetic oligonucleotide
  Target: LAMA2; (-) strand; PAM type: YTN; PAM sequence: TTA
ggaggatatttcttctgcca

SEQ ID NO: 194331 - DNA, 20 bp, Artificial Sequence
  Description of Artificial Sequence: Synthetic oligonucleotide
  Target: LAMA2; (-) strand; PAM type: YTN; PAM sequence: TTT
aggaggatatttcttctgcc

SEQ ID NO: 194332 - DNA, 20 bp, Artificial Sequence
  Description of Artificial Sequence: Synthetic oligonucleotide
  Target: LAMA2; (-) strand; PAM type: YTN; PAM sequence: TTA
atagatttaggaggatattt

SEQ ID NO: 194333 - DNA, 20 bp, Artificial Sequence
  Description of Artificial Sequence: Synthetic oligonucleotide
  Target: LAMA2; (-) strand; PAM type: YTN; PAM sequence: TTT
aatagatttaggaggatatt

SEQ ID NO: 194334 - DNA, 20 bp, Artificial Sequence
  Description of Artificial Sequence: Synthetic oligonucleotide
  Target: LAMA2; (-) strand; PAM type: YTN; PAM sequence: TTT
taatagatttaggaggatat

SEQ ID NO: 194335 - DNA, 20 bp, Artificial Sequence
  Description of Artificial Sequence: Synthetic oligonucleotide
  Target: LAMA2; (-) strand; PAM type: YTN; PAM sequence: TTG
agagcatagtatgattttaa

SEQ ID NO: 194336 - DNA, 20 bp, Artificial Sequence
  Description of Artificial Sequence: Synthetic oligonucleotide
  Target: LAMA2; (-) strand; PAM type: YTN; PAM sequence: TTT
gagagcatagtatgatttta

SEQ ID NO: 194337 - DNA, 20 bp, Artificial Sequence
  Description of Artificial Sequence: Synthetic oligonucleotide
  Target: LAMA2; (-) strand; PAM type: YTN; PAM sequence: CTT
tgagagcatagtatgatttt

SEQ ID NO: 194338 - DNA, 20 bp, Artificial Sequence
  Description of Artificial Sequence: Synthetic oligonucleotide
  Target: LAMA2; (-) strand; PAM type: YTN; PAM sequence: CTA
gaatctttgagagcatagta

SEQ ID NO: 194339 - DNA, 20 bp, Artificial Sequence
  Description of Artificial Sequence: Synthetic oligonucleotide
  Target: LAMA2; (-) strand; PAM type: YTN; PAM sequence: TTA
agggagcagctagaatcttt

SEQ ID NO: 194340 - DNA, 20 bp, Artificial Sequence
  Description of Artificial Sequence: Synthetic oligonucleotide
  Target: LAMA2; (-) strand; PAM type: YTN; PAM sequence: TTA
tagcagggataaaatatcaa

SEQ ID NO: 194341 - DNA, 20 bp, Artificial Sequence
  Description of Artificial Sequence: Synthetic oligonucleotide
  Target: LAMA2; (-) strand; PAM type: YTN; PAM sequence: TTG
taaaaattatagcagggata

SEQ ID NO: 194342 - DNA, 20 bp, Artificial Sequence
  Description of Artificial Sequence: Synthetic oligonucleotide
  Target: LAMA2; (-) strand; PAM type: YTN; PAM sequence: CTT
gtaaaaattatagcagggat

SEQ ID NO: 194343 - DNA, 20 bp, Artificial Sequence
  Description of Artificial Sequence: Synthetic oligonucleotide
  Target: LAMA2; (-) strand; PAM type: YTN; PAM sequence: CTA
tgtatacatacatcacacat

SEQ ID NO: 194344 - DNA, 20 bp, Artificial Sequence
  Description of Artificial Sequence: Synthetic oligonucleotide
  Target: LAMA2; (-) strand; PAM type: YTN; PAM sequence: TTG
ggtaatagctatgtatacat

SEQ ID NO: 194345 - DNA, 20 bp, Artificial Sequence
  Description of Artificial Sequence: Synthetic oligonucleotide
  Target: LAMA2; (-) strand; PAM type: YTN; PAM sequence: CTT
gggtaatagctatgtataca

SEQ ID NO: 194346 - DNA, 20 bp, Artificial Sequence
  Description of Artificial Sequence: Synthetic oligonucleotide
  Target: LAMA2; (-) strand; PAM type: YTN; PAM sequence: TTA
atggaaagacttgggtaata

SEQ ID NO: 194347 - DNA, 20 bp, Artificial Sequence
  Description of Artificial Sequence: Synthetic oligonucleotide
  Target: LAMA2; (-) strand; PAM type: YTN; PAM sequence: CTG
gtaaggacaaatataacacc

SEQ ID NO: 194348 - DNA, 20 bp, Artificial Sequence
  Description of Artificial Sequence: Synthetic oligonucleotide
  Target: LAMA2; (-) strand; PAM type: YTN; PAM sequence: TTC
tggtaaggacaaatataaca

SEQ ID NO: 194349 - DNA, 20 bp, Artificial Sequence
  Description of Artificial Sequence: Synthetic oligonucleotide
  Target: LAMA2; (-) strand; PAM type: YTN; PAM sequence: TTA
gcagtcagtagttctggtaa

SEQ ID NO: 194350 - DNA, 20 bp, Artificial Sequence
  Description of Artificial Sequence: Synthetic oligonucleotide
  Target: LAMA2; (-) strand; PAM type: YTN; PAM sequence: TTG
ttagcagtcagtagttctgg

SEQ ID NO: 194351 - DNA, 20 bp, Artificial Sequence
  Description of Artificial Sequence: Synthetic oligonucleotide
  Target: LAMA2; (-) strand; PAM type: YTN; PAM sequence: TTA
tgttgttagcagtcagtagt

SEQ ID NO: 194352 - DNA, 20 bp, Artificial Sequence
  Description of Artificial Sequence: Synthetic oligonucleotide
  Target: LAMA2; (-) strand; PAM type: YTN; PAM sequence: TTT
atgttgttagcagtcagtag

SEQ ID NO: 194353 - DNA, 20 bp, Artificial Sequence
  Description of Artificial Sequence: Synthetic oligonucleotide
  Target: LAMA2; (-) strand; PAM type: YTN; PAM sequence: TTT
tatgttgttagcagtcagta

SEQ ID NO: 194354 - DNA, 20 bp, Artificial Sequence
  Description of Artificial Sequence: Synthetic oligonucleotide
  Target: LAMA2; (-) strand; PAM type: YTN; PAM sequence: TTG
gatggaaaagagttttatgt

SEQ ID NO: 194355 - DNA, 20 bp, Artificial Sequence
  Description of Artificial Sequence: Synthetic oligonucleotide
  Target: LAMA2; (-) strand; PAM type: YTN; PAM sequence: TTT
ggatggaaaagagttttatg

SEQ ID NO: 194356 - DNA, 20 bp, Artificial Sequence
  Description of Artificial Sequence: Synthetic oligonucleotide
  Target: LAMA2; (-) strand; PAM type: YTN; PAM sequence: TTT
tggatggaaaagagttttat

SEQ ID NO: 194357 - DNA, 20 bp, Artificial Sequence
  Description of Artificial Sequence: Synthetic oligonucleotide
  Target: LAMA2; (-) strand; PAM type: YTN; PAM sequence: TTA
aataggaatgattttggatg

SEQ ID NO: 194358 - DNA, 20 bp, Artificial Sequence
  Description of Artificial Sequence: Synthetic oligonucleotide
  Target: LAMA2; (-) strand; PAM type: YTN; PAM sequence: TTT
aaataggaatgattttggat

SEQ ID NO: 194359 - DNA, 20 bp, Artificial Sequence
  Description of Artificial Sequence: Synthetic oligonucleotide
  Target: LAMA2; (-) strand; PAM type: YTN; PAM sequence: CTA
ataaatgtttaaataggaat

SEQ ID NO: 194360 - DNA, 20 bp, Artificial Sequence
  Description of Artificial Sequence: Synthetic oligonucleotide
  Target: LAMA2; (-) strand; PAM type: YTN; PAM sequence: TTG
aacactaataaatgtttaaa

SEQ ID NO: 194361 - DNA, 20 bp, Artificial Sequence
  Description of Artificial Sequence: Synthetic oligonucleotide
  Target: LAMA2; (-) strand; PAM type: YTN; PAM sequence: TTA
gaattgaacactaataaatg

SEQ ID NO: 194362 - DNA, 20 bp, Artificial Sequence
  Description of Artificial Sequence: Synthetic oligonucleotide
  Target: LAMA2; (-) strand; PAM type: YTN; PAM sequence: TTG
aatggtattagaattgaaca

SEQ ID NO: 194363 - DNA, 20 bp, Artificial Sequence
  Description of Artificial Sequence: Synthetic oligonucleotide
  Target: LAMA2; (-) strand; PAM type: YTN; PAM sequence: TTA
tgagcagttgaatggtatta

SEQ ID NO: 194364 - DNA, 20 bp, Artificial Sequence
  Description of Artificial Sequence: Synthetic oligonucleotide
  Target: LAMA2; (-) strand; PAM type: YTN; PAM sequence: TTT
atgagcagttgaatggtatt

SEQ ID NO: 194365 - DNA, 20 bp, Artificial Sequence
  Description of Artificial Sequence: Synthetic oligonucleotide
  Target: LAMA2; (-) strand; PAM type: YTN; PAM sequence: CTT
tatgagcagttgaatggtat

SEQ ID NO: 194366 - DNA, 20 bp, Artificial Sequence
  Description of Artificial Sequence: Synthetic oligonucleotide
  Target: LAMA2; (-) strand; PAM type: YTN; PAM sequence: CTC
ctttatgagcagttgaatgg

SEQ ID NO: 194367 - DNA, 20 bp, Artificial Sequence
  Description of Artificial Sequence: Synthetic oligonucleotide
  Target: LAMA2; (-) strand; PAM type: YTN; PAM sequence: TTC
tcctttatgagcagttgaat

SEQ ID NO: 194368 - DNA, 20 bp, Artificial Sequence
  Description of Artificial Sequence: Synthetic oligonucleotide
  Target: LAMA2; (-) strand; PAM type: YTN; PAM sequence: TTT
ctcctttatgagcagttgaa

SEQ ID NO: 194369 - DNA, 20 bp, Artificial Sequence
  Description of Artificial Sequence: Synthetic oligonucleotide
  Target: LAMA2; (-) strand; PAM type: YTN; PAM sequence: CTT
tctcctttatgagcagttga

SEQ ID NO: 194370 - DNA, 20 bp, Artificial Sequence
  Description of Artificial Sequence: Synthetic oligonucleotide
  Target: LAMA2; (-) strand; PAM type: YTN; PAM sequence: CTC
tttctcctttatgagcagtt

SEQ ID NO: 194371 - DNA, 20 bp, Artificial Sequence
  Description of Artificial Sequence: Synthetic oligonucleotide
  Target: LAMA2; (-) strand; PAM type: YTN; PAM sequence: TTC
ctctttctcctttatgagca

SEQ ID NO: 194372 - DNA, 20 bp, Artificial Sequence
  Description of Artificial Sequence: Synthetic oligonucleotide
  Target: LAMA2; (-) strand; PAM type: YTN; PAM sequence: CTT
cctctttctcctttatgagc

SEQ ID NO: 194373 - DNA, 20 bp, Artificial Sequence
  Description of Artificial Sequence: Synthetic oligonucleotide
  Target: LAMA2; (-) strand; PAM type: YTN; PAM sequence: CTC
ttcctctttctcctttatga

SEQ ID NO: 194374 - DNA, 20 bp, Artificial Sequence
  Description of Artificial Sequence: Synthetic oligonucleotide
  Target: LAMA2; (-) strand; PAM type: YTN; PAM sequence: TTC
tcttcctctttctcctttat

SEQ ID NO: 194375 - DNA, 20 bp, Artificial Sequence
  Description of Artificial Sequence: Synthetic oligonucleotide
  Target: LAMA2; (-) strand; PAM type: YTN; PAM sequence: CTT
ctcttcctctttctccttta

SEQ ID NO: 194376 - DNA, 20 bp, Artificial Sequence
  Description of Artificial Sequence: Synthetic oligonucleotide
  Target: LAMA2; (-) strand; PAM type: YTN; PAM sequence: TTC
cttctcttcctctttctcct

SEQ ID NO: 194377 - DNA, 20 bp, Artificial Sequence
  Description of Artificial Sequence: Synthetic oligonucleotide
  Target: LAMA2; (-) strand; PAM type: YTN; PAM sequence: CTT
ccttctcttcctctttctcc

SEQ ID NO: 194378 - DNA, 20 bp, Artificial Sequence
  Description of Artificial Sequence: Synthetic oligonucleotide
  Target: LAMA2; (-) strand; PAM type: YTN; PAM sequence: CTC
ttccttctcttcctctttct

SEQ ID NO: 194379 - DNA, 20 bp, Artificial Sequence
  Description of Artificial Sequence: Synthetic oligonucleotide
  Target: LAMA2; (-) strand; PAM type: YTN; PAM sequence: CTC
ctcttccttctcttcctctt

SEQ ID NO: 194380 - DNA, 20 bp, Artificial Sequence
  Description of Artificial Sequence: Synthetic oligonucleotide
  Target: LAMA2; (-) strand; PAM type: YTN; PAM sequence: CTC
ctcctcttccttctcttcct

SEQ ID NO: 194381 - DNA, 20 bp, Artificial Sequence
  Description of Artificial Sequence: Synthetic oligonucleotide
  Target: LAMA2; (-) strand; PAM type: YTN; PAM sequence: TTC
tcctcctcttccttctcttc

SEQ ID NO: 194382 - DNA, 20 bp, Artificial Sequence
  Description of Artificial Sequence: Synthetic oligonucleotide
  Target: LAMA2; (-) strand; PAM type: YTN; PAM sequence: TTT
ctcctcctcttccttctctt

SEQ ID NO: 194383 - DNA, 20 bp, Artificial Sequence
  Description of Artificial Sequence: Synthetic oligonucleotide
  Target: LAMA2; (-) strand; PAM type: YTN; PAM sequence: CTG
gaaaatttctcctcctcttc

SEQ ID NO: 194384 - DNA, 20 bp, Artificial Sequence
  Description of Artificial Sequence: Synthetic oligonucleotide
  Target: LAMA2; (-) strand; PAM type: YTN; PAM sequence: TTA
cctggaaaatttctcctcct

SEQ ID NO: 194385 - DNA, 20 bp, Artificial Sequence
  Description of Artificial Sequence: Synthetic oligonucleotide
  Target: LAMA2; (-) strand; PAM type: YTN; PAM sequence: CTT
acctggaaaatttctcctcc

SEQ ID NO: 194386 - DNA, 20 bp, Artificial Sequence
  Description of Artificial Sequence: Synthetic oligonucleotide
  Target: LAMA2; (-) strand; PAM type: YTN; PAM sequence: CTA
taaacttacctggaaaattt

SEQ ID NO: 194387 - DNA, 20 bp, Artificial Sequence
  Description of Artificial Sequence: Synthetic oligonucleotide
  Target: LAMA2; (-) strand; PAM type: YTN; PAM sequence: CTC
tataaacttacctggaaaat

SEQ ID NO: 194388 - DNA, 20 bp, Artificial Sequence
  Description of Artificial Sequence: Synthetic oligonucleotide
  Target: LAMA2; (-) strand; PAM type: YTN; PAM sequence: TTA
ctctataaacttacctggaa

SEQ ID NO: 194389 - DNA, 20 bp, Artificial Sequence
  Description of Artificial Sequence: Synthetic oligonucleotide
  Target: LAMA2; (-) strand; PAM type: YTN; PAM sequence: TTT
actctataaacttacctgga

SEQ ID NO: 194390 - DNA, 20 bp, Artificial Sequence
  Description of Artificial Sequence: Synthetic oligonucleotide
  Target: LAMA2; (-) strand; PAM type: YTN; PAM sequence: CTT
tactctataaacttacctgg

SEQ ID NO: 194391 - DNA, 20 bp, Artificial Sequence
  Description of Artificial Sequence: Synthetic oligonucleotide
  Target: LAMA2; (-) strand; PAM type: YTN; PAM sequence: TTC
ctttactctataaacttacc

SEQ ID NO: 194392 - DNA, 20 bp, Artificial Sequence
  Description of Artificial Sequence: Synthetic oligonucleotide
  Target: LAMA2; (-) strand; PAM type: YTN; PAM sequence: TTT
cctttactctataaacttac

SEQ ID NO: 194393 - DNA, 20 bp, Artificial Sequence
  Description of Artificial Sequence: Synthetic oligonucleotide
  Target: LAMA2; (-) strand; PAM type: YTN; PAM sequence: TTG
tttcctttactctataaact

SEQ ID NO: 194394 - DNA, 20 bp, Artificial Sequence
  Description of Artificial Sequence: Synthetic oligonucleotide
  Target: LAMA2; (-) strand; PAM type: YTN; PAM sequence: CTC
aaaacaatcaaaatggcagg

SEQ ID NO: 194395 - DNA, 20 bp, Artificial Sequence
  Description of Artificial Sequence: Synthetic oligonucleotide
  Target: LAMA2; (-) strand; PAM type: YTN; PAM sequence: TTG
atactcaaaacaatcaaaat

SEQ ID NO: 194396 - DNA, 20 bp, Artificial Sequence
  Description of Artificial Sequence: Synthetic oligonucleotide
  Target: LAMA2; (-) strand; PAM type: YTN; PAM sequence: TTA
attgatactcaaaacaatca

SEQ ID NO: 194397 - DNA, 20 bp, Artificial Sequence
  Description of Artificial Sequence: Synthetic oligonucleotide
  Target: LAMA2; (-) strand; PAM type: YTN; PAM sequence: TTT
aattgatactcaaaacaatc

SEQ ID NO: 194398 - DNA, 20 bp, Artificial Sequence
  Description of Artificial Sequence: Synthetic oligonucleotide
  Target: LAMA2; (-) strand; PAM type: YTN; PAM sequence: CTG
ataatttaattgatactcaa

SEQ ID NO: 194399 - DNA, 20 bp, Artificial Sequence
  Description of Artificial Sequence: Synthetic oligonucleotide
  Target: LAMA2; (-) strand; PAM type: YTN; PAM sequence: TTA
actgataatttaattgatac

SEQ ID NO: 194400 - DNA, 20 bp, Artificial Sequence
  Description of Artificial Sequence: Synthetic oligonucleotide
  Target: LAMA2; (-) strand; PAM type: YTN; PAM sequence: TTA
ttaactgataatttaattga

SEQ ID NO: 194401 - DNA, 20 bp, Artificial Sequence
  Description of Artificial Sequence: Synthetic oligonucleotide
  Target: LAMA2; (-) strand; PAM type: YTN; PAM sequence: TTG
aattattaactgataattta

SEQ ID NO: 194402 - DNA, 20 bp, Artificial Sequence
  Description of Artificial Sequence: Synthetic oligonucleotide
  Target: LAMA2; (-) strand; PAM type: YTN; PAM sequence: CTT
gaattattaactgataattt

SEQ ID NO: 194403 - DNA, 20 bp, Artificial Sequence
  Description of Artificial Sequence: Synthetic oligonucleotide
  Target: LAMA2; (-) strand; PAM type: YTN; PAM sequence: TTC
ttgaattattaactgataat

SEQ ID NO: 194404 - DNA, 20 bp, Artificial Sequence
  Description of Artificial Sequence: Synthetic oligonucleotide
  Target: LAMA2; (-) strand; PAM type: YTN; PAM sequence: TTT
cttgaattattaactgataa

SEQ ID NO: 194405 - DNA, 20 bp, Artificial Sequence
  Description of Artificial Sequence: Synthetic oligonucleotide
  Target: LAMA2; (-) strand; PAM type: YTN; PAM sequence: TTT
tcttgaattattaactgata

SEQ ID NO: 194406 - DNA, 20 bp, Artificial Sequence
  Description of Artificial Sequence: Synthetic oligonucleotide
  Target: LAMA2; (-) strand; PAM type: YTN; PAM sequence: CTG
ggatatattttcttgaatta

SEQ ID NO: 194407 - DNA, 20 bp, Artificial Sequence
  Description of Artificial Sequence: Synthetic oligonucleotide
  Target: LAMA2; (-) strand; PAM type: YTN; PAM sequence: TTC
ctgggatatattttcttgaa

SEQ ID NO: 194408 - DNA, 20 bp, Artificial Sequence
  Description of Artificial Sequence: Synthetic oligonucleotide
  Target: LAMA2; (-) strand; PAM type: YTN; PAM sequence: TTT
cctgggatatattttcttga

SEQ ID NO: 194409 - DNA, 20 bp, Artificial Sequence
  Description of Artificial Sequence: Synthetic oligonucleotide
  Target: LAMA2; (-) strand; PAM type: YTN; PAM sequence: TTT
tcctgggatatattttcttg

SEQ ID NO: 194410 - DNA, 20 bp, Artificial Sequence
  Description of Artificial Sequence: Synthetic oligonucleotide
  Target: LAMA2; (-) strand; PAM type: YTN; PAM sequence: TTT
ttcctgggatatattttctt

SEQ ID NO: 194411 - DNA, 20 bp, Artificial Sequence
  Description of Artificial Sequence: Synthetic oligonucleotide
  Target: LAMA2; (-) strand; PAM type: YTN; PAM sequence: TTT
tttcctgggatatattttct

SEQ ID NO: 194412 - DNA, 20 bp, Artificial Sequence
  Description of Artificial Sequence: Synthetic oligonucleotide
  Target: LAMA2; (-) strand; PAM type: YTN; PAM sequence: TTT
ttttcctgggatatattttc

SEQ ID NO: 194413 - DNA, 20 bp, Artificial Sequence
  Description of Artificial Sequence: Synthetic oligonucleotide
  Target: LAMA2; (-) strand; PAM type: YTN; PAM sequence: TTT
tttttcctgggatatatttt

SEQ ID NO: 194414 - DNA, 20 bp, Artificial Sequence
  Description of Artificial Sequence: Synthetic oligonucleotide
  Target: LAMA2; (-) strand; PAM type: YTN; PAM sequence: TTT
ttttttcctgggatatattt

SEQ ID NO: 194415 - DNA, 20 bp, Artificial Sequence
  Description of Artificial Sequence: Synthetic oligonucleotide
  Target: LAMA2; (-) strand; PAM type: YTN; PAM sequence: TTT
tttttttcctgggatatatt

SEQ ID NO: 194416 - DNA, 20 bp, Artificial Sequence
  Description of Artificial Sequence: Synthetic oligonucleotide
  Target: LAMA2; (-) strand; PAM type: YTN; PAM sequence: TTA
tacaggggattttttttttc

SEQ ID NO: 194417 - DNA, 20 bp, Artificial Sequence
  Description of Artificial Sequence: Synthetic oligonucleotide
  Target: LAMA2; (-) strand; PAM type: YTN; PAM sequence: TTA
ttatacaggggatttttttt

SEQ ID NO: 194418 - DNA, 20 bp, Artificial Sequence
  Description of Artificial Sequence: Synthetic oligonucleotide
  Target: LAMA2; (-) strand; PAM type: YTN; PAM sequence: TTT
attatacaggggattttttt

SEQ ID NO: 194419 - DNA, 20 bp, Artificial Sequence
  Description of Artificial Sequence: Synthetic oligonucleotide
  Target: LAMA2; (-) strand; PAM type: YTN; PAM sequence: TTA
gtttattatacaggggattt

SEQ ID NO: 194420 - DNA, 20 bp, Artificial Sequence
  Description of Artificial Sequence: Synthetic oligonucleotide
  Target: LAMA2; (-) strand; PAM type: YTN; PAM sequence: TTT
agtttattatacaggggatt

SEQ ID NO: 194421 - DNA, 20 bp, Artificial Sequence
  Description of Artificial Sequence: Synthetic oligonucleotide
  Target: LAMA2; (-) strand; PAM type: YTN; PAM sequence: CTT
tagtttattatacaggggat

SEQ ID NO: 194422 - DNA, 20 bp, Artificial Sequence
  Description of Artificial Sequence: Synthetic oligonucleotide
  Target: LAMA2; (-) strand; PAM type: YTN; PAM sequence: TTA
aaaaagctttagtttattat

SEQ ID NO: 194423 - DNA, 20 bp, Artificial Sequence
  Description of Artificial Sequence: Synthetic oligonucleotide
  Target: LAMA2; (-) strand; PAM type: YTN; PAM sequence: TTA
agaaggatgttaaaaaagct

SEQ ID NO: 194424 - DNA, 20 bp, Artificial Sequence
  Description of Artificial Sequence: Synthetic oligonucleotide
  Target: LAMA2; (-) strand; PAM type: YTN; PAM sequence: TTC
atatgagggattaagaagga

SEQ ID NO: 194425 - DNA, 20 bp, Artificial Sequence
  Description of Artificial Sequence: Synthetic oligonucleotide
  Target: LAMA2; (-) strand; PAM type: YTN; PAM sequence: TTT
catatgagggattaagaagg

SEQ ID NO: 194426 - DNA, 20 bp, Artificial Sequence
  Description of Artificial Sequence: Synthetic oligonucleotide
  Target: LAMA2; (-) strand; PAM type: YTN; PAM sequence: TTT
tcatatgagggattaagaag

SEQ ID NO: 194427 - DNA, 20 bp, Artificial Sequence
  Description of Artificial Sequence: Synthetic oligonucleotide
  Target: LAMA2; (-) strand; PAM type: YTN; PAM sequence: TTT
ttcatatgagggattaagaa

SEQ ID NO: 194428 - DNA, 20 bp, Artificial Sequence
  Description of Artificial Sequence: Synthetic oligonucleotide
  Target: LAMA2; (-) strand; PAM type: YTN; PAM sequence: CTA
agaggggagtataaattttt

SEQ ID NO: 194429 - DNA, 20 bp, Artificial Sequence
  Description of Artificial Sequence: Synthetic oligonucleotide
  Target: LAMA2; (-) strand; PAM type: YTN; PAM sequence: TTA
atatctaagaggggagtata

SEQ ID NO: 194430 - DNA, 20 bp, Artificial Sequence
  Description of Artificial Sequence: Synthetic oligonucleotide
  Target: LAMA2; (-) strand; PAM type: YTN; PAM sequence: TTA
ttaatatctaagaggggagt

SEQ ID NO: 194431 - DNA, 20 bp, Artificial Sequence
  Description of Artificial Sequence: Synthetic oligonucleotide
  Target: LAMA2; (-) strand; PAM type: YTN; PAM sequence: TTT
attaatatctaagaggggag

SEQ ID NO: 194432 - DNA, 20 bp, Artificial Sequence
  Description of Artificial Sequence: Synthetic oligonucleotide
  Target: LAMA2; (-) strand; PAM type: YTN; PAM sequence: TTT
tattaatatctaagagggga

SEQ ID NO: 194433 - DNA, 20 bp, Artificial Sequence
  Description of Artificial Sequence: Synthetic oligonucleotide
  Target: LAMA2; (-) strand; PAM type: YTN; PAM sequence: CTT
ttattaatatctaagagggg

SEQ ID NO: 194434 - DNA, 20 bp, Artificial Sequence
  Description of Artificial Sequence: Synthetic oligonucleotide
  Target: LAMA2; (-) strand; PAM type: YTN; PAM sequence: TTG
agcttttattaatatctaag

SEQ ID NO: 194435 - DNA, 20 bp, Artificial Sequence
  Description of Artificial Sequence: Synthetic oligonucleotide
  Target: LAMA2; (-) strand; PAM type: YTN; PAM sequence: CTG
tacattgagcttttattaat

SEQ ID NO: 194436 - DNA, 20 bp, Artificial Sequence
  Description of Artificial Sequence: Synthetic oligonucleotide
  Target: LAMA2; (-) strand; PAM type: YTN; PAM sequence: CTA
cctgtacattgagcttttat

SEQ ID NO: 194437 - DNA, 20 bp, Artificial Sequence
  Description of Artificial Sequence: Synthetic oligonucleotide
  Target: LAMA2; (-) strand; PAM type: YTN; PAM sequence: CTA
gctacctgtacattgagctt

SEQ ID NO: 194438 - DNA, 20 bp, Artificial Sequence
  Description of Artificial Sequence: Synthetic oligonucleotide
  Target: LAMA2; (-) strand; PAM type: YTN; PAM sequence: CTA
caaatccagcagggaagacg

SEQ ID NO: 194439 - DNA, 20 bp, Artificial Sequence
  Description of Artificial Sequence: Synthetic oligonucleotide
  Target: LAMA2; (-) strand; PAM type: YTN; PAM sequence: CTG
catgagcaggacctacaaat

SEQ ID NO: 194440 - DNA, 20 bp, Artificial Sequence
  Description of Artificial Sequence: Synthetic oligonucleotide
  Target: LAMA2; (-) strand; PAM type: YTN; PAM sequence: CTC
tgcatgagcaggacctacaa

SEQ ID NO: 194441 - DNA, 20 bp, Artificial Sequence
  Description of Artificial Sequence: Synthetic oligonucleotide
  Target: LAMA2; (-) strand; PAM type: YTN; PAM sequence: CTG
ggaaataacccctctgcatg

SEQ ID NO: 194442 - DNA, 20 bp, Artificial Sequence
  Description of Artificial Sequence: Synthetic oligonucleotide
  Target: LAMA2; (-) strand; PAM type: YTN; PAM sequence: CTA
cagtggagtcaaatagagca

SEQ ID NO: 194443 - DNA, 20 bp, Artificial Sequence
  Description of Artificial Sequence: Synthetic oligonucleotide
  Target: LAMA2; (-) strand; PAM type: YTN; PAM sequence: TTG
gcctacagtggagtcaaata

SEQ ID NO: 194444 - DNA, 20 bp, Artificial Sequence
  Description of Artificial Sequence: Synthetic oligonucleotide
  Target: LAMA2; (-) strand; PAM type: YTN; PAM sequence: TTG
atgagaaggggtggttggcc

SEQ ID NO: 194445 - DNA, 20 bp, Artificial Sequence
  Description of Artificial Sequence: Synthetic oligonucleotide
  Target: LAMA2; (-) strand; PAM type: YTN; PAM sequence: TTG
caacatgattgatgagaagg

SEQ ID NO: 194446 - DNA, 20 bp, Artificial Sequence
  Description of Artificial Sequence: Synthetic oligonucleotide
  Target: LAMA2; (-) strand; PAM type: YTN; PAM sequence: TTG
tgtaaaaaataattgcaaca

SEQ ID NO: 194447 - DNA, 20 bp, Artificial Sequence
  Description of Artificial Sequence: Synthetic oligonucleotide
  Target: LAMA2; (-) strand; PAM type: YTN; PAM sequence: CTA
aaagaagacgtaattgtgta

SEQ ID NO: 194448 - DNA, 20 bp, Artificial Sequence
  Description of Artificial Sequence: Synthetic oligonucleotide
  Target: LAMA2; (-) strand; PAM type: YTN; PAM sequence: CTC
taaaagaagacgtaattgtg

SEQ ID NO: 194449 - DNA, 20 bp, Artificial Sequence
  Description of Artificial Sequence: Synthetic oligonucleotide
  Target: LAMA2; (-) strand; PAM type: YTN; PAM sequence: TTC
tctaaaagaagacgtaattg

SEQ ID NO: 194450 - DNA, 20 bp, Artificial Sequence
  Description of Artificial Sequence: Synthetic oligonucleotide
  Target: LAMA2; (-) strand; PAM type: YTN; PAM sequence: CTT
ctctaaaagaagacgtaatt

SEQ ID NO: 194451 - DNA, 20 bp, Artificial Sequence
  Description of Artificial Sequence: Synthetic oligonucleotide
  Target: LAMA2; (-) strand; PAM type: YTN; PAM sequence: CTC
ttctctaaaagaagacgtaa

SEQ ID NO: 194452 - DNA, 20 bp, Artificial Sequence
  Description of Artificial Sequence: Synthetic oligonucleotide
  Target: LAMA2; (-) strand; PAM type: YTN; PAM sequence: TTC
tcttctctaaaagaagacgt

SEQ ID NO: 194453 - DNA, 20 bp, Artificial Sequence
  Description of Artificial Sequence: Synthetic oligonucleotide
  Target: LAMA2; (-) strand; PAM type: YTN; PAM sequence: TTA
aataattctcttctctaaaa

SEQ ID NO: 194454 - DNA, 20 bp, Artificial Sequence
  Description of Artificial Sequence: Synthetic oligonucleotide
  Target: LAMA2; (-) strand; PAM type: YTN; PAM sequence: CTG
gttaaataattctcttctct

SEQ ID NO: 194455 - DNA, 20 bp, Artificial Sequence
  Description of Artificial Sequence: Synthetic oligonucleotide
  Target: LAMA2; (-) strand; PAM type: YTN; PAM sequence: TTC
tggttaaataattctcttct

SEQ ID NO: 194456 - DNA, 20 bp, Artificial Sequence
  Description of Artificial Sequence: Synthetic oligonucleotide
  Target: LAMA2; (-) strand; PAM type: YTN; PAM sequence: TTT
ctggttaaataattctcttc

SEQ ID NO: 194457 - DNA, 20 bp, Artificial Sequence
  Description of Artificial Sequence: Synthetic oligonucleotide
  Target: LAMA2; (-) strand; PAM type: YTN; PAM sequence: TTA
tttctggttaaataattctc

SEQ ID NO: 194458 - DNA, 20 bp, Artificial Sequence
  Description of Artificial Sequence: Synthetic oligonucleotide
  Target: LAMA2; (-) strand; PAM type: YTN; PAM sequence: TTG
atgttatttctggttaaata

SEQ ID NO: 194459 - DNA, 20 bp, Artificial Sequence
  Description of Artificial Sequence: Synthetic oligonucleotide
  Target: LAMA2; (-) strand; PAM type: YTN; PAM sequence: TTG
ttgatgttatttctggttaa

SEQ ID NO: 194460 - DNA, 20 bp, Artificial Sequence
  Description of Artificial Sequence: Synthetic oligonucleotide
  Target: LAMA2; (-) strand; PAM type: YTN; PAM sequence: CTT
gttgatgttatttctggtta

SEQ ID NO: 194461 - DNA, 20 bp, Artificial Sequence
  Description of Artificial Sequence: Synthetic oligonucleotide
  Target: LAMA2; (-) strand; PAM type: YTN; PAM sequence: CTG
taaaaggcttgttgatgtta

SEQ ID NO: 194462 - DNA, 20 bp, Artificial Sequence
  Description of Artificial Sequence: Synthetic oligonucleotide
  Target: LAMA2; (-) strand; PAM type: YTN; PAM sequence: TTC
tgtaaaaggcttgttgatgt

SEQ ID NO: 194463 - DNA, 20 bp, Artificial Sequence
  Description of Artificial Sequence: Synthetic oligonucleotide
  Target: LAMA2; (-) strand; PAM type: YTN; PAM sequence: TTA
agcatgtatattctgtaaaa

SEQ ID NO: 194464 - DNA, 20 bp, Artificial Sequence
  Description of Artificial Sequence: Synthetic oligonucleotide
  Target: LAMA2; (-) strand; PAM type: YTN; PAM sequence: CTT
aagcatgtatattctgtaaa

SEQ ID NO: 194465 - DNA, 20 bp, Artificial Sequence
  Description of Artificial Sequence: Synthetic oligonucleotide
  Target: LAMA2; (-) strand; PAM type: YTN; PAM sequence: CTC
aacaatatggtgtgaaactt

SEQ ID NO: 194466 - DNA, 20 bp, Artificial Sequence
  Description of Artificial Sequence: Synthetic oligonucleotide
  Target: LAMA2; (-) strand; PAM type: YTN; PAM sequence: TTA
aaatatctcaacaatatggt

SEQ ID NO: 194467 - DNA, 20 bp, Artificial Sequence
  Description of Artificial Sequence: Synthetic oligonucleotide
  Target: LAMA2; (-) strand; PAM type: YTN; PAM sequence: CTT
aaaatatctcaacaatatgg

SEQ ID NO: 194468 - DNA, 20 bp, Artificial Sequence
  Description of Artificial Sequence: Synthetic oligonucleotide
  Target: LAMA2; (-) strand; PAM type: YTN; PAM sequence: TTA
aacacttaaaatatctcaac

SEQ ID NO: 194469 - DNA, 20 bp, Artificial Sequence
  Description of Artificial Sequence: Synthetic oligonucleotide
  Target: LAMA2; (-) strand; PAM type: YTN; PAM sequence: TTT
aaacacttaaaatatctcaa

SEQ ID NO: 194470 - DNA, 20 bp, Artificial Sequence
  Description of Artificial Sequence: Synthetic oligonucleotide
  Target: LAMA2; (-) strand; PAM type: YTN; PAM sequence: TTT
taaacacttaaaatatctca

SEQ ID NO: 194471 - DNA, 20 bp, Artificial Sequence
  Description of Artificial Sequence: Synthetic oligonucleotide
  Target: LAMA2; (-) strand; PAM type: YTN; PAM sequence: TTT
ttaaacacttaaaatatctc

SEQ ID NO: 194472 - DNA, 20 bp, Artificial Sequence
  Description of Artificial Sequence: Synthetic oligonucleotide
  Target: LAMA2; (-) strand; PAM type: YTN; PAM sequence: TTT
tttaaacacttaaaatatct

SEQ ID NO: 194473 - DNA, 20 bp, Artificial Sequence
  Description of Artificial Sequence: Synthetic oligonucleotide
  Target: LAMA2; (-) strand; PAM type: YTN; PAM sequence: CTA
ttttttaaacacttaaaata

SEQ ID NO: 194474 - DNA, 20 bp, Artificial Sequence
  Description of Artificial Sequence: Synthetic oligonucleotide
  Target: LAMA2; (-) strand; PAM type: YTN; PAM sequence: TTC
acatactattttttaaacac

SEQ ID NO: 194475 - DNA, 20 bp, Artificial Sequence
  Description of Artificial Sequence: Synthetic oligonucleotide
  Target: LAMA2; (-) strand; PAM type: YTN; PAM sequence: TTA
caaccgaaatatattcacat

SEQ ID NO: 194476 - DNA, 20 bp, Artificial Sequence
  Description of Artificial Sequence: Synthetic oligonucleotide
  Target: LAMA2; (-) strand; PAM type: YTN; PAM sequence: TTT
acaaccgaaatatattcaca

SEQ ID NO: 194477 - DNA, 20 bp, Artificial Sequence
  Description of Artificial Sequence: Synthetic oligonucleotide
  Target: LAMA2; (-) strand; PAM type: YTN; PAM sequence: TTT
tacaaccgaaatatattcac

SEQ ID NO: 194478 - DNA, 20 bp, Artificial Sequence
  Description of Artificial Sequence: Synthetic oligonucleotide
  Target: LAMA2; (-) strand; PAM type: YTN; PAM sequence: TTT
ttacaaccgaaatatattca

SEQ ID NO: 194479 - DNA, 20 bp, Artificial Sequence
  Description of Artificial Sequence: Synthetic oligonucleotide
  Target: LAMA2; (-) strand; PAM type: YTN; PAM sequence: TTT
tttacaaccgaaatatattc

SEQ ID NO: 194480 - DNA, 20 bp, Artificial Sequence
  Description of Artificial Sequence: Synthetic oligonucleotide
  Target: LAMA2; (-) strand; PAM type: YTN; PAM sequence: TTG
aattttttacaaccgaaata

SEQ ID NO: 194481 - DNA, 20 bp, Artificial Sequence
  Description of Artificial Sequence: Synthetic oligonucleotide
  Target: LAMA2; (-) strand; PAM type: YTN; PAM sequence: TTT
gaattttttacaaccgaaat

SEQ ID NO: 194482 - DNA, 20 bp, Artificial Sequence
  Description of Artificial Sequence: Synthetic oligonucleotide
  Target: LAMA2; (-) strand; PAM type: YTN; PAM sequence: CTT
tgaattttttacaaccgaaa

SEQ ID NO: 194483 - DNA, 20 bp, Artificial Sequence
  Description of Artificial Sequence: Synthetic oligonucleotide
  Target: LAMA2; (-) strand; PAM type: YTN; PAM sequence: TTC
ctttgaattttttacaaccg

SEQ ID NO: 194484 - DNA, 20 bp, Artificial Sequence
  Description of Artificial Sequence: Synthetic oligonucleotide
  Target: LAMA2; (-) strand; PAM type: YTN; PAM sequence: CTT
cctttgaattttttacaacc

SEQ ID NO: 194485 - DNA, 20 bp, Artificial Sequence
  Description of Artificial Sequence: Synthetic oligonucleotide
  Target: LAMA2; (-) strand; PAM type: YTN; PAM sequence: CTA
atgggtataaagcttccttt

SEQ ID NO: 194486 - DNA, 20 bp, Artificial Sequence
  Description of Artificial Sequence: Synthetic oligonucleotide
  Target: LAMA2; (-) strand; PAM type: YTN; PAM sequence: TTA
tggcagccatcctaatgggt

SEQ ID NO: 194487 - DNA, 20 bp, Artificial Sequence
  Description of Artificial Sequence: Synthetic oligonucleotide
  Target: LAMA2; (-) strand; PAM type: YTN; PAM sequence: TTA
aaattatggcagccatccta

SEQ ID NO: 194488 - DNA, 20 bp, Artificial Sequence
  Description of Artificial Sequence: Synthetic oligonucleotide
  Target: LAMA2; (-) strand; PAM type: YTN; PAM sequence: TTT
aaaattatggcagccatcct

SEQ ID NO: 194489 - DNA, 20 bp, Artificial Sequence
  Description of Artificial Sequence: Synthetic oligonucleotide
  Target: LAMA2; (-) strand; PAM type: YTN; PAM sequence: TTT
taaaattatggcagccatcc

SEQ ID NO: 194490 - DNA, 20 bp, Artificial Sequence
  Description of Artificial Sequence: Synthetic oligonucleotide
  Target: LAMA2; (-) strand; PAM type: YTN; PAM sequence: TTT
ttaaaattatggcagccatc

SEQ ID NO: 194491 - DNA, 20 bp, Artificial Sequence
  Description of Artificial Sequence: Synthetic oligonucleotide
  Target: LAMA2; (-) strand; PAM type: YTN; PAM sequence: TTC
catttttaaaattatggcag

SEQ ID NO: 194492 - DNA, 20 bp, Artificial Sequence
  Description of Artificial Sequence: Synthetic oligonucleotide
  Target: LAMA2; (-) strand; PAM type: YTN; PAM sequence: CTT
ccatttttaaaattatggca

SEQ ID NO: 194493 - DNA, 20 bp, Artificial Sequence
  Description of Artificial Sequence: Synthetic oligonucleotide
  Target: LAMA2; (-) strand; PAM type: YTN; PAM sequence: CTA
ccttccatttttaaaattat

SEQ ID NO: 194494 - DNA, 20 bp, Artificial Sequence
  Description of Artificial Sequence: Synthetic oligonucleotide
  Target: LAMA2; (-) strand; PAM type: YTN; PAM sequence: TTC
taccttccatttttaaaatt

SEQ ID NO: 194495 - DNA, 20 bp, Artificial Sequence
  Description of Artificial Sequence: Synthetic oligonucleotide
  Target: LAMA2; (-) strand; PAM type: YTN; PAM sequence: TTT
ctaccttccatttttaaaat

SEQ ID NO: 194496 - DNA, 20 bp, Artificial Sequence
  Description of Artificial Sequence: Synthetic oligonucleotide
  Target: LAMA2; (-) strand; PAM type: YTN; PAM sequence: CTC
accaatttctaccttccatt

SEQ ID NO: 194497 - DNA, 20 bp, Artificial Sequence
  Description of Artificial Sequence: Synthetic oligonucleotide
  Target: LAMA2; (-) strand; PAM type: YTN; PAM sequence: TTC
acatcctcaccaatttctac

SEQ ID NO: 194498 - DNA, 20 bp, Artificial Sequence
  Description of Artificial Sequence: Synthetic oligonucleotide
  Target: LAMA2; (-) strand; PAM type: YTN; PAM sequence: CTT
cacatcctcaccaatttcta

SEQ ID NO: 194499 - DNA, 20 bp, Artificial Sequence
  Description of Artificial Sequence: Synthetic oligonucleotide
  Target: LAMA2; (-) strand; PAM type: YTN; PAM sequence: TTC
cttcacatcctcaccaattt

SEQ ID NO: 194500 - DNA, 20 bp, Artificial Sequence
  Description of Artificial Sequence: Synthetic oligonucleotide
  Target: LAMA2; (-) strand; PAM type: YTN; PAM sequence: CTA
attccttcacatcctcacca

SEQ ID NO: 194501 - DNA, 20 bp, Artificial Sequence
  Description of Artificial Sequence: Synthetic oligonucleotide
  Target: LAMA2; (-) strand; PAM type: YTN; PAM sequence: TTC
taattccttcacatcctcac

SEQ ID NO: 194502 - DNA, 20 bp, Artificial Sequence
  Description of Artificial Sequence: Synthetic oligonucleotide
  Target: LAMA2; (-) strand; PAM type: YTN; PAM sequence: CTT
ctaattccttcacatcctca

SEQ ID NO: 194503 - DNA, 20 bp, Artificial Sequence
  Description of Artificial Sequence: Synthetic oligonucleotide
  Target: LAMA2; (-) strand; PAM type: YTN; PAM sequence: TTC
ccatcaacaatgcataaggc

SEQ ID NO: 194504 - DNA, 20 bp, Artificial Sequence
  Description of Artificial Sequence: Synthetic oligonucleotide
  Target: LAMA2; (-) strand; PAM type: YTN; PAM sequence: TTA
tattcccatcaacaatgcat

SEQ ID NO: 194505 - DNA, 20 bp, Artificial Sequence
  Description of Artificial Sequence: Synthetic oligonucleotide
  Target: LAMA2; (-) strand; PAM type: YTN; PAM sequence: TTT
atattcccatcaacaatgca

SEQ ID NO: 194506 - DNA, 20 bp, Artificial Sequence
  Description of Artificial Sequence: Synthetic oligonucleotide
  Target: LAMA2; (-) strand; PAM type: YTN; PAM sequence: TTT
tatattcccatcaacaatgc

SEQ ID NO: 194507 - DNA, 20 bp, Artificial Sequence
  Description of Artificial Sequence: Synthetic oligonucleotide
  Target: LAMA2; (-) strand; PAM type: YTN; PAM sequence: TTG
tcacaccattttatattccc

SEQ ID NO: 194508 - DNA, 20 bp, Artificial Sequence
  Description of Artificial Sequence: Synthetic oligonucleotide
  Target: LAMA2; (-) strand; PAM type: YTN; PAM sequence: TTC
catgattgtcacaccatttt

SEQ ID NO: 194509 - DNA, 20 bp, Artificial Sequence
  Description of Artificial Sequence: Synthetic oligonucleotide
  Target: LAMA2; (-) strand; PAM type: YTN; PAM sequence: TTT
ccatgattgtcacaccattt

SEQ ID NO: 194510 - DNA, 20 bp, Artificial Sequence
  Description of Artificial Sequence: Synthetic oligonucleotide
  Target: LAMA2; (-) strand; PAM type: YTN; PAM sequence: TTT
tccatgattgtcacaccatt

SEQ ID NO: 194511 - DNA, 20 bp, Artificial Sequence
  Description of Artificial Sequence: Synthetic oligonucleotide
  Target: LAMA2; (-) strand; PAM type: YTN; PAM sequence: CTG
ttttccatgattgtcacacc

SEQ ID NO: 194512 - DNA, 20 bp, Artificial Sequence
  Description of Artificial Sequence: Synthetic oligonucleotide
  Target: LAMA2; (-) strand; PAM type: YTN; PAM sequence: CTC
catactgttttccatgattg

SEQ ID NO: 194513 - DNA, 20 bp, Artificial Sequence
  Description of Artificial Sequence: Synthetic oligonucleotide
  Target: LAMA2; (-) strand; PAM type: YTN; PAM sequence: TTG
aggaccctccatactgtttt

SEQ ID NO: 194514 - DNA, 20 bp, Artificial Sequence
  Description of Artificial Sequence: Synthetic oligonucleotide
  Target: LAMA2; (-) strand; PAM type: YTN; PAM sequence: TTT
gaggaccctccatactgttt

SEQ ID NO: 194515 - DNA, 20 bp, Artificial Sequence
  Description of Artificial Sequence: Synthetic oligonucleotide
  Target: LAMA2; (-) strand; PAM type: YTN; PAM sequence: TTT
tgaggaccctccatactgtt

SEQ ID NO: 194516 - DNA, 20 bp, Artificial Sequence
  Description of Artificial Sequence: Synthetic oligonucleotide
  Target: LAMA2; (-) strand; PAM type: YTN; PAM sequence: TTG
taatgttttgaggaccctcc

SEQ ID NO: 194517 - DNA, 20 bp, Artificial Sequence
  Description of Artificial Sequence: Synthetic oligonucleotide
  Target: LAMA2; (-) strand; PAM type: YTN; PAM sequence: TTT
gtaatgttttgaggaccctc

SEQ ID NO: 194518 - DNA, 20 bp, Artificial Sequence
  Description of Artificial Sequence: Synthetic oligonucleotide
  Target: LAMA2; (-) strand; PAM type: YTN; PAM sequence: CTA
tttgtaatgttttgaggacc

SEQ ID NO: 194519 - DNA, 20 bp, Artificial Sequence
  Description of Artificial Sequence: Synthetic oligonucleotide
  Target: LAMA2; (-) strand; PAM type: YTN; PAM sequence: TTC
tatttgtaatgttttgagga

SEQ ID NO: 194520 - DNA, 20 bp, Artificial Sequence
  Description of Artificial Sequence: Synthetic oligonucleotide
  Target: LAMA2; (-) strand; PAM type: YTN; PAM sequence: TTG
taattctatttgtaatgttt

SEQ ID NO: 194521 - DNA, 20 bp, Artificial Sequence
  Description of Artificial Sequence: Synthetic oligonucleotide
  Target: LAMA2; (-) strand; PAM type: YTN; PAM sequence: CTA
ttgtaattctatttgtaatg

SEQ ID NO: 194522 - DNA, 20 bp, Artificial Sequence
  Description of Artificial Sequence: Synthetic oligonucleotide
  Target: LAMA2; (-) strand; PAM type: YTN; PAM sequence: TTG
gatcctattgtaattctatt

SEQ ID NO: 194523 - DNA, 20 bp, Artificial Sequence
  Description of Artificial Sequence: Synthetic oligonucleotide
  Target: LAMA2; (-) strand; PAM type: YTN; PAM sequence: TTG
ttggatcctattgtaattct

SEQ ID NO: 194524 - DNA, 20 bp, Artificial Sequence
  Description of Artificial Sequence: Synthetic oligonucleotide
  Target: LAMA2; (-) strand; PAM type: YTN; PAM sequence: TTC
ccagaagtggaattgttgga

SEQ ID NO: 194525 - DNA, 20 bp, Artificial Sequence
  Description of Artificial Sequence: Synthetic oligonucleotide
  Target: LAMA2; (-) strand; PAM type: YTN; PAM sequence: TTG
gggcatattcccagaagtgg

SEQ ID NO: 194526 - DNA, 20 bp, Artificial Sequence
  Description of Artificial Sequence: Synthetic oligonucleotide
  Target: LAMA2; (-) strand; PAM type: YTN; PAM sequence: TTT
ggggcatattcccagaagtg

SEQ ID NO: 194527 - DNA, 20 bp, Artificial Sequence
  Description of Artificial Sequence: Synthetic oligonucleotide
  Target: LAMA2; (-) strand; PAM type: YTN; PAM sequence: TTA
tttggggcatattcccagaa

SEQ ID NO: 194528 - DNA, 20 bp, Artificial Sequence
  Description of Artificial Sequence: Synthetic oligonucleotide
  Target: LAMA2; (-) strand; PAM type: YTN; PAM sequence: TTA
attatttggggcatattccc

SEQ ID NO: 194529 - DNA, 20 bp, Artificial Sequence
  Description of Artificial Sequence: Synthetic oligonucleotide
  Target: LAMA2; (-) strand; PAM type: YTN; PAM sequence: TTT
aattatttggggcatattcc

SEQ ID NO: 194530 - DNA, 20 bp, Artificial Sequence
  Description of Artificial Sequence: Synthetic oligonucleotide
  Target: LAMA2; (-) strand; PAM type: YTN; PAM sequence: TTT
taattatttggggcatattc

SEQ ID NO: 194531 - DNA, 20 bp, Artificial Sequence
  Description of Artificial Sequence: Synthetic oligonucleotide
  Target: LAMA2; (-) strand; PAM type: YTN; PAM sequence: CTT
ttaattatttggggcatatt

SEQ ID NO: 194532 - DNA, 20 bp, Artificial Sequence
  Description of Artificial Sequence: Synthetic oligonucleotide
  Target: LAMA2; (-) strand; PAM type: YTN; PAM sequence: CTG
cttttaattatttggggcat

SEQ ID NO: 194533 - DNA, 20 bp, Artificial Sequence
  Description of Artificial Sequence: Synthetic oligonucleotide
  Target: LAMA2; (-) strand; PAM type: YTN; PAM sequence: TTC
aggaccctgcttttaattat

SEQ ID NO: 194534 - DNA, 20 bp, Artificial Sequence
  Description of Artificial Sequence: Synthetic oligonucleotide
  Target: LAMA2; (-) strand; PAM type: YTN; PAM sequence: TTT
caggaccctgcttttaatta

SEQ ID NO: 194535 - DNA, 20 bp, Artificial Sequence
  Description of Artificial Sequence: Synthetic oligonucleotide
  Target: LAMA2; (-) strand; PAM type: YTN; PAM sequence: TTT
tcaggaccctgcttttaatt

SEQ ID NO: 194536 - DNA, 20 bp, Artificial Sequence
  Description of Artificial Sequence: Synthetic oligonucleotide
  Target: LAMA2; (-) strand; PAM type: YTN; PAM sequence: CTT
ttcaggaccctgcttttaat

SEQ ID NO: 194537 - DNA, 20 bp, Artificial Sequence
  Description of Artificial Sequence: Synthetic oligonucleotide
  Target: LAMA2; (-) strand; PAM type: YTN; PAM sequence: CTA
tgacagagatgtataaatat

SEQ ID NO: 194538 - DNA, 20 bp, Artificial Sequence
  Description of Artificial Sequence: Synthetic oligonucleotide
  Target: LAMA2; (-) strand; PAM type: YTN; PAM sequence: CTA
ctatgacagagatgtataaa

SEQ ID NO: 194539 - DNA, 20 bp, Artificial Sequence
  Description of Artificial Sequence: Synthetic oligonucleotide
  Target: LAMA2; (-) strand; PAM type: YTN; PAM sequence: TTG
taaataatgctactatgaca

SEQ ID NO: 194540 - DNA, 20 bp, Artificial Sequence
  Description of Artificial Sequence: Synthetic oligonucleotide
  Target: LAMA2; (-) strand; PAM type: YTN; PAM sequence: TTG
gccattgtaaataatgctac

SEQ ID NO: 194541 - DNA, 20 bp, Artificial Sequence
  Description of Artificial Sequence: Synthetic oligonucleotide
  Target: LAMA2; (-) strand; PAM type: YTN; PAM sequence: TTT
ggccattgtaaataatgcta

SEQ ID NO: 194542 - DNA, 20 bp, Artificial Sequence
  Description of Artificial Sequence: Synthetic oligonucleotide
  Target: LAMA2; (-) strand; PAM type: YTN; PAM sequence: TTT
tggccattgtaaataatgct

SEQ ID NO: 194543 - DNA, 20 bp, Artificial Sequence
  Description of Artificial Sequence: Synthetic oligonucleotide
  Target: LAMA2; (-) strand; PAM type: YTN; PAM sequence: CTT
ttggccattgtaaataatgc

SEQ ID NO: 194544 - DNA, 20 bp, Artificial Sequence
  Description of Artificial Sequence: Synthetic oligonucleotide
  Target: LAMA2; (-) strand; PAM type: YTN; PAM sequence: CTC
ccaccttttggccattgtaa

SEQ ID NO: 194545 - DNA, 20 bp, Artificial Sequence
  Description of Artificial Sequence: Synthetic oligonucleotide
  Target: LAMA2; (-) strand; PAM type: YTN; PAM sequence: TTC
tcccaccttttggccattgt

SEQ ID NO: 194546 - DNA, 20 bp, Artificial Sequence
  Description of Artificial Sequence: Synthetic oligonucleotide
  Target: LAMA2; (-) strand; PAM type: YTN; PAM sequence: TTT
ctcccaccttttggccattg

SEQ ID NO: 194547 - DNA, 20 bp, Artificial Sequence
  Description of Artificial Sequence: Synthetic oligonucleotide
  Target: LAMA2; (-) strand; PAM type: YTN; PAM sequence: CTG
tcaacagccaggtttctccc

SEQ ID NO: 194548 - DNA, 20 bp, Artificial Sequence
  Description of Artificial Sequence: Synthetic oligonucleotide
  Target: LAMA2; (-) strand; PAM type: YTN; PAM sequence: TTC
gtctgtcaacagccaggttt

SEQ ID NO: 194549 - DNA, 20 bp, Artificial Sequence
  Description of Artificial Sequence: Synthetic oligonucleotide
  Target: LAMA2; (-) strand; PAM type: YTN; PAM sequence: CTA
ttcgtctgtcaacagccagg

SEQ ID NO: 194550 - DNA, 20 bp, Artificial Sequence
  Description of Artificial Sequence: Synthetic oligonucleotide
  Target: LAMA2; (-) strand; PAM type: YTN; PAM sequence: TTA
tctattcgtctgtcaacagc

SEQ ID NO: 194551 - DNA, 20 bp, Artificial Sequence
  Description of Artificial Sequence: Synthetic oligonucleotide
  Target: LAMA2; (-) strand; PAM type: YTN; PAM sequence: TTT
atctattcgtctgtcaacag

SEQ ID NO: 194552 - DNA, 20 bp, Artificial Sequence
  Description of Artificial Sequence: Synthetic oligonucleotide
  Target: LAMA2; (-) strand; PAM type: YTN; PAM sequence: TTA
tttatctattcgtctgtcaa

SEQ ID NO: 194553 - DNA, 20 bp, Artificial Sequence
  Description of Artificial Sequence: Synthetic oligonucleotide
  Target: LAMA2; (-) strand; PAM type: YTN; PAM sequence: TTT
atttatctattcgtctgtca

SEQ ID NO: 194554 - DNA, 20 bp, Artificial Sequence
  Description of Artificial Sequence: Synthetic oligonucleotide
  Target: LAMA2; (-) strand; PAM type: YTN; PAM sequence: TTT
tatttatctattcgtctgtc

SEQ ID NO: 194555 - DNA, 20 bp, Artificial Sequence
  Description of Artificial Sequence: Synthetic oligonucleotide
  Target: LAMA2; (-) strand; PAM type: YTN; PAM sequence: TTC
catcgtatacatgcacaaca

SEQ ID NO: 194556 - DNA, 20 bp, Artificial Sequence
  Description of Artificial Sequence: Synthetic oligonucleotide
  Target: LAMA2; (-) strand; PAM type: YTN; PAM sequence: TTA
cagacggaataatgttccat

SEQ ID NO: 194557 - DNA, 20 bp, Artificial Sequence
  Description of Artificial Sequence: Synthetic oligonucleotide
  Target: LAMA2; (-) strand; PAM type: YTN; PAM sequence: TTT
acagacggaataatgttcca

SEQ ID NO: 194558 - DNA, 20 bp, Artificial Sequence
  Description of Artificial Sequence: Synthetic oligonucleotide
  Target: LAMA2; (-) strand; PAM type: YTN; PAM sequence: TTT
tacagacggaataatgttcc

SEQ ID NO: 194559 - DNA, 20 bp, Artificial Sequence
  Description of Artificial Sequence: Synthetic oligonucleotide
  Target: LAMA2; (-) strand; PAM type: YTN; PAM sequence: CTT
ttacagacggaataatgttc

SEQ ID NO: 194560 - DNA, 20 bp, Artificial Sequence
  Description of Artificial Sequence: Synthetic oligonucleotide
  Target: LAMA2; (-) strand; PAM type: YTN; PAM sequence: CTC
ttttacagacggaataatgt

SEQ ID NO: 194561 - DNA, 20 bp, Artificial Sequence
  Description of Artificial Sequence: Synthetic oligonucleotide
  Target: LAMA2; (-) strand; PAM type: YTN; PAM sequence: CTC
tcttttacagacggaataat

SEQ ID NO: 194562 - DNA, 20 bp, Artificial Sequence
  Description of Artificial Sequence: Synthetic oligonucleotide
  Target: LAMA2; (-) strand; PAM type: YTN; PAM sequence: TTC
ctctcttttacagacggaat

SEQ ID NO: 194563 - DNA, 20 bp, Artificial Sequence
  Description of Artificial Sequence: Synthetic oligonucleotide
  Target: LAMA2; (-) strand; PAM type: YTN; PAM sequence: TTT
cctctcttttacagacggaa

SEQ ID NO: 194564 - DNA, 20 bp, Artificial Sequence
  Description of Artificial Sequence: Synthetic oligonucleotide
  Target: LAMA2; (-) strand; PAM type: YTN; PAM sequence: TTC
atatggtagcatgtgtcaga

SEQ ID NO: 194565 - DNA, 20 bp, Artificial Sequence
  Description of Artificial Sequence: Synthetic oligonucleotide
  Target: LAMA2; (-) strand; PAM type: YTN; PAM sequence: CTC
aaggtccattcatatggtag

SEQ ID NO: 194566 - DNA, 20 bp, Artificial Sequence
  Description of Artificial Sequence: Synthetic oligonucleotide
  Target: LAMA2; (-) strand; PAM type: YTN; PAM sequence: TTA
gcagaatgtcctcaaggtcc

SEQ ID NO: 194567 - DNA, 20 bp, Artificial Sequence
  Description of Artificial Sequence: Synthetic oligonucleotide
  Target: LAMA2; (-) strand; PAM type: YTN; PAM sequence: CTT
agcagaatgtcctcaaggtc

SEQ ID NO: 194568 - DNA, 20 bp, Artificial Sequence
  Description of Artificial Sequence: Synthetic oligonucleotide
  Target: LAMA2; (-) strand; PAM type: YTN; PAM sequence: TTC
acttagcagaatgtcctcaa

SEQ ID NO: 194569 - DNA, 20 bp, Artificial Sequence
  Description of Artificial Sequence: Synthetic oligonucleotide
  Target: LAMA2; (-) strand; PAM type: YTN; PAM sequence: TTT
cacttagcagaatgtcctca

SEQ ID NO: 194570 - DNA, 20 bp, Artificial Sequence
  Description of Artificial Sequence: Synthetic oligonucleotide
  Target: LAMA2; (-) strand; PAM type: YTN; PAM sequence: CTG
gtatatttcacttagcagaa

SEQ ID NO: 194571 - DNA, 20 bp, Artificial Sequence
  Description of Artificial Sequence: Synthetic oligonucleotide
  Target: LAMA2; (-) strand; PAM type: YTN; PAM sequence: TTG
tgactggtatatttcactta

SEQ ID NO: 194572 - DNA, 20 bp, Artificial Sequence
  Description of Artificial Sequence: Synthetic oligonucleotide
  Target: LAMA2; (-) strand; PAM type: YTN; PAM sequence: TTT
gtgactggtatatttcactt

SEQ ID NO: 194573 - DNA, 20 bp, Artificial Sequence
  Description of Artificial Sequence: Synthetic oligonucleotide
  Target: LAMA2; (-) strand; PAM type: YTN; PAM sequence: TTT
tgtgactggtatatttcact

SEQ ID NO: 194574 - DNA, 20 bp, Artificial Sequence
  Description of Artificial Sequence: Synthetic oligonucleotide
  Target: LAMA2; (-) strand; PAM type: YTN; PAM sequence: TTT
ttgtgactggtatatttcac

SEQ ID NO: 194575 - DNA, 20 bp, Artificial Sequence
  Description of Artificial Sequence: Synthetic oligonucleotide
  Target: LAMA2; (-) strand; PAM type: YTN; PAM sequence: CTT
tttgtgactggtatatttca

SEQ ID NO: 194576 - DNA, 20 bp, Artificial Sequence
  Description of Artificial Sequence: Synthetic oligonucleotide
  Target: LAMA2; (-) strand; PAM type: YTN; PAM sequence: TTG
tctttttgtgactggtatat

SEQ ID NO: 194577 - DNA, 20 bp, Artificial Sequence
  Description of Artificial Sequence: Synthetic oligonucleotide
  Target: LAMA2; (-) strand; PAM type: YTN; PAM sequence: TTT
gtctttttgtgactggtata

SEQ ID NO: 194578 - DNA, 20 bp, Artificial Sequence
  Description of Artificial Sequence: Synthetic oligonucleotide
  Target: LAMA2; (-) strand; PAM type: YTN; PAM sequence: CTA
ggtaagtagaatcataacag

SEQ ID NO: 194579 - DNA, 20 bp, Artificial Sequence
  Description of Artificial Sequence: Synthetic oligonucleotide
  Target: LAMA2; (-) strand; PAM type: YTN; PAM sequence: CTC
taggtaagtagaatcataac

SEQ ID NO: 194580 - DNA, 20 bp, Artificial Sequence
  Description of Artificial Sequence: Synthetic oligonucleotide
  Target: LAMA2; (-) strand; PAM type: YTN; PAM sequence: CTA
ctctaggtaagtagaatcat

SEQ ID NO: 194581 - DNA, 20 bp, Artificial Sequence
  Description of Artificial Sequence: Synthetic oligonucleotide
  Target: LAMA2; (-) strand; PAM type: YTN; PAM sequence: CTG
actactctaggtaagtagaa

SEQ ID NO: 194582 - DNA, 20 bp, Artificial Sequence
  Description of Artificial Sequence: Synthetic oligonucleotide
  Target: LAMA2; (-) strand; PAM type: YTN; PAM sequence: TTC
tgactactctaggtaagtag

SEQ ID NO: 194583 - DNA, 20 bp, Artificial Sequence
  Description of Artificial Sequence: Synthetic oligonucleotide
  Target: LAMA2; (-) strand; PAM type: YTN; PAM sequence: CTA
tgattctgactactctaggt

SEQ ID NO: 194584 - DNA, 20 bp, Artificial Sequence
  Description of Artificial Sequence: Synthetic oligonucleotide
  Target: LAMA2; (-) strand; PAM type: YTN; PAM sequence: CTC
tatgattctgactactctag

SEQ ID NO: 194585 - DNA, 20 bp, Artificial Sequence
  Description of Artificial Sequence: Synthetic oligonucleotide
  Target: LAMA2; (-) strand; PAM type: YTN; PAM sequence: CTG
tctctatgattctgactact

SEQ ID NO: 194586 - DNA, 20 bp, Artificial Sequence
  Description of Artificial Sequence: Synthetic oligonucleotide
  Target: LAMA2; (-) strand; PAM type: YTN; PAM sequence: TTC
tgtctctatgattctgacta

SEQ ID NO: 194587 - DNA, 20 bp, Artificial Sequence
  Description of Artificial Sequence: Synthetic oligonucleotide
  Target: LAMA2; (-) strand; PAM type: YTN; PAM sequence: TTT
ctgtctctatgattctgact

SEQ ID NO: 194588 - DNA, 20 bp, Artificial Sequence
  Description of Artificial Sequence: Synthetic oligonucleotide
  Target: LAMA2; (-) strand; PAM type: YTN; PAM sequence: CTT
tctgtctctatgattctgac

SEQ ID NO: 194589 - DNA, 20 bp, Artificial Sequence
  Description of Artificial Sequence: Synthetic oligonucleotide
  Target: LAMA2; (-) strand; PAM type: YTN; PAM sequence: TTA
tactttctgtctctatgatt

SEQ ID NO: 194590 - DNA, 20 bp, Artificial Sequence
  Description of Artificial Sequence: Synthetic oligonucleotide
  Target: LAMA2; (-) strand; PAM type: YTN; PAM sequence: CTA
gtaatcaccattatactttc

SEQ ID NO: 194591 - DNA, 20 bp, Artificial Sequence
  Description of Artificial Sequence: Synthetic oligonucleotide
  Target: LAMA2; (-) strand; PAM type: YTN; PAM sequence: CTG
cagccgctagtaatcaccat

SEQ ID NO: 194592 - DNA, 20 bp, Artificial Sequence
  Description of Artificial Sequence: Synthetic oligonucleotide
  Target: LAMA2; (-) strand; PAM type: YTN; PAM sequence: CTC
cctgcagccgctagtaatca

SEQ ID NO: 194593 - DNA, 20 bp, Artificial Sequence
  Description of Artificial Sequence: Synthetic oligonucleotide
  Target: LAMA2; (-) strand; PAM type: YTN; PAM sequence: CTC
tccctgcagccgctagtaat

SEQ ID NO: 194594 - DNA, 20 bp, Artificial Sequence
  Description of Artificial Sequence: Synthetic oligonucleotide
  Target: LAMA2; (-) strand; PAM type: YTN; PAM sequence: CTC
tctccctgcagccgctagta

SEQ ID NO: 194595 - DNA, 20 bp, Artificial Sequence
  Description of Artificial Sequence: Synthetic oligonucleotide
  Target: LAMA2; (-) strand; PAM type: YTN; PAM sequence: TTC
ctctctccctgcagccgcta

SEQ ID NO: 194596 - DNA, 20 bp, Artificial Sequence
  Description of Artificial Sequence: Synthetic oligonucleotide
  Target: LAMA2; (-) strand; PAM type: YTN; PAM sequence: CTA
ttcctctctccctgcagccg

SEQ ID NO: 194597 - DNA, 20 bp, Artificial Sequence
  Description of Artificial Sequence: Synthetic oligonucleotide
  Target: LAMA2; (-) strand; PAM type: YTN; PAM sequence: CTC
cctattcctctctccctgca

SEQ ID NO: 194598 - DNA, 20 bp, Artificial Sequence
  Description of Artificial Sequence: Synthetic oligonucleotide
  Target: LAMA2; (-) strand; PAM type: YTN; PAM sequence: TTA
aataataactccctattcct

SEQ ID NO: 194599 - DNA, 20 bp, Artificial Sequence
  Description of Artificial Sequence: Synthetic oligonucleotide
  Target: LAMA2; (-) strand; PAM type: YTN; PAM sequence: CTC
attaaataataactccctat

SEQ ID NO: 194600 - DNA, 20 bp, Artificial Sequence
  Description of Artificial Sequence: Synthetic oligonucleotide
  Target: LAMA2; (-) strand; PAM type: YTN; PAM sequence: CTC
ggtactcattaaataataac

SEQ ID NO: 194601 - DNA, 20 bp, Artificial Sequence
  Description of Artificial Sequence: Synthetic oligonucleotide
  Target: LAMA2; (-) strand; PAM type: YTN; PAM sequence: CTG
aaactcggtactcattaaat

SEQ ID NO: 194602 - DNA, 20 bp, Artificial Sequence
  Description of Artificial Sequence: Synthetic oligonucleotide
  Target: LAMA2; (-) strand; PAM type: YTN; PAM sequence: TTG
caaaactgaaactcggtact

SEQ ID NO: 194603 - DNA, 20 bp, Artificial Sequence
  Description of Artificial Sequence: Synthetic oligonucleotide
  Target: LAMA2; (-) strand; PAM type: YTN; PAM sequence: CTT
gcaaaactgaaactcggtac

SEQ ID NO: 194604 - DNA, 20 bp, Artificial Sequence
  Description of Artificial Sequence: Synthetic oligonucleotide
  Target: LAMA2; (-) strand; PAM type: YTN; PAM sequence: TTC
atcttgcaaaactgaaactc

SEQ ID NO: 194605 - DNA, 20 bp, Artificial Sequence
  Description of Artificial Sequence: Synthetic oligonucleotide
  Target: LAMA2; (-) strand; PAM type: YTN; PAM sequence: TTT
catcttgcaaaactgaaact

SEQ ID NO: 194606 - DNA, 20 bp, Artificial Sequence
  Description of Artificial Sequence: Synthetic oligonucleotide
  Target: LAMA2; (-) strand; PAM type: YTN; PAM sequence: TTT
tcatcttgcaaaactgaaac

SEQ ID NO: 194607 - DNA, 20 bp, Artificial Sequence
  Description of Artificial Sequence: Synthetic oligonucleotide
  Target: LAMA2; (-) strand; PAM type: YTN; PAM sequence: CTT
ttcatcttgcaaaactgaaa

SEQ ID NO: 194608 - DNA, 20 bp, Artificial Sequence
  Description of Artificial Sequence: Synthetic oligonucleotide
  Target: LAMA2; (-) strand; PAM type: YTN; PAM sequence: TTC
acatccagaatgcttttcat

SEQ ID NO: 194609 - DNA, 20 bp, Artificial Sequence
  Description of Artificial Sequence: Synthetic oligonucleotide
  Target: LAMA2; (-) strand; PAM type: YTN; PAM sequence: TTG
tgcaaccatcaacaccattc

SEQ ID NO: 194610 - DNA, 20 bp, Artificial Sequence
  Description of Artificial Sequence: Synthetic oligonucleotide
  Target: LAMA2; (-) strand; PAM type: YTN; PAM sequence: TTG
ttgtgcaaccatcaacacca

SEQ ID NO: 194611 - DNA, 20 bp, Artificial Sequence
  Description of Artificial Sequence: Synthetic oligonucleotide
  Target: LAMA2; (-) strand; PAM type: YTN; PAM sequence: TTC
acattgttgtgcaaccatca

SEQ ID NO: 194612 - DNA, 20 bp, Artificial Sequence
  Description of Artificial Sequence: Synthetic oligonucleotide
  Target: LAMA2; (-) strand; PAM type: YTN; PAM sequence: CTT
cacattgttgtgcaaccatc

SEQ ID NO: 194613 - DNA, 20 bp, Artificial Sequence
  Description of Artificial Sequence: Synthetic oligonucleotide
  Target: LAMA2; (-) strand; PAM type: YTN; PAM sequence: TTA
gtaccttcacattgttgtgc

SEQ ID NO: 194614 - DNA, 20 bp, Artificial Sequence
  Description of Artificial Sequence: Synthetic oligonucleotide
  Target: LAMA2; (-) strand; PAM type: YTN; PAM sequence: TTC
agtagtattagtaccttcac

SEQ ID NO: 194615 - DNA, 20 bp, Artificial Sequence
  Description of Artificial Sequence: Synthetic oligonucleotide
  Target: LAMA2; (-) strand; PAM type: YTN; PAM sequence: TTA
agtatacagttcagtagtat

SEQ ID NO: 194616 - DNA, 20 bp, Artificial Sequence
  Description of Artificial Sequence: Synthetic oligonucleotide
  Target: LAMA2; (-) strand; PAM type: YTN; PAM sequence: TTT
aagtatacagttcagtagta

SEQ ID NO: 194617 - DNA, 20 bp, Artificial Sequence
  Description of Artificial Sequence: Synthetic oligonucleotide
  Target: LAMA2; (-) strand; PAM type: YTN; PAM sequence: TTT
taagtatacagttcagtagt

SEQ ID NO: 194618 - DNA, 20 bp, Artificial Sequence
  Description of Artificial Sequence: Synthetic oligonucleotide
  Target: LAMA2; (-) strand; PAM type: YTN; PAM sequence: TTT
ttaagtatacagttcagtag

SEQ ID NO: 194619 - DNA, 20 bp, Artificial Sequence
  Description of Artificial Sequence: Synthetic oligonucleotide
  Target: LAMA2; (-) strand; PAM type: YTN; PAM sequence: TTG
taaccatttttaagtataca

SEQ ID NO: 194620 - DNA, 20 bp, Artificial Sequence
  Description of Artificial Sequence: Synthetic oligonucleotide
  Target: LAMA2; (-) strand; PAM type: YTN; PAM sequence: TTC
atcattgtaaccatttttaa

SEQ ID NO: 194621 - DNA, 20 bp, Artificial Sequence
  Description of Artificial Sequence: Synthetic oligonucleotide
  Target: LAMA2; (-) strand; PAM type: YTN; PAM sequence: TTG
taaaatacacataacataaa

SEQ ID NO: 194622 - DNA, 20 bp, Artificial Sequence
  Description of Artificial Sequence: Synthetic oligonucleotide
  Target: LAMA2; (-) strand; PAM type: YTN; PAM sequence: TTA
aagtattgtaaaatacacat

SEQ ID NO: 194623 - DNA, 20 bp, Artificial Sequence
  Description of Artificial Sequence: Synthetic oligonucleotide
  Target: LAMA2; (-) strand; PAM type: YTN; PAM sequence: TTT
aaagtattgtaaaatacaca

SEQ ID NO: 194624 - DNA, 20 bp, Artificial Sequence
  Description of Artificial Sequence: Synthetic oligonucleotide
  Target: LAMA2; (-) strand; PAM type: YTN; PAM sequence: TTT
taaagtattgtaaaatacac

SEQ ID NO: 194625 - DNA, 20 bp, Artificial Sequence
  Description of Artificial Sequence: Synthetic oligonucleotide
  Target: LAMA2; (-) strand; PAM type: YTN; PAM sequence: TTA
ttttaaagtattgtaaaata

SEQ ID NO: 194626 - DNA, 20 bp, Artificial Sequence
  Description of Artificial Sequence: Synthetic oligonucleotide
  Target: LAMA2; (-) strand; PAM type: YTN; PAM sequence: TTG
aattattttaaagtattgta

SEQ ID NO: 194627 - DNA, 20 bp, Artificial Sequence
  Description of Artificial Sequence: Synthetic oligonucleotide
  Target: LAMA2; (-) strand; PAM type: YTN; PAM sequence: TTT
gaattattttaaagtattgt

SEQ ID NO: 194628 - DNA, 20 bp, Artificial Sequence
  Description of Artificial Sequence: Synthetic oligonucleotide
  Target: LAMA2; (-) strand; PAM type: YTN; PAM sequence: TTT
tgaattattttaaagtattg

SEQ ID NO: 194629 - DNA, 20 bp, Artificial Sequence
  Description of Artificial Sequence: Synthetic oligonucleotide
  Target: LAMA2; (-) strand; PAM type: YTN; PAM sequence: CTT
ttgaattattttaaagtatt

SEQ ID NO: 194630 - DNA, 20 bp, Artificial Sequence
  Description of Artificial Sequence: Synthetic oligonucleotide
  Target: LAMA2; (-) strand; PAM type: YTN; PAM sequence: TTA
cttttgaattattttaaagt

SEQ ID NO: 194631 - DNA, 20 bp, Artificial Sequence
  Description of Artificial Sequence: Synthetic oligonucleotide
  Target: LAMA2; (-) strand; PAM type: YTN; PAM sequence: CTG
ggagtgaggatgttactttt

SEQ ID NO: 194632 - DNA, 20 bp, Artificial Sequence
  Description of Artificial Sequence: Synthetic oligonucleotide
  Target: LAMA2; (-) strand; PAM type: YTN; PAM sequence: CTG
tatagagcactgggagtgag

SEQ ID NO: 194633 - DNA, 20 bp, Artificial Sequence
  Description of Artificial Sequence: Synthetic oligonucleotide
  Target: LAMA2; (-) strand; PAM type: YTN; PAM sequence: CTC
tgtatagagcactgggagtg

SEQ ID NO: 194634 - DNA, 20 bp, Artificial Sequence
  Description of Artificial Sequence: Synthetic oligonucleotide
  Target: LAMA2; (-) strand; PAM type: YTN; PAM sequence: TTC
tctgtatagagcactgggag

SEQ ID NO: 194635 - DNA, 20 bp, Artificial Sequence
  Description of Artificial Sequence: Synthetic oligonucleotide
  Target: LAMA2; (-) strand; PAM type: YTN; PAM sequence: TTT
ctctgtatagagcactggga

SEQ ID NO: 194636 - DNA, 20 bp, Artificial Sequence
  Description of Artificial Sequence: Synthetic oligonucleotide
  Target: LAMA2; (-) strand; PAM type: YTN; PAM sequence: TTT
tctctgtatagagcactggg

SEQ ID NO: 194637 - DNA, 20 bp, Artificial Sequence
  Description of Artificial Sequence: Synthetic oligonucleotide
  Target: LAMA2; (-) strand; PAM type: YTN; PAM sequence: TTG
gttttctctgtatagagcac

SEQ ID NO: 194638 - DNA, 20 bp, Artificial Sequence
  Description of Artificial Sequence: Synthetic oligonucleotide
  Target: LAMA2; (-) strand; PAM type: YTN; PAM sequence: CTA
aagaataaagacattggttt

SEQ ID NO: 194639 - DNA, 20 bp, Artificial Sequence
  Description of Artificial Sequence: Synthetic oligonucleotide
  Target: LAMA2; (-) strand; PAM type: YTN; PAM sequence: CTA
tgtaaacgcagaactaaaga

SEQ ID NO: 194640 - DNA, 20 bp, Artificial Sequence
  Description of Artificial Sequence: Synthetic oligonucleotide
  Target: LAMA2; (-) strand; PAM type: YTN; PAM sequence: TTG
tgtctatgtaaacgcagaac

SEQ ID NO: 194641 - DNA, 20 bp, Artificial Sequence
  Description of Artificial Sequence: Synthetic oligonucleotide
  Target: LAMA2; (-) strand; PAM type: YTN; PAM sequence: TTT
gtgtctatgtaaacgcagaa

SEQ ID NO: 194642 - DNA, 20 bp, Artificial Sequence
  Description of Artificial Sequence: Synthetic oligonucleotide
  Target: LAMA2; (-) strand; PAM type: YTN; PAM sequence: CTA
tgtgagaatttgtgtctatg

SEQ ID NO: 194643 - DNA, 20 bp, Artificial Sequence
  Description of Artificial Sequence: Synthetic oligonucleotide
  Target: LAMA2; (-) strand; PAM type: YTN; PAM sequence: TTG
ctatgtgagaatttgtgtct

SEQ ID NO: 194644 - DNA, 20 bp, Artificial Sequence
  Description of Artificial Sequence: Synthetic oligonucleotide
  Target: LAMA2; (-) strand; PAM type: YTN; PAM sequence: TTA
tgtgaaaaaaaaatgaatca

SEQ ID NO: 194645 - DNA, 20 bp, Artificial Sequence
  Description of Artificial Sequence: Synthetic oligonucleotide
  Target: LAMA2; (-) strand; PAM type: YTN; PAM sequence: TTT
atgtgaaaaaaaaatgaatc

SEQ ID NO: 194646 - DNA, 20 bp, Artificial Sequence
  Description of Artificial Sequence: Synthetic oligonucleotide
  Target: LAMA2; (-) strand; PAM type: YTN; PAM sequence: TTA
agatagcatttatgtgaaaa

SEQ ID NO: 194647 - DNA, 20 bp, Artificial Sequence
  Description of Artificial Sequence: Synthetic oligonucleotide
  Target: LAMA2; (-) strand; PAM type: YTN; PAM sequence: TTG
aacatgcagaacaagatatg

SEQ ID NO: 194648 - DNA, 20 bp, Artificial Sequence
  Description of Artificial Sequence: Synthetic oligonucleotide
  Target: LAMA2; (-) strand; PAM type: YTN; PAM sequence: TTG
ttgaacatgcagaacaagat

SEQ ID NO: 194649 - DNA, 20 bp, Artificial Sequence
  Description of Artificial Sequence: Synthetic oligonucleotide
  Target: LAMA2; (-) strand; PAM type: YTN; PAM sequence: CTG
agacattgttgaacatgcag

SEQ ID NO: 194650 - DNA, 20 bp, Artificial Sequence
  Description of Artificial Sequence: Synthetic oligonucleotide
  Target: LAMA2; (-) strand; PAM type: YTN; PAM sequence: CTC
atggcaagactgagacattg

SEQ ID NO: 194651 - DNA, 20 bp, Artificial Sequence
  Description of Artificial Sequence: Synthetic oligonucleotide
  Target: LAMA2; (-) strand; PAM type: YTN; PAM sequence: TTC
tcatggcaagactgagacat

SEQ ID NO: 194652 - DNA, 20 bp, Artificial Sequence
  Description of Artificial Sequence: Synthetic oligonucleotide
  Target: LAMA2; (-) strand; PAM type: YTN; PAM sequence: TTT
ctcatggcaagactgagaca

SEQ ID NO: 194653 - DNA, 20 bp, Artificial Sequence
  Description of Artificial Sequence: Synthetic oligonucleotide
  Target: LAMA2; (-) strand; PAM type: YTN; PAM sequence: CTC
cgtttctcatggcaagactg

SEQ ID NO: 194654 - DNA, 20 bp, Artificial Sequence
  Description of Artificial Sequence: Synthetic oligonucleotide
  Target: LAMA2; (-) strand; PAM type: YTN; PAM sequence: CTG
ctccgtttctcatggcaaga

SEQ ID NO: 194655 - DNA, 20 bp, Artificial Sequence
  Description of Artificial Sequence: Synthetic oligonucleotide
  Target: LAMA2; (-) strand; PAM type: YTN; PAM sequence: TTC
cctgctccgtttctcatggc

SEQ ID NO: 194656 - DNA, 20 bp, Artificial Sequence
  Description of Artificial Sequence: Synthetic oligonucleotide
  Target: LAMA2; (-) strand; PAM type: YTN; PAM sequence: TTT
ccctgctccgtttctcatgg

SEQ ID NO: 194657 - DNA, 20 bp, Artificial Sequence
  Description of Artificial Sequence: Synthetic oligonucleotide
  Target: LAMA2; (-) strand; PAM type: YTN; PAM sequence: TTA
ggcccaggaagtttccctgc

SEQ ID NO: 194658 - DNA, 20 bp, Artificial Sequence
  Description of Artificial Sequence: Synthetic oligonucleotide
  Target: LAMA2; (-) strand; PAM type: YTN; PAM sequence: TTT
aggcccaggaagtttccctg

SEQ ID NO: 194659 - DNA, 20 bp, Artificial Sequence
  Description of Artificial Sequence: Synthetic oligonucleotide
  Target: LAMA2; (-) strand; PAM type: YTN; PAM sequence: TTC
agtttaggcccaggaagttt

SEQ ID NO: 194660 - DNA, 20 bp, Artificial Sequence
  Description of Artificial Sequence: Synthetic oligonucleotide
  Target: LAMA2; (-) strand; PAM type: YTN; PAM sequence: CTA
ttcagtttaggcccaggaag

SEQ ID NO: 194661 - DNA, 20 bp, Artificial Sequence
  Description of Artificial Sequence: Synthetic oligonucleotide
  Target: LAMA2; (-) strand; PAM type: YTN; PAM sequence: TTG
gtaaaggaccaatggagagt

SEQ ID NO: 194662 - DNA, 20 bp, Artificial Sequence
  Description of Artificial Sequence: Synthetic oligonucleotide
  Target: LAMA2; (-) strand; PAM type: YTN; PAM sequence: CTC
attggtaaaggaccaatgga

SEQ ID NO: 194663 - DNA, 20 bp, Artificial Sequence
  Description of Artificial Sequence: Synthetic oligonucleotide
  Target: LAMA2; (-) strand; PAM type: YTN; PAM sequence: TTC
atgagaatagaatggctcat

SEQ ID NO: 194664 - DNA, 20 bp, Artificial Sequence
  Description of Artificial Sequence: Synthetic oligonucleotide
  Target: LAMA2; (-) strand; PAM type: YTN; PAM sequence: TTT
catgagaatagaatggctca

SEQ ID NO: 194665 - DNA, 20 bp, Artificial Sequence
  Description of Artificial Sequence: Synthetic oligonucleotide
  Target: LAMA2; (-) strand; PAM type: YTN; PAM sequence: CTC
atgaatatttcatgagaata

SEQ ID NO: 194666 - DNA, 20 bp, Artificial Sequence
  Description of Artificial Sequence: Synthetic oligonucleotide
  Target: LAMA2; (-) strand; PAM type: YTN; PAM sequence: TTC
tcatgaatatttcatgagaa

SEQ ID NO: 194667 - DNA, 20 bp, Artificial Sequence
  Description of Artificial Sequence: Synthetic oligonucleotide
  Target: LAMA2; (-) strand; PAM type: YTN; PAM sequence: CTG
gtgaaacattctcatgaata

SEQ ID NO: 194668 - DNA, 20 bp, Artificial Sequence
  Description of Artificial Sequence: Synthetic oligonucleotide
  Target: LAMA2; (-) strand; PAM type: YTN; PAM sequence: CTA
gatctggtgaaacattctca

SEQ ID NO: 194669 - DNA, 20 bp, Artificial Sequence
  Description of Artificial Sequence: Synthetic oligonucleotide
  Target: LAMA2; (-) strand; PAM type: YTN; PAM sequence: TTA
gaagtaatatgtagaaatcc

SEQ ID NO: 194670 - DNA, 20 bp, Artificial Sequence
  Description of Artificial Sequence: Synthetic oligonucleotide
  Target: LAMA2; (-) strand; PAM type: YTN; PAM sequence: TTA
ggcaaagaaatatggaaatg

SEQ ID NO: 194671 - DNA, 20 bp, Artificial Sequence
  Description of Artificial Sequence: Synthetic oligonucleotide
  Target: LAMA2; (-) strand; PAM type: YTN; PAM sequence: TTT
aggcaaagaaatatggaaat

SEQ ID NO: 194672 - DNA, 20 bp, Artificial Sequence
  Description of Artificial Sequence: Synthetic oligonucleotide
  Target: LAMA2; (-) strand; PAM type: YTN; PAM sequence: TTT
taggcaaagaaatatggaaa

SEQ ID NO: 194673 - DNA, 20 bp, Artificial Sequence
  Description of Artificial Sequence: Synthetic oligonucleotide
  Target: LAMA2; (-) strand; PAM type: YTN; PAM sequence: TTC
aaatagaatggaaaatttta

SEQ ID NO: 194674 - DNA, 20 bp, Artificial Sequence
  Description of Artificial Sequence: Synthetic oligonucleotide
  Target: LAMA2; (-) strand; PAM type: YTN; PAM sequence: TTT
caaatagaatggaaaatttt

SEQ ID NO: 194675 - DNA, 20 bp, Artificial Sequence
  Description of Artificial Sequence: Synthetic oligonucleotide
  Target: LAMA2; (-) strand; PAM type: YTN; PAM sequence: CTT
tcaaatagaatggaaaattt

SEQ ID NO: 194676 - DNA, 20 bp, Artificial Sequence
  Description of Artificial Sequence: Synthetic oligonucleotide
  Target: LAMA2; (-) strand; PAM type: YTN; PAM sequence: CTC
cccatgtaggtgataaaaag

SEQ ID NO: 194677 - DNA, 20 bp, Artificial Sequence
  Description of Artificial Sequence: Synthetic oligonucleotide
  Target: LAMA2; (-) strand; PAM type: YTN; PAM sequence: CTA
cctccccatgtaggtgataa

SEQ ID NO: 194678 - DNA, 20 bp, Artificial Sequence
  Description of Artificial Sequence: Synthetic oligonucleotide
  Target: LAMA2; (-) strand; PAM type: YTN; PAM sequence: CTC
tacctccccatgtaggtgat

SEQ ID NO: 194679 - DNA, 20 bp, Artificial Sequence
  Description of Artificial Sequence: Synthetic oligonucleotide
  Target: LAMA2; (-) strand; PAM type: YTN; PAM sequence: TTG
aaagccaacactctacctcc

SEQ ID NO: 194680 - DNA, 20 bp, Artificial Sequence
  Description of Artificial Sequence: Synthetic oligonucleotide
  Target: LAMA2; (-) strand; PAM type: YTN; PAM sequence: TTT
gaaagccaacactctacctc

SEQ ID NO: 194681 - DNA, 20 bp, Artificial Sequence
  Description of Artificial Sequence: Synthetic oligonucleotide
  Target: LAMA2; (-) strand; PAM type: YTN; PAM sequence: CTT
tgaaagccaacactctacct

SEQ ID NO: 194682 - DNA, 20 bp, Artificial Sequence
  Description of Artificial Sequence: Synthetic oligonucleotide
  Target: LAMA2; (-) strand; PAM type: YTN; PAM sequence: TTC
acctttgaaagccaacactc

SEQ ID NO: 194683 - DNA, 20 bp, Artificial Sequence
  Description of Artificial Sequence: Synthetic oligonucleotide
  Target: LAMA2; (-) strand; PAM type: YTN; PAM sequence: TTT
cacctttgaaagccaacact

SEQ ID NO: 194684 - DNA, 20 bp, Artificial Sequence
  Description of Artificial Sequence: Synthetic oligonucleotide
  Target: LAMA2; (-) strand; PAM type: YTN; PAM sequence: TTG
tggaaagatgcaatttcacc

SEQ ID NO: 194685 - DNA, 20 bp, Artificial Sequence
  Description of Artificial Sequence: Synthetic oligonucleotide
  Target: LAMA2; (-) strand; PAM type: YTN; PAM sequence: CTC
agagttgtggaaagatgcaa

SEQ ID NO: 194686 - DNA, 20 bp, Artificial Sequence
  Description of Artificial Sequence: Synthetic oligonucleotide
  Target: LAMA2; (-) strand; PAM type: YTN; PAM sequence: CTC
agaaaactcagagttgtgga

SEQ ID NO: 194687 - DNA, 20 bp, Artificial Sequence
  Description of Artificial Sequence: Synthetic oligonucleotide
  Target: LAMA2; (-) strand; PAM type: YTN; PAM sequence: CTC
aaaactcagaaaactcagag

SEQ ID NO: 194688 - DNA, 20 bp, Artificial Sequence
  Description of Artificial Sequence: Synthetic oligonucleotide
  Target: LAMA2; (-) strand; PAM type: YTN; PAM sequence: TTA
aaagaagtcaagaacagact

SEQ ID NO: 194689 - DNA, 20 bp, Artificial Sequence
  Description of Artificial Sequence: Synthetic oligonucleotide
  Target: LAMA2; (-) strand; PAM type: YTN; PAM sequence: TTT
aaaagaagtcaagaacagac

SEQ ID NO: 194690 - DNA, 20 bp, Artificial Sequence
  Description of Artificial Sequence: Synthetic oligonucleotide
  Target: LAMA2; (-) strand; PAM type: YTN; PAM sequence: TTT
taaaagaagtcaagaacaga

SEQ ID NO: 194691 - DNA, 20 bp, Artificial Sequence
  Description of Artificial Sequence: Synthetic oligonucleotide
  Target: LAMA2; (-) strand; PAM type: YTN; PAM sequence: TTT
ttaaaagaagtcaagaacag

SEQ ID NO: 194692 - DNA, 20 bp, Artificial Sequence
  Description of Artificial Sequence: Synthetic oligonucleotide
  Target: LAMA2; (-) strand; PAM type: YTN; PAM sequence: TTT
tttaaaagaagtcaagaaca

SEQ ID NO: 194693 - DNA, 20 bp, Artificial Sequence
  Description of Artificial Sequence: Synthetic oligonucleotide
  Target: LAMA2; (-) strand; PAM type: YTN; PAM sequence: TTT
ttttaaaagaagtcaagaac

SEQ ID NO: 194694 - DNA, 20 bp, Artificial Sequence
  Description of Artificial Sequence: Synthetic oligonucleotide
  Target: LAMA2; (-) strand; PAM type: YTN; PAM sequence: TTT
tttttaaaagaagtcaagaa

SEQ ID NO: 194695 - DNA, 20 bp, Artificial Sequence
  Description of Artificial Sequence: Synthetic oligonucleotide
  Target: LAMA2; (-) strand; PAM type: YTN; PAM sequence: TTT
ttttttaaaagaagtcaaga

SEQ ID NO: 194696 - DNA, 20 bp, Artificial Sequence
  Description of Artificial Sequence: Synthetic oligonucleotide
  Target: LAMA2; (-) strand; PAM type: YTN; PAM sequence: TTG
ccaccatgaccaaagagttt

SEQ ID NO: 194697 - DNA, 20 bp, Artificial Sequence
  Description of Artificial Sequence: Synthetic oligonucleotide
  Target: LAMA2; (-) strand; PAM type: YTN; PAM sequence: CTA
ttgccaccatgaccaaagag

SEQ ID NO: 194698 - DNA, 20 bp, Artificial Sequence
  Description of Artificial Sequence: Synthetic oligonucleotide
  Target: LAMA2; (-) strand; PAM type: YTN; PAM sequence: CTC
tattgccaccatgaccaaag

SEQ ID NO: 194699 - DNA, 20 bp, Artificial Sequence
  Description of Artificial Sequence: Synthetic oligonucleotide
  Target: LAMA2; (-) strand; PAM type: YTN; PAM sequence: CTA
acctctattgccaccatgac

SEQ ID NO: 194700 - DNA, 20 bp, Artificial Sequence
  Description of Artificial Sequence: Synthetic oligonucleotide
  Target: LAMA2; (-) strand; PAM type: YTN; PAM sequence: CTC
taacctctattgccaccatg

SEQ ID NO: 194701 - DNA, 20 bp, Artificial Sequence
  Description of Artificial Sequence: Synthetic oligonucleotide
  Target: LAMA2; (-) strand; PAM type: YTN; PAM sequence: TTC
atactctaacctctattgcc

SEQ ID NO: 194702 - DNA, 20 bp, Artificial Sequence
  Description of Artificial Sequence: Synthetic oligonucleotide
  Target: LAMA2; (-) strand; PAM type: YTN; PAM sequence: TTG
gtattcatactctaacctct

SEQ ID NO: 194703 - DNA, 20 bp, Artificial Sequence
  Description of Artificial Sequence: Synthetic oligonucleotide
  Target: LAMA2; (-) strand; PAM type: YTN; PAM sequence: CTA
aacgagaggagttggtattc

SEQ ID NO: 194704 - DNA, 20 bp, Artificial Sequence
  Description of Artificial Sequence: Synthetic oligonucleotide
  Target: LAMA2; (-) strand; PAM type: YTN; PAM sequence: CTA
aagaacagaggcctaaacga

SEQ ID NO: 194705 - DNA, 20 bp, Artificial Sequence
  Description of Artificial Sequence: Synthetic oligonucleotide
  Target: LAMA2; (-) strand; PAM type: YTN; PAM sequence: TTG
aagcggtaaaatgaccatat

SEQ ID NO: 194706 - DNA, 20 bp, Artificial Sequence
  Description of Artificial Sequence: Synthetic oligonucleotide
  Target: LAMA2; (-) strand; PAM type: YTN; PAM sequence: CTT
gaagcggtaaaatgaccata

SEQ ID NO: 194707 - DNA, 20 bp, Artificial Sequence
  Description of Artificial Sequence: Synthetic oligonucleotide
  Target: LAMA2; (-) strand; PAM type: YTN; PAM sequence: CTG
atccttgaagcggtaaaatg

SEQ ID NO: 194708 - DNA, 20 bp, Artificial Sequence
  Description of Artificial Sequence: Synthetic oligonucleotide
  Target: LAMA2; (-) strand; PAM type: YTN; PAM sequence: TTC
tgatccttgaagcggtaaaa

SEQ ID NO: 194709 - DNA, 20 bp, Artificial Sequence
  Description of Artificial Sequence: Synthetic oligonucleotide
  Target: LAMA2; (-) strand; PAM type: YTN; PAM sequence: TTG
ggatatgatatgttctgatc

SEQ ID NO: 194710 - DNA, 20 bp, Artificial Sequence
  Description of Artificial Sequence: Synthetic oligonucleotide
  Target: LAMA2; (-) strand; PAM type: YTN; PAM sequence: TTT
gggatatgatatgttctgat

SEQ ID NO: 194711 - DNA, 20 bp, Artificial Sequence
  Description of Artificial Sequence: Synthetic oligonucleotide
  Target: LAMA2; (-) strand; PAM type: YTN; PAM sequence: TTA
taaatttgggatatgatatg

SEQ ID NO: 194712 - DNA, 20 bp, Artificial Sequence
  Description of Artificial Sequence: Synthetic oligonucleotide
  Target: LAMA2; (-) strand; PAM type: YTN; PAM sequence: CTG
gggattataaatttgggata

SEQ ID NO: 194713 - DNA, 20 bp, Artificial Sequence
  Description of Artificial Sequence: Synthetic oligonucleotide
  Target: LAMA2; (-) strand; PAM type: YTN; PAM sequence: CTC
tggggattataaatttggga

SEQ ID NO: 194714 - DNA, 20 bp, Artificial Sequence
  Description of Artificial Sequence: Synthetic oligonucleotide
  Target: LAMA2; (-) strand; PAM type: YTN; PAM sequence: TTA
cctctggggattataaattt

SEQ ID NO: 194715 - DNA, 20 bp, Artificial Sequence
  Description of Artificial Sequence: Synthetic oligonucleotide
  Target: LAMA2; (-) strand; PAM type: YTN; PAM sequence: CTG
agttacctctggggattata

SEQ ID NO: 194716 - DNA, 20 bp, Artificial Sequence
  Description of Artificial Sequence: Synthetic oligonucleotide
  Target: LAMA2; (-) strand; PAM type: YTN; PAM sequence: TTA
tacatatctgagttacctct

SEQ ID NO: 194717 - DNA, 20 bp, Artificial Sequence
  Description of Artificial Sequence: Synthetic oligonucleotide
  Target: LAMA2; (-) strand; PAM type: YTN; PAM sequence: TTA
aagaattatacatatctgag

SEQ ID NO: 194718 - DNA, 20 bp, Artificial Sequence
  Description of Artificial Sequence: Synthetic oligonucleotide
  Target: LAMA2; (-) strand; PAM type: YTN; PAM sequence: TTA
ttaaagaattatacatatct

SEQ ID NO: 194719 - DNA, 20 bp, Artificial Sequence
  Description of Artificial Sequence: Synthetic oligonucleotide
  Target: LAMA2; (-) strand; PAM type: YTN; PAM sequence: TTG
ttattaaagaattatacata

SEQ ID NO: 194720 - DNA, 20 bp, Artificial Sequence
  Description of Artificial Sequence: Synthetic oligonucleotide
  Target: LAMA2; (-) strand; PAM type: YTN; PAM sequence: TTG
agaacaaatcagattgttat

SEQ ID NO: 194721 - DNA, 20 bp, Artificial Sequence
  Description of Artificial Sequence: Synthetic oligonucleotide
  Target: LAMA2; (-) strand; PAM type: YTN; PAM sequence: TTA
aatattgagaacaaatcaga

SEQ ID NO: 194722 - DNA, 20 bp, Artificial Sequence
  Description of Artificial Sequence: Synthetic oligonucleotide
  Target: LAMA2; (-) strand; PAM type: YTN; PAM sequence: TTT
aaatattgagaacaaatcag

SEQ ID NO: 194723 - DNA, 20 bp, Artificial Sequence
  Description of Artificial Sequence: Synthetic oligonucleotide
  Target: LAMA2; (-) strand; PAM type: YTN; PAM sequence: CTT
taaatattgagaacaaatca

SEQ ID NO: 194724 - DNA, 20 bp, Artificial Sequence
  Description of Artificial Sequence: Synthetic oligonucleotide
  Target: LAMA2; (-) strand; PAM type: YTN; PAM sequence: TTC
actttaaatattgagaacaa

SEQ ID NO: 194725 - DNA, 20 bp, Artificial Sequence
  Description of Artificial Sequence: Synthetic oligonucleotide
  Target: LAMA2; (-) strand; PAM type: YTN; PAM sequence: TTG
ggttcactttaaatattgag

SEQ ID NO: 194726 - DNA, 20 bp, Artificial Sequence
  Description of Artificial Sequence: Synthetic oligonucleotide
  Target: LAMA2; (-) strand; PAM type: YTN; PAM sequence: CTT
gggttcactttaaatattga

SEQ ID NO: 194727 - DNA, 20 bp, Artificial Sequence
  Description of Artificial Sequence: Synthetic oligonucleotide
  Target: LAMA2; (-) strand; PAM type: YTN; PAM sequence: TTC
atcttgggttcactttaaat

SEQ ID NO: 194728 - DNA, 20 bp, Artificial Sequence
  Description of Artificial Sequence: Synthetic oligonucleotide
  Target: LAMA2; (-) strand; PAM type: YTN; PAM sequence: CTT
catcttgggttcactttaaa

SEQ ID NO: 194729 - DNA, 20 bp, Artificial Sequence
  Description of Artificial Sequence: Synthetic oligonucleotide
  Target: LAMA2; (-) strand; PAM type: YTN; PAM sequence: CTC
ttcatcttgggttcacttta

SEQ ID NO: 194730 - DNA, 20 bp, Artificial Sequence
  Description of Artificial Sequence: Synthetic oligonucleotide
  Target: LAMA2; (-) strand; PAM type: YTN; PAM sequence: TTC
caactcttcatcttgggttc

SEQ ID NO: 194731 - DNA, 20 bp, Artificial Sequence
  Description of Artificial Sequence: Synthetic oligonucleotide
  Target: LAMA2; (-) strand; PAM type: YTN; PAM sequence: TTT
ccaactcttcatcttgggtt

SEQ ID NO: 194732 - DNA, 20 bp, Artificial Sequence
  Description of Artificial Sequence: Synthetic oligonucleotide
  Target: LAMA2; (-) strand; PAM type: YTN; PAM sequence: CTT
tccaactcttcatcttgggt

SEQ ID NO: 194733 - DNA, 20 bp, Artificial Sequence
  Description of Artificial Sequence: Synthetic oligonucleotide
  Target: LAMA2; (-) strand; PAM type: YTN; PAM sequence: TTC
ctttccaactcttcatcttg

SEQ ID NO: 194734 - DNA, 20 bp, Artificial Sequence
  Description of Artificial Sequence: Synthetic oligonucleotide
  Target: LAMA2; (-) strand; PAM type: YTN; PAM sequence: TTT
cctttccaactcttcatctt

SEQ ID NO: 194735 - DNA, 20 bp, Artificial Sequence
  Description of Artificial Sequence: Synthetic oligonucleotide
  Target: LAMA2; (-) strand; PAM type: YTN; PAM sequence: TTA
aaaatttcctttccaactct

SEQ ID NO: 194736 - DNA, 20 bp, Artificial Sequence
  Description of Artificial Sequence: Synthetic oligonucleotide
  Target: LAMA2; (-) strand; PAM type: YTN; PAM sequence: TTT
aaaaatttcctttccaactc

SEQ ID NO: 194737 - DNA, 20 bp, Artificial Sequence
  Description of Artificial Sequence: Synthetic oligonucleotide
  Target: LAMA2; (-) strand; PAM type: YTN; PAM sequence: TTT
taaaaatttcctttccaact

SEQ ID NO: 194738 - DNA, 20 bp, Artificial Sequence
  Description of Artificial Sequence: Synthetic oligonucleotide
  Target: LAMA2; (-) strand; PAM type: YTN; PAM sequence: TTA
gagttttaaaaatttccttt

SEQ ID NO: 194739 - DNA, 20 bp, Artificial Sequence
  Description of Artificial Sequence: Synthetic oligonucleotide
  Target: LAMA2; (-) strand; PAM type: YTN; PAM sequence: CTA
aagcattagagttttaaaaa

SEQ ID NO: 194740 - DNA, 20 bp, Artificial Sequence
  Description of Artificial Sequence: Synthetic oligonucleotide
  Target: LAMA2; (-) strand; PAM type: YTN; PAM sequence: CTA
ctaaagcattagagttttaa

SEQ ID NO: 194741 - DNA, 20 bp, Artificial Sequence
  Description of Artificial Sequence: Synthetic oligonucleotide
  Target: LAMA2; (-) strand; PAM type: YTN; PAM sequence: TTG
agagcctactaaagcattag

SEQ ID NO: 194742 - DNA, 20 bp, Artificial Sequence
  Description of Artificial Sequence: Synthetic oligonucleotide
  Target: LAMA2; (-) strand; PAM type: YTN; PAM sequence: TTT
gagagcctactaaagcatta

SEQ ID NO: 194743 - DNA, 20 bp, Artificial Sequence
  Description of Artificial Sequence: Synthetic oligonucleotide
  Target: LAMA2; (-) strand; PAM type: YTN; PAM sequence: CTG
tcagcagtttgagagcctac

SEQ ID NO: 194744 - DNA, 20 bp, Artificial Sequence
  Description of Artificial Sequence: Synthetic oligonucleotide
  Target: LAMA2; (-) strand; PAM type: YTN; PAM sequence: TTG
agctgtcagcagtttgagag

SEQ ID NO: 194745 - DNA, 20 bp, Artificial Sequence
  Description of Artificial Sequence: Synthetic oligonucleotide
  Target: LAMA2; (-) strand; PAM type: YTN; PAM sequence: CTT
gagctgtcagcagtttgaga

SEQ ID NO: 194746 - DNA, 20 bp, Artificial Sequence
  Description of Artificial Sequence: Synthetic oligonucleotide
  Target: LAMA2; (-) strand; PAM type: YTN; PAM sequence: TTG
ccaaagagacagaacacttg

SEQ ID NO: 194747 - DNA, 20 bp, Artificial Sequence
  Description of Artificial Sequence: Synthetic oligonucleotide
  Target: LAMA2; (-) strand; PAM type: YTN; PAM sequence: TTA
tatgttgccaaagagacaga

SEQ ID NO: 194748 - DNA, 20 bp, Artificial Sequence
  Description of Artificial Sequence: Synthetic oligonucleotide
  Target: LAMA2; (-) strand; PAM type: YTN; PAM sequence: TTT
atatgttgccaaagagacag

SEQ ID NO: 194749 - DNA, 20 bp, Artificial Sequence
  Description of Artificial Sequence: Synthetic oligonucleotide
  Target: LAMA2; (-) strand; PAM type: YTN; PAM sequence: TTT
tatatgttgccaaagagaca

SEQ ID NO: 194750 - DNA, 20 bp, Artificial Sequence
  Description of Artificial Sequence: Synthetic oligonucleotide
  Target: LAMA2; (-) strand; PAM type: YTN; PAM sequence: TTT
ttatatgttgccaaagagac

SEQ ID NO: 194751 - DNA, 20 bp, Artificial Sequence
  Description of Artificial Sequence: Synthetic oligonucleotide
  Target: LAMA2; (-) strand; PAM type: YTN; PAM sequence: CTG
gatttttatatgttgccaaa

SEQ ID NO: 194752 - DNA, 20 bp, Artificial Sequence
  Description of Artificial Sequence: Synthetic oligonucleotide
  Target: LAMA2; (-) strand; PAM type: YTN; PAM sequence: TTC
tggatttttatatgttgcca

SEQ ID NO: 194753 - DNA, 20 bp, Artificial Sequence
  Description of Artificial Sequence: Synthetic oligonucleotide
  Target: LAMA2; (-) strand; PAM type: YTN; PAM sequence: TTA
ttctggatttttatatgttg

SEQ ID NO: 194754 - DNA, 20 bp, Artificial Sequence
  Description of Artificial Sequence: Synthetic oligonucleotide
  Target: LAMA2; (-) strand; PAM type: YTN; PAM sequence: CTG
ttattctggatttttatatg

SEQ ID NO: 194755 - DNA, 20 bp, Artificial Sequence
  Description of Artificial Sequence: Synthetic oligonucleotide
  Target: LAMA2; (-) strand; PAM type: YTN; PAM sequence: TTA
actgttattctggattttta

SEQ ID NO: 194756 - DNA, 20 bp, Artificial Sequence
  Description of Artificial Sequence: Synthetic oligonucleotide
  Target: LAMA2; (-) strand; PAM type: YTN; PAM sequence: TTT
aactgttattctggattttt

SEQ ID NO: 194757 - DNA, 20 bp, Artificial Sequence
  Description of Artificial Sequence: Synthetic oligonucleotide
  Target: LAMA2; (-) strand; PAM type: YTN; PAM sequence: CTG
tggaatatttaactgttatt

SEQ ID NO: 194758 - DNA, 20 bp, Artificial Sequence
  Description of Artificial Sequence: Synthetic oligonucleotide
  Target: LAMA2; (-) strand; PAM type: YTN; PAM sequence: TTA
gctgtggaatatttaactgt

SEQ ID NO: 194759 - DNA, 20 bp, Artificial Sequence
  Description of Artificial Sequence: Synthetic oligonucleotide
  Target: LAMA2; (-) strand; PAM type: YTN; PAM sequence: TTA
aataatagttagctgtggaa

SEQ ID NO: 194760 - DNA, 20 bp, Artificial Sequence
  Description of Artificial Sequence: Synthetic oligonucleotide
  Target: LAMA2; (-) strand; PAM type: YTN; PAM sequence: TTA
gtattaaataatagttagct

SEQ ID NO: 194761 - DNA, 20 bp, Artificial Sequence
  Description of Artificial Sequence: Synthetic oligonucleotide
  Target: LAMA2; (-) strand; PAM type: YTN; PAM sequence: TTA
accaagacataatattagta

SEQ ID NO: 194762 - DNA, 20 bp, Artificial Sequence
  Description of Artificial Sequence: Synthetic oligonucleotide
  Target: LAMA2; (-) strand; PAM type: YTN; PAM sequence: TTC
cattaaccaagacataatat

SEQ ID NO: 194763 - DNA, 20 bp, Artificial Sequence
  Description of Artificial Sequence: Synthetic oligonucleotide
  Target: LAMA2; (-) strand; PAM type: YTN; PAM sequence: CTT
ccattaaccaagacataata

SEQ ID NO: 194764 - DNA, 20 bp, Artificial Sequence
  Description of Artificial Sequence: Synthetic oligonucleotide
  Target: LAMA2; (-) strand; PAM type: YTN; PAM sequence: CTA
tggtgtcttccattaaccaa

SEQ ID NO: 194765 - DNA, 20 bp, Artificial Sequence
  Description of Artificial Sequence: Synthetic oligonucleotide
  Target: LAMA2; (-) strand; PAM type: YTN; PAM sequence: TTC
aaaatgtggtctatggtgtc

SEQ ID NO: 194766 - DNA, 20 bp, Artificial Sequence
  Description of Artificial Sequence: Synthetic oligonucleotide
  Target: LAMA2; (-) strand; PAM type: YTN; PAM sequence: TTA
aaaaggagcacaaatattca

SEQ ID NO: 194767 - DNA, 20 bp, Artificial Sequence
  Description of Artificial Sequence: Synthetic oligonucleotide
  Target: LAMA2; (-) strand; PAM type: YTN; PAM sequence: TTA
ccaatattaaaaaggagcac

SEQ ID NO: 194768 - DNA, 20 bp, Artificial Sequence
  Description of Artificial Sequence: Synthetic oligonucleotide
  Target: LAMA2; (-) strand; PAM type: YTN; PAM sequence: CTC
agaaggaggattaccaatat

SEQ ID NO: 194769 - DNA, 20 bp, Artificial Sequence
  Description of Artificial Sequence: Synthetic oligonucleotide
  Target: LAMA2; (-) strand; PAM type: YTN; PAM sequence: TTA
tctcagaaggaggattacca

SEQ ID NO: 194770 - DNA, 20 bp, Artificial Sequence
  Description of Artificial Sequence: Synthetic oligonucleotide
  Target: LAMA2; (-) strand; PAM type: YTN; PAM sequence: TTT
atctcagaaggaggattacc

SEQ ID NO: 194771 - DNA, 20 bp, Artificial Sequence
  Description of Artificial Sequence: Synthetic oligonucleotide
  Target: LAMA2; (-) strand; PAM type: YTN; PAM sequence: CTG
aatttatctcagaaggagga

SEQ ID NO: 194772 - DNA, 20 bp, Artificial Sequence
  Description of Artificial Sequence: Synthetic oligonucleotide
  Target: LAMA2; (-) strand; PAM type: YTN; PAM sequence: TTC
ctgaatttatctcagaagga

SEQ ID NO: 194773 - DNA, 20 bp, Artificial Sequence
  Description of Artificial Sequence: Synthetic oligonucleotide
  Target: LAMA2; (-) strand; PAM type: YTN; PAM sequence: TTT
cctgaatttatctcagaagg

SEQ ID NO: 194774 - DNA, 20 bp, Artificial Sequence
  Description of Artificial Sequence: Synthetic oligonucleotide
  Target: LAMA2; (-) strand; PAM type: YTN; PAM sequence: CTG
aggagaaaggtcagatttcc

SEQ ID NO: 194775 - DNA, 20 bp, Artificial Sequence
  Description of Artificial Sequence: Synthetic oligonucleotide
  Target: LAMA2; (-) strand; PAM type: YTN; PAM sequence: TTC
aaaagggctgaggagaaagg

SEQ ID NO: 194776 - DNA, 20 bp, Artificial Sequence
  Description of Artificial Sequence: Synthetic oligonucleotide
  Target: LAMA2; (-) strand; PAM type: YTN; PAM sequence: TTT
caaaagggctgaggagaaag

SEQ ID NO: 194777 - DNA, 20 bp, Artificial Sequence
  Description of Artificial Sequence: Synthetic oligonucleotide
  Target: LAMA2; (-) strand; PAM type: YTN; PAM sequence: TTA
tttcaaaagggctgaggaga

SEQ ID NO: 194778 - DNA, 20 bp, Artificial Sequence
  Description of Artificial Sequence: Synthetic oligonucleotide
  Target: LAMA2; (-) strand; PAM type: YTN; PAM sequence: TTT
atttcaaaagggctgaggag

SEQ ID NO: 194779 - DNA, 20 bp, Artificial Sequence
  Description of Artificial Sequence: Synthetic oligonucleotide
  Target: LAMA2; (-) strand; PAM type: YTN; PAM sequence: CTT
tatttcaaaagggctgagga

SEQ ID NO: 194780 - DNA, 20 bp, Artificial Sequence
  Description of Artificial Sequence: Synthetic oligonucleotide
  Target: LAMA2; (-) strand; PAM type: YTN; PAM sequence: TTG
gaaaagtggtctttatttca

SEQ ID NO: 194781 - DNA, 20 bp, Artificial Sequence
  Description of Artificial Sequence: Synthetic oligonucleotide
  Target: LAMA2; (-) strand; PAM type: YTN; PAM sequence: CTA
attggaaaagtggtctttat

SEQ ID NO: 194782 - DNA, 20 bp, Artificial Sequence
  Description of Artificial Sequence: Synthetic oligonucleotide
  Target: LAMA2; (-) strand; PAM type: YTN; PAM sequence: TTC
ctaattggaaaagtggtctt

SEQ ID NO: 194783 - DNA, 20 bp, Artificial Sequence
  Description of Artificial Sequence: Synthetic oligonucleotide
  Target: LAMA2; (-) strand; PAM type: YTN; PAM sequence: TTA
gatattcctaattggaaaag

SEQ ID NO: 194784 - DNA, 20 bp, Artificial Sequence
  Description of Artificial Sequence: Synthetic oligonucleotide
  Target: LAMA2; (-) strand; PAM type: YTN; PAM sequence: CTA
cattagatattcctaattgg

SEQ ID NO: 194785 - DNA, 20 bp, Artificial Sequence
  Description of Artificial Sequence: Synthetic oligonucleotide
  Target: LAMA2; (-) strand; PAM type: YTN; PAM sequence: TTA
acactacattagatattcct

SEQ ID NO: 194786 - DNA, 20 bp, Artificial Sequence
  Description of Artificial Sequence: Synthetic oligonucleotide
  Target: LAMA2; (-) strand; PAM type: YTN; PAM sequence: TTT
aacactacattagatattcc

SEQ ID NO: 194787 - DNA, 20 bp, Artificial Sequence
  Description of Artificial Sequence: Synthetic oligonucleotide
  Target: LAMA2; (-) strand; PAM type: YTN; PAM sequence: CTT
taacactacattagatattc

SEQ ID NO: 194788 - DNA, 20 bp, Artificial Sequence
  Description of Artificial Sequence: Synthetic oligonucleotide
  Target: LAMA2; (-) strand; PAM type: YTN; PAM sequence: CTG
agctttaacactacattaga

SEQ ID NO: 194789 - DNA, 20 bp, Artificial Sequence
  Description of Artificial Sequence: Synthetic oligonucleotide
  Target: LAMA2; (-) strand; PAM type: YTN; PAM sequence: CTC
tgagctttaacactacatta

SEQ ID NO: 194790 - DNA, 20 bp, Artificial Sequence
  Description of Artificial Sequence: Synthetic oligonucleotide
  Target: LAMA2; (-) strand; PAM type: YTN; PAM sequence: TTC
aactctgagctttaacacta

SEQ ID NO: 194791 - DNA, 20 bp, Artificial Sequence
  Description of Artificial Sequence: Synthetic oligonucleotide
  Target: LAMA2; (-) strand; PAM type: YTN; PAM sequence: TTT
caactctgagctttaacact

SEQ ID NO: 194792 - DNA, 20 bp, Artificial Sequence
  Description of Artificial Sequence: Synthetic oligonucleotide
  Target: LAMA2; (-) strand; PAM type: YTN; PAM sequence: TTT
tcaactctgagctttaacac

SEQ ID NO: 194793 - DNA, 20 bp, Artificial Sequence
  Description of Artificial Sequence: Synthetic oligonucleotide
  Target: LAMA2; (-) strand; PAM type: YTN; PAM sequence: CTT
ttcaactctgagctttaaca

SEQ ID NO: 194794 - DNA, 20 bp, Artificial Sequence
  Description of Artificial Sequence: Synthetic oligonucleotide
  Target: LAMA2; (-) strand; PAM type: YTN; PAM sequence: CTA
aaacatcttttcaactctga

SEQ ID NO: 194795 - DNA, 20 bp, Artificial Sequence
  Description of Artificial Sequence: Synthetic oligonucleotide
  Target: LAMA2; (-) strand; PAM type: YTN; PAM sequence: CTG
atgaatactaaaacatcttt

SEQ ID NO: 194796 - DNA, 20 bp, Artificial Sequence
  Description of Artificial Sequence: Synthetic oligonucleotide
  Target: LAMA2; (-) strand; PAM type: YTN; PAM sequence: TTA
tatctgatgaatactaaaac

SEQ ID NO: 194797 - DNA, 20 bp, Artificial Sequence
  Description of Artificial Sequence: Synthetic oligonucleotide
  Target: LAMA2; (-) strand; PAM type: YTN; PAM sequence: CTA
caacgttatatctgatgaat

SEQ ID NO: 194798 - DNA, 20 bp, Artificial Sequence
  Description of Artificial Sequence: Synthetic oligonucleotide
  Target: LAMA2; (-) strand; PAM type: YTN; PAM sequence: TTA
ccaataatactacaacgtta

SEQ ID NO: 194799 - DNA, 20 bp, Artificial Sequence
  Description of Artificial Sequence: Synthetic oligonucleotide
  Target: LAMA2; (-) strand; PAM type: YTN; PAM sequence: TTC
acaatgttaccaataatact

SEQ ID NO: 194800 - DNA, 20 bp, Artificial Sequence
  Description of Artificial Sequence: Synthetic oligonucleotide
  Target: LAMA2; (-) strand; PAM type: YTN; PAM sequence: TTT
cacaatgttaccaataatac

SEQ ID NO: 194801 - DNA, 20 bp, Artificial Sequence
  Description of Artificial Sequence: Synthetic oligonucleotide
  Target: LAMA2; (-) strand; PAM type: YTN; PAM sequence: TTG
tttcacaatgttaccaataa

SEQ ID NO: 194802 - DNA, 20 bp, Artificial Sequence
  Description of Artificial Sequence: Synthetic oligonucleotide
  Target: LAMA2; (-) strand; PAM type: YTN; PAM sequence: TTT
gtttcacaatgttaccaata

SEQ ID NO: 194803 - DNA, 20 bp, Artificial Sequence
  Description of Artificial Sequence: Synthetic oligonucleotide
  Target: LAMA2; (-) strand; PAM type: YTN; PAM sequence: CTG
gaatttgtttcacaatgtta

SEQ ID NO: 194804 - DNA, 20 bp, Artificial Sequence
  Description of Artificial Sequence: Synthetic oligonucleotide
  Target: LAMA2; (-) strand; PAM type: YTN; PAM sequence: CTG
aagtgtactggaatttgttt

SEQ ID NO: 194805 - DNA, 20 bp, Artificial Sequence
  Description of Artificial Sequence: Synthetic oligonucleotide
  Target: LAMA2; (-) strand; PAM type: YTN; PAM sequence: TTA
gcagagctgaagtgtactgg

SEQ ID NO: 194806 - DNA, 20 bp, Artificial Sequence
  Description of Artificial Sequence: Synthetic oligonucleotide
  Target: LAMA2; (-) strand; PAM type: YTN; PAM sequence: TTG
ttagcagagctgaagtgtac

SEQ ID NO: 194807 - DNA, 20 bp, Artificial Sequence
  Description of Artificial Sequence: Synthetic oligonucleotide
  Target: LAMA2; (-) strand; PAM type: YTN; PAM sequence: TTT
gttagcagagctgaagtgta

SEQ ID NO: 194808 - DNA, 20 bp, Artificial Sequence
  Description of Artificial Sequence: Synthetic oligonucleotide
  Target: LAMA2; (-) strand; PAM type: YTN; PAM sequence: CTT
tgttagcagagctgaagtgt

SEQ ID NO: 194809 - DNA, 20 bp, Artificial Sequence
  Description of Artificial Sequence: Synthetic oligonucleotide
  Target: LAMA2; (-) strand; PAM type: YTN; PAM sequence: TTC
atctttgttagcagagctga

SEQ ID NO: 194810 - DNA, 20 bp, Artificial Sequence
  Description of Artificial Sequence: Synthetic oligonucleotide
  Target: LAMA2; (-) strand; PAM type: YTN; PAM sequence: TTT
catctttgttagcagagctg

SEQ ID NO: 194811 - DNA, 20 bp, Artificial Sequence
  Description of Artificial Sequence: Synthetic oligonucleotide
  Target: LAMA2; (-) strand; PAM type: YTN; PAM sequence: CTA
tttcatctttgttagcagag

SEQ ID NO: 194812 - DNA, 20 bp, Artificial Sequence
  Description of Artificial Sequence: Synthetic oligonucleotide
  Target: LAMA2; (-) strand; PAM type: YTN; PAM sequence: CTC
tatttcatctttgttagcag

SEQ ID NO: 194813 - DNA, 20 bp, Artificial Sequence
  Description of Artificial Sequence: Synthetic oligonucleotide
  Target: LAMA2; (-) strand; PAM type: YTN; PAM sequence: TTC
tctatttcatctttgttagc

SEQ ID NO: 194814 - DNA, 20 bp, Artificial Sequence
  Description of Artificial Sequence: Synthetic oligonucleotide
  Target: LAMA2; (-) strand; PAM type: YTN; PAM sequence: TTA
ttctctatttcatctttgtt

SEQ ID NO: 194815 - DNA, 20 bp, Artificial Sequence
  Description of Artificial Sequence: Synthetic oligonucleotide
  Target: LAMA2; (-) strand; PAM type: YTN; PAM sequence: TTT
attctctatttcatctttgt

SEQ ID NO: 194816 - DNA, 20 bp, Artificial Sequence
  Description of Artificial Sequence: Synthetic oligonucleotide
  Target: LAMA2; (-) strand; PAM type: YTN; PAM sequence: CTT
tattctctatttcatctttg

SEQ ID NO: 194817 - DNA, 20 bp, Artificial Sequence
  Description of Artificial Sequence: Synthetic oligonucleotide
  Target: LAMA2; (-) strand; PAM type: YTN; PAM sequence: CTA
ctttattctctatttcatct

SEQ ID NO: 194818 - DNA, 20 bp, Artificial Sequence
  Description of Artificial Sequence: Synthetic oligonucleotide
  Target: LAMA2; (-) strand; PAM type: YTN; PAM sequence: TTC
agcatacacctactttattc

SEQ ID NO: 194819 - DNA, 20 bp, Artificial Sequence
  Description of Artificial Sequence: Synthetic oligonucleotide
  Target: LAMA2; (-) strand; PAM type: YTN; PAM sequence: TTA
ataagattcagcatacacct

SEQ ID NO: 194820 - DNA, 20 bp, Artificial Sequence
  Description of Artificial Sequence: Synthetic oligonucleotide
  Target: LAMA2; (-) strand; PAM type: YTN; PAM sequence: CTT
aataagattcagcatacacc

SEQ ID NO: 194821 - DNA, 20 bp, Artificial Sequence
  Description of Artificial Sequence: Synthetic oligonucleotide
  Target: LAMA2; (-) strand; PAM type: YTN; PAM sequence: CTG
gatgtcaaccttaataagat

SEQ ID NO: 194822 - DNA, 20 bp, Artificial Sequence
  Description of Artificial Sequence: Synthetic oligonucleotide
  Target: LAMA2; (-) strand; PAM type: YTN; PAM sequence: TTC
aaactggatgtcaaccttaa

SEQ ID NO: 194823 - DNA, 20 bp, Artificial Sequence
  Description of Artificial Sequence: Synthetic oligonucleotide
  Target: LAMA2; (-) strand; PAM type: YTN; PAM sequence: TTA
gaggatgaatgtattcaaac

SEQ ID NO: 194824 - DNA, 20 bp, Artificial Sequence
  Description of Artificial Sequence: Synthetic oligonucleotide
  Target: LAMA2; (-) strand; PAM type: YTN; PAM sequence: CTT
agaggatgaatgtattcaaa

SEQ ID NO: 194825 - DNA, 20 bp, Artificial Sequence
  Description of Artificial Sequence: Synthetic oligonucleotide
  Target: LAMA2; (-) strand; PAM type: YTN; PAM sequence: CTA
taccttagaggatgaatgta

SEQ ID NO: 194826 - DNA, 20 bp, Artificial Sequence
  Description of Artificial Sequence: Synthetic oligonucleotide
  Target: LAMA2; (-) strand; PAM type: YTN; PAM sequence: TTA
tacccaaaactataccttag

SEQ ID NO: 194827 - DNA, 20 bp, Artificial Sequence
  Description of Artificial Sequence: Synthetic oligonucleotide
  Target: LAMA2; (-) strand; PAM type: YTN; PAM sequence: TTT
atacccaaaactatacctta

SEQ ID NO: 194828 - DNA, 20 bp, Artificial Sequence
  Description of Artificial Sequence: Synthetic oligonucleotide
  Target: LAMA2; (-) strand; PAM type: YTN; PAM sequence: CTC
gatggtttatacccaaaact

SEQ ID NO: 194829 - DNA, 20 bp, Artificial Sequence
  Description of Artificial Sequence: Synthetic oligonucleotide
  Target: LAMA2; (-) strand; PAM type: YTN; PAM sequence: TTG
ctcgatggtttatacccaaa

SEQ ID NO: 194830 - DNA, 20 bp, Artificial Sequence
  Description of Artificial Sequence: Synthetic oligonucleotide
  Target: LAMA2; (-) strand; PAM type: YTN; PAM sequence: CTT
gctcgatggtttatacccaa

SEQ ID NO: 194831 - DNA, 20 bp, Artificial Sequence
  Description of Artificial Sequence: Synthetic oligonucleotide
  Target: LAMA2; (-) strand; PAM type: YTN; PAM sequence: TTG
tgcttgctcgatggtttata

SEQ ID NO: 194832 - DNA, 20 bp, Artificial Sequence
  Description of Artificial Sequence: Synthetic oligonucleotide
  Target: LAMA2; (-) strand; PAM type: YTN; PAM sequence: TTT
gtgcttgctcgatggtttat

SEQ ID NO: 194833 - DNA, 20 bp, Artificial Sequence
  Description of Artificial Sequence: Synthetic oligonucleotide
  Target: LAMA2; (-) strand; PAM type: YTN; PAM sequence: TTT
tgtgcttgctcgatggttta

SEQ ID NO: 194834 - DNA, 20 bp, Artificial Sequence
  Description of Artificial Sequence: Synthetic oligonucleotide
  Target: LAMA2; (-) strand; PAM type: YTN; PAM sequence: CTG
ttttgtgcttgctcgatggt

SEQ ID NO: 194835 - DNA, 20 bp, Artificial Sequence
  Description of Artificial Sequence: Synthetic oligonucleotide
  Target: LAMA2; (-) strand; PAM type: YTN; PAM sequence: TTC
actgttttgtgcttgctcga

SEQ ID NO: 194836 - DNA, 20 bp, Artificial Sequence
  Description of Artificial Sequence: Synthetic oligonucleotide
  Target: LAMA2; (-) strand; PAM type: YTN; PAM sequence: CTT
cactgttttgtgcttgctcg

SEQ ID NO: 194837 - DNA, 20 bp, Artificial Sequence
  Description of Artificial Sequence: Synthetic oligonucleotide
  Target: LAMA2; (-) strand; PAM type: YTN; PAM sequence: CTC
agcttcactgttttgtgctt

SEQ ID NO: 194838 - DNA, 20 bp, Artificial Sequence
  Description of Artificial Sequence: Synthetic oligonucleotide
  Target: LAMA2; (-) strand; PAM type: YTN; PAM sequence: CTC
tcagcttcactgttttgtgc

SEQ ID NO: 194839 - DNA, 20 bp, Artificial Sequence
  Description of Artificial Sequence: Synthetic oligonucleotide
  Target: LAMA2; (-) strand; PAM type: YTN; PAM sequence: CTG
cagctctcagcttcactgtt

SEQ ID NO: 194840 - DNA, 20 bp, Artificial Sequence
  Description of Artificial Sequence: Synthetic oligonucleotide
  Target: LAMA2; (-) strand; PAM type: YTN; PAM sequence: TTC
tgcagctctcagcttcactg

SEQ ID NO: 194841 - DNA, 20 bp, Artificial Sequence
  Description of Artificial Sequence: Synthetic oligonucleotide
  Target: LAMA2; (-) strand; PAM type: YTN; PAM sequence: CTA
tgttctgcagctctcagctt

SEQ ID NO: 194842 - DNA, 20 bp, Artificial Sequence
  Description of Artificial Sequence: Synthetic oligonucleotide
  Target: LAMA2; (-) strand; PAM type: YTN; PAM sequence: CTC
tatgttctgcagctctcagc

SEQ ID NO: 194843 - DNA, 20 bp, Artificial Sequence
  Description of Artificial Sequence: Synthetic oligonucleotide
  Target: LAMA2; (-) strand; PAM type: YTN; PAM sequence: TTA
gaatccaccagatctctatg

SEQ ID NO: 194844 - DNA, 20 bp, Artificial Sequence
  Description of Artificial Sequence: Synthetic oligonucleotide
  Target: LAMA2; (-) strand; PAM type: YTN; PAM sequence: TTT
agaatccaccagatctctat

SEQ ID NO: 194845 - DNA, 20 bp, Artificial Sequence
  Description of Artificial Sequence: Synthetic oligonucleotide
  Target: LAMA2; (-) strand; PAM type: YTN; PAM sequence: CTT
tagaatccaccagatctcta

SEQ ID NO: 194846 - DNA, 20 bp, Artificial Sequence
  Description of Artificial Sequence: Synthetic oligonucleotide
  Target: LAMA2; (-) strand; PAM type: YTN; PAM sequence: CTC
agtcctttagaatccaccag

SEQ ID NO: 194847 - DNA, 20 bp, Artificial Sequence
  Description of Artificial Sequence: Synthetic oligonucleotide
  Target: LAMA2; (-) strand; PAM type: YTN; PAM sequence: TTC
tcagtcctttagaatccacc

SEQ ID NO: 194848 - DNA, 20 bp, Artificial Sequence
  Description of Artificial Sequence: Synthetic oligonucleotide
  Target: LAMA2; (-) strand; PAM type: YTN; PAM sequence: TTC
agtagccatcgatcattctc

SEQ ID NO: 194849 - DNA, 20 bp, Artificial Sequence
  Description of Artificial Sequence: Synthetic oligonucleotide
  Target: LAMA2; (-) strand; PAM type: YTN; PAM sequence: TTT
cagtagccatcgatcattct

SEQ ID NO: 194850 - DNA, 20 bp, Artificial Sequence
  Description of Artificial Sequence: Synthetic oligonucleotide
  Target: LAMA2; (-) strand; PAM type: YTN; PAM sequence: TTC
atttcagtagccatcgatca

SEQ ID NO: 194851 - DNA, 20 bp, Artificial Sequence
  Description of Artificial Sequence: Synthetic oligonucleotide
  Target: LAMA2; (-) strand; PAM type: YTN; PAM sequence: CTT
catttcagtagccatcgatc

SEQ ID NO: 194852 - DNA, 20 bp, Artificial Sequence
  Description of Artificial Sequence: Synthetic oligonucleotide
  Target: LAMA2; (-) strand; PAM type: YTN; PAM sequence: TTC
acacttcatttcagtagcca

SEQ ID NO: 194853 - DNA, 20 bp, Artificial Sequence
  Description of Artificial Sequence: Synthetic oligonucleotide
  Target: LAMA2; (-) strand; PAM type: YTN; PAM sequence: TTT
cacacttcatttcagtagcc

SEQ ID NO: 194854 - DNA, 20 bp, Artificial Sequence
  Description of Artificial Sequence: Synthetic oligonucleotide
  Target: LAMA2; (-) strand; PAM type: YTN; PAM sequence: CTA
tggataccatttcacacttc

SEQ ID NO: 194855 - DNA, 20 bp, Artificial Sequence
  Description of Artificial Sequence: Synthetic oligonucleotide
  Target: LAMA2; (-) strand; PAM type: YTN; PAM sequence: TTA
aagacaaatatcagctatgg

SEQ ID NO: 194856 - DNA, 20 bp, Artificial Sequence
  Description of Artificial Sequence: Synthetic oligonucleotide
  Target: LAMA2; (-) strand; PAM type: YTN; PAM sequence: TTA
tcagttaaagacaaatatca

SEQ ID NO: 194857 - DNA, 20 bp, Artificial Sequence
  Description of Artificial Sequence: Synthetic oligonucleotide
  Target: LAMA2; (-) strand; PAM type: YTN; PAM sequence: TTT
atcagttaaagacaaatatc

SEQ ID NO: 194858 - DNA, 20 bp, Artificial Sequence
  Description of Artificial Sequence: Synthetic oligonucleotide
  Target: LAMA2; (-) strand; PAM type: YTN; PAM sequence: TTT
tatcagttaaagacaaatat

SEQ ID NO: 194859 - DNA, 20 bp, Artificial Sequence
  Description of Artificial Sequence: Synthetic oligonucleotide
  Target: LAMA2; (-) strand; PAM type: YTN; PAM sequence: TTA
gccattttatcagttaaaga

SEQ ID NO: 194860 - DNA, 20 bp, Artificial Sequence
  Description of Artificial Sequence: Synthetic oligonucleotide
  Target: LAMA2; (-) strand; PAM type: YTN; PAM sequence: TTT
agccattttatcagttaaag

SEQ ID NO: 194861 - DNA, 20 bp, Artificial Sequence
  Description of Artificial Sequence: Synthetic oligonucleotide
  Target: LAMA2; (-) strand; PAM type: YTN; PAM sequence: CTT
tagccattttatcagttaaa

SEQ ID NO: 194862 - DNA, 20 bp, Artificial Sequence
  Description of Artificial Sequence: Synthetic oligonucleotide
  Target: LAMA2; (-) strand; PAM type: YTN; PAM sequence: TTG
accaggaaatgctttagcca

SEQ ID NO: 194863 - DNA, 20 bp, Artificial Sequence
  Description of Artificial Sequence: Synthetic oligonucleotide
  Target: LAMA2; (-) strand; PAM type: YTN; PAM sequence: CTA
gaggaatgagaagagaggag

SEQ ID NO: 194864 - DNA, 20 bp, Artificial Sequence
  Description of Artificial Sequence: Synthetic oligonucleotide
  Target: LAMA2; (-) strand; PAM type: YTN; PAM sequence: TTC
tagaggaatgagaagagagg

SEQ ID NO: 194865 - DNA, 20 bp, Artificial Sequence
  Description of Artificial Sequence: Synthetic oligonucleotide
  Target: LAMA2; (-) strand; PAM type: YTN; PAM sequence: CTG
ttctagaggaatgagaagag

SEQ ID NO: 194866 - DNA, 20 bp, Artificial Sequence
  Description of Artificial Sequence: Synthetic oligonucleotide
  Target: LAMA2; (-) strand; PAM type: YTN; PAM sequence: TTG
aaggccactgttctagagga

SEQ ID NO: 194867 - DNA, 20 bp, Artificial Sequence
  Description of Artificial Sequence: Synthetic oligonucleotide
  Target: LAMA2; (-) strand; PAM type: YTN; PAM sequence: TTT
gaaggccactgttctagagg

SEQ ID NO: 194868 - DNA, 20 bp, Artificial Sequence
  Description of Artificial Sequence: Synthetic oligonucleotide
  Target: LAMA2; (-) strand; PAM type: YTN; PAM sequence: TTA
tcaagaaaagagtttgaagg

SEQ ID NO: 194869 - DNA, 20 bp, Artificial Sequence
  Description of Artificial Sequence: Synthetic oligonucleotide
  Target: LAMA2; (-) strand; PAM type: YTN; PAM sequence: TTG
ttatcaagaaaagagtttga

SEQ ID NO: 194870 - DNA, 20 bp, Artificial Sequence
  Description of Artificial Sequence: Synthetic oligonucleotide
  Target: LAMA2; (-) strand; PAM type: YTN; PAM sequence: TTT
gttatcaagaaaagagtttg

SEQ ID NO: 194871 - DNA, 20 bp, Artificial Sequence
  Description of Artificial Sequence: Synthetic oligonucleotide
  Target: LAMA2; (-) strand; PAM type: YTN; PAM sequence: TTA
agtgcatttgttatcaagaa

SEQ ID NO: 194872 - DNA, 20 bp, Artificial Sequence
  Description of Artificial Sequence: Synthetic oligonucleotide
  Target: LAMA2; (-) strand; PAM type: YTN; PAM sequence: TTT
aagtgcatttgttatcaaga

SEQ ID NO: 194873 - DNA, 20 bp, Artificial Sequence
  Description of Artificial Sequence: Synthetic oligonucleotide
  Target: LAMA2; (-) strand; PAM type: YTN; PAM sequence: CTC
caatttaagtgcatttgtta

SEQ ID NO: 194874 - DNA, 20 bp, Artificial Sequence
  Description of Artificial Sequence: Synthetic oligonucleotide
  Target: LAMA2; (-) strand; PAM type: YTN; PAM sequence: TTC
tccaatttaagtgcatttgt

SEQ ID NO: 194875 - DNA, 20 bp, Artificial Sequence
  Description of Artificial Sequence: Synthetic oligonucleotide
  Target: LAMA2; (-) strand; PAM type: YTN; PAM sequence: TTA
gaaagagagatattctccaa

SEQ ID NO: 194876 - DNA, 20 bp, Artificial Sequence
  Description of Artificial Sequence: Synthetic oligonucleotide
  Target: LAMA2; (-) strand; PAM type: YTN; PAM sequence: TTA
tgtgtgtgttagaaagagag

SEQ ID NO: 194877 - DNA, 20 bp, Artificial Sequence
  Description of Artificial Sequence: Synthetic oligonucleotide
  Target: LAMA2; (-) strand; PAM type: YTN; PAM sequence: TTG
ttatgtgtgtgttagaaaga

SEQ ID NO: 194878 - DNA, 20 bp, Artificial Sequence
  Description of Artificial Sequence: Synthetic oligonucleotide
  Target: LAMA2; (-) strand; PAM type: YTN; PAM sequence: TTT
gttatgtgtgtgttagaaag

SEQ ID NO: 194879 - DNA, 20 bp, Artificial Sequence
  Description of Artificial Sequence: Synthetic oligonucleotide
  Target: LAMA2; (-) strand; PAM type: YTN; PAM sequence: TTT
tgttatgtgtgtgttagaaa

SEQ ID NO: 194880 - DNA, 20 bp, Artificial Sequence
  Description of Artificial Sequence: Synthetic oligonucleotide
  Target: LAMA2; (-) strand; PAM type: YTN; PAM sequence: TTT
ttgttatgtgtgtgttagaa

SEQ ID NO: 194881 - DNA, 20 bp, Artificial Sequence
  Description of Artificial Sequence: Synthetic oligonucleotide
  Target: LAMA2; (-) strand; PAM type: YTN; PAM sequence: CTC
atgacatttttgttatgtgt

SEQ ID NO: 194882 - DNA, 20 bp, Artificial Sequence
  Description of Artificial Sequence: Synthetic oligonucleotide
  Target: LAMA2; (-) strand; PAM type: YTN; PAM sequence: TTA
agacatctcatgacattttt

SEQ ID NO: 194883 - DNA, 20 bp, Artificial Sequence
  Description of Artificial Sequence: Synthetic oligonucleotide
  Target: LAMA2; (-) strand; PAM type: YTN; PAM sequence: TTT
aagacatctcatgacatttt

SEQ ID NO: 194884 - DNA, 20 bp, Artificial Sequence
  Description of Artificial Sequence: Synthetic oligonucleotide
  Target: LAMA2; (-) strand; PAM type: YTN; PAM sequence: CTA
agtatttaagacatctcatg

SEQ ID NO: 194885 - DNA, 20 bp, Artificial Sequence
  Description of Artificial Sequence: Synthetic oligonucleotide
  Target: LAMA2; (-) strand; PAM type: YTN; PAM sequence: CTG
aatgtaaaatgtctaagtat

SEQ ID NO: 194886 - DNA, 20 bp, Artificial Sequence
  Description of Artificial Sequence: Synthetic oligonucleotide
  Target: LAMA2; (-) strand; PAM type: YTN; PAM sequence: TTG
gagtacactgaatgtaaaat

SEQ ID NO: 194887 - DNA, 20 bp, Artificial Sequence
  Description of Artificial Sequence: Synthetic oligonucleotide
  Target: LAMA2; (-) strand; PAM type: YTN; PAM sequence: TTA
aaaaagaatataaaatagaa

SEQ ID NO: 194888 - DNA, 20 bp, Artificial Sequence
  Description of Artificial Sequence: Synthetic oligonucleotide
  Target: LAMA2; (-) strand; PAM type: YTN; PAM sequence: TTT
aaaaaagaatataaaataga

SEQ ID NO: 194889 - DNA, 20 bp, Artificial Sequence
  Description of Artificial Sequence: Synthetic oligonucleotide
  Target: LAMA2; (-) strand; PAM type: YTN; PAM sequence: TTA
ataggtcaaaaccagtattt

SEQ ID NO: 194890 - DNA, 20 bp, Artificial Sequence
  Description of Artificial Sequence: Synthetic oligonucleotide
  Target: LAMA2; (-) strand; PAM type: YTN; PAM sequence: TTT
aataggtcaaaaccagtatt

SEQ ID NO: 194891 - DNA, 20 bp, Artificial Sequence
  Description of Artificial Sequence: Synthetic oligonucleotide
  Target: LAMA2; (-) strand; PAM type: YTN; PAM sequence: TTG
aagtccatttaataggtcaa

SEQ ID NO: 194892 - DNA, 20 bp, Artificial Sequence
  Description of Artificial Sequence: Synthetic oligonucleotide
  Target: LAMA2; (-) strand; PAM type: YTN; PAM sequence: CTT
gaagtccatttaataggtca

SEQ ID NO: 194893 - DNA, 20 bp, Artificial Sequence
  Description of Artificial Sequence: Synthetic oligonucleotide
  Target: LAMA2; (-) strand; PAM type: YTN; PAM sequence: TTC
ttgaagtccatttaataggt

SEQ ID NO: 194894 - DNA, 20 bp, Artificial Sequence
  Description of Artificial Sequence: Synthetic oligonucleotide
  Target: LAMA2; (-) strand; PAM type: YTN; PAM sequence: TTT
cttgaagtccatttaatagg

SEQ ID NO: 194895 - DNA, 20 bp, Artificial Sequence
  Description of Artificial Sequence: Synthetic oligonucleotide
  Target: LAMA2; (-) strand; PAM type: YTN; PAM sequence: CTG
aaaaatttcttgaagtccat

SEQ ID NO: 194896 - DNA, 20 bp, Artificial Sequence
  Description of Artificial Sequence: Synthetic oligonucleotide
  Target: LAMA2; (-) strand; PAM type: YTN; PAM sequence: CTA
gatgagactgaaaaatttct

SEQ ID NO: 194897 - DNA, 20 bp, Artificial Sequence
  Description of Artificial Sequence: Synthetic oligonucleotide
  Target: LAMA2; (-) strand; PAM type: YTN; PAM sequence: CTG
tgtgcctagatgagactgaa

SEQ ID NO: 194898 - DNA, 20 bp, Artificial Sequence
  Description of Artificial Sequence: Synthetic oligonucleotide
  Target: LAMA2; (-) strand; PAM type: YTN; PAM sequence: TTA
aatctgtgtgcctagatgag

SEQ ID NO: 194899 - DNA, 20 bp, Artificial Sequence
  Description of Artificial Sequence: Synthetic oligonucleotide
  Target: LAMA2; (-) strand; PAM type: YTN; PAM sequence: TTT
aaatctgtgtgcctagatga

SEQ ID NO: 194900 - DNA, 20 bp, Artificial Sequence
  Description of Artificial Sequence: Synthetic oligonucleotide
  Target: LAMA2; (-) strand; PAM type: YTN; PAM sequence: CTA
acatagaagtaatatttaaa

SEQ ID NO: 194901 - DNA, 20 bp, Artificial Sequence
  Description of Artificial Sequence: Synthetic oligonucleotide
  Target: LAMA2; (-) strand; PAM type: YTN; PAM sequence: CTC
acagaagaggtcactaacat

SEQ ID NO: 194902 - DNA, 20 bp, Artificial Sequence
  Description of Artificial Sequence: Synthetic oligonucleotide
  Target: LAMA2; (-) strand; PAM type: YTN; PAM sequence: TTA
ctcacagaagaggtcactaa

SEQ ID NO: 194903 - DNA, 20 bp, Artificial Sequence
  Description of Artificial Sequence: Synthetic oligonucleotide
  Target: LAMA2; (-) strand; PAM type: YTN; PAM sequence: CTT
actcacagaagaggtcacta

SEQ ID NO: 194904 - DNA, 20 bp, Artificial Sequence
  Description of Artificial Sequence: Synthetic oligonucleotide
  Target: LAMA2; (-) strand; PAM type: YTN; PAM sequence: TTA
gagacggagcttactcacag

SEQ ID NO: 194905 - DNA, 20 bp, Artificial Sequence
  Description of Artificial Sequence: Synthetic oligonucleotide
  Target: LAMA2; (-) strand; PAM type: YTN; PAM sequence: CTG
gaaggaatatgcgaataagg

SEQ ID NO: 194906 - DNA, 20 bp, Artificial Sequence
  Description of Artificial Sequence: Synthetic oligonucleotide
  Target: LAMA2; (-) strand; PAM type: YTN; PAM sequence: TTC
tggaaggaatatgcgaataa

SEQ ID NO: 194907 - DNA, 20 bp, Artificial Sequence
  Description of Artificial Sequence: Synthetic oligonucleotide
  Target: LAMA2; (-) strand; PAM type: YTN; PAM sequence: TTG
tacgttctggaaggaatatg

SEQ ID NO: 194908 - DNA, 20 bp, Artificial Sequence
  Description of Artificial Sequence: Synthetic oligonucleotide
  Target: LAMA2; (-) strand; PAM type: YTN; PAM sequence: TTA
agttgtacgttctggaagga

SEQ ID NO: 194909 - DNA, 20 bp, Artificial Sequence
  Description of Artificial Sequence: Synthetic oligonucleotide
  Target: LAMA2; (-) strand; PAM type: YTN; PAM sequence: TTA
agccacgttaagttgtacgt

SEQ ID NO: 194910 - DNA, 20 bp, Artificial Sequence
  Description of Artificial Sequence: Synthetic oligonucleotide
  Target: LAMA2; (-) strand; PAM type: YTN; PAM sequence: TTT
aagccacgttaagttgtacg

SEQ ID NO: 194911 - DNA, 20 bp, Artificial Sequence
  Description of Artificial Sequence: Synthetic oligonucleotide
  Target: LAMA2; (-) strand; PAM type: YTN; PAM sequence: TTA
agtttaagccacgttaagtt

SEQ ID NO: 194912 - DNA, 20 bp, Artificial Sequence
  Description of Artificial Sequence: Synthetic oligonucleotide
  Target: LAMA2; (-) strand; PAM type: YTN; PAM sequence: CTG
ttaagtttaagccacgttaa

SEQ ID NO: 194913 - DNA, 20 bp, Artificial Sequence
  Description of Artificial Sequence: Synthetic oligonucleotide
  Target: LAMA2; (-) strand; PAM type: YTN; PAM sequence: TTA
gctgttaagtttaagccacg

SEQ ID NO: 194914 - DNA, 20 bp, Artificial Sequence
  Description of Artificial Sequence: Synthetic oligonucleotide
  Target: LAMA2; (-) strand; PAM type: YTN; PAM sequence: TTT
agctgttaagtttaagccac

SEQ ID NO: 194915 - DNA, 20 bp, Artificial Sequence
  Description of Artificial Sequence: Synthetic oligonucleotide
  Target: LAMA2; (-) strand; PAM type: YTN; PAM sequence: TTC
agagggagaatgtttagctg

SEQ ID NO: 194916 - DNA, 20 bp, Artificial Sequence
  Description of Artificial Sequence: Synthetic oligonucleotide
  Target: LAMA2; (-) strand; PAM type: YTN; PAM sequence: CTT
cagagggagaatgtttagct

SEQ ID NO: 194917 - DNA, 20 bp, Artificial Sequence
  Description of Artificial Sequence: Synthetic oligonucleotide
  Target: LAMA2; (-) strand; PAM type: YTN; PAM sequence: CTG
tggaaagaatgggatacttc

SEQ ID NO: 194918 - DNA, 20 bp, Artificial Sequence
  Description of Artificial Sequence: Synthetic oligonucleotide
  Target: LAMA2; (-) strand; PAM type: YTN; PAM sequence: TTG
atggaggtgggtgaggactg

SEQ ID NO: 194919 - DNA, 20 bp, Artificial Sequence
  Description of Artificial Sequence: Synthetic oligonucleotide
  Target: LAMA2; (-) strand; PAM type: YTN; PAM sequence: CTT
gatggaggtgggtgaggact

SEQ ID NO: 194920 - DNA, 20 bp, Artificial Sequence
  Description of Artificial Sequence: Synthetic oligonucleotide
  Target: LAMA2; (-) strand; PAM type: YTN; PAM sequence: TTG
gaaacaggaggaaaataact

SEQ ID NO: 194921 - DNA, 20 bp, Artificial Sequence
  Description of Artificial Sequence: Synthetic oligonucleotide
  Target: LAMA2; (-) strand; PAM type: YTN; PAM sequence: TTT
ggaaacaggaggaaaataac

SEQ ID NO: 194922 - DNA, 20 bp, Artificial Sequence
  Description of Artificial Sequence: Synthetic oligonucleotide
  Target: LAMA2; (-) strand; PAM type: YTN; PAM sequence: CTC
agcagaaatttggaaacagg

SEQ ID NO: 194923 - DNA, 20 bp, Artificial Sequence
  Description of Artificial Sequence: Synthetic oligonucleotide
  Target: LAMA2; (-) strand; PAM type: YTN; PAM sequence: CTG
atgggaccctcagcagaaat

SEQ ID NO: 194924 - DNA, 20 bp, Artificial Sequence
  Description of Artificial Sequence: Synthetic oligonucleotide
  Target: LAMA2; (-) strand; PAM type: YTN; PAM sequence: CTG
gaagactgatgggaccctca

SEQ ID NO: 194925 - DNA, 20 bp, Artificial Sequence
  Description of Artificial Sequence: Synthetic oligonucleotide
  Target: LAMA2; (-) strand; PAM type: YTN; PAM sequence: TTA
cacctggaagactgatggga

SEQ ID NO: 194926 - DNA, 20 bp, Artificial Sequence
  Description of Artificial Sequence: Synthetic oligonucleotide
  Target: LAMA2; (-) strand; PAM type: YTN; PAM sequence: TTT
acacctggaagactgatggg

SEQ ID NO: 194927 - DNA, 20 bp, Artificial Sequence
  Description of Artificial Sequence: Synthetic oligonucleotide
  Target: LAMA2; (-) strand; PAM type: YTN; PAM sequence: CTA
atggtttacacctggaagac

SEQ ID NO: 194928 - DNA, 20 bp, Artificial Sequence
  Description of Artificial Sequence: Synthetic oligonucleotide
  Target: LAMA2; (-) strand; PAM type: YTN; PAM sequence: CTA
gtaggaatctaatggtttac

SEQ ID NO: 194929 - DNA, 20 bp, Artificial Sequence
  Description of Artificial Sequence: Synthetic oligonucleotide
  Target: LAMA2; (-) strand; PAM type: YTN; PAM sequence: CTG
atatagtaacgggaagaaag

SEQ ID NO: 194930 - DNA, 20 bp, Artificial Sequence
  Description of Artificial Sequence: Synthetic oligonucleotide
  Target: LAMA2; (-) strand; PAM type: YTN; PAM sequence: CTC
actgatatagtaacgggaag

SEQ ID NO: 194931 - DNA, 20 bp, Artificial Sequence
  Description of Artificial Sequence: Synthetic oligonucleotide
  Target: LAMA2; (-) strand; PAM type: YTN; PAM sequence: TTG
ctcactgatatagtaacggg

SEQ ID NO: 194932 - DNA, 20 bp, Artificial Sequence
  Description of Artificial Sequence: Synthetic oligonucleotide
  Target: LAMA2; (-) strand; PAM type: YTN; PAM sequence: CTT
gctcactgatatagtaacgg

SEQ ID NO: 194933 - DNA, 20 bp, Artificial Sequence
  Description of Artificial Sequence: Synthetic oligonucleotide
  Target: LAMA2; (-) strand; PAM type: YTN; PAM sequence: TTG
tgacaaaaaacgaaatagaa

SEQ ID NO: 194934 - DNA, 20 bp, Artificial Sequence
  Description of Artificial Sequence: Synthetic oligonucleotide
  Target: LAMA2; (-) strand; PAM type: YTN; PAM sequence: TTA
attgtgacaaaaaacgaaat

SEQ ID NO: 194935 - DNA, 20 bp, Artificial Sequence
  Description of Artificial Sequence: Synthetic oligonucleotide
  Target: LAMA2; (-) strand; PAM type: YTN; PAM sequence: TTA
ataataattaattgtgacaa

SEQ ID NO: 194936 - DNA, 20 bp, Artificial Sequence
  Description of Artificial Sequence: Synthetic oligonucleotide
  Target: LAMA2; (-) strand; PAM type: YTN; PAM sequence: CTA
ttaataataattaattgtga

SEQ ID NO: 194937 - DNA, 20 bp, Artificial Sequence
  Description of Artificial Sequence: Synthetic oligonucleotide
  Target: LAMA2; (-) strand; PAM type: YTN; PAM sequence: TTC
tattaataataattaattgt

SEQ ID NO: 194938 - DNA, 20 bp, Artificial Sequence
  Description of Artificial Sequence: Synthetic oligonucleotide
  Target: LAMA2; (-) strand; PAM type: YTN; PAM sequence: TTT
ctattaataataattaattg

SEQ ID NO: 194939 - DNA, 20 bp, Artificial Sequence
  Description of Artificial Sequence: Synthetic oligonucleotide
  Target: LAMA2; (-) strand; PAM type: YTN; PAM sequence: TTT
tctattaataataattaatt

SEQ ID NO: 194940 - DNA, 20 bp, Artificial Sequence
  Description of Artificial Sequence: Synthetic oligonucleotide
  Target: LAMA2; (-) strand; PAM type: YTN; PAM sequence: TTA
ttttctattaataataatta

SEQ ID NO: 194941 - DNA, 20 bp, Artificial Sequence
  Description of Artificial Sequence: Synthetic oligonucleotide
  Target: LAMA2; (-) strand; PAM type: YTN; PAM sequence: TTT
attttctattaataataatt

SEQ ID NO: 194942 - DNA, 20 bp, Artificial Sequence
  Description of Artificial Sequence: Synthetic oligonucleotide
  Target: LAMA2; (-) strand; PAM type: YTN; PAM sequence: CTG
gaataagtgtttattttcta

SEQ ID NO: 194943 - DNA, 20 bp, Artificial Sequence
  Description of Artificial Sequence: Synthetic oligonucleotide
  Target: LAMA2; (-) strand; PAM type: YTN; PAM sequence: TTG
aaactggaataagtgtttat

SEQ ID NO: 194944 - DNA, 20 bp, Artificial Sequence
  Description of Artificial Sequence: Synthetic oligonucleotide
  Target: LAMA2; (-) strand; PAM type: YTN; PAM sequence: TTT
gaaactggaataagtgttta

SEQ ID NO: 194945 - DNA, 20 bp, Artificial Sequence
  Description of Artificial Sequence: Synthetic oligonucleotide
  Target: LAMA2; (-) strand; PAM type: YTN; PAM sequence: CTT
tgaaactggaataagtgttt

SEQ ID NO: 194946 - DNA, 20 bp, Artificial Sequence
  Description of Artificial Sequence: Synthetic oligonucleotide
  Target: LAMA2; (-) strand; PAM type: YTN; PAM sequence: TTA
taacaactttgaaactggaa

SEQ ID NO: 194947 - DNA, 20 bp, Artificial Sequence
  Description of Artificial Sequence: Synthetic oligonucleotide
  Target: LAMA2; (-) strand; PAM type: YTN; PAM sequence: TTC
aattataacaactttgaaac

SEQ ID NO: 194948 - DNA, 20 bp, Artificial Sequence
  Description of Artificial Sequence: Synthetic oligonucleotide
  Target: LAMA2; (-) strand; PAM type: YTN; PAM sequence: CTT
caattataacaactttgaaa

SEQ ID NO: 194949 - DNA, 20 bp, Artificial Sequence
  Description of Artificial Sequence: Synthetic oligonucleotide
  Target: LAMA2; (-) strand; PAM type: YTN; PAM sequence: TTA
gcaacttcaattataacaac

SEQ ID NO: 194950 - DNA, 20 bp, Artificial Sequence
  Description of Artificial Sequence: Synthetic oligonucleotide
  Target: LAMA2; (-) strand; PAM type: YTN; PAM sequence: TTA
aaattagcaacttcaattat

SEQ ID NO: 194951 - DNA, 20 bp, Artificial Sequence
  Description of Artificial Sequence: Synthetic oligonucleotide
  Target: LAMA2; (-) strand; PAM type: YTN; PAM sequence: TTT
aaaattagcaacttcaatta

SEQ ID NO: 194952 - DNA, 20 bp, Artificial Sequence
  Description of Artificial Sequence: Synthetic oligonucleotide
  Target: LAMA2; (-) strand; PAM type: YTN; PAM sequence: TTT
taaaattagcaacttcaatt

SEQ ID NO: 194953 - DNA, 20 bp, Artificial Sequence
  Description of Artificial Sequence: Synthetic oligonucleotide
  Target: LAMA2; (-) strand; PAM type: YTN; PAM sequence: TTT
ttaaaattagcaacttcaat

SEQ ID NO: 194954 - DNA, 20 bp, Artificial Sequence
  Description of Artificial Sequence: Synthetic oligonucleotide
  Target: LAMA2; (-) strand; PAM type: YTN; PAM sequence: TTT
tttaaaattagcaacttcaa

SEQ ID NO: 194955 - DNA, 20 bp, Artificial Sequence
  Description of Artificial Sequence: Synthetic oligonucleotide
  Target: LAMA2; (-) strand; PAM type: YTN; PAM sequence: TTC
attttttaaaattagcaact

SEQ ID NO: 194956 - DNA, 20 bp, Artificial Sequence
  Description of Artificial Sequence: Synthetic oligonucleotide
  Target: LAMA2; (-) strand; PAM type: YTN; PAM sequence: TTA
aaattcattttttaaaatta

SEQ ID NO: 194957 - DNA, 20 bp, Artificial Sequence
  Description of Artificial Sequence: Synthetic oligonucleotide
  Target: LAMA2; (-) strand; PAM type: YTN; PAM sequence: TTT
aaaattcattttttaaaatt

SEQ ID NO: 194958 - DNA, 20 bp, Artificial Sequence
  Description of Artificial Sequence: Synthetic oligonucleotide
  Target: LAMA2; (-) strand; PAM type: YTN; PAM sequence: TTA
tttaaaattcattttttaaa

SEQ ID NO: 194959 - DNA, 20 bp, Artificial Sequence
  Description of Artificial Sequence: Synthetic oligonucleotide
  Target: LAMA2; (-) strand; PAM type: YTN; PAM sequence: TTA
agtgattatttaaaattcat

SEQ ID NO: 194960 - DNA, 20 bp, Artificial Sequence
  Description of Artificial Sequence: Synthetic oligonucleotide
  Target: LAMA2; (-) strand; PAM type: YTN; PAM sequence: TTA
ttaagtgattatttaaaatt

SEQ ID NO: 194961 - DNA, 20 bp, Artificial Sequence
  Description of Artificial Sequence: Synthetic oligonucleotide
  Target: LAMA2; (-) strand; PAM type: YTN; PAM sequence: TTA
gtcaaagaaggattattaag

SEQ ID NO: 194962 - DNA, 20 bp, Artificial Sequence
  Description of Artificial Sequence: Synthetic oligonucleotide
  Target: LAMA2; (-) strand; PAM type: YTN; PAM sequence: CTT
agtcaaagaaggattattaa

SEQ ID NO: 194963 - DNA, 20 bp, Artificial Sequence
  Description of Artificial Sequence: Synthetic oligonucleotide
  Target: LAMA2; (-) strand; PAM type: YTN; PAM sequence: TTG
tcttagtcaaagaaggatta

SEQ ID NO: 194964 - DNA, 20 bp, Artificial Sequence
  Description of Artificial Sequence: Synthetic oligonucleotide
  Target: LAMA2; (-) strand; PAM type: YTN; PAM sequence: TTC
attgtcttagtcaaagaagg

SEQ ID NO: 194965 - DNA, 20 bp, Artificial Sequence
  Description of Artificial Sequence: Synthetic oligonucleotide
  Target: LAMA2; (-) strand; PAM type: YTN; PAM sequence: TTT
cattgtcttagtcaaagaag

SEQ ID NO: 194966 - DNA, 20 bp, Artificial Sequence
  Description of Artificial Sequence: Synthetic oligonucleotide
  Target: LAMA2; (-) strand; PAM type: YTN; PAM sequence: TTA
aagccacatttcattgtctt

SEQ ID NO: 194967 - DNA, 20 bp, Artificial Sequence
  Description of Artificial Sequence: Synthetic oligonucleotide
  Target: LAMA2; (-) strand; PAM type: YTN; PAM sequence: TTT
aaagccacatttcattgtct

SEQ ID NO: 194968 - DNA, 20 bp, Artificial Sequence
  Description of Artificial Sequence: Synthetic oligonucleotide
  Target: LAMA2; (-) strand; PAM type: YTN; PAM sequence: TTT
taaagccacatttcattgtc

SEQ ID NO: 194969 - DNA, 20 bp, Artificial Sequence
  Description of Artificial Sequence: Synthetic oligonucleotide
  Target: LAMA2; (-) strand; PAM type: YTN; PAM sequence: TTT
ttaaagccacatttcattgt

SEQ ID NO: 194970 - DNA, 20 bp, Artificial Sequence
  Description of Artificial Sequence: Synthetic oligonucleotide
  Target: LAMA2; (-) strand; PAM type: YTN; PAM sequence: TTT
tttaaagccacatttcattg

SEQ ID NO: 194971 - DNA, 20 bp, Artificial Sequence
  Description of Artificial Sequence: Synthetic oligonucleotide
  Target: LAMA2; (-) strand; PAM type: YTN; PAM sequence: TTT
ttttaaagccacatttcatt

SEQ ID NO: 194972 - DNA, 20 bp, Artificial Sequence
  Description of Artificial Sequence: Synthetic oligonucleotide
  Target: LAMA2; (-) strand; PAM type: YTN; PAM sequence: CTT
tttttaaagccacatttcat

SEQ ID NO: 194973 - DNA, 20 bp, Artificial Sequence
  Description of Artificial Sequence: Synthetic oligonucleotide
  Target: LAMA2; (-) strand; PAM type: YTN; PAM sequence: TTA
ctttttttaaagccacattt

SEQ ID NO: 194974 - DNA, 20 bp, Artificial Sequence
  Description of Artificial Sequence: Synthetic oligonucleotide
  Target: LAMA2; (-) strand; PAM type: YTN; PAM sequence: CTG
attactttttttaaagccac

SEQ ID NO: 194975 - DNA, 20 bp, Artificial Sequence
  Description of Artificial Sequence: Synthetic oligonucleotide
  Target: LAMA2; (-) strand; PAM type: YTN; PAM sequence: CTA
taagcaaatggtgctgatta

SEQ ID NO: 194976 - DNA, 20 bp, Artificial Sequence
  Description of Artificial Sequence: Synthetic oligonucleotide
  Target: LAMA2; (-) strand; PAM type: YTN; PAM sequence: CTG
aaagacctataagcaaatgg

SEQ ID NO: 194977 - DNA, 20 bp, Artificial Sequence
  Description of Artificial Sequence: Synthetic oligonucleotide
  Target: LAMA2; (-) strand; PAM type: YTN; PAM sequence: TTC
tgaaagacctataagcaaat

SEQ ID NO: 194978 - DNA, 20 bp, Artificial Sequence
  Description of Artificial Sequence: Synthetic oligonucleotide
  Target: LAMA2; (-) strand; PAM type: YTN; PAM sequence: TTA
agaacaaattctgaaagacc

SEQ ID NO: 194979 - DNA, 20 bp, Artificial Sequence
  Description of Artificial Sequence: Synthetic oligonucleotide
  Target: LAMA2; (-) strand; PAM type: YTN; PAM sequence: TTT
aagaacaaattctgaaagac

SEQ ID NO: 194980 - DNA, 20 bp, Artificial Sequence
  Description of Artificial Sequence: Synthetic oligonucleotide
  Target: LAMA2; (-) strand; PAM type: YTN; PAM sequence: CTT
taagaacaaattctgaaaga

SEQ ID NO: 194981 - DNA, 20 bp, Artificial Sequence
  Description of Artificial Sequence: Synthetic oligonucleotide
  Target: LAMA2; (-) strand; PAM type: YTN; PAM sequence: TTC
cagaaactttaagaacaaat

SEQ ID NO: 194982 - DNA, 20 bp, Artificial Sequence
  Description of Artificial Sequence: Synthetic oligonucleotide
  Target: LAMA2; (-) strand; PAM type: YTN; PAM sequence: TTA
cagagaggaaagttccagaa

SEQ ID NO: 194983 - DNA, 20 bp, Artificial Sequence
  Description of Artificial Sequence: Synthetic oligonucleotide
  Target: LAMA2; (-) strand; PAM type: YTN; PAM sequence: TTT
acagagaggaaagttccaga

SEQ ID NO: 194984 - DNA, 20 bp, Artificial Sequence
  Description of Artificial Sequence: Synthetic oligonucleotide
  Target: LAMA2; (-) strand; PAM type: YTN; PAM sequence: CTT
tacagagaggaaagttccag

SEQ ID NO: 194985 - DNA, 20 bp, Artificial Sequence
  Description of Artificial Sequence: Synthetic oligonucleotide
  Target: LAMA2; (-) strand; PAM type: YTN; PAM sequence: CTG
tactttacagagaggaaagt

SEQ ID NO: 194986 - DNA, 20 bp, Artificial Sequence
  Description of Artificial Sequence: Synthetic oligonucleotide
  Target: LAMA2; (-) strand; PAM type: YTN; PAM sequence: TTC
ctgtactttacagagaggaa

SEQ ID NO: 194987 - DNA, 20 bp, Artificial Sequence
  Description of Artificial Sequence: Synthetic oligonucleotide
  Target: LAMA2; (-) strand; PAM type: YTN; PAM sequence: TTT
cctgtactttacagagagga

SEQ ID NO: 194988 - DNA, 20 bp, Artificial Sequence
  Description of Artificial Sequence: Synthetic oligonucleotide
  Target: LAMA2; (-) strand; PAM type: YTN; PAM sequence: CTC
agtatttcctgtactttaca

SEQ ID NO: 194989 - DNA, 20 bp, Artificial Sequence
  Description of Artificial Sequence: Synthetic oligonucleotide
  Target: LAMA2; (-) strand; PAM type: YTN; PAM sequence: TTC
cagtgtagctcagtatttcc

SEQ ID NO: 194990 - DNA, 20 bp, Artificial Sequence
  Description of Artificial Sequence: Synthetic oligonucleotide
  Target: LAMA2; (-) strand; PAM type: YTN; PAM sequence: TTT
ccagtgtagctcagtatttc

SEQ ID NO: 194991 - DNA, 20 bp, Artificial Sequence
  Description of Artificial Sequence: Synthetic oligonucleotide
  Target: LAMA2; (-) strand; PAM type: YTN; PAM sequence: CTT
tccagtgtagctcagtattt

SEQ ID NO: 194992 - DNA, 20 bp, Artificial Sequence
  Description of Artificial Sequence: Synthetic oligonucleotide
  Target: LAMA2; (-) strand; PAM type: YTN; PAM sequence: CTG
tcccagagaggctttccagt

SEQ ID NO: 194993 - DNA, 20 bp, Artificial Sequence
  Description of Artificial Sequence: Synthetic oligonucleotide
  Target: LAMA2; (-) strand; PAM type: YTN; PAM sequence: TTG
cctgtcccagagaggctttc

SEQ ID NO: 194994 - DNA, 20 bp, Artificial Sequence
  Description of Artificial Sequence: Synthetic oligonucleotide
  Target: LAMA2; (-) strand; PAM type: YTN; PAM sequence: CTC
cccattgcctgtcccagaga

SEQ ID NO: 194995 - DNA, 20 bp, Artificial Sequence
  Description of Artificial Sequence: Synthetic oligonucleotide
  Target: LAMA2; (-) strand; PAM type: YTN; PAM sequence: TTA
actccccattgcctgtccca

SEQ ID NO: 194996 - DNA, 20 bp, Artificial Sequence
  Description of Artificial Sequence: Synthetic oligonucleotide
  Target: LAMA2; (-) strand; PAM type: YTN; PAM sequence: CTT
aactccccattgcctgtccc

SEQ ID NO: 194997 - DNA, 20 bp, Artificial Sequence
  Description of Artificial Sequence: Synthetic oligonucleotide
  Target: LAMA2; (-) strand; PAM type: YTN; PAM sequence: CTG
cttaactccccattgcctgt

SEQ ID NO: 194998 - DNA, 20 bp, Artificial Sequence
  Description of Artificial Sequence: Synthetic oligonucleotide
  Target: LAMA2; (-) strand; PAM type: YTN; PAM sequence: TTA
tgatgactgcttaactcccc

SEQ ID NO: 194999 - DNA, 20 bp, Artificial Sequence
  Description of Artificial Sequence: Synthetic oligonucleotide
  Target: LAMA2; (-) strand; PAM type: YTN; PAM sequence: TTT
atgatgactgcttaactccc

SEQ ID NO: 195000 - DNA, 20 bp, Artificial Sequence
  Description of Artificial Sequence: Synthetic oligonucleotide
  Target: LAMA2; (-) strand; PAM type: YTN; PAM sequence: CTT
tatgatgactgcttaactcc

SEQ ID NO: 195001 - DNA, 20 bp, Artificial Sequence
  Description of Artificial Sequence: Synthetic oligonucleotide
  Target: LAMA2; (-) strand; PAM type: YTN; PAM sequence: TTC
ctttatgatgactgcttaac

SEQ ID NO: 195002 - DNA, 20 bp, Artificial Sequence
  Description of Artificial Sequence: Synthetic oligonucleotide
  Target: LAMA2; (-) strand; PAM type: YTN; PAM sequence: TTG
attcctttatgatgactgct

SEQ ID NO: 195003 - DNA, 20 bp, Artificial Sequence
  Description of Artificial Sequence: Synthetic oligonucleotide
  Target: LAMA2; (-) strand; PAM type: YTN; PAM sequence: CTG
aatgtacattgattccttta

SEQ ID NO: 195004 - DNA, 20 bp, Artificial Sequence
  Description of Artificial Sequence: Synthetic oligonucleotide
  Target: LAMA2; (-) strand; PAM type: YTN; PAM sequence: CTA
tgctgaatgtacattgattc

SEQ ID NO: 195005 - DNA, 20 bp, Artificial Sequence
  Description of Artificial Sequence: Synthetic oligonucleotide
  Target: LAMA2; (-) strand; PAM type: YTN; PAM sequence: TTG
tgtagtccaagtcactatgc

SEQ ID NO: 195006 - DNA, 20 bp, Artificial Sequence
  Description of Artificial Sequence: Synthetic oligonucleotide
  Target: LAMA2; (-) strand; PAM type: YTN; PAM sequence: TTG
ttgtgtagtccaagtcacta

SEQ ID NO: 195007 - DNA, 20 bp, Artificial Sequence
  Description of Artificial Sequence: Synthetic oligonucleotide
  Target: LAMA2; (-) strand; PAM type: YTN; PAM sequence: CTA
ccgtagaggagaaggaattg

SEQ ID NO: 195008 - DNA, 20 bp, Artificial Sequence
  Description of Artificial Sequence: Synthetic oligonucleotide
  Target: LAMA2; (-) strand; PAM type: YTN; PAM sequence: TTG
agctaccgtagaggagaagg

SEQ ID NO: 195009 - DNA, 20 bp, Artificial Sequence
  Description of Artificial Sequence: Synthetic oligonucleotide
  Target: LAMA2; (-) strand; PAM type: YTN; PAM sequence: CTT
gagctaccgtagaggagaag

SEQ ID NO: 195010 - DNA, 20 bp, Artificial Sequence
  Description of Artificial Sequence: Synthetic oligonucleotide
  Target: LAMA2; (-) strand; PAM type: YTN; PAM sequence: CTC
ttgagctaccgtagaggaga

SEQ ID NO: 195011 - DNA, 20 bp, Artificial Sequence
  Description of Artificial Sequence: Synthetic oligonucleotide
  Target: LAMA2; (-) strand; PAM type: YTN; PAM sequence: CTC
tcttgagctaccgtagagga

SEQ ID NO: 195012 - DNA, 20 bp, Artificial Sequence
  Description of Artificial Sequence: Synthetic oligonucleotide
  Target: LAMA2; (-) strand; PAM type: YTN; PAM sequence: TTA
gaagcatgtctctcttgagc

SEQ ID NO: 195013 - DNA, 20 bp, Artificial Sequence
  Description of Artificial Sequence: Synthetic oligonucleotide
  Target: LAMA2; (-) strand; PAM type: YTN; PAM sequence: CTT
agaagcatgtctctcttgag

SEQ ID NO: 195014 - DNA, 20 bp, Artificial Sequence
  Description of Artificial Sequence: Synthetic oligonucleotide
  Target: LAMA2; (-) strand; PAM type: YTN; PAM sequence: CTG
tgcttagaagcatgtctctc

SEQ ID NO: 195015 - DNA, 20 bp, Artificial Sequence
  Description of Artificial Sequence: Synthetic oligonucleotide
  Target: LAMA2; (-) strand; PAM type: YTN; PAM sequence: CTC
tgtgcttagaagcatgtctc

SEQ ID NO: 195016 - DNA, 20 bp, Artificial Sequence
  Description of Artificial Sequence: Synthetic oligonucleotide
  Target: LAMA2; (-) strand; PAM type: YTN; PAM sequence: CTC
atacctctgtgcttagaagc

SEQ ID NO: 195017 - DNA, 20 bp, Artificial Sequence
  Description of Artificial Sequence: Synthetic oligonucleotide
  Target: LAMA2; (-) strand; PAM type: YTN; PAM sequence: TTC
tcatacctctgtgcttagaa

SEQ ID NO: 195018 - DNA, 20 bp, Artificial Sequence
  Description of Artificial Sequence: Synthetic oligonucleotide
  Target: LAMA2; (-) strand; PAM type: YTN; PAM sequence: CTT
ctcatacctctgtgcttaga

SEQ ID NO: 195019 - DNA, 20 bp, Artificial Sequence
  Description of Artificial Sequence: Synthetic oligonucleotide
  Target: LAMA2; (-) strand; PAM type: YTN; PAM sequence: CTG
agacttctcatacctctgtg

SEQ ID NO: 195020 - DNA, 20 bp, Artificial Sequence
  Description of Artificial Sequence: Synthetic oligonucleotide
  Target: LAMA2; (-) strand; PAM type: YTN; PAM sequence: CTA
acagcaaataacagtctgag

SEQ ID NO: 195021 - DNA, 20 bp, Artificial Sequence
  Description of Artificial Sequence: Synthetic oligonucleotide
  Target: LAMA2; (-) strand; PAM type: YTN; PAM sequence: TTC
taacagcaaataacagtctg

SEQ ID NO: 195022 - DNA, 20 bp, Artificial Sequence
  Description of Artificial Sequence: Synthetic oligonucleotide
  Target: LAMA2; (-) strand; PAM type: YTN; PAM sequence: TTA
gatggggagaccaattctaa

SEQ ID NO: 195023 - DNA, 20 bp, Artificial Sequence
  Description of Artificial Sequence: Synthetic oligonucleotide
  Target: LAMA2; (-) strand; PAM type: YTN; PAM sequence: TTA
ttagatggggagaccaattc

SEQ ID NO: 195024 - DNA, 20 bp, Artificial Sequence
  Description of Artificial Sequence: Synthetic oligonucleotide
  Target: LAMA2; (-) strand; PAM type: YTN; PAM sequence: CTG
ttattagatggggagaccaa

SEQ ID NO: 195025 - DNA, 20 bp, Artificial Sequence
  Description of Artificial Sequence: Synthetic oligonucleotide
  Target: LAMA2; (-) strand; PAM type: YTN; PAM sequence: TTA
ctgttattagatggggagac

SEQ ID NO: 195026 - DNA, 20 bp, Artificial Sequence
  Description of Artificial Sequence: Synthetic oligonucleotide
  Target: LAMA2; (-) strand; PAM type: YTN; PAM sequence: TTT
actgttattagatggggaga

SEQ ID NO: 195027 - DNA, 20 bp, Artificial Sequence
  Description of Artificial Sequence: Synthetic oligonucleotide
  Target: LAMA2; (-) strand; PAM type: YTN; PAM sequence: CTG
tgccagagatttactgttat

SEQ ID NO: 195028 - DNA, 20 bp, Artificial Sequence
  Description of Artificial Sequence: Synthetic oligonucleotide
  Target: LAMA2; (-) strand; PAM type: YTN; PAM sequence: TTA
aggaccaatagcatctgtgc

SEQ ID NO: 195029 - DNA, 20 bp, Artificial Sequence
  Description of Artificial Sequence: Synthetic oligonucleotide
  Target: LAMA2; (-) strand; PAM type: YTN; PAM sequence: CTA
aaatcacaggacattaagga

SEQ ID NO: 195030 - DNA, 20 bp, Artificial Sequence
  Description of Artificial Sequence: Synthetic oligonucleotide
  Target: LAMA2; (-) strand; PAM type: YTN; PAM sequence: TTC
ctaaaatcacaggacattaa

SEQ ID NO: 195031 - DNA, 20 bp, Artificial Sequence
  Description of Artificial Sequence: Synthetic oligonucleotide
  Target: LAMA2; (-) strand; PAM type: YTN; PAM sequence: TTT
cctaaaatcacaggacatta

SEQ ID NO: 195032 - DNA, 20 bp, Artificial Sequence
  Description of Artificial Sequence: Synthetic oligonucleotide
  Target: LAMA2; (-) strand; PAM type: YTN; PAM sequence: CTA
tttcctaaaatcacaggaca

SEQ ID NO: 195033 - DNA, 20 bp, Artificial Sequence
  Description of Artificial Sequence: Synthetic oligonucleotide
  Target: LAMA2; (-) strand; PAM type: YTN; PAM sequence: CTA
aatccaaactatttcctaaa

SEQ ID NO: 195034 - DNA, 20 bp, Artificial Sequence
  Description of Artificial Sequence: Synthetic oligonucleotide
  Target: LAMA2; (-) strand; PAM type: YTN; PAM sequence: TTA
aactaaatccaaactatttc

SEQ ID NO: 195035 - DNA, 20 bp, Artificial Sequence
  Description of Artificial Sequence: Synthetic oligonucleotide
  Target: LAMA2; (-) strand; PAM type: YTN; PAM sequence: CTG
aataaattaaactaaatcca

SEQ ID NO: 195036 - DNA, 20 bp, Artificial Sequence
  Description of Artificial Sequence: Synthetic oligonucleotide
  Target: LAMA2; (-) strand; PAM type: YTN; PAM sequence: TTC
tgaataaattaaactaaatc

SEQ ID NO: 195037 - DNA, 20 bp, Artificial Sequence
  Description of Artificial Sequence: Synthetic oligonucleotide
  Target: LAMA2; (-) strand; PAM type: YTN; PAM sequence: TTT
ctgaataaattaaactaaat

SEQ ID NO: 195038 - DNA, 20 bp, Artificial Sequence
  Description of Artificial Sequence: Synthetic oligonucleotide
  Target: LAMA2; (-) strand; PAM type: YTN; PAM sequence: TTG
atttctgaataaattaaact

SEQ ID NO: 195039 - DNA, 20 bp, Artificial Sequence
  Description of Artificial Sequence: Synthetic oligonucleotide
  Target: LAMA2; (-) strand; PAM type: YTN; PAM sequence: TTT
gatttctgaataaattaaac

SEQ ID NO: 195040 - DNA, 20 bp, Artificial Sequence
  Description of Artificial Sequence: Synthetic oligonucleotide
  Target: LAMA2; (-) strand; PAM type: YTN; PAM sequence: TTA
aacatgtttgatttctgaat

SEQ ID NO: 195041 - DNA, 20 bp, Artificial Sequence
  Description of Artificial Sequence: Synthetic oligonucleotide
  Target: LAMA2; (-) strand; PAM type: YTN; PAM sequence: CTA
attaaacatgtttgatttct

SEQ ID NO: 195042 - DNA, 20 bp, Artificial Sequence
  Description of Artificial Sequence: Synthetic oligonucleotide
  Target: LAMA2; (-) strand; PAM type: YTN; PAM sequence: CTG
ccagagcagtgaacctaatt

SEQ ID NO: 195043 - DNA, 20 bp, Artificial Sequence
  Description of Artificial Sequence: Synthetic oligonucleotide
  Target: LAMA2; (-) strand; PAM type: YTN; PAM sequence: CTC
tgccagagcagtgaacctaa

SEQ ID NO: 195044 - DNA, 20 bp, Artificial Sequence
  Description of Artificial Sequence: Synthetic oligonucleotide
  Target: LAMA2; (-) strand; PAM type: YTN; PAM sequence: TTA
ctctgccagagcagtgaacc

SEQ ID NO: 195045 - DNA, 20 bp, Artificial Sequence
  Description of Artificial Sequence: Synthetic oligonucleotide
  Target: LAMA2; (-) strand; PAM type: YTN; PAM sequence: CTT
actctgccagagcagtgaac

SEQ ID NO: 195046 - DNA, 20 bp, Artificial Sequence
  Description of Artificial Sequence: Synthetic oligonucleotide
  Target: LAMA2; (-) strand; PAM type: YTN; PAM sequence: CTA
aaccagcatacccttactct

SEQ ID NO: 195047 - DNA, 20 bp, Artificial Sequence
  Description of Artificial Sequence: Synthetic oligonucleotide
  Target: LAMA2; (-) strand; PAM type: YTN; PAM sequence: TTA
taaagatactaaaccagcat

SEQ ID NO: 195048 - DNA, 20 bp, Artificial Sequence
  Description of Artificial Sequence: Synthetic oligonucleotide
  Target: LAMA2; (-) strand; PAM type: YTN; PAM sequence: TTA
tatatatattataaagatac

SEQ ID NO: 195049 - DNA, 20 bp, Artificial Sequence
  Description of Artificial Sequence: Synthetic oligonucleotide
  Target: LAMA2; (-) strand; PAM type: YTN; PAM sequence: CTC
attatatatatattataaag

SEQ ID NO: 195050 - DNA, 20 bp, Artificial Sequence
  Description of Artificial Sequence: Synthetic oligonucleotide
  Target: LAMA2; (-) strand; PAM type: YTN; PAM sequence: CTA
ctcattatatatatattata

SEQ ID NO: 195051 - DNA, 20 bp, Artificial Sequence
  Description of Artificial Sequence: Synthetic oligonucleotide
  Target: LAMA2; (-) strand; PAM type: YTN; PAM sequence: TTA
cctactcattatatatatat

SEQ ID NO: 195052 - DNA, 20 bp, Artificial Sequence
  Description of Artificial Sequence: Synthetic oligonucleotide
  Target: LAMA2; (-) strand; PAM type: YTN; PAM sequence: TTT
acctactcattatatatata

SEQ ID NO: 195053 - DNA, 20 bp, Artificial Sequence
  Description of Artificial Sequence: Synthetic oligonucleotide
  Target: LAMA2; (-) strand; PAM type: YTN; PAM sequence: CTA
tgatttacctactcattata

SEQ ID NO: 195054 - DNA, 20 bp, Artificial Sequence
  Description of Artificial Sequence: Synthetic oligonucleotide
  Target: LAMA2; (-) strand; PAM type: YTN; PAM sequence: TTA
agactatgatttacctactc

SEQ ID NO: 195055 - DNA, 20 bp, Artificial Sequence
  Description of Artificial Sequence: Synthetic oligonucleotide
  Target: LAMA2; (-) strand; PAM type: YTN; PAM sequence: TTT
aagactatgatttacctact

SEQ ID NO: 195056 - DNA, 20 bp, Artificial Sequence
  Description of Artificial Sequence: Synthetic oligonucleotide
  Target: LAMA2; (-) strand; PAM type: YTN; PAM sequence: CTA
agtatgatttaagactatga

SEQ ID NO: 195057 - DNA, 20 bp, Artificial Sequence
  Description of Artificial Sequence: Synthetic oligonucleotide
  Target: LAMA2; (-) strand; PAM type: YTN; PAM sequence: TTC
taagtatgatttaagactat

SEQ ID NO: 195058 - DNA, 20 bp, Artificial Sequence
  Description of Artificial Sequence: Synthetic oligonucleotide
  Target: LAMA2; (-) strand; PAM type: YTN; PAM sequence: TTA
aataatatagtattctaagt

SEQ ID NO: 195059 - DNA, 20 bp, Artificial Sequence
  Description of Artificial Sequence: Synthetic oligonucleotide
  Target: LAMA2; (-) strand; PAM type: YTN; PAM sequence: TTT
aaataatatagtattctaag

SEQ ID NO: 195060 - DNA, 20 bp, Artificial Sequence
  Description of Artificial Sequence: Synthetic oligonucleotide
  Target: LAMA2; (-) strand; PAM type: YTN; PAM sequence: TTG
gtttaaataatatagtattc

SEQ ID NO: 195061 - DNA, 20 bp, Artificial Sequence
  Description of Artificial Sequence: Synthetic oligonucleotide
  Target: LAMA2; (-) strand; PAM type: YTN; PAM sequence: TTG
aaatagatattggtttaaat

SEQ ID NO: 195062 - DNA, 20 bp, Artificial Sequence
  Description of Artificial Sequence: Synthetic oligonucleotide
  Target: LAMA2; (-) strand; PAM type: YTN; PAM sequence: TTG
ttgaaatagatattggttta

SEQ ID NO: 195063 - DNA, 20 bp, Artificial Sequence
  Description of Artificial Sequence: Synthetic oligonucleotide
  Target: LAMA2; (-) strand; PAM type: YTN; PAM sequence: TTT
gttgaaatagatattggttt

SEQ ID NO: 195064 - DNA, 20 bp, Artificial Sequence
  Description of Artificial Sequence: Synthetic oligonucleotide
  Target: LAMA2; (-) strand; PAM type: YTN; PAM sequence: TTT
tgttgaaatagatattggtt

SEQ ID NO: 195065 - DNA, 20 bp, Artificial Sequence
  Description of Artificial Sequence: Synthetic oligonucleotide
  Target: LAMA2; (-) strand; PAM type: YTN; PAM sequence: TTA
taaacattttgttgaaatag

SEQ ID NO: 195066 - DNA, 20 bp, Artificial Sequence
  Description of Artificial Sequence: Synthetic oligonucleotide
  Target: LAMA2; (-) strand; PAM type: YTN; PAM sequence: TTT
ataaacattttgttgaaata

SEQ ID NO: 195067 - DNA, 20 bp, Artificial Sequence
  Description of Artificial Sequence: Synthetic oligonucleotide
  Target: LAMA2; (-) strand; PAM type: YTN; PAM sequence: TTA
tttataaacattttgttgaa

SEQ ID NO: 195068 - DNA, 20 bp, Artificial Sequence
  Description of Artificial Sequence: Synthetic oligonucleotide
  Target: LAMA2; (-) strand; PAM type: YTN; PAM sequence: TTT
atttataaacattttgttga

SEQ ID NO: 195069 - DNA, 20 bp, Artificial Sequence
  Description of Artificial Sequence: Synthetic oligonucleotide
  Target: LAMA2; (-) strand; PAM type: YTN; PAM sequence: TTT
tatttataaacattttgttg

SEQ ID NO: 195070 - DNA, 20 bp, Artificial Sequence
  Description of Artificial Sequence: Synthetic oligonucleotide
  Target: LAMA2; (-) strand; PAM type: YTN; PAM sequence: TTT
ttatttataaacattttgtt

SEQ ID NO: 195071 - DNA, 20 bp, Artificial Sequence
  Description of Artificial Sequence: Synthetic oligonucleotide
  Target: LAMA2; (-) strand; PAM type: YTN; PAM sequence: CTG
tttttatttataaacatttt

SEQ ID NO: 195072 - DNA, 20 bp, Artificial Sequence
  Description of Artificial Sequence: Synthetic oligonucleotide
  Target: LAMA2; (-) strand; PAM type: YTN; PAM sequence: TTC
atcagctgtttttatttata

SEQ ID NO: 195073 - DNA, 20 bp, Artificial Sequence
  Description of Artificial Sequence: Synthetic oligonucleotide
  Target: LAMA2; (-) strand; PAM type: YTN; PAM sequence: TTT
catcagctgtttttatttat

SEQ ID NO: 195074 - DNA, 20 bp, Artificial Sequence
  Description of Artificial Sequence: Synthetic oligonucleotide
  Target: LAMA2; (-) strand; PAM type: YTN; PAM sequence: TTA
gtttcatcagctgtttttat

SEQ ID NO: 195075 - DNA, 20 bp, Artificial Sequence
  Description of Artificial Sequence: Synthetic oligonucleotide
  Target: LAMA2; (-) strand; PAM type: YTN; PAM sequence: TTT
agtttcatcagctgttttta

SEQ ID NO: 195076 - DNA, 20 bp, Artificial Sequence
  Description of Artificial Sequence: Synthetic oligonucleotide
  Target: LAMA2; (-) strand; PAM type: YTN; PAM sequence: TTG
gatttagtttcatcagctgt

SEQ ID NO: 195077 - DNA, 20 bp, Artificial Sequence
  Description of Artificial Sequence: Synthetic oligonucleotide
  Target: LAMA2; (-) strand; PAM type: YTN; PAM sequence: TTT
ggatttagtttcatcagctg

SEQ ID NO: 195078 - DNA, 20 bp, Artificial Sequence
  Description of Artificial Sequence: Synthetic oligonucleotide
  Target: LAMA2; (-) strand; PAM type: YTN; PAM sequence: CTT
tggatttagtttcatcagct

SEQ ID NO: 195079 - DNA, 20 bp, Artificial Sequence
  Description of Artificial Sequence: Synthetic oligonucleotide
  Target: LAMA2; (-) strand; PAM type: YTN; PAM sequence: TTG
tcatacctttggatttagtt

SEQ ID NO: 195080 - DNA, 20 bp, Artificial Sequence
  Description of Artificial Sequence: Synthetic oligonucleotide
  Target: LAMA2; (-) strand; PAM type: YTN; PAM sequence: TTT
gtcatacctttggatttagt

SEQ ID NO: 195081 - DNA, 20 bp, Artificial Sequence
  Description of Artificial Sequence: Synthetic oligonucleotide
  Target: LAMA2; (-) strand; PAM type: YTN; PAM sequence: CTT
tgtcatacctttggatttag

SEQ ID NO: 195082 - DNA, 20 bp, Artificial Sequence
  Description of Artificial Sequence: Synthetic oligonucleotide
  Target: LAMA2; (-) strand; PAM type: YTN; PAM sequence: CTG
agtcgtctttgtcatacctt

SEQ ID NO: 195083 - DNA, 20 bp, Artificial Sequence
  Description of Artificial Sequence: Synthetic oligonucleotide
  Target: LAMA2; (-) strand; PAM type: YTN; PAM sequence: TTA
agcaacatagagctgagtcg

SEQ ID NO: 195084 - DNA, 20 bp, Artificial Sequence
  Description of Artificial Sequence: Synthetic oligonucleotide
  Target: LAMA2; (-) strand; PAM type: YTN; PAM sequence: TTT
aagcaacatagagctgagtc

SEQ ID NO: 195085 - DNA, 20 bp, Artificial Sequence
  Description of Artificial Sequence: Synthetic oligonucleotide
  Target: LAMA2; (-) strand; PAM type: YTN; PAM sequence: CTT
taagcaacatagagctgagt

SEQ ID NO: 195086 - DNA, 20 bp, Artificial Sequence
  Description of Artificial Sequence: Synthetic oligonucleotide
  Target: LAMA2; (-) strand; PAM type: YTN; PAM sequence: TTC
tttaagcaacatagagctga

SEQ ID NO: 195087 - DNA, 20 bp, Artificial Sequence
  Description of Artificial Sequence: Synthetic oligonucleotide
  Target: LAMA2; (-) strand; PAM type: YTN; PAM sequence: TTA
aagttctttaagcaacatag

SEQ ID NO: 195088 - DNA, 20 bp, Artificial Sequence
  Description of Artificial Sequence: Synthetic oligonucleotide
  Target: LAMA2; (-) strand; PAM type: YTN; PAM sequence: TTT
aaagttctttaagcaacata

SEQ ID NO: 195089 - DNA, 20 bp, Artificial Sequence
  Description of Artificial Sequence: Synthetic oligonucleotide
  Target: LAMA2; (-) strand; PAM type: YTN; PAM sequence: TTT
taaagttctttaagcaacat

SEQ ID NO: 195090 - DNA, 20 bp, Artificial Sequence
  Description of Artificial Sequence: Synthetic oligonucleotide
  Target: LAMA2; (-) strand; PAM type: YTN; PAM sequence: TTT
ttaaagttctttaagcaaca

SEQ ID NO: 195091 - DNA, 20 bp, Artificial Sequence
  Description of Artificial Sequence: Synthetic oligonucleotide
  Target: LAMA2; (-) strand; PAM type: YTN; PAM sequence: CTT
tttaaagttctttaagcaac

SEQ ID NO: 195092 - DNA, 20 bp, Artificial Sequence
  Description of Artificial Sequence: Synthetic oligonucleotide
  Target: LAMA2; (-) strand; PAM type: YTN; PAM sequence: TTA
tgggcacatgctttttaaag

SEQ ID NO: 195093 - DNA, 20 bp, Artificial Sequence
  Description of Artificial Sequence: Synthetic oligonucleotide
  Target: LAMA2; (-) strand; PAM type: YTN; PAM sequence: TTT
atgggcacatgctttttaaa

SEQ ID NO: 195094 - DNA, 20 bp, Artificial Sequence
  Description of Artificial Sequence: Synthetic oligonucleotide
  Target: LAMA2; (-) strand; PAM type: YTN; PAM sequence: CTT
tatgggcacatgctttttaa

SEQ ID NO: 195095 - DNA, 20 bp, Artificial Sequence
  Description of Artificial Sequence: Synthetic oligonucleotide
  Target: LAMA2; (-) strand; PAM type: YTN; PAM sequence: TTG
aacggctttatgggcacatg

SEQ ID NO: 195096 - DNA, 20 bp, Artificial Sequence
  Description of Artificial Sequence: Synthetic oligonucleotide
  Target: LAMA2; (-) strand; PAM type: YTN; PAM sequence: CTT
gaacggctttatgggcacat

SEQ ID NO: 195097 - DNA, 20 bp, Artificial Sequence
  Description of Artificial Sequence: Synthetic oligonucleotide
  Target: LAMA2; (-) strand; PAM type: YTN; PAM sequence: CTC
cttgaacggctttatgggca

SEQ ID NO: 195098 - DNA, 20 bp, Artificial Sequence
  Description of Artificial Sequence: Synthetic oligonucleotide
  Target: LAMA2; (-) strand; PAM type: YTN; PAM sequence: CTC
tccttgaacggctttatggg

SEQ ID NO: 195099 - DNA, 20 bp, Artificial Sequence
  Description of Artificial Sequence: Synthetic oligonucleotide
  Target: LAMA2; (-) strand; PAM type: YTN; PAM sequence: TTC
cctctccttgaacggcttta

SEQ ID NO: 195100 - DNA, 20 bp, Artificial Sequence
  Description of Artificial Sequence: Synthetic oligonucleotide
  Target: LAMA2; (-) strand; PAM type: YTN; PAM sequence: CTT
ccctctccttgaacggcttt

SEQ ID NO: 195101 - DNA, 20 bp, Artificial Sequence
  Description of Artificial Sequence: Synthetic oligonucleotide
  Target: LAMA2; (-) strand; PAM type: YTN; PAM sequence: CTC
cttccctctccttgaacggc

SEQ ID NO: 195102 - DNA, 20 bp, Artificial Sequence
  Description of Artificial Sequence: Synthetic oligonucleotide
  Target: LAMA2; (-) strand; PAM type: YTN; PAM sequence: CTA
tcgtaagaataaggagaagg

SEQ ID NO: 195103 - DNA, 20 bp, Artificial Sequence
  Description of Artificial Sequence: Synthetic oligonucleotide
  Target: LAMA2; (-) strand; PAM type: YTN; PAM sequence: TTC
tatcgtaagaataaggagaa

SEQ ID NO: 195104 - DNA, 20 bp, Artificial Sequence
  Description of Artificial Sequence: Synthetic oligonucleotide
  Target: LAMA2; (-) strand; PAM type: YTN; PAM sequence: CTG
gcacagccccaataggaatt

SEQ ID NO: 195105 - DNA, 20 bp, Artificial Sequence
  Description of Artificial Sequence: Synthetic oligonucleotide
  Target: LAMA2; (-) strand; PAM type: YTN; PAM sequence: TTC
tggcacagccccaataggaa

SEQ ID NO: 195106 - DNA, 20 bp, Artificial Sequence
  Description of Artificial Sequence: Synthetic oligonucleotide
  Target: LAMA2; (-) strand; PAM type: YTN; PAM sequence: TTT
ctggcacagccccaatagga

SEQ ID NO: 195107 - DNA, 20 bp, Artificial Sequence
  Description of Artificial Sequence: Synthetic oligonucleotide
  Target: LAMA2; (-) strand; PAM type: YTN; PAM sequence: CTC
atttctggcacagccccaat

SEQ ID NO: 195108 - DNA, 20 bp, Artificial Sequence
  Description of Artificial Sequence: Synthetic oligonucleotide
  Target: LAMA2; (-) strand; PAM type: YTN; PAM sequence: TTA
gaagtgctcatttctggcac

SEQ ID NO: 195109 - DNA, 20 bp, Artificial Sequence
  Description of Artificial Sequence: Synthetic oligonucleotide
  Target: LAMA2; (-) strand; PAM type: YTN; PAM sequence: CTT
agaagtgctcatttctggca

SEQ ID NO: 195110 - DNA, 20 bp, Artificial Sequence
  Description of Artificial Sequence: Synthetic oligonucleotide
  Target: LAMA2; (-) strand; PAM type: YTN; PAM sequence: CTG
aaatacttagaagtgctcat

SEQ ID NO: 195111 - DNA, 20 bp, Artificial Sequence
  Description of Artificial Sequence: Synthetic oligonucleotide
  Target: LAMA2; (-) strand; PAM type: YTN; PAM sequence: CTC
tgaaatacttagaagtgctc

SEQ ID NO: 195112 - DNA, 20 bp, Artificial Sequence
  Description of Artificial Sequence: Synthetic oligonucleotide
  Target: LAMA2; (-) strand; PAM type: YTN; PAM sequence: TTC
tctgaaatacttagaagtgc

SEQ ID NO: 195113 - DNA, 20 bp, Artificial Sequence
  Description of Artificial Sequence: Synthetic oligonucleotide
  Target: LAMA2; (-) strand; PAM type: YTN; PAM sequence: CTT
ctctgaaatacttagaagtg

SEQ ID NO: 195114 - DNA, 20 bp, Artificial Sequence
  Description of Artificial Sequence: Synthetic oligonucleotide
  Target: LAMA2; (-) strand; PAM type: YTN; PAM sequence: TTG
gacttctctgaaatacttag

SEQ ID NO: 195115 - DNA, 20 bp, Artificial Sequence
  Description of Artificial Sequence: Synthetic oligonucleotide
  Target: LAMA2; (-) strand; PAM type: YTN; PAM sequence: TTT
ggacttctctgaaatactta

SEQ ID NO: 195116 - DNA, 20 bp, Artificial Sequence
  Description of Artificial Sequence: Synthetic oligonucleotide
  Target: LAMA2; (-) strand; PAM type: YTN; PAM sequence: CTT
tggacttctctgaaatactt

SEQ ID NO: 195117 - DNA, 20 bp, Artificial Sequence
  Description of Artificial Sequence: Synthetic oligonucleotide
  Target: LAMA2; (-) strand; PAM type: YTN; PAM sequence: TTA
acactttggacttctctgaa

SEQ ID NO: 195118 - DNA, 20 bp, Artificial Sequence
  Description of Artificial Sequence: Synthetic oligonucleotide
  Target: LAMA2; (-) strand; PAM type: YTN; PAM sequence: TTT
aacactttggacttctctga

SEQ ID NO: 195119 - DNA, 20 bp, Artificial Sequence
  Description of Artificial Sequence: Synthetic oligonucleotide
  Target: LAMA2; (-) strand; PAM type: YTN; PAM sequence: TTT
taacactttggacttctctg

SEQ ID NO: 195120 - DNA, 20 bp, Artificial Sequence
  Description of Artificial Sequence: Synthetic oligonucleotide
  Target: LAMA2; (-) strand; PAM type: YTN; PAM sequence: TTT
ttaacactttggacttctct

SEQ ID NO: 195121 - DNA, 20 bp, Artificial Sequence
  Description of Artificial Sequence: Synthetic oligonucleotide
  Target: LAMA2; (-) strand; PAM type: YTN; PAM sequence: CTT
tttaacactttggacttctc

SEQ ID NO: 195122 - DNA, 20 bp, Artificial Sequence
  Description of Artificial Sequence: Synthetic oligonucleotide
  Target: LAMA2; (-) strand; PAM type: YTN; PAM sequence: TTG
cataaaagactttttaacac

SEQ ID NO: 195123 - DNA, 20 bp, Artificial Sequence
  Description of Artificial Sequence: Synthetic oligonucleotide
  Target: LAMA2; (-) strand; PAM type: YTN; PAM sequence: TTT
gcataaaagactttttaaca

SEQ ID NO: 195124 - DNA, 20 bp, Artificial Sequence
  Description of Artificial Sequence: Synthetic oligonucleotide
  Target: LAMA2; (-) strand; PAM type: YTN; PAM sequence: TTT
tgcataaaagactttttaac

SEQ ID NO: 195125 - DNA, 20 bp, Artificial Sequence
  Description of Artificial Sequence: Synthetic oligonucleotide
  Target: LAMA2; (-) strand; PAM type: YTN; PAM sequence: CTT
ttgcataaaagactttttaa

SEQ ID NO: 195126 - DNA, 20 bp, Artificial Sequence
  Description of Artificial Sequence: Synthetic oligonucleotide
  Target: LAMA2; (-) strand; PAM type: YTN; PAM sequence: TTC
ttttgcataaaagacttttt

SEQ ID NO: 195127 - DNA, 20 bp, Artificial Sequence
  Description of Artificial Sequence: Synthetic oligonucleotide
  Target: LAMA2; (-) strand; PAM type: YTN; PAM sequence: TTC
agaaagacgttcttttgcat

SEQ ID NO: 195128 - DNA, 20 bp, Artificial Sequence
  Description of Artificial Sequence: Synthetic oligonucleotide
  Target: LAMA2; (-) strand; PAM type: YTN; PAM sequence: CTG
attcagaaagacgttctttt

SEQ ID NO: 195129 - DNA, 20 bp, Artificial Sequence
  Description of Artificial Sequence: Synthetic oligonucleotide
  Target: LAMA2; (-) strand; PAM type: YTN; PAM sequence: TTC
actgattcagaaagacgttc

SEQ ID NO: 195130 - DNA, 20 bp, Artificial Sequence
  Description of Artificial Sequence: Synthetic oligonucleotide
  Target: LAMA2; (-) strand; PAM type: YTN; PAM sequence: CTA
ttcactgattcagaaagacg

SEQ ID NO: 195131 - DNA, 20 bp, Artificial Sequence
  Description of Artificial Sequence: Synthetic oligonucleotide
  Target: LAMA2; (-) strand; PAM type: YTN; PAM sequence: TTA
ctattcactgattcagaaag

SEQ ID NO: 195132 - DNA, 20 bp, Artificial Sequence
  Description of Artificial Sequence: Synthetic oligonucleotide
  Target: LAMA2; (-) strand; PAM type: YTN; PAM sequence: CTG
atgagcattactattcactg

SEQ ID NO: 195133 - DNA, 20 bp, Artificial Sequence
  Description of Artificial Sequence: Synthetic oligonucleotide
  Target: LAMA2; (-) strand; PAM type: YTN; PAM sequence: TTC
tgatgagcattactattcac

SEQ ID NO: 195134 - DNA, 20 bp, Artificial Sequence
  Description of Artificial Sequence: Synthetic oligonucleotide
  Target: LAMA2; (-) strand; PAM type: YTN; PAM sequence: TTA
gaaaattctgatgagcatta

SEQ ID NO: 195135 - DNA, 20 bp, Artificial Sequence
  Description of Artificial Sequence: Synthetic oligonucleotide
  Target: LAMA2; (-) strand; PAM type: YTN; PAM sequence: TTA
ttagaaaattctgatgagca

SEQ ID NO: 195136 - DNA, 20 bp, Artificial Sequence
  Description of Artificial Sequence: Synthetic oligonucleotide
  Target: LAMA2; (-) strand; PAM type: YTN; PAM sequence: TTG
tgttattagaaaattctgat

SEQ ID NO: 195137 - DNA, 20 bp, Artificial Sequence
  Description of Artificial Sequence: Synthetic oligonucleotide
  Target: LAMA2; (-) strand; PAM type: YTN; PAM sequence: TTT
gtgttattagaaaattctga

SEQ ID NO: 195138 - DNA, 20 bp, Artificial Sequence
  Description of Artificial Sequence: Synthetic oligonucleotide
  Target: LAMA2; (-) strand; PAM type: YTN; PAM sequence: TTT
tgtgttattagaaaattctg

SEQ ID NO: 195139 - DNA, 20 bp, Artificial Sequence
  Description of Artificial Sequence: Synthetic oligonucleotide
  Target: LAMA2; (-) strand; PAM type: YTN; PAM sequence: TTT
ttgtgttattagaaaattct

SEQ ID NO: 195140 - DNA, 20 bp, Artificial Sequence
  Description of Artificial Sequence: Synthetic oligonucleotide
  Target: LAMA2; (-) strand; PAM type: YTN; PAM sequence: TTG
tttttgtgttattagaaaat

SEQ ID NO: 195141 - DNA, 20 bp, Artificial Sequence
  Description of Artificial Sequence: Synthetic oligonucleotide
  Target: LAMA2; (-) strand; PAM type: YTN; PAM sequence: TTT
gtttttgtgttattagaaaa

SEQ ID NO: 195142 - DNA, 20 bp, Artificial Sequence
  Description of Artificial Sequence: Synthetic oligonucleotide
  Target: LAMA2; (-) strand; PAM type: YTN; PAM sequence: CTT
tgtttttgtgttattagaaa

SEQ ID NO: 195143 - DNA, 20 bp, Artificial Sequence
  Description of Artificial Sequence: Synthetic oligonucleotide
  Target: LAMA2; (-) strand; PAM type: YTN; PAM sequence: TTG
gctttgtttttgtgttatta

SEQ ID NO: 195144 - DNA, 20 bp, Artificial Sequence
  Description of Artificial Sequence: Synthetic oligonucleotide
  Target: LAMA2; (-) strand; PAM type: YTN; PAM sequence: CTT
ggctttgtttttgtgttatt

SEQ ID NO: 195145 - DNA, 20 bp, Artificial Sequence
  Description of Artificial Sequence: Synthetic oligonucleotide
  Target: LAMA2; (-) strand; PAM type: YTN; PAM sequence: CTG
atcaaatgtatggacttggc

SEQ ID NO: 195146 - DNA, 20 bp, Artificial Sequence
  Description of Artificial Sequence: Synthetic oligonucleotide
  Target: LAMA2; (-) strand; PAM type: YTN; PAM sequence: TTG
acaactgatcaaatgtatgg

SEQ ID NO: 195147 - DNA, 20 bp, Artificial Sequence
  Description of Artificial Sequence: Synthetic oligonucleotide
  Target: LAMA2; (-) strand; PAM type: YTN; PAM sequence: TTT
gacaactgatcaaatgtatg

SEQ ID NO: 195148 - DNA, 20 bp, Artificial Sequence
  Description of Artificial Sequence: Synthetic oligonucleotide
  Target: LAMA2; (-) strand; PAM type: YTN; PAM sequence: CTT
tgacaactgatcaaatgtat

SEQ ID NO: 195149 - DNA, 20 bp, Artificial Sequence
  Description of Artificial Sequence: Synthetic oligonucleotide
  Target: LAMA2; (-) strand; PAM type: YTN; PAM sequence: TTA
ctttgacaactgatcaaatg

SEQ ID NO: 195150 - DNA, 20 bp, Artificial Sequence
  Description of Artificial Sequence: Synthetic oligonucleotide
  Target: LAMA2; (-) strand; PAM type: YTN; PAM sequence: CTC
ccattactttgacaactgat

SEQ ID NO: 195151 - DNA, 20 bp, Artificial Sequence
  Description of Artificial Sequence: Synthetic oligonucleotide
  Target: LAMA2; (-) strand; PAM type: YTN; PAM sequence: TTG
acataatagtccacctccca

SEQ ID NO: 195152 - DNA, 20 bp, Artificial Sequence
  Description of Artificial Sequence: Synthetic oligonucleotide
  Target: LAMA2; (-) strand; PAM type: YTN; PAM sequence: CTA
aggttgacataatagtccac

SEQ ID NO: 195153 - DNA, 20 bp, Artificial Sequence
  Description of Artificial Sequence: Synthetic oligonucleotide
  Target: LAMA2; (-) strand; PAM type: YTN; PAM sequence: CTG
actaaggttgacataatagt

SEQ ID NO: 195154 - DNA, 20 bp, Artificial Sequence
  Description of Artificial Sequence: Synthetic oligonucleotide
  Target: LAMA2; (-) strand; PAM type: YTN; PAM sequence: CTC
tgactaaggttgacataata

SEQ ID NO: 195155 - DNA, 20 bp, Artificial Sequence
  Description of Artificial Sequence: Synthetic oligonucleotide
  Target: LAMA2; (-) strand; PAM type: YTN; PAM sequence: TTG
gtgaacagtgtatacaaaga

SEQ ID NO: 195156 - DNA, 20 bp, Artificial Sequence
  Description of Artificial Sequence: Synthetic oligonucleotide
  Target: LAMA2; (-) strand; PAM type: YTN; PAM sequence: CTC
aaattggtgaacagtgtata

SEQ ID NO: 195157 - DNA, 20 bp, Artificial Sequence
  Description of Artificial Sequence: Synthetic oligonucleotide
  Target: LAMA2; (-) strand; PAM type: YTN; PAM sequence: TTA
ctcaaattggtgaacagtgt

SEQ ID NO: 195158 - DNA, 20 bp, Artificial Sequence
  Description of Artificial Sequence: Synthetic oligonucleotide
  Target: LAMA2; (-) strand; PAM type: YTN; PAM sequence: TTT
actcaaattggtgaacagtg

SEQ ID NO: 195159 - DNA, 20 bp, Artificial Sequence
  Description of Artificial Sequence: Synthetic oligonucleotide
  Target: LAMA2; (-) strand; PAM type: YTN; PAM sequence: CTT
tactcaaattggtgaacagt

SEQ ID NO: 195160 - DNA, 20 bp, Artificial Sequence
  Description of Artificial Sequence: Synthetic oligonucleotide
  Target: LAMA2; (-) strand; PAM type: YTN; PAM sequence: CTC
acaaagtccactttactcaa

SEQ ID NO: 195161 - DNA, 20 bp, Artificial Sequence
  Description of Artificial Sequence: Synthetic oligonucleotide
  Target: LAMA2; (-) strand; PAM type: YTN; PAM sequence: CTC
tcacaaagtccactttactc

SEQ ID NO: 195162 - DNA, 20 bp, Artificial Sequence
  Description of Artificial Sequence: Synthetic oligonucleotide
  Target: LAMA2; (-) strand; PAM type: YTN; PAM sequence: TTC
tctcacaaagtccactttac

SEQ ID NO: 195163 - DNA, 20 bp, Artificial Sequence
  Description of Artificial Sequence: Synthetic oligonucleotide
  Target: LAMA2; (-) strand; PAM type: YTN; PAM sequence: CTA
ttctctcacaaagtccactt

SEQ ID NO: 195164 - DNA, 20 bp, Artificial Sequence
  Description of Artificial Sequence: Synthetic oligonucleotide
  Target: LAMA2; (-) strand; PAM type: YTN; PAM sequence: CTG
gccatcaaacactattctct

SEQ ID NO: 195165 - DNA, 20 bp, Artificial Sequence
  Description of Artificial Sequence: Synthetic oligonucleotide
  Target: LAMA2; (-) strand; PAM type: YTN; PAM sequence: TTA
ggaagaaatgcccaaaagag

SEQ ID NO: 195166 - DNA, 20 bp, Artificial Sequence
  Description of Artificial Sequence: Synthetic oligonucleotide
  Target: LAMA2; (-) strand; PAM type: YTN; PAM sequence: CTT
aggaagaaatgcccaaaaga

SEQ ID NO: 195167 - DNA, 20 bp, Artificial Sequence
  Description of Artificial Sequence: Synthetic oligonucleotide
  Target: LAMA2; (-) strand; PAM type: YTN; PAM sequence: TTC
cacttaggaagaaatgccca

SEQ ID NO: 195168 - DNA, 20 bp, Artificial Sequence
  Description of Artificial Sequence: Synthetic oligonucleotide
  Target: LAMA2; (-) strand; PAM type: YTN; PAM sequence: TTG
tgtattccacttaggaagaa

SEQ ID NO: 195169 - DNA, 20 bp, Artificial Sequence
  Description of Artificial Sequence: Synthetic oligonucleotide
  Target: LAMA2; (-) strand; PAM type: YTN; PAM sequence: CTG
ttgtgtattccacttaggaa

SEQ ID NO: 195170 - DNA, 20 bp, Artificial Sequence
  Description of Artificial Sequence: Synthetic oligonucleotide
  Target: LAMA2; (-) strand; PAM type: YTN; PAM sequence: TTA
tctgttgtgtattccactta

SEQ ID NO: 195171 - DNA, 20 bp, Artificial Sequence
  Description of Artificial Sequence: Synthetic oligonucleotide
  Target: LAMA2; (-) strand; PAM type: YTN; PAM sequence: CTT
atctgttgtgtattccactt

SEQ ID NO: 195172 - DNA, 20 bp, Artificial Sequence
  Description of Artificial Sequence: Synthetic oligonucleotide
  Target: LAMA2; (-) strand; PAM type: YTN; PAM sequence: CTC
ccttatctgttgtgtattcc

SEQ ID NO: 195173 - DNA, 20 bp, Artificial Sequence
  Description of Artificial Sequence: Synthetic oligonucleotide
  Target: LAMA2; (-) strand; PAM type: YTN; PAM sequence: CTA
ctcccttatctgttgtgtat

SEQ ID NO: 195174 - DNA, 20 bp, Artificial Sequence
  Description of Artificial Sequence: Synthetic oligonucleotide
  Target: LAMA2; (-) strand; PAM type: YTN; PAM sequence: CTC
tactcccttatctgttgtgt

SEQ ID NO: 195175 - DNA, 20 bp, Artificial Sequence
  Description of Artificial Sequence: Synthetic oligonucleotide
  Target: LAMA2; (-) strand; PAM type: YTN; PAM sequence: CTC
ctctactcccttatctgttg

SEQ ID NO: 195176 - DNA, 20 bp, Artificial Sequence
  Description of Artificial Sequence: Synthetic oligonucleotide
  Target: LAMA2; (-) strand; PAM type: YTN; PAM sequence: TTA
cctcctctactcccttatct

SEQ ID NO: 195177 - DNA, 20 bp, Artificial Sequence
  Description of Artificial Sequence: Synthetic oligonucleotide
  Target: LAMA2; (-) strand; PAM type: YTN; PAM sequence: CTG
tattacctcctctactccct

SEQ ID NO: 195178 - DNA, 20 bp, Artificial Sequence
  Description of Artificial Sequence: Synthetic oligonucleotide
  Target: LAMA2; (-) strand; PAM type: YTN; PAM sequence: TTC
cctgtattacctcctctact

SEQ ID NO: 195179 - DNA, 20 bp, Artificial Sequence
  Description of Artificial Sequence: Synthetic oligonucleotide
  Target: LAMA2; (-) strand; PAM type: YTN; PAM sequence: CTT
ccctgtattacctcctctac

SEQ ID NO: 195180 - DNA, 20 bp, Artificial Sequence
  Description of Artificial Sequence: Synthetic oligonucleotide
  Target: LAMA2; (-) strand; PAM type: YTN; PAM sequence: CTG
gaatgagtagcttccctgta

SEQ ID NO: 195181 - DNA, 20 bp, Artificial Sequence
  Description of Artificial Sequence: Synthetic oligonucleotide
  Target: LAMA2; (-) strand; PAM type: YTN; PAM sequence: CTG
agctggaatgagtagcttcc

SEQ ID NO: 195182 - DNA, 20 bp, Artificial Sequence
  Description of Artificial Sequence: Synthetic oligonucleotide
  Target: LAMA2; (-) strand; PAM type: YTN; PAM sequence: TTC
tgagctggaatgagtagctt

SEQ ID NO: 195183 - DNA, 20 bp, Artificial Sequence
  Description of Artificial Sequence: Synthetic oligonucleotide
  Target: LAMA2; (-) strand; PAM type: YTN; PAM sequence: CTT
ctgagctggaatgagtagct

SEQ ID NO: 195184 - DNA, 20 bp, Artificial Sequence
  Description of Artificial Sequence: Synthetic oligonucleotide
  Target: LAMA2; (-) strand; PAM type: YTN; PAM sequence: CTC
cttctgagctggaatgagta

SEQ ID NO: 195185 - DNA, 20 bp, Artificial Sequence
  Description of Artificial Sequence: Synthetic oligonucleotide
  Target: LAMA2; (-) strand; PAM type: YTN; PAM sequence: CTG
ctccttctgagctggaatga

SEQ ID NO: 195186 - DNA, 20 bp, Artificial Sequence
  Description of Artificial Sequence: Synthetic oligonucleotide
  Target: LAMA2; (-) strand; PAM type: YTN; PAM sequence: TTC
tgctccttctgagctggaat

SEQ ID NO: 195187 - DNA, 20 bp, Artificial Sequence
  Description of Artificial Sequence: Synthetic oligonucleotide
  Target: LAMA2; (-) strand; PAM type: YTN; PAM sequence: CTT
ctgctccttctgagctggaa

SEQ ID NO: 195188 - DNA, 20 bp, Artificial Sequence
  Description of Artificial Sequence: Synthetic oligonucleotide
  Target: LAMA2; (-) strand; PAM type: YTN; PAM sequence: CTC
cttctgctccttctgagctg

SEQ ID NO: 195189 - DNA, 20 bp, Artificial Sequence
  Description of Artificial Sequence: Synthetic oligonucleotide
  Target: LAMA2; (-) strand; PAM type: YTN; PAM sequence: CTA
actccttctgctccttctga

SEQ ID NO: 195190 - DNA, 20 bp, Artificial Sequence
  Description of Artificial Sequence: Synthetic oligonucleotide
  Target: LAMA2; (-) strand; PAM type: YTN; PAM sequence: TTC
atctaactccttctgctcct

SEQ ID NO: 195191 - DNA, 20 bp, Artificial Sequence
  Description of Artificial Sequence: Synthetic oligonucleotide
  Target: LAMA2; (-) strand; PAM type: YTN; PAM sequence: CTT
catctaactccttctgctcc

SEQ ID NO: 195192 - DNA, 20 bp, Artificial Sequence
  Description of Artificial Sequence: Synthetic oligonucleotide
  Target: LAMA2; (-) strand; PAM type: YTN; PAM sequence: TTG
aatgcatatatgggcttcat

SEQ ID NO: 195193 - DNA, 20 bp, Artificial Sequence
  Description of Artificial Sequence: Synthetic oligonucleotide
  Target: LAMA2; (-) strand; PAM type: YTN; PAM sequence: CTT
gaatgcatatatgggcttca

SEQ ID NO: 195194 - DNA, 20 bp, Artificial Sequence
  Description of Artificial Sequence: Synthetic oligonucleotide
  Target: LAMA2; (-) strand; PAM type: YTN; PAM sequence: TTC
ttgaatgcatatatgggctt

SEQ ID NO: 195195 - DNA, 20 bp, Artificial Sequence
  Description of Artificial Sequence: Synthetic oligonucleotide
  Target: LAMA2; (-) strand; PAM type: YTN; PAM sequence: CTT
cttgaatgcatatatgggct

SEQ ID NO: 195196 - DNA, 20 bp, Artificial Sequence
  Description of Artificial Sequence: Synthetic oligonucleotide
  Target: LAMA2; (-) strand; PAM type: YTN; PAM sequence: TTG
gcttcttgaatgcatatatg

SEQ ID NO: 195197 - DNA, 20 bp, Artificial Sequence
  Description of Artificial Sequence: Synthetic oligonucleotide
  Target: LAMA2; (-) strand; PAM type: YTN; PAM sequence: CTA
gaggataccattggcttctt

SEQ ID NO: 195198 - DNA, 20 bp, Artificial Sequence
  Description of Artificial Sequence: Synthetic oligonucleotide
  Target: LAMA2; (-) strand; PAM type: YTN; PAM sequence: CTA
tccacagctagaggatacca

SEQ ID NO: 195199 - DNA, 20 bp, Artificial Sequence
  Description of Artificial Sequence: Synthetic oligonucleotide
  Target: LAMA2; (-) strand; PAM type: YTN; PAM sequence: TTA
gccactatccacagctagag

SEQ ID NO: 195200 - DNA, 20 bp, Artificial Sequence
  Description of Artificial Sequence: Synthetic oligonucleotide
  Target: LAMA2; (-) strand; PAM type: YTN; PAM sequence: CTG
gatgaccacattagccacta

SEQ ID NO: 195201 - DNA, 20 bp, Artificial Sequence
  Description of Artificial Sequence: Synthetic oligonucleotide
  Target: LAMA2; (-) strand; PAM type: YTN; PAM sequence: TTC
tggatgaccacattagccac

SEQ ID NO: 195202 - DNA, 20 bp, Artificial Sequence
  Description of Artificial Sequence: Synthetic oligonucleotide
  Target: LAMA2; (-) strand; PAM type: YTN; PAM sequence: CTG
cggtccacagtgtggattct

SEQ ID NO: 195203 - DNA, 20 bp, Artificial Sequence
  Description of Artificial Sequence: Synthetic oligonucleotide
  Target: LAMA2; (-) strand; PAM type: YTN; PAM sequence: CTG
ctgcggtccacagtgtggat

SEQ ID NO: 195204 - DNA, 20 bp, Artificial Sequence
  Description of Artificial Sequence: Synthetic oligonucleotide
  Target: LAMA2; (-) strand; PAM type: YTN; PAM sequence: CTG
tacgggaaaacgctgctgcg

SEQ ID NO: 195205 - DNA, 20 bp, Artificial Sequence
  Description of Artificial Sequence: Synthetic oligonucleotide
  Target: LAMA2; (-) strand; PAM type: YTN; PAM sequence: TTG
gatctgtacgggaaaacgct

SEQ ID NO: 195206 - DNA, 20 bp, Artificial Sequence
  Description of Artificial Sequence: Synthetic oligonucleotide
  Target: LAMA2; (-) strand; PAM type: YTN; PAM sequence: TTT
ggatctgtacgggaaaacgc

SEQ ID NO: 195207 - DNA, 20 bp, Artificial Sequence
  Description of Artificial Sequence: Synthetic oligonucleotide
  Target: LAMA2; (-) strand; PAM type: YTN; PAM sequence: TTT
tggatctgtacgggaaaacg

SEQ ID NO: 195208 - DNA, 20 bp, Artificial Sequence
  Description of Artificial Sequence: Synthetic oligonucleotide
  Target: LAMA2; (-) strand; PAM type: YTN; PAM sequence: TTT
ttggatctgtacgggaaaac

SEQ ID NO: 195209 - DNA, 20 bp, Artificial Sequence
  Description of Artificial Sequence: Synthetic oligonucleotide
  Target: LAMA2; (-) strand; PAM type: YTN; PAM sequence: CTA
tccagagtttttggatctgt

SEQ ID NO: 195210 - DNA, 20 bp, Artificial Sequence
  Description of Artificial Sequence: Synthetic oligonucleotide
  Target: LAMA2; (-) strand; PAM type: YTN; PAM sequence: CTG
taaatccctatccagagttt

SEQ ID NO: 195211 - DNA, 20 bp, Artificial Sequence
  Description of Artificial Sequence: Synthetic oligonucleotide
  Target: LAMA2; (-) strand; PAM type: YTN; PAM sequence: TTG
gatcctgtaaatccctatcc

SEQ ID NO: 195212 - DNA, 20 bp, Artificial Sequence
  Description of Artificial Sequence: Synthetic oligonucleotide
  Target: LAMA2; (-) strand; PAM type: YTN; PAM sequence: CTA
ccggccattggatcctgtaa

SEQ ID NO: 195213 - DNA, 20 bp, Artificial Sequence
  Description of Artificial Sequence: Synthetic oligonucleotide
  Target: LAMA2; (-) strand; PAM type: YTN; PAM sequence: TTA
tctaccggccattggatcct

SEQ ID NO: 195214 - DNA, 20 bp, Artificial Sequence
  Description of Artificial Sequence: Synthetic oligonucleotide
  Target: LAMA2; (-) strand; PAM type: YTN; PAM sequence: TTT
atctaccggccattggatcc

SEQ ID NO: 195215 - DNA, 20 bp, Artificial Sequence
  Description of Artificial Sequence: Synthetic oligonucleotide
  Target: LAMA2; (-) strand; PAM type: YTN; PAM sequence: TTT
tatctaccggccattggatc

SEQ ID NO: 195216 - DNA, 20 bp, Artificial Sequence
  Description of Artificial Sequence: Synthetic oligonucleotide
  Target: LAMA2; (-) strand; PAM type: YTN; PAM sequence: TTC
attttatctaccggccattg

SEQ ID NO: 195217 - DNA, 20 bp, Artificial Sequence
  Description of Artificial Sequence: Synthetic oligonucleotide
  Target: LAMA2; (-) strand; PAM type: YTN; PAM sequence: CTA
tccccattcattttatctac

SEQ ID NO: 195218 - DNA, 20 bp, Artificial Sequence
  Description of Artificial Sequence: Synthetic oligonucleotide
  Target: LAMA2; (-) strand; PAM type: YTN; PAM sequence: CTG
taactatccccattcatttt

SEQ ID NO: 195219 - DNA, 20 bp, Artificial Sequence
  Description of Artificial Sequence: Synthetic oligonucleotide
  Target: LAMA2; (-) strand; PAM type: YTN; PAM sequence: CTC
tgtaactatccccattcatt

SEQ ID NO: 195220 - DNA, 20 bp, Artificial Sequence
  Description of Artificial Sequence: Synthetic oligonucleotide
  Target: LAMA2; (-) strand; PAM type: YTN; PAM sequence: TTG
cctctgtaactatccccatt

SEQ ID NO: 195221 - DNA, 20 bp, Artificial Sequence
  Description of Artificial Sequence: Synthetic oligonucleotide
  Target: LAMA2; (-) strand; PAM type: YTN; PAM sequence: CTT
gcctctgtaactatccccat

SEQ ID NO: 195222 - DNA, 20 bp, Artificial Sequence
  Description of Artificial Sequence: Synthetic oligonucleotide
  Target: LAMA2; (-) strand; PAM type: YTN; PAM sequence: CTC
ttgcctctgtaactatcccc

SEQ ID NO: 195223 - DNA, 20 bp, Artificial Sequence
  Description of Artificial Sequence: Synthetic oligonucleotide
  Target: LAMA2; (-) strand; PAM type: YTN; PAM sequence: CTG
ggtgggagctcttgcctctg

SEQ ID NO: 195224 - DNA, 20 bp, Artificial Sequence
  Description of Artificial Sequence: Synthetic oligonucleotide
  Target: LAMA2; (-) strand; PAM type: YTN; PAM sequence: CTC
agaaggcgctgggtgggagc

SEQ ID NO: 195225 - DNA, 20 bp, Artificial Sequence
  Description of Artificial Sequence: Synthetic oligonucleotide
  Target: LAMA2; (-) strand; PAM type: YTN; PAM sequence: TTA
cagtacatcaatcagaggaa

SEQ ID NO: 195226 - DNA, 20 bp, Artificial Sequence
  Description of Artificial Sequence: Synthetic oligonucleotide
  Target: LAMA2; (-) strand; PAM type: YTN; PAM sequence: CTT
acagtacatcaatcagagga

SEQ ID NO: 195227 - DNA, 20 bp, Artificial Sequence
  Description of Artificial Sequence: Synthetic oligonucleotide
  Target: LAMA2; (-) strand; PAM type: YTN; PAM sequence: CTC
ttacagtacatcaatcagag

SEQ ID NO: 195228 - DNA, 20 bp, Artificial Sequence
  Description of Artificial Sequence: Synthetic oligonucleotide
  Target: LAMA2; (-) strand; PAM type: YTN; PAM sequence: TTG
acggtctcttacagtacatc

SEQ ID NO: 195229 - DNA, 20 bp, Artificial Sequence
  Description of Artificial Sequence: Synthetic oligonucleotide
  Target: LAMA2; (-) strand; PAM type: YTN; PAM sequence: TTA
gccattgacggtctcttaca

SEQ ID NO: 195230 - DNA, 20 bp, Artificial Sequence
  Description of Artificial Sequence: Synthetic oligonucleotide
  Target: LAMA2; (-) strand; PAM type: YTN; PAM sequence: CTT
agccattgacggtctcttac

SEQ ID NO: 195231 - DNA, 20 bp, Artificial Sequence
  Description of Artificial Sequence: Synthetic oligonucleotide
  Target: LAMA2; (-) strand; PAM type: YTN; PAM sequence: CTG
tgggacatgtgggcagggat

SEQ ID NO: 195232 - DNA, 20 bp, Artificial Sequence
  Description of Artificial Sequence: Synthetic oligonucleotide
  Target: LAMA2; (-) strand; PAM type: YTN; PAM sequence: CTG
tgagagtgagctgtgggaca

SEQ ID NO: 195233 - DNA, 20 bp, Artificial Sequence
  Description of Artificial Sequence: Synthetic oligonucleotide
  Target: LAMA2; (-) strand; PAM type: YTN; PAM sequence: CTC
tgtgagagtgagctgtggga

SEQ ID NO: 195234 - DNA, 20 bp, Artificial Sequence
  Description of Artificial Sequence: Synthetic oligonucleotide
  Target: LAMA2; (-) strand; PAM type: YTN; PAM sequence: TTG
gctctgtgagagtgagctgt

SEQ ID NO: 195235 - DNA, 20 bp, Artificial Sequence
  Description of Artificial Sequence: Synthetic oligonucleotide
  Target: LAMA2; (-) strand; PAM type: YTN; PAM sequence: CTT
ggctctgtgagagtgagctg

SEQ ID NO: 195236 - DNA, 20 bp, Artificial Sequence
  Description of Artificial Sequence: Synthetic oligonucleotide
  Target: LAMA2; (-) strand; PAM type: YTN; PAM sequence: TTG
ggccgtgtacttggctctgt

SEQ ID NO: 195237 - DNA, 20 bp, Artificial Sequence
  Description of Artificial Sequence: Synthetic oligonucleotide
  Target: LAMA2; (-) strand; PAM type: YTN; PAM sequence: TTT
gggccgtgtacttggctctg

SEQ ID NO: 195238 - DNA, 20 bp, Artificial Sequence
  Description of Artificial Sequence: Synthetic oligonucleotide
  Target: LAMA2; (-) strand; PAM type: YTN; PAM sequence: CTT
tgggccgtgtacttggctct

SEQ ID NO: 195239 - DNA, 20 bp, Artificial Sequence
  Description of Artificial Sequence: Synthetic oligonucleotide
  Target: LAMA2; (-) strand; PAM type: YTN; PAM sequence: CTC
accccagtctttgggccgtg

SEQ ID NO: 195240 - DNA, 20 bp, Artificial Sequence
  Description of Artificial Sequence: Synthetic oligonucleotide
  Target: LAMA2; (-) strand; PAM type: YTN; PAM sequence: CTC
gaggtctcaccccagtcttt

SEQ ID NO: 195241 - DNA, 20 bp, Artificial Sequence
  Description of Artificial Sequence: Synthetic oligonucleotide
  Target: LAMA2; (-) strand; PAM type: YTN; PAM sequence: CTC
tcgaggtctcaccccagtct

SEQ ID NO: 195242 - DNA, 20 bp, Artificial Sequence
  Description of Artificial Sequence: Synthetic oligonucleotide
  Target: LAMA2; (-) strand; PAM type: YTN; PAM sequence: TTC
tctcgaggtctcaccccagt

SEQ ID NO: 195243 - DNA, 20 bp, Artificial Sequence
  Description of Artificial Sequence: Synthetic oligonucleotide
  Target: LAMA2; (-) strand; PAM type: YTN; PAM sequence: TTG
tattctctcgaggtctcacc

SEQ ID NO: 195244 - DNA, 20 bp, Artificial Sequence
  Description of Artificial Sequence: Synthetic oligonucleotide
  Target: LAMA2; (-) strand; PAM type: YTN; PAM sequence: TTT
gtattctctcgaggtctcac

SEQ ID NO: 195245 - DNA, 20 bp, Artificial Sequence
  Description of Artificial Sequence: Synthetic oligonucleotide
  Target: LAMA2; (-) strand; PAM type: YTN; PAM sequence: CTT
tgtattctctcgaggtctca

SEQ ID NO: 195246 - DNA, 20 bp, Artificial Sequence
  Description of Artificial Sequence: Synthetic oligonucleotide
  Target: LAMA2; (-) strand; PAM type: YTN; PAM sequence: TTC
tttgtattctctcgaggtct

SEQ ID NO: 195247 - DNA, 20 bp, Artificial Sequence
  Description of Artificial Sequence: Synthetic oligonucleotide
  Target: LAMA2; (-) strand; PAM type: YTN; PAM sequence: CTT
ctttgtattctctcgaggtc

SEQ ID NO: 195248 - DNA, 20 bp, Artificial Sequence
  Description of Artificial Sequence: Synthetic oligonucleotide
  Target: LAMA2; (-) strand; PAM type: YTN; PAM sequence: CTG
atgaacttctttgtattctc

SEQ ID NO: 195249 - DNA, 20 bp, Artificial Sequence
  Description of Artificial Sequence: Synthetic oligonucleotide
  Target: LAMA2; (-) strand; PAM type: YTN; PAM sequence: CTC
acatgactgatgaacttctt

SEQ ID NO: 195250 - DNA, 20 bp, Artificial Sequence
  Description of Artificial Sequence: Synthetic oligonucleotide
  Target: LAMA2; (-) strand; PAM type: YTN; PAM sequence: CTC
atcctcacatgactgatgaa

SEQ ID NO: 195251 - DNA, 20 bp, Artificial Sequence
  Description of Artificial Sequence: Synthetic oligonucleotide
  Target: LAMA2; (-) strand; PAM type: YTN; PAM sequence: CTA
tcactcatcctcacatgact

SEQ ID NO: 195252 - DNA, 20 bp, Artificial Sequence
  Description of Artificial Sequence: Synthetic oligonucleotide
  Target: LAMA2; (-) strand; PAM type: YTN; PAM sequence: CTC
aaagatggaggtgtgctatc

SEQ ID NO: 195253 - DNA, 20 bp, Artificial Sequence
  Description of Artificial Sequence: Synthetic oligonucleotide
  Target: LAMA2; (-) strand; PAM type: YTN; PAM sequence: CTA
ctcaaagatggaggtgtgct

SEQ ID NO: 195254 - DNA, 20 bp, Artificial Sequence
  Description of Artificial Sequence: Synthetic oligonucleotide
  Target: LAMA2; (-) strand; PAM type: YTN; PAM sequence: CTC
caaaagctactcaaagatgg

SEQ ID NO: 195255 - DNA, 20 bp, Artificial Sequence
  Description of Artificial Sequence: Synthetic oligonucleotide
  Target: LAMA2; (-) strand; PAM type: YTN; PAM sequence: TTC
tccaaaagctactcaaagat

SEQ ID NO: 195256 - DNA, 20 bp, Artificial Sequence
  Description of Artificial Sequence: Synthetic oligonucleotide
  Target: LAMA2; (-) strand; PAM type: YTN; PAM sequence: CTT
ctccaaaagctactcaaaga

SEQ ID NO: 195257 - DNA, 20 bp, Artificial Sequence
  Description of Artificial Sequence: Synthetic oligonucleotide
  Target: LAMA2; (-) strand; PAM type: YTN; PAM sequence: CTC
cttctccaaaagctactcaa

SEQ ID NO: 195258 - DNA, 20 bp, Artificial Sequence
  Description of Artificial Sequence: Synthetic oligonucleotide
  Target: LAMA2; (-) strand; PAM type: YTN; PAM sequence: CTC
accgtccactccttctccaa

SEQ ID NO: 195259 - DNA, 20 bp, Artificial Sequence
  Description of Artificial Sequence: Synthetic oligonucleotide
  Target: LAMA2; (-) strand; PAM type: YTN; PAM sequence: CTG
agactcaccgtccactcctt

SEQ ID NO: 195260 - DNA, 20 bp, Artificial Sequence
  Description of Artificial Sequence: Synthetic oligonucleotide
  Target: LAMA2; (-) strand; PAM type: YTN; PAM sequence: TTC
ctgagactcaccgtccactc

SEQ ID NO: 195261 - DNA, 20 bp, Artificial Sequence
  Description of Artificial Sequence: Synthetic oligonucleotide
  Target: LAMA2; (-) strand; PAM type: YTN; PAM sequence: TTT
cctgagactcaccgtccact

SEQ ID NO: 195262 - DNA, 20 bp, Artificial Sequence
  Description of Artificial Sequence: Synthetic oligonucleotide
  Target: LAMA2; (-) strand; PAM type: YTN; PAM sequence: CTT
tcctgagactcaccgtccac

SEQ ID NO: 195263 - DNA, 20 bp, Artificial Sequence
  Description of Artificial Sequence: Synthetic oligonucleotide
  Target: LAMA2; (-) strand; PAM type: YTN; PAM sequence: CTG
tcaaatggaggtatctttcc

SEQ ID NO: 195264 - DNA, 20 bp, Artificial Sequence
  Description of Artificial Sequence: Synthetic oligonucleotide
  Target: LAMA2; (-) strand; PAM type: YTN; PAM sequence: CTG
tctgtcaaatggaggtatct

SEQ ID NO: 195265 - DNA, 20 bp, Artificial Sequence
  Description of Artificial Sequence: Synthetic oligonucleotide
  Target: LAMA2; (-) strand; PAM type: YTN; PAM sequence: CTG
gtcggcataccataaagagt

SEQ ID NO: 195266 - DNA, 20 bp, Artificial Sequence
  Description of Artificial Sequence: Synthetic oligonucleotide
  Target: LAMA2; (-) strand; PAM type: YTN; PAM sequence: CTA
caggtacaagcagaatcgat

SEQ ID NO: 195267 - DNA, 20 bp, Artificial Sequence
  Description of Artificial Sequence: Synthetic oligonucleotide
  Target: LAMA2; (-) strand; PAM type: YTN; PAM sequence: CTC
tacaggtacaagcagaatcg

SEQ ID NO: 195268 - DNA, 20 bp, Artificial Sequence
  Description of Artificial Sequence: Synthetic oligonucleotide
  Target: LAMA2; (-) strand; PAM type: YTN; PAM sequence: TTC
tctacaggtacaagcagaat

SEQ ID NO: 195269 - DNA, 20 bp, Artificial Sequence
  Description of Artificial Sequence: Synthetic oligonucleotide
  Target: LAMA2; (-) strand; PAM type: YTN; PAM sequence: TTT
ctctacaggtacaagcagaa

SEQ ID NO: 195270 - DNA, 20 bp, Artificial Sequence
  Description of Artificial Sequence: Synthetic oligonucleotide
  Target: LAMA2; (-) strand; PAM type: YTN; PAM sequence: CTC
aggagtttctctacaggtac

SEQ ID NO: 195271 - DNA, 20 bp, Artificial Sequence
  Description of Artificial Sequence: Synthetic oligonucleotide
  Target: LAMA2; (-) strand; PAM type: YTN; PAM sequence: TTG
tcgctcaggagtttctctac

SEQ ID NO: 195272 - DNA, 20 bp, Artificial Sequence
  Description of Artificial Sequence: Synthetic oligonucleotide
  Target: LAMA2; (-) strand; PAM type: YTN; PAM sequence: CTA
tggagataattgtcgctcag

SEQ ID NO: 195273 - DNA, 20 bp, Artificial Sequence
  Description of Artificial Sequence: Synthetic oligonucleotide
  Target: LAMA2; (-) strand; PAM type: YTN; PAM sequence: CTC
atgactatggagataattgt

SEQ ID NO: 195274 - DNA, 20 bp, Artificial Sequence
  Description of Artificial Sequence: Synthetic oligonucleotide
  Target: LAMA2; (-) strand; PAM type: YTN; PAM sequence: CTG
caggatcaagtctcatgact

SEQ ID NO: 195275 - DNA, 20 bp, Artificial Sequence
  Description of Artificial Sequence: Synthetic oligonucleotide
  Target: LAMA2; (-) strand; PAM type: YTN; PAM sequence: CTC
cagaactgcaggatcaagtc

SEQ ID NO: 195276 - DNA, 20 bp, Artificial Sequence
  Description of Artificial Sequence: Synthetic oligonucleotide
  Target: LAMA2; (-) strand; PAM type: YTN; PAM sequence: CTG
gggctccagaactgcaggat

SEQ ID NO: 195277 - DNA, 20 bp, Artificial Sequence
  Description of Artificial Sequence: Synthetic oligonucleotide
  Target: LAMA2; (-) strand; PAM type: YTN; PAM sequence: TTG
cggcatctggggctccagaa

SEQ ID NO: 195278 - DNA, 20 bp, Artificial Sequence
  Description of Artificial Sequence: Synthetic oligonucleotide
  Target: LAMA2; (-) strand; PAM type: YTN; PAM sequence: TTT
gcggcatctggggctccaga

SEQ ID NO: 195279 - DNA, 20 bp, Artificial Sequence
  Description of Artificial Sequence: Synthetic oligonucleotide
  Target: LAMA2; (-) strand; PAM type: YTN; PAM sequence: TTT
tgcggcatctggggctccag

SEQ ID NO: 195280 - DNA, 20 bp, Artificial Sequence
  Description of Artificial Sequence: Synthetic oligonucleotide
  Target: LAMA2; (-) strand; PAM type: YTN; PAM sequence: CTT
ttgcggcatctggggctcca

SEQ ID NO: 195281 - DNA, 20 bp, Artificial Sequence
  Description of Artificial Sequence: Synthetic oligonucleotide
  Target: LAMA2; (-) strand; PAM type: YTN; PAM sequence: TTG
agcaggtcagcatcgtggaa

SEQ ID NO: 195282 - DNA, 20 bp, Artificial Sequence
  Description of Artificial Sequence: Synthetic oligonucleotide
  Target: LAMA2; (-) strand; PAM type: YTN; PAM sequence: TTT
gagcaggtcagcatcgtgga

SEQ ID NO: 195283 - DNA, 20 bp, Artificial Sequence
  Description of Artificial Sequence: Synthetic oligonucleotide
  Target: LAMA2; (-) strand; PAM type: YTN; PAM sequence: TTC
catatttgagcaggtcagca

SEQ ID NO: 195284 - DNA, 20 bp, Artificial Sequence
  Description of Artificial Sequence: Synthetic oligonucleotide
  Target: LAMA2; (-) strand; PAM type: YTN; PAM sequence: CTA
ttccatatttgagcaggtca

SEQ ID NO: 195285 - DNA, 20 bp, Artificial Sequence
  Description of Artificial Sequence: Synthetic oligonucleotide
  Target: LAMA2; (-) strand; PAM type: YTN; PAM sequence: TTC
agtgacaaaccgagaccgca

SEQ ID NO: 195286 - DNA, 20 bp, Artificial Sequence
  Description of Artificial Sequence: Synthetic oligonucleotide
  Target: LAMA2; (-) strand; PAM type: YTN; PAM sequence: CTT
cagtgacaaaccgagaccgc

SEQ ID NO: 195287 - DNA, 20 bp, Artificial Sequence
  Description of Artificial Sequence: Synthetic oligonucleotide
  Target: LAMA2; (-) strand; PAM type: YTN; PAM sequence: TTG
gcttcagtgacaaaccgaga

SEQ ID NO: 195288 - DNA, 20 bp, Artificial Sequence
  Description of Artificial Sequence: Synthetic oligonucleotide
  Target: LAMA2; (-) strand; PAM type: YTN; PAM sequence: TTG
gcgttggcttcagtgacaaa

SEQ ID NO: 195289 - DNA, 20 bp, Artificial Sequence
  Description of Artificial Sequence: Synthetic oligonucleotide
  Target: LAMA2; (-) strand; PAM type: YTN; PAM sequence: CTT
ggcgttggcttcagtgacaa

SEQ ID NO: 195290 - DNA, 20 bp, Artificial Sequence
  Description of Artificial Sequence: Synthetic oligonucleotide
  Target: LAMA2; (-) strand; PAM type: YTN; PAM sequence: TTC
ttggcgttggcttcagtgac

SEQ ID NO: 195291 - DNA, 20 bp, Artificial Sequence
  Description of Artificial Sequence: Synthetic oligonucleotide
  Target: LAMA2; (-) strand; PAM type: YTN; PAM sequence: TTT
cttggcgttggcttcagtga

SEQ ID NO: 195292 - DNA, 20 bp, Artificial Sequence
  Description of Artificial Sequence: Synthetic oligonucleotide
  Target: LAMA2; (-) strand; PAM type: YTN; PAM sequence: TTG
atttcttggcgttggcttca

SEQ ID NO: 195293 - DNA, 20 bp, Artificial Sequence
  Description of Artificial Sequence: Synthetic oligonucleotide
  Target: LAMA2; (-) strand; PAM type: YTN; PAM sequence: CTT
gatttcttggcgttggcttc

SEQ ID NO: 195294 - DNA, 20 bp, Artificial Sequence
  Description of Artificial Sequence: Synthetic oligonucleotide
  Target: LAMA2; (-) strand; PAM type: YTN; PAM sequence: TTG
cccttgatttcttggcgttg

SEQ ID NO: 195295 - DNA, 20 bp, Artificial Sequence
  Description of Artificial Sequence: Synthetic oligonucleotide
  Target: LAMA2; (-) strand; PAM type: YTN; PAM sequence: TTC
atcgggtgattgcccttgat

SEQ ID NO: 195296 - DNA, 20 bp, Artificial Sequence
  Description of Artificial Sequence: Synthetic oligonucleotide
  Target: LAMA2; (-) strand; PAM type: YTN; PAM sequence: TTT
catcgggtgattgcccttga

SEQ ID NO: 195297 - DNA, 20 bp, Artificial Sequence
  Description of Artificial Sequence: Synthetic oligonucleotide
  Target: LAMA2; (-) strand; PAM type: YTN; PAM sequence: TTG
aggtttcatcgggtgattgc

SEQ ID NO: 195298 - DNA, 20 bp, Artificial Sequence
  Description of Artificial Sequence: Synthetic oligonucleotide
  Target: LAMA2; (-) strand; PAM type: YTN; PAM sequence: CTT
gaggtttcatcgggtgattg

SEQ ID NO: 195299 - DNA, 20 bp, Artificial Sequence
  Description of Artificial Sequence: Synthetic oligonucleotide
  Target: LAMA2; (-) strand; PAM type: YTN; PAM sequence: CTG
accttgaggtttcatcgggt

SEQ ID NO: 195300 - DNA, 20 bp, Artificial Sequence
  Description of Artificial Sequence: Synthetic oligonucleotide
  Target: LAMA2; (-) strand; PAM type: YTN; PAM sequence: TTG
ggaaggtctgaccttgaggt

SEQ ID NO: 195301 - DNA, 20 bp, Artificial Sequence
  Description of Artificial Sequence: Synthetic oligonucleotide
  Target: LAMA2; (-) strand; PAM type: YTN; PAM sequence: TTG
gtacaagaattgggaaggtc

SEQ ID NO: 195302 - DNA, 20 bp, Artificial Sequence
  Description of Artificial Sequence: Synthetic oligonucleotide
  Target: LAMA2; (-) strand; PAM type: YTN; PAM sequence: CTA
cgattggtacaagaattggg

SEQ ID NO: 195303 - DNA, 20 bp, Artificial Sequence
  Description of Artificial Sequence: Synthetic oligonucleotide
  Target: LAMA2; (-) strand; PAM type: YTN; PAM sequence: TTC
caatatccagctacgattgg

SEQ ID NO: 195304 - DNA, 20 bp, Artificial Sequence
  Description of Artificial Sequence: Synthetic oligonucleotide
  Target: LAMA2; (-) strand; PAM type: YTN; PAM sequence: TTT
ccaatatccagctacgattg

SEQ ID NO: 195305 - DNA, 20 bp, Artificial Sequence
  Description of Artificial Sequence: Synthetic oligonucleotide
  Target: LAMA2; (-) strand; PAM type: YTN; PAM sequence: TTT
tccaatatccagctacgatt

SEQ ID NO: 195306 - DNA, 20 bp, Artificial Sequence
  Description of Artificial Sequence: Synthetic oligonucleotide
  Target: LAMA2; (-) strand; PAM type: YTN; PAM sequence: TTA
cacgttttccaatatccagc

SEQ ID NO: 195307 - DNA, 20 bp, Artificial Sequence
  Description of Artificial Sequence: Synthetic oligonucleotide
  Target: LAMA2; (-) strand; PAM type: YTN; PAM sequence: TTT
acacgttttccaatatccag

SEQ ID NO: 195308 - DNA, 20 bp, Artificial Sequence
  Description of Artificial Sequence: Synthetic oligonucleotide
  Target: LAMA2; (-) strand; PAM type: YTN; PAM sequence: TTT
tacacgttttccaatatcca

SEQ ID NO: 195309 - DNA, 20 bp, Artificial Sequence
  Description of Artificial Sequence: Synthetic oligonucleotide
  Target: LAMA2; (-) strand; PAM type: YTN; PAM sequence: TTG
tggttttacacgttttccaa

SEQ ID NO: 195310 - DNA, 20 bp, Artificial Sequence
  Description of Artificial Sequence: Synthetic oligonucleotide
  Target: LAMA2; (-) strand; PAM type: YTN; PAM sequence: TTG
gaagtcaggagacagttgtg

SEQ ID NO: 195311 - DNA, 20 bp, Artificial Sequence
  Description of Artificial Sequence: Synthetic oligonucleotide
  Target: LAMA2; (-) strand; PAM type: YTN; PAM sequence: CTG
tgggtgtggttggaagtcag

SEQ ID NO: 195312 - DNA, 20 bp, Artificial Sequence
  Description of Artificial Sequence: Synthetic oligonucleotide
  Target: LAMA2; (-) strand; PAM type: YTN; PAM sequence: CTC
tgtgggtgtggttggaagtc

SEQ ID NO: 195313 - DNA, 20 bp, Artificial Sequence
  Description of Artificial Sequence: Synthetic oligonucleotide
  Target: LAMA2; (-) strand; PAM type: YTN; PAM sequence: CTA
ccaagactctgtgggtgtgg

SEQ ID NO: 195314 - DNA, 20 bp, Artificial Sequence
  Description of Artificial Sequence: Synthetic oligonucleotide
  Target: LAMA2; (-) strand; PAM type: YTN; PAM sequence: TTC
taccaagactctgtgggtgt

SEQ ID NO: 195315 - DNA, 20 bp, Artificial Sequence
  Description of Artificial Sequence: Synthetic oligonucleotide
  Target: LAMA2; (-) strand; PAM type: YTN; PAM sequence: CTT
ctaccaagactctgtgggtg

SEQ ID NO: 195316 - DNA, 20 bp, Artificial Sequence
  Description of Artificial Sequence: Synthetic oligonucleotide
  Target: LAMA2; (-) strand; PAM type: YTN; PAM sequence: CTG
cgtatcttctaccaagactc

SEQ ID NO: 195317 - DNA, 20 bp, Artificial Sequence
  Description of Artificial Sequence: Synthetic oligonucleotide
  Target: LAMA2; (-) strand; PAM type: YTN; PAM sequence: TTA
caagggactgcgtatcttct

SEQ ID NO: 195318 - DNA, 20 bp, Artificial Sequence
  Description of Artificial Sequence: Synthetic oligonucleotide
  Target: LAMA2; (-) strand; PAM type: YTN; PAM sequence: CTT
acaagggactgcgtatcttc

SEQ ID NO: 195319 - DNA, 20 bp, Artificial Sequence
  Description of Artificial Sequence: Synthetic oligonucleotide
  Target: LAMA2; (-) strand; PAM type: YTN; PAM sequence: TTC
acttacaagggactgcgtat

SEQ ID NO: 195320 - DNA, 20 bp, Artificial Sequence
  Description of Artificial Sequence: Synthetic oligonucleotide
  Target: LAMA2; (-) strand; PAM type: YTN; PAM sequence: TTT
cacttacaagggactgcgta

SEQ ID NO: 195321 - DNA, 20 bp, Artificial Sequence
  Description of Artificial Sequence: Synthetic oligonucleotide
  Target: LAMA2; (-) strand; PAM type: YTN; PAM sequence: TTT
tcacttacaagggactgcgt

SEQ ID NO: 195322 - DNA, 20 bp, Artificial Sequence
  Description of Artificial Sequence: Synthetic oligonucleotide
  Target: LAMA2; (-) strand; PAM type: YTN; PAM sequence: TTT
ttcacttacaagggactgcg

SEQ ID NO: 195323 - DNA, 20 bp, Artificial Sequence
  Description of Artificial Sequence: Synthetic oligonucleotide
  Target: LAMA2; (-) strand; PAM type: YTN; PAM sequence: TTC
aggcaagtttttcacttaca

SEQ ID NO: 195324 - DNA, 20 bp, Artificial Sequence
  Description of Artificial Sequence: Synthetic oligonucleotide
  Target: LAMA2; (-) strand; PAM type: YTN; PAM sequence: CTT
caggcaagtttttcacttac

SEQ ID NO: 195325 - DNA, 20 bp, Artificial Sequence
  Description of Artificial Sequence: Synthetic oligonucleotide
  Target: LAMA2; (-) strand; PAM type: YTN; PAM sequence: CTC
gtggaagtcttcaggcaagt

SEQ ID NO: 195326 - DNA, 20 bp, Artificial Sequence
  Description of Artificial Sequence: Synthetic oligonucleotide
  Target: LAMA2; (-) strand; PAM type: YTN; PAM sequence: TTC
actcgtggaagtcttcaggc

SEQ ID NO: 195327 - DNA, 20 bp, Artificial Sequence
  Description of Artificial Sequence: Synthetic oligonucleotide
  Target: LAMA2; (-) strand; PAM type: YTN; PAM sequence: CTT
cactcgtggaagtcttcagg

SEQ ID NO: 195328 - DNA, 20 bp, Artificial Sequence
  Description of Artificial Sequence: Synthetic oligonucleotide
  Target: LAMA2; (-) strand; PAM type: YTN; PAM sequence: CTG
atcttcactcgtggaagtct

SEQ ID NO: 195329 - DNA, 20 bp, Artificial Sequence
  Description of Artificial Sequence: Synthetic oligonucleotide
  Target: LAMA2; (-) strand; PAM type: YTN; PAM sequence: CTG
tcacctgatcttcactcgtg

SEQ ID NO: 195330 - DNA, 20 bp, Artificial Sequence
  Description of Artificial Sequence: Synthetic oligonucleotide
  Target: LAMA2; (-) strand; PAM type: YTN; PAM sequence: CTC
agctgtcacctgatcttcac

SEQ ID NO: 195331 - DNA, 20 bp, Artificial Sequence
  Description of Artificial Sequence: Synthetic oligonucleotide
  Target: LAMA2; (-) strand; PAM type: YTN; PAM sequence: CTG
cacatcccatacactcagct

SEQ ID NO: 195332 - DNA, 20 bp, Artificial Sequence
  Description of Artificial Sequence: Synthetic oligonucleotide
  Target: LAMA2; (-) strand; PAM type: YTN; PAM sequence: CTG
cgtacctgcacatcccatac

SEQ ID NO: 195333 - DNA, 20 bp, Artificial Sequence
  Description of Artificial Sequence: Synthetic oligonucleotide
  Target: LAMA2; (-) strand; PAM type: YTN; PAM sequence: TTG
ctgcgtacctgcacatccca

SEQ ID NO: 195334 - DNA, 20 bp, Artificial Sequence
  Description of Artificial Sequence: Synthetic oligonucleotide
  Target: LAMA2; (-) strand; PAM type: YTN; PAM sequence: CTT
gctgcgtacctgcacatccc

SEQ ID NO: 195335 - DNA, 20 bp, Artificial Sequence
  Description of Artificial Sequence: Synthetic oligonucleotide
  Target: LAMA2; (-) strand; PAM type: YTN; PAM sequence: CTG
cttgctgcgtacctgcacat

SEQ ID NO: 195336 - DNA, 20 bp, Artificial Sequence
  Description of Artificial Sequence: Synthetic oligonucleotide
  Target: LAMA2; (-) strand; PAM type: YTN; PAM sequence: CTC
ctgcttgctgcgtacctgca

SEQ ID NO: 195337 - DNA, 20 bp, Artificial Sequence
  Description of Artificial Sequence: Synthetic oligonucleotide
  Target: LAMA2; (-) strand; PAM type: YTN; PAM sequence: CTG
tgggccgcgctcctgcttgc

SEQ ID NO: 195338 - DNA, 20 bp, Artificial Sequence
  Description of Artificial Sequence: Synthetic oligonucleotide
  Target: LAMA2; (-) strand; PAM type: YTN; PAM sequence: CTC
cgcaggatgagggagtggtg

SEQ ID NO: 195339 - DNA, 20 bp, Artificial Sequence
  Description of Artificial Sequence: Synthetic oligonucleotide
  Target: LAMA2; (-) strand; PAM type: YTN; PAM sequence: CTG
gcagcgtgggataacgccgc

SEQ ID NO: 195340 - DNA, 20 bp, Artificial Sequence
  Description of Artificial Sequence: Synthetic oligonucleotide
  Target: LAMA2; (-) strand; PAM type: YTN; PAM sequence: CTG
caacgccgaggctggcagcg

SEQ ID NO: 195341 - DNA, 20 bp, Artificial Sequence
  Description of Artificial Sequence: Synthetic oligonucleotide
  Target: LAMA2; (-) strand; PAM type: YTN; PAM sequence: CTC
tgcaacgccgaggctggcag

SEQ ID NO: 195342 - DNA, 20 bp, Artificial Sequence
  Description of Artificial Sequence: Synthetic oligonucleotide
  Target: LAMA2; (-) strand; PAM type: YTN; PAM sequence: CTG
cgggcgccacggcgccccgt

SEQ ID NO: 195343 - DNA, 20 bp, Artificial Sequence
  Description of Artificial Sequence: Synthetic oligonucleotide
  Target: LAMA2; (-) strand; PAM type: YTN; PAM sequence: CTG
cagggctgcgggcgccacgg

SEQ ID NO: 195344 - DNA, 20 bp, Artificial Sequence
  Description of Artificial Sequence: Synthetic oligonucleotide
  Target: LAMA2; (-) strand; PAM type: YTN; PAM sequence: CTG
ccggccggccctgcagggct

SEQ ID NO: 195345 - DNA, 20 bp, Artificial Sequence
  Description of Artificial Sequence: Synthetic oligonucleotide
  Target: LAMA2; (-) strand; PAM type: YTN; PAM sequence: TTG
agaccccgctgccggccggc

SEQ ID NO: 195346 - DNA, 20 bp, Artificial Sequence
  Description of Artificial Sequence: Synthetic oligonucleotide
  Target: LAMA2; (-) strand; PAM type: YTN; PAM sequence: CTG
attgagaccccgctgccggc

SEQ ID NO: 195347 - DNA, 20 bp, Artificial Sequence
  Description of Artificial Sequence: Synthetic oligonucleotide
  Target: LAMA2; (-) strand; PAM type: YTN; PAM sequence: CTG
ctgattgagaccccgctgcc

SEQ ID NO: 195348 - DNA, 20 bp, Artificial Sequence
  Description of Artificial Sequence: Synthetic oligonucleotide
  Target: LAMA2; (-) strand; PAM type: YTN; PAM sequence: CTG
tgggctgctgattgagaccc

SEQ ID NO: 195349 - DNA, 20 bp, Artificial Sequence
  Description of Artificial Sequence: Synthetic oligonucleotide
  Target: LAMA2; (-) strand; PAM type: YTN; PAM sequence: CTG
tgcgggctgtgggctgctga

SEQ ID NO: 195350 - DNA, 20 bp, Artificial Sequence
  Description of Artificial Sequence: Synthetic oligonucleotide
  Target: LAMA2; (-) strand; PAM type: YTN; PAM sequence: CTG
ccgggcgcggcgccgccctg

SEQ ID NO: 195351 - DNA, 20 bp, Artificial Sequence
  Description of Artificial Sequence: Synthetic oligonucleotide
  Target: LAMA2; (-) strand; PAM type: YTN; PAM sequence: CTG
tagctgccgggcgcggcgcc

SEQ ID NO: 195352 - DNA, 20 bp, Artificial Sequence
  Description of Artificial Sequence: Synthetic oligonucleotide
  Target: LAMA2; (-) strand; PAM type: YTN; PAM sequence: CTA
gcaaacgcagtgccgccgtg

SEQ ID NO: 195353 - DNA, 20 bp, Artificial Sequence
  Description of Artificial Sequence: Synthetic oligonucleotide
  Target: LAMA2; (-) strand; PAM type: YTN; PAM sequence: TTG
tggcagtcgcgcctagcaaa

SEQ ID NO: 195354 - DNA, 20 bp, Artificial Sequence
  Description of Artificial Sequence: Synthetic oligonucleotide
  Target: LAMA2; (-) strand; PAM type: YTN; PAM sequence: CTT
gtggcagtcgcgcctagcaa

SEQ ID NO: 195355 - DNA, 20 bp, Artificial Sequence
  Description of Artificial Sequence: Synthetic oligonucleotide
  Target: LAMA2; (-) strand; PAM type: YTN; PAM sequence: TTC
ccttgtggcagtcgcgccta

SEQ ID NO: 195356 - DNA, 20 bp, Artificial Sequence
  Description of Artificial Sequence: Synthetic oligonucleotide
  Target: LAMA2; (-) strand; PAM type: YTN; PAM sequence: CTT
cccttgtggcagtcgcgcct

SEQ ID NO: 195357 - DNA, 20 bp, Artificial Sequence
  Description of Artificial Sequence: Synthetic oligonucleotide
  Target: LAMA2; (-) strand; PAM type: YTN; PAM sequence: TTA
gaaatagaggccacggcaac

SEQ ID NO: 195358 - DNA, 20 bp, Artificial Sequence
  Description of Artificial Sequence: Synthetic oligonucleotide
  Target: LAMA2; (-) strand; PAM type: YTN; PAM sequence: TTT
agaaatagaggccacggcaa

SEQ ID NO: 195359 - DNA, 20 bp, Artificial Sequence
  Description of Artificial Sequence: Synthetic oligonucleotide
  Target: LAMA2; (-) strand; PAM type: YTN; PAM sequence: CTT
tagaaatagaggccacggca

SEQ ID NO: 195360 - DNA, 20 bp, Artificial Sequence
  Description of Artificial Sequence: Synthetic oligonucleotide
  Target: LAMA2; (-) strand; PAM type: YTN; PAM sequence: TTC
agtcaatgagggtgtaagca

SEQ ID NO: 195361 - DNA, 20 bp, Artificial Sequence
  Description of Artificial Sequence: Synthetic oligonucleotide
  Target: LAMA2; (-) strand; PAM type: YTN; PAM sequence: TTG
caatagttcagtcaatgagg

SEQ ID NO: 195362 - DNA, 20 bp, Artificial Sequence
  Description of Artificial Sequence: Synthetic oligonucleotide
  Target: LAMA2; (-) strand; PAM type: YTN; PAM sequence: CTC
aagaggcggttgcaatagtt

SEQ ID NO: 195363 - DNA, 20 bp, Artificial Sequence
  Description of Artificial Sequence: Synthetic oligonucleotide
  Target: LAMA2; (-) strand; PAM type: YTN; PAM sequence: TTC
agtcacctcaagaggcggtt

SEQ ID NO: 195364 - DNA, 20 bp, Artificial Sequence
  Description of Artificial Sequence: Synthetic oligonucleotide
  Target: LAMA2; (-) strand; PAM type: YTN; PAM sequence: TTT
cagtcacctcaagaggcggt

SEQ ID NO: 195365 - DNA, 20 bp, Artificial Sequence
  Description of Artificial Sequence: Synthetic oligonucleotide
  Target: LAMA2; (-) strand; PAM type: YTN; PAM sequence: CTA
tgaatatttcagtcacctca

SEQ ID NO: 195366 - DNA, 20 bp, Artificial Sequence
  Description of Artificial Sequence: Synthetic oligonucleotide
  Target: LAMA2; (-) strand; PAM type: YTN; PAM sequence: CTG
caatatctatgaatatttca

SEQ ID NO: 195367 - DNA, 20 bp, Artificial Sequence
  Description of Artificial Sequence: Synthetic oligonucleotide
  Target: LAMA2; (-) strand; PAM type: YTN; PAM sequence: CTA
tatgcccaaaaggagaataa

SEQ ID NO: 195368 - DNA, 20 bp, Artificial Sequence
  Description of Artificial Sequence: Synthetic oligonucleotide
  Target: LAMA2; (-) strand; PAM type: YTN; PAM sequence: CTA
ctatatgcccaaaaggagaa

SEQ ID NO: 195369 - DNA, 20 bp, Artificial Sequence
  Description of Artificial Sequence: Synthetic oligonucleotide
  Target: LAMA2; (-) strand; PAM type: YTN; PAM sequence: TTC
aggggtgagcaaatgtaatc

SEQ ID NO: 195370 - DNA, 20 bp, Artificial Sequence
  Description of Artificial Sequence: Synthetic oligonucleotide
  Target: LAMA2; (-) strand; PAM type: YTN; PAM sequence: TTT
caggggtgagcaaatgtaat

SEQ ID NO: 195371 - DNA, 20 bp, Artificial Sequence
  Description of Artificial Sequence: Synthetic oligonucleotide
  Target: LAMA2; (-) strand; PAM type: YTN; PAM sequence: CTA
atttcaggggtgagcaaatg

SEQ ID NO: 195372 - DNA, 20 bp, Artificial Sequence
  Description of Artificial Sequence: Synthetic oligonucleotide
  Target: LAMA2; (-) strand; PAM type: YTN; PAM sequence: CTA
tgcctaatttcaggggtgag

SEQ ID NO: 195373 - DNA, 20 bp, Artificial Sequence
  Description of Artificial Sequence: Synthetic oligonucleotide
  Target: LAMA2; (-) strand; PAM type: YTN; PAM sequence: TTG
acggtgtctatgcctaattt

SEQ ID NO: 195374 - DNA, 20 bp, Artificial Sequence
  Description of Artificial Sequence: Synthetic oligonucleotide
  Target: LAMA2; (-) strand; PAM type: YTN; PAM sequence: TTC
attgacggtgtctatgccta

SEQ ID NO: 195375 - DNA, 20 bp, Artificial Sequence
  Description of Artificial Sequence: Synthetic oligonucleotide
  Target: LAMA2; (-) strand; PAM type: YTN; PAM sequence: TTT
cattgacggtgtctatgcct

SEQ ID NO: 195376 - DNA, 20 bp, Artificial Sequence
  Description of Artificial Sequence: Synthetic oligonucleotide
  Target: LAMA2; (-) strand; PAM type: YTN; PAM sequence: TTC
acatttcattgacggtgtct

SEQ ID NO: 195377 - DNA, 20 bp, Artificial Sequence
  Description of Artificial Sequence: Synthetic oligonucleotide
  Target: LAMA2; (-) strand; PAM type: YTN; PAM sequence: CTG
ttcacatttcattgacggtg

SEQ ID NO: 195378 - DNA, 20 bp, Artificial Sequence
  Description of Artificial Sequence: Synthetic oligonucleotide
  Target: LAMA2; (-) strand; PAM type: YTN; PAM sequence: TTC
tgttcacatttcattgacgg

SEQ ID NO: 195379 - DNA, 20 bp, Artificial Sequence
  Description of Artificial Sequence: Synthetic oligonucleotide
  Target: LAMA2; (-) strand; PAM type: YTN; PAM sequence: CTA
agagtaaagcatgtcagttc

SEQ ID NO: 195380 - DNA, 20 bp, Artificial Sequence
  Description of Artificial Sequence: Synthetic oligonucleotide
  Target: LAMA2; (-) strand; PAM type: YTN; PAM sequence: TTC
aatctaagagtaaagcatgt

SEQ ID NO: 195381 - DNA, 20 bp, Artificial Sequence
  Description of Artificial Sequence: Synthetic oligonucleotide
  Target: LAMA2; (-) strand; PAM type: YTN; PAM sequence: CTC
gtattcaatctaagagtaaa

SEQ ID NO: 195382 - DNA, 20 bp, Artificial Sequence
  Description of Artificial Sequence: Synthetic oligonucleotide
  Target: LAMA2; (-) strand; PAM type: YTN; PAM sequence: TTG
taaaactcgtattcaatcta

SEQ ID NO: 195383 - DNA, 20 bp, Artificial Sequence
  Description of Artificial Sequence: Synthetic oligonucleotide
  Target: LAMA2; (-) strand; PAM type: YTN; PAM sequence: CTT
gtaaaactcgtattcaatct

SEQ ID NO: 195384 - DNA, 20 bp, Artificial Sequence
  Description of Artificial Sequence: Synthetic oligonucleotide
  Target: LAMA2; (-) strand; PAM type: YTN; PAM sequence: CTG
gcttgtaaaactcgtattca

SEQ ID NO: 195385 - DNA, 20 bp, Artificial Sequence
  Description of Artificial Sequence: Synthetic oligonucleotide
  Target: LAMA2; (-) strand; PAM type: YTN; PAM sequence: TTA
tgcactggcttgtaaaactc

SEQ ID NO: 195386 - DNA, 20 bp, Artificial Sequence
  Description of Artificial Sequence: Synthetic oligonucleotide
  Target: LAMA2; (-) strand; PAM type: YTN; PAM sequence: CTA
tagcatggcgaattatgcac

SEQ ID NO: 195387 - DNA, 20 bp, Artificial Sequence
  Description of Artificial Sequence: Synthetic oligonucleotide
  Target: LAMA2; (-) strand; PAM type: YTN; PAM sequence: CTC
tatagcatggcgaattatgc

SEQ ID NO: 195388 - DNA, 20 bp, Artificial Sequence
  Description of Artificial Sequence: Synthetic oligonucleotide
  Target: LAMA2; (-) strand; PAM type: YTN; PAM sequence: CTG
tctctatagcatggcgaatt

SEQ ID NO: 195389 - DNA, 20 bp, Artificial Sequence
  Description of Artificial Sequence: Synthetic oligonucleotide
  Target: LAMA2; (-) strand; PAM type: YTN; PAM sequence: CTG
gaagatcatctgtctctata

SEQ ID NO: 195390 - DNA, 20 bp, Artificial Sequence
  Description of Artificial Sequence: Synthetic oligonucleotide
  Target: LAMA2; (-) strand; PAM type: YTN; PAM sequence: CTC
aggcatccatctggaagatc

SEQ ID NO: 195391 - DNA, 20 bp, Artificial Sequence
  Description of Artificial Sequence: Synthetic oligonucleotide
  Target: LAMA2; (-) strand; PAM type: YTN; PAM sequence: CTA
cactcaggcatccatctgga

SEQ ID NO: 195392 - DNA, 20 bp, Artificial Sequence
  Description of Artificial Sequence: Synthetic oligonucleotide
  Target: LAMA2; (-) strand; PAM type: YTN; PAM sequence: TTC
tacactcaggcatccatctg

SEQ ID NO: 195393 - DNA, 20 bp, Artificial Sequence
  Description of Artificial Sequence: Synthetic oligonucleotide
  Target: LAMA2; (-) strand; PAM type: YTN; PAM sequence: CTA
tatattctacactcaggcat

SEQ ID NO: 195394 - DNA, 20 bp, Artificial Sequence
  Description of Artificial Sequence: Synthetic oligonucleotide
  Target: LAMA2; (-) strand; PAM type: YTN; PAM sequence: CTG
atctatatattctacactca

SEQ ID NO: 195395 - DNA, 20 bp, Artificial Sequence
  Description of Artificial Sequence: Synthetic oligonucleotide
  Target: LAMA2; (-) strand; PAM type: YTN; PAM sequence: TTG
ggcccatgtgtgaagggtgg

SEQ ID NO: 195396 - DNA, 20 bp, Artificial Sequence
  Description of Artificial Sequence: Synthetic oligonucleotide
  Target: LAMA2; (-) strand; PAM type: YTN; PAM sequence: TTT
gggcccatgtgtgaagggtg

SEQ ID NO: 195397 - DNA, 20 bp, Artificial Sequence
  Description of Artificial Sequence: Synthetic oligonucleotide
  Target: LAMA2; (-) strand; PAM type: YTN; PAM sequence: TTT
tgggcccatgtgtgaagggt

SEQ ID NO: 195398 - DNA, 20 bp, Artificial Sequence
  Description of Artificial Sequence: Synthetic oligonucleotide
  Target: LAMA2; (-) strand; PAM type: YTN; PAM sequence: CTC
cgtgtacattttgggcccat

SEQ ID NO: 195399 - DNA, 20 bp, Artificial Sequence
  Description of Artificial Sequence: Synthetic oligonucleotide
  Target: LAMA2; (-) strand; PAM type: YTN; PAM sequence: CTG
ctccgtgtacattttgggcc

SEQ ID NO: 195400 - DNA, 20 bp, Artificial Sequence
  Description of Artificial Sequence: Synthetic oligonucleotide
  Target: LAMA2; (-) strand; PAM type: YTN; PAM sequence: CTC
ctgctccgtgtacattttgg

SEQ ID NO: 195401 - DNA, 20 bp, Artificial Sequence
  Description of Artificial Sequence: Synthetic oligonucleotide
  Target: LAMA2; (-) strand; PAM type: YTN; PAM sequence: TTG
ctcctgctccgtgtacattt

SEQ ID NO: 195402 - DNA, 20 bp, Artificial Sequence
  Description of Artificial Sequence: Synthetic oligonucleotide
  Target: LAMA2; (-) strand; PAM type: YTN; PAM sequence: CTT
gctcctgctccgtgtacatt

SEQ ID NO: 195403 - DNA, 20 bp, Artificial Sequence
  Description of Artificial Sequence: Synthetic oligonucleotide
  Target: LAMA2; (-) strand; PAM type: YTN; PAM sequence: TTC
ttgctcctgctccgtgtaca

SEQ ID NO: 195404 - DNA, 20 bp, Artificial Sequence
  Description of Artificial Sequence: Synthetic oligonucleotide
  Target: LAMA2; (-) strand; PAM type: YTN; PAM sequence: TTT
cttgctcctgctccgtgtac

SEQ ID NO: 195405 - DNA, 20 bp, Artificial Sequence
  Description of Artificial Sequence: Synthetic oligonucleotide
  Target: LAMA2; (-) strand; PAM type: YTN; PAM sequence: CTA
acaaagatagcaaggacgtg

SEQ ID NO: 195406 - DNA, 20 bp, Artificial Sequence
  Description of Artificial Sequence: Synthetic oligonucleotide
  Target: LAMA2; (-) strand; PAM type: YTN; PAM sequence: TTA
aactaacaaagatagcaagg

SEQ ID NO: 195407 - DNA, 20 bp, Artificial Sequence
  Description of Artificial Sequence: Synthetic oligonucleotide
  Target: LAMA2; (-) strand; PAM type: YTN; PAM sequence: CTG
tggattaaactaacaaagat

SEQ ID NO: 195408 - DNA, 20 bp, Artificial Sequence
  Description of Artificial Sequence: Synthetic oligonucleotide
  Target: LAMA2; (-) strand; PAM type: YTN; PAM sequence: CTC
tgtggattaaactaacaaag

SEQ ID NO: 195409 - DNA, 20 bp, Artificial Sequence
  Description of Artificial Sequence: Synthetic oligonucleotide
  Target: LAMA2; (-) strand; PAM type: YTN; PAM sequence: CTC
caaagtctctgtggattaaa

SEQ ID NO: 195410 - DNA, 20 bp, Artificial Sequence
  Description of Artificial Sequence: Synthetic oligonucleotide
  Target: LAMA2; (-) strand; PAM type: YTN; PAM sequence: CTG
cagactccaaagtctctgtg

SEQ ID NO: 195411 - DNA, 20 bp, Artificial Sequence
  Description of Artificial Sequence: Synthetic oligonucleotide
  Target: LAMA2; (-) strand; PAM type: YTN; PAM sequence: CTG
tataactgcagactccaaag

SEQ ID NO: 195412 - DNA, 20 bp, Artificial Sequence
  Description of Artificial Sequence: Synthetic oligonucleotide
  Target: LAMA2; (-) strand; PAM type: YTN; PAM sequence: CTA
ggatgctgtataactgcaga

SEQ ID NO: 195413 - DNA, 20 bp, Artificial Sequence
  Description of Artificial Sequence: Synthetic oligonucleotide
  Target: LAMA2; (-) strand; PAM type: YTN; PAM sequence: TTA
agggatcatatcagtcagga

SEQ ID NO: 195414 - DNA, 20 bp, Artificial Sequence
  Description of Artificial Sequence: Synthetic oligonucleotide
  Target: LAMA2; (-) strand; PAM type: YTN; PAM sequence: TTG
agtagaaaaatcagttaagg

SEQ ID NO: 195415 - DNA, 20 bp, Artificial Sequence
  Description of Artificial Sequence: Synthetic oligonucleotide
  Target: LAMA2; (-) strand; PAM type: YTN; PAM sequence: TTT
gagtagaaaaatcagttaag

SEQ ID NO: 195416 - DNA, 20 bp, Artificial Sequence
  Description of Artificial Sequence: Synthetic oligonucleotide
  Target: LAMA2; (-) strand; PAM type: YTN; PAM sequence: CTT
tgagtagaaaaatcagttaa

SEQ ID NO: 195417 - DNA, 20 bp, Artificial Sequence
  Description of Artificial Sequence: Synthetic oligonucleotide
  Target: LAMA2; (-) strand; PAM type: YTN; PAM sequence: TTA
atatgatagtgatgtagaat

SEQ ID NO: 195418 - DNA, 20 bp, Artificial Sequence
  Description of Artificial Sequence: Synthetic oligonucleotide
  Target: LAMA2; (-) strand; PAM type: YTN; PAM sequence: TTC
agaaagattaatatgatagt

SEQ ID NO: 195419 - DNA, 20 bp, Artificial Sequence
  Description of Artificial Sequence: Synthetic oligonucleotide
  Target: LAMA2; (-) strand; PAM type: YTN; PAM sequence: TTT
cagaaagattaatatgatag

SEQ ID NO: 195420 - DNA, 20 bp, Artificial Sequence
  Description of Artificial Sequence: Synthetic oligonucleotide
  Target: LAMA2; (-) strand; PAM type: YTN; PAM sequence: CTA
tttcagaaagattaatatga

SEQ ID NO: 195421 - DNA, 20 bp, Artificial Sequence
  Description of Artificial Sequence: Synthetic oligonucleotide
  Target: LAMA2; (-) strand; PAM type: YTN; PAM sequence: TTC
tatttcagaaagattaatat

SEQ ID NO: 195422 - DNA, 20 bp, Artificial Sequence
  Description of Artificial Sequence: Synthetic oligonucleotide
  Target: LAMA2; (-) strand; PAM type: YTN; PAM sequence: TTA
gagttctatttcagaaagat

SEQ ID NO: 195423 - DNA, 20 bp, Artificial Sequence
  Description of Artificial Sequence: Synthetic oligonucleotide
  Target: LAMA2; (-) strand; PAM type: YTN; PAM sequence: TTA
tataattagagttctatttc

SEQ ID NO: 195424 - DNA, 20 bp, Artificial Sequence
  Description of Artificial Sequence: Synthetic oligonucleotide
  Target: LAMA2; (-) strand; PAM type: YTN; PAM sequence: TTT
atataattagagttctattt

SEQ ID NO: 195425 - DNA, 20 bp, Artificial Sequence
  Description of Artificial Sequence: Synthetic oligonucleotide
  Target: LAMA2; (-) strand; PAM type: YTN; PAM sequence: TTC
ataaggaatttatataatta

SEQ ID NO: 195426 - DNA, 20 bp, Artificial Sequence
  Description of Artificial Sequence: Synthetic oligonucleotide
  Target: LAMA2; (-) strand; PAM type: YTN; PAM sequence: TTT
cataaggaatttatataatt

SEQ ID NO: 195427 - DNA, 20 bp, Artificial Sequence
  Description of Artificial Sequence: Synthetic oligonucleotide
  Target: LAMA2; (-) strand; PAM type: YTN; PAM sequence: TTT
tcataaggaatttatataat

SEQ ID NO: 195428 - DNA, 20 bp, Artificial Sequence
  Description of Artificial Sequence: Synthetic oligonucleotide
  Target: LAMA2; (-) strand; PAM type: YTN; PAM sequence: TTC
aaagattttcataaggaatt

SEQ ID NO: 195429 - DNA, 20 bp, Artificial Sequence
  Description of Artificial Sequence: Synthetic oligonucleotide
  Target: LAMA2; (-) strand; PAM type: YTN; PAM sequence: TTG
aaagccagtgaagataacag

SEQ ID NO: 195430 - DNA, 20 bp, Artificial Sequence
  Description of Artificial Sequence: Synthetic oligonucleotide
  Target: LAMA2; (-) strand; PAM type: YTN; PAM sequence: CTT
gaaagccagtgaagataaca

SEQ ID NO: 195431 - DNA, 20 bp, Artificial Sequence
  Description of Artificial Sequence: Synthetic oligonucleotide
  Target: LAMA2; (-) strand; PAM type: YTN; PAM sequence: CTG
tgatggtcttgaaagccagt

SEQ ID NO: 195432 - DNA, 20 bp, Artificial Sequence
  Description of Artificial Sequence: Synthetic oligonucleotide
  Target: LAMA2; (-) strand; PAM type: YTN; PAM sequence: TTG
agatgcacactgtgatggtc

SEQ ID NO: 195433 - DNA, 20 bp, Artificial Sequence
  Description of Artificial Sequence: Synthetic oligonucleotide
  Target: LAMA2; (-) strand; PAM type: YTN; PAM sequence: TTA
aaaggaagttgagatgcaca

SEQ ID NO: 195434 - DNA, 20 bp, Artificial Sequence
  Description of Artificial Sequence: Synthetic oligonucleotide
  Target: LAMA2; (-) strand; PAM type: YTN; PAM sequence: TTT
aaaaggaagttgagatgcac

SEQ ID NO: 195435 - DNA, 20 bp, Artificial Sequence
  Description of Artificial Sequence: Synthetic oligonucleotide
  Target: LAMA2; (-) strand; PAM type: YTN; PAM sequence: TTT
taaaaggaagttgagatgca

SEQ ID NO: 195436 - DNA, 20 bp, Artificial Sequence
  Description of Artificial Sequence: Synthetic oligonucleotide
  Target: LAMA2; (-) strand; PAM type: YTN; PAM sequence: TTA
gaaagtgtgtgtgtacacgt

SEQ ID NO: 195437 - DNA, 20 bp, Artificial Sequence
  Description of Artificial Sequence: Synthetic oligonucleotide
  Target: LAMA2; (-) strand; PAM type: YTN; PAM sequence: TTA
gaatcataggaacagaaaag

SEQ ID NO: 195438 - DNA, 20 bp, Artificial Sequence
  Description of Artificial Sequence: Synthetic oligonucleotide
  Target: LAMA2; (-) strand; PAM type: YTN; PAM sequence: CTT
agaatcataggaacagaaaa

SEQ ID NO: 195439 - DNA, 20 bp, Artificial Sequence
  Description of Artificial Sequence: Synthetic oligonucleotide
  Target: LAMA2; (-) strand; PAM type: YTN; PAM sequence: CTA
gcagagagcatcttagaatc

SEQ ID NO: 195440 - DNA, 20 bp, Artificial Sequence
  Description of Artificial Sequence: Synthetic oligonucleotide
  Target: LAMA2; (-) strand; PAM type: YTN; PAM sequence: TTA
gacaggactagcagagagca

SEQ ID NO: 195441 - DNA, 20 bp, Artificial Sequence
  Description of Artificial Sequence: Synthetic oligonucleotide
  Target: LAMA2; (-) strand; PAM type: YTN; PAM sequence: CTT
agacaggactagcagagagc

SEQ ID NO: 195442 - DNA, 20 bp, Artificial Sequence
  Description of Artificial Sequence: Synthetic oligonucleotide
  Target: LAMA2; (-) strand; PAM type: YTN; PAM sequence: TTA
agaataggtagcacttagac

SEQ ID NO: 195443 - DNA, 20 bp, Artificial Sequence
  Description of Artificial Sequence: Synthetic oligonucleotide
  Target: LAMA2; (-) strand; PAM type: YTN; PAM sequence: CTT
aagaataggtagcacttaga

SEQ ID NO: 195444 - DNA, 20 bp, Artificial Sequence
  Description of Artificial Sequence: Synthetic oligonucleotide
  Target: LAMA2; (-) strand; PAM type: YTN; PAM sequence: TTA
cttaagaataggtagcactt

SEQ ID NO: 195445 - DNA, 20 bp, Artificial Sequence
  Description of Artificial Sequence: Synthetic oligonucleotide
  Target: LAMA2; (-) strand; PAM type: YTN; PAM sequence: CTG
ttacttaagaataggtagca

SEQ ID NO: 195446 - DNA, 20 bp, Artificial Sequence
  Description of Artificial Sequence: Synthetic oligonucleotide
  Target: LAMA2; (-) strand; PAM type: YTN; PAM sequence: TTG
aactgttacttaagaatagg

SEQ ID NO: 195447 - DNA, 20 bp, Artificial Sequence
  Description of Artificial Sequence: Synthetic oligonucleotide
  Target: LAMA2; (-) strand; PAM type: YTN; PAM sequence: TTT
gaactgttacttaagaatag

SEQ ID NO: 195448 - DNA, 20 bp, Artificial Sequence
  Description of Artificial Sequence: Synthetic oligonucleotide
  Target: LAMA2; (-) strand; PAM type: YTN; PAM sequence: CTG
gcatttgaactgttacttaa

SEQ ID NO: 195449 - DNA, 20 bp, Artificial Sequence
  Description of Artificial Sequence: Synthetic oligonucleotide
  Target: LAMA2; (-) strand; PAM type: YTN; PAM sequence: CTC
atagagatactggcatttga

SEQ ID NO: 195450 - DNA, 20 bp, Artificial Sequence
  Description of Artificial Sequence: Synthetic oligonucleotide
  Target: LAMA2; (-) strand; PAM type: YTN; PAM sequence: TTG
cagagatccagaaaaagcct

SEQ ID NO: 195451 - DNA, 20 bp, Artificial Sequence
  Description of Artificial Sequence: Synthetic oligonucleotide
  Target: LAMA2; (-) strand; PAM type: YTN; PAM sequence: TTT
gcagagatccagaaaaagcc

SEQ ID NO: 195452 - DNA, 20 bp, Artificial Sequence
  Description of Artificial Sequence: Synthetic oligonucleotide
  Target: LAMA2; (-) strand; PAM type: YTN; PAM sequence: TTT
tgcagagatccagaaaaagc

SEQ ID NO: 195453 - DNA, 20 bp, Artificial Sequence
  Description of Artificial Sequence: Synthetic oligonucleotide
  Target: LAMA2; (-) strand; PAM type: YTN; PAM sequence: TTT
ttgcagagatccagaaaaag

SEQ ID NO: 195454 - DNA, 20 bp, Artificial Sequence
  Description of Artificial Sequence: Synthetic oligonucleotide
  Target: LAMA2; (-) strand; PAM type: YTN; PAM sequence: TTT
tttgcagagatccagaaaaa

SEQ ID NO: 195455 - DNA, 20 bp, Artificial Sequence
  Description of Artificial Sequence: Synthetic oligonucleotide
  Target: LAMA2; (-) strand; PAM type: YTN; PAM sequence: TTT
ttttgcagagatccagaaaa

SEQ ID NO: 195456 - DNA, 20 bp, Artificial Sequence
  Description of Artificial Sequence: Synthetic oligonucleotide
  Target: LAMA2; (-) strand; PAM type: YTN; PAM sequence: TTT
tttttgcagagatccagaaa

SEQ ID NO: 195457 - DNA, 20 bp, Artificial Sequence
  Description of Artificial Sequence: Synthetic oligonucleotide
  Target: LAMA2; (-) strand; PAM type: YTN; PAM sequence: TTT
ttttttgcagagatccagaa

SEQ ID NO: 195458 - DNA, 20 bp, Artificial Sequence
  Description of Artificial Sequence: Synthetic oligonucleotide
  Target: LAMA2; (-) strand; PAM type: YTN; PAM sequence: CTT
tttttttgcagagatccaga

SEQ ID NO: 195459 - DNA, 20 bp, Artificial Sequence
  Description of Artificial Sequence: Synthetic oligonucleotide
  Target: LAMA2; (-) strand; PAM type: YTN; PAM sequence: TTG
tccctttttttttgcagaga

SEQ ID NO: 195460 - DNA, 20 bp, Artificial Sequence
  Description of Artificial Sequence: Synthetic oligonucleotide
  Target: LAMA2; (-) strand; PAM type: YTN; PAM sequence: CTT
gtccctttttttttgcagag

SEQ ID NO: 195461 - DNA, 20 bp, Artificial Sequence
  Description of Artificial Sequence: Synthetic oligonucleotide
  Target: LAMA2; (-) strand; PAM type: YTN; PAM sequence: TTC
ttgtccctttttttttgcag

SEQ ID NO: 195462 - DNA, 20 bp, Artificial Sequence
  Description of Artificial Sequence: Synthetic oligonucleotide
  Target: LAMA2; (-) strand; PAM type: YTN; PAM sequence: TTT
cttgtccctttttttttgca

SEQ ID NO: 195463 - DNA, 20 bp, Artificial Sequence
  Description of Artificial Sequence: Synthetic oligonucleotide
  Target: LAMA2; (-) strand; PAM type: YTN; PAM sequence: TTG
ggaggaaggtgtttcttgtc

SEQ ID NO: 195464 - DNA, 20 bp, Artificial Sequence
  Description of Artificial Sequence: Synthetic oligonucleotide
  Target: LAMA2; (-) strand; PAM type: YTN; PAM sequence: TTT
gggaggaaggtgtttcttgt

SEQ ID NO: 195465 - DNA, 20 bp, Artificial Sequence
  Description of Artificial Sequence: Synthetic oligonucleotide
  Target: LAMA2; (-) strand; PAM type: YTN; PAM sequence: CTT
tgggaggaaggtgtttcttg

SEQ ID NO: 195466 - DNA, 20 bp, Artificial Sequence
  Description of Artificial Sequence: Synthetic oligonucleotide
  Target: LAMA2; (-) strand; PAM type: YTN; PAM sequence: TTC
ctttgggaggaaggtgtttc

SEQ ID NO: 195467 - DNA, 20 bp, Artificial Sequence
  Description of Artificial Sequence: Synthetic oligonucleotide
  Target: LAMA2; (-) strand; PAM type: YTN; PAM sequence: TTG
ttcctttgggaggaaggtgt

SEQ ID NO: 195468 - DNA, 20 bp, Artificial Sequence
  Description of Artificial Sequence: Synthetic oligonucleotide
  Target: LAMA2; (-) strand; PAM type: YTN; PAM sequence: TTT
gttcctttgggaggaaggtg

SEQ ID NO: 195469 - DNA, 20 bp, Artificial Sequence
  Description of Artificial Sequence: Synthetic oligonucleotide
  Target: LAMA2; (-) strand; PAM type: YTN; PAM sequence: CTT
tgttcctttgggaggaaggt

SEQ ID NO: 195470 - DNA, 20 bp, Artificial Sequence
  Description of Artificial Sequence: Synthetic oligonucleotide
  Target: LAMA2; (-) strand; PAM type: YTN; PAM sequence: TTC
tttgttcctttgggaggaag

SEQ ID NO: 195471 - DNA, 20 bp, Artificial Sequence
  Description of Artificial Sequence: Synthetic oligonucleotide
  Target: LAMA2; (-) strand; PAM type: YTN; PAM sequence: TTG
ccattctttgttcctttggg

SEQ ID NO: 195472 - DNA, 20 bp, Artificial Sequence
  Description of Artificial Sequence: Synthetic oligonucleotide
  Target: LAMA2; (-) strand; PAM type: YTN; PAM sequence: TTA
taagtaattgccattctttg

SEQ ID NO: 195473 - DNA, 20 bp, Artificial Sequence
  Description of Artificial Sequence: Synthetic oligonucleotide
  Target: LAMA2; (-) strand; PAM type: YTN; PAM sequence: CTT
ataagtaattgccattcttt

SEQ ID NO: 195474 - DNA, 20 bp, Artificial Sequence
  Description of Artificial Sequence: Synthetic oligonucleotide
  Target: LAMA2; (-) strand; PAM type: YTN; PAM sequence: TTA
cttataagtaattgccattc

SEQ ID NO: 195475 - DNA, 20 bp, Artificial Sequence
  Description of Artificial Sequence: Synthetic oligonucleotide
  Target: LAMA2; (-) strand; PAM type: YTN; PAM sequence: CTT
acttataagtaattgccatt

SEQ ID NO: 195476 - DNA, 20 bp, Artificial Sequence
  Description of Artificial Sequence: Synthetic oligonucleotide
  Target: LAMA2; (-) strand; PAM type: YTN; PAM sequence: CTG
gcttacttataagtaattgc

SEQ ID NO: 195477 - DNA, 20 bp, Artificial Sequence
  Description of Artificial Sequence: Synthetic oligonucleotide
  Target: LAMA2; (-) strand; PAM type: YTN; PAM sequence: CTA
aaatctggcttacttataag

SEQ ID NO: 195478 - DNA, 20 bp, Artificial Sequence
  Description of Artificial Sequence: Synthetic oligonucleotide
  Target: LAMA2; (-) strand; PAM type: YTN; PAM sequence: TTG
ctaaaatctggcttacttat

SEQ ID NO: 195479 - DNA, 20 bp, Artificial Sequence
  Description of Artificial Sequence: Synthetic oligonucleotide
  Target: LAMA2; (-) strand; PAM type: YTN; PAM sequence: TTA
agacaaaaatggtccaattg

SEQ ID NO: 195480 - DNA, 20 bp, Artificial Sequence
  Description of Artificial Sequence: Synthetic oligonucleotide
  Target: LAMA2; (-) strand; PAM type: YTN; PAM sequence: TTT
aagacaaaaatggtccaatt

SEQ ID NO: 195481 - DNA, 20 bp, Artificial Sequence
  Description of Artificial Sequence: Synthetic oligonucleotide
  Target: LAMA2; (-) strand; PAM type: YTN; PAM sequence: TTA
tatttaagacaaaaatggtc

SEQ ID NO: 195482 - DNA, 20 bp, Artificial Sequence
  Description of Artificial Sequence: Synthetic oligonucleotide
  Target: LAMA2; (-) strand; PAM type: YTN; PAM sequence: TTA
gttatatttaagacaaaaat

SEQ ID NO: 195483 - DNA, 20 bp, Artificial Sequence
  Description of Artificial Sequence: Synthetic oligonucleotide
  Target: LAMA2; (-) strand; PAM type: YTN; PAM sequence: CTA
tagagacaggttagttatat

SEQ ID NO: 195484 - DNA, 20 bp, Artificial Sequence
  Description of Artificial Sequence: Synthetic oligonucleotide
  Target: LAMA2; (-) strand; PAM type: YTN; PAM sequence: TTG
taagctatagagacaggtta

SEQ ID NO: 195485 - DNA, 20 bp, Artificial Sequence
  Description of Artificial Sequence: Synthetic oligonucleotide
  Target: LAMA2; (-) strand; PAM type: YTN; PAM sequence: CTT
gtaagctatagagacaggtt

SEQ ID NO: 195486 - DNA, 20 bp, Artificial Sequence
  Description of Artificial Sequence: Synthetic oligonucleotide
  Target: LAMA2; (-) strand; PAM type: YTN; PAM sequence: TTA
tgaataccttgtaagctata

SEQ ID NO: 195487 - DNA, 20 bp, Artificial Sequence
  Description of Artificial Sequence: Synthetic oligonucleotide
  Target: LAMA2; (-) strand; PAM type: YTN; PAM sequence: TTT
atgaataccttgtaagctat

SEQ ID NO: 195488 - DNA, 20 bp, Artificial Sequence
  Description of Artificial Sequence: Synthetic oligonucleotide
  Target: LAMA2; (-) strand; PAM type: YTN; PAM sequence: TTG
aagaatttatgaataccttg

SEQ ID NO: 195489 - DNA, 20 bp, Artificial Sequence
  Description of Artificial Sequence: Synthetic oligonucleotide
  Target: LAMA2; (-) strand; PAM type: YTN; PAM sequence: TTT
gaagaatttatgaatacctt

SEQ ID NO: 195490 - DNA, 20 bp, Artificial Sequence
  Description of Artificial Sequence: Synthetic oligonucleotide
  Target: LAMA2; (-) strand; PAM type: YTN; PAM sequence: TTG
tttgaagaatttatgaatac

SEQ ID NO: 195491 - DNA, 20 bp, Artificial Sequence
  Description of Artificial Sequence: Synthetic oligonucleotide
  Target: LAMA2; (-) strand; PAM type: YTN; PAM sequence: TTT
gtttgaagaatttatgaata

SEQ ID NO: 195492 - DNA, 20 bp, Artificial Sequence
  Description of Artificial Sequence: Synthetic oligonucleotide
  Target: LAMA2; (-) strand; PAM type: YTN; PAM sequence: TTT
tgtttgaagaatttatgaat

SEQ ID NO: 195493 - DNA, 20 bp, Artificial Sequence
  Description of Artificial Sequence: Synthetic oligonucleotide
  Target: LAMA2; (-) strand; PAM type: YTN; PAM sequence: CTT
ttgtttgaagaatttatgaa

SEQ ID NO: 195494 - DNA, 20 bp, Artificial Sequence
  Description of Artificial Sequence: Synthetic oligonucleotide
  Target: LAMA2; (-) strand; PAM type: YTN; PAM sequence: TTC
ttttgtttgaagaatttatg

SEQ ID NO: 195495 - DNA, 20 bp, Artificial Sequence
  Description of Artificial Sequence: Synthetic oligonucleotide
  Target: LAMA2; (-) strand; PAM type: YTN; PAM sequence: TTT
cttttgtttgaagaatttat

SEQ ID NO: 195496 - DNA, 20 bp, Artificial Sequence
  Description of Artificial Sequence: Synthetic oligonucleotide
  Target: LAMA2; (-) strand; PAM type: YTN; PAM sequence: TTA
tgataaatttcttttgtttg

SEQ ID NO: 195497 - DNA, 20 bp, Artificial Sequence
  Description of Artificial Sequence: Synthetic oligonucleotide
  Target: LAMA2; (-) strand; PAM type: YTN; PAM sequence: TTT
atgataaatttcttttgttt

SEQ ID NO: 195498 - DNA, 20 bp, Artificial Sequence
  Description of Artificial Sequence: Synthetic oligonucleotide
  Target: LAMA2; (-) strand; PAM type: YTN; PAM sequence: CTT
tatgataaatttcttttgtt

SEQ ID NO: 195499 - DNA, 20 bp, Artificial Sequence
  Description of Artificial Sequence: Synthetic oligonucleotide
  Target: LAMA2; (-) strand; PAM type: YTN; PAM sequence: CTG
tatcctttatgataaatttc

SEQ ID NO: 195500 - DNA, 20 bp, Artificial Sequence
  Description of Artificial Sequence: Synthetic oligonucleotide
  Target: LAMA2; (-) strand; PAM type: YTN; PAM sequence: TTA
cctgtatcctttatgataaa

SEQ ID NO: 195501 - DNA, 20 bp, Artificial Sequence
  Description of Artificial Sequence: Synthetic oligonucleotide
  Target: LAMA2; (-) strand; PAM type: YTN; PAM sequence: TTT
acctgtatcctttatgataa

SEQ ID NO: 195502 - DNA, 20 bp, Artificial Sequence
  Description of Artificial Sequence: Synthetic oligonucleotide
  Target: LAMA2; (-) strand; PAM type: YTN; PAM sequence: TTT
tacctgtatcctttatgata

SEQ ID NO: 195503 - DNA, 20 bp, Artificial Sequence
  Description of Artificial Sequence: Synthetic oligonucleotide
  Target: LAMA2; (-) strand; PAM type: YTN; PAM sequence: CTT
ttacctgtatcctttatgat

SEQ ID NO: 195504 - DNA, 20 bp, Artificial Sequence
  Description of Artificial Sequence: Synthetic oligonucleotide
  Target: LAMA2; (-) strand; PAM type: YTN; PAM sequence: TTC
acagaacttttacctgtatc

SEQ ID NO: 195505 - DNA, 20 bp, Artificial Sequence
  Description of Artificial Sequence: Synthetic oligonucleotide
  Target: LAMA2; (-) strand; PAM type: YTN; PAM sequence: TTT
cacagaacttttacctgtat

SEQ ID NO: 195506 - DNA, 20 bp, Artificial Sequence
  Description of Artificial Sequence: Synthetic oligonucleotide
  Target: LAMA2; (-) strand; PAM type: YTN; PAM sequence: TTA
aacaatttcacagaactttt

SEQ ID NO: 195507 - DNA, 20 bp, Artificial Sequence
  Description of Artificial Sequence: Synthetic oligonucleotide
  Target: LAMA2; (-) strand; PAM type: YTN; PAM sequence: TTT
aaacaatttcacagaacttt

SEQ ID NO: 195508 - DNA, 20 bp, Artificial Sequence
  Description of Artificial Sequence: Synthetic oligonucleotide
  Target: LAMA2; (-) strand; PAM type: YTN; PAM sequence: TTT
taaacaatttcacagaactt

SEQ ID NO: 195509 - DNA, 20 bp, Artificial Sequence
  Description of Artificial Sequence: Synthetic oligonucleotide
  Target: LAMA2; (-) strand; PAM type: YTN; PAM sequence: TTT
ttaaacaatttcacagaact

SEQ ID NO: 195510 - DNA, 20 bp, Artificial Sequence
  Description of Artificial Sequence: Synthetic oligonucleotide
  Target: LAMA2; (-) strand; PAM type: YTN; PAM sequence: TTT
tttaaacaatttcacagaac

SEQ ID NO: 195511 - DNA, 20 bp, Artificial Sequence
  Description of Artificial Sequence: Synthetic oligonucleotide
  Target: LAMA2; (-) strand; PAM type: YTN; PAM sequence: TTA
ttttttaaacaatttcacag

SEQ ID NO: 195512 - DNA, 20 bp, Artificial Sequence
  Description of Artificial Sequence: Synthetic oligonucleotide
  Target: LAMA2; (-) strand; PAM type: YTN; PAM sequence: TTA
gttattttttaaacaatttc

SEQ ID NO: 195513 - DNA, 20 bp, Artificial Sequence
  Description of Artificial Sequence: Synthetic oligonucleotide
  Target: LAMA2; (-) strand; PAM type: YTN; PAM sequence: TTT
agttattttttaaacaattt

SEQ ID NO: 195514 - DNA, 20 bp, Artificial Sequence
  Description of Artificial Sequence: Synthetic oligonucleotide
  Target: LAMA2; (-) strand; PAM type: YTN; PAM sequence: TTA
tttagttattttttaaacaa

SEQ ID NO: 195515 - DNA, 20 bp, Artificial Sequence
  Description of Artificial Sequence: Synthetic oligonucleotide
  Target: LAMA2; (-) strand; PAM type: YTN; PAM sequence: TTT
atttagttattttttaaaca

SEQ ID NO: 195516 - DNA, 20 bp, Artificial Sequence
  Description of Artificial Sequence: Synthetic oligonucleotide
  Target: LAMA2; (-) strand; PAM type: YTN; PAM sequence: TTC
atttatttagttatttttta

SEQ ID NO: 195517 - DNA, 20 bp, Artificial Sequence
  Description of Artificial Sequence: Synthetic oligonucleotide
  Target: LAMA2; (-) strand; PAM type: YTN; PAM sequence: TTG
ggaattcatttatttagtta

SEQ ID NO: 195518 - DNA, 20 bp, Artificial Sequence
  Description of Artificial Sequence: Synthetic oligonucleotide
  Target: LAMA2; (-) strand; PAM type: YTN; PAM sequence: TTT
gggaattcatttatttagtt

SEQ ID NO: 195519 - DNA, 20 bp, Artificial Sequence
  Description of Artificial Sequence: Synthetic oligonucleotide
  Target: LAMA2; (-) strand; PAM type: YTN; PAM sequence: CTC
aaaatcatttgggaattcat

SEQ ID NO: 195520 - DNA, 20 bp, Artificial Sequence
  Description of Artificial Sequence: Synthetic oligonucleotide
  Target: LAMA2; (-) strand; PAM type: YTN; PAM sequence: CTA
caataaagactcaaaatcat

SEQ ID NO: 195521 - DNA, 20 bp, Artificial Sequence
  Description of Artificial Sequence: Synthetic oligonucleotide
  Target: LAMA2; (-) strand; PAM type: YTN; PAM sequence: CTG
caaagtgtgataagaactac

SEQ ID NO: 195522 - DNA, 20 bp, Artificial Sequence
  Description of Artificial Sequence: Synthetic oligonucleotide
  Target: LAMA2; (-) strand; PAM type: YTN; PAM sequence: CTA
gaaatggccactgcaaagtg

SEQ ID NO: 195523 - DNA, 20 bp, Artificial Sequence
  Description of Artificial Sequence: Synthetic oligonucleotide
  Target: LAMA2; (-) strand; PAM type: YTN; PAM sequence: CTG
aaaagtgctagaaatggcca

SEQ ID NO: 195524 - DNA, 20 bp, Artificial Sequence
  Description of Artificial Sequence: Synthetic oligonucleotide
  Target: LAMA2; (-) strand; PAM type: YTN; PAM sequence: TTG
cctgaaaagtgctagaaatg

SEQ ID NO: 195525 - DNA, 20 bp, Artificial Sequence
  Description of Artificial Sequence: Synthetic oligonucleotide
  Target: LAMA2; (-) strand; PAM type: YTN; PAM sequence: TTA
ttgcctgaaaagtgctagaa

SEQ ID NO: 195526 - DNA, 20 bp, Artificial Sequence
  Description of Artificial Sequence: Synthetic oligonucleotide
  Target: LAMA2; (-) strand; PAM type: YTN; PAM sequence: TTT
attgcctgaaaagtgctaga

SEQ ID NO: 195527 - DNA, 20 bp, Artificial Sequence
  Description of Artificial Sequence: Synthetic oligonucleotide
  Target: LAMA2; (-) strand; PAM type: YTN; PAM sequence: TTC
aataatatggaagtgaaaga

SEQ ID NO: 195528 - DNA, 20 bp, Artificial Sequence
  Description of Artificial Sequence: Synthetic oligonucleotide
  Target: LAMA2; (-) strand; PAM type: YTN; PAM sequence: TTT
caataatatggaagtgaaag

SEQ ID NO: 195529 - DNA, 20 bp, Artificial Sequence
  Description of Artificial Sequence: Synthetic oligonucleotide
  Target: LAMA2; (-) strand; PAM type: YTN; PAM sequence: TTT
tcaataatatggaagtgaaa

SEQ ID NO: 195530 - DNA, 20 bp, Artificial Sequence
  Description of Artificial Sequence: Synthetic oligonucleotide
  Target: LAMA2; (-) strand; PAM type: YTN; PAM sequence: TTA
tgcaaaagaattttcaataa

SEQ ID NO: 195531 - DNA, 20 bp, Artificial Sequence
  Description of Artificial Sequence: Synthetic oligonucleotide
  Target: LAMA2; (-) strand; PAM type: YTN; PAM sequence: CTA
ggcattatgcaaaagaattt

SEQ ID NO: 195532 - DNA, 20 bp, Artificial Sequence
  Description of Artificial Sequence: Synthetic oligonucleotide
  Target: LAMA2; (-) strand; PAM type: YTN; PAM sequence: TTG
ctaggcattatgcaaaagaa

SEQ ID NO: 195533 - DNA, 20 bp, Artificial Sequence
  Description of Artificial Sequence: Synthetic oligonucleotide
  Target: LAMA2; (-) strand; PAM type: YTN; PAM sequence: TTT
gctaggcattatgcaaaaga

SEQ ID NO: 195534 - DNA, 20 bp, Artificial Sequence
  Description of Artificial Sequence: Synthetic oligonucleotide
  Target: LAMA2; (-) strand; PAM type: YTN; PAM sequence: TTA
agatatttgctaggcattat

SEQ ID NO: 195535 - DNA, 20 bp, Artificial Sequence
  Description of Artificial Sequence: Synthetic oligonucleotide
  Target: LAMA2; (-) strand; PAM type: YTN; PAM sequence: TTC
aacattaagatatttgctag

SEQ ID NO: 195536 - DNA, 20 bp, Artificial Sequence
  Description of Artificial Sequence: Synthetic oligonucleotide
  Target: LAMA2; (-) strand; PAM type: YTN; PAM sequence: TTC
agatattcaacattaagata

SEQ ID NO: 195537 - DNA, 20 bp, Artificial Sequence
  Description of Artificial Sequence: Synthetic oligonucleotide
  Target: LAMA2; (-) strand; PAM type: YTN; PAM sequence: TTC
attcagatattcaacattaa

SEQ ID NO: 195538 - DNA, 20 bp, Artificial Sequence
  Description of Artificial Sequence: Synthetic oligonucleotide
  Target: LAMA2; (-) strand; PAM type: YTN; PAM sequence: TTC
attcattcagatattcaaca

SEQ ID NO: 195539 - DNA, 20 bp, Artificial Sequence
  Description of Artificial Sequence: Synthetic oligonucleotide
  Target: LAMA2; (-) strand; PAM type: YTN; PAM sequence: TTC
attcattcattcagatattc

SEQ ID NO: 195540 - DNA, 20 bp, Artificial Sequence
  Description of Artificial Sequence: Synthetic oligonucleotide
  Target: LAMA2; (-) strand; PAM type: YTN; PAM sequence: TTC
attcattcattcattcagat

SEQ ID NO: 195541 - DNA, 20 bp, Artificial Sequence
  Description of Artificial Sequence: Synthetic oligonucleotide
  Target: LAMA2; (-) strand; PAM type: YTN; PAM sequence: TTC
attcattcattcattcattc

SEQ ID NO: 195542 - DNA, 20 bp, Artificial Sequence
  Description of Artificial Sequence: Synthetic oligonucleotide
  Target: LAMA2; (-) strand; PAM type: YTN; PAM sequence: TTC
gttcattcattcattcattc

SEQ ID NO: 195543 - DNA, 20 bp, Artificial Sequence
  Description of Artificial Sequence: Synthetic oligonucleotide
  Target: LAMA2; (-) strand; PAM type: YTN; PAM sequence: TTC
attcgttcattcattcattc

SEQ ID NO: 195544 - DNA, 20 bp, Artificial Sequence
  Description of Artificial Sequence: Synthetic oligonucleotide
  Target: LAMA2; (-) strand; PAM type: YTN; PAM sequence: TTT
cattcgttcattcattcatt

SEQ ID NO: 195545 - DNA, 20 bp, Artificial Sequence
  Description of Artificial Sequence: Synthetic oligonucleotide
  Target: LAMA2; (-) strand; PAM type: YTN; PAM sequence: TTA
atttcattcgttcattcatt

SEQ ID NO: 195546 - DNA, 20 bp, Artificial Sequence
  Description of Artificial Sequence: Synthetic oligonucleotide
  Target: LAMA2; (-) strand; PAM type: YTN; PAM sequence: CTT
aatttcattcgttcattcat

SEQ ID NO: 195547 - DNA, 20 bp, Artificial Sequence
  Description of Artificial Sequence: Synthetic oligonucleotide
  Target: LAMA2; (-) strand; PAM type: YTN; PAM sequence: TTA
aaataaaatgcaaccttaat

SEQ ID NO: 195548 - DNA, 20 bp, Artificial Sequence
  Description of Artificial Sequence: Synthetic oligonucleotide
  Target: LAMA2; (-) strand; PAM type: YTN; PAM sequence: TTT
aaaataaaatgcaaccttaa

SEQ ID NO: 195549 - DNA, 20 bp, Artificial Sequence
  Description of Artificial Sequence: Synthetic oligonucleotide
  Target: LAMA2; (-) strand; PAM type: YTN; PAM sequence: TTT
taaaataaaatgcaacctta

SEQ ID NO: 195550 - DNA, 20 bp, Artificial Sequence
  Description of Artificial Sequence: Synthetic oligonucleotide
  Target: LAMA2; (-) strand; PAM type: YTN; PAM sequence: CTG
aagaaaaaaacggtagtttt

SEQ ID NO: 195551 - DNA, 20 bp, Artificial Sequence
  Description of Artificial Sequence: Synthetic oligonucleotide
  Target: LAMA2; (-) strand; PAM type: YTN; PAM sequence: TTC
tgaagaaaaaaacggtagtt

SEQ ID NO: 195552 - DNA, 20 bp, Artificial Sequence
  Description of Artificial Sequence: Synthetic oligonucleotide
  Target: LAMA2; (-) strand; PAM type: YTN; PAM sequence: TTT
ctgaagaaaaaaacggtagt

SEQ ID NO: 195553 - DNA, 20 bp, Artificial Sequence
  Description of Artificial Sequence: Synthetic oligonucleotide
  Target: LAMA2; (-) strand; PAM type: YTN; PAM sequence: TTG
tgatttctgaagaaaaaaac

SEQ ID NO: 195554 - DNA, 20 bp, Artificial Sequence
  Description of Artificial Sequence: Synthetic oligonucleotide
  Target: LAMA2; (-) strand; PAM type: YTN; PAM sequence: CTC
gttgtgatttctgaagaaaa

SEQ ID NO: 195555 - DNA, 20 bp, Artificial Sequence
  Description of Artificial Sequence: Synthetic oligonucleotide
  Target: LAMA2; (-) strand; PAM type: YTN; PAM sequence: TTG
cctcgttgtgatttctgaag

SEQ ID NO: 195556 - DNA, 20 bp, Artificial Sequence
  Description of Artificial Sequence: Synthetic oligonucleotide
  Target: LAMA2; (-) strand; PAM type: YTN; PAM sequence: TTT
gcctcgttgtgatttctgaa

SEQ ID NO: 195557 - DNA, 20 bp, Artificial Sequence
  Description of Artificial Sequence: Synthetic oligonucleotide
  Target: LAMA2; (-) strand; PAM type: YTN; PAM sequence: TTG
gcaacatttgcctcgttgtg

SEQ ID NO: 195558 - DNA, 20 bp, Artificial Sequence
  Description of Artificial Sequence: Synthetic oligonucleotide
  Target: LAMA2; (-) strand; PAM type: YTN; PAM sequence: TTA
ttggcaacatttgcctcgtt

SEQ ID NO: 195559 - DNA, 20 bp, Artificial Sequence
  Description of Artificial Sequence: Synthetic oligonucleotide
  Target: LAMA2; (-) strand; PAM type: YTN; PAM sequence: TTT
attggcaacatttgcctcgt

SEQ ID NO: 195560 - DNA, 20 bp, Artificial Sequence
  Description of Artificial Sequence: Synthetic oligonucleotide
  Target: LAMA2; (-) strand; PAM type: YTN; PAM sequence: TTT
tattggcaacatttgcctcg

SEQ ID NO: 195561 - DNA, 20 bp, Artificial Sequence
  Description of Artificial Sequence: Synthetic oligonucleotide
  Target: LAMA2; (-) strand; PAM type: YTN; PAM sequence: CTA
ttttattggcaacatttgcc

SEQ ID NO: 195562 - DNA, 20 bp, Artificial Sequence
  Description of Artificial Sequence: Synthetic oligonucleotide
  Target: LAMA2; (-) strand; PAM type: YTN; PAM sequence: TTA
ataactattttattggcaac

SEQ ID NO: 195563 - DNA, 20 bp, Artificial Sequence
  Description of Artificial Sequence: Synthetic oligonucleotide
  Target: LAMA2; (-) strand; PAM type: YTN; PAM sequence: CTT
aataactattttattggcaa

SEQ ID NO: 195564 - DNA, 20 bp, Artificial Sequence
  Description of Artificial Sequence: Synthetic oligonucleotide
  Target: LAMA2; (-) strand; PAM type: YTN; PAM sequence: TTA
acttaataactattttattg

SEQ ID NO: 195565 - DNA, 20 bp, Artificial Sequence
  Description of Artificial Sequence: Synthetic oligonucleotide
  Target: LAMA2; (-) strand; PAM type: YTN; PAM sequence: TTT
aacttaataactattttatt

SEQ ID NO: 195566 - DNA, 20 bp, Artificial Sequence
  Description of Artificial Sequence: Synthetic oligonucleotide
  Target: LAMA2; (-) strand; PAM type: YTN; PAM sequence: TTT
taacttaataactattttat

SEQ ID NO: 195567 - DNA, 20 bp, Artificial Sequence
  Description of Artificial Sequence: Synthetic oligonucleotide
  Target: LAMA2; (-) strand; PAM type: YTN; PAM sequence: TTT
ttaacttaataactatttta

SEQ ID NO: 195568 - DNA, 20 bp, Artificial Sequence
  Description of Artificial Sequence: Synthetic oligonucleotide
  Target: LAMA2; (-) strand; PAM type: YTN; PAM sequence: TTT
tttaacttaataactatttt

SEQ ID NO: 195569 - DNA, 20 bp, Artificial Sequence
  Description of Artificial Sequence: Synthetic oligonucleotide
  Target: LAMA2; (-) strand; PAM type: YTN; PAM sequence: TTA
tgttttttaacttaataact

SEQ ID NO: 195570 - DNA, 20 bp, Artificial Sequence
  Description of Artificial Sequence: Synthetic oligonucleotide
  Target: LAMA2; (-) strand; PAM type: YTN; PAM sequence: TTT
atgttttttaacttaataac

SEQ ID NO: 195571 - DNA, 20 bp, Artificial Sequence
  Description of Artificial Sequence: Synthetic oligonucleotide
  Target: LAMA2; (-) strand; PAM type: YTN; PAM sequence: CTC
agatatttatgttttttaac

SEQ ID NO: 195572 - DNA, 20 bp, Artificial Sequence
  Description of Artificial Sequence: Synthetic oligonucleotide
  Target: LAMA2; (-) strand; PAM type: YTN; PAM sequence: TTC
tcagatatttatgtttttta

SEQ ID NO: 195573 - DNA, 20 bp, Artificial Sequence
  Description of Artificial Sequence: Synthetic oligonucleotide
  Target: LAMA2; (-) strand; PAM type: YTN; PAM sequence: TTT
ctcagatatttatgtttttt

SEQ ID NO: 195574 - DNA, 20 bp, Artificial Sequence
  Description of Artificial Sequence: Synthetic oligonucleotide
  Target: LAMA2; (-) strand; PAM type: YTN; PAM sequence: TTC
atttctcagatatttatgtt

SEQ ID NO: 195575 - DNA, 20 bp, Artificial Sequence
  Description of Artificial Sequence: Synthetic oligonucleotide
  Target: LAMA2; (-) strand; PAM type: YTN; PAM sequence: CTC
agttcatttctcagatattt

SEQ ID NO: 195576 - DNA, 20 bp, Artificial Sequence
  Description of Artificial Sequence: Synthetic oligonucleotide
  Target: LAMA2; (-) strand; PAM type: YTN; PAM sequence: TTC
tcagttcatttctcagatat

SEQ ID NO: 195577 - DNA, 20 bp, Artificial Sequence
  Description of Artificial Sequence: Synthetic oligonucleotide
  Target: LAMA2; (-) strand; PAM type: YTN; PAM sequence: TTT
ctcagttcatttctcagata

SEQ ID NO: 195578 - DNA, 20 bp, Artificial Sequence
  Description of Artificial Sequence: Synthetic oligonucleotide
  Target: LAMA2; (-) strand; PAM type: YTN; PAM sequence: TTT
tctcagttcatttctcagat

SEQ ID NO: 195579 - DNA, 20 bp, Artificial Sequence
  Description of Artificial Sequence: Synthetic oligonucleotide
  Target: LAMA2; (-) strand; PAM type: YTN; PAM sequence: CTT
ttctcagttcatttctcaga

SEQ ID NO: 195580 - DNA, 20 bp, Artificial Sequence
  Description of Artificial Sequence: Synthetic oligonucleotide
  Target: LAMA2; (-) strand; PAM type: YTN; PAM sequence: CTC
cttttctcagttcatttctc

SEQ ID NO: 195581 - DNA, 20 bp, Artificial Sequence
  Description of Artificial Sequence: Synthetic oligonucleotide
  Target: LAMA2; (-) strand; PAM type: YTN; PAM sequence: TTC
tccttttctcagttcatttc

SEQ ID NO: 195582 - DNA, 20 bp, Artificial Sequence
  Description of Artificial Sequence: Synthetic oligonucleotide
  Target: LAMA2; (-) strand; PAM type: YTN; PAM sequence: TTT
ctccttttctcagttcattt

SEQ ID NO: 195583 - DNA, 20 bp, Artificial Sequence
  Description of Artificial Sequence: Synthetic oligonucleotide
  Target: LAMA2; (-) strand; PAM type: YTN; PAM sequence: CTG
taaggatttctccttttctc

SEQ ID NO: 195584 - DNA, 20 bp, Artificial Sequence
  Description of Artificial Sequence: Synthetic oligonucleotide
  Target: LAMA2; (-) strand; PAM type: YTN; PAM sequence: TTC
atgtcctgtaaggatttctc

SEQ ID NO: 195585 - DNA, 20 bp, Artificial Sequence
  Description of Artificial Sequence: Synthetic oligonucleotide
  Target: LAMA2; (-) strand; PAM type: YTN; PAM sequence: CTG
taccattcatgtcctgtaag

SEQ ID NO: 195586 - DNA, 20 bp, Artificial Sequence
  Description of Artificial Sequence: Synthetic oligonucleotide
  Target: LAMA2; (-) strand; PAM type: YTN; PAM sequence: CTC
ctgtaccattcatgtcctgt

SEQ ID NO: 195587 - DNA, 20 bp, Artificial Sequence
  Description of Artificial Sequence: Synthetic oligonucleotide
  Target: LAMA2; (-) strand; PAM type: YTN; PAM sequence: TTC
tcctgtaccattcatgtcct

SEQ ID NO: 195588 - DNA, 20 bp, Artificial Sequence
  Description of Artificial Sequence: Synthetic oligonucleotide
  Target: LAMA2; (-) strand; PAM type: YTN; PAM sequence: CTA
ttctcctgtaccattcatgt

SEQ ID NO: 195589 - DNA, 20 bp, Artificial Sequence
  Description of Artificial Sequence: Synthetic oligonucleotide
  Target: LAMA2; (-) strand; PAM type: YTN; PAM sequence: TTG
atatgtactattctcctgta

SEQ ID NO: 195590 - DNA, 20 bp, Artificial Sequence
  Description of Artificial Sequence: Synthetic oligonucleotide
  Target: LAMA2; (-) strand; PAM type: YTN; PAM sequence: TTT
gatatgtactattctcctgt

SEQ ID NO: 195591 - DNA, 20 bp, Artificial Sequence
  Description of Artificial Sequence: Synthetic oligonucleotide
  Target: LAMA2; (-) strand; PAM type: YTN; PAM sequence: CTT
tgatatgtactattctcctg

SEQ ID NO: 195592 - DNA, 20 bp, Artificial Sequence
  Description of Artificial Sequence: Synthetic oligonucleotide
  Target: LAMA2; (-) strand; PAM type: YTN; PAM sequence: TTC
accctttgatatgtactatt

SEQ ID NO: 195593 - DNA, 20 bp, Artificial Sequence
  Description of Artificial Sequence: Synthetic oligonucleotide
  Target: LAMA2; (-) strand; PAM type: YTN; PAM sequence: CTG
tgacccagagttcacccttt

SEQ ID NO: 195594 - DNA, 20 bp, Artificial Sequence
  Description of Artificial Sequence: Synthetic oligonucleotide
  Target: LAMA2; (-) strand; PAM type: YTN; PAM sequence: CTG
atcccacaagctgtgaccca

SEQ ID NO: 195595 - DNA, 20 bp, Artificial Sequence
  Description of Artificial Sequence: Synthetic oligonucleotide
  Target: LAMA2; (-) strand; PAM type: YTN; PAM sequence: TTG
cctgatcccacaagctgtga

SEQ ID NO: 195596 - DNA, 20 bp, Artificial Sequence
  Description of Artificial Sequence: Synthetic oligonucleotide
  Target: LAMA2; (-) strand; PAM type: YTN; PAM sequence: CTT
gcctgatcccacaagctgtg

SEQ ID NO: 195597 - DNA, 20 bp, Artificial Sequence
  Description of Artificial Sequence: Synthetic oligonucleotide
  Target: LAMA2; (-) strand; PAM type: YTN; PAM sequence: TTC
ttgcctgatcccacaagctg

SEQ ID NO: 195598 - DNA, 20 bp, Artificial Sequence
  Description of Artificial Sequence: Synthetic oligonucleotide
  Target: LAMA2; (-) strand; PAM type: YTN; PAM sequence: CTA
gacatgttcttgcctgatcc

SEQ ID NO: 195599 - DNA, 20 bp, Artificial Sequence
  Description of Artificial Sequence: Synthetic oligonucleotide
  Target: LAMA2; (-) strand; PAM type: YTN; PAM sequence: CTA
tgactagacatgttcttgcc

SEQ ID NO: 195600 - DNA, 20 bp, Artificial Sequence
  Description of Artificial Sequence: Synthetic oligonucleotide
  Target: LAMA2; (-) strand; PAM type: YTN; PAM sequence: TTG
aaagactatgactagacatg

SEQ ID NO: 195601 - DNA, 20 bp, Artificial Sequence
  Description of Artificial Sequence: Synthetic oligonucleotide
  Target: LAMA2; (-) strand; PAM type: YTN; PAM sequence: TTT
gaaagactatgactagacat

SEQ ID NO: 195602 - DNA, 20 bp, Artificial Sequence
  Description of Artificial Sequence: Synthetic oligonucleotide
  Target: LAMA2; (-) strand; PAM type: YTN; PAM sequence: TTA
tttgaaagactatgactaga

SEQ ID NO: 195603 - DNA, 20 bp, Artificial Sequence
  Description of Artificial Sequence: Synthetic oligonucleotide
  Target: LAMA2; (-) strand; PAM type: YTN; PAM sequence: TTA
ataagattatttgaaagact

SEQ ID NO: 195604 - DNA, 20 bp, Artificial Sequence
  Description of Artificial Sequence: Synthetic oligonucleotide
  Target: LAMA2; (-) strand; PAM type: YTN; PAM sequence: TTT
aataagattatttgaaagac

SEQ ID NO: 195605 - DNA, 20 bp, Artificial Sequence
  Description of Artificial Sequence: Synthetic oligonucleotide
  Target: LAMA2; (-) strand; PAM type: YTN; PAM sequence: TTT
taataagattatttgaaaga

SEQ ID NO: 195606 - DNA, 20 bp, Artificial Sequence
  Description of Artificial Sequence: Synthetic oligonucleotide
  Target: LAMA2; (-) strand; PAM type: YTN; PAM sequence: TTT
ttaataagattatttgaaag

SEQ ID NO: 195607 - DNA, 20 bp, Artificial Sequence
  Description of Artificial Sequence: Synthetic oligonucleotide
  Target: LAMA2; (-) strand; PAM type: YTN; PAM sequence: TTA
gaaaaaataatttttaataa

SEQ ID NO: 195608 - DNA, 20 bp, Artificial Sequence
  Description of Artificial Sequence: Synthetic oligonucleotide
  Target: LAMA2; (-) strand; PAM type: YTN; PAM sequence: CTT
agaaaaaataatttttaata

SEQ ID NO: 195609 - DNA, 20 bp, Artificial Sequence
  Description of Artificial Sequence: Synthetic oligonucleotide
  Target: LAMA2; (-) strand; PAM type: YTN; PAM sequence: TTA
gtcagagaaaagagtaaaag

SEQ ID NO: 195610 - DNA, 20 bp, Artificial Sequence
  Description of Artificial Sequence: Synthetic oligonucleotide
  Target: LAMA2; (-) strand; PAM type: YTN; PAM sequence: CTA
aataaaattagtcagagaaa

SEQ ID NO: 195611 - DNA, 20 bp, Artificial Sequence
  Description of Artificial Sequence: Synthetic oligonucleotide
  Target: LAMA2; (-) strand; PAM type: YTN; PAM sequence: TTG
aaagctaaataaaattagtc

SEQ ID NO: 195612 - DNA, 20 bp, Artificial Sequence
  Description of Artificial Sequence: Synthetic oligonucleotide
  Target: LAMA2; (-) strand; PAM type: YTN; PAM sequence: CTT
gaaagctaaataaaattagt

SEQ ID NO: 195613 - DNA, 20 bp, Artificial Sequence
  Description of Artificial Sequence: Synthetic oligonucleotide
  Target: LAMA2; (-) strand; PAM type: YTN; PAM sequence: CTG
aagccacaaagaaatgcttg

SEQ ID NO: 195614 - DNA, 20 bp, Artificial Sequence
  Description of Artificial Sequence: Synthetic oligonucleotide
  Target: LAMA2; (-) strand; PAM type: YTN; PAM sequence: CTG
aagtcaaaactgaagccaca

SEQ ID NO: 195615 - DNA, 20 bp, Artificial Sequence
  Description of Artificial Sequence: Synthetic oligonucleotide
  Target: LAMA2; (-) strand; PAM type: YTN; PAM sequence: TTA
aaaactgaagtcaaaactga

SEQ ID NO: 195616 - DNA, 20 bp, Artificial Sequence
  Description of Artificial Sequence: Synthetic oligonucleotide
  Target: LAMA2; (-) strand; PAM type: YTN; PAM sequence: TTT
aaaaactgaagtcaaaactg

SEQ ID NO: 195617 - DNA, 20 bp, Artificial Sequence
  Description of Artificial Sequence: Synthetic oligonucleotide
  Target: LAMA2; (-) strand; PAM type: YTN; PAM sequence: TTG
tttaaaaactgaagtcaaaa

SEQ ID NO: 195618 - DNA, 20 bp, Artificial Sequence
  Description of Artificial Sequence: Synthetic oligonucleotide
  Target: LAMA2; (-) strand; PAM type: YTN; PAM sequence: TTA
aattgtttaaaaactgaagt

SEQ ID NO: 195619 - DNA, 20 bp, Artificial Sequence
  Description of Artificial Sequence: Synthetic oligonucleotide
  Target: LAMA2; (-) strand; PAM type: YTN; PAM sequence: TTT
aaattgtttaaaaactgaag

SEQ ID NO: 195620 - DNA, 20 bp, Artificial Sequence
  Description of Artificial Sequence: Synthetic oligonucleotide
  Target: LAMA2; (-) strand; PAM type: YTN; PAM sequence: TTG
tttaaattgtttaaaaactg

SEQ ID NO: 195621 - DNA, 20 bp, Artificial Sequence
  Description of Artificial Sequence: Synthetic oligonucleotide
  Target: LAMA2; (-) strand; PAM type: YTN; PAM sequence: TTT
gtttaaattgtttaaaaact

SEQ ID NO: 195622 - DNA, 20 bp, Artificial Sequence
  Description of Artificial Sequence: Synthetic oligonucleotide
  Target: LAMA2; (-) strand; PAM type: YTN; PAM sequence: TTA
tttgtttaaattgtttaaaa

SEQ ID NO: 195623 - DNA, 20 bp, Artificial Sequence
  Description of Artificial Sequence: Synthetic oligonucleotide
  Target: LAMA2; (-) strand; PAM type: YTN; PAM sequence: TTT
atttgtttaaattgtttaaa

SEQ ID NO: 195624 - DNA, 20 bp, Artificial Sequence
  Description of Artificial Sequence: Synthetic oligonucleotide
  Target: LAMA2; (-) strand; PAM type: YTN; PAM sequence: TTT
tatttgtttaaattgtttaa

SEQ ID NO: 195625 - DNA, 20 bp, Artificial Sequence
  Description of Artificial Sequence: Synthetic oligonucleotide
  Target: LAMA2; (-) strand; PAM type: YTN; PAM sequence: TTT
ttatttgtttaaattgttta

SEQ ID NO: 195626 - DNA, 20 bp, Artificial Sequence
  Description of Artificial Sequence: Synthetic oligonucleotide
  Target: LAMA2; (-) strand; PAM type: YTN; PAM sequence: CTG
taatgtaatttttatttgtt

SEQ ID NO: 195627 - DNA, 20 bp, Artificial Sequence
  Description of Artificial Sequence: Synthetic oligonucleotide
  Target: LAMA2; (-) strand; PAM type: YTN; PAM sequence: TTC
tgtaatgtaatttttatttg

SEQ ID NO: 195628 - DNA, 20 bp, Artificial Sequence
  Description of Artificial Sequence: Synthetic oligonucleotide
  Target: LAMA2; (-) strand; PAM type: YTN; PAM sequence: TTA
aaagtaacaattctgtaatg

SEQ ID NO: 195629 - DNA, 20 bp, Artificial Sequence
  Description of Artificial Sequence: Synthetic oligonucleotide
  Target: LAMA2; (-) strand; PAM type: YTN; PAM sequence: TTT
aaaagtaacaattctgtaat

SEQ ID NO: 195630 - DNA, 20 bp, Artificial Sequence
  Description of Artificial Sequence: Synthetic oligonucleotide
  Target: LAMA2; (-) strand; PAM type: YTN; PAM sequence: TTA
caataacagtccccgtggaa

SEQ ID NO: 195631 - DNA, 20 bp, Artificial Sequence
  Description of Artificial Sequence: Synthetic oligonucleotide
  Target: LAMA2; (-) strand; PAM type: YTN; PAM sequence: TTT
acaataacagtccccgtgga

SEQ ID NO: 195632 - DNA, 20 bp, Artificial Sequence
  Description of Artificial Sequence: Synthetic oligonucleotide
  Target: LAMA2; (-) strand; PAM type: YTN; PAM sequence: TTT
tacaataacagtccccgtgg

SEQ ID NO: 195633 - DNA, 20 bp, Artificial Sequence
  Description of Artificial Sequence: Synthetic oligonucleotide
  Target: LAMA2; (-) strand; PAM type: YTN; PAM sequence: TTA
aaagaataagaacagatttt

SEQ ID NO: 195634 - DNA, 20 bp, Artificial Sequence
  Description of Artificial Sequence: Synthetic oligonucleotide
  Target: LAMA2; (-) strand; PAM type: YTN; PAM sequence: TTA
aattaaaagaataagaacag

SEQ ID NO: 195635 - DNA, 20 bp, Artificial Sequence
  Description of Artificial Sequence: Synthetic oligonucleotide
  Target: LAMA2; (-) strand; PAM type: YTN; PAM sequence: TTA
aaacaaaataatggagttaa

SEQ ID NO: 195636 - DNA, 20 bp, Artificial Sequence
  Description of Artificial Sequence: Synthetic oligonucleotide
  Target: LAMA2; (-) strand; PAM type: YTN; PAM sequence: TTT
aaaacaaaataatggagtta

SEQ ID NO: 195637 - DNA, 20 bp, Artificial Sequence
  Description of Artificial Sequence: Synthetic oligonucleotide
  Target: LAMA2; (-) strand; PAM type: YTN; PAM sequence: TTA
catttaaaacaaaataatgg

SEQ ID NO: 195638 - DNA, 20 bp, Artificial Sequence
  Description of Artificial Sequence: Synthetic oligonucleotide
  Target: LAMA2; (-) strand; PAM type: YTN; PAM sequence: TTG
gagaaaaatataatgaacaa

SEQ ID NO: 195639 - DNA, 20 bp, Artificial Sequence
  Description of Artificial Sequence: Synthetic oligonucleotide
  Target: LAMA2; (-) strand; PAM type: YTN; PAM sequence: TTA
aagcagttggagaaaaatat

SEQ ID NO: 195640 - DNA, 20 bp, Artificial Sequence
  Description of Artificial Sequence: Synthetic oligonucleotide
  Target: LAMA2; (-) strand; PAM type: YTN; PAM sequence: TTT
aaagcagttggagaaaaata

SEQ ID NO: 195641 - DNA, 20 bp, Artificial Sequence
  Description of Artificial Sequence: Synthetic oligonucleotide
  Target: LAMA2; (-) strand; PAM type: YTN; PAM sequence: TTT
taaagcagttggagaaaaat

SEQ ID NO: 195642 - DNA, 20 bp, Artificial Sequence
  Description of Artificial Sequence: Synthetic oligonucleotide
  Target: LAMA2; (-) strand; PAM type: YTN; PAM sequence: CTT
ttaaagcagttggagaaaaa

SEQ ID NO: 195643 - DNA, 20 bp, Artificial Sequence
  Description of Artificial Sequence: Synthetic oligonucleotide
  Target: LAMA2; (-) strand; PAM type: YTN; PAM sequence: TTG
gtgcttttaaagcagttgga

SEQ ID NO: 195644 - DNA, 20 bp, Artificial Sequence
  Description of Artificial Sequence: Synthetic oligonucleotide
  Target: LAMA2; (-) strand; PAM type: YTN; PAM sequence: TTG
atacatatacagcaaagaag

SEQ ID NO: 195645 - DNA, 20 bp, Artificial Sequence
  Description of Artificial Sequence: Synthetic oligonucleotide
  Target: LAMA2; (-) strand; PAM type: YTN; PAM sequence: TTT
gatacatatacagcaaagaa

SEQ ID NO: 195646 - DNA, 20 bp, Artificial Sequence
  Description of Artificial Sequence: Synthetic oligonucleotide
  Target: LAMA2; (-) strand; PAM type: YTN; PAM sequence: CTT
tgatacatatacagcaaaga

SEQ ID NO: 195647 - DNA, 20 bp, Artificial Sequence
  Description of Artificial Sequence: Synthetic oligonucleotide
  Target: LAMA2; (-) strand; PAM type: YTN; PAM sequence: TTA
tggactttgatacatataca

SEQ ID NO: 195648 - DNA, 20 bp, Artificial Sequence
  Description of Artificial Sequence: Synthetic oligonucleotide
  Target: LAMA2; (-) strand; PAM type: YTN; PAM sequence: TTT
atggactttgatacatatac

SEQ ID NO: 195649 - DNA, 20 bp, Artificial Sequence
  Description of Artificial Sequence: Synthetic oligonucleotide
  Target: LAMA2; (-) strand; PAM type: YTN; PAM sequence: CTA
ggataatgtcaaagaatatt

SEQ ID NO: 195650 - DNA, 20 bp, Artificial Sequence
  Description of Artificial Sequence: Synthetic oligonucleotide
  Target: LAMA2; (-) strand; PAM type: YTN; PAM sequence: TTC
aaggctaggataatgtcaaa

SEQ ID NO: 195651 - DNA, 20 bp, Artificial Sequence
  Description of Artificial Sequence: Synthetic oligonucleotide
  Target: LAMA2; (-) strand; PAM type: YTN; PAM sequence: TTA
ttcaaggctaggataatgtc

SEQ ID NO: 195652 - DNA, 20 bp, Artificial Sequence
  Description of Artificial Sequence: Synthetic oligonucleotide
  Target: LAMA2; (-) strand; PAM type: YTN; PAM sequence: TTA
ttattcaaggctaggataat

SEQ ID NO: 195653 - DNA, 20 bp, Artificial Sequence
  Description of Artificial Sequence: Synthetic oligonucleotide
  Target: LAMA2; (-) strand; PAM type: YTN; PAM sequence: TTT
attattcaaggctaggataa

SEQ ID NO: 195654 - DNA, 20 bp, Artificial Sequence
  Description of Artificial Sequence: Synthetic oligonucleotide
  Target: LAMA2; (-) strand; PAM type: YTN; PAM sequence: TTT
tattattcaaggctaggata

SEQ ID NO: 195655 - DNA, 20 bp, Artificial Sequence
  Description of Artificial Sequence: Synthetic oligonucleotide
  Target: LAMA2; (-) strand; PAM type: YTN; PAM sequence: CTT
ttattattcaaggctaggat

SEQ ID NO: 195656 - DNA, 20 bp, Artificial Sequence
  Description of Artificial Sequence: Synthetic oligonucleotide
  Target: LAMA2; (-) strand; PAM type: YTN; PAM sequence: TTC
cttttattattcaaggctag

SEQ ID NO: 195657 - DNA, 20 bp, Artificial Sequence
  Description of Artificial Sequence: Synthetic oligonucleotide
  Target: LAMA2; (-) strand; PAM type: YTN; PAM sequence: TTT
ccttttattattcaaggcta

SEQ ID NO: 195658 - DNA, 20 bp, Artificial Sequence
  Description of Artificial Sequence: Synthetic oligonucleotide
  Target: LAMA2; (-) strand; PAM type: YTN; PAM sequence: TTT
tccttttattattcaaggct

SEQ ID NO: 195659 - DNA, 20 bp, Artificial Sequence
  Description of Artificial Sequence: Synthetic oligonucleotide
  Target: LAMA2; (-) strand; PAM type: YTN; PAM sequence: TTT
ttccttttattattcaaggc

SEQ ID NO: 195660 - DNA, 20 bp, Artificial Sequence
  Description of Artificial Sequence: Synthetic oligonucleotide
  Target: LAMA2; (-) strand; PAM type: YTN; PAM sequence: TTT
tttccttttattattcaagg

SEQ ID NO: 195661 - DNA, 20 bp, Artificial Sequence
  Description of Artificial Sequence: Synthetic oligonucleotide
  Target: LAMA2; (-) strand; PAM type: YTN; PAM sequence: TTT
ttttccttttattattcaag

SEQ ID NO: 195662 - DNA, 20 bp, Artificial Sequence
  Description of Artificial Sequence: Synthetic oligonucleotide
  Target: LAMA2; (-) strand; PAM type: YTN; PAM sequence: TTG
tgagaggtttttttcctttt

SEQ ID NO: 195663 - DNA, 20 bp, Artificial Sequence
  Description of Artificial Sequence: Synthetic oligonucleotide
  Target: LAMA2; (-) strand; PAM type: YTN; PAM sequence: TTG
tagaataaaaagttgtgaga

SEQ ID NO: 195664 - DNA, 20 bp, Artificial Sequence
  Description of Artificial Sequence: Synthetic oligonucleotide
  Target: LAMA2; (-) strand; PAM type: YTN; PAM sequence: TTT
gtagaataaaaagttgtgag

SEQ ID NO: 195665 - DNA, 20 bp, Artificial Sequence
  Description of Artificial Sequence: Synthetic oligonucleotide
  Target: LAMA2; (-) strand; PAM type: YTN; PAM sequence: TTT
tgtagaataaaaagttgtga

SEQ ID NO: 195666 - DNA, 20 bp, Artificial Sequence
  Description of Artificial Sequence: Synthetic oligonucleotide
  Target: LAMA2; (-) strand; PAM type: YTN; PAM sequence: TTA
ttttgtagaataaaaagttg

SEQ ID NO: 195667 - DNA, 20 bp, Artificial Sequence
  Description of Artificial Sequence: Synthetic oligonucleotide
  Target: LAMA2; (-) strand; PAM type: YTN; PAM sequence: TTA
atattattttgtagaataaa

SEQ ID NO: 195668 - DNA, 20 bp, Artificial Sequence
  Description of Artificial Sequence: Synthetic oligonucleotide
  Target: LAMA2; (-) strand; PAM type: YTN; PAM sequence: TTT
aatattattttgtagaataa

SEQ ID NO: 195669 - DNA, 20 bp, Artificial Sequence
  Description of Artificial Sequence: Synthetic oligonucleotide
  Target: LAMA2; (-) strand; PAM type: YTN; PAM sequence: TTT
taatattattttgtagaata

SEQ ID NO: 195670 - DNA, 20 bp, Artificial Sequence
  Description of Artificial Sequence: Synthetic oligonucleotide
  Target: LAMA2; (-) strand; PAM type: YTN; PAM sequence: TTA
cagtaaaaataggggcatat

SEQ ID NO: 195671 - DNA, 20 bp, Artificial Sequence
  Description of Artificial Sequence: Synthetic oligonucleotide
  Target: LAMA2; (-) strand; PAM type: YTN; PAM sequence: TTT
acagtaaaaataggggcata

SEQ ID NO: 195672 - DNA, 20 bp, Artificial Sequence
  Description of Artificial Sequence: Synthetic oligonucleotide
  Target: LAMA2; (-) strand; PAM type: YTN; PAM sequence: TTA
catttacagtaaaaataggg

SEQ ID NO: 195673 - DNA, 20 bp, Artificial Sequence
  Description of Artificial Sequence: Synthetic oligonucleotide
  Target: LAMA2; (-) strand; PAM type: YTN; PAM sequence: CTG
tgaagattacatttacagta

SEQ ID NO: 195674 - DNA, 20 bp, Artificial Sequence
  Description of Artificial Sequence: Synthetic oligonucleotide
  Target: LAMA2; (-) strand; PAM type: YTN; PAM sequence: TTG
ctgtgaagattacatttaca

SEQ ID NO: 195675 - DNA, 20 bp, Artificial Sequence
  Description of Artificial Sequence: Synthetic oligonucleotide
  Target: LAMA2; (-) strand; PAM type: YTN; PAM sequence: CTG
ttgctgtgaagattacattt

SEQ ID NO: 195676 - DNA, 20 bp, Artificial Sequence
  Description of Artificial Sequence: Synthetic oligonucleotide
  Target: LAMA2; (-) strand; PAM type: YTN; PAM sequence: TTG
actgttgctgtgaagattac

SEQ ID NO: 195677 - DNA, 20 bp, Artificial Sequence
  Description of Artificial Sequence: Synthetic oligonucleotide
  Target: LAMA2; (-) strand; PAM type: YTN; PAM sequence: CTT
gactgttgctgtgaagatta

SEQ ID NO: 195678 - DNA, 20 bp, Artificial Sequence
  Description of Artificial Sequence: Synthetic oligonucleotide
  Target: LAMA2; (-) strand; PAM type: YTN; PAM sequence: CTC
ttgactgttgctgtgaagat

SEQ ID NO: 195679 - DNA, 20 bp, Artificial Sequence
  Description of Artificial Sequence: Synthetic oligonucleotide
  Target: LAMA2; (-) strand; PAM type: YTN; PAM sequence: TTC
tcttgactgttgctgtgaag

SEQ ID NO: 195680 - DNA, 20 bp, Artificial Sequence
  Description of Artificial Sequence: Synthetic oligonucleotide
  Target: LAMA2; (-) strand; PAM type: YTN; PAM sequence: TTG
ttctcttgactgttgctgtg

SEQ ID NO: 195681 - DNA, 20 bp, Artificial Sequence
  Description of Artificial Sequence: Synthetic oligonucleotide
  Target: LAMA2; (-) strand; PAM type: YTN; PAM sequence: CTT
gttctcttgactgttgctgt

SEQ ID NO: 195682 - DNA, 20 bp, Artificial Sequence
  Description of Artificial Sequence: Synthetic oligonucleotide
  Target: LAMA2; (-) strand; PAM type: YTN; PAM sequence: CTC
agtcttgttctcttgactgt

SEQ ID NO: 195683 - DNA, 20 bp, Artificial Sequence
  Description of Artificial Sequence: Synthetic oligonucleotide
  Target: LAMA2; (-) strand; PAM type: YTN; PAM sequence: TTG
caatgtgtgatgaagaatga

SEQ ID NO: 195684 - DNA, 20 bp, Artificial Sequence
  Description of Artificial Sequence: Synthetic oligonucleotide
  Target: LAMA2; (-) strand; PAM type: YTN; PAM sequence: CTT
gcaatgtgtgatgaagaatg

SEQ ID NO: 195685 - DNA, 20 bp, Artificial Sequence
  Description of Artificial Sequence: Synthetic oligonucleotide
  Target: LAMA2; (-) strand; PAM type: YTN; PAM sequence: CTC
acaacagaggagacatagcc

SEQ ID NO: 195686 - DNA, 20 bp, Artificial Sequence
  Description of Artificial Sequence: Synthetic oligonucleotide
  Target: LAMA2; (-) strand; PAM type: YTN; PAM sequence: CTC
ctcacaacagaggagacata

SEQ ID NO: 195687 - DNA, 20 bp, Artificial Sequence
  Description of Artificial Sequence: Synthetic oligonucleotide
  Target: LAMA2; (-) strand; PAM type: YTN; PAM sequence: TTC
tcctcacaacagaggagaca

SEQ ID NO: 195688 - DNA, 20 bp, Artificial Sequence
  Description of Artificial Sequence: Synthetic oligonucleotide
  Target: LAMA2; (-) strand; PAM type: YTN; PAM sequence: CTG
cagggcaatattctcctcac

SEQ ID NO: 195689 - DNA, 20 bp, Artificial Sequence
  Description of Artificial Sequence: Synthetic oligonucleotide
  Target: LAMA2; (-) strand; PAM type: YTN; PAM sequence: TTG
ctgcagggcaatattctcct

SEQ ID NO: 195690 - DNA, 20 bp, Artificial Sequence
  Description of Artificial Sequence: Synthetic oligonucleotide
  Target: LAMA2; (-) strand; PAM type: YTN; PAM sequence: TTG
tgagaatattgctgcagggc

SEQ ID NO: 195691 - DNA, 20 bp, Artificial Sequence
  Description of Artificial Sequence: Synthetic oligonucleotide
  Target: LAMA2; (-) strand; PAM type: YTN; PAM sequence: CTT
gtgagaatattgctgcaggg

SEQ ID NO: 195692 - DNA, 20 bp, Artificial Sequence
  Description of Artificial Sequence: Synthetic oligonucleotide
  Target: LAMA2; (-) strand; PAM type: YTN; PAM sequence: CTC
cacttgtgagaatattgctg

SEQ ID NO: 195693 - DNA, 20 bp, Artificial Sequence
  Description of Artificial Sequence: Synthetic oligonucleotide
  Target: LAMA2; (-) strand; PAM type: YTN; PAM sequence: TTA
gcaaaagtgcagtcaatgac

SEQ ID NO: 195694 - DNA, 20 bp, Artificial Sequence
  Description of Artificial Sequence: Synthetic oligonucleotide
  Target: LAMA2; (-) strand; PAM type: YTN; PAM sequence: TTA
ttagcaaaagtgcagtcaat

SEQ ID NO: 195695 - DNA, 20 bp, Artificial Sequence
  Description of Artificial Sequence: Synthetic oligonucleotide
  Target: LAMA2; (-) strand; PAM type: YTN; PAM sequence: CTT
attagcaaaagtgcagtcaa

SEQ ID NO: 195696 - DNA, 20 bp, Artificial Sequence
  Description of Artificial Sequence: Synthetic oligonucleotide
  Target: LAMA2; (-) strand; PAM type: YTN; PAM sequence: TTC
ttattagcaaaagtgcagtc

SEQ ID NO: 195697 - DNA, 20 bp, Artificial Sequence
  Description of Artificial Sequence: Synthetic oligonucleotide
  Target: LAMA2; (-) strand; PAM type: YTN; PAM sequence: TTT
cttattagcaaaagtgcagt

SEQ ID NO: 195698 - DNA, 20 bp, Artificial Sequence
  Description of Artificial Sequence: Synthetic oligonucleotide
  Target: LAMA2; (-) strand; PAM type: YTN; PAM sequence: CTG
aagatttcttattagcaaaa

SEQ ID NO: 195699 - DNA, 20 bp, Artificial Sequence
  Description of Artificial Sequence: Synthetic oligonucleotide
  Target: LAMA2; (-) strand; PAM type: YTN; PAM sequence: CTA
ctgaagatttcttattagca

SEQ ID NO: 195700 - DNA, 20 bp, Artificial Sequence
  Description of Artificial Sequence: Synthetic oligonucleotide
  Target: LAMA2; (-) strand; PAM type: YTN; PAM sequence: CTC
ctactgaagatttcttatta

SEQ ID NO: 195701 - DNA, 20 bp, Artificial Sequence
  Description of Artificial Sequence: Synthetic oligonucleotide
  Target: LAMA2; (-) strand; PAM type: YTN; PAM sequence: TTG
cacaaggcccagtcactcct

SEQ ID NO: 195702 - DNA, 20 bp, Artificial Sequence
  Description of Artificial Sequence: Synthetic oligonucleotide
  Target: LAMA2; (-) strand; PAM type: YTN; PAM sequence: TTT
gcacaaggcccagtcactcc

SEQ ID NO: 195703 - DNA, 20 bp, Artificial Sequence
  Description of Artificial Sequence: Synthetic oligonucleotide
  Target: LAMA2; (-) strand; PAM type: YTN; PAM sequence: CTG
gagagatttgcacaaggccc

SEQ ID NO: 195704 - DNA, 20 bp, Artificial Sequence
  Description of Artificial Sequence: Synthetic oligonucleotide
  Target: LAMA2; (-) strand; PAM type: YTN; PAM sequence: CTA
ctggagagatttgcacaagg

SEQ ID NO: 195705 - DNA, 20 bp, Artificial Sequence
  Description of Artificial Sequence: Synthetic oligonucleotide
  Target: LAMA2; (-) strand; PAM type: YTN; PAM sequence: CTA
gtggaagaaactactggaga

SEQ ID NO: 195706 - DNA, 20 bp, Artificial Sequence
  Description of Artificial Sequence: Synthetic oligonucleotide
  Target: LAMA2; (-) strand; PAM type: YTN; PAM sequence: CTA
atgcgtcactagtggaagaa

SEQ ID NO: 195707 - DNA, 20 bp, Artificial Sequence
  Description of Artificial Sequence: Synthetic oligonucleotide
  Target: LAMA2; (-) strand; PAM type: YTN; PAM sequence: CTC
taatgcgtcactagtggaag

SEQ ID NO: 195708 - DNA, 20 bp, Artificial Sequence
  Description of Artificial Sequence: Synthetic oligonucleotide
  Target: LAMA2; (-) strand; PAM type: YTN; PAM sequence: CTG
aggctctaatgcgtcactag

SEQ ID NO: 195709 - DNA, 20 bp, Artificial Sequence
  Description of Artificial Sequence: Synthetic oligonucleotide
  Target: LAMA2; (-) strand; PAM type: YTN; PAM sequence: TTC
tgaggctctaatgcgtcact

SEQ ID NO: 195710 - DNA, 20 bp, Artificial Sequence
  Description of Artificial Sequence: Synthetic oligonucleotide
  Target: LAMA2; (-) strand; PAM type: YTN; PAM sequence: TTG
attctgaggctctaatgcgt

SEQ ID NO: 195711 - DNA, 20 bp, Artificial Sequence
  Description of Artificial Sequence: Synthetic oligonucleotide
  Target: LAMA2; (-) strand; PAM type: YTN; PAM sequence: TTG
agtgattgattctgaggctc

SEQ ID NO: 195712 - DNA, 20 bp, Artificial Sequence
  Description of Artificial Sequence: Synthetic oligonucleotide
  Target: LAMA2; (-) strand; PAM type: YTN; PAM sequence: TTG
ttgagtgattgattctgagg

SEQ ID NO: 195713 - DNA, 20 bp, Artificial Sequence
  Description of Artificial Sequence: Synthetic oligonucleotide
  Target: LAMA2; (-) strand; PAM type: YTN; PAM sequence: CTT
gttgagtgattgattctgag

SEQ ID NO: 195714 - DNA, 20 bp, Artificial Sequence
  Description of Artificial Sequence: Synthetic oligonucleotide
  Target: LAMA2; (-) strand; PAM type: YTN; PAM sequence: TTC
agtaaacacttgttgagtga

SEQ ID NO: 195715 - DNA, 20 bp, Artificial Sequence
  Description of Artificial Sequence: Synthetic oligonucleotide
  Target: LAMA2; (-) strand; PAM type: YTN; PAM sequence: TTT
cagtaaacacttgttgagtg

SEQ ID NO: 195716 - DNA, 20 bp, Artificial Sequence
  Description of Artificial Sequence: Synthetic oligonucleotide
  Target: LAMA2; (-) strand; PAM type: YTN; PAM sequence: CTT
tcagtaaacacttgttgagt

SEQ ID NO: 195717 - DNA, 20 bp, Artificial Sequence
  Description of Artificial Sequence: Synthetic oligonucleotide
  Target: LAMA2; (-) strand; PAM type: YTN; PAM sequence: CTG
ggtatcagtaagctttcagt

SEQ ID NO: 195718 - DNA, 20 bp, Artificial Sequence
  Description of Artificial Sequence: Synthetic oligonucleotide
  Target: LAMA2; (-) strand; PAM type: YTN; PAM sequence: TTA
aggtctgggtatcagtaagc

SEQ ID NO: 195719 - DNA, 20 bp, Artificial Sequence
  Description of Artificial Sequence: Synthetic oligonucleotide
  Target: LAMA2; (-) strand; PAM type: YTN; PAM sequence: TTT
aaggtctgggtatcagtaag

SEQ ID NO: 195720 - DNA, 20 bp, Artificial Sequence
  Description of Artificial Sequence: Synthetic oligonucleotide
  Target: LAMA2; (-) strand; PAM type: YTN; PAM sequence: TTG
gtaacagtttaaggtctggg

SEQ ID NO: 195721 - DNA, 20 bp, Artificial Sequence
  Description of Artificial Sequence: Synthetic oligonucleotide
  Target: LAMA2; (-) strand; PAM type: YTN; PAM sequence: TTT
ggtaacagtttaaggtctgg

SEQ ID NO: 195722 - DNA, 20 bp, Artificial Sequence
  Description of Artificial Sequence: Synthetic oligonucleotide
  Target: LAMA2; (-) strand; PAM type: YTN; PAM sequence: CTG
tttggtaacagtttaaggtc

SEQ ID NO: 195723 - DNA, 20 bp, Artificial Sequence
  Description of Artificial Sequence: Synthetic oligonucleotide
  Target: LAMA2; (-) strand; PAM type: YTN; PAM sequence: TTC
tgtttggtaacagtttaagg

SEQ ID NO: 195724 - DNA, 20 bp, Artificial Sequence
  Description of Artificial Sequence: Synthetic oligonucleotide
  Target: LAMA2; (-) strand; PAM type: YTN; PAM sequence: CTG
gcattctgtttggtaacagt

SEQ ID NO: 195725 - DNA, 20 bp, Artificial Sequence
  Description of Artificial Sequence: Synthetic oligonucleotide
  Target: LAMA2; (-) strand; PAM type: YTN; PAM sequence: TTA
tatcccatatctggcattct

SEQ ID NO: 195726 - DNA, 20 bp, Artificial Sequence
  Description of Artificial Sequence: Synthetic oligonucleotide
  Target: LAMA2; (-) strand; PAM type: YTN; PAM sequence: CTG
gaattatatcccatatctgg

SEQ ID NO: 195727 - DNA, 20 bp, Artificial Sequence
  Description of Artificial Sequence: Synthetic oligonucleotide
  Target: LAMA2; (-) strand; PAM type: YTN; PAM sequence: TTC
aggctggaattatatcccat

SEQ ID NO: 195728 - DNA, 20 bp, Artificial Sequence
  Description of Artificial Sequence: Synthetic oligonucleotide
  Target: LAMA2; (-) strand; PAM type: YTN; PAM sequence: CTT
caggctggaattatatccca

SEQ ID NO: 195729 - DNA, 20 bp, Artificial Sequence
  Description of Artificial Sequence: Synthetic oligonucleotide
  Target: LAMA2; (-) strand; PAM type: YTN; PAM sequence: CTC
ttcaggctggaattatatcc

SEQ ID NO: 195730 - DNA, 20 bp, Artificial Sequence
  Description of Artificial Sequence: Synthetic oligonucleotide
  Target: LAMA2; (-) strand; PAM type: YTN; PAM sequence: TTG
agcataaactcttcaggctg

SEQ ID NO: 195731 - DNA, 20 bp, Artificial Sequence
  Description of Artificial Sequence: Synthetic oligonucleotide
  Target: LAMA2; (-) strand; PAM type: YTN; PAM sequence: CTT
gagcataaactcttcaggct

SEQ ID NO: 195732 - DNA, 20 bp, Artificial Sequence
  Description of Artificial Sequence: Synthetic oligonucleotide
  Target: LAMA2; (-) strand; PAM type: YTN; PAM sequence: TTG
tcttgagcataaactcttca

SEQ ID NO: 195733 - DNA, 20 bp, Artificial Sequence
  Description of Artificial Sequence: Synthetic oligonucleotide
  Target: LAMA2; (-) strand; PAM type: YTN; PAM sequence: CTT
gtcttgagcataaactcttc

SEQ ID NO: 195734 - DNA, 20 bp, Artificial Sequence
  Description of Artificial Sequence: Synthetic oligonucleotide
  Target: LAMA2; (-) strand; PAM type: YTN; PAM sequence: CTG
taatatatgtaagtcttgtc

SEQ ID NO: 195735 - DNA, 20 bp, Artificial Sequence
  Description of Artificial Sequence: Synthetic oligonucleotide
  Target: LAMA2; (-) strand; PAM type: YTN; PAM sequence: CTC
tgtaatatatgtaagtcttg

SEQ ID NO: 195736 - DNA, 20 bp, Artificial Sequence
  Description of Artificial Sequence: Synthetic oligonucleotide
  Target: LAMA2; (-) strand; PAM type: YTN; PAM sequence: TTC
tctgtaatatatgtaagtct

SEQ ID NO: 195737 - DNA, 20 bp, Artificial Sequence
  Description of Artificial Sequence: Synthetic oligonucleotide
  Target: LAMA2; (-) strand; PAM type: YTN; PAM sequence: CTT
ctctgtaatatatgtaagtc

SEQ ID NO: 195738 - DNA, 20 bp, Artificial Sequence
  Description of Artificial Sequence: Synthetic oligonucleotide
  Target: LAMA2; (-) strand; PAM type: YTN; PAM sequence: TTA
cgcttctctgtaatatatgt

SEQ ID NO: 195739 - DNA, 20 bp, Artificial Sequence
  Description of Artificial Sequence: Synthetic oligonucleotide
  Target: LAMA2; (-) strand; PAM type: YTN; PAM sequence: CTG
ttacgcttctctgtaatata

SEQ ID NO: 195740 - DNA, 20 bp, Artificial Sequence
  Description of Artificial Sequence: Synthetic oligonucleotide
  Target: LAMA2; (-) strand; PAM type: YTN; PAM sequence: CTC
tgttacgcttctctgtaata

SEQ ID NO: 195741 - DNA, 20 bp, Artificial Sequence
  Description of Artificial Sequence: Synthetic oligonucleotide
  Target: LAMA2; (-) strand; PAM type: YTN; PAM sequence: TTG
ctctgttacgcttctctgta

SEQ ID NO: 195742 - DNA, 20 bp, Artificial Sequence
  Description of Artificial Sequence: Synthetic oligonucleotide
  Target: LAMA2; (-) strand; PAM type: YTN; PAM sequence: TTT
gctctgttacgcttctctgt

SEQ ID NO: 195743 - DNA, 20 bp, Artificial Sequence
  Description of Artificial Sequence: Synthetic oligonucleotide
  Target: LAMA2; (-) strand; PAM type: YTN; PAM sequence: TTA
atcatttgctctgttacgct

SEQ ID NO: 195744 - DNA, 20 bp, Artificial Sequence
  Description of Artificial Sequence: Synthetic oligonucleotide
  Target: LAMA2; (-) strand; PAM type: YTN; PAM sequence: CTT
aatcatttgctctgttacgc

SEQ ID NO: 195745 - DNA, 20 bp, Artificial Sequence
  Description of Artificial Sequence: Synthetic oligonucleotide
  Target: LAMA2; (-) strand; PAM type: YTN; PAM sequence: TTA
gaacttaatcatttgctctg

SEQ ID NO: 195746 - DNA, 20 bp, Artificial Sequence
  Description of Artificial Sequence: Synthetic oligonucleotide
  Target: LAMA2; (-) strand; PAM type: YTN; PAM sequence: CTT
agaacttaatcatttgctct

SEQ ID NO: 195747 - DNA, 20 bp, Artificial Sequence
  Description of Artificial Sequence: Synthetic oligonucleotide
  Target: LAMA2; (-) strand; PAM type: YTN; PAM sequence: TTA
gggtgtacagtgaaacttag

SEQ ID NO: 195748 - DNA, 20 bp, Artificial Sequence
  Description of Artificial Sequence: Synthetic oligonucleotide
  Target: LAMA2; (-) strand; PAM type: YTN; PAM sequence: TTT
agggtgtacagtgaaactta

SEQ ID NO: 195749 - DNA, 20 bp, Artificial Sequence
  Description of Artificial Sequence: Synthetic oligonucleotide
  Target: LAMA2; (-) strand; PAM type: YTN; PAM sequence: TTT
tagggtgtacagtgaaactt

SEQ ID NO: 195750 - DNA, 20 bp, Artificial Sequence
  Description of Artificial Sequence: Synthetic oligonucleotide
  Target: LAMA2; (-) strand; PAM type: YTN; PAM sequence: TTT
ttagggtgtacagtgaaact

SEQ ID NO: 195751 - DNA, 20 bp, Artificial Sequence
  Description of Artificial Sequence: Synthetic oligonucleotide
  Target: LAMA2; (-) strand; PAM type: YTN; PAM sequence: TTT
tttagggtgtacagtgaaac

SEQ ID NO: 195752 - DNA, 20 bp, Artificial Sequence
  Description of Artificial Sequence: Synthetic oligonucleotide
  Target: LAMA2; (-) strand; PAM type: YTN; PAM sequence: TTT
ttttagggtgtacagtgaaa

SEQ ID NO: 195753 - DNA, 20 bp, Artificial Sequence
  Description of Artificial Sequence: Synthetic oligonucleotide
  Target: LAMA2; (-) strand; PAM type: YTN; PAM sequence: TTT
tttttagggtgtacagtgaa

SEQ ID NO: 195754 - DNA, 20 bp, Artificial Sequence
  Description of Artificial Sequence: Synthetic oligonucleotide
  Target: LAMA2; (-) strand; PAM type: YTN; PAM sequence: CTT
ttttttagggtgtacagtga

SEQ ID NO: 195755 - DNA, 20 bp, Artificial Sequence
  Description of Artificial Sequence: Synthetic oligonucleotide
  Target: LAMA2; (-) strand; PAM type: YTN; PAM sequence: CTC
cttttttttagggtgtacag

SEQ ID NO: 195756 - DNA, 20 bp, Artificial Sequence
  Description of Artificial Sequence: Synthetic oligonucleotide
  Target: LAMA2; (-) strand; PAM type: YTN; PAM sequence: TTC
tccttttttttagggtgtac

SEQ ID NO: 195757 - DNA, 20 bp, Artificial Sequence
  Description of Artificial Sequence: Synthetic oligonucleotide
  Target: LAMA2; (-) strand; PAM type: YTN; PAM sequence: TTT
ctccttttttttagggtgta

SEQ ID NO: 195758 - DNA, 20 bp, Artificial Sequence
  Description of Artificial Sequence: Synthetic oligonucleotide
  Target: LAMA2; (-) strand; PAM type: YTN; PAM sequence: TTC
catatcaatttctccttttt

SEQ ID NO: 195759 - DNA, 20 bp, Artificial Sequence
  Description of Artificial Sequence: Synthetic oligonucleotide
  Target: LAMA2; (-) strand; PAM type: YTN; PAM sequence: TTC
atgttccatatcaatttctc

SEQ ID NO: 195760 - DNA, 20 bp, Artificial Sequence
  Description of Artificial Sequence: Synthetic oligonucleotide
  Target: LAMA2; (-) strand; PAM type: YTN; PAM sequence: CTA
ttcatgttccatatcaattt

SEQ ID NO: 195761 - DNA, 20 bp, Artificial Sequence
  Description of Artificial Sequence: Synthetic oligonucleotide
  Target: LAMA2; (-) strand; PAM type: YTN; PAM sequence: CTA
tactattcatgttccatatc

SEQ ID NO: 195762 - DNA, 20 bp, Artificial Sequence
  Description of Artificial Sequence: Synthetic oligonucleotide
  Target: LAMA2; (-) strand; PAM type: YTN; PAM sequence: TTC
ctatactattcatgttccat

SEQ ID NO: 195763 - DNA, 20 bp, Artificial Sequence
  Description of Artificial Sequence: Synthetic oligonucleotide
  Target: LAMA2; (-) strand; PAM type: YTN; PAM sequence: TTT
cctatactattcatgttcca

SEQ ID NO: 195764 - DNA, 20 bp, Artificial Sequence
  Description of Artificial Sequence: Synthetic oligonucleotide
  Target: LAMA2; (-) strand; PAM type: YTN; PAM sequence: TTT
tcctatactattcatgttcc

SEQ ID NO: 195765 - DNA, 20 bp, Artificial Sequence
  Description of Artificial Sequence: Synthetic oligonucleotide
  Target: LAMA2; (-) strand; PAM type: YTN; PAM sequence: CTA
aggaccattttcctatacta

SEQ ID NO: 195766 - DNA, 20 bp, Artificial Sequence
  Description of Artificial Sequence: Synthetic oligonucleotide
  Target: LAMA2; (-) strand; PAM type: YTN; PAM sequence: TTC
ctaaggaccattttcctata

SEQ ID NO: 195767 - DNA, 20 bp, Artificial Sequence
  Description of Artificial Sequence: Synthetic oligonucleotide
  Target: LAMA2; (-) strand; PAM type: YTN; PAM sequence: CTT
cctaaggaccattttcctat

SEQ ID NO: 195768 - DNA, 20 bp, Artificial Sequence
  Description of Artificial Sequence: Synthetic oligonucleotide
  Target: LAMA2; (-) strand; PAM type: YTN; PAM sequence: CTG
gccttcctaaggaccatttt

SEQ ID NO: 195769 - DNA, 20 bp, Artificial Sequence
  Description of Artificial Sequence: Synthetic oligonucleotide
  Target: LAMA2; (-) strand; PAM type: YTN; PAM sequence: CTC
atgtctggccttcctaagga

SEQ ID NO: 195770 - DNA, 20 bp, Artificial Sequence
  Description of Artificial Sequence: Synthetic oligonucleotide
  Target: LAMA2; (-) strand; PAM type: YTN; PAM sequence: CTC
tcatgtctggccttcctaag

SEQ ID NO: 195771 - DNA, 20 bp, Artificial Sequence
  Description of Artificial Sequence: Synthetic oligonucleotide
  Target: LAMA2; (-) strand; PAM type: YTN; PAM sequence: CTC
accctctcatgtctggcctt

SEQ ID NO: 195772 - DNA, 20 bp, Artificial Sequence
  Description of Artificial Sequence: Synthetic oligonucleotide
  Target: LAMA2; (-) strand; PAM type: YTN; PAM sequence: CTA
gagctcaccctctcatgtct

SEQ ID NO: 195773 - DNA, 20 bp, Artificial Sequence
  Description of Artificial Sequence: Synthetic oligonucleotide
  Target: LAMA2; (-) strand; PAM type: YTN; PAM sequence: CTA
caggtggtcacctagagctc

SEQ ID NO: 195774 - DNA, 20 bp, Artificial Sequence
  Description of Artificial Sequence: Synthetic oligonucleotide
  Target: LAMA2; (-) strand; PAM type: YTN; PAM sequence: CTG
atcctacaggtggtcaccta

SEQ ID NO: 195775 - DNA, 20 bp, Artificial Sequence
  Description of Artificial Sequence: Synthetic oligonucleotide
  Target: LAMA2; (-) strand; PAM type: YTN; PAM sequence: TTC
ctgatcctacaggtggtcac

SEQ ID NO: 195776 - DNA, 20 bp, Artificial Sequence
  Description of Artificial Sequence: Synthetic oligonucleotide
  Target: LAMA2; (-) strand; PAM type: YTN; PAM sequence: TTT
cctgatcctacaggtggtca

SEQ ID NO: 195777 - DNA, 20 bp, Artificial Sequence
  Description of Artificial Sequence: Synthetic oligonucleotide
  Target: LAMA2; (-) strand; PAM type: YTN; PAM sequence: CTT
tcctgatcctacaggtggtc

SEQ ID NO: 195778 - DNA, 20 bp, Artificial Sequence
  Description of Artificial Sequence: Synthetic oligonucleotide
  Target: LAMA2; (-) strand; PAM type: YTN; PAM sequence: TTC
tttcctgatcctacaggtgg

SEQ ID NO: 195779 - DNA, 20 bp, Artificial Sequence
  Description of Artificial Sequence: Synthetic oligonucleotide
  Target: LAMA2; (-) strand; PAM type: YTN; PAM sequence: CTA
gatatgttctttcctgatcc

SEQ ID NO: 195780 - DNA, 20 bp, Artificial Sequence
  Description of Artificial Sequence: Synthetic oligonucleotide
  Target: LAMA2; (-) strand; PAM type: YTN; PAM sequence: CTC
caggactagatatgttcttt

SEQ ID NO: 195781 - DNA, 20 bp, Artificial Sequence
  Description of Artificial Sequence: Synthetic oligonucleotide
  Target: LAMA2; (-) strand; PAM type: YTN; PAM sequence: TTA
actccaggactagatatgtt

SEQ ID NO: 195782 - DNA, 20 bp, Artificial Sequence
  Description of Artificial Sequence: Synthetic oligonucleotide
  Target: LAMA2; (-) strand; PAM type: YTN; PAM sequence: CTT
aactccaggactagatatgt

SEQ ID NO: 195783 - DNA, 20 bp, Artificial Sequence
  Description of Artificial Sequence: Synthetic oligonucleotide
  Target: LAMA2; (-) strand; PAM type: YTN; PAM sequence: CTA
gaaaaaatagaaatcttaac

SEQ ID NO: 195784 - DNA, 20 bp, Artificial Sequence
  Description of Artificial Sequence: Synthetic oligonucleotide
  Target: LAMA2; (-) strand; PAM type: YTN; PAM sequence: CTA
taaatctagaaaaaatagaa

SEQ ID NO: 195785 - DNA, 20 bp, Artificial Sequence
  Description of Artificial Sequence: Synthetic oligonucleotide
  Target: LAMA2; (-) strand; PAM type: YTN; PAM sequence: CTC
tataaatctagaaaaaatag

SEQ ID NO: 195786 - DNA, 20 bp, Artificial Sequence
  Description of Artificial Sequence: Synthetic oligonucleotide
  Target: LAMA2; (-) strand; PAM type: YTN; PAM sequence: TTA
tacctctataaatctagaaa

SEQ ID NO: 195787 - DNA, 20 bp, Artificial Sequence
  Description of Artificial Sequence: Synthetic oligonucleotide
  Target: LAMA2; (-) strand; PAM type: YTN; PAM sequence: TTG
tcaattatacctctataaat

SEQ ID NO: 195788 - DNA, 20 bp, Artificial Sequence
  Description of Artificial Sequence: Synthetic oligonucleotide
  Target: LAMA2; (-) strand; PAM type: YTN; PAM sequence: TTA
attgtcaattatacctctat

SEQ ID NO: 195789 - DNA, 20 bp, Artificial Sequence
  Description of Artificial Sequence: Synthetic oligonucleotide
  Target: LAMA2; (-) strand; PAM type: YTN; PAM sequence: TTT
aattgtcaattatacctcta

SEQ ID NO: 195790 - DNA, 20 bp, Artificial Sequence
  Description of Artificial Sequence: Synthetic oligonucleotide
  Target: LAMA2; (-) strand; PAM type: YTN; PAM sequence: TTT
taattgtcaattatacctct

SEQ ID NO: 195791 - DNA, 20 bp, Artificial Sequence
  Description of Artificial Sequence: Synthetic oligonucleotide
  Target: LAMA2; (-) strand; PAM type: YTN; PAM sequence: TTT
ttaattgtcaattatacctc

SEQ ID NO: 195792 - DNA, 20 bp, Artificial Sequence
  Description of Artificial Sequence: Synthetic oligonucleotide
  Target: LAMA2; (-) strand; PAM type: YTN; PAM sequence: CTA
gaatatacacaatttttaat

SEQ ID NO: 195793 - DNA, 20 bp, Artificial Sequence
  Description of Artificial Sequence: Synthetic oligonucleotide
  Target: LAMA2; (-) strand; PAM type: YTN; PAM sequence: TTA
aatcgtcatgcatatctaga

SEQ ID NO: 195794 - DNA, 20 bp, Artificial Sequence
  Description of Artificial Sequence: Synthetic oligonucleotide
  Target: LAMA2; (-) strand; PAM type: YTN; PAM sequence: TTC
acaatgtatatgtatattaa

SEQ ID NO: 195795 - DNA, 20 bp, Artificial Sequence
  Description of Artificial Sequence: Synthetic oligonucleotide
  Target: LAMA2; (-) strand; PAM type: YTN; PAM sequence: TTT
cacaatgtatatgtatatta

SEQ ID NO: 195796 - DNA, 20 bp, Artificial Sequence
  Description of Artificial Sequence: Synthetic oligonucleotide
  Target: LAMA2; (-) strand; PAM type: YTN; PAM sequence: TTG
tggtaatcatttcacaatgt

SEQ ID NO: 195797 - DNA, 20 bp, Artificial Sequence
  Description of Artificial Sequence: Synthetic oligonucleotide
  Target: LAMA2; (-) strand; PAM type: YTN; PAM sequence: TTG
gttgtggtaatcatttcaca

SEQ ID NO: 195798 - DNA, 20 bp, Artificial Sequence
  Description of Artificial Sequence: Synthetic oligonucleotide
  Target: LAMA2; (-) strand; PAM type: YTN; PAM sequence: TTT
ggttgtggtaatcatttcac

SEQ ID NO: 195799 - DNA, 20 bp, Artificial Sequence
  Description of Artificial Sequence: Synthetic oligonucleotide
  Target: LAMA2; (-) strand; PAM type: YTN; PAM sequence: TTA
atttggttgtggtaatcatt

SEQ ID NO: 195800 - DNA, 20 bp, Artificial Sequence
  Description of Artificial Sequence: Synthetic oligonucleotide
  Target: LAMA2; (-) strand; PAM type: YTN; PAM sequence: TTA
attaatttggttgtggtaat

SEQ ID NO: 195801 - DNA, 20 bp, Artificial Sequence
  Description of Artificial Sequence: Synthetic oligonucleotide
  Target: LAMA2; (-) strand; PAM type: YTN; PAM sequence: CTA
tgtgaggtgatacacgtatt

SEQ ID NO: 195802 - DNA, 20 bp, Artificial Sequence
  Description of Artificial Sequence: Synthetic oligonucleotide
  Target: LAMA2; (-) strand; PAM type: YTN; PAM sequence: CTC
catgcataaacaaacacgca

SEQ ID NO: 195803 - DNA, 20 bp, Artificial Sequence
  Description of Artificial Sequence: Synthetic oligonucleotide
  Target: LAMA2; (-) strand; PAM type: YTN; PAM sequence: TTA
aatgtcctccatgcataaac

SEQ ID NO: 195804 - DNA, 20 bp, Artificial Sequence
  Description of Artificial Sequence: Synthetic oligonucleotide
  Target: LAMA2; (-) strand; PAM type: YTN; PAM sequence: CTT
aaatgtcctccatgcataaa

SEQ ID NO: 195805 - DNA, 20 bp, Artificial Sequence
  Description of Artificial Sequence: Synthetic oligonucleotide
  Target: LAMA2; (-) strand; PAM type: YTN; PAM sequence: TTC
caaacacagatcttaaatgt

SEQ ID NO: 195806 - DNA, 20 bp, Artificial Sequence
  Description of Artificial Sequence: Synthetic oligonucleotide
  Target: LAMA2; (-) strand; PAM type: YTN; PAM sequence: TTT
ccaaacacagatcttaaatg

SEQ ID NO: 195807 - DNA, 20 bp, Artificial Sequence
  Description of Artificial Sequence: Synthetic oligonucleotide
  Target: LAMA2; (-) strand; PAM type: YTN; PAM sequence: TTT
tccaaacacagatcttaaat

SEQ ID NO: 195808 - DNA, 20 bp, Artificial Sequence
  Description of Artificial Sequence: Synthetic oligonucleotide
  Target: LAMA2; (-) strand; PAM type: YTN; PAM sequence: TTG
gaattttccaaacacagatc

SEQ ID NO: 195809 - DNA, 20 bp, Artificial Sequence
  Description of Artificial Sequence: Synthetic oligonucleotide
  Target: LAMA2; (-) strand; PAM type: YTN; PAM sequence: TTT
ggaattttccaaacacagat

SEQ ID NO: 195810 - DNA, 20 bp, Artificial Sequence
  Description of Artificial Sequence: Synthetic oligonucleotide
  Target: LAMA2; (-) strand; PAM type: YTN; PAM sequence: TTA
tttggaattttccaaacaca

SEQ ID NO: 195811 - DNA, 20 bp, Artificial Sequence
  Description of Artificial Sequence: Synthetic oligonucleotide
  Target: LAMA2; (-) strand; PAM type: YTN; PAM sequence: TTT
atttggaattttccaaacac

SEQ ID NO: 195812 - DNA, 20 bp, Artificial Sequence
  Description of Artificial Sequence: Synthetic oligonucleotide
  Target: LAMA2; (-) strand; PAM type: YTN; PAM sequence: CTG
tttatttggaattttccaaa

SEQ ID NO: 195813 - DNA, 20 bp, Artificial Sequence
  Description of Artificial Sequence: Synthetic oligonucleotide
  Target: LAMA2; (-) strand; PAM type: YTN; PAM sequence: TTG
tactgtttatttggaatttt

SEQ ID NO: 195814 - DNA, 20 bp, Artificial Sequence
  Description of Artificial Sequence: Synthetic oligonucleotide
  Target: LAMA2; (-) strand; PAM type: YTN; PAM sequence: TTA
ataatattgtactgtttatt

SEQ ID NO: 195815 - DNA, 20 bp, Artificial Sequence
  Description of Artificial Sequence: Synthetic oligonucleotide
  Target: LAMA2; (-) strand; PAM type: YTN; PAM sequence: CTA
tagttaataatattgtactg

SEQ ID NO: 195816 - DNA, 20 bp, Artificial Sequence
  Description of Artificial Sequence: Synthetic oligonucleotide
  Target: LAMA2; (-) strand; PAM type: YTN; PAM sequence: CTA
atgtacagaatagtaactat

SEQ ID NO: 195817 - DNA, 20 bp, Artificial Sequence
  Description of Artificial Sequence: Synthetic oligonucleotide
  Target: LAMA2; (-) strand; PAM type: YTN; PAM sequence: CTA
gggatctaatgtacagaata

SEQ ID NO: 195818 - DNA, 20 bp, Artificial Sequence
  Description of Artificial Sequence: Synthetic oligonucleotide
  Target: LAMA2; (-) strand; PAM type: YTN; PAM sequence: TTC
tagggatctaatgtacagaa

SEQ ID NO: 195819 - DNA, 20 bp, Artificial Sequence
  Description of Artificial Sequence: Synthetic oligonucleotide
  Target: LAMA2; (-) strand; PAM type: YTN; PAM sequence: TTA
taagatgaataagttctagg

SEQ ID NO: 195820 - DNA, 20 bp, Artificial Sequence
  Description of Artificial Sequence: Synthetic oligonucleotide
  Target: LAMA2; (-) strand; PAM type: YTN; PAM sequence: TTC
agttataagatgaataagtt

SEQ ID NO: 195821 - DNA, 20 bp, Artificial Sequence
  Description of Artificial Sequence: Synthetic oligonucleotide
  Target: LAMA2; (-) strand; PAM type: YTN; PAM sequence: TTT
cagttataagatgaataagt

SEQ ID NO: 195822 - DNA, 20 bp, Artificial Sequence
  Description of Artificial Sequence: Synthetic oligonucleotide
  Target: LAMA2; (-) strand; PAM type: YTN; PAM sequence: TTG
ggtcaaagggtacacagttt

SEQ ID NO: 195823 - DNA, 20 bp, Artificial Sequence
  Description of Artificial Sequence: Synthetic oligonucleotide
  Target: LAMA2; (-) strand; PAM type: YTN; PAM sequence: TTT
gggtcaaagggtacacagtt

SEQ ID NO: 195824 - DNA, 20 bp, Artificial Sequence
  Description of Artificial Sequence: Synthetic oligonucleotide
  Target: LAMA2; (-) strand; PAM type: YTN; PAM sequence: TTG
gggtaaatgagaggtttggg

SEQ ID NO: 195825 - DNA, 20 bp, Artificial Sequence
  Description of Artificial Sequence: Synthetic oligonucleotide
  Target: LAMA2; (-) strand; PAM type: YTN; PAM sequence: TTG
ccaggaattggggtaaatga

SEQ ID NO: 195826 - DNA, 20 bp, Artificial Sequence
  Description of Artificial Sequence: Synthetic oligonucleotide
  Target: LAMA2; (-) strand; PAM type: YTN; PAM sequence: CTC
atagaagcagagagtagaat

SEQ ID NO: 195827 - DNA, 20 bp, Artificial Sequence
  Description of Artificial Sequence: Synthetic oligonucleotide
  Target: LAMA2; (-) strand; PAM type: YTN; PAM sequence: TTG
aactcatagaagcagagagt

SEQ ID NO: 195828 - DNA, 20 bp, Artificial Sequence
  Description of Artificial Sequence: Synthetic oligonucleotide
  Target: LAMA2; (-) strand; PAM type: YTN; PAM sequence: CTA
aaaagttgaactcatagaag

SEQ ID NO: 195829 - DNA, 20 bp, Artificial Sequence
  Description of Artificial Sequence: Synthetic oligonucleotide
  Target: LAMA2; (-) strand; PAM type: YTN; PAM sequence: CTC
acatgtggaatctaaaaagt

SEQ ID NO: 195830 - DNA, 20 bp, Artificial Sequence
  Description of Artificial Sequence: Synthetic oligonucleotide
  Target: LAMA2; (-) strand; PAM type: YTN; PAM sequence: CTC
actcacatgtggaatctaaa

SEQ ID NO: 195831 - DNA, 20 bp, Artificial Sequence
  Description of Artificial Sequence: Synthetic oligonucleotide
  Target: LAMA2; (-) strand; PAM type: YTN; PAM sequence: CTA
ggtgagataagccacacata

SEQ ID NO: 195832 - DNA, 20 bp, Artificial Sequence
  Description of Artificial Sequence: Synthetic oligonucleotide
  Target: LAMA2; (-) strand; PAM type: YTN; PAM sequence: TTG
tgctaggtgagataagccac

SEQ ID NO: 195833 - DNA, 20 bp, Artificial Sequence
  Description of Artificial Sequence: Synthetic oligonucleotide
  Target: LAMA2; (-) strand; PAM type: YTN; PAM sequence: CTG
aagggcattgtgctaggtga

SEQ ID NO: 195834 - DNA, 20 bp, Artificial Sequence
  Description of Artificial Sequence: Synthetic oligonucleotide
  Target: LAMA2; (-) strand; PAM type: YTN; PAM sequence: TTG
caatgacatggataagcctg

SEQ ID NO: 195835 - DNA, 20 bp, Artificial Sequence
  Description of Artificial Sequence: Synthetic oligonucleotide
  Target: LAMA2; (-) strand; PAM type: YTN; PAM sequence: TTT
gcaatgacatggataagcct

SEQ ID NO: 195836 - DNA, 20 bp, Artificial Sequence
  Description of Artificial Sequence: Synthetic oligonucleotide
  Target: LAMA2; (-) strand; PAM type: YTN; PAM sequence: CTA
tttgcaatgacatggataag

SEQ ID NO: 195837 - DNA, 20 bp, Artificial Sequence
  Description of Artificial Sequence: Synthetic oligonucleotide
  Target: LAMA2; (-) strand; PAM type: YTN; PAM sequence: CTG
ctatttgcaatgacatggat

SEQ ID NO: 195838 - DNA, 20 bp, Artificial Sequence
  Description of Artificial Sequence: Synthetic oligonucleotide
  Target: LAMA2; (-) strand; PAM type: YTN; PAM sequence: TTC
agccataaaagagaaggaaa

SEQ ID NO: 195839 - DNA, 20 bp, Artificial Sequence
  Description of Artificial Sequence: Synthetic oligonucleotide
  Target: LAMA2; (-) strand; PAM type: YTN; PAM sequence: TTA
ttcagccataaaagagaagg

SEQ ID NO: 195840 - DNA, 20 bp, Artificial Sequence
  Description of Artificial Sequence: Synthetic oligonucleotide
  Target: LAMA2; (-) strand; PAM type: YTN; PAM sequence: CTA
agtatccatcagtgaatgaa

SEQ ID NO: 195841 - DNA, 20 bp, Artificial Sequence
  Description of Artificial Sequence: Synthetic oligonucleotide
  Target: LAMA2; (-) strand; PAM type: YTN; PAM sequence: TTC
acaacagtcaagataaataa

SEQ ID NO: 195842 - DNA, 20 bp, Artificial Sequence
  Description of Artificial Sequence: Synthetic oligonucleotide
  Target: LAMA2; (-) strand; PAM type: YTN; PAM sequence: TTC
atagcagcatcattcacaac

SEQ ID NO: 195843 - DNA, 20 bp, Artificial Sequence
  Description of Artificial Sequence: Synthetic oligonucleotide
  Target: LAMA2; (-) strand; PAM type: YTN; PAM sequence: CTG
catccacatgttcatagcag

SEQ ID NO: 195844 - DNA, 20 bp, Artificial Sequence
  Description of Artificial Sequence: Synthetic oligonucleotide
  Target: LAMA2; (-) strand; PAM type: YTN; PAM sequence: CTC
aaggagatatctgcatccac

SEQ ID NO: 195845 - DNA, 20 bp, Artificial Sequence
  Description of Artificial Sequence: Synthetic oligonucleotide
  Target: LAMA2; (-) strand; PAM type: YTN; PAM sequence: TTA
aaaggtgatatcagtatctc

SEQ ID NO: 195846 - DNA, 20 bp, Artificial Sequence
  Description of Artificial Sequence: Synthetic oligonucleotide
  Target: LAMA2; (-) strand; PAM type: YTN; PAM sequence: TTT
aaaaggtgatatcagtatct

SEQ ID NO: 195847 - DNA, 20 bp, Artificial Sequence
  Description of Artificial Sequence: Synthetic oligonucleotide
  Target: LAMA2; (-) strand; PAM type: YTN; PAM sequence: TTT
taaaaggtgatatcagtatc

SEQ ID NO: 195848 - DNA, 20 bp, Artificial Sequence
  Description of Artificial Sequence: Synthetic oligonucleotide
  Target: LAMA2; (-) strand; PAM type: YTN; PAM sequence: CTA
tatattttaaaaggtgatat

SEQ ID NO: 195849 - DNA, 20 bp, Artificial Sequence
  Description of Artificial Sequence: Synthetic oligonucleotide
  Target: LAMA2; (-) strand; PAM type: YTN; PAM sequence: CTA
gctatatattttaaaaggtg

SEQ ID NO: 195850 - DNA, 20 bp, Artificial Sequence
  Description of Artificial Sequence: Synthetic oligonucleotide
  Target: LAMA2; (-) strand; PAM type: YTN; PAM sequence: TTC
tagctatatattttaaaagg

SEQ ID NO: 195851 - DNA, 20 bp, Artificial Sequence
  Description of Artificial Sequence: Synthetic oligonucleotide
  Target: LAMA2; (-) strand; PAM type: YTN; PAM sequence: TTT
ctagctatatattttaaaag

SEQ ID NO: 195852 - DNA, 20 bp, Artificial Sequence
  Description of Artificial Sequence: Synthetic oligonucleotide
  Target: LAMA2; (-) strand; PAM type: YTN; PAM sequence: CTA
caatatgacccagcaatccc

SEQ ID NO: 195853 - DNA, 20 bp, Artificial Sequence
  Description of Artificial Sequence: Synthetic oligonucleotide
  Target: LAMA2; (-) strand; PAM type: YTN; PAM sequence: TTC
caaaaatgaaaatagtacta

SEQ ID NO: 195854 - DNA, 20 bp, Artificial Sequence
  Description of Artificial Sequence: Synthetic oligonucleotide
  Target: LAMA2; (-) strand; PAM type: YTN; PAM sequence: CTT
ccaaaaatgaaaatagtact

SEQ ID NO: 195855 - DNA, 20 bp, Artificial Sequence
  Description of Artificial Sequence: Synthetic oligonucleotide
  Target: LAMA2; (-) strand; PAM type: YTN; PAM sequence: TTC
ttccaaaaatgaaaatagta

SEQ ID NO: 195856 - DNA, 20 bp, Artificial Sequence
  Description of Artificial Sequence: Synthetic oligonucleotide
  Target: LAMA2; (-) strand; PAM type: YTN; PAM sequence: TTA
agcatagagattcttccaaa

SEQ ID NO: 195857 - DNA, 20 bp, Artificial Sequence
  Description of Artificial Sequence: Synthetic oligonucleotide
  Target: LAMA2; (-) strand; PAM type: YTN; PAM sequence: CTA
tggaaaacagcattaagcat

SEQ ID NO: 195858 - DNA, 20 bp, Artificial Sequence
  Description of Artificial Sequence: Synthetic oligonucleotide
  Target: LAMA2; (-) strand; PAM type: YTN; PAM sequence: TTG
gtgggaatgtaaataggcat

SEQ ID NO: 195859 - DNA, 20 bp, Artificial Sequence
  Description of Artificial Sequence: Synthetic oligonucleotide
  Target: LAMA2; (-) strand; PAM type: YTN; PAM sequence: TTT
ggtgggaatgtaaataggca

SEQ ID NO: 195860 - DNA, 20 bp, Artificial Sequence
  Description of Artificial Sequence: Synthetic oligonucleotide
  Target: LAMA2; (-) strand; PAM type: YTN; PAM sequence: TTT
tggtgggaatgtaaataggc

SEQ ID NO: 195861 - DNA, 20 bp, Artificial Sequence
  Description of Artificial Sequence: Synthetic oligonucleotide
  Target: LAMA2; (-) strand; PAM type: YTN; PAM sequence: CTT
ttggtgggaatgtaaatagg

SEQ ID NO: 195862 - DNA, 20 bp, Artificial Sequence
  Description of Artificial Sequence: Synthetic oligonucleotide
  Target: LAMA2; (-) strand; PAM type: YTN; PAM sequence: CTA
cacttttggtgggaatgtaa

SEQ ID NO: 195863 - DNA, 20 bp, Artificial Sequence
  Description of Artificial Sequence: Synthetic oligonucleotide
  Target: LAMA2; (-) strand; PAM type: YTN; PAM sequence: TTC
tacacttttggtgggaatgt

SEQ ID NO: 195864 - DNA, 20 bp, Artificial Sequence
  Description of Artificial Sequence: Synthetic oligonucleotide
  Target: LAMA2; (-) strand; PAM type: YTN; PAM sequence: CTT
ctacacttttggtgggaatg

SEQ ID NO: 195865 - DNA, 20 bp, Artificial Sequence
  Description of Artificial Sequence: Synthetic oligonucleotide
  Target: LAMA2; (-) strand; PAM type: YTN; PAM sequence: TTG
gtgaggaaacagagaaaaag

SEQ ID NO: 195866 - DNA, 20 bp, Artificial Sequence
  Description of Artificial Sequence: Synthetic oligonucleotide
  Target: LAMA2; (-) strand; PAM type: YTN; PAM sequence: TTA
tataaaagacaaaagataac

SEQ ID NO: 195867 - DNA, 20 bp, Artificial Sequence
  Description of Artificial Sequence: Synthetic oligonucleotide
  Target: LAMA2; (-) strand; PAM type: YTN; PAM sequence: CTA
ttatataaaagacaaaagat

SEQ ID NO: 195868 - DNA, 20 bp, Artificial Sequence
  Description of Artificial Sequence: Synthetic oligonucleotide
  Target: LAMA2; (-) strand; PAM type: YTN; PAM sequence: TTA
gcatggctattatataaaag

SEQ ID NO: 195869 - DNA, 20 bp, Artificial Sequence
  Description of Artificial Sequence: Synthetic oligonucleotide
  Target: LAMA2; (-) strand; PAM type: YTN; PAM sequence: CTA
ttagcatggctattatataa

SEQ ID NO: 195870 - DNA, 20 bp, Artificial Sequence
  Description of Artificial Sequence: Synthetic oligonucleotide
  Target: LAMA2; (-) strand; PAM type: YTN; PAM sequence: CTC
atacctattagcatggctat

SEQ ID NO: 195871 - DNA, 20 bp, Artificial Sequence
  Description of Artificial Sequence: Synthetic oligonucleotide
  Target: LAMA2; (-) strand; PAM type: YTN; PAM sequence: TTA
atcatcagggaaatacaaat

SEQ ID NO: 195872 - DNA, 20 bp, Artificial Sequence
  Description of Artificial Sequence: Synthetic oligonucleotide
  Target: LAMA2; (-) strand; PAM type: YTN; PAM sequence: TTC
aacatcattaatcatcaggg

SEQ ID NO: 195873 - DNA, 20 bp, Artificial Sequence
  Description of Artificial Sequence: Synthetic oligonucleotide
  Target: LAMA2; (-) strand; PAM type: YTN; PAM sequence: TTA
aaaagtgttcaacatcatta

SEQ ID NO: 195874 - DNA, 20 bp, Artificial Sequence
  Description of Artificial Sequence: Synthetic oligonucleotide
  Target: LAMA2; (-) strand; PAM type: YTN; PAM sequence: TTC
caaaaagagacatacaaatg

SEQ ID NO: 195875 - DNA, 20 bp, Artificial Sequence
  Description of Artificial Sequence: Synthetic oligonucleotide
  Target: LAMA2; (-) strand; PAM type: YTN; PAM sequence: TTT
ccaaaaagagacatacaaat

SEQ ID NO: 195876 - DNA, 20 bp, Artificial Sequence
  Description of Artificial Sequence: Synthetic oligonucleotide
  Target: LAMA2; (-) strand; PAM type: YTN; PAM sequence: CTA
aaaaatagacatgtttccaa

SEQ ID NO: 195877 - DNA, 20 bp, Artificial Sequence
  Description of Artificial Sequence: Synthetic oligonucleotide
  Target: LAMA2; (-) strand; PAM type: YTN; PAM sequence: CTA
aacatatctaaaaaatagac

SEQ ID NO: 195878 - DNA, 20 bp, Artificial Sequence
  Description of Artificial Sequence: Synthetic oligonucleotide
  Target: LAMA2; (-) strand; PAM type: YTN; PAM sequence: TTC
aaaatggacaaaggacctaa

SEQ ID NO: 195879 - DNA, 20 bp, Artificial Sequence
  Description of Artificial Sequence: Synthetic oligonucleotide
  Target: LAMA2; (-) strand; PAM type: YTN; PAM sequence: TTT
caaaatggacaaaggaccta

SEQ ID NO: 195880 - DNA, 20 bp, Artificial Sequence
  Description of Artificial Sequence: Synthetic oligonucleotide
  Target: LAMA2; (-) strand; PAM type: YTN; PAM sequence: CTC
aatagcaagaaaacacaaaa

SEQ ID NO: 195881 - DNA, 20 bp, Artificial Sequence
  Description of Artificial Sequence: Synthetic oligonucleotide
  Target: LAMA2; (-) strand; PAM type: YTN; PAM sequence: TTC
atacaactcaatagcaagaa

SEQ ID NO: 195882 - DNA, 20 bp, Artificial Sequence
  Description of Artificial Sequence: Synthetic oligonucleotide
  Target: LAMA2; (-) strand; PAM type: YTN; PAM sequence: TTC
aaaatatataaggaattcat

SEQ ID NO: 195883 - DNA, 20 bp, Artificial Sequence
  Description of Artificial Sequence: Synthetic oligonucleotide
  Target: LAMA2; (-) strand; PAM type: YTN; PAM sequence: TTA
atattcaaaatatataagga

SEQ ID NO: 195884 - DNA, 20 bp, Artificial Sequence
  Description of Artificial Sequence: Synthetic oligonucleotide
  Target: LAMA2; (-) strand; PAM type: YTN; PAM sequence: TTG
gcaaaccatatatatgatca

SEQ ID NO: 195885 - DNA, 20 bp, Artificial Sequence
  Description of Artificial Sequence: Synthetic oligonucleotide
  Target: LAMA2; (-) strand; PAM type: YTN; PAM sequence: TTG
tggtatgggataatatattg

SEQ ID NO: 195886 - DNA, 20 bp, Artificial Sequence
  Description of Artificial Sequence: Synthetic oligonucleotide
  Target: LAMA2; (-) strand; PAM type: YTN; PAM sequence: CTA
cagcagaggatacaatcaac

SEQ ID NO: 195887 - DNA, 20 bp, Artificial Sequence
  Description of Artificial Sequence: Synthetic oligonucleotide
  Target: LAMA2; (-) strand; PAM type: YTN; PAM sequence: TTC
tacagcagaggatacaatca

SEQ ID NO: 195888 - DNA, 20 bp, Artificial Sequence
  Description of Artificial Sequence: Synthetic oligonucleotide
  Target: LAMA2; (-) strand; PAM type: YTN; PAM sequence: CTT
ctacagcagaggatacaatc

SEQ ID NO: 195889 - DNA, 20 bp, Artificial Sequence
  Description of Artificial Sequence: Synthetic oligonucleotide
  Target: LAMA2; (-) strand; PAM type: YTN; PAM sequence: CTA
aaaacttctacagcagagga

SEQ ID NO: 195890 - DNA, 20 bp, Artificial Sequence
  Description of Artificial Sequence: Synthetic oligonucleotide
  Target: LAMA2; (-) strand; PAM type: YTN; PAM sequence: CTG
cagcaaactaaaaacttcta

SEQ ID NO: 195891 - DNA, 20 bp, Artificial Sequence
  Description of Artificial Sequence: Synthetic oligonucleotide
  Target: LAMA2; (-) strand; PAM type: YTN; PAM sequence: TTG
gggtacgacacccgaagcac

SEQ ID NO: 195892 - DNA, 20 bp, Artificial Sequence
  Description of Artificial Sequence: Synthetic oligonucleotide
  Target: LAMA2; (-) strand; PAM type: YTN; PAM sequence: TTT
ggggtacgacacccgaagca

SEQ ID NO: 195893 - DNA, 20 bp, Artificial Sequence
  Description of Artificial Sequence: Synthetic oligonucleotide
  Target: LAMA2; (-) strand; PAM type: YTN; PAM sequence: TTT
tggggtacgacacccgaagc

SEQ ID NO: 195894 - DNA, 20 bp, Artificial Sequence
  Description of Artificial Sequence: Synthetic oligonucleotide
  Target: LAMA2; (-) strand; PAM type: YTN; PAM sequence: TTT
ttggggtacgacacccgaag

SEQ ID NO: 195895 - DNA, 20 bp, Artificial Sequence
  Description of Artificial Sequence: Synthetic oligonucleotide
  Target: LAMA2; (-) strand; PAM type: YTN; PAM sequence: TTG
gtcatgatttttggggtacg

SEQ ID NO: 195896 - DNA, 20 bp, Artificial Sequence
  Description of Artificial Sequence: Synthetic oligonucleotide
  Target: LAMA2; (-) strand; PAM type: YTN; PAM sequence: CTT
ggtcatgatttttggggtac

SEQ ID NO: 195897 - DNA, 20 bp, Artificial Sequence
  Description of Artificial Sequence: Synthetic oligonucleotide
  Target: LAMA2; (-) strand; PAM type: YTN; PAM sequence: TTG
ccatcagtcttggtcatgat

SEQ ID NO: 195898 - DNA, 20 bp, Artificial Sequence
  Description of Artificial Sequence: Synthetic oligonucleotide
  Target: LAMA2; (-) strand; PAM type: YTN; PAM sequence: CTT
gccatcagtcttggtcatga

SEQ ID NO: 195899 - DNA, 20 bp, Artificial Sequence
  Description of Artificial Sequence: Synthetic oligonucleotide
  Target: LAMA2; (-) strand; PAM type: YTN; PAM sequence: CTC
cttgccatcagtcttggtca

SEQ ID NO: 195900 - DNA, 20 bp, Artificial Sequence
  Description of Artificial Sequence: Synthetic oligonucleotide
  Target: LAMA2; (-) strand; PAM type: YTN; PAM sequence: CTA
aaataaatataaagaaaagg

SEQ ID NO: 195901 - DNA, 20 bp, Artificial Sequence
  Description of Artificial Sequence: Synthetic oligonucleotide
  Target: LAMA2; (-) strand; PAM type: YTN; PAM sequence: TTC
taaaataaatataaagaaaa

SEQ ID NO: 195902 - DNA, 20 bp, Artificial Sequence
  Description of Artificial Sequence: Synthetic oligonucleotide
  Target: LAMA2; (-) strand; PAM type: YTN; PAM sequence: CTT
ctaaaataaatataaagaaa

SEQ ID NO: 195903 - DNA, 20 bp, Artificial Sequence
  Description of Artificial Sequence: Synthetic oligonucleotide
  Target: LAMA2; (-) strand; PAM type: YTN; PAM sequence: CTG
aaaccataaagcttctaaaa

SEQ ID NO: 195904 - DNA, 20 bp, Artificial Sequence
  Description of Artificial Sequence: Synthetic oligonucleotide
  Target: LAMA2; (-) strand; PAM type: YTN; PAM sequence: CTG
aaatgtatgacctgaaacca

SEQ ID NO: 195905 - DNA, 20 bp, Artificial Sequence
  Description of Artificial Sequence: Synthetic oligonucleotide
  Target: LAMA2; (-) strand; PAM type: YTN; PAM sequence: TTC
aagactgaaatgtatgacct

SEQ ID NO: 195906 - DNA, 20 bp, Artificial Sequence
  Description of Artificial Sequence: Synthetic oligonucleotide
  Target: LAMA2; (-) strand; PAM type: YTN; PAM sequence: CTG
aaaatggattcaagactgaa

SEQ ID NO: 195907 - DNA, 20 bp, Artificial Sequence
  Description of Artificial Sequence: Synthetic oligonucleotide
  Target: LAMA2; (-) strand; PAM type: YTN; PAM sequence: TTC
catatacaaaaatcaactga

SEQ ID NO: 195908 - DNA, 20 bp, Artificial Sequence
  Description of Artificial Sequence: Synthetic oligonucleotide
  Target: LAMA2; (-) strand; PAM type: YTN; PAM sequence: TTA
ttccatatacaaaaatcaac

SEQ ID NO: 195909 - DNA, 20 bp, Artificial Sequence
  Description of Artificial Sequence: Synthetic oligonucleotide
  Target: LAMA2; (-) strand; PAM type: YTN; PAM sequence: CTT
attccatatacaaaaatcaa

SEQ ID NO: 195910 - DNA, 20 bp, Artificial Sequence
  Description of Artificial Sequence: Synthetic oligonucleotide
  Target: LAMA2; (-) strand; PAM type: YTN; PAM sequence: TTA
tcttattccatatacaaaaa

SEQ ID NO: 195911 - DNA, 20 bp, Artificial Sequence
  Description of Artificial Sequence: Synthetic oligonucleotide
  Target: LAMA2; (-) strand; PAM type: YTN; PAM sequence: TTT
atcttattccatatacaaaa

SEQ ID NO: 195912 - DNA, 20 bp, Artificial Sequence
  Description of Artificial Sequence: Synthetic oligonucleotide
  Target: LAMA2; (-) strand; PAM type: YTN; PAM sequence: TTG
gatgtttatcttattccata

SEQ ID NO: 195913 - DNA, 20 bp, Artificial Sequence
  Description of Artificial Sequence: Synthetic oligonucleotide
  Target: LAMA2; (-) strand; PAM type: YTN; PAM sequence: TTT
ggatgtttatcttattccat

SEQ ID NO: 195914 - DNA, 20 bp, Artificial Sequence
  Description of Artificial Sequence: Synthetic oligonucleotide
  Target: LAMA2; (-) strand; PAM type: YTN; PAM sequence: TTT
tggatgtttatcttattcca

SEQ ID NO: 195915 - DNA, 20 bp, Artificial Sequence
  Description of Artificial Sequence: Synthetic oligonucleotide
  Target: LAMA2; (-) strand; PAM type: YTN; PAM sequence: CTA
gatatccacatgcaaaagaa

SEQ ID NO: 195916 - DNA, 20 bp, Artificial Sequence
  Description of Artificial Sequence: Synthetic oligonucleotide
  Target: LAMA2; (-) strand; PAM type: YTN; PAM sequence: TTG
gggaaactagatatccacat

SEQ ID NO: 195917 - DNA, 20 bp, Artificial Sequence
  Description of Artificial Sequence: Synthetic oligonucleotide
  Target: LAMA2; (-) strand; PAM type: YTN; PAM sequence: CTG
tattggggaaactagatatc

SEQ ID NO: 195918 - DNA, 20 bp, Artificial Sequence
  Description of Artificial Sequence: Synthetic oligonucleotide
  Target: LAMA2; (-) strand; PAM type: YTN; PAM sequence: TTC
aataaactgtattggggaaa

SEQ ID NO: 195919 - DNA, 20 bp, Artificial Sequence
  Description of Artificial Sequence: Synthetic oligonucleotide
  Target: LAMA2; (-) strand; PAM type: YTN; PAM sequence: TTT
caataaactgtattggggaa

SEQ ID NO: 195920 - DNA, 20 bp, Artificial Sequence
  Description of Artificial Sequence: Synthetic oligonucleotide
  Target: LAMA2; (-) strand; PAM type: YTN; PAM sequence: TTT
tcaataaactgtattgggga

SEQ ID NO: 195921 - DNA, 20 bp, Artificial Sequence
  Description of Artificial Sequence: Synthetic oligonucleotide
  Target: LAMA2; (-) strand; PAM type: YTN; PAM sequence: CTT
ttcaataaactgtattgggg

SEQ ID NO: 195922 - DNA, 20 bp, Artificial Sequence
  Description of Artificial Sequence: Synthetic oligonucleotide
  Target: LAMA2; (-) strand; PAM type: YTN; PAM sequence: CTA
cacaatggggaacaaatagt

SEQ ID NO: 195923 - DNA, 20 bp, Artificial Sequence
  Description of Artificial Sequence: Synthetic oligonucleotide
  Target: LAMA2; (-) strand; PAM type: YTN; PAM sequence: TTA
aaactacacaatggggaaca

SEQ ID NO: 195924 - DNA, 20 bp, Artificial Sequence
  Description of Artificial Sequence: Synthetic oligonucleotide
  Target: LAMA2; (-) strand; PAM type: YTN; PAM sequence: CTA
ggccattaaaactacacaat

SEQ ID NO: 195925 - DNA, 20 bp, Artificial Sequence
  Description of Artificial Sequence: Synthetic oligonucleotide
  Target: LAMA2; (-) strand; PAM type: YTN; PAM sequence: TTG
actaggccattaaaactaca

SEQ ID NO: 195926 - DNA, 20 bp, Artificial Sequence
  Description of Artificial Sequence: Synthetic oligonucleotide
  Target: LAMA2; (-) strand; PAM type: YTN; PAM sequence: TTT
gactaggccattaaaactac

SEQ ID NO: 195927 - DNA, 20 bp, Artificial Sequence
  Description of Artificial Sequence: Synthetic oligonucleotide
  Target: LAMA2; (-) strand; PAM type: YTN; PAM sequence: CTT
tgactaggccattaaaacta

SEQ ID NO: 195928 - DNA, 20 bp, Artificial Sequence
  Description of Artificial Sequence: Synthetic oligonucleotide
  Target: LAMA2; (-) strand; PAM type: YTN; PAM sequence: CTA
atctttgactaggccattaa

SEQ ID NO: 195929 - DNA, 20 bp, Artificial Sequence
  Description of Artificial Sequence: Synthetic oligonucleotide
  Target: LAMA2; (-) strand; PAM type: YTN; PAM sequence: CTA
taaaaacagacatatagacc

SEQ ID NO: 195930 - DNA, 20 bp, Artificial Sequence
  Description of Artificial Sequence: Synthetic oligonucleotide
  Target: LAMA2; (-) strand; PAM type: YTN; PAM sequence: CTA
tatacaaagccatggtaatc

SEQ ID NO: 195931 - DNA, 20 bp, Artificial Sequence
  Description of Artificial Sequence: Synthetic oligonucleotide
  Target: LAMA2; (-) strand; PAM type: YTN; PAM sequence: TTC
aaactatatacaaagccatg

SEQ ID NO: 195932 - DNA, 20 bp, Artificial Sequence
  Description of Artificial Sequence: Synthetic oligonucleotide
  Target: LAMA2; (-) strand; PAM type: YTN; PAM sequence: TTT
caaactatatacaaagccat

SEQ ID NO: 195933 - DNA, 20 bp, Artificial Sequence
  Description of Artificial Sequence: Synthetic oligonucleotide
  Target: LAMA2; (-) strand; PAM type: YTN; PAM sequence: CTG
atttcaaactatatacaaag

SEQ ID NO: 195934 - DNA, 20 bp, Artificial Sequence
  Description of Artificial Sequence: Synthetic oligonucleotide
  Target: LAMA2; (-) strand; PAM type: YTN; PAM sequence: TTA
agaaagaaggacaaagccag

SEQ ID NO: 195935 - DNA, 20 bp, Artificial Sequence
  Description of Artificial Sequence: Synthetic oligonucleotide
  Target: LAMA2; (-) strand; PAM type: YTN; PAM sequence: CTT
aagaaagaaggacaaagcca

SEQ ID NO: 195936 - DNA, 20 bp, Artificial Sequence
  Description of Artificial Sequence: Synthetic oligonucleotide
  Target: LAMA2; (-) strand; PAM type: YTN; PAM sequence: TTC
atatgaaatcacaaatgacc

SEQ ID NO: 195937 - DNA, 20 bp, Artificial Sequence
  Description of Artificial Sequence: Synthetic oligonucleotide
  Target: LAMA2; (-) strand; PAM type: YTN; PAM sequence: TTA
aaattcatatgaaatcacaa

SEQ ID NO: 195938 - DNA, 20 bp, Artificial Sequence
  Description of Artificial Sequence: Synthetic oligonucleotide
  Target: LAMA2; (-) strand; PAM type: YTN; PAM sequence: TTA
ataattaaaattcatatgaa

SEQ ID NO: 195939 - DNA, 20 bp, Artificial Sequence
  Description of Artificial Sequence: Synthetic oligonucleotide
  Target: LAMA2; (-) strand; PAM type: YTN; PAM sequence: TTT
aataattaaaattcatatga

SEQ ID NO: 195940 - DNA, 20 bp, Artificial Sequence
  Description of Artificial Sequence: Synthetic oligonucleotide
  Target: LAMA2; (-) strand; PAM type: YTN; PAM sequence: TTT
taataattaaaattcatatg

SEQ ID NO: 195941 - DNA, 20 bp, Artificial Sequence
  Description of Artificial Sequence: Synthetic oligonucleotide
  Target: LAMA2; (-) strand; PAM type: YTN; PAM sequence: CTA
aaaaaaagaataagaatttt

SEQ ID NO: 195942 - DNA, 20 bp, Artificial Sequence
  Description of Artificial Sequence: Synthetic oligonucleotide
  Target: LAMA2; (-) strand; PAM type: YTN; PAM sequence: TTC
taaaaaaaagaataagaatt

SEQ ID NO: 195943 - DNA, 20 bp, Artificial Sequence
  Description of Artificial Sequence: Synthetic oligonucleotide
  Target: LAMA2; (-) strand; PAM type: YTN; PAM sequence: CTC
agaaaaaaaagaaagaaaaa

SEQ ID NO: 195944 - DNA, 20 bp, Artificial Sequence
  Description of Artificial Sequence: Synthetic oligonucleotide
  Target: LAMA2; (-) strand; PAM type: YTN; PAM sequence: TTC
cacctcagaaaaaaaagaaa

SEQ ID NO: 195945 - DNA, 20 bp, Artificial Sequence
  Description of Artificial Sequence: Synthetic oligonucleotide
  Target: LAMA2; (-) strand; PAM type: YTN; PAM sequence: TTG
agcgaaaagagggaaattcc

SEQ ID NO: 195946 - DNA, 20 bp, Artificial Sequence
  Description of Artificial Sequence: Synthetic oligonucleotide
  Target: LAMA2; (-) strand; PAM type: YTN; PAM sequence: CTT
gagcgaaaagagggaaattc

SEQ ID NO: 195947 - DNA, 20 bp, Artificial Sequence
  Description of Artificial Sequence: Synthetic oligonucleotide
  Target: LAMA2; (-) strand; PAM type: YTN; PAM sequence: CTC
caccttgagcgaaaagaggg

SEQ ID NO: 195948 - DNA, 20 bp, Artificial Sequence
  Description of Artificial Sequence: Synthetic oligonucleotide
  Target: LAMA2; (-) strand; PAM type: YTN; PAM sequence: TTG
cactccaccttgagcgaaaa

SEQ ID NO: 195949 - DNA, 20 bp, Artificial Sequence
  Description of Artificial Sequence: Synthetic oligonucleotide
  Target: LAMA2; (-) strand; PAM type: YTN; PAM sequence: TTG
caccattgcactccaccttg

SEQ ID NO: 195950 - DNA, 20 bp, Artificial Sequence
  Description of Artificial Sequence: Synthetic oligonucleotide
  Target: LAMA2; (-) strand; PAM type: YTN; PAM sequence: CTG
agattgcaccattgcactcc

SEQ ID NO: 195951 - DNA, 20 bp, Artificial Sequence
  Description of Artificial Sequence: Synthetic oligonucleotide
  Target: LAMA2; (-) strand; PAM type: YTN; PAM sequence: TTG
cagtgagctgagattgcacc

SEQ ID NO: 195952 - DNA, 20 bp, Artificial Sequence
  Description of Artificial Sequence: Synthetic oligonucleotide
  Target: LAMA2; (-) strand; PAM type: YTN; PAM sequence: TTG
aacccaggagacggaggttg

SEQ ID NO: 195953 - DNA, 20 bp, Artificial Sequence
  Description of Artificial Sequence: Synthetic oligonucleotide
  Target: LAMA2; (-) strand; PAM type: YTN; PAM sequence: CTT
gaacccaggagacggaggtt

SEQ ID NO: 195954 - DNA, 20 bp, Artificial Sequence
  Description of Artificial Sequence: Synthetic oligonucleotide
  Target: LAMA2; (-) strand; PAM type: YTN; PAM sequence: CTG
aggcaggagaatcacttgaa

SEQ ID NO: 195955 - DNA, 20 bp, Artificial Sequence
  Description of Artificial Sequence: Synthetic oligonucleotide
  Target: LAMA2; (-) strand; PAM type: YTN; PAM sequence: CTC
aggaggctgaggcaggagaa

SEQ ID NO: 195956 - DNA, 20 bp, Artificial Sequence
  Description of Artificial Sequence: Synthetic oligonucleotide
  Target: LAMA2; (-) strand; PAM type: YTN; PAM sequence: CTA
ctcaggaggctgaggcagga

SEQ ID NO: 195957 - DNA, 20 bp, Artificial Sequence
  Description of Artificial Sequence: Synthetic oligonucleotide
  Target: LAMA2; (-) strand; PAM type: YTN; PAM sequence: CTC
agctactcaggaggctgagg

SEQ ID NO: 195958 - DNA, 20 bp, Artificial Sequence
  Description of Artificial Sequence: Synthetic oligonucleotide
  Target: LAMA2; (-) strand; PAM type: YTN; PAM sequence: CTG
taatctcagctactcaggag

SEQ ID NO: 195959 - DNA, 20 bp, Artificial Sequence
  Description of Artificial Sequence: Synthetic oligonucleotide
  Target: LAMA2; (-) strand; PAM type: YTN; PAM sequence: CTG
ggcatggtggtgtgcacctg

SEQ ID NO: 195960 - DNA, 20 bp, Artificial Sequence
  Description of Artificial Sequence: Synthetic oligonucleotide
  Target: LAMA2; (-) strand; PAM type: YTN; PAM sequence: TTG
gctgggcatggtggtgtgca

SEQ ID NO: 195961 - DNA, 20 bp, Artificial Sequence
  Description of Artificial Sequence: Synthetic oligonucleotide
  Target: LAMA2; (-) strand; PAM type: YTN; PAM sequence: CTA
agaaatacaaaaaataaaat

SEQ ID NO: 195962 - DNA, 20 bp, Artificial Sequence
  Description of Artificial Sequence: Synthetic oligonucleotide
  Target: LAMA2; (-) strand; PAM type: YTN; PAM sequence: CTA
ctaagaaatacaaaaaataa

SEQ ID NO: 195963 - DNA, 20 bp, Artificial Sequence
  Description of Artificial Sequence: Synthetic oligonucleotide
  Target: LAMA2; (-) strand; PAM type: YTN; PAM sequence: CTC
tactaagaaatacaaaaaat

SEQ ID NO: 195964 - DNA, 20 bp, Artificial Sequence
  Description of Artificial Sequence: Synthetic oligonucleotide
  Target: LAMA2; (-) strand; PAM type: YTN; PAM sequence: CTG
tccaacatagcaaaacccca

SEQ ID NO: 195965 - DNA, 20 bp, Artificial Sequence
  Description of Artificial Sequence: Synthetic oligonucleotide
  Target: LAMA2; (-) strand; PAM type: YTN; PAM sequence: TTG
agaccagcctgtccaacata

SEQ ID NO: 195966 - DNA, 20 bp, Artificial Sequence
  Description of Artificial Sequence: Synthetic oligonucleotide
  Target: LAMA2; (-) strand; PAM type: YTN; PAM sequence: TTT
gagaccagcctgtccaacat

SEQ ID NO: 195967 - DNA, 20 bp, Artificial Sequence
  Description of Artificial Sequence: Synthetic oligonucleotide
  Target: LAMA2; (-) strand; PAM type: YTN; PAM sequence: CTG
aggtcaggagtttgagacca

SEQ ID NO: 195968 - DNA, 20 bp, Artificial Sequence
  Description of Artificial Sequence: Synthetic oligonucleotide
  Target: LAMA2; (-) strand; PAM type: YTN; PAM sequence: TTA
cctgaggtcaggagtttgag

SEQ ID NO: 195969 - DNA, 20 bp, Artificial Sequence
  Description of Artificial Sequence: Synthetic oligonucleotide
  Target: LAMA2; (-) strand; PAM type: YTN; PAM sequence: CTG
aggtgggcagattacctgag

SEQ ID NO: 195970 - DNA, 20 bp, Artificial Sequence
  Description of Artificial Sequence: Synthetic oligonucleotide
  Target: LAMA2; (-) strand; PAM type: YTN; PAM sequence: TTG
ggaggctgaggtgggcagat

SEQ ID NO: 195971 - DNA, 20 bp, Artificial Sequence
  Description of Artificial Sequence: Synthetic oligonucleotide
  Target: LAMA2; (-) strand; PAM type: YTN; PAM sequence: TTT
gggaggctgaggtgggcaga

SEQ ID NO: 195972 - DNA, 20 bp, Artificial Sequence
  Description of Artificial Sequence: Synthetic oligonucleotide
  Target: LAMA2; (-) strand; PAM type: YTN; PAM sequence: CTT
tgggaggctgaggtgggcag

SEQ ID NO: 195973 - DNA, 20 bp, Artificial Sequence
  Description of Artificial Sequence: Synthetic oligonucleotide
  Target: LAMA2; (-) strand; PAM type: YTN; PAM sequence: CTG
taatcccagcactttgggag

SEQ ID NO: 195974 - DNA, 20 bp, Artificial Sequence
  Description of Artificial Sequence: Synthetic oligonucleotide
  Target: LAMA2; (-) strand; PAM type: YTN; PAM sequence: TTA
tgcctgtaatcccagcactt

SEQ ID NO: 195975 - DNA, 20 bp, Artificial Sequence
  Description of Artificial Sequence: Synthetic oligonucleotide
  Target: LAMA2; (-) strand; PAM type: YTN; PAM sequence: CTT
atgcctgtaatcccagcact

SEQ ID NO: 195976 - DNA, 20 bp, Artificial Sequence
  Description of Artificial Sequence: Synthetic oligonucleotide
  Target: LAMA2; (-) strand; PAM type: YTN; PAM sequence: TTA
gaaaatgtagaaaaaatggc

SEQ ID NO: 195977 - DNA, 20 bp, Artificial Sequence
  Description of Artificial Sequence: Synthetic oligonucleotide
  Target: LAMA2; (-) strand; PAM type: YTN; PAM sequence: TTT
agaaaatgtagaaaaaatgg

SEQ ID NO: 195978 - DNA, 20 bp, Artificial Sequence
  Description of Artificial Sequence: Synthetic oligonucleotide
  Target: LAMA2; (-) strand; PAM type: YTN; PAM sequence: TTT
tagaaaatgtagaaaaaatg

SEQ ID NO: 195979 - DNA, 20 bp, Artificial Sequence
  Description of Artificial Sequence: Synthetic oligonucleotide
  Target: LAMA2; (-) strand; PAM type: YTN; PAM sequence: TTT
ttagaaaatgtagaaaaaat

SEQ ID NO: 195980 - DNA, 20 bp, Artificial Sequence
  Description of Artificial Sequence: Synthetic oligonucleotide
  Target: LAMA2; (-) strand; PAM type: YTN; PAM sequence: TTT
tttagaaaatgtagaaaaaa

SEQ ID NO: 195981 - DNA, 20 bp, Artificial Sequence
  Description of Artificial Sequence: Synthetic oligonucleotide
  Target: LAMA2; (-) strand; PAM type: YTN; PAM sequence: TTC
aatggcaattttttagaaaa

SEQ ID NO: 195982 - DNA, 20 bp, Artificial Sequence
  Description of Artificial Sequence: Synthetic oligonucleotide
  Target: LAMA2; (-) strand; PAM type: YTN; PAM sequence: TTT
caatggcaattttttagaaa

SEQ ID NO: 195983 - DNA, 20 bp, Artificial Sequence
  Description of Artificial Sequence: Synthetic oligonucleotide
  Target: LAMA2; (-) strand; PAM type: YTN; PAM sequence: CTC
aacatttcaatggcaatttt

SEQ ID NO: 195984 - DNA, 20 bp, Artificial Sequence
  Description of Artificial Sequence: Synthetic oligonucleotide
  Target: LAMA2; (-) strand; PAM type: YTN; PAM sequence: CTA
cagagtcaatgcagtcactc

SEQ ID NO: 195985 - DNA, 20 bp, Artificial Sequence
  Description of Artificial Sequence: Synthetic oligonucleotide
  Target: LAMA2; (-) strand; PAM type: YTN; PAM sequence: TTA
cccaaaatgatctacagagt

SEQ ID NO: 195986 - DNA, 20 bp, Artificial Sequence
  Description of Artificial Sequence: Synthetic oligonucleotide
  Target: LAMA2; (-) strand; PAM type: YTN; PAM sequence: TTA
aaatgtccacattacccaaa

SEQ ID NO: 195987 - DNA, 20 bp, Artificial Sequence
  Description of Artificial Sequence: Synthetic oligonucleotide
  Target: LAMA2; (-) strand; PAM type: YTN; PAM sequence: TTG
ttaaaatgtccacattaccc

SEQ ID NO: 195988 - DNA, 20 bp, Artificial Sequence
  Description of Artificial Sequence: Synthetic oligonucleotide
  Target: LAMA2; (-) strand; PAM type: YTN; PAM sequence: CTA
atattgttaaaatgtccaca

SEQ ID NO: 195989 - DNA, 20 bp, Artificial Sequence
  Description of Artificial Sequence: Synthetic oligonucleotide
  Target: LAMA2; (-) strand; PAM type: YTN; PAM sequence: TTG
gaagaactaatattgttaaa

SEQ ID NO: 195990 - DNA, 20 bp, Artificial Sequence
  Description of Artificial Sequence: Synthetic oligonucleotide
  Target: LAMA2; (-) strand; PAM type: YTN; PAM sequence: TTC
atgaattggaagaactaata

SEQ ID NO: 195991 - DNA, 20 bp, Artificial Sequence
  Description of Artificial Sequence: Synthetic oligonucleotide
  Target: LAMA2; (-) strand; PAM type: YTN; PAM sequence: CTG
tgttcatgaattggaagaac

SEQ ID NO: 195992 - DNA, 20 bp, Artificial Sequence
  Description of Artificial Sequence: Synthetic oligonucleotide
  Target: LAMA2; (-) strand; PAM type: YTN; PAM sequence: TTC
tgtgttcatgaattggaaga

SEQ ID NO: 195993 - DNA, 20 bp, Artificial Sequence
  Description of Artificial Sequence: Synthetic oligonucleotide
  Target: LAMA2; (-) strand; PAM type: YTN; PAM sequence: TTT
ctgtgttcatgaattggaag

SEQ ID NO: 195994 - DNA, 20 bp, Artificial Sequence
  Description of Artificial Sequence: Synthetic oligonucleotide
  Target: LAMA2; (-) strand; PAM type: YTN; PAM sequence: CTT
tctgtgttcatgaattggaa

SEQ ID NO: 195995 - DNA, 20 bp, Artificial Sequence
  Description of Artificial Sequence: Synthetic oligonucleotide
  Target: LAMA2; (-) strand; PAM type: YTN; PAM sequence: TTG
aagaaagaaatggaagacaa

SEQ ID NO: 195996 - DNA, 20 bp, Artificial Sequence
  Description of Artificial Sequence: Synthetic oligonucleotide
  Target: LAMA2; (-) strand; PAM type: YTN; PAM sequence: CTA
taagacattgaagaaagaaa

SEQ ID NO: 195997 - DNA, 20 bp, Artificial Sequence
  Description of Artificial Sequence: Synthetic oligonucleotide
  Target: LAMA2; (-) strand; PAM type: YTN; PAM sequence: CTG
aaaactataagacattgaag

SEQ ID NO: 195998 - DNA, 20 bp, Artificial Sequence
  Description of Artificial Sequence: Synthetic oligonucleotide
  Target: LAMA2; (-) strand; PAM type: YTN; PAM sequence: CTG
tacactgaaaactataagac

SEQ ID NO: 195999 - DNA, 20 bp, Artificial Sequence
  Description of Artificial Sequence: Synthetic oligonucleotide
  Target: LAMA2; (-) strand; PAM type: YTN; PAM sequence: TTA
accaaggaggtgaaagatct

SEQ ID NO: 196000 - DNA, 20 bp, Artificial Sequence
  Description of Artificial Sequence: Synthetic oligonucleotide
  Target: LAMA2; (-) strand; PAM type: YTN; PAM sequence: TTT
aaccaaggaggtgaaagatc

SEQ ID NO: 196001 - DNA, 20 bp, Artificial Sequence
  Description of Artificial Sequence: Synthetic oligonucleotide
  Target: LAMA2; (-) strand; PAM type: YTN; PAM sequence: CTC
aaagtataataataataaga

SEQ ID NO: 196002 - DNA, 20 bp, Artificial Sequence
  Description of Artificial Sequence: Synthetic oligonucleotide
  Target: LAMA2; (-) strand; PAM type: YTN; PAM sequence: CTA
gaactcaaagtataataata

SEQ ID NO: 196003 - DNA, 20 bp, Artificial Sequence
  Description of Artificial Sequence: Synthetic oligonucleotide
  Target: LAMA2; (-) strand; PAM type: YTN; PAM sequence: TTG
tgcacaagtaccctagaact

SEQ ID NO: 196004 - DNA, 20 bp, Artificial Sequence
  Description of Artificial Sequence: Synthetic oligonucleotide
  Target: LAMA2; (-) strand; PAM type: YTN; PAM sequence: CTG
cacattgtgcacaagtaccc

SEQ ID NO: 196005 - DNA, 20 bp, Artificial Sequence
  Description of Artificial Sequence: Synthetic oligonucleotide
  Target: LAMA2; (-) strand; PAM type: YTN; PAM sequence: CTA
tgtaacaaacctgcacattg

SEQ ID NO: 196006 - DNA, 20 bp, Artificial Sequence
  Description of Artificial Sequence: Synthetic oligonucleotide
  Target: LAMA2; (-) strand; PAM type: YTN; PAM sequence: TTG
acgggtgcggcaaaccaaca

SEQ ID NO: 196007 - DNA, 20 bp, Artificial Sequence
  Description of Artificial Sequence: Synthetic oligonucleotide
  Target: LAMA2; (-) strand; PAM type: YTN; PAM sequence: CTA
atgtaaatgatgagttgacg

SEQ ID NO: 196008 - DNA, 20 bp, Artificial Sequence
  Description of Artificial Sequence: Synthetic oligonucleotide
  Target: LAMA2; (-) strand; PAM type: YTN; PAM sequence: TTA
ggataaatacctaatgtaaa

SEQ ID NO: 196009 - DNA, 20 bp, Artificial Sequence
  Description of Artificial Sequence: Synthetic oligonucleotide
  Target: LAMA2; (-) strand; PAM type: YTN; PAM sequence: CTG
ggggagggatagcattagga

SEQ ID NO: 196010 - DNA, 20 bp, Artificial Sequence
  Description of Artificial Sequence: Synthetic oligonucleotide
  Target: LAMA2; (-) strand; PAM type: YTN; PAM sequence: TTG
gggggggtgtggggctgggg

SEQ ID NO: 196011 - DNA, 20 bp, Artificial Sequence
  Description of Artificial Sequence: Synthetic oligonucleotide
  Target: LAMA2; (-) strand; PAM type: YTN; PAM sequence: CTG
ttggggggggtgtggggctg

SEQ ID NO: 196012 - DNA, 20 bp, Artificial Sequence
  Description of Artificial Sequence: Synthetic oligonucleotide
  Target: LAMA2; (-) strand; PAM type: YTN; PAM sequence: TTG
gggtctgttggggggggtgt

SEQ ID NO: 196013 - DNA, 20 bp, Artificial Sequence
  Description of Artificial Sequence: Synthetic oligonucleotide
  Target: LAMA2; (-) strand; PAM type: YTN; PAM sequence: TTA
cacattggggtctgttgggg

SEQ ID NO: 196014 - DNA, 20 bp, Artificial Sequence
  Description of Artificial Sequence: Synthetic oligonucleotide
  Target: LAMA2; (-) strand; PAM type: YTN; PAM sequence: TTG
aacaatgagaacacatggac

SEQ ID NO: 196015 - DNA, 20 bp, Artificial Sequence
  Description of Artificial Sequence: Synthetic oligonucleotide
  Target: LAMA2; (-) strand; PAM type: YTN; PAM sequence: CTC
ataagtgggagttgaacaat

SEQ ID NO: 196016 - DNA, 20 bp, Artificial Sequence
  Description of Artificial Sequence: Synthetic oligonucleotide
  Target: LAMA2; (-) strand; PAM type: YTN; PAM sequence: CTC
actcataagtgggagttgaa

SEQ ID NO: 196017 - DNA, 20 bp, Artificial Sequence
  Description of Artificial Sequence: Synthetic oligonucleotide
  Target: LAMA2; (-) strand; PAM type: YTN; PAM sequence: TTC
tcactcataagtgggagttg

SEQ ID NO: 196018 - DNA, 20 bp, Artificial Sequence
  Description of Artificial Sequence: Synthetic oligonucleotide
  Target: LAMA2; (-) strand; PAM type: YTN; PAM sequence: CTC
agcaaaatatcacaaggaca

SEQ ID NO: 196019 - DNA, 20 bp, Artificial Sequence
  Description of Artificial Sequence: Synthetic oligonucleotide
  Target: LAMA2; (-) strand; PAM type: YTN; PAM sequence: TTC
tcagcaaaatatcacaagga

SEQ ID NO: 196020 - DNA, 20 bp, Artificial Sequence
  Description of Artificial Sequence: Synthetic oligonucleotide
  Target: LAMA2; (-) strand; PAM type: YTN; PAM sequence: CTG
gaaaccaacattctcagcaa

SEQ ID NO: 196021 - DNA, 20 bp, Artificial Sequence
  Description of Artificial Sequence: Synthetic oligonucleotide
  Target: LAMA2; (-) strand; PAM type: YTN; PAM sequence: TTG
cagggacatggatgaagctg

SEQ ID NO: 196022 - DNA, 20 bp, Artificial Sequence
  Description of Artificial Sequence: Synthetic oligonucleotide
  Target: LAMA2; (-) strand; PAM type: YTN; PAM sequence: TTT
gcagggacatggatgaagct

SEQ ID NO: 196023 - DNA, 20 bp, Artificial Sequence
  Description of Artificial Sequence: Synthetic oligonucleotide
  Target: LAMA2; (-) strand; PAM type: YTN; PAM sequence: CTT
tgcagggacatggatgaagc

SEQ ID NO: 196024 - DNA, 20 bp, Artificial Sequence
  Description of Artificial Sequence: Synthetic oligonucleotide
  Target: LAMA2; (-) strand; PAM type: YTN; PAM sequence: TTA
tgtcctttgcagggacatgg

SEQ ID NO: 196025 - DNA, 20 bp, Artificial Sequence
  Description of Artificial Sequence: Synthetic oligonucleotide
  Target: LAMA2; (-) strand; PAM type: YTN; PAM sequence: TTT
atgtcctttgcagggacatg

SEQ ID NO: 196026 - DNA, 20 bp, Artificial Sequence
  Description of Artificial Sequence: Synthetic oligonucleotide
  Target: LAMA2; (-) strand; PAM type: YTN; PAM sequence: CTA
cagagtcataaaaaagatga

SEQ ID NO: 196027 - DNA, 20 bp, Artificial Sequence
  Description of Artificial Sequence: Synthetic oligonucleotide
  Target: LAMA2; (-) strand; PAM type: YTN; PAM sequence: CTG
gataaagaaaatgtggcaca

SEQ ID NO: 196028 - DNA, 20 bp, Artificial Sequence
  Description of Artificial Sequence: Synthetic oligonucleotide
  Target: LAMA2; (-) strand; PAM type: YTN; PAM sequence: TTG
gaaccaacccaaatgtccat

SEQ ID NO: 196029 - DNA, 20 bp, Artificial Sequence
  Description of Artificial Sequence: Synthetic oligonucleotide
  Target: LAMA2; (-) strand; PAM type: YTN; PAM sequence: CTT
ggaaccaacccaaatgtcca

SEQ ID NO: 196030 - DNA, 20 bp, Artificial Sequence
  Description of Artificial Sequence: Synthetic oligonucleotide
  Target: LAMA2; (-) strand; PAM type: YTN; PAM sequence: TTC
acaatagcaaagacttggaa

SEQ ID NO: 196031 - DNA, 20 bp, Artificial Sequence
  Description of Artificial Sequence: Synthetic oligonucleotide
  Target: LAMA2; (-) strand; PAM type: YTN; PAM sequence: CTA
ttcacaatagcaaagacttg

SEQ ID NO: 196032 - DNA, 20 bp, Artificial Sequence
  Description of Artificial Sequence: Synthetic oligonucleotide
  Target: LAMA2; (-) strand; PAM type: YTN; PAM sequence: CTG
cagcactattcacaatagca

SEQ ID NO: 196033 - DNA, 20 bp, Artificial Sequence
  Description of Artificial Sequence: Synthetic oligonucleotide
  Target: LAMA2; (-) strand; PAM type: YTN; PAM sequence: TTA
ctgcagcactattcacaata

SEQ ID NO: 196034 - DNA, 20 bp, Artificial Sequence
  Description of Artificial Sequence: Synthetic oligonucleotide
  Target: LAMA2; (-) strand; PAM type: YTN; PAM sequence: TTT
actgcagcactattcacaat

SEQ ID NO: 196035 - DNA, 20 bp, Artificial Sequence
  Description of Artificial Sequence: Synthetic oligonucleotide
  Target: LAMA2; (-) strand; PAM type: YTN; PAM sequence: CTA
taaagacacatgtacatgta

SEQ ID NO: 196036 - DNA, 20 bp, Artificial Sequence
  Description of Artificial Sequence: Synthetic oligonucleotide
  Target: LAMA2; (-) strand; PAM type: YTN; PAM sequence: CTA
ctataaagacacatgtacat

SEQ ID NO: 196037 - DNA, 20 bp, Artificial Sequence
  Description of Artificial Sequence: Synthetic oligonucleotide
  Target: LAMA2; (-) strand; PAM type: YTN; PAM sequence: TTA
taaatcatgctactataaag

SEQ ID NO: 196038 - DNA, 20 bp, Artificial Sequence
  Description of Artificial Sequence: Synthetic oligonucleotide
  Target: LAMA2; (-) strand; PAM type: YTN; PAM sequence: TTA
agtacccaaaggattataaa

SEQ ID NO: 196039 - DNA, 20 bp, Artificial Sequence
  Description of Artificial Sequence: Synthetic oligonucleotide
  Target: LAMA2; (-) strand; PAM type: YTN; PAM sequence: TTA
tccaaaaaagaattaagtac

SEQ ID NO: 196040 - DNA, 20 bp, Artificial Sequence
  Description of Artificial Sequence: Synthetic oligonucleotide
  Target: LAMA2; (-) strand; PAM type: YTN; PAM sequence: TTA
acaacaaattatccaaaaaa

SEQ ID NO: 196041 - DNA, 20 bp, Artificial Sequence
  Description of Artificial Sequence: Synthetic oligonucleotide
  Target: LAMA2; (-) strand; PAM type: YTN; PAM sequence: CTA
tattaacaacaaattatcca

SEQ ID NO: 196042 - DNA, 20 bp, Artificial Sequence
  Description of Artificial Sequence: Synthetic oligonucleotide
  Target: LAMA2; (-) strand; PAM type: YTN; PAM sequence: TTG
caggatatgaaatcaacata

SEQ ID NO: 196043 - DNA, 20 bp, Artificial Sequence
  Description of Artificial Sequence: Synthetic oligonucleotide
  Target: LAMA2; (-) strand; PAM type: YTN; PAM sequence: TTC
aataaagttgcaggatatga

SEQ ID NO: 196044 - DNA, 20 bp, Artificial Sequence
  Description of Artificial Sequence: Synthetic oligonucleotide
  Target: LAMA2; (-) strand; PAM type: YTN; PAM sequence: CTA
ataaagaaattcaataaagt

SEQ ID NO: 196045 - DNA, 20 bp, Artificial Sequence
  Description of Artificial Sequence: Synthetic oligonucleotide
  Target: LAMA2; (-) strand; PAM type: YTN; PAM sequence: TTA
gaagctaataaagaaattca

SEQ ID NO: 196046 - DNA, 20 bp, Artificial Sequence
  Description of Artificial Sequence: Synthetic oligonucleotide
  Target: LAMA2; (-) strand; PAM type: YTN; PAM sequence: CTA
ttagaagctaataaagaaat

SEQ ID NO: 196047 - DNA, 20 bp, Artificial Sequence
  Description of Artificial Sequence: Synthetic oligonucleotide
  Target: LAMA2; (-) strand; PAM type: YTN; PAM sequence: CTA
aagtgctattagaagctaat

SEQ ID NO: 196048 - DNA, 20 bp, Artificial Sequence
  Description of Artificial Sequence: Synthetic oligonucleotide
  Target: LAMA2; (-) strand; PAM type: YTN; PAM sequence: CTC
catctaaagtgctattagaa

SEQ ID NO: 196049 - DNA, 20 bp, Artificial Sequence
  Description of Artificial Sequence: Synthetic oligonucleotide
  Target: LAMA2; (-) strand; PAM type: YTN; PAM sequence: CTA
aactccatctaaagtgctat

SEQ ID NO: 196050 - DNA, 20 bp, Artificial Sequence
  Description of Artificial Sequence: Synthetic oligonucleotide
  Target: LAMA2; (-) strand; PAM type: YTN; PAM sequence: TTA
tatgaaggaaaccctaaact

SEQ ID NO: 196051 - DNA, 20 bp, Artificial Sequence
  Description of Artificial Sequence: Synthetic oligonucleotide
  Target: LAMA2; (-) strand; PAM type: YTN; PAM sequence: CTT
atatgaaggaaaccctaaac

SEQ ID NO: 196052 - DNA, 20 bp, Artificial Sequence
  Description of Artificial Sequence: Synthetic oligonucleotide
  Target: LAMA2; (-) strand; PAM type: YTN; PAM sequence: TTG
cagatgacatgatcttatat

SEQ ID NO: 196053 - DNA, 20 bp, Artificial Sequence
  Description of Artificial Sequence: Synthetic oligonucleotide
  Target: LAMA2; (-) strand; PAM type: YTN; PAM sequence: TTT
gcagatgacatgatcttata

SEQ ID NO: 196054 - DNA, 20 bp, Artificial Sequence
  Description of Artificial Sequence: Synthetic oligonucleotide
  Target: LAMA2; (-) strand; PAM type: YTN; PAM sequence: CTG
tttgcagatgacatgatctt

SEQ ID NO: 196055 - DNA, 20 bp, Artificial Sequence
  Description of Artificial Sequence: Synthetic oligonucleotide
  Target: LAMA2; (-) strand; PAM type: YTN; PAM sequence: CTC
tgtttgcagatgacatgatc

SEQ ID NO: 196056 - DNA, 20 bp, Artificial Sequence
  Description of Artificial Sequence: Synthetic oligonucleotide
  Target: LAMA2; (-) strand; PAM type: YTN; PAM sequence: TTG
tctctgtttgcagatgacat

SEQ ID NO: 196057 - DNA, 20 bp, Artificial Sequence
  Description of Artificial Sequence: Synthetic oligonucleotide
  Target: LAMA2; (-) strand; PAM type: YTN; PAM sequence: TTG
gaaaggaagaaggtaaattg

SEQ ID NO: 196058 - DNA, 20 bp, Artificial Sequence
  Description of Artificial Sequence: Synthetic oligonucleotide
  Target: LAMA2; (-) strand; PAM type: YTN; PAM sequence: CTA
aattggaaaggaagaaggta

SEQ ID NO: 196059 - DNA, 20 bp, Artificial Sequence
  Description of Artificial Sequence: Synthetic oligonucleotide
  Target: LAMA2; (-) strand; PAM type: YTN; PAM sequence: TTC
atctaaattggaaaggaaga

SEQ ID NO: 196060 - DNA, 20 bp, Artificial Sequence
  Description of Artificial Sequence: Synthetic oligonucleotide
  Target: LAMA2; (-) strand; PAM type: YTN; PAM sequence: TTC
ggcaagaaaaagatataaca

SEQ ID NO: 196061 - DNA, 20 bp, Artificial Sequence
  Description of Artificial Sequence: Synthetic oligonucleotide
  Target: LAMA2; (-) strand; PAM type: YTN; PAM sequence: CTA
gtcagagcaattcggcaaga

SEQ ID NO: 196062 - DNA, 20 bp, Artificial Sequence
  Description of Artificial Sequence: Synthetic oligonucleotide
  Target: LAMA2; (-) strand; PAM type: YTN; PAM sequence: CTA
tgagtcctagtcagagcaat

SEQ ID NO: 196063 - DNA, 20 bp, Artificial Sequence
  Description of Artificial Sequence: Synthetic oligonucleotide
  Target: LAMA2; (-) strand; PAM type: YTN; PAM sequence: CTC
ccaatcaacatagtactatg

SEQ ID NO: 196064 - DNA, 20 bp, Artificial Sequence
  Description of Artificial Sequence: Synthetic oligonucleotide
  Target: LAMA2; (-) strand; PAM type: YTN; PAM sequence: TTA
ccactcccaatcaacatagt

SEQ ID NO: 196065 - DNA, 20 bp, Artificial Sequence
  Description of Artificial Sequence: Synthetic oligonucleotide
  Target: LAMA2; (-) strand; PAM type: YTN; PAM sequence: CTT
accactcccaatcaacatag

SEQ ID NO: 196066 - DNA, 20 bp, Artificial Sequence
  Description of Artificial Sequence: Synthetic oligonucleotide
  Target: LAMA2; (-) strand; PAM type: YTN; PAM sequence: TTA
tcaggtgcccagtcttacca

SEQ ID NO: 196067 - DNA, 20 bp, Artificial Sequence
  Description of Artificial Sequence: Synthetic oligonucleotide
  Target: LAMA2; (-) strand; PAM type: YTN; PAM sequence: CTT
atcaggtgcccagtcttacc

SEQ ID NO: 196068 - DNA, 20 bp, Artificial Sequence
  Description of Artificial Sequence: Synthetic oligonucleotide
  Target: LAMA2; (-) strand; PAM type: YTN; PAM sequence: CTA
accttatcaggtgcccagtc

SEQ ID NO: 196069 - DNA, 20 bp, Artificial Sequence
  Description of Artificial Sequence: Synthetic oligonucleotide
  Target: LAMA2; (-) strand; PAM type: YTN; PAM sequence: TTG
ggtggggacataaagcctaa

SEQ ID NO: 196070 - DNA, 20 bp, Artificial Sequence
  Description of Artificial Sequence: Synthetic oligonucleotide
  Target: LAMA2; (-) strand; PAM type: YTN; PAM sequence: TTT
gggtggggacataaagccta

SEQ ID NO: 196071 - DNA, 20 bp, Artificial Sequence
  Description of Artificial Sequence: Synthetic oligonucleotide
  Target: LAMA2; (-) strand; PAM type: YTN; PAM sequence: CTG
aagatgagatttgggtgggg

SEQ ID NO: 196072 - DNA, 20 bp, Artificial Sequence
  Description of Artificial Sequence: Synthetic oligonucleotide
  Target: LAMA2; (-) strand; PAM type: YTN; PAM sequence: TTA
caactgaagatgagatttgg

SEQ ID NO: 196073 - DNA, 20 bp, Artificial Sequence
  Description of Artificial Sequence: Synthetic oligonucleotide
  Target: LAMA2; (-) strand; PAM type: YTN; PAM sequence: TTA
tggggatgatgagggttaca

SEQ ID NO: 196074 - DNA, 20 bp, Artificial Sequence
  Description of Artificial Sequence: Synthetic oligonucleotide
  Target: LAMA2; (-) strand; PAM type: YTN; PAM sequence: TTG
gggattatggggatgatgag

SEQ ID NO: 196075 - DNA, 20 bp, Artificial Sequence
  Description of Artificial Sequence: Synthetic oligonucleotide
  Target: LAMA2; (-) strand; PAM type: YTN; PAM sequence: TTT
ggggattatggggatgatga

SEQ ID NO: 196076 - DNA, 20 bp, Artificial Sequence
  Description of Artificial Sequence: Synthetic oligonucleotide
  Target: LAMA2; (-) strand; PAM type: YTN; PAM sequence: TTG
acatttggggattatgggga

SEQ ID NO: 196077 - DNA, 20 bp, Artificial Sequence
  Description of Artificial Sequence: Synthetic oligonucleotide
  Target: LAMA2; (-) strand; PAM type: YTN; PAM sequence: TTT
gacatttggggattatgggg

SEQ ID NO: 196078 - DNA, 20 bp, Artificial Sequence
  Description of Artificial Sequence: Synthetic oligonucleotide
  Target: LAMA2; (-) strand; PAM type: YTN; PAM sequence: CTT
tgacatttggggattatggg

SEQ ID NO: 196079 - DNA, 20 bp, Artificial Sequence
  Description of Artificial Sequence: Synthetic oligonucleotide
  Target: LAMA2; (-) strand; PAM type: YTN; PAM sequence: TTC
ctttgacatttggggattat

SEQ ID NO: 196080 - DNA, 20 bp, Artificial Sequence
  Description of Artificial Sequence: Synthetic oligonucleotide
  Target: LAMA2; (-) strand; PAM type: YTN; PAM sequence: TTT
cctttgacatttggggatta

SEQ ID NO: 196081 - DNA, 20 bp, Artificial Sequence
  Description of Artificial Sequence: Synthetic oligonucleotide
  Target: LAMA2; (-) strand; PAM type: YTN; PAM sequence: CTG
gtttcctttgacatttgggg

SEQ ID NO: 196082 - DNA, 20 bp, Artificial Sequence
  Description of Artificial Sequence: Synthetic oligonucleotide
  Target: LAMA2; (-) strand; PAM type: YTN; PAM sequence: TTC
atctggtttcctttgacatt

SEQ ID NO: 196083 - DNA, 20 bp, Artificial Sequence
  Description of Artificial Sequence: Synthetic oligonucleotide
  Target: LAMA2; (-) strand; PAM type: YTN; PAM sequence: CTT
catctggtttcctttgacat

SEQ ID NO: 196084 - DNA, 20 bp, Artificial Sequence
  Description of Artificial Sequence: Synthetic oligonucleotide
  Target: LAMA2; (-) strand; PAM type: YTN; PAM sequence: TTA
ccttcatctggtttcctttg

SEQ ID NO: 196085 - DNA, 20 bp, Artificial Sequence
  Description of Artificial Sequence: Synthetic oligonucleotide
  Target: LAMA2; (-) strand; PAM type: YTN; PAM sequence: TTC
aattaccttcatctggtttc

SEQ ID NO: 196086 - DNA, 20 bp, Artificial Sequence
  Description of Artificial Sequence: Synthetic oligonucleotide
  Target: LAMA2; (-) strand; PAM type: YTN; PAM sequence: CTC
catgattcaattaccttcat

SEQ ID NO: 196087 - DNA, 20 bp, Artificial Sequence
  Description of Artificial Sequence: Synthetic oligonucleotide
  Target: LAMA2; (-) strand; PAM type: YTN; PAM sequence: CTG
gcctccatgattcaattacc

SEQ ID NO: 196088 - DNA, 20 bp, Artificial Sequence
  Description of Artificial Sequence: Synthetic oligonucleotide
  Target: LAMA2; (-) strand; PAM type: YTN; PAM sequence: CTA
tcacaagaaaagcatcgggg

SEQ ID NO: 196089 - DNA, 20 bp, Artificial Sequence
  Description of Artificial Sequence: Synthetic oligonucleotide
  Target: LAMA2; (-) strand; PAM type: YTN; PAM sequence: CTC
actatcacaagaaaagcatc

SEQ ID NO: 196090 - DNA, 20 bp, Artificial Sequence
  Description of Artificial Sequence: Synthetic oligonucleotide
  Target: LAMA2; (-) strand; PAM type: YTN; PAM sequence: CTC
actcactatcacaagaaaag

SEQ ID NO: 196091 - DNA, 20 bp, Artificial Sequence
  Description of Artificial Sequence: Synthetic oligonucleotide
  Target: LAMA2; (-) strand; PAM type: YTN; PAM sequence: CTC
atgagaactcactcactatc

SEQ ID NO: 196092 - DNA, 20 bp, Artificial Sequence
  Description of Artificial Sequence: Synthetic oligonucleotide
  Target: LAMA2; (-) strand; PAM type: YTN; PAM sequence: CTA
tcagagctcatgagaactca

SEQ ID NO: 196093 - DNA, 20 bp, Artificial Sequence
  Description of Artificial Sequence: Synthetic oligonucleotide
  Target: LAMA2; (-) strand; PAM type: YTN; PAM sequence: TTA
taaaactatcagagctcatg

SEQ ID NO: 196094 - DNA, 20 bp, Artificial Sequence
  Description of Artificial Sequence: Synthetic oligonucleotide
  Target: LAMA2; (-) strand; PAM type: YTN; PAM sequence: CTT
ataaaactatcagagctcat

SEQ ID NO: 196095 - DNA, 20 bp, Artificial Sequence
  Description of Artificial Sequence: Synthetic oligonucleotide
  Target: LAMA2; (-) strand; PAM type: YTN; PAM sequence: CTC
acaaggcagcaggaagaaga

SEQ ID NO: 196096 - DNA, 20 bp, Artificial Sequence
  Description of Artificial Sequence: Synthetic oligonucleotide
  Target: LAMA2; (-) strand; PAM type: YTN; PAM sequence: TTC
ctcacaaggcagcaggaaga

SEQ ID NO: 196097 - DNA, 20 bp, Artificial Sequence
  Description of Artificial Sequence: Synthetic oligonucleotide
  Target: LAMA2; (-) strand; PAM type: YTN; PAM sequence: CTT
cctcacaaggcagcaggaag

SEQ ID NO: 196098 - DNA, 20 bp, Artificial Sequence
  Description of Artificial Sequence: Synthetic oligonucleotide
  Target: LAMA2; (-) strand; PAM type: YTN; PAM sequence: TTA
caaccgtggcagaaggccaa

SEQ ID NO: 196099 - DNA, 20 bp, Artificial Sequence
  Description of Artificial Sequence: Synthetic oligonucleotide
  Target: LAMA2; (-) strand; PAM type: YTN; PAM sequence: CTT
acaaccgtggcagaaggcca

SEQ ID NO: 196100 - DNA, 20 bp, Artificial Sequence
  Description of Artificial Sequence: Synthetic oligonucleotide
  Target: LAMA2; (-) strand; PAM type: YTN; PAM sequence: CTC
aggaagcttacaaccgtggc

SEQ ID NO: 196101 - DNA, 20 bp, Artificial Sequence
  Description of Artificial Sequence: Synthetic oligonucleotide
  Target: LAMA2; (-) strand; PAM type: YTN; PAM sequence: CTG
gggagacctcaggaagctta

SEQ ID NO: 196102 - DNA, 20 bp, Artificial Sequence
  Description of Artificial Sequence: Synthetic oligonucleotide
  Target: LAMA2; (-) strand; PAM type: YTN; PAM sequence: TTC
agcacggctggggagacctc

SEQ ID NO: 196103 - DNA, 20 bp, Artificial Sequence
  Description of Artificial Sequence: Synthetic oligonucleotide
  Target: LAMA2; (-) strand; PAM type: YTN; PAM sequence: TTG
aatcacagttcagcacggct

SEQ ID NO: 196104 - DNA, 20 bp, Artificial Sequence
  Description of Artificial Sequence: Synthetic oligonucleotide
  Target: LAMA2; (-) strand; PAM type: YTN; PAM sequence: TTA
attgaatcacagttcagcac

SEQ ID NO: 196105 - DNA, 20 bp, Artificial Sequence
  Description of Artificial Sequence: Synthetic oligonucleotide
  Target: LAMA2; (-) strand; PAM type: YTN; PAM sequence: TTT
aattgaatcacagttcagca

SEQ ID NO: 196106 - DNA, 20 bp, Artificial Sequence
  Description of Artificial Sequence: Synthetic oligonucleotide
  Target: LAMA2; (-) strand; PAM type: YTN; PAM sequence: TTT
taattgaatcacagttcagc

SEQ ID NO: 196107 - DNA, 20 bp, Artificial Sequence
  Description of Artificial Sequence: Synthetic oligonucleotide
  Target: LAMA2; (-) strand; PAM type: YTN; PAM sequence: TTA
taaaggaaaaagttttaatt

SEQ ID NO: 196108 - DNA, 20 bp, Artificial Sequence
  Description of Artificial Sequence: Synthetic oligonucleotide
  Target: LAMA2; (-) strand; PAM type: YTN; PAM sequence: TTT
ataaaggaaaaagttttaat

SEQ ID NO: 196109 - DNA, 20 bp, Artificial Sequence
  Description of Artificial Sequence: Synthetic oligonucleotide
  Target: LAMA2; (-) strand; PAM type: YTN; PAM sequence: CTG
ggtgatttataaaggaaaaa

SEQ ID NO: 196110 - DNA, 20 bp, Artificial Sequence
  Description of Artificial Sequence: Synthetic oligonucleotide
  Target: LAMA2; (-) strand; PAM type: YTN; PAM sequence: CTG
cccgaaactgggtgatttat

SEQ ID NO: 196111 - DNA, 20 bp, Artificial Sequence
  Description of Artificial Sequence: Synthetic oligonucleotide
  Target: LAMA2; (-) strand; PAM type: YTN; PAM sequence: CTA
taaagaactgcccgaaactg

SEQ ID NO: 196112 - DNA, 20 bp, Artificial Sequence
  Description of Artificial Sequence: Synthetic oligonucleotide
  Target: LAMA2; (-) strand; PAM type: YTN; PAM sequence: TTC
acaaggctataaagaactgc

SEQ ID NO: 196113 - DNA, 20 bp, Artificial Sequence
  Description of Artificial Sequence: Synthetic oligonucleotide
  Target: LAMA2; (-) strand; PAM type: YTN; PAM sequence: TTT
cacaaggctataaagaactg

SEQ ID NO: 196114 - DNA, 20 bp, Artificial Sequence
  Description of Artificial Sequence: Synthetic oligonucleotide
  Target: LAMA2; (-) strand; PAM type: YTN; PAM sequence: TTT
tcacaaggctataaagaact

SEQ ID NO: 196115 - DNA, 20 bp, Artificial Sequence
  Description of Artificial Sequence: Synthetic oligonucleotide
  Target: LAMA2; (-) strand; PAM type: YTN; PAM sequence: TTA
gtcgttttcacaaggctata

SEQ ID NO: 196116 - DNA, 20 bp, Artificial Sequence
  Description of Artificial Sequence: Synthetic oligonucleotide
  Target: LAMA2; (-) strand; PAM type: YTN; PAM sequence: CTG
tattagtcgttttcacaagg

SEQ ID NO: 196117 - DNA, 20 bp, Artificial Sequence
  Description of Artificial Sequence: Synthetic oligonucleotide
  Target: LAMA2; (-) strand; PAM type: YTN; PAM sequence: TTA
ggaataagataagggtgctg

SEQ ID NO: 196118 - DNA, 20 bp, Artificial Sequence
  Description of Artificial Sequence: Synthetic oligonucleotide
  Target: LAMA2; (-) strand; PAM type: YTN; PAM sequence: CTG
agattaggaataagataagg

SEQ ID NO: 196119 - DNA, 20 bp, Artificial Sequence
  Description of Artificial Sequence: Synthetic oligonucleotide
  Target: LAMA2; (-) strand; PAM type: YTN; PAM sequence: TTC
tgagattaggaataagataa

SEQ ID NO: 196120 - DNA, 20 bp, Artificial Sequence
  Description of Artificial Sequence: Synthetic oligonucleotide
  Target: LAMA2; (-) strand; PAM type: YTN; PAM sequence: TTT
ctgagattaggaataagata

SEQ ID NO: 196121 - DNA, 20 bp, Artificial Sequence
  Description of Artificial Sequence: Synthetic oligonucleotide
  Target: LAMA2; (-) strand; PAM type: YTN; PAM sequence: TTT
tctgagattaggaataagat

SEQ ID NO: 196122 - DNA, 20 bp, Artificial Sequence
  Description of Artificial Sequence: Synthetic oligonucleotide
  Target: LAMA2; (-) strand; PAM type: YTN; PAM sequence: CTT
ttctgagattaggaataaga

SEQ ID NO: 196123 - DNA, 20 bp, Artificial Sequence
  Description of Artificial Sequence: Synthetic oligonucleotide
  Target: LAMA2; (-) strand; PAM type: YTN; PAM sequence: TTG
aaagcttttctgagattagg

SEQ ID NO: 196124 - DNA, 20 bp, Artificial Sequence
  Description of Artificial Sequence: Synthetic oligonucleotide
  Target: LAMA2; (-) strand; PAM type: YTN; PAM sequence: CTG
aatagtgaaaagttgaaagc

SEQ ID NO: 196125 - DNA, 20 bp, Artificial Sequence
  Description of Artificial Sequence: Synthetic oligonucleotide
  Target: LAMA2; (-) strand; PAM type: YTN; PAM sequence: CTG
atgtcatactgaatagtgaa

SEQ ID NO: 196126 - DNA, 20 bp, Artificial Sequence
  Description of Artificial Sequence: Synthetic oligonucleotide
  Target: LAMA2; (-) strand; PAM type: YTN; PAM sequence: CTA
cagctgatgtcatactgaat

SEQ ID NO: 196127 - DNA, 20 bp, Artificial Sequence
  Description of Artificial Sequence: Synthetic oligonucleotide
  Target: LAMA2; (-) strand; PAM type: YTN; PAM sequence: CTG
aacataataaaggacatata

SEQ ID NO: 196128 - DNA, 20 bp, Artificial Sequence
  Description of Artificial Sequence: Synthetic oligonucleotide
  Target: LAMA2; (-) strand; PAM type: YTN; PAM sequence: TTA
ggtatagaaaaatgtatctg

SEQ ID NO: 196129 - DNA, 20 bp, Artificial Sequence
  Description of Artificial Sequence: Synthetic oligonucleotide
  Target: LAMA2; (-) strand; PAM type: YTN; PAM sequence: CTC
ccaacaaattaggtatagaa

SEQ ID NO: 196130 - DNA, 20 bp, Artificial Sequence
  Description of Artificial Sequence: Synthetic oligonucleotide
  Target: LAMA2; (-) strand; PAM type: YTN; PAM sequence: CTG
tcatgataaaagctcccaac

SEQ ID NO: 196131 - DNA, 20 bp, Artificial Sequence
  Description of Artificial Sequence: Synthetic oligonucleotide
  Target: LAMA2; (-) strand; PAM type: YTN; PAM sequence: TTC
aacatcctgtcatgataaaa

SEQ ID NO: 196132 - DNA, 20 bp, Artificial Sequence
  Description of Artificial Sequence: Synthetic oligonucleotide
  Target: LAMA2; (-) strand; PAM type: YTN; PAM sequence: TTG
aaaaaattcaacatcctgtc

SEQ ID NO: 196133 - DNA, 20 bp, Artificial Sequence
  Description of Artificial Sequence: Synthetic oligonucleotide
  Target: LAMA2; (-) strand; PAM type: YTN; PAM sequence: TTT
gaaaaaattcaacatcctgt

SEQ ID NO: 196134 - DNA, 20 bp, Artificial Sequence
  Description of Artificial Sequence: Synthetic oligonucleotide
  Target: LAMA2; (-) strand; PAM type: YTN; PAM sequence: CTC
agatgtagaaaaagcatttg

SEQ ID NO: 196135 - DNA, 20 bp, Artificial Sequence
  Description of Artificial Sequence: Synthetic oligonucleotide
  Target: LAMA2; (-) strand; PAM type: YTN; PAM sequence: TTA
tcatctcagatgtagaaaaa

SEQ ID NO: 196136 - DNA, 20 bp, Artificial Sequence
  Description of Artificial Sequence: Synthetic oligonucleotide
  Target: LAMA2; (-) strand; PAM type: YTN; PAM sequence: TTC
acagaataaagaataaaaat

SEQ ID NO: 196137 - DNA, 20 bp, Artificial Sequence
  Description of Artificial Sequence: Synthetic oligonucleotide
  Target: LAMA2; (-) strand; PAM type: YTN; PAM sequence: TTT
cacagaataaagaataaaaa

SEQ ID NO: 196138 - DNA, 20 bp, Artificial Sequence
  Description of Artificial Sequence: Synthetic oligonucleotide
  Target: LAMA2; (-) strand; PAM type: YTN; PAM sequence: CTT
tcacagaataaagaataaaa

SEQ ID NO: 196139 - DNA, 20 bp, Artificial Sequence
  Description of Artificial Sequence: Synthetic oligonucleotide
  Target: LAMA2; (-) strand; PAM type: YTN; PAM sequence: CTG
tataccactttcacagaata

SEQ ID NO: 196140 - DNA, 20 bp, Artificial Sequence
  Description of Artificial Sequence: Synthetic oligonucleotide
  Target: LAMA2; (-) strand; PAM type: YTN; PAM sequence: CTA
ctgtataccactttcacaga

SEQ ID NO: 196141 - DNA, 20 bp, Artificial Sequence
  Description of Artificial Sequence: Synthetic oligonucleotide
  Target: LAMA2; (-) strand; PAM type: YTN; PAM sequence: CTG
gaatgtatcccccatgcata

SEQ ID NO: 196142 - DNA, 20 bp, Artificial Sequence
  Description of Artificial Sequence: Synthetic oligonucleotide
  Target: LAMA2; (-) strand; PAM type: YTN; PAM sequence: CTG
ggggtcctggaatgtatccc

SEQ ID NO: 196143 - DNA, 20 bp, Artificial Sequence
  Description of Artificial Sequence: Synthetic oligonucleotide
  Target: LAMA2; (-) strand; PAM type: YTN; PAM sequence: CTC
tgggggtcctggaatgtatc

SEQ ID NO: 196144 - DNA, 20 bp, Artificial Sequence
  Description of Artificial Sequence: Synthetic oligonucleotide
  Target: LAMA2; (-) strand; PAM type: YTN; PAM sequence: TTC
agacatactctgggggtcct

SEQ ID NO: 196145 - DNA, 20 bp, Artificial Sequence
  Description of Artificial Sequence: Synthetic oligonucleotide
  Target: LAMA2; (-) strand; PAM type: YTN; PAM sequence: TTT
cagacatactctgggggtcc

SEQ ID NO: 196146 - DNA, 20 bp, Artificial Sequence
  Description of Artificial Sequence: Synthetic oligonucleotide
  Target: LAMA2; (-) strand; PAM type: YTN; PAM sequence: CTG
cagtttcagacatactctgg

SEQ ID NO: 196147 - DNA, 20 bp, Artificial Sequence
  Description of Artificial Sequence: Synthetic oligonucleotide
  Target: LAMA2; (-) strand; PAM type: YTN; PAM sequence: CTA
tatgtaggtgtcagtacaat

SEQ ID NO: 196148 - DNA, 20 bp, Artificial Sequence
  Description of Artificial Sequence: Synthetic oligonucleotide
  Target: LAMA2; (-) strand; PAM type: YTN; PAM sequence: TTC
ataggtatatacatagaata

SEQ ID NO: 196149 - DNA, 20 bp, Artificial Sequence
  Description of Artificial Sequence: Synthetic oligonucleotide
  Target: LAMA2; (-) strand; PAM type: YTN; PAM sequence: TTT
cataggtatatacatagaat

SEQ ID NO: 196150 - DNA, 20 bp, Artificial Sequence
  Description of Artificial Sequence: Synthetic oligonucleotide
  Target: LAMA2; (-) strand; PAM type: YTN; PAM sequence: TTT
tcataggtatatacatagaa

SEQ ID NO: 196151 - DNA, 20 bp, Artificial Sequence
  Description of Artificial Sequence: Synthetic oligonucleotide
  Target: LAMA2; (-) strand; PAM type: YTN; PAM sequence: TTT
ttcataggtatatacataga

SEQ ID NO: 196152 - DNA, 20 bp, Artificial Sequence
  Description of Artificial Sequence: Synthetic oligonucleotide
  Target: LAMA2; (-) strand; PAM type: YTN; PAM sequence: CTT
tttcataggtatatacatag

SEQ ID NO: 196153 - DNA, 20 bp, Artificial Sequence
  Description of Artificial Sequence: Synthetic oligonucleotide
  Target: LAMA2; (-) strand; PAM type: YTN; PAM sequence: TTA
aactttttcataggtatata

SEQ ID NO: 196154 - DNA, 20 bp, Artificial Sequence
  Description of Artificial Sequence: Synthetic oligonucleotide
  Target: LAMA2; (-) strand; PAM type: YTN; PAM sequence: CTA
acataaattaaactttttca

SEQ ID NO: 196155 - DNA, 20 bp, Artificial Sequence
  Description of Artificial Sequence: Synthetic oligonucleotide
  Target: LAMA2; (-) strand; PAM type: YTN; PAM sequence: CTG
tgcctaacataaattaaact

SEQ ID NO: 196156 - DNA, 20 bp, Artificial Sequence
  Description of Artificial Sequence: Synthetic oligonucleotide
  Target: LAMA2; (-) strand; PAM type: YTN; PAM sequence: TTG
ctgtgcctaacataaattaa

SEQ ID NO: 196157 - DNA, 20 bp, Artificial Sequence
  Description of Artificial Sequence: Synthetic oligonucleotide
  Target: LAMA2; (-) strand; PAM type: YTN; PAM sequence: CTT
gctgtgcctaacataaatta

SEQ ID NO: 196158 - DNA, 20 bp, Artificial Sequence
  Description of Artificial Sequence: Synthetic oligonucleotide
  Target: LAMA2; (-) strand; PAM type: YTN; PAM sequence: CTC
ttgctgtgcctaacataaat

SEQ ID NO: 196159 - DNA, 20 bp, Artificial Sequence
  Description of Artificial Sequence: Synthetic oligonucleotide
  Target: LAMA2; (-) strand; PAM type: YTN; PAM sequence: TTA
atctcttgctgtgcctaaca

SEQ ID NO: 196160 - DNA, 20 bp, Artificial Sequence
  Description of Artificial Sequence: Synthetic oligonucleotide
  Target: LAMA2; (-) strand; PAM type: YTN; PAM sequence: TTG
ttaatctcttgctgtgccta

SEQ ID NO: 196161 - DNA, 20 bp, Artificial Sequence
  Description of Artificial Sequence: Synthetic oligonucleotide
  Target: LAMA2; (-) strand; PAM type: YTN; PAM sequence: TTG
ttgttaatctcttgctgtgc

SEQ ID NO: 196162 - DNA, 20 bp, Artificial Sequence
  Description of Artificial Sequence: Synthetic oligonucleotide
  Target: LAMA2; (-) strand; PAM type: YTN; PAM sequence: CTA
ttgttgttaatctcttgctg

SEQ ID NO: 196163 - DNA, 20 bp, Artificial Sequence
  Description of Artificial Sequence: Synthetic oligonucleotide
  Target: LAMA2; (-) strand; PAM type: YTN; PAM sequence: CTC
tattgttgttaatctcttgc

SEQ ID NO: 196164 - DNA, 20 bp, Artificial Sequence
  Description of Artificial Sequence: Synthetic oligonucleotide
  Target: LAMA2; (-) strand; PAM type: YTN; PAM sequence: TTG
ctctattgttgttaatctct

SEQ ID NO: 196165 - DNA, 20 bp, Artificial Sequence
  Description of Artificial Sequence: Synthetic oligonucleotide
  Target: LAMA2; (-) strand; PAM type: YTN; PAM sequence: TTA
taattgctctattgttgtta

SEQ ID NO: 196166 - DNA, 20 bp, Artificial Sequence
  Description of Artificial Sequence: Synthetic oligonucleotide
  Target: LAMA2; (-) strand; PAM type: YTN; PAM sequence: TTG
ttataattgctctattgttg

SEQ ID NO: 196167 - DNA, 20 bp, Artificial Sequence
  Description of Artificial Sequence: Synthetic oligonucleotide
  Target: LAMA2; (-) strand; PAM type: YTN; PAM sequence: TTA
tagtaaattgttataattgc

SEQ ID NO: 196168 - DNA, 20 bp, Artificial Sequence
  Description of Artificial Sequence: Synthetic oligonucleotide
  Target: LAMA2; (-) strand; PAM type: YTN; PAM sequence: TTA
ttatagtaaattgttataat

SEQ ID NO: 196169 - DNA, 20 bp, Artificial Sequence
  Description of Artificial Sequence: Synthetic oligonucleotide
  Target: LAMA2; (-) strand; PAM type: YTN; PAM sequence: CTT
attatagtaaattgttataa

SEQ ID NO: 196170 - DNA, 20 bp, Artificial Sequence
  Description of Artificial Sequence: Synthetic oligonucleotide
  Target: LAMA2; (-) strand; PAM type: YTN; PAM sequence: CTC
ttattatagtaaattgttat

SEQ ID NO: 196171 - DNA, 20 bp, Artificial Sequence
  Description of Artificial Sequence: Synthetic oligonucleotide
  Target: LAMA2; (-) strand; PAM type: YTN; PAM sequence: TTC
acataactcttattatagta

SEQ ID NO: 196172 - DNA, 20 bp, Artificial Sequence
  Description of Artificial Sequence: Synthetic oligonucleotide
  Target: LAMA2; (-) strand; PAM type: YTN; PAM sequence: TTG
agggggagtgagagagacaa

SEQ ID NO: 196173 - DNA, 20 bp, Artificial Sequence
  Description of Artificial Sequence: Synthetic oligonucleotide
  Target: LAMA2; (-) strand; PAM type: YTN; PAM sequence: TTT
gagggggagtgagagagaca

SEQ ID NO: 196174 - DNA, 20 bp, Artificial Sequence
  Description of Artificial Sequence: Synthetic oligonucleotide
  Target: LAMA2; (-) strand; PAM type: YTN; PAM sequence: TTT
tgagggggagtgagagagac

SEQ ID NO: 196175 - DNA, 20 bp, Artificial Sequence
  Description of Artificial Sequence: Synthetic oligonucleotide
  Target: LAMA2; (-) strand; PAM type: YTN; PAM sequence: CTC
acatcatcacaaggagaaag

SEQ ID NO: 196176 - DNA, 20 bp, Artificial Sequence
  Description of Artificial Sequence: Synthetic oligonucleotide
  Target: LAMA2; (-) strand; PAM type: YTN; PAM sequence: TTA
tcatctcacatcatcacaag

SEQ ID NO: 196177 - DNA, 20 bp, Artificial Sequence
  Description of Artificial Sequence: Synthetic oligonucleotide
  Target: LAMA2; (-) strand; PAM type: YTN; PAM sequence: TTT
atcatctcacatcatcacaa

SEQ ID NO: 196178 - DNA, 20 bp, Artificial Sequence
  Description of Artificial Sequence: Synthetic oligonucleotide
  Target: LAMA2; (-) strand; PAM type: YTN; PAM sequence: TTT
tatcatctcacatcatcaca

SEQ ID NO: 196179 - DNA, 20 bp, Artificial Sequence
  Description of Artificial Sequence: Synthetic oligonucleotide
  Target: LAMA2; (-) strand; PAM type: YTN; PAM sequence: CTT
ttatcatctcacatcatcac

SEQ ID NO: 196180 - DNA, 20 bp, Artificial Sequence
  Description of Artificial Sequence: Synthetic oligonucleotide
  Target: LAMA2; (-) strand; PAM type: YTN; PAM sequence: CTA
atcatggtggccttttatca

SEQ ID NO: 196181 - DNA, 20 bp, Artificial Sequence
  Description of Artificial Sequence: Synthetic oligonucleotide
  Target: LAMA2; (-) strand; PAM type: YTN; PAM sequence: TTC
atctaatcatggtggccttt

SEQ ID NO: 196182 - DNA, 20 bp, Artificial Sequence
  Description of Artificial Sequence: Synthetic oligonucleotide
  Target: LAMA2; (-) strand; PAM type: YTN; PAM sequence: TTT
catctaatcatggtggcctt

SEQ ID NO: 196183 - DNA, 20 bp, Artificial Sequence
  Description of Artificial Sequence: Synthetic oligonucleotide
  Target: LAMA2; (-) strand; PAM type: YTN; PAM sequence: TTC
accatatttcatctaatcat

SEQ ID NO: 196184 - DNA, 20 bp, Artificial Sequence
  Description of Artificial Sequence: Synthetic oligonucleotide
  Target: LAMA2; (-) strand; PAM type: YTN; PAM sequence: CTA
tgtcgttcaccatatttcat

SEQ ID NO: 196185 - DNA, 20 bp, Artificial Sequence
  Description of Artificial Sequence: Synthetic oligonucleotide
  Target: LAMA2; (-) strand; PAM type: YTN; PAM sequence: TTA
caatgcctatgtcgttcacc

SEQ ID NO: 196186 - DNA, 20 bp, Artificial Sequence
  Description of Artificial Sequence: Synthetic oligonucleotide
  Target: LAMA2; (-) strand; PAM type: YTN; PAM sequence: TTA
tgttacaatgcctatgtcgt

SEQ ID NO: 196187 - DNA, 20 bp, Artificial Sequence
  Description of Artificial Sequence: Synthetic oligonucleotide
  Target: LAMA2; (-) strand; PAM type: YTN; PAM sequence: TTT
atgttacaatgcctatgtcg

SEQ ID NO: 196188 - DNA, 20 bp, Artificial Sequence
  Description of Artificial Sequence: Synthetic oligonucleotide
  Target: LAMA2; (-) strand; PAM type: YTN; PAM sequence: CTT
tatgttacaatgcctatgtc

SEQ ID NO: 196189 - DNA, 20 bp, Artificial Sequence
  Description of Artificial Sequence: Synthetic oligonucleotide
  Target: LAMA2; (-) strand; PAM type: YTN; PAM sequence: CTA
actttatgttacaatgccta

SEQ ID NO: 196190 - DNA, 20 bp, Artificial Sequence
  Description of Artificial Sequence: Synthetic oligonucleotide
  Target: LAMA2; (-) strand; PAM type: YTN; PAM sequence: CTG
atgcatcatcagaaaatcaa

SEQ ID NO: 196191 - DNA, 20 bp, Artificial Sequence
  Description of Artificial Sequence: Synthetic oligonucleotide
  Target: LAMA2; (-) strand; PAM type: YTN; PAM sequence: TTC
tgatgcatcatcagaaaatc

SEQ ID NO: 196192 - DNA, 20 bp, Artificial Sequence
  Description of Artificial Sequence: Synthetic oligonucleotide
  Target: LAMA2; (-) strand; PAM type: YTN; PAM sequence: CTT
ctgatgcatcatcagaaaat

SEQ ID NO: 196193 - DNA, 20 bp, Artificial Sequence
  Description of Artificial Sequence: Synthetic oligonucleotide
  Target: LAMA2; (-) strand; PAM type: YTN; PAM sequence: TTC
cttctgatgcatcatcagaa

SEQ ID NO: 196194 - DNA, 20 bp, Artificial Sequence
  Description of Artificial Sequence: Synthetic oligonucleotide
  Target: LAMA2; (-) strand; PAM type: YTN; PAM sequence: CTT
ccttctgatgcatcatcaga

SEQ ID NO: 196195 - DNA, 20 bp, Artificial Sequence
  Description of Artificial Sequence: Synthetic oligonucleotide
  Target: LAMA2; (-) strand; PAM type: YTN; PAM sequence: CTC
aaagcagatggtcttccttc

SEQ ID NO: 196196 - DNA, 20 bp, Artificial Sequence
  Description of Artificial Sequence: Synthetic oligonucleotide
  Target: LAMA2; (-) strand; PAM type: YTN; PAM sequence: CTC
aataatcaagggtcgctcaa

SEQ ID NO: 196197 - DNA, 20 bp, Artificial Sequence
  Description of Artificial Sequence: Synthetic oligonucleotide
  Target: LAMA2; (-) strand; PAM type: YTN; PAM sequence: TTG
tcatagctcaataatcaagg

SEQ ID NO: 196198 - DNA, 20 bp, Artificial Sequence
  Description of Artificial Sequence: Synthetic oligonucleotide
  Target: LAMA2; (-) strand; PAM type: YTN; PAM sequence: CTG
gcatccaaccatcaacattg

SEQ ID NO: 196199 - DNA, 20 bp, Artificial Sequence
  Description of Artificial Sequence: Synthetic oligonucleotide
  Target: LAMA2; (-) strand; PAM type: YTN; PAM sequence: TTG
atatcatatgcacctggcat

SEQ ID NO: 196200 - DNA, 20 bp, Artificial Sequence
  Description of Artificial Sequence: Synthetic oligonucleotide
  Target: LAMA2; (-) strand; PAM type: YTN; PAM sequence: TTG
gacattgatatcatatgcac

SEQ ID NO: 196201 - DNA, 20 bp, Artificial Sequence
  Description of Artificial Sequence: Synthetic oligonucleotide
  Target: LAMA2; (-) strand; PAM type: YTN; PAM sequence: CTG
ttggacattgatatcatatg

SEQ ID NO: 196202 - DNA, 20 bp, Artificial Sequence
  Description of Artificial Sequence: Synthetic oligonucleotide
  Target: LAMA2; (-) strand; PAM type: YTN; PAM sequence: CTG
tatcacaaccgacctgttgg

SEQ ID NO: 196203 - DNA, 20 bp, Artificial Sequence
  Description of Artificial Sequence: Synthetic oligonucleotide
  Target: LAMA2; (-) strand; PAM type: YTN; PAM sequence: CTA
gggtatccaaactgtatcac

SEQ ID NO: 196204 - DNA, 20 bp, Artificial Sequence
  Description of Artificial Sequence: Synthetic oligonucleotide
  Target: LAMA2; (-) strand; PAM type: YTN; PAM sequence: TTC
tagggtatccaaactgtatc

SEQ ID NO: 196205 - DNA, 20 bp, Artificial Sequence
  Description of Artificial Sequence: Synthetic oligonucleotide
  Target: LAMA2; (-) strand; PAM type: YTN; PAM sequence: TTT
ctagggtatccaaactgtat

SEQ ID NO: 196206 - DNA, 20 bp, Artificial Sequence
  Description of Artificial Sequence: Synthetic oligonucleotide
  Target: LAMA2; (-) strand; PAM type: YTN; PAM sequence: TTT
tctagggtatccaaactgta

SEQ ID NO: 196207 - DNA, 20 bp, Artificial Sequence
  Description of Artificial Sequence: Synthetic oligonucleotide
  Target: LAMA2; (-) strand; PAM type: YTN; PAM sequence: TTT
ttctagggtatccaaactgt

SEQ ID NO: 196208 - DNA, 20 bp, Artificial Sequence
  Description of Artificial Sequence: Synthetic oligonucleotide
  Target: LAMA2; (-) strand; PAM type: YTN; PAM sequence: CTT
tttctagggtatccaaactg

SEQ ID NO: 196209 - DNA, 20 bp, Artificial Sequence
  Description of Artificial Sequence: Synthetic oligonucleotide
  Target: LAMA2; (-) strand; PAM type: YTN; PAM sequence: TTC
ctttttctagggtatccaaa

SEQ ID NO: 196210 - DNA, 20 bp, Artificial Sequence
  Description of Artificial Sequence: Synthetic oligonucleotide
  Target: LAMA2; (-) strand; PAM type: YTN; PAM sequence: CTC
ccacccaggagatgaaccat

SEQ ID NO: 196211 - DNA, 20 bp, Artificial Sequence
  Description of Artificial Sequence: Synthetic oligonucleotide
  Target: LAMA2; (-) strand; PAM type: YTN; PAM sequence: TTC
ctcccacccaggagatgaac

SEQ ID NO: 196212 - DNA, 20 bp, Artificial Sequence
  Description of Artificial Sequence: Synthetic oligonucleotide
  Target: LAMA2; (-) strand; PAM type: YTN; PAM sequence: TTT
cctcccacccaggagatgaa

SEQ ID NO: 196213 - DNA, 20 bp, Artificial Sequence
  Description of Artificial Sequence: Synthetic oligonucleotide
  Target: LAMA2; (-) strand; PAM type: YTN; PAM sequence: CTG
tttcctcccacccaggagat

SEQ ID NO: 196214 - DNA, 20 bp, Artificial Sequence
  Description of Artificial Sequence: Synthetic oligonucleotide
  Target: LAMA2; (-) strand; PAM type: YTN; PAM sequence: CTG
tcctgtttcctcccacccag

SEQ ID NO: 196215 - DNA, 20 bp, Artificial Sequence
  Description of Artificial Sequence: Synthetic oligonucleotide
  Target: LAMA2; (-) strand; PAM type: YTN; PAM sequence: TTA
cactgtcctgtttcctccca

SEQ ID NO: 196216 - DNA, 20 bp, Artificial Sequence
  Description of Artificial Sequence: Synthetic oligonucleotide
  Target: LAMA2; (-) strand; PAM type: YTN; PAM sequence: CTT
acactgtcctgtttcctccc

SEQ ID NO: 196217 - DNA, 20 bp, Artificial Sequence
  Description of Artificial Sequence: Synthetic oligonucleotide
  Target: LAMA2; (-) strand; PAM type: YTN; PAM sequence: TTA
aatcttacactgtcctgttt

SEQ ID NO: 196218 - DNA, 20 bp, Artificial Sequence
  Description of Artificial Sequence: Synthetic oligonucleotide
  Target: LAMA2; (-) strand; PAM type: YTN; PAM sequence: TTG
agtagcaggattaaatctta

SEQ ID NO: 196219 - DNA, 20 bp, Artificial Sequence
  Description of Artificial Sequence: Synthetic oligonucleotide
  Target: LAMA2; (-) strand; PAM type: YTN; PAM sequence: TTT
gagtagcaggattaaatctt

SEQ ID NO: 196220 - DNA, 20 bp, Artificial Sequence
  Description of Artificial Sequence: Synthetic oligonucleotide
  Target: LAMA2; (-) strand; PAM type: YTN; PAM sequence: TTT
tgagtagcaggattaaatct

SEQ ID NO: 196221 - DNA, 20 bp, Artificial Sequence
  Description of Artificial Sequence: Synthetic oligonucleotide
  Target: LAMA2; (-) strand; PAM type: YTN; PAM sequence: TTG
tgcattttgagtagcaggat

SEQ ID NO: 196222 - DNA, 20 bp, Artificial Sequence
  Description of Artificial Sequence: Synthetic oligonucleotide
  Target: LAMA2; (-) strand; PAM type: YTN; PAM sequence: TTG
aattgtgcattttgagtagc

SEQ ID NO: 196223 - DNA, 20 bp, Artificial Sequence
  Description of Artificial Sequence: Synthetic oligonucleotide
  Target: LAMA2; (-) strand; PAM type: YTN; PAM sequence: TTT
gaattgtgcattttgagtag

SEQ ID NO: 196224 - DNA, 20 bp, Artificial Sequence
  Description of Artificial Sequence: Synthetic oligonucleotide
  Target: LAMA2; (-) strand; PAM type: YTN; PAM sequence: TTT
tgaattgtgcattttgagta

SEQ ID NO: 196225 - DNA, 20 bp, Artificial Sequence
  Description of Artificial Sequence: Synthetic oligonucleotide
  Target: LAMA2; (-) strand; PAM type: YTN; PAM sequence: TTC
ataagttttgaattgtgcat

SEQ ID NO: 196226 - DNA, 20 bp, Artificial Sequence
  Description of Artificial Sequence: Synthetic oligonucleotide
  Target: LAMA2; (-) strand; PAM type: YTN; PAM sequence: TTC
agaaaaacaattcataagtt

SEQ ID NO: 196227 - DNA, 20 bp, Artificial Sequence
  Description of Artificial Sequence: Synthetic oligonucleotide
  Target: LAMA2; (-) strand; PAM type: YTN; PAM sequence: TTT
cagaaaaacaattcataagt

SEQ ID NO: 196228 - DNA, 20 bp, Artificial Sequence
  Description of Artificial Sequence: Synthetic oligonucleotide
  Target: LAMA2; (-) strand; PAM type: YTN; PAM sequence: TTA
agtggaaaatttcagaaaaa

SEQ ID NO: 196229 - DNA, 20 bp, Artificial Sequence
  Description of Artificial Sequence: Synthetic oligonucleotide
  Target: LAMA2; (-) strand; PAM type: YTN; PAM sequence: CTG
aaaatattaagtggaaaatt

SEQ ID NO: 196230 - DNA, 20 bp, Artificial Sequence
  Description of Artificial Sequence: Synthetic oligonucleotide
  Target: LAMA2; (-) strand; PAM type: YTN; PAM sequence: CTC
aatcatggtctgaaaatatt

SEQ ID NO: 196231 - DNA, 20 bp, Artificial Sequence
  Description of Artificial Sequence: Synthetic oligonucleotide
  Target: LAMA2; (-) strand; PAM type: YTN; PAM sequence: CTG
tactcaatcatggtctgaaa

SEQ ID NO: 196232 - DNA, 20 bp, Artificial Sequence
  Description of Artificial Sequence: Synthetic oligonucleotide
  Target: LAMA2; (-) strand; PAM type: YTN; PAM sequence: TTA
cctgtactcaatcatggtct

SEQ ID NO: 196233 - DNA, 20 bp, Artificial Sequence
  Description of Artificial Sequence: Synthetic oligonucleotide
  Target: LAMA2; (-) strand; PAM type: YTN; PAM sequence: TTC
agttacctgtactcaatcat

SEQ ID NO: 196234 - DNA, 20 bp, Artificial Sequence
  Description of Artificial Sequence: Synthetic oligonucleotide
  Target: LAMA2; (-) strand; PAM type: YTN; PAM sequence: TTT
cagttacctgtactcaatca

SEQ ID NO: 196235 - DNA, 20 bp, Artificial Sequence
  Description of Artificial Sequence: Synthetic oligonucleotide
  Target: LAMA2; (-) strand; PAM type: YTN; PAM sequence: TTC
catggtttcagttacctgta

SEQ ID NO: 196236 - DNA, 20 bp, Artificial Sequence
  Description of Artificial Sequence: Synthetic oligonucleotide
  Target: LAMA2; (-) strand; PAM type: YTN; PAM sequence: TTT
ccatggtttcagttacctgt

SEQ ID NO: 196237 - DNA, 20 bp, Artificial Sequence
  Description of Artificial Sequence: Synthetic oligonucleotide
  Target: LAMA2; (-) strand; PAM type: YTN; PAM sequence: CTT
tccatggtttcagttacctg

SEQ ID NO: 196238 - DNA, 20 bp, Artificial Sequence
  Description of Artificial Sequence: Synthetic oligonucleotide
  Target: LAMA2; (-) strand; PAM type: YTN; PAM sequence: TTC
actttccatggtttcagtta

SEQ ID NO: 196239 - DNA, 20 bp, Artificial Sequence
  Description of Artificial Sequence: Synthetic oligonucleotide
  Target: LAMA2; (-) strand; PAM type: YTN; PAM sequence: TTT
cactttccatggtttcagtt

SEQ ID NO: 196240 - DNA, 20 bp, Artificial Sequence
  Description of Artificial Sequence: Synthetic oligonucleotide
  Target: LAMA2; (-) strand; PAM type: YTN; PAM sequence: TTG
tttcactttccatggtttca

SEQ ID NO: 196241 - DNA, 20 bp, Artificial Sequence
  Description of Artificial Sequence: Synthetic oligonucleotide
  Target: LAMA2; (-) strand; PAM type: YTN; PAM sequence: TTT
gtttcactttccatggtttc

SEQ ID NO: 196242 - DNA, 20 bp, Artificial Sequence
  Description of Artificial Sequence: Synthetic oligonucleotide
  Target: LAMA2; (-) strand; PAM type: YTN; PAM sequence: CTT
tgtttcactttccatggttt

SEQ ID NO: 196243 - DNA, 20 bp, Artificial Sequence
  Description of Artificial Sequence: Synthetic oligonucleotide
  Target: LAMA2; (-) strand; PAM type: YTN; PAM sequence: TTA
tgctttgtttcactttccat

SEQ ID NO: 196244 - DNA, 20 bp, Artificial Sequence
  Description of Artificial Sequence: Synthetic oligonucleotide
  Target: LAMA2; (-) strand; PAM type: YTN; PAM sequence: CTT
atgctttgtttcactttcca

SEQ ID NO: 196245 - DNA, 20 bp, Artificial Sequence
  Description of Artificial Sequence: Synthetic oligonucleotide
  Target: LAMA2; (-) strand; PAM type: YTN; PAM sequence: CTC
acttatgctttgtttcactt

SEQ ID NO: 196246 - DNA, 20 bp, Artificial Sequence
  Description of Artificial Sequence: Synthetic oligonucleotide
  Target: LAMA2; (-) strand; PAM type: YTN; PAM sequence: TTC
tcacttatgctttgtttcac

SEQ ID NO: 196247 - DNA, 20 bp, Artificial Sequence
  Description of Artificial Sequence: Synthetic oligonucleotide
  Target: LAMA2; (-) strand; PAM type: YTN; PAM sequence: TTC
aacatacatgagtcgataaa

SEQ ID NO: 196248 - DNA, 20 bp, Artificial Sequence
  Description of Artificial Sequence: Synthetic oligonucleotide
  Target: LAMA2; (-) strand; PAM type: YTN; PAM sequence: TTG
gaataaatggataattcaac

SEQ ID NO: 196249 - DNA, 20 bp, Artificial Sequence
  Description of Artificial Sequence: Synthetic oligonucleotide
  Target: LAMA2; (-) strand; PAM type: YTN; PAM sequence: CTT
ggaataaatggataattcaa

SEQ ID NO: 196250 - DNA, 20 bp, Artificial Sequence
  Description of Artificial Sequence: Synthetic oligonucleotide
  Target: LAMA2; (-) strand; PAM type: YTN; PAM sequence: TTA
tccttggaataaatggataa

SEQ ID NO: 196251 - DNA, 20 bp, Artificial Sequence
  Description of Artificial Sequence: Synthetic oligonucleotide
  Target: LAMA2; (-) strand; PAM type: YTN; PAM sequence: TTT
atccttggaataaatggata

SEQ ID NO: 196252 - DNA, 20 bp, Artificial Sequence
  Description of Artificial Sequence: Synthetic oligonucleotide
  Target: LAMA2; (-) strand; PAM type: YTN; PAM sequence: TTA
agagggatttatccttggaa

SEQ ID NO: 196253 - DNA, 20 bp, Artificial Sequence
  Description of Artificial Sequence: Synthetic oligonucleotide
  Target: LAMA2; (-) strand; PAM type: YTN; PAM sequence: TTC
accatgattaagagggattt

SEQ ID NO: 196254 - DNA, 20 bp, Artificial Sequence
  Description of Artificial Sequence: Synthetic oligonucleotide
  Target: LAMA2; (-) strand; PAM type: YTN; PAM sequence: TTC
aacggcatatcaaaaggaac

SEQ ID NO: 196255 - DNA, 20 bp, Artificial Sequence
  Description of Artificial Sequence: Synthetic oligonucleotide
  Target: LAMA2; (-) strand; PAM type: YTN; PAM sequence: CTA
gcaaatcaaattcaacggca

SEQ ID NO: 196256 - DNA, 20 bp, Artificial Sequence
  Description of Artificial Sequence: Synthetic oligonucleotide
  Target: LAMA2; (-) strand; PAM type: YTN; PAM sequence: CTC
aaaaaaatactagcaaatca

SEQ ID NO: 196257 - DNA, 20 bp, Artificial Sequence
  Description of Artificial Sequence: Synthetic oligonucleotide
  Target: LAMA2; (-) strand; PAM type: YTN; PAM sequence: CTG
aagaacacagatataaaaat

SEQ ID NO: 196258 - DNA, 20 bp, Artificial Sequence
  Description of Artificial Sequence: Synthetic oligonucleotide
  Target: LAMA2; (-) strand; PAM type: YTN; PAM sequence: CTC
tgaagaacacagatataaaa

SEQ ID NO: 196259 - DNA, 20 bp, Artificial Sequence
  Description of Artificial Sequence: Synthetic oligonucleotide
  Target: LAMA2; (-) strand; PAM type: YTN; PAM sequence: TTA
caggccaatatctctgaaga

SEQ ID NO: 196260 - DNA, 20 bp, Artificial Sequence
  Description of Artificial Sequence: Synthetic oligonucleotide
  Target: LAMA2; (-) strand; PAM type: YTN; PAM sequence: CTA
caaataaagaaaattacagg

SEQ ID NO: 196261 - DNA, 20 bp, Artificial Sequence
  Description of Artificial Sequence: Synthetic oligonucleotide
  Target: LAMA2; (-) strand; PAM type: YTN; PAM sequence: CTA
acccagataaggacactaca

SEQ ID NO: 196262 - DNA, 20 bp, Artificial Sequence
  Description of Artificial Sequence: Synthetic oligonucleotide
  Target: LAMA2; (-) strand; PAM type: YTN; PAM sequence: TTA
tacaatgctaacccagataa

SEQ ID NO: 196263 - DNA, 20 bp, Artificial Sequence
  Description of Artificial Sequence: Synthetic oligonucleotide
  Target: LAMA2; (-) strand; PAM type: YTN; PAM sequence: CTA
ttatacaatgctaacccaga

SEQ ID NO: 196264 - DNA, 20 bp, Artificial Sequence
  Description of Artificial Sequence: Synthetic oligonucleotide
  Target: LAMA2; (-) strand; PAM type: YTN; PAM sequence: TTA
tatgaggtaactattataca

SEQ ID NO: 196265 - DNA, 20 bp, Artificial Sequence
  Description of Artificial Sequence: Synthetic oligonucleotide
  Target: LAMA2; (-) strand; PAM type: YTN; PAM sequence: CTC
attatatgaggtaactatta

SEQ ID NO: 196266 - DNA, 20 bp, Artificial Sequence
  Description of Artificial Sequence: Synthetic oligonucleotide
  Target: LAMA2; (-) strand; PAM type: YTN; PAM sequence: TTC
caatctcattatatgaggta

SEQ ID NO: 196267 - DNA, 20 bp, Artificial Sequence
  Description of Artificial Sequence: Synthetic oligonucleotide
  Target: LAMA2; (-) strand; PAM type: YTN; PAM sequence: CTT
ccaatctcattatatgaggt

SEQ ID NO: 196268 - DNA, 20 bp, Artificial Sequence
  Description of Artificial Sequence: Synthetic oligonucleotide
  Target: LAMA2; (-) strand; PAM type: YTN; PAM sequence: TTG
gagggaacacttccaatctc

SEQ ID NO: 196269 - DNA, 20 bp, Artificial Sequence
  Description of Artificial Sequence: Synthetic oligonucleotide
  Target: LAMA2; (-) strand; PAM type: YTN; PAM sequence: CTT
ggagggaacacttccaatct

SEQ ID NO: 196270 - DNA, 20 bp, Artificial Sequence
  Description of Artificial Sequence: Synthetic oligonucleotide
  Target: LAMA2; (-) strand; PAM type: YTN; PAM sequence: TTC
aagaccagacacttggaggg

SEQ ID NO: 196271 - DNA, 20 bp, Artificial Sequence
  Description of Artificial Sequence: Synthetic oligonucleotide
  Target: LAMA2; (-) strand; PAM type: YTN; PAM sequence: CTC
ccaataaagaaaagttcaag

SEQ ID NO: 196272 - DNA, 20 bp, Artificial Sequence
  Description of Artificial Sequence: Synthetic oligonucleotide
  Target: LAMA2; (-) strand; PAM type: YTN; PAM sequence: CTG
ataatgagtaaggagaataa

SEQ ID NO: 196273 - DNA, 20 bp, Artificial Sequence
  Description of Artificial Sequence: Synthetic oligonucleotide
  Target: LAMA2; (-) strand; PAM type: YTN; PAM sequence: TTG
ggtaatgagtacctgataat

SEQ ID NO: 196274 - DNA, 20 bp, Artificial Sequence
  Description of Artificial Sequence: Synthetic oligonucleotide
  Target: LAMA2; (-) strand; PAM type: YTN; PAM sequence: TTT
gggtaatgagtacctgataa

SEQ ID NO: 196275 - DNA, 20 bp, Artificial Sequence
  Description of Artificial Sequence: Synthetic oligonucleotide
  Target: LAMA2; (-) strand; PAM type: YTN; PAM sequence: CTG
aacaaatttgggtaatgagt

SEQ ID NO: 196276 - DNA, 20 bp, Artificial Sequence
  Description of Artificial Sequence: Synthetic oligonucleotide
  Target: LAMA2; (-) strand; PAM type: YTN; PAM sequence: CTG
aatgatgaagaaatagaaaa

SEQ ID NO: 196277 - DNA, 20 bp, Artificial Sequence
  Description of Artificial Sequence: Synthetic oligonucleotide
  Target: LAMA2; (-) strand; PAM type: YTN; PAM sequence: CTA
gacacatagaatcgaccaag

SEQ ID NO: 196278 - DNA, 20 bp, Artificial Sequence
  Description of Artificial Sequence: Synthetic oligonucleotide
  Target: LAMA2; (-) strand; PAM type: YTN; PAM sequence: TTG
ataaaggctagacacataga

SEQ ID NO: 196279 - DNA, 20 bp, Artificial Sequence
  Description of Artificial Sequence: Synthetic oligonucleotide
  Target: LAMA2; (-) strand; PAM type: YTN; PAM sequence: CTA
caagaagttgataaaggcta

SEQ ID NO: 196280 - DNA, 20 bp, Artificial Sequence
  Description of Artificial Sequence: Synthetic oligonucleotide
  Target: LAMA2; (-) strand; PAM type: YTN; PAM sequence: TTA
tacaccaataaatacaataa

SEQ ID NO: 196281 - DNA, 20 bp, Artificial Sequence
  Description of Artificial Sequence: Synthetic oligonucleotide
  Target: LAMA2; (-) strand; PAM type: YTN; PAM sequence: CTA
tgaacaattatacaccaata

SEQ ID NO: 196282 - DNA, 20 bp, Artificial Sequence
  Description of Artificial Sequence: Synthetic oligonucleotide
  Target: LAMA2; (-) strand; PAM type: YTN; PAM sequence: CTG
ctatgaacaattatacacca

SEQ ID NO: 196283 - DNA, 20 bp, Artificial Sequence
  Description of Artificial Sequence: Synthetic oligonucleotide
  Target: LAMA2; (-) strand; PAM type: YTN; PAM sequence: TTG
caacagaaataaaaaaggat

SEQ ID NO: 196284 - DNA, 20 bp, Artificial Sequence
  Description of Artificial Sequence: Synthetic oligonucleotide
  Target: LAMA2; (-) strand; PAM type: YTN; PAM sequence: TTA
aagaggagacattgcaacag

SEQ ID NO: 196285 - DNA, 20 bp, Artificial Sequence
  Description of Artificial Sequence: Synthetic oligonucleotide
  Target: LAMA2; (-) strand; PAM type: YTN; PAM sequence: TTA
taaattaaagaggagacatt

SEQ ID NO: 196286 - DNA, 20 bp, Artificial Sequence
  Description of Artificial Sequence: Synthetic oligonucleotide
  Target: LAMA2; (-) strand; PAM type: YTN; PAM sequence: CTA
aataaaattataaattaaag

SEQ ID NO: 196287 - DNA, 20 bp, Artificial Sequence
  Description of Artificial Sequence: Synthetic oligonucleotide
  Target: LAMA2; (-) strand; PAM type: YTN; PAM sequence: TTC
aactaaataaaattataaat

SEQ ID NO: 196288 - DNA, 20 bp, Artificial Sequence
  Description of Artificial Sequence: Synthetic oligonucleotide
  Target: LAMA2; (-) strand; PAM type: YTN; PAM sequence: CTA
agaaaaaaggaatgaggatt

SEQ ID NO: 196289 - DNA, 20 bp, Artificial Sequence
  Description of Artificial Sequence: Synthetic oligonucleotide
  Target: LAMA2; (-) strand; PAM type: YTN; PAM sequence: TTC
agccaaactaagaaaaaagg

SEQ ID NO: 196290 - DNA, 20 bp, Artificial Sequence
  Description of Artificial Sequence: Synthetic oligonucleotide
  Target: LAMA2; (-) strand; PAM type: YTN; PAM sequence: CTT
cagccaaactaagaaaaaag

SEQ ID NO: 196291 - DNA, 20 bp, Artificial Sequence
  Description of Artificial Sequence: Synthetic oligonucleotide
  Target: LAMA2; (-) strand; PAM type: YTN; PAM sequence: TTG
acaaaccttcagccaaacta

SEQ ID NO: 196292 - DNA, 20 bp, Artificial Sequence
  Description of Artificial Sequence: Synthetic oligonucleotide
  Target: LAMA2; (-) strand; PAM type: YTN; PAM sequence: TTA
aagataaacaaaattgacaa

SEQ ID NO: 196293 - DNA, 20 bp, Artificial Sequence
  Description of Artificial Sequence: Synthetic oligonucleotide
  Target: LAMA2; (-) strand; PAM type: YTN; PAM sequence: TTT
aaagataaacaaaattgaca

SEQ ID NO: 196294 - DNA, 20 bp, Artificial Sequence
  Description of Artificial Sequence: Synthetic oligonucleotide
  Target: LAMA2; (-) strand; PAM type: YTN; PAM sequence: TTT
taaagataaacaaaattgac

SEQ ID NO: 196295 - DNA, 20 bp, Artificial Sequence
  Description of Artificial Sequence: Synthetic oligonucleotide
  Target: LAMA2; (-) strand; PAM type: YTN; PAM sequence: TTT
ttaaagataaacaaaattga

SEQ ID NO: 196296 - DNA, 20 bp, Artificial Sequence
  Description of Artificial Sequence: Synthetic oligonucleotide
  Target: LAMA2; (-) strand; PAM type: YTN; PAM sequence: TTT
tttaaagataaacaaaattg

SEQ ID NO: 196297 - DNA, 20 bp, Artificial Sequence
  Description of Artificial Sequence: Synthetic oligonucleotide
  Target: LAMA2; (-) strand; PAM type: YTN; PAM sequence: TTT
ttttaaagataaacaaaatt

SEQ ID NO: 196298 - DNA, 20 bp, Artificial Sequence
  Description of Artificial Sequence: Synthetic oligonucleotide
  Target: LAMA2; (-) strand; PAM type: YTN; PAM sequence: TTG
tttttttaaagataaacaaa

SEQ ID NO: 196299 - DNA, 20 bp, Artificial Sequence
  Description of Artificial Sequence: Synthetic oligonucleotide
  Target: LAMA2; (-) strand; PAM type: YTN; PAM sequence: CTA
gaaagagaatagaaaagatc

SEQ ID NO: 196300 - DNA, 20 bp, Artificial Sequence
  Description of Artificial Sequence: Synthetic oligonucleotide
  Target: LAMA2; (-) strand; PAM type: YTN; PAM sequence: TTG
tgactagaaagagaatagaa

SEQ ID NO: 196301 - DNA, 20 bp, Artificial Sequence
  Description of Artificial Sequence: Synthetic oligonucleotide
  Target: LAMA2; (-) strand; PAM type: YTN; PAM sequence: TTA
gagcataaataaatgaaatt

SEQ ID NO: 196302 - DNA, 20 bp, Artificial Sequence
  Description of Artificial Sequence: Synthetic oligonucleotide
  Target: LAMA2; (-) strand; PAM type: YTN; PAM sequence: CTA
agacaaagatagaaaaggga

SEQ ID NO: 196303 - DNA, 20 bp, Artificial Sequence
  Description of Artificial Sequence: Synthetic oligonucleotide
  Target: LAMA2; (-) strand; PAM type: YTN; PAM sequence: CTC
aaggaaataggaaaaaaaaa

SEQ ID NO: 196304 - DNA, 20 bp, Artificial Sequence
  Description of Artificial Sequence: Synthetic oligonucleotide
  Target: LAMA2; (-) strand; PAM type: YTN; PAM sequence: TTA
tacctcaaggaaataggaaa

SEQ ID NO: 196305 - DNA, 20 bp, Artificial Sequence
  Description of Artificial Sequence: Synthetic oligonucleotide
  Target: LAMA2; (-) strand; PAM type: YTN; PAM sequence: TTT
atacctcaaggaaataggaa

SEQ ID NO: 196306 - DNA, 20 bp, Artificial Sequence
  Description of Artificial Sequence: Synthetic oligonucleotide
  Target: LAMA2; (-) strand; PAM type: YTN; PAM sequence: CTT
tatacctcaaggaaatagga

SEQ ID NO: 196307 - DNA, 20 bp, Artificial Sequence
  Description of Artificial Sequence: Synthetic oligonucleotide
  Target: LAMA2; (-) strand; PAM type: YTN; PAM sequence: TTA
actttatacctcaaggaaat

SEQ ID NO: 196308 - DNA, 20 bp, Artificial Sequence
  Description of Artificial Sequence: Synthetic oligonucleotide
  Target: LAMA2; (-) strand; PAM type: YTN; PAM sequence: CTT
aactttatacctcaaggaaa

SEQ ID NO: 196309 - DNA, 20 bp, Artificial Sequence
  Description of Artificial Sequence: Synthetic oligonucleotide
  Target: LAMA2; (-) strand; PAM type: YTN; PAM sequence: CTA
aaatgaacaacttaacttta

SEQ ID NO: 196310 - DNA, 20 bp, Artificial Sequence
  Description of Artificial Sequence: Synthetic oligonucleotide
  Target: LAMA2; (-) strand; PAM type: YTN; PAM sequence: TTA
aaaaaaaagatctaaaatga

SEQ ID NO: 196311 - DNA, 20 bp, Artificial Sequence
  Description of Artificial Sequence: Synthetic oligonucleotide
  Target: LAMA2; (-) strand; PAM type: YTN; PAM sequence: CTA
tattaaaaaaaaagatctaa

SEQ ID NO: 196312 - DNA, 20 bp, Artificial Sequence
  Description of Artificial Sequence: Synthetic oligonucleotide
  Target: LAMA2; (-) strand; PAM type: YTN; PAM sequence: TTG
ataaatgcctatattaaaaa

SEQ ID NO: 196313 - DNA, 20 bp, Artificial Sequence
  Description of Artificial Sequence: Synthetic oligonucleotide
  Target: LAMA2; (-) strand; PAM type: YTN; PAM sequence: TTA
cattgataaatgcctatatt

SEQ ID NO: 196314 - DNA, 20 bp, Artificial Sequence
  Description of Artificial Sequence: Synthetic oligonucleotide
  Target: LAMA2; (-) strand; PAM type: YTN; PAM sequence: TTT
acattgataaatgcctatat

SEQ ID NO: 196315 - DNA, 20 bp, Artificial Sequence
  Description of Artificial Sequence: Synthetic oligonucleotide
  Target: LAMA2; (-) strand; PAM type: YTN; PAM sequence: CTA
agagagaagtttacattgat

SEQ ID NO: 196316 - DNA, 20 bp, Artificial Sequence
  Description of Artificial Sequence: Synthetic oligonucleotide
  Target: LAMA2; (-) strand; PAM type: YTN; PAM sequence: TTC
taagagagaagtttacattg

SEQ ID NO: 196317 - DNA, 20 bp, Artificial Sequence
  Description of Artificial Sequence: Synthetic oligonucleotide
  Target: LAMA2; (-) strand; PAM type: YTN; PAM sequence: CTG
ggatgcagcaaaagacgttc

SEQ ID NO: 196318 - DNA, 20 bp, Artificial Sequence
  Description of Artificial Sequence: Synthetic oligonucleotide
  Target: LAMA2; (-) strand; PAM type: YTN; PAM sequence: TTC
tgggatgcagcaaaagacgt

SEQ ID NO: 196319 - DNA, 20 bp, Artificial Sequence
  Description of Artificial Sequence: Synthetic oligonucleotide
  Target: LAMA2; (-) strand; PAM type: YTN; PAM sequence: CTT
ctgggatgcagcaaaagacg

SEQ ID NO: 196320 - DNA, 20 bp, Artificial Sequence
  Description of Artificial Sequence: Synthetic oligonucleotide
  Target: LAMA2; (-) strand; PAM type: YTN; PAM sequence: TTG
agacaaatgaaaataacaat

SEQ ID NO: 196321 - DNA, 20 bp, Artificial Sequence
  Description of Artificial Sequence: Synthetic oligonucleotide
  Target: LAMA2; (-) strand; PAM type: YTN; PAM sequence: CTT
gagacaaatgaaaataacaa

SEQ ID NO: 196322 - DNA, 20 bp, Artificial Sequence
  Description of Artificial Sequence: Synthetic oligonucleotide
  Target: LAMA2; (-) strand; PAM type: YTN; PAM sequence: CTC
caaaatgaccaatgggtcaa

SEQ ID NO: 196323 - DNA, 20 bp, Artificial Sequence
  Description of Artificial Sequence: Synthetic oligonucleotide
  Target: LAMA2; (-) strand; PAM type: YTN; PAM sequence: TTA
atcccagcacagatatatgg

SEQ ID NO: 196324 - DNA, 20 bp, Artificial Sequence
  Description of Artificial Sequence: Synthetic oligonucleotide
  Target: LAMA2; (-) strand; PAM type: YTN; PAM sequence: CTA
aaaagtcagaaatattaatc

SEQ ID NO: 196325 - DNA, 20 bp, Artificial Sequence
  Description of Artificial Sequence: Synthetic oligonucleotide
  Target: LAMA2; (-) strand; PAM type: YTN; PAM sequence: CTG
gctaaaaagtcagaaatatt

SEQ ID NO: 196326 - DNA, 20 bp, Artificial Sequence
  Description of Artificial Sequence: Synthetic oligonucleotide
  Target: LAMA2; (-) strand; PAM type: YTN; PAM sequence: TTA
gaatacaggcagcctggcta

SEQ ID NO: 196327 - DNA, 20 bp, Artificial Sequence
  Description of Artificial Sequence: Synthetic oligonucleotide
  Target: LAMA2; (-) strand; PAM type: YTN; PAM sequence: TTG
taattagaatacaggcagcc

SEQ ID NO: 196328 - DNA, 20 bp, Artificial Sequence
  Description of Artificial Sequence: Synthetic oligonucleotide
  Target: LAMA2; (-) strand; PAM type: YTN; PAM sequence: TTG
taagtggtgaagttgtaatt

SEQ ID NO: 196329 - DNA, 20 bp, Artificial Sequence
  Description of Artificial Sequence: Synthetic oligonucleotide
  Target: LAMA2; (-) strand; PAM type: YTN; PAM sequence: CTT
gtaagtggtgaagttgtaat

SEQ ID NO: 196330 - DNA, 20 bp, Artificial Sequence
  Description of Artificial Sequence: Synthetic oligonucleotide
  Target: LAMA2; (-) strand; PAM type: YTN; PAM sequence: CTA
aataccttgtaagtggtgaa

SEQ ID NO: 196331 - DNA, 20 bp, Artificial Sequence
  Description of Artificial Sequence: Synthetic oligonucleotide
  Target: LAMA2; (-) strand; PAM type: YTN; PAM sequence: CTA
aagctaaataccttgtaagt

SEQ ID NO: 196332 - DNA, 20 bp, Artificial Sequence
  Description of Artificial Sequence: Synthetic oligonucleotide
  Target: LAMA2; (-) strand; PAM type: YTN; PAM sequence: TTA
cctaaagctaaataccttgt

SEQ ID NO: 196333 - DNA, 20 bp, Artificial Sequence
  Description of Artificial Sequence: Synthetic oligonucleotide
  Target: LAMA2; (-) strand; PAM type: YTN; PAM sequence: CTT
acctaaagctaaataccttg

SEQ ID NO: 196334 - DNA, 20 bp, Artificial Sequence
  Description of Artificial Sequence: Synthetic oligonucleotide
  Target: LAMA2; (-) strand; PAM type: YTN; PAM sequence: TTA
aatggcttacctaaagctaa

SEQ ID NO: 196335 - DNA, 20 bp, Artificial Sequence
  Description of Artificial Sequence: Synthetic oligonucleotide
  Target: LAMA2; (-) strand; PAM type: YTN; PAM sequence: TTT
aaatggcttacctaaagcta

SEQ ID NO: 196336 - DNA, 20 bp, Artificial Sequence
  Description of Artificial Sequence: Synthetic oligonucleotide
  Target: LAMA2; (-) strand; PAM type: YTN; PAM sequence: CTG
agagtttaaatggcttacct

SEQ ID NO: 196337 - DNA, 20 bp, Artificial Sequence
  Description of Artificial Sequence: Synthetic oligonucleotide
  Target: LAMA2; (-) strand; PAM type: YTN; PAM sequence: CTG
aggcactgagagtttaaatg

SEQ ID NO: 196338 - DNA, 20 bp, Artificial Sequence
  Description of Artificial Sequence: Synthetic oligonucleotide
  Target: LAMA2; (-) strand; PAM type: YTN; PAM sequence: TTA
cagataaggggactgaggca

SEQ ID NO: 196339 - DNA, 20 bp, Artificial Sequence
  Description of Artificial Sequence: Synthetic oligonucleotide
  Target: LAMA2; (-) strand; PAM type: YTN; PAM sequence: TTT
acagataaggggactgaggc

SEQ ID NO: 196340 - DNA, 20 bp, Artificial Sequence
  Description of Artificial Sequence: Synthetic oligonucleotide
  Target: LAMA2; (-) strand; PAM type: YTN; PAM sequence: TTT
tacagataaggggactgagg

SEQ ID NO: 196341 - DNA, 20 bp, Artificial Sequence
  Description of Artificial Sequence: Synthetic oligonucleotide
  Target: LAMA2; (-) strand; PAM type: YTN; PAM sequence: TTT
ttacagataaggggactgag

SEQ ID NO: 196342 - DNA, 20 bp, Artificial Sequence
  Description of Artificial Sequence: Synthetic oligonucleotide
  Target: LAMA2; (-) strand; PAM type: YTN; PAM sequence: CTC
atttttacagataaggggac

SEQ ID NO: 196343 - DNA, 20 bp, Artificial Sequence
  Description of Artificial Sequence: Synthetic oligonucleotide
  Target: LAMA2; (-) strand; PAM type: YTN; PAM sequence: TTA
ctcatttttacagataaggg

SEQ ID NO: 196344 - DNA, 20 bp, Artificial Sequence
  Description of Artificial Sequence: Synthetic oligonucleotide
  Target: LAMA2; (-) strand; PAM type: YTN; PAM sequence: CTG
tattactcatttttacagat

SEQ ID NO: 196345 - DNA, 20 bp, Artificial Sequence
  Description of Artificial Sequence: Synthetic oligonucleotide
  Target: LAMA2; (-) strand; PAM type: YTN; PAM sequence: TTA
atatcactgtattactcatt

SEQ ID NO: 196346 - DNA, 20 bp, Artificial Sequence
  Description of Artificial Sequence: Synthetic oligonucleotide
  Target: LAMA2; (-) strand; PAM type: YTN; PAM sequence: TTA
ttaatatcactgtattactc

SEQ ID NO: 196347 - DNA, 20 bp, Artificial Sequence
  Description of Artificial Sequence: Synthetic oligonucleotide
  Target: LAMA2; (-) strand; PAM type: YTN; PAM sequence: TTA
ttattaatatcactgtatta

SEQ ID NO: 196348 - DNA, 20 bp, Artificial Sequence
  Description of Artificial Sequence: Synthetic oligonucleotide
  Target: LAMA2; (-) strand; PAM type: YTN; PAM sequence: TTA
ttattattaatatcactgta

SEQ ID NO: 196349 - DNA, 20 bp, Artificial Sequence
  Description of Artificial Sequence: Synthetic oligonucleotide
  Target: LAMA2; (-) strand; PAM type: YTN; PAM sequence: CTC
attattattattaatatcac

SEQ ID NO: 196350 - DNA, 20 bp, Artificial Sequence
  Description of Artificial Sequence: Synthetic oligonucleotide
  Target: LAMA2; (-) strand; PAM type: YTN; PAM sequence: CTC
tcattattattattaatatc

SEQ ID NO: 196351 - DNA, 20 bp, Artificial Sequence
  Description of Artificial Sequence: Synthetic oligonucleotide
  Target: LAMA2; (-) strand; PAM type: YTN; PAM sequence: TTC
acaatcagtcagggaggtag

SEQ ID NO: 196352 - DNA, 20 bp, Artificial Sequence
  Description of Artificial Sequence: Synthetic oligonucleotide
  Target: LAMA2; (-) strand; PAM type: YTN; PAM sequence: CTT
cacaatcagtcagggaggta

SEQ ID NO: 196353 - DNA, 20 bp, Artificial Sequence
  Description of Artificial Sequence: Synthetic oligonucleotide
  Target: LAMA2; (-) strand; PAM type: YTN; PAM sequence: TTC
atcttcacaatcagtcaggg

SEQ ID NO: 196354 - DNA, 20 bp, Artificial Sequence
  Description of Artificial Sequence: Synthetic oligonucleotide
  Target: LAMA2; (-) strand; PAM type: YTN; PAM sequence: TTT
catcttcacaatcagtcagg

SEQ ID NO: 196355 - DNA, 20 bp, Artificial Sequence
  Description of Artificial Sequence: Synthetic oligonucleotide
  Target: LAMA2; (-) strand; PAM type: YTN; PAM sequence: TTC
atttcatcttcacaatcagt

SEQ ID NO: 196356 - DNA, 20 bp, Artificial Sequence
  Description of Artificial Sequence: Synthetic oligonucleotide
  Target: LAMA2; (-) strand; PAM type: YTN; PAM sequence: TTT
catttcatcttcacaatcag

SEQ ID NO: 196357 - DNA, 20 bp, Artificial Sequence
  Description of Artificial Sequence: Synthetic oligonucleotide
  Target: LAMA2; (-) strand; PAM type: YTN; PAM sequence: CTA
tttcatttcatcttcacaat

SEQ ID NO: 196358 - DNA, 20 bp, Artificial Sequence
  Description of Artificial Sequence: Synthetic oligonucleotide
  Target: LAMA2; (-) strand; PAM type: YTN; PAM sequence: CTG
actatttcatttcatcttca

SEQ ID NO: 196359 - DNA, 20 bp, Artificial Sequence
  Description of Artificial Sequence: Synthetic oligonucleotide
  Target: LAMA2; (-) strand; PAM type: YTN; PAM sequence: CTA
ctgactatttcatttcatct

SEQ ID NO: 196360 - DNA, 20 bp, Artificial Sequence
  Description of Artificial Sequence: Synthetic oligonucleotide
  Target: LAMA2; (-) strand; PAM type: YTN; PAM sequence: TTC
tactgactatttcatttcat

SEQ ID NO: 196361 - DNA, 20 bp, Artificial Sequence
  Description of Artificial Sequence: Synthetic oligonucleotide
  Target: LAMA2; (-) strand; PAM type: YTN; PAM sequence: TTT
ctactgactatttcatttca

SEQ ID NO: 196362 - DNA, 20 bp, Artificial Sequence
  Description of Artificial Sequence: Synthetic oligonucleotide
  Target: LAMA2; (-) strand; PAM type: YTN; PAM sequence: CTT
tctactgactatttcatttc

SEQ ID NO: 196363 - DNA, 20 bp, Artificial Sequence
  Description of Artificial Sequence: Synthetic oligonucleotide
  Target: LAMA2; (-) strand; PAM type: YTN; PAM sequence: CTA
ctttctactgactatttcat

SEQ ID NO: 196364 - DNA, 20 bp, Artificial Sequence
  Description of Artificial Sequence: Synthetic oligonucleotide
  Target: LAMA2; (-) strand; PAM type: YTN; PAM sequence: CTA
actactttctactgactatt

SEQ ID NO: 196365 - DNA, 20 bp, Artificial Sequence
  Description of Artificial Sequence: Synthetic oligonucleotide
  Target: LAMA2; (-) strand; PAM type: YTN; PAM sequence: TTC
taactactttctactgacta

SEQ ID NO: 196366 - DNA, 20 bp, Artificial Sequence
  Description of Artificial Sequence: Synthetic oligonucleotide
  Target: LAMA2; (-) strand; PAM type: YTN; PAM sequence: CTA
ttctaactactttctactga

SEQ ID NO: 196367 - DNA, 20 bp, Artificial Sequence
  Description of Artificial Sequence: Synthetic oligonucleotide
  Target: LAMA2; (-) strand; PAM type: YTN; PAM sequence: CTG
tgaactattctaactacttt

SEQ ID NO: 196368 - DNA, 20 bp, Artificial Sequence
  Description of Artificial Sequence: Synthetic oligonucleotide
  Target: LAMA2; (-) strand; PAM type: YTN; PAM sequence: CTG
tatgctgtgaactattctaa

SEQ ID NO: 196369 - DNA, 20 bp, Artificial Sequence
  Description of Artificial Sequence: Synthetic oligonucleotide
  Target: LAMA2; (-) strand; PAM type: YTN; PAM sequence: TTA
atcataaaaataataaatac

SEQ ID NO: 196370 - DNA, 20 bp, Artificial Sequence
  Description of Artificial Sequence: Synthetic oligonucleotide
  Target: LAMA2; (-) strand; PAM type: YTN; PAM sequence: TTA
gttaatcataaaaataataa

SEQ ID NO: 196371 - DNA, 20 bp, Artificial Sequence
  Description of Artificial Sequence: Synthetic oligonucleotide
  Target: LAMA2; (-) strand; PAM type: YTN; PAM sequence: CTC
ataaaacattagttaatcat

SEQ ID NO: 196372 - DNA, 20 bp, Artificial Sequence
  Description of Artificial Sequence: Synthetic oligonucleotide
  Target: LAMA2; (-) strand; PAM type: YTN; PAM sequence: CTA
aggacctcataaaacattag

SEQ ID NO: 196373 - DNA, 20 bp, Artificial Sequence
  Description of Artificial Sequence: Synthetic oligonucleotide
  Target: LAMA2; (-) strand; PAM type: YTN; PAM sequence: CTC
taaggacctcataaaacatt

SEQ ID NO: 196374 - DNA, 20 bp, Artificial Sequence
  Description of Artificial Sequence: Synthetic oligonucleotide
  Target: LAMA2; (-) strand; PAM type: YTN; PAM sequence: CTA
gcactctaaggacctcataa

SEQ ID NO: 196375 - DNA, 20 bp, Artificial Sequence
  Description of Artificial Sequence: Synthetic oligonucleotide
  Target: LAMA2; (-) strand; PAM type: YTN; PAM sequence: TTC
atgcaaacagtgtctagcac

SEQ ID NO: 196376 - DNA, 20 bp, Artificial Sequence
  Description of Artificial Sequence: Synthetic oligonucleotide
  Target: LAMA2; (-) strand; PAM type: YTN; PAM sequence: TTG
tggtgagatcatataaaata

SEQ ID NO: 196377 - DNA, 20 bp, Artificial Sequence
  Description of Artificial Sequence: Synthetic oligonucleotide
  Target: LAMA2; (-) strand; PAM type: YTN; PAM sequence: TTA
taaggttgtggtgagatcat

SEQ ID NO: 196378 - DNA, 20 bp, Artificial Sequence
  Description of Artificial Sequence: Synthetic oligonucleotide
  Target: LAMA2; (-) strand; PAM type: YTN; PAM sequence: TTT
ataaggttgtggtgagatca

SEQ ID NO: 196379 - DNA, 20 bp, Artificial Sequence
  Description of Artificial Sequence: Synthetic oligonucleotide
  Target: LAMA2; (-) strand; PAM type: YTN; PAM sequence: TTT
tataaggttgtggtgagatc

SEQ ID NO: 196380 - DNA, 20 bp, Artificial Sequence
  Description of Artificial Sequence: Synthetic oligonucleotide
  Target: LAMA2; (-) strand; PAM type: YTN; PAM sequence: TTT
ttataaggttgtggtgagat

SEQ ID NO: 196381 - DNA, 20 bp, Artificial Sequence
  Description of Artificial Sequence: Synthetic oligonucleotide
  Target: LAMA2; (-) strand; PAM type: YTN; PAM sequence: TTT
tttataaggttgtggtgaga

SEQ ID NO: 196382 - DNA, 20 bp, Artificial Sequence
  Description of Artificial Sequence: Synthetic oligonucleotide
  Target: LAMA2; (-) strand; PAM type: YTN; PAM sequence: CTT
ttttataaggttgtggtgag

SEQ ID NO: 196383 - DNA, 20 bp, Artificial Sequence
  Description of Artificial Sequence: Synthetic oligonucleotide
  Target: LAMA2; (-) strand; PAM type: YTN; PAM sequence: CTA
aaacatcggacaataaaaac

SEQ ID NO: 196384 - DNA, 20 bp, Artificial Sequence
  Description of Artificial Sequence: Synthetic oligonucleotide
  Target: LAMA2; (-) strand; PAM type: YTN; PAM sequence: CTA
cgccgtctaaaacatcggac

SEQ ID NO: 196385 - DNA, 20 bp, Artificial Sequence
  Description of Artificial Sequence: Synthetic oligonucleotide
  Target: LAMA2; (-) strand; PAM type: YTN; PAM sequence: CTA
taactacgccgtctaaaaca

SEQ ID NO: 196386 - DNA, 20 bp, Artificial Sequence
  Description of Artificial Sequence: Synthetic oligonucleotide
  Target: LAMA2; (-) strand; PAM type: YTN; PAM sequence: CTC
ctataactacgccgtctaaa

SEQ ID NO: 196387 - DNA, 20 bp, Artificial Sequence
  Description of Artificial Sequence: Synthetic oligonucleotide
  Target: LAMA2; (-) strand; PAM type: YTN; PAM sequence: CTA
actcctataactacgccgtc

SEQ ID NO: 196388 - DNA, 20 bp, Artificial Sequence
  Description of Artificial Sequence: Synthetic oligonucleotide
  Target: LAMA2; (-) strand; PAM type: YTN; PAM sequence: CTG
aaactaactcctataactac

SEQ ID NO: 196389 - DNA, 20 bp, Artificial Sequence
  Description of Artificial Sequence: Synthetic oligonucleotide
  Target: LAMA2; (-) strand; PAM type: YTN; PAM sequence: CTG
gtggctgaaactaactccta

SEQ ID NO: 196390 - DNA, 20 bp, Artificial Sequence
  Description of Artificial Sequence: Synthetic oligonucleotide
  Target: LAMA2; (-) strand; PAM type: YTN; PAM sequence: CTA
tatacaactggtggctgaaa

SEQ ID NO: 196391 - DNA, 20 bp, Artificial Sequence
  Description of Artificial Sequence: Synthetic oligonucleotide
  Target: LAMA2; (-) strand; PAM type: YTN; PAM sequence: CTC
tatatacaactggtggctga

SEQ ID NO: 196392 - DNA, 20 bp, Artificial Sequence
  Description of Artificial Sequence: Synthetic oligonucleotide
  Target: LAMA2; (-) strand; PAM type: YTN; PAM sequence: TTC
tctatatacaactggtggct

SEQ ID NO: 196393 - DNA, 20 bp, Artificial Sequence
  Description of Artificial Sequence: Synthetic oligonucleotide
  Target: LAMA2; (-) strand; PAM type: YTN; PAM sequence: CTT
ctctatatacaactggtggc

SEQ ID NO: 196394 - DNA, 20 bp, Artificial Sequence
  Description of Artificial Sequence: Synthetic oligonucleotide
  Target: LAMA2; (-) strand; PAM type: YTN; PAM sequence: CTA
gcagcttctctatatacaac

SEQ ID NO: 196395 - DNA, 20 bp, Artificial Sequence
  Description of Artificial Sequence: Synthetic oligonucleotide
  Target: LAMA2; (-) strand; PAM type: YTN; PAM sequence: TTG
cctagcagcttctctatata

SEQ ID NO: 196396 - DNA, 20 bp, Artificial Sequence
  Description of Artificial Sequence: Synthetic oligonucleotide
  Target: LAMA2; (-) strand; PAM type: YTN; PAM sequence: TTT
gcctagcagcttctctatat

SEQ ID NO: 196397 - DNA, 20 bp, Artificial Sequence
  Description of Artificial Sequence: Synthetic oligonucleotide
  Target: LAMA2; (-) strand; PAM type: YTN; PAM sequence: TTA
tgtttgcctagcagcttctc

SEQ ID NO: 196398 - DNA, 20 bp, Artificial Sequence
  Description of Artificial Sequence: Synthetic oligonucleotide
  Target: LAMA2; (-) strand; PAM type: YTN; PAM sequence: CTT
atgtttgcctagcagcttct

SEQ ID NO: 196399 - DNA, 20 bp, Artificial Sequence
  Description of Artificial Sequence: Synthetic oligonucleotide
  Target: LAMA2; (-) strand; PAM type: YTN; PAM sequence: TTA
aaaaaatcttatgtttgcct

SEQ ID NO: 196400 - DNA, 20 bp, Artificial Sequence
  Description of Artificial Sequence: Synthetic oligonucleotide
  Target: LAMA2; (-) strand; PAM type: YTN; PAM sequence: TTT
aaaaaaatcttatgtttgcc

SEQ ID NO: 196401 - DNA, 20 bp, Artificial Sequence
  Description of Artificial Sequence: Synthetic oligonucleotide
  Target: LAMA2; (-) strand; PAM type: YTN; PAM sequence: CTA
gatttaaaaaaatcttatgt

SEQ ID NO: 196402 - DNA, 20 bp, Artificial Sequence
  Description of Artificial Sequence: Synthetic oligonucleotide
  Target: LAMA2; (-) strand; PAM type: YTN; PAM sequence: TTG
tgctagatttaaaaaaatct

SEQ ID NO: 196403 - DNA, 20 bp, Artificial Sequence
  Description of Artificial Sequence: Synthetic oligonucleotide
  Target: LAMA2; (-) strand; PAM type: YTN; PAM sequence: CTT
gtgctagatttaaaaaaatc

SEQ ID NO: 196404 - DNA, 20 bp, Artificial Sequence
  Description of Artificial Sequence: Synthetic oligonucleotide
  Target: LAMA2; (-) strand; PAM type: YTN; PAM sequence: TTC
aggtccttgtgctagattta

SEQ ID NO: 196405 - DNA, 20 bp, Artificial Sequence
  Description of Artificial Sequence: Synthetic oligonucleotide
  Target: LAMA2; (-) strand; PAM type: YTN; PAM sequence: TTG
atagtcaacaggggagacag

SEQ ID NO: 196406 - DNA, 20 bp, Artificial Sequence
  Description of Artificial Sequence: Synthetic oligonucleotide
  Target: LAMA2; (-) strand; PAM type: YTN; PAM sequence: TTG
aattgatagtcaacagggga

SEQ ID NO: 196407 - DNA, 20 bp, Artificial Sequence
  Description of Artificial Sequence: Synthetic oligonucleotide
  Target: LAMA2; (-) strand; PAM type: YTN; PAM sequence: CTA
ggcattgaattgatagtcaa

SEQ ID NO: 196408 - DNA, 20 bp, Artificial Sequence
  Description of Artificial Sequence: Synthetic oligonucleotide
  Target: LAMA2; (-) strand; PAM type: YTN; PAM sequence: CTC
atgggacctaggcattgaat

SEQ ID NO: 196409 - DNA, 20 bp, Artificial Sequence
  Description of Artificial Sequence: Synthetic oligonucleotide
  Target: LAMA2; (-) strand; PAM type: YTN; PAM sequence: TTC
cctcatgggacctaggcatt

SEQ ID NO: 196410 - DNA, 20 bp, Artificial Sequence
  Description of Artificial Sequence: Synthetic oligonucleotide
  Target: LAMA2; (-) strand; PAM type: YTN; PAM sequence: CTT
ccctcatgggacctaggcat

SEQ ID NO: 196411 - DNA, 20 bp, Artificial Sequence
  Description of Artificial Sequence: Synthetic oligonucleotide
  Target: LAMA2; (-) strand; PAM type: YTN; PAM sequence: TTG
acccttccctcatgggacct

SEQ ID NO: 196412 - DNA, 20 bp, Artificial Sequence
  Description of Artificial Sequence: Synthetic oligonucleotide
  Target: LAMA2; (-) strand; PAM type: YTN; PAM sequence: TTT
gacccttccctcatgggacc

SEQ ID NO: 196413 - DNA, 20 bp, Artificial Sequence
  Description of Artificial Sequence: Synthetic oligonucleotide
  Target: LAMA2; (-) strand; PAM type: YTN; PAM sequence: CTT
tgacccttccctcatgggac

SEQ ID NO: 196414 - DNA, 20 bp, Artificial Sequence
  Description of Artificial Sequence: Synthetic oligonucleotide
  Target: LAMA2; (-) strand; PAM type: YTN; PAM sequence: TTA
acatcaaatgctttgaccct

SEQ ID NO: 196415 - DNA, 20 bp, Artificial Sequence
  Description of Artificial Sequence: Synthetic oligonucleotide
  Target: LAMA2; (-) strand; PAM type: YTN; PAM sequence: TTT
aacatcaaatgctttgaccc

SEQ ID NO: 196416 - DNA, 20 bp, Artificial Sequence
  Description of Artificial Sequence: Synthetic oligonucleotide
  Target: LAMA2; (-) strand; PAM type: YTN; PAM sequence: TTT
taacatcaaatgctttgacc

SEQ ID NO: 196417 - DNA, 20 bp, Artificial Sequence
  Description of Artificial Sequence: Synthetic oligonucleotide
  Target: LAMA2; (-) strand; PAM type: YTN; PAM sequence: CTG
agaagtacattttaacatca

SEQ ID NO: 196418 - DNA, 20 bp, Artificial Sequence
  Description of Artificial Sequence: Synthetic oligonucleotide
  Target: LAMA2; (-) strand; PAM type: YTN; PAM sequence: CTC
tgagaagtacattttaacat

SEQ ID NO: 196419 - DNA, 20 bp, Artificial Sequence
  Description of Artificial Sequence: Synthetic oligonucleotide
  Target: LAMA2; (-) strand; PAM type: YTN; PAM sequence: CTC
cgaaggacatcctctgagaa

SEQ ID NO: 196420 - DNA, 20 bp, Artificial Sequence
  Description of Artificial Sequence: Synthetic oligonucleotide
  Target: LAMA2; (-) strand; PAM type: YTN; PAM sequence: TTC
tccgaaggacatcctctgag

SEQ ID NO: 196421 - DNA, 20 bp, Artificial Sequence
  Description of Artificial Sequence: Synthetic oligonucleotide
  Target: LAMA2; (-) strand; PAM type: YTN; PAM sequence: CTT
ctccgaaggacatcctctga

SEQ ID NO: 196422 - DNA, 20 bp, Artificial Sequence
  Description of Artificial Sequence: Synthetic oligonucleotide
  Target: LAMA2; (-) strand; PAM type: YTN; PAM sequence: TTA
acaaaacataagtaagagaa

SEQ ID NO: 196423 - DNA, 20 bp, Artificial Sequence
  Description of Artificial Sequence: Synthetic oligonucleotide
  Target: LAMA2; (-) strand; PAM type: YTN; PAM sequence: CTA
caatcaaaaccaagcaaaaa

SEQ ID NO: 196424 - DNA, 20 bp, Artificial Sequence
  Description of Artificial Sequence: Synthetic oligonucleotide
  Target: LAMA2; (-) strand; PAM type: YTN; PAM sequence: CTG
atgtctacaatcaaaaccaa

SEQ ID NO: 196425 - DNA, 20 bp, Artificial Sequence
  Description of Artificial Sequence: Synthetic oligonucleotide
  Target: LAMA2; (-) strand; PAM type: YTN; PAM sequence: TTA
caaactgatgtctacaatca

SEQ ID NO: 196426 - DNA, 20 bp, Artificial Sequence
  Description of Artificial Sequence: Synthetic oligonucleotide
  Target: LAMA2; (-) strand; PAM type: YTN; PAM sequence: CTG
attacaaactgatgtctaca

SEQ ID NO: 196427 - DNA, 20 bp, Artificial Sequence
  Description of Artificial Sequence: Synthetic oligonucleotide
  Target: LAMA2; (-) strand; PAM type: YTN; PAM sequence: TTC
tgattacaaactgatgtcta

SEQ ID NO: 196428 - DNA, 20 bp, Artificial Sequence
  Description of Artificial Sequence: Synthetic oligonucleotide
  Target: LAMA2; (-) strand; PAM type: YTN; PAM sequence: TTT
ctgattacaaactgatgtct

SEQ ID NO: 196429 - DNA, 20 bp, Artificial Sequence
  Description of Artificial Sequence: Synthetic oligonucleotide
  Target: LAMA2; (-) strand; PAM type: YTN; PAM sequence: TTC
atttctgattacaaactgat

SEQ ID NO: 196430 - DNA, 20 bp, Artificial Sequence
  Description of Artificial Sequence: Synthetic oligonucleotide
  Target: LAMA2; (-) strand; PAM type: YTN; PAM sequence: CTT
catttctgattacaaactga

SEQ ID NO: 196431 - DNA, 20 bp, Artificial Sequence
  Description of Artificial Sequence: Synthetic oligonucleotide
  Target: LAMA2; (-) strand; PAM type: YTN; PAM sequence: TTC
ccttcatttctgattacaaa

SEQ ID NO: 196432 - DNA, 20 bp, Artificial Sequence
  Description of Artificial Sequence: Synthetic oligonucleotide
  Target: LAMA2; (-) strand; PAM type: YTN; PAM sequence: CTT
cccttcatttctgattacaa

SEQ ID NO: 196433 - DNA, 20 bp, Artificial Sequence
  Description of Artificial Sequence: Synthetic oligonucleotide
  Target: LAMA2; (-) strand; PAM type: YTN; PAM sequence: CTC
ccaggaccttcccttcattt

SEQ ID NO: 196434 - DNA, 20 bp, Artificial Sequence
  Description of Artificial Sequence: Synthetic oligonucleotide
  Target: LAMA2; (-) strand; PAM type: YTN; PAM sequence: TTG
gtactcccaggaccttccct

SEQ ID NO: 196435 - DNA, 20 bp, Artificial Sequence
  Description of Artificial Sequence: Synthetic oligonucleotide
  Target: LAMA2; (-) strand; PAM type: YTN; PAM sequence: TTA
aatgttggtactcccaggac

SEQ ID NO: 196436 - DNA, 20 bp, Artificial Sequence
  Description of Artificial Sequence: Synthetic oligonucleotide
  Target: LAMA2; (-) strand; PAM type: YTN; PAM sequence: CTT
aaatgttggtactcccagga

SEQ ID NO: 196437 - DNA, 20 bp, Artificial Sequence
  Description of Artificial Sequence: Synthetic oligonucleotide
  Target: LAMA2; (-) strand; PAM type: YTN; PAM sequence: CTC
ttaaatgttggtactcccag

SEQ ID NO: 196438 - DNA, 20 bp, Artificial Sequence
  Description of Artificial Sequence: Synthetic oligonucleotide
  Target: LAMA2; (-) strand; PAM type: YTN; PAM sequence: TTG
gtcactcttaaatgttggta

SEQ ID NO: 196439 - DNA, 20 bp, Artificial Sequence
  Description of Artificial Sequence: Synthetic oligonucleotide
  Target: LAMA2; (-) strand; PAM type: YTN; PAM sequence: TTT
ggtcactcttaaatgttggt

SEQ ID NO: 196440 - DNA, 20 bp, Artificial Sequence
  Description of Artificial Sequence: Synthetic oligonucleotide
  Target: LAMA2; (-) strand; PAM type: YTN; PAM sequence: TTT
tggtcactcttaaatgttgg

SEQ ID NO: 196441 - DNA, 20 bp, Artificial Sequence
  Description of Artificial Sequence: Synthetic oligonucleotide
  Target: LAMA2; (-) strand; PAM type: YTN; PAM sequence: CTT
ttggtcactcttaaatgttg

SEQ ID NO: 196442 - DNA, 20 bp, Artificial Sequence
  Description of Artificial Sequence: Synthetic oligonucleotide
  Target: LAMA2; (-) strand; PAM type: YTN; PAM sequence: TTC
ttttggtcactcttaaatgt

SEQ ID NO: 196443 - DNA, 20 bp, Artificial Sequence
  Description of Artificial Sequence: Synthetic oligonucleotide
  Target: LAMA2; (-) strand; PAM type: YTN; PAM sequence: TTC
cattcttttggtcactctta

SEQ ID NO: 196444 - DNA, 20 bp, Artificial Sequence
  Description of Artificial Sequence: Synthetic oligonucleotide
  Target: LAMA2; (-) strand; PAM type: YTN; PAM sequence: CTT
ccattcttttggtcactctt

SEQ ID NO: 196445 - DNA, 20 bp, Artificial Sequence
  Description of Artificial Sequence: Synthetic oligonucleotide
  Target: LAMA2; (-) strand; PAM type: YTN; PAM sequence: CTG
gcttccattcttttggtcac

SEQ ID NO: 196446 - DNA, 20 bp, Artificial Sequence
  Description of Artificial Sequence: Synthetic oligonucleotide
  Target: LAMA2; (-) strand; PAM type: YTN; PAM sequence: TTG
ctggcttccattcttttggt

SEQ ID NO: 196447 - DNA, 20 bp, Artificial Sequence
  Description of Artificial Sequence: Synthetic oligonucleotide
  Target: LAMA2; (-) strand; PAM type: YTN; PAM sequence: TTT
gctggcttccattcttttgg

SEQ ID NO: 196448 - DNA, 20 bp, Artificial Sequence
  Description of Artificial Sequence: Synthetic oligonucleotide
  Target: LAMA2; (-) strand; PAM type: YTN; PAM sequence: TTT
tgctggcttccattcttttg

SEQ ID NO: 196449 - DNA, 20 bp, Artificial Sequence
  Description of Artificial Sequence: Synthetic oligonucleotide
  Target: LAMA2; (-) strand; PAM type: YTN; PAM sequence: CTT
ttgctggcttccattctttt

SEQ ID NO: 196450 - DNA, 20 bp, Artificial Sequence
  Description of Artificial Sequence: Synthetic oligonucleotide
  Target: LAMA2; (-) strand; PAM type: YTN; PAM sequence: CTA
tcccttttgctggcttccat

SEQ ID NO: 196451 - DNA, 20 bp, Artificial Sequence
  Description of Artificial Sequence: Synthetic oligonucleotide
  Target: LAMA2; (-) strand; PAM type: YTN; PAM sequence: TTC
tatcccttttgctggcttcc

SEQ ID NO: 196452 - DNA, 20 bp, Artificial Sequence
  Description of Artificial Sequence: Synthetic oligonucleotide
  Target: LAMA2; (-) strand; PAM type: YTN; PAM sequence: TTG
ggagtcaagatgatagaatt

SEQ ID NO: 196453 - DNA, 20 bp, Artificial Sequence
  Description of Artificial Sequence: Synthetic oligonucleotide
  Target: LAMA2; (-) strand; PAM type: YTN; PAM sequence: TTT
gggagtcaagatgatagaat

SEQ ID NO: 196454 - DNA, 20 bp, Artificial Sequence
  Description of Artificial Sequence: Synthetic oligonucleotide
  Target: LAMA2; (-) strand; PAM type: YTN; PAM sequence: CTA
tcaacatggagtaggtttgg

SEQ ID NO: 196455 - DNA, 20 bp, Artificial Sequence
  Description of Artificial Sequence: Synthetic oligonucleotide
  Target: LAMA2; (-) strand; PAM type: YTN; PAM sequence: TTA
agactatcaacatggagtag

SEQ ID NO: 196456 - DNA, 20 bp, Artificial Sequence
  Description of Artificial Sequence: Synthetic oligonucleotide
  Target: LAMA2; (-) strand; PAM type: YTN; PAM sequence: CTA
agattaagactatcaacatg

SEQ ID NO: 196457 - DNA, 20 bp, Artificial Sequence
  Description of Artificial Sequence: Synthetic oligonucleotide
  Target: LAMA2; (-) strand; PAM type: YTN; PAM sequence: TTA
actaagattaagactatcaa

SEQ ID NO: 196458 - DNA, 20 bp, Artificial Sequence
  Description of Artificial Sequence: Synthetic oligonucleotide
  Target: LAMA2; (-) strand; PAM type: YTN; PAM sequence: TTG
gatcaagcagcagggatcat

SEQ ID NO: 196459 - DNA, 20 bp, Artificial Sequence
  Description of Artificial Sequence: Synthetic oligonucleotide
  Target: LAMA2; (-) strand; PAM type: YTN; PAM sequence: TTT
ggatcaagcagcagggatca

SEQ ID NO: 196460 - DNA, 20 bp, Artificial Sequence
  Description of Artificial Sequence: Synthetic oligonucleotide
  Target: LAMA2; (-) strand; PAM type: YTN; PAM sequence: TTT
tggatcaagcagcagggatc

SEQ ID NO: 196461 - DNA, 20 bp, Artificial Sequence
  Description of Artificial Sequence: Synthetic oligonucleotide
  Target: LAMA2; (-) strand; PAM type: YTN; PAM sequence: TTT
ttggatcaagcagcagggat

SEQ ID NO: 196462 - DNA, 20 bp, Artificial Sequence
  Description of Artificial Sequence: Synthetic oligonucleotide
  Target: LAMA2; (-) strand; PAM type: YTN; PAM sequence: TTA
ggtttttggatcaagcagca

SEQ ID NO: 196463 - DNA, 20 bp, Artificial Sequence
  Description of Artificial Sequence: Synthetic oligonucleotide
  Target: LAMA2; (-) strand; PAM type: YTN; PAM sequence: TTG
ttaggtttttggatcaagca

SEQ ID NO: 196464 - DNA, 20 bp, Artificial Sequence
  Description of Artificial Sequence: Synthetic oligonucleotide
  Target: LAMA2; (-) strand; PAM type: YTN; PAM sequence: CTG
aagaggtaacaacagtgcag

SEQ ID NO: 196465 - DNA, 20 bp, Artificial Sequence
  Description of Artificial Sequence: Synthetic oligonucleotide
  Target: LAMA2; (-) strand; PAM type: YTN; PAM sequence: TTG
tccctgaagaggtaacaaca

SEQ ID NO: 196466 - DNA, 20 bp, Artificial Sequence
  Description of Artificial Sequence: Synthetic oligonucleotide
  Target: LAMA2; (-) strand; PAM type: YTN; PAM sequence: TTT
gtccctgaagaggtaacaac

SEQ ID NO: 196467 - DNA, 20 bp, Artificial Sequence
  Description of Artificial Sequence: Synthetic oligonucleotide
  Target: LAMA2; (-) strand; PAM type: YTN; PAM sequence: TTT
tgtccctgaagaggtaacaa

SEQ ID NO: 196468 - DNA, 20 bp, Artificial Sequence
  Description of Artificial Sequence: Synthetic oligonucleotide
  Target: LAMA2; (-) strand; PAM type: YTN; PAM sequence: TTG
aaattttgtccctgaagagg

SEQ ID NO: 196469 - DNA, 20 bp, Artificial Sequence
  Description of Artificial Sequence: Synthetic oligonucleotide
  Target: LAMA2; (-) strand; PAM type: YTN; PAM sequence: CTA
agtggaaagtattgaaattt

SEQ ID NO: 196470 - DNA, 20 bp, Artificial Sequence
  Description of Artificial Sequence: Synthetic oligonucleotide
  Target: LAMA2; (-) strand; PAM type: YTN; PAM sequence: TTA
gaagtcagtagtgaaagtct

SEQ ID NO: 196471 - DNA, 20 bp, Artificial Sequence
  Description of Artificial Sequence: Synthetic oligonucleotide
  Target: LAMA2; (-) strand; PAM type: YTN; PAM sequence: TTC
caaataagagaaagcaaaaa

SEQ ID NO: 196472 - DNA, 20 bp, Artificial Sequence
  Description of Artificial Sequence: Synthetic oligonucleotide
  Target: LAMA2; (-) strand; PAM type: YTN; PAM sequence: CTG
ttccaaataagagaaagcaa

SEQ ID NO: 196473 - DNA, 20 bp, Artificial Sequence
  Description of Artificial Sequence: Synthetic oligonucleotide
  Target: LAMA2; (-) strand; PAM type: YTN; PAM sequence: CTG
aataactgttccaaataaga

SEQ ID NO: 196474 - DNA, 20 bp, Artificial Sequence
  Description of Artificial Sequence: Synthetic oligonucleotide
  Target: LAMA2; (-) strand; PAM type: YTN; PAM sequence: TTA
gggtaagctgaataactgtt

SEQ ID NO: 196475 - DNA, 20 bp, Artificial Sequence
  Description of Artificial Sequence: Synthetic oligonucleotide
  Target: LAMA2; (-) strand; PAM type: YTN; PAM sequence: CTT
agggtaagctgaataactgt

SEQ ID NO: 196476 - DNA, 20 bp, Artificial Sequence
  Description of Artificial Sequence: Synthetic oligonucleotide
  Target: LAMA2; (-) strand; PAM type: YTN; PAM sequence: CTG
gacttagggtaagctgaata

SEQ ID NO: 196477 - DNA, 20 bp, Artificial Sequence
  Description of Artificial Sequence: Synthetic oligonucleotide
  Target: LAMA2; (-) strand; PAM type: YTN; PAM sequence: CTC
tggacttagggtaagctgaa

SEQ ID NO: 196478 - DNA, 20 bp, Artificial Sequence
  Description of Artificial Sequence: Synthetic oligonucleotide
  Target: LAMA2; (-) strand; PAM type: YTN; PAM sequence: TTC
actctggacttagggtaagc

SEQ ID NO: 196479 - DNA, 20 bp, Artificial Sequence
  Description of Artificial Sequence: Synthetic oligonucleotide
  Target: LAMA2; (-) strand; PAM type: YTN; PAM sequence: TTG
gaaattcactctggacttag

SEQ ID NO: 196480 - DNA, 20 bp, Artificial Sequence
  Description of Artificial Sequence: Synthetic oligonucleotide
  Target: LAMA2; (-) strand; PAM type: YTN; PAM sequence: TTT
ggaaattcactctggactta

SEQ ID NO: 196481 - DNA, 20 bp, Artificial Sequence
  Description of Artificial Sequence: Synthetic oligonucleotide
  Target: LAMA2; (-) strand; PAM type: YTN; PAM sequence: TTT
tggaaattcactctggactt

SEQ ID NO: 196482 - DNA, 20 bp, Artificial Sequence
  Description of Artificial Sequence: Synthetic oligonucleotide
  Target: LAMA2; (-) strand; PAM type: YTN; PAM sequence: TTT
ttggaaattcactctggact

SEQ ID NO: 196483 - DNA, 20 bp, Artificial Sequence
  Description of Artificial Sequence: Synthetic oligonucleotide
  Target: LAMA2; (-) strand; PAM type: YTN; PAM sequence: TTT
tttggaaattcactctggac

SEQ ID NO: 196484 - DNA, 20 bp, Artificial Sequence
  Description of Artificial Sequence: Synthetic oligonucleotide
  Target: LAMA2; (-) strand; PAM type: YTN; PAM sequence: TTG
attttttggaaattcactct

SEQ ID NO: 196485 - DNA, 20 bp, Artificial Sequence
  Description of Artificial Sequence: Synthetic oligonucleotide
  Target: LAMA2; (-) strand; PAM type: YTN; PAM sequence: TTT
gattttttggaaattcactc

SEQ ID NO: 196486 - DNA, 20 bp, Artificial Sequence
  Description of Artificial Sequence: Synthetic oligonucleotide
  Target: LAMA2; (-) strand; PAM type: YTN; PAM sequence: CTT
tgattttttggaaattcact

SEQ ID NO: 196487 - DNA, 20 bp, Artificial Sequence
  Description of Artificial Sequence: Synthetic oligonucleotide
  Target: LAMA2; (-) strand; PAM type: YTN; PAM sequence: TTG
cagaacctttgattttttgg

SEQ ID NO: 196488 - DNA, 20 bp, Artificial Sequence
  Description of Artificial Sequence: Synthetic oligonucleotide
  Target: LAMA2; (-) strand; PAM type: YTN; PAM sequence: TTG
aagagaaatgaaaagttgca

SEQ ID NO: 196489 - DNA, 20 bp, Artificial Sequence
  Description of Artificial Sequence: Synthetic oligonucleotide
  Target: LAMA2; (-) strand; PAM type: YTN; PAM sequence: TTG
gaattgaagagaaatgaaaa

SEQ ID NO: 196490 - DNA, 20 bp, Artificial Sequence
  Description of Artificial Sequence: Synthetic oligonucleotide
  Target: LAMA2; (-) strand; PAM type: YTN; PAM sequence: CTG
agttggaattgaagagaaat

SEQ ID NO: 196491 - DNA, 20 bp, Artificial Sequence
  Description of Artificial Sequence: Synthetic oligonucleotide
  Target: LAMA2; (-) strand; PAM type: YTN; PAM sequence: CTA
ggtgataaacgtgtgaacct

SEQ ID NO: 196492 - DNA, 20 bp, Artificial Sequence
  Description of Artificial Sequence: Synthetic oligonucleotide
  Target: LAMA2; (-) strand; PAM type: YTN; PAM sequence: CTA
cactaggtgataaacgtgtg

SEQ ID NO: 196493 - DNA, 20 bp, Artificial Sequence
  Description of Artificial Sequence: Synthetic oligonucleotide
  Target: LAMA2; (-) strand; PAM type: YTN; PAM sequence: TTC
tacactaggtgataaacgtg

SEQ ID NO: 196494 - DNA, 20 bp, Artificial Sequence
  Description of Artificial Sequence: Synthetic oligonucleotide
  Target: LAMA2; (-) strand; PAM type: YTN; PAM sequence: CTT
ctacactaggtgataaacgt

SEQ ID NO: 196495 - DNA, 20 bp, Artificial Sequence
  Description of Artificial Sequence: Synthetic oligonucleotide
  Target: LAMA2; (-) strand; PAM type: YTN; PAM sequence: CTG
tggaggaaagcccttctaca

SEQ ID NO: 196496 - DNA, 20 bp, Artificial Sequence
  Description of Artificial Sequence: Synthetic oligonucleotide
  Target: LAMA2; (-) strand; PAM type: YTN; PAM sequence: TTG
ccaagcaaaactgtggagga

SEQ ID NO: 196497 - DNA, 20 bp, Artificial Sequence
  Description of Artificial Sequence: Synthetic oligonucleotide
  Target: LAMA2; (-) strand; PAM type: YTN; PAM sequence: TTT
gccaagcaaaactgtggagg

SEQ ID NO: 196498 - DNA, 20 bp, Artificial Sequence
  Description of Artificial Sequence: Synthetic oligonucleotide
  Target: LAMA2; (-) strand; PAM type: YTN; PAM sequence: TTG
aaggatgaaaaggagtttgc

SEQ ID NO: 196499 - DNA, 20 bp, Artificial Sequence
  Description of Artificial Sequence: Synthetic oligonucleotide
  Target: LAMA2; (-) strand; PAM type: YTN; PAM sequence: CTT
gaaggatgaaaaggagtttg

SEQ ID NO: 196500 - DNA, 20 bp, Artificial Sequence
  Description of Artificial Sequence: Synthetic oligonucleotide
  Target: LAMA2; (-) strand; PAM type: YTN; PAM sequence: TTG
agtcttgaaggatgaaaagg

SEQ ID NO: 196501 - DNA, 20 bp, Artificial Sequence
  Description of Artificial Sequence: Synthetic oligonucleotide
  Target: LAMA2; (-) strand; PAM type: YTN; PAM sequence: TTG
ttgagtcttgaaggatgaaa

SEQ ID NO: 196502 - DNA, 20 bp, Artificial Sequence
  Description of Artificial Sequence: Synthetic oligonucleotide
  Target: LAMA2; (-) strand; PAM type: YTN; PAM sequence: TTT
gttgagtcttgaaggatgaa

SEQ ID NO: 196503 - DNA, 20 bp, Artificial Sequence
  Description of Artificial Sequence: Synthetic oligonucleotide
  Target: LAMA2; (-) strand; PAM type: YTN; PAM sequence: TTT
tgttgagtcttgaaggatga

SEQ ID NO: 196504 - DNA, 20 bp, Artificial Sequence
  Description of Artificial Sequence: Synthetic oligonucleotide
  Target: LAMA2; (-) strand; PAM type: YTN; PAM sequence: TTC
atgaaaaggcaacaattttg

SEQ ID NO: 196505 - DNA, 20 bp, Artificial Sequence
  Description of Artificial Sequence: Synthetic oligonucleotide
  Target: LAMA2; (-) strand; PAM type: YTN; PAM sequence: TTT
catgaaaaggcaacaatttt

SEQ ID NO: 196506 - DNA, 20 bp, Artificial Sequence
  Description of Artificial Sequence: Synthetic oligonucleotide
  Target: LAMA2; (-) strand; PAM type: YTN; PAM sequence: TTT
tcatgaaaaggcaacaattt

SEQ ID NO: 196507 - DNA, 20 bp, Artificial Sequence
  Description of Artificial Sequence: Synthetic oligonucleotide
  Target: LAMA2; (-) strand; PAM type: YTN; PAM sequence: TTT
ttcatgaaaaggcaacaatt

SEQ ID NO: 196508 - DNA, 20 bp, Artificial Sequence
  Description of Artificial Sequence: Synthetic oligonucleotide
  Target: LAMA2; (-) strand; PAM type: YTN; PAM sequence: CTT
tttcatgaaaaggcaacaat

SEQ ID NO: 196509 - DNA, 20 bp, Artificial Sequence
  Description of Artificial Sequence: Synthetic oligonucleotide
  Target: LAMA2; (-) strand; PAM type: YTN; PAM sequence: TTA
atatcagaaggatggaagag

SEQ ID NO: 196510 - DNA, 20 bp, Artificial Sequence
  Description of Artificial Sequence: Synthetic oligonucleotide
  Target: LAMA2; (-) strand; PAM type: YTN; PAM sequence: TTA
ttaatatcagaaggatggaa

SEQ ID NO: 196511 - DNA, 20 bp, Artificial Sequence
  Description of Artificial Sequence: Synthetic oligonucleotide
  Target: LAMA2; (-) strand; PAM type: YTN; PAM sequence: CTA
tcatggacacaagaacaaaa

SEQ ID NO: 196512 - DNA, 20 bp, Artificial Sequence
  Description of Artificial Sequence: Synthetic oligonucleotide
  Target: LAMA2; (-) strand; PAM type: YTN; PAM sequence: TTA
tgacaaagtctatcatggac

SEQ ID NO: 196513 - DNA, 20 bp, Artificial Sequence
  Description of Artificial Sequence: Synthetic oligonucleotide
  Target: LAMA2; (-) strand; PAM type: YTN; PAM sequence: CTG
taatacattatgacaaagtc

SEQ ID NO: 196514 - DNA, 20 bp, Artificial Sequence
  Description of Artificial Sequence: Synthetic oligonucleotide
  Target: LAMA2; (-) strand; PAM type: YTN; PAM sequence: CTC
caggataaactgtaatacat

SEQ ID NO: 196515 - DNA, 20 bp, Artificial Sequence
  Description of Artificial Sequence: Synthetic oligonucleotide
  Target: LAMA2; (-) strand; PAM type: YTN; PAM sequence: TTC
ctccaggataaactgtaata

SEQ ID NO: 196516 - DNA, 20 bp, Artificial Sequence
  Description of Artificial Sequence: Synthetic oligonucleotide
  Target: LAMA2; (-) strand; PAM type: YTN; PAM sequence: TTT
cctccaggataaactgtaat

SEQ ID NO: 196517 - DNA, 20 bp, Artificial Sequence
  Description of Artificial Sequence: Synthetic oligonucleotide
  Target: LAMA2; (-) strand; PAM type: YTN; PAM sequence: CTT
tcctccaggataaactgtaa

SEQ ID NO: 196518 - DNA, 20 bp, Artificial Sequence
  Description of Artificial Sequence: Synthetic oligonucleotide
  Target: LAMA2; (-) strand; PAM type: YTN; PAM sequence: TTG
tggtgctttcctccaggata

SEQ ID NO: 196519 - DNA, 20 bp, Artificial Sequence
  Description of Artificial Sequence: Synthetic oligonucleotide
  Target: LAMA2; (-) strand; PAM type: YTN; PAM sequence: CTT
gtggtgctttcctccaggat

SEQ ID NO: 196520 - DNA, 20 bp, Artificial Sequence
  Description of Artificial Sequence: Synthetic oligonucleotide
  Target: LAMA2; (-) strand; PAM type: YTN; PAM sequence: TTG
gtcttgtggtgctttcctcc

SEQ ID NO: 196521 - DNA, 20 bp, Artificial Sequence
  Description of Artificial Sequence: Synthetic oligonucleotide
  Target: LAMA2; (-) strand; PAM type: YTN; PAM sequence: CTT
ggtcttgtggtgctttcctc

SEQ ID NO: 196522 - DNA, 20 bp, Artificial Sequence
  Description of Artificial Sequence: Synthetic oligonucleotide
  Target: LAMA2; (-) strand; PAM type: YTN; PAM sequence: CTC
ttggtcttgtggtgctttcc

SEQ ID NO: 196523 - DNA, 20 bp, Artificial Sequence
  Description of Artificial Sequence: Synthetic oligonucleotide
  Target: LAMA2; (-) strand; PAM type: YTN; PAM sequence: TTG
ggatgaaaaaaaaaaaggaa

SEQ ID NO: 196524 - DNA, 20 bp, Artificial Sequence
  Description of Artificial Sequence: Synthetic oligonucleotide
  Target: LAMA2; (-) strand; PAM type: YTN; PAM sequence: CTA
tgtatcaagcattgggatga

SEQ ID NO: 196525 - DNA, 20 bp, Artificial Sequence
  Description of Artificial Sequence: Synthetic oligonucleotide
  Target: LAMA2; (-) strand; PAM type: YTN; PAM sequence: CTA
ctatgtatcaagcattggga

SEQ ID NO: 196526 - DNA, 20 bp, Artificial Sequence
  Description of Artificial Sequence: Synthetic oligonucleotide
  Target: LAMA2; (-) strand; PAM type: YTN; PAM sequence: TTA
tcaaatggctactatgtatc

SEQ ID NO: 196527 - DNA, 20 bp, Artificial Sequence
  Description of Artificial Sequence: Synthetic oligonucleotide
  Target: LAMA2; (-) strand; PAM type: YTN; PAM sequence: CTT
atcaaatggctactatgtat

SEQ ID NO: 196528 - DNA, 20 bp, Artificial Sequence
  Description of Artificial Sequence: Synthetic oligonucleotide
  Target: LAMA2; (-) strand; PAM type: YTN; PAM sequence: TTC
aacatgtacttatcaaatgg

SEQ ID NO: 196529 - DNA, 20 bp, Artificial Sequence
  Description of Artificial Sequence: Synthetic oligonucleotide
  Target: LAMA2; (-) strand; PAM type: YTN; PAM sequence: TTC
attcaacatgtacttatcaa

SEQ ID NO: 196530 - DNA, 20 bp, Artificial Sequence
  Description of Artificial Sequence: Synthetic oligonucleotide
  Target: LAMA2; (-) strand; PAM type: YTN; PAM sequence: TTT
cattcaacatgtacttatca

SEQ ID NO: 196531 - DNA, 20 bp, Artificial Sequence
  Description of Artificial Sequence: Synthetic oligonucleotide
  Target: LAMA2; (-) strand; PAM type: YTN; PAM sequence: CTT
tcattcaacatgtacttatc

SEQ ID NO: 196532 - DNA, 20 bp, Artificial Sequence
  Description of Artificial Sequence: Synthetic oligonucleotide
  Target: LAMA2; (-) strand; PAM type: YTN; PAM sequence: TTC
atgctttcattcaacatgta

SEQ ID NO: 196533 - DNA, 20 bp, Artificial Sequence
  Description of Artificial Sequence: Synthetic oligonucleotide
  Target: LAMA2; (-) strand; PAM type: YTN; PAM sequence: TTA
taaattcatgctttcattca

SEQ ID NO: 196534 - DNA, 20 bp, Artificial Sequence
  Description of Artificial Sequence: Synthetic oligonucleotide
  Target: LAMA2; (-) strand; PAM type: YTN; PAM sequence: CTC
caagtcaggtgaaggtatat

SEQ ID NO: 196535 - DNA, 20 bp, Artificial Sequence
  Description of Artificial Sequence: Synthetic oligonucleotide
  Target: LAMA2; (-) strand; PAM type: YTN; PAM sequence: TTA
tgaaactccaagtcaggtga

SEQ ID NO: 196536 - DNA, 20 bp, Artificial Sequence
  Description of Artificial Sequence: Synthetic oligonucleotide
  Target: LAMA2; (-) strand; PAM type: YTN; PAM sequence: CTT
atgaaactccaagtcaggtg

SEQ ID NO: 196537 - DNA, 20 bp, Artificial Sequence
  Description of Artificial Sequence: Synthetic oligonucleotide
  Target: LAMA2; (-) strand; PAM type: YTN; PAM sequence: TTC
cttatgaaactccaagtcag

SEQ ID NO: 196538 - DNA, 20 bp, Artificial Sequence
  Description of Artificial Sequence: Synthetic oligonucleotide
  Target: LAMA2; (-) strand; PAM type: YTN; PAM sequence: TTG
cattccttatgaaactccaa

SEQ ID NO: 196539 - DNA, 20 bp, Artificial Sequence
  Description of Artificial Sequence: Synthetic oligonucleotide
  Target: LAMA2; (-) strand; PAM type: YTN; PAM sequence: CTG
ttgcattccttatgaaactc

SEQ ID NO: 196540 - DNA, 20 bp, Artificial Sequence
  Description of Artificial Sequence: Synthetic oligonucleotide
  Target: LAMA2; (-) strand; PAM type: YTN; PAM sequence: TTG
gaagctgttgcattccttat

SEQ ID NO: 196541 - DNA, 20 bp, Artificial Sequence
  Description of Artificial Sequence: Synthetic oligonucleotide
  Target: LAMA2; (-) strand; PAM type: YTN; PAM sequence: TTA
agcaaaaagaaagtaaatga

SEQ ID NO: 196542 - DNA, 20 bp, Artificial Sequence
  Description of Artificial Sequence: Synthetic oligonucleotide
  Target: LAMA2; (-) strand; PAM type: YTN; PAM sequence: TTG
ttaagcaaaaagaaagtaaa

SEQ ID NO: 196543 - DNA, 20 bp, Artificial Sequence
  Description of Artificial Sequence: Synthetic oligonucleotide
  Target: LAMA2; (-) strand; PAM type: YTN; PAM sequence: TTT
gttaagcaaaaagaaagtaa

SEQ ID NO: 196544 - DNA, 20 bp, Artificial Sequence
  Description of Artificial Sequence: Synthetic oligonucleotide
  Target: LAMA2; (-) strand; PAM type: YTN; PAM sequence: CTT
tgttaagcaaaaagaaagta

SEQ ID NO: 196545 - DNA, 20 bp, Artificial Sequence
  Description of Artificial Sequence: Synthetic oligonucleotide
  Target: LAMA2; (-) strand; PAM type: YTN; PAM sequence: CTA
tgtgtcagatactttgttaa

SEQ ID NO: 196546 - DNA, 20 bp, Artificial Sequence
  Description of Artificial Sequence: Synthetic oligonucleotide
  Target: LAMA2; (-) strand; PAM type: YTN; PAM sequence: TTG
tactatgtgtcagatacttt

SEQ ID NO: 196547 - DNA, 20 bp, Artificial Sequence
  Description of Artificial Sequence: Synthetic oligonucleotide
  Target: LAMA2; (-) strand; PAM type: YTN; PAM sequence: TTT
gtactatgtgtcagatactt

SEQ ID NO: 196548 - DNA, 20 bp, Artificial Sequence
  Description of Artificial Sequence: Synthetic oligonucleotide
  Target: LAMA2; (-) strand; PAM type: YTN; PAM sequence: TTT
tgtactatgtgtcagatact

SEQ ID NO: 196549 - DNA, 20 bp, Artificial Sequence
  Description of Artificial Sequence: Synthetic oligonucleotide
  Target: LAMA2; (-) strand; PAM type: YTN; PAM sequence: CTT
ttgtactatgtgtcagatac

SEQ ID NO: 196550 - DNA, 20 bp, Artificial Sequence
  Description of Artificial Sequence: Synthetic oligonucleotide
  Target: LAMA2; (-) strand; PAM type: YTN; PAM sequence: TTA
acttttgtactatgtgtcag

SEQ ID NO: 196551 - DNA, 20 bp, Artificial Sequence
  Description of Artificial Sequence: Synthetic oligonucleotide
  Target: LAMA2; (-) strand; PAM type: YTN; PAM sequence: TTT
aacttttgtactatgtgtca

SEQ ID NO: 196552 - DNA, 20 bp, Artificial Sequence
  Description of Artificial Sequence: Synthetic oligonucleotide
  Target: LAMA2; (-) strand; PAM type: YTN; PAM sequence: TTA
taatatttaacttttgtact

SEQ ID NO: 196553 - DNA, 20 bp, Artificial Sequence
  Description of Artificial Sequence: Synthetic oligonucleotide
  Target: LAMA2; (-) strand; PAM type: YTN; PAM sequence: TTT
ataatatttaacttttgtac

SEQ ID NO: 196554 - DNA, 20 bp, Artificial Sequence
  Description of Artificial Sequence: Synthetic oligonucleotide
  Target: LAMA2; (-) strand; PAM type: YTN; PAM sequence: TTA
tttataatatttaacttttg

SEQ ID NO: 196555 - DNA, 20 bp, Artificial Sequence
  Description of Artificial Sequence: Synthetic oligonucleotide
  Target: LAMA2; (-) strand; PAM type: YTN; PAM sequence: TTT
atttataatatttaactttt

SEQ ID NO: 196556 - DNA, 20 bp, Artificial Sequence
  Description of Artificial Sequence: Synthetic oligonucleotide
  Target: LAMA2; (-) strand; PAM type: YTN; PAM sequence: TTT
tatttataatatttaacttt

SEQ ID NO: 196557 - DNA, 20 bp, Artificial Sequence
  Description of Artificial Sequence: Synthetic oligonucleotide
  Target: LAMA2; (-) strand; PAM type: YTN; PAM sequence: CTT
ttatttataatatttaactt

SEQ ID NO: 196558 - DNA, 20 bp, Artificial Sequence
  Description of Artificial Sequence: Synthetic oligonucleotide
  Target: LAMA2; (-) strand; PAM type: YTN; PAM sequence: TTA
atcttttatttataatattt

SEQ ID NO: 196559 - DNA, 20 bp, Artificial Sequence
  Description of Artificial Sequence: Synthetic oligonucleotide
  Target: LAMA2; (-) strand; PAM type: YTN; PAM sequence: CTG
tgcaattaatcttttattta

SEQ ID NO: 196560 - DNA, 20 bp, Artificial Sequence
  Description of Artificial Sequence: Synthetic oligonucleotide
  Target: LAMA2; (-) strand; PAM type: YTN; PAM sequence: TTA
aaaatatctgtgcaattaat

SEQ ID NO: 196561 - DNA, 20 bp, Artificial Sequence
  Description of Artificial Sequence: Synthetic oligonucleotide
  Target: LAMA2; (-) strand; PAM type: YTN; PAM sequence: TTT
aaaaatatctgtgcaattaa

SEQ ID NO: 196562 - DNA, 20 bp, Artificial Sequence
  Description of Artificial Sequence: Synthetic oligonucleotide
  Target: LAMA2; (-) strand; PAM type: YTN; PAM sequence: CTT
taaaaatatctgtgcaatta

SEQ ID NO: 196563 - DNA, 20 bp, Artificial Sequence
  Description of Artificial Sequence: Synthetic oligonucleotide
  Target: LAMA2; (-) strand; PAM type: YTN; PAM sequence: CTC
ctttaaaaatatctgtgcaa

SEQ ID NO: 196564 - DNA, 20 bp, Artificial Sequence
  Description of Artificial Sequence: Synthetic oligonucleotide
  Target: LAMA2; (-) strand; PAM type: YTN; PAM sequence: CTG
tctcctttaaaaatatctgt

SEQ ID NO: 196565 - DNA, 20 bp, Artificial Sequence
  Description of Artificial Sequence: Synthetic oligonucleotide
  Target: LAMA2; (-) strand; PAM type: YTN; PAM sequence: TTC
tgtctcctttaaaaatatct

SEQ ID NO: 196566 - DNA, 20 bp, Artificial Sequence
  Description of Artificial Sequence: Synthetic oligonucleotide
  Target: LAMA2; (-) strand; PAM type: YTN; PAM sequence: TTT
ctgtctcctttaaaaatatc

SEQ ID NO: 196567 - DNA, 20 bp, Artificial Sequence
  Description of Artificial Sequence: Synthetic oligonucleotide
  Target: LAMA2; (-) strand; PAM type: YTN; PAM sequence: TTT
tctgtctcctttaaaaatat

SEQ ID NO: 196568 - DNA, 20 bp, Artificial Sequence
  Description of Artificial Sequence: Synthetic oligonucleotide
  Target: LAMA2; (-) strand; PAM type: YTN; PAM sequence: CTT
ttctgtctcctttaaaaata

SEQ ID NO: 196569 - DNA, 20 bp, Artificial Sequence
  Description of Artificial Sequence: Synthetic oligonucleotide
  Target: LAMA2; (-) strand; PAM type: YTN; PAM sequence: TTC
aaatcttttctgtctccttt

SEQ ID NO: 196570 - DNA, 20 bp, Artificial Sequence
  Description of Artificial Sequence: Synthetic oligonucleotide
  Target: LAMA2; (-) strand; PAM type: YTN; PAM sequence: CTG
gatattcaaatcttttctgt

SEQ ID NO: 196571 - DNA, 20 bp, Artificial Sequence
  Description of Artificial Sequence: Synthetic oligonucleotide
  Target: LAMA2; (-) strand; PAM type: YTN; PAM sequence: TTC
ctggatattcaaatcttttc

SEQ ID NO: 196572 - DNA, 20 bp, Artificial Sequence
  Description of Artificial Sequence: Synthetic oligonucleotide
  Target: LAMA2; (-) strand; PAM type: YTN; PAM sequence: TTG
ggtggaattcctggatattc

SEQ ID NO: 196573 - DNA, 20 bp, Artificial Sequence
  Description of Artificial Sequence: Synthetic oligonucleotide
  Target: LAMA2; (-) strand; PAM type: YTN; PAM sequence: TTC
atcgttgggtggaattcctg

SEQ ID NO: 196574 - DNA, 20 bp, Artificial Sequence
  Description of Artificial Sequence: Synthetic oligonucleotide
  Target: LAMA2; (-) strand; PAM type: YTN; PAM sequence: TTT
catcgttgggtggaattcct

SEQ ID NO: 196575 - DNA, 20 bp, Artificial Sequence
  Description of Artificial Sequence: Synthetic oligonucleotide
  Target: LAMA2; (-) strand; PAM type: YTN; PAM sequence: CTT
tcatcgttgggtggaattcc

SEQ ID NO: 196576 - DNA, 20 bp, Artificial Sequence
  Description of Artificial Sequence: Synthetic oligonucleotide
  Target: LAMA2; (-) strand; PAM type: YTN; PAM sequence: CTA
taggtctttcatcgttgggt

SEQ ID NO: 196577 - DNA, 20 bp, Artificial Sequence
  Description of Artificial Sequence: Synthetic oligonucleotide
  Target: LAMA2; (-) strand; PAM type: YTN; PAM sequence: TTG
taaccgcctataggtctttc

SEQ ID NO: 196578 - DNA, 20 bp, Artificial Sequence
  Description of Artificial Sequence: Synthetic oligonucleotide
  Target: LAMA2; (-) strand; PAM type: YTN; PAM sequence: CTT
gtaaccgcctataggtcttt

SEQ ID NO: 196579 - DNA, 20 bp, Artificial Sequence
  Description of Artificial Sequence: Synthetic oligonucleotide
  Target: LAMA2; (-) strand; PAM type: YTN; PAM sequence: CTA
cttgtaaccgcctataggtc

SEQ ID NO: 196580 - DNA, 20 bp, Artificial Sequence
  Description of Artificial Sequence: Synthetic oligonucleotide
  Target: LAMA2; (-) strand; PAM type: YTN; PAM sequence: TTA
cctacttgtaaccgcctata

SEQ ID NO: 196581 - DNA, 20 bp, Artificial Sequence
  Description of Artificial Sequence: Synthetic oligonucleotide
  Target: LAMA2; (-) strand; PAM type: YTN; PAM sequence: CTT
acctacttgtaaccgcctat

SEQ ID NO: 196582 - DNA, 20 bp, Artificial Sequence
  Description of Artificial Sequence: Synthetic oligonucleotide
  Target: LAMA2; (-) strand; PAM type: YTN; PAM sequence: CTG
cttacctacttgtaaccgcc

SEQ ID NO: 196583 - DNA, 20 bp, Artificial Sequence
  Description of Artificial Sequence: Synthetic oligonucleotide
  Target: LAMA2; (-) strand; PAM type: YTN; PAM sequence: CTC
tgcttacctacttgtaaccg

SEQ ID NO: 196584 - DNA, 20 bp, Artificial Sequence
  Description of Artificial Sequence: Synthetic oligonucleotide
  Target: LAMA2; (-) strand; PAM type: YTN; PAM sequence: TTG
gactctgcttacctacttgt

SEQ ID NO: 196585 - DNA, 20 bp, Artificial Sequence
  Description of Artificial Sequence: Synthetic oligonucleotide
  Target: LAMA2; (-) strand; PAM type: YTN; PAM sequence: TTT
ggactctgcttacctacttg

SEQ ID NO: 196586 - DNA, 20 bp, Artificial Sequence
  Description of Artificial Sequence: Synthetic oligonucleotide
  Target: LAMA2; (-) strand; PAM type: YTN; PAM sequence: TTT
tggactctgcttacctactt

SEQ ID NO: 196587 - DNA, 20 bp, Artificial Sequence
  Description of Artificial Sequence: Synthetic oligonucleotide
  Target: LAMA2; (-) strand; PAM type: YTN; PAM sequence: CTA
cattttggactctgcttacc

SEQ ID NO: 196588 - DNA, 20 bp, Artificial Sequence
  Description of Artificial Sequence: Synthetic oligonucleotide
  Target: LAMA2; (-) strand; PAM type: YTN; PAM sequence: TTG
aaaatgaccctacattttgg

SEQ ID NO: 196589 - DNA, 20 bp, Artificial Sequence
  Description of Artificial Sequence: Synthetic oligonucleotide
  Target: LAMA2; (-) strand; PAM type: YTN; PAM sequence: CTG
ccattgaaaatgaccctaca

SEQ ID NO: 196590 - DNA, 20 bp, Artificial Sequence
  Description of Artificial Sequence: Synthetic oligonucleotide
  Target: LAMA2; (-) strand; PAM type: YTN; PAM sequence: CTC
tgccattgaaaatgacccta

SEQ ID NO: 196591 - DNA, 20 bp, Artificial Sequence
  Description of Artificial Sequence: Synthetic oligonucleotide
  Target: LAMA2; (-) strand; PAM type: YTN; PAM sequence: CTC
tctgccattgaaaatgaccc

SEQ ID NO: 196592 - DNA, 20 bp, Artificial Sequence
  Description of Artificial Sequence: Synthetic oligonucleotide
  Target: LAMA2; (-) strand; PAM type: YTN; PAM sequence: TTC
ctctctgccattgaaaatga

SEQ ID NO: 196593 - DNA, 20 bp, Artificial Sequence
  Description of Artificial Sequence: Synthetic oligonucleotide
  Target: LAMA2; (-) strand; PAM type: YTN; PAM sequence: CTA
ttcctctctgccattgaaaa

SEQ ID NO: 196594 - DNA, 20 bp, Artificial Sequence
  Description of Artificial Sequence: Synthetic oligonucleotide
  Target: LAMA2; (-) strand; PAM type: YTN; PAM sequence: CTC
ctattcctctctgccattga

SEQ ID NO: 196595 - DNA, 20 bp, Artificial Sequence
  Description of Artificial Sequence: Synthetic oligonucleotide
  Target: LAMA2; (-) strand; PAM type: YTN; PAM sequence: CTC
tcctattcctctctgccatt

SEQ ID NO: 196596 - DNA, 20 bp, Artificial Sequence
  Description of Artificial Sequence: Synthetic oligonucleotide
  Target: LAMA2; (-) strand; PAM type: YTN; PAM sequence: TTG
actctcctattcctctctgc

SEQ ID NO: 196597 - DNA, 20 bp, Artificial Sequence
  Description of Artificial Sequence: Synthetic oligonucleotide
  Target: LAMA2; (-) strand; PAM type: YTN; PAM sequence: TTA
ttgactctcctattcctctc

SEQ ID NO: 196598 - DNA, 20 bp, Artificial Sequence
  Description of Artificial Sequence: Synthetic oligonucleotide
  Target: LAMA2; (-) strand; PAM type: YTN; PAM sequence: CTT
attgactctcctattcctct

SEQ ID NO: 196599 - DNA, 20 bp, Artificial Sequence
  Description of Artificial Sequence: Synthetic oligonucleotide
  Target: LAMA2; (-) strand; PAM type: YTN; PAM sequence: TTC
ttattgactctcctattcct

SEQ ID NO: 196600 - DNA, 20 bp, Artificial Sequence
  Description of Artificial Sequence: Synthetic oligonucleotide
  Target: LAMA2; (-) strand; PAM type: YTN; PAM sequence: CTT
cttattgactctcctattcc

SEQ ID NO: 196601 - DNA, 20 bp, Artificial Sequence
  Description of Artificial Sequence: Synthetic oligonucleotide
  Target: LAMA2; (-) strand; PAM type: YTN; PAM sequence: TTG
cttcttattgactctcctat

SEQ ID NO: 196602 - DNA, 20 bp, Artificial Sequence
  Description of Artificial Sequence: Synthetic oligonucleotide
  Target: LAMA2; (-) strand; PAM type: YTN; PAM sequence: TTT
gcttcttattgactctccta

SEQ ID NO: 196603 - DNA, 20 bp, Artificial Sequence
  Description of Artificial Sequence: Synthetic oligonucleotide
  Target: LAMA2; (-) strand; PAM type: YTN; PAM sequence: TTG
agcatttgcttcttattgac

SEQ ID NO: 196604 - DNA, 20 bp, Artificial Sequence
  Description of Artificial Sequence: Synthetic oligonucleotide
  Target: LAMA2; (-) strand; PAM type: YTN; PAM sequence: CTT
gagcatttgcttcttattga

SEQ ID NO: 196605 - DNA, 20 bp, Artificial Sequence
  Description of Artificial Sequence: Synthetic oligonucleotide
  Target: LAMA2; (-) strand; PAM type: YTN; PAM sequence: CTC
cttgagcatttgcttcttat

SEQ ID NO: 196606 - DNA, 20 bp, Artificial Sequence
  Description of Artificial Sequence: Synthetic oligonucleotide
  Target: LAMA2; (-) strand; PAM type: YTN; PAM sequence: CTC
aagctccttgagcatttgct

SEQ ID NO: 196607 - DNA, 20 bp, Artificial Sequence
  Description of Artificial Sequence: Synthetic oligonucleotide
  Target: LAMA2; (-) strand; PAM type: YTN; PAM sequence: CTA
ctcaagctccttgagcattt

SEQ ID NO: 196608 - DNA, 20 bp, Artificial Sequence
  Description of Artificial Sequence: Synthetic oligonucleotide
  Target: LAMA2; (-) strand; PAM type: YTN; PAM sequence: CTC
tactcaagctccttgagcat

SEQ ID NO: 196609 - DNA, 20 bp, Artificial Sequence
  Description of Artificial Sequence: Synthetic oligonucleotide
  Target: LAMA2; (-) strand; PAM type: YTN; PAM sequence: TTC
ccgtctctactcaagctcct

SEQ ID NO: 196610 - DNA, 20 bp, Artificial Sequence
  Description of Artificial Sequence: Synthetic oligonucleotide
  Target: LAMA2; (-) strand; PAM type: YTN; PAM sequence: CTA
ttcccgtctctactcaagct

SEQ ID NO: 196611 - DNA, 20 bp, Artificial Sequence
  Description of Artificial Sequence: Synthetic oligonucleotide
  Target: LAMA2; (-) strand; PAM type: YTN; PAM sequence: TTA
caagaagtataaatcagcca

SEQ ID NO: 196612 - DNA, 20 bp, Artificial Sequence
  Description of Artificial Sequence: Synthetic oligonucleotide
  Target: LAMA2; (-) strand; PAM type: YTN; PAM sequence: TTT
acaagaagtataaatcagcc

SEQ ID NO: 196613 - DNA, 20 bp, Artificial Sequence
  Description of Artificial Sequence: Synthetic oligonucleotide
  Target: LAMA2; (-) strand; PAM type: YTN; PAM sequence: TTT
tacaagaagtataaatcagc

SEQ ID NO: 196614 - DNA, 20 bp, Artificial Sequence
  Description of Artificial Sequence: Synthetic oligonucleotide
  Target: LAMA2; (-) strand; PAM type: YTN; PAM sequence: TTA
ttttacaagaagtataaatc

SEQ ID NO: 196615 - DNA, 20 bp, Artificial Sequence
  Description of Artificial Sequence: Synthetic oligonucleotide
  Target: LAMA2; (-) strand; PAM type: YTN; PAM sequence: CTA
attattttacaagaagtata

SEQ ID NO: 196616 - DNA, 20 bp, Artificial Sequence
  Description of Artificial Sequence: Synthetic oligonucleotide
  Target: LAMA2; (-) strand; PAM type: YTN; PAM sequence: TTA
agctaattattttacaagaa

SEQ ID NO: 196617 - DNA, 20 bp, Artificial Sequence
  Description of Artificial Sequence: Synthetic oligonucleotide
  Target: LAMA2; (-) strand; PAM type: YTN; PAM sequence: CTT
aagctaattattttacaaga

SEQ ID NO: 196618 - DNA, 20 bp, Artificial Sequence
  Description of Artificial Sequence: Synthetic oligonucleotide
  Target: LAMA2; (-) strand; PAM type: YTN; PAM sequence: TTA
gcttaagctaattattttac

SEQ ID NO: 196619 - DNA, 20 bp, Artificial Sequence
  Description of Artificial Sequence: Synthetic oligonucleotide
  Target: LAMA2; (-) strand; PAM type: YTN; PAM sequence: TTA
gataattagcttaagctaat

SEQ ID NO: 196620 - DNA, 20 bp, Artificial Sequence
  Description of Artificial Sequence: Synthetic oligonucleotide
  Target: LAMA2; (-) strand; PAM type: YTN; PAM sequence: CTT
agataattagcttaagctaa

SEQ ID NO: 196621 - DNA, 20 bp, Artificial Sequence
  Description of Artificial Sequence: Synthetic oligonucleotide
  Target: LAMA2; (-) strand; PAM type: YTN; PAM sequence: TTC
ttagataattagcttaagct

SEQ ID NO: 196622 - DNA, 20 bp, Artificial Sequence
  Description of Artificial Sequence: Synthetic oligonucleotide
  Target: LAMA2; (-) strand; PAM type: YTN; PAM sequence: TTT
cttagataattagcttaagc

SEQ ID NO: 196623 - DNA, 20 bp, Artificial Sequence
  Description of Artificial Sequence: Synthetic oligonucleotide
  Target: LAMA2; (-) strand; PAM type: YTN; PAM sequence: TTG
tttcttagataattagctta

SEQ ID NO: 196624 - DNA, 20 bp, Artificial Sequence
  Description of Artificial Sequence: Synthetic oligonucleotide
  Target: LAMA2; (-) strand; PAM type: YTN; PAM sequence: CTT
gtttcttagataattagctt

SEQ ID NO: 196625 - DNA, 20 bp, Artificial Sequence
  Description of Artificial Sequence: Synthetic oligonucleotide
  Target: LAMA2; (-) strand; PAM type: YTN; PAM sequence: TTC
ttgtttcttagataattagc

SEQ ID NO: 196626 - DNA, 20 bp, Artificial Sequence
  Description of Artificial Sequence: Synthetic oligonucleotide
  Target: LAMA2; (-) strand; PAM type: YTN; PAM sequence: CTA
ggagagattcttgtttctta

SEQ ID NO: 196627 - DNA, 20 bp, Artificial Sequence
  Description of Artificial Sequence: Synthetic oligonucleotide
  Target: LAMA2; (-) strand; PAM type: YTN; PAM sequence: CTG
cctaggagagattcttgttt

SEQ ID NO: 196628 - DNA, 20 bp, Artificial Sequence
  Description of Artificial Sequence: Synthetic oligonucleotide
  Target: LAMA2; (-) strand; PAM type: YTN; PAM sequence: CTG
aatctgcctaggagagattc

SEQ ID NO: 196629 - DNA, 20 bp, Artificial Sequence
  Description of Artificial Sequence: Synthetic oligonucleotide
  Target: LAMA2; (-) strand; PAM type: YTN; PAM sequence: CTC
agggagaaccaggaaaggca

SEQ ID NO: 196630 - DNA, 20 bp, Artificial Sequence
  Description of Artificial Sequence: Synthetic oligonucleotide
  Target: LAMA2; (-) strand; PAM type: YTN; PAM sequence: CTC
agagcactcagggagaacca

SEQ ID NO: 196631 - DNA, 20 bp, Artificial Sequence
  Description of Artificial Sequence: Synthetic oligonucleotide
  Target: LAMA2; (-) strand; PAM type: YTN; PAM sequence: TTA
ctcagagcactcagggagaa

SEQ ID NO: 196632 - DNA, 20 bp, Artificial Sequence
  Description of Artificial Sequence: Synthetic oligonucleotide
  Target: LAMA2; (-) strand; PAM type: YTN; PAM sequence: CTT
actcagagcactcagggaga

SEQ ID NO: 196633 - DNA, 20 bp, Artificial Sequence
  Description of Artificial Sequence: Synthetic oligonucleotide
  Target: LAMA2; (-) strand; PAM type: YTN; PAM sequence: CTA
gaaggcaatggtggggctta

SEQ ID NO: 196634 - DNA, 20 bp, Artificial Sequence
  Description of Artificial Sequence: Synthetic oligonucleotide
  Target: LAMA2; (-) strand; PAM type: YTN; PAM sequence: TTC
tagaaggcaatggtggggct

SEQ ID NO: 196635 - DNA, 20 bp, Artificial Sequence
  Description of Artificial Sequence: Synthetic oligonucleotide
  Target: LAMA2; (-) strand; PAM type: YTN; PAM sequence: TTT
ctagaaggcaatggtggggc

SEQ ID NO: 196636 - DNA, 20 bp, Artificial Sequence
  Description of Artificial Sequence: Synthetic oligonucleotide
  Target: LAMA2; (-) strand; PAM type: YTN; PAM sequence: TTT
tctagaaggcaatggtgggg

SEQ ID NO: 196637 - DNA, 20 bp, Artificial Sequence
  Description of Artificial Sequence: Synthetic oligonucleotide
  Target: LAMA2; (-) strand; PAM type: YTN; PAM sequence: TTT
ttctagaaggcaatggtggg

SEQ ID NO: 196638 - DNA, 20 bp, Artificial Sequence
  Description of Artificial Sequence: Synthetic oligonucleotide
  Target: LAMA2; (-) strand; PAM type: YTN; PAM sequence: CTG
gatgccgtgaagggatcaga

SEQ ID NO: 196639 - DNA, 20 bp, Artificial Sequence
  Description of Artificial Sequence: Synthetic oligonucleotide
  Target: LAMA2; (-) strand; PAM type: YTN; PAM sequence: TTC
tggatgccgtgaagggatca

SEQ ID NO: 196640 - DNA, 20 bp, Artificial Sequence
  Description of Artificial Sequence: Synthetic oligonucleotide
  Target: LAMA2; (-) strand; PAM type: YTN; PAM sequence: TTG
gatcatcattctggatgccg

SEQ ID NO: 196641 - DNA, 20 bp, Artificial Sequence
  Description of Artificial Sequence: Synthetic oligonucleotide
  Target: LAMA2; (-) strand; PAM type: YTN; PAM sequence: TTT
ggatcatcattctggatgcc

SEQ ID NO: 196642 - DNA, 20 bp, Artificial Sequence
  Description of Artificial Sequence: Synthetic oligonucleotide
  Target: LAMA2; (-) strand; PAM type: YTN; PAM sequence: TTT
tggatcatcattctggatgc

SEQ ID NO: 196643 - DNA, 20 bp, Artificial Sequence
  Description of Artificial Sequence: Synthetic oligonucleotide
  Target: LAMA2; (-) strand; PAM type: YTN; PAM sequence: CTT
ttggatcatcattctggatg

SEQ ID NO: 196644 - DNA, 20 bp, Artificial Sequence
  Description of Artificial Sequence: Synthetic oligonucleotide
  Target: LAMA2; (-) strand; PAM type: YTN; PAM sequence: TTG
gacccaaacttttggatcat

SEQ ID NO: 196645 - DNA, 20 bp, Artificial Sequence
  Description of Artificial Sequence: Synthetic oligonucleotide
  Target: LAMA2; (-) strand; PAM type: YTN; PAM sequence: TTT
ggacccaaacttttggatca

SEQ ID NO: 196646 - DNA, 20 bp, Artificial Sequence
  Description of Artificial Sequence: Synthetic oligonucleotide
  Target: LAMA2; (-) strand; PAM type: YTN; PAM sequence: TTG
catcacatttggacccaaac

SEQ ID NO: 196647 - DNA, 20 bp, Artificial Sequence
  Description of Artificial Sequence: Synthetic oligonucleotide
  Target: LAMA2; (-) strand; PAM type: YTN; PAM sequence: TTT
gcatcacatttggacccaaa

SEQ ID NO: 196648 - DNA, 20 bp, Artificial Sequence
  Description of Artificial Sequence: Synthetic oligonucleotide
  Target: LAMA2; (-) strand; PAM type: YTN; PAM sequence: TTT
tgcatcacatttggacccaa

SEQ ID NO: 196649 - DNA, 20 bp, Artificial Sequence
  Description of Artificial Sequence: Synthetic oligonucleotide
  Target: LAMA2; (-) strand; PAM type: YTN; PAM sequence: CTT
ttgcatcacatttggaccca

SEQ ID NO: 196650 - DNA, 20 bp, Artificial Sequence
  Description of Artificial Sequence: Synthetic oligonucleotide
  Target: LAMA2; (-) strand; PAM type: YTN; PAM sequence: CTG
taaacttttgcatcacattt

SEQ ID NO: 196651 - DNA, 20 bp, Artificial Sequence
  Description of Artificial Sequence: Synthetic oligonucleotide
  Target: LAMA2; (-) strand; PAM type: YTN; PAM sequence: TTG
taaaggaaccatggtagacc

SEQ ID NO: 196652 - DNA, 20 bp, Artificial Sequence
  Description of Artificial Sequence: Synthetic oligonucleotide
  Target: LAMA2; (-) strand; PAM type: YTN; PAM sequence: TTT
gtaaaggaaccatggtagac

SEQ ID NO: 196653 - DNA, 20 bp, Artificial Sequence
  Description of Artificial Sequence: Synthetic oligonucleotide
  Target: LAMA2; (-) strand; PAM type: YTN; PAM sequence: TTT
tgtaaaggaaccatggtaga

SEQ ID NO: 196654 - DNA, 20 bp, Artificial Sequence
  Description of Artificial Sequence: Synthetic oligonucleotide
  Target: LAMA2; (-) strand; PAM type: YTN; PAM sequence: TTT
ttgtaaaggaaccatggtag

SEQ ID NO: 196655 - DNA, 20 bp, Artificial Sequence
  Description of Artificial Sequence: Synthetic oligonucleotide
  Target: LAMA2; (-) strand; PAM type: YTN; PAM sequence: TTT
tttgtaaaggaaccatggta

SEQ ID NO: 196656 - DNA, 20 bp, Artificial Sequence
  Description of Artificial Sequence: Synthetic oligonucleotide
  Target: LAMA2; (-) strand; PAM type: YTN; PAM sequence: TTT
ttttgtaaaggaaccatggt

SEQ ID NO: 196657 - DNA, 20 bp, Artificial Sequence
  Description of Artificial Sequence: Synthetic oligonucleotide
  Target: LAMA2; (-) strand; PAM type: YTN; PAM sequence: CTT
tttttgtaaaggaaccatgg

SEQ ID NO: 196658 - DNA, 20 bp, Artificial Sequence
  Description of Artificial Sequence: Synthetic oligonucleotide
  Target: LAMA2; (-) strand; PAM type: YTN; PAM sequence: TTG
gtctttttttgtaaaggaac

SEQ ID NO: 196659 - DNA, 20 bp, Artificial Sequence
  Description of Artificial Sequence: Synthetic oligonucleotide
  Target: LAMA2; (-) strand; PAM type: YTN; PAM sequence: TTT
ggtctttttttgtaaaggaa

SEQ ID NO: 196660 - DNA, 20 bp, Artificial Sequence
  Description of Artificial Sequence: Synthetic oligonucleotide
  Target: LAMA2; (-) strand; PAM type: YTN; PAM sequence: TTT
tggtctttttttgtaaagga

SEQ ID NO: 196661 - DNA, 20 bp, Artificial Sequence
  Description of Artificial Sequence: Synthetic oligonucleotide
  Target: LAMA2; (-) strand; PAM type: YTN; PAM sequence: TTT
ttggtctttttttgtaaagg

SEQ ID NO: 196662 - DNA, 20 bp, Artificial Sequence
  Description of Artificial Sequence: Synthetic oligonucleotide
  Target: LAMA2; (-) strand; PAM type: YTN; PAM sequence: CTG
aggcaaaatcatgatgagca

SEQ ID NO: 196663 - DNA, 20 bp, Artificial Sequence
  Description of Artificial Sequence: Synthetic oligonucleotide
  Target: LAMA2; (-) strand; PAM type: YTN; PAM sequence: TTG
aaaaactgaggcaaaatcat

SEQ ID NO: 196664 - DNA, 20 bp, Artificial Sequence
  Description of Artificial Sequence: Synthetic oligonucleotide
  Target: LAMA2; (-) strand; PAM type: YTN; PAM sequence: CTT
gaaaaactgaggcaaaatca

SEQ ID NO: 196665 - DNA, 20 bp, Artificial Sequence
  Description of Artificial Sequence: Synthetic oligonucleotide
  Target: LAMA2; (-) strand; PAM type: YTN; PAM sequence: TTA
tgaacaaaacataacttgaa

SEQ ID NO: 196666 - DNA, 20 bp, Artificial Sequence
  Description of Artificial Sequence: Synthetic oligonucleotide
  Target: LAMA2; (-) strand; PAM type: YTN; PAM sequence: TTC
agaaaacaaacaaaaaaaaa

SEQ ID NO: 196667 - DNA, 20 bp, Artificial Sequence
  Description of Artificial Sequence: Synthetic oligonucleotide
  Target: LAMA2; (-) strand; PAM type: YTN; PAM sequence: TTA
aggcagtagaaggaacagaa

SEQ ID NO: 196668 - DNA, 20 bp, Artificial Sequence
  Description of Artificial Sequence: Synthetic oligonucleotide
  Target: LAMA2; (-) strand; PAM type: YTN; PAM sequence: TTT
aaggcagtagaaggaacaga

SEQ ID NO: 196669 - DNA, 20 bp, Artificial Sequence
  Description of Artificial Sequence: Synthetic oligonucleotide
  Target: LAMA2; (-) strand; PAM type: YTN; PAM sequence: TTT
taaggcagtagaaggaacag

SEQ ID NO: 196670 - DNA, 20 bp, Artificial Sequence
  Description of Artificial Sequence: Synthetic oligonucleotide
  Target: LAMA2; (-) strand; PAM type: YTN; PAM sequence: TTT
ttaaggcagtagaaggaaca

SEQ ID NO: 196671 - DNA, 20 bp, Artificial Sequence
  Description of Artificial Sequence: Synthetic oligonucleotide
  Target: LAMA2; (-) strand; PAM type: YTN; PAM sequence: CTT
tttaaggcagtagaaggaac

SEQ ID NO: 196672 - DNA, 20 bp, Artificial Sequence
  Description of Artificial Sequence: Synthetic oligonucleotide
  Target: LAMA2; (-) strand; PAM type: YTN; PAM sequence: CTC
agtgatgagggctttttaag

SEQ ID NO: 196673 - DNA, 20 bp, Artificial Sequence
  Description of Artificial Sequence: Synthetic oligonucleotide
  Target: LAMA2; (-) strand; PAM type: YTN; PAM sequence: TTC
agtagggtaagtggaggtga

SEQ ID NO: 196674 - DNA, 20 bp, Artificial Sequence
  Description of Artificial Sequence: Synthetic oligonucleotide
  Target: LAMA2; (-) strand; PAM type: YTN; PAM sequence: TTG
aaaattcagtagggtaagtg

SEQ ID NO: 196675 - DNA, 20 bp, Artificial Sequence
  Description of Artificial Sequence: Synthetic oligonucleotide
  Target: LAMA2; (-) strand; PAM type: YTN; PAM sequence: TTT
gaaaattcagtagggtaagt

SEQ ID NO: 196676 - DNA, 20 bp, Artificial Sequence
  Description of Artificial Sequence: Synthetic oligonucleotide
  Target: LAMA2; (-) strand; PAM type: YTN; PAM sequence: TTG
cagtttgaaaattcagtagg

SEQ ID NO: 196677 - DNA, 20 bp, Artificial Sequence
  Description of Artificial Sequence: Synthetic oligonucleotide
  Target: LAMA2; (-) strand; PAM type: YTN; PAM sequence: CTT
gcagtttgaaaattcagtag

SEQ ID NO: 196678 - DNA, 20 bp, Artificial Sequence
  Description of Artificial Sequence: Synthetic oligonucleotide
  Target: LAMA2; (-) strand; PAM type: YTN; PAM sequence: TTG
acttgcagtttgaaaattca

SEQ ID NO: 196679 - DNA, 20 bp, Artificial Sequence
  Description of Artificial Sequence: Synthetic oligonucleotide
  Target: LAMA2; (-) strand; PAM type: YTN; PAM sequence: TTT
gacttgcagtttgaaaattc

SEQ ID NO: 196680 - DNA, 20 bp, Artificial Sequence
  Description of Artificial Sequence: Synthetic oligonucleotide
  Target: LAMA2; (-) strand; PAM type: YTN; PAM sequence: CTA
aggaagtaatatttgacttg

SEQ ID NO: 196681 - DNA, 20 bp, Artificial Sequence
  Description of Artificial Sequence: Synthetic oligonucleotide
  Target: LAMA2; (-) strand; PAM type: YTN; PAM sequence: TTC
ccctaaggaagtaatatttg

SEQ ID NO: 196682 - DNA, 20 bp, Artificial Sequence
  Description of Artificial Sequence: Synthetic oligonucleotide
  Target: LAMA2; (-) strand; PAM type: YTN; PAM sequence: CTG
atgagattcccctaaggaag

SEQ ID NO: 196683 - DNA, 20 bp, Artificial Sequence
  Description of Artificial Sequence: Synthetic oligonucleotide
  Target: LAMA2; (-) strand; PAM type: YTN; PAM sequence: CTA
gggagacagtctgatgagat

SEQ ID NO: 196684 - DNA, 20 bp, Artificial Sequence
  Description of Artificial Sequence: Synthetic oligonucleotide
  Target: LAMA2; (-) strand; PAM type: YTN; PAM sequence: TTG
ggtggggtgtggtggtctag

SEQ ID NO: 196685 - DNA, 20 bp, Artificial Sequence
  Description of Artificial Sequence: Synthetic oligonucleotide
  Target: LAMA2; (-) strand; PAM type: YTN; PAM sequence: TTG
ttgggtggggtgtggtggtc

SEQ ID NO: 196686 - DNA, 20 bp, Artificial Sequence
  Description of Artificial Sequence: Synthetic oligonucleotide
  Target: LAMA2; (-) strand; PAM type: YTN; PAM sequence: CTA
gttgttgggtggggtgtggt

SEQ ID NO: 196687 - DNA, 20 bp, Artificial Sequence
  Description of Artificial Sequence: Synthetic oligonucleotide
  Target: LAMA2; (-) strand; PAM type: YTN; PAM sequence: CTA
ataaagggatgtgatctagt

SEQ ID NO: 196688 - DNA, 20 bp, Artificial Sequence
  Description of Artificial Sequence: Synthetic oligonucleotide
  Target: LAMA2; (-) strand; PAM type: YTN; PAM sequence: CTG
aaaacatagtacccctaata

SEQ ID NO: 196689 - DNA, 20 bp, Artificial Sequence
  Description of Artificial Sequence: Synthetic oligonucleotide
  Target: LAMA2; (-) strand; PAM type: YTN; PAM sequence: TTA
tactgaaaacatagtacccc

SEQ ID NO: 196690 - DNA, 20 bp, Artificial Sequence
  Description of Artificial Sequence: Synthetic oligonucleotide
  Target: LAMA2; (-) strand; PAM type: YTN; PAM sequence: TTG
caattatactgaaaacatag

SEQ ID NO: 196691 - DNA, 20 bp, Artificial Sequence
  Description of Artificial Sequence: Synthetic oligonucleotide
  Target: LAMA2; (-) strand; PAM type: YTN; PAM sequence: TTA
taattgcaattatactgaaa

SEQ ID NO: 196692 - DNA, 20 bp, Artificial Sequence
  Description of Artificial Sequence: Synthetic oligonucleotide
  Target: LAMA2; (-) strand; PAM type: YTN; PAM sequence: TTC
aatgggtcaataattataat

SEQ ID NO: 196693 - DNA, 20 bp, Artificial Sequence
  Description of Artificial Sequence: Synthetic oligonucleotide
  Target: LAMA2; (-) strand; PAM type: YTN; PAM sequence: CTC
attcaatgggtcaataatta

SEQ ID NO: 196694 - DNA, 20 bp, Artificial Sequence
  Description of Artificial Sequence: Synthetic oligonucleotide
  Target: LAMA2; (-) strand; PAM type: YTN; PAM sequence: TTA
taataaagaaggaagggaca

SEQ ID NO: 196695 - DNA, 20 bp, Artificial Sequence
  Description of Artificial Sequence: Synthetic oligonucleotide
  Target: LAMA2; (-) strand; PAM type: YTN; PAM sequence: CTT
ataataaagaaggaagggac

SEQ ID NO: 196696 - DNA, 20 bp, Artificial Sequence
  Description of Artificial Sequence: Synthetic oligonucleotide
  Target: LAMA2; (-) strand; PAM type: YTN; PAM sequence: TTA
aagcttataataaagaagga

SEQ ID NO: 196697 - DNA, 20 bp, Artificial Sequence
  Description of Artificial Sequence: Synthetic oligonucleotide
  Target: LAMA2; (-) strand; PAM type: YTN; PAM sequence: CTT
aaagcttataataaagaagg

SEQ ID NO: 196698 - DNA, 20 bp, Artificial Sequence
  Description of Artificial Sequence: Synthetic oligonucleotide
  Target: LAMA2; (-) strand; PAM type: YTN; PAM sequence: CTC
ttaaagcttataataaagaa

SEQ ID NO: 196699 - DNA, 20 bp, Artificial Sequence
  Description of Artificial Sequence: Synthetic oligonucleotide
  Target: LAMA2; (-) strand; PAM type: YTN; PAM sequence: TTG
ccctcttaaagcttataata

SEQ ID NO: 196700 - DNA, 20 bp, Artificial Sequence
  Description of Artificial Sequence: Synthetic oligonucleotide
  Target: LAMA2; (-) strand; PAM type: YTN; PAM sequence: TTT
gccctcttaaagcttataat

SEQ ID NO: 196701 - DNA, 20 bp, Artificial Sequence
  Description of Artificial Sequence: Synthetic oligonucleotide
  Target: LAMA2; (-) strand; PAM type: YTN; PAM sequence: TTT
tgccctcttaaagcttataa

SEQ ID NO: 196702 - DNA, 20 bp, Artificial Sequence
  Description of Artificial Sequence: Synthetic oligonucleotide
  Target: LAMA2; (-) strand; PAM type: YTN; PAM sequence: TTT
ttgccctcttaaagcttata

SEQ ID NO: 196703 - DNA, 20 bp, Artificial Sequence
  Description of Artificial Sequence: Synthetic oligonucleotide
  Target: LAMA2; (-) strand; PAM type: YTN; PAM sequence: CTA
aagagggaaagatggtaaga

SEQ ID NO: 196704 - DNA, 20 bp, Artificial Sequence
  Description of Artificial Sequence: Synthetic oligonucleotide
  Target: LAMA2; (-) strand; PAM type: YTN; PAM sequence: CTG
caatgtaccagacaatgtgg

SEQ ID NO: 196705 - DNA, 20 bp, Artificial Sequence
  Description of Artificial Sequence: Synthetic oligonucleotide
  Target: LAMA2; (-) strand; PAM type: YTN; PAM sequence: TTA
gatgtctgcaatgtaccaga

SEQ ID NO: 196706 - DNA, 20 bp, Artificial Sequence
  Description of Artificial Sequence: Synthetic oligonucleotide
  Target: LAMA2; (-) strand; PAM type: YTN; PAM sequence: TTA
ttagatgtctgcaatgtacc

SEQ ID NO: 196707 - DNA, 20 bp, Artificial Sequence
  Description of Artificial Sequence: Synthetic oligonucleotide
  Target: LAMA2; (-) strand; PAM type: YTN; PAM sequence: TTT
attagatgtctgcaatgtac

SEQ ID NO: 196708 - DNA, 20 bp, Artificial Sequence
  Description of Artificial Sequence: Synthetic oligonucleotide
  Target: LAMA2; (-) strand; PAM type: YTN; PAM sequence: TTC
cgacaaatatttattagatg

SEQ ID NO: 196709 - DNA, 20 bp, Artificial Sequence
  Description of Artificial Sequence: Synthetic oligonucleotide
  Target: LAMA2; (-) strand; PAM type: YTN; PAM sequence: CTT
ccgacaaatatttattagat

SEQ ID NO: 196710 - DNA, 20 bp, Artificial Sequence
  Description of Artificial Sequence: Synthetic oligonucleotide
  Target: LAMA2; (-) strand; PAM type: YTN; PAM sequence: TTC
cttccgacaaatatttatta

SEQ ID NO: 196711 - DNA, 20 bp, Artificial Sequence
  Description of Artificial Sequence: Synthetic oligonucleotide
  Target: LAMA2; (-) strand; PAM type: YTN; PAM sequence: TTA
ttccttccgacaaatattta

SEQ ID NO: 196712 - DNA, 20 bp, Artificial Sequence
  Description of Artificial Sequence: Synthetic oligonucleotide
  Target: LAMA2; (-) strand; PAM type: YTN; PAM sequence: TTT
attccttccgacaaatattt

SEQ ID NO: 196713 - DNA, 20 bp, Artificial Sequence
  Description of Artificial Sequence: Synthetic oligonucleotide
  Target: LAMA2; (-) strand; PAM type: YTN; PAM sequence: CTA
atatttattccttccgacaa

SEQ ID NO: 196714 - DNA, 20 bp, Artificial Sequence
  Description of Artificial Sequence: Synthetic oligonucleotide
  Target: LAMA2; (-) strand; PAM type: YTN; PAM sequence: CTC
actaatatttattccttccg

SEQ ID NO: 196715 - DNA, 20 bp, Artificial Sequence
  Description of Artificial Sequence: Synthetic oligonucleotide
  Target: LAMA2; (-) strand; PAM type: YTN; PAM sequence: CTC
tcactaatatttattccttc

SEQ ID NO: 196716 - DNA, 20 bp, Artificial Sequence
  Description of Artificial Sequence: Synthetic oligonucleotide
  Target: LAMA2; (-) strand; PAM type: YTN; PAM sequence: TTC
tctcactaatatttattcct

SEQ ID NO: 196717 - DNA, 20 bp, Artificial Sequence
  Description of Artificial Sequence: Synthetic oligonucleotide
  Target: LAMA2; (-) strand; PAM type: YTN; PAM sequence: TTA
ttctctcactaatatttatt

SEQ ID NO: 196718 - DNA, 20 bp, Artificial Sequence
  Description of Artificial Sequence: Synthetic oligonucleotide
  Target: LAMA2; (-) strand; PAM type: YTN; PAM sequence: TTT
attctctcactaatatttat

SEQ ID NO: 196719 - DNA, 20 bp, Artificial Sequence
  Description of Artificial Sequence: Synthetic oligonucleotide
  Target: LAMA2; (-) strand; PAM type: YTN; PAM sequence: TTA
cccatttattctctcactaa

SEQ ID NO: 196720 - DNA, 20 bp, Artificial Sequence
  Description of Artificial Sequence: Synthetic oligonucleotide
  Target: LAMA2; (-) strand; PAM type: YTN; PAM sequence: CTC
atgaatgcattacccattta

SEQ ID NO: 196721 - DNA, 20 bp, Artificial Sequence
  Description of Artificial Sequence: Synthetic oligonucleotide
  Target: LAMA2; (-) strand; PAM type: YTN; PAM sequence: TTC
actcatgaatgcattaccca

SEQ ID NO: 196722 - DNA, 20 bp, Artificial Sequence
  Description of Artificial Sequence: Synthetic oligonucleotide
  Target: LAMA2; (-) strand; PAM type: YTN; PAM sequence: TTA
ttcactcatgaatgcattac

SEQ ID NO: 196723 - DNA, 20 bp, Artificial Sequence
  Description of Artificial Sequence: Synthetic oligonucleotide
  Target: LAMA2; (-) strand; PAM type: YTN; PAM sequence: TTT
attcactcatgaatgcatta

SEQ ID NO: 196724 - DNA, 20 bp, Artificial Sequence
  Description of Artificial Sequence: Synthetic oligonucleotide
  Target: LAMA2; (-) strand; PAM type: YTN; PAM sequence: CTT
tattcactcatgaatgcatt

SEQ ID NO: 196725 - DNA, 20 bp, Artificial Sequence
  Description of Artificial Sequence: Synthetic oligonucleotide
  Target: LAMA2; (-) strand; PAM type: YTN; PAM sequence: TTA
ccacaaaaatatgatataat

SEQ ID NO: 196726 - DNA, 20 bp, Artificial Sequence
  Description of Artificial Sequence: Synthetic oligonucleotide
  Target: LAMA2; (-) strand; PAM type: YTN; PAM sequence: TTT
accacaaaaatatgatataa

SEQ ID NO: 196727 - DNA, 20 bp, Artificial Sequence
  Description of Artificial Sequence: Synthetic oligonucleotide
  Target: LAMA2; (-) strand; PAM type: YTN; PAM sequence: TTG
aaggtaaacaaaatatttac

SEQ ID NO: 196728 - DNA, 20 bp, Artificial Sequence
  Description of Artificial Sequence: Synthetic oligonucleotide
  Target: LAMA2; (-) strand; PAM type: YTN; PAM sequence: TTC
agtcattgaaggtaaacaaa

SEQ ID NO: 196729 - DNA, 20 bp, Artificial Sequence
  Description of Artificial Sequence: Synthetic oligonucleotide
  Target: LAMA2; (-) strand; PAM type: YTN; PAM sequence: TTT
cagtcattgaaggtaaacaa

SEQ ID NO: 196730 - DNA, 20 bp, Artificial Sequence
  Description of Artificial Sequence: Synthetic oligonucleotide
  Target: LAMA2; (-) strand; PAM type: YTN; PAM sequence: TTG
tttcagtcattgaaggtaaa

SEQ ID NO: 196731 - DNA, 20 bp, Artificial Sequence
  Description of Artificial Sequence: Synthetic oligonucleotide
  Target: LAMA2; (-) strand; PAM type: YTN; PAM sequence: TTT
gtttcagtcattgaaggtaa

SEQ ID NO: 196732 - DNA, 20 bp, Artificial Sequence
  Description of Artificial Sequence: Synthetic oligonucleotide
  Target: LAMA2; (-) strand; PAM type: YTN; PAM sequence: CTT
tgtttcagtcattgaaggta

SEQ ID NO: 196733 - DNA, 20 bp, Artificial Sequence
  Description of Artificial Sequence: Synthetic oligonucleotide
  Target: LAMA2; (-) strand; PAM type: YTN; PAM sequence: CTC
tttgtttcagtcattgaagg

SEQ ID NO: 196734 - DNA, 20 bp, Artificial Sequence
  Description of Artificial Sequence: Synthetic oligonucleotide
  Target: LAMA2; (-) strand; PAM type: YTN; PAM sequence: TTC
aggatatggaactctttgtt

SEQ ID NO: 196735 - DNA, 20 bp, Artificial Sequence
  Description of Artificial Sequence: Synthetic oligonucleotide
  Target: LAMA2; (-) strand; PAM type: YTN; PAM sequence: TTT
caggatatggaactctttgt

SEQ ID NO: 196736 - DNA, 20 bp, Artificial Sequence
  Description of Artificial Sequence: Synthetic oligonucleotide
  Target: LAMA2; (-) strand; PAM type: YTN; PAM sequence: TTC
aggtcatatttcaggatatg

SEQ ID NO: 196737 - DNA, 20 bp, Artificial Sequence
  Description of Artificial Sequence: Synthetic oligonucleotide
  Target: LAMA2; (-) strand; PAM type: YTN; PAM sequence: TTT
caggtcatatttcaggatat

SEQ ID NO: 196738 - DNA, 20 bp, Artificial Sequence
  Description of Artificial Sequence: Synthetic oligonucleotide
  Target: LAMA2; (-) strand; PAM type: YTN; PAM sequence: CTT
tcaggtcatatttcaggata

SEQ ID NO: 196739 - DNA, 20 bp, Artificial Sequence
  Description of Artificial Sequence: Synthetic oligonucleotide
  Target: LAMA2; (-) strand; PAM type: YTN; PAM sequence: TTC
catggctttcaggtcatatt

SEQ ID NO: 196740 - DNA, 20 bp, Artificial Sequence
  Description of Artificial Sequence: Synthetic oligonucleotide
  Target: LAMA2; (-) strand; PAM type: YTN; PAM sequence: TTC
attccatggctttcaggtca

SEQ ID NO: 196741 - DNA, 20 bp, Artificial Sequence
  Description of Artificial Sequence: Synthetic oligonucleotide
  Target: LAMA2; (-) strand; PAM type: YTN; PAM sequence: TTT
cattccatggctttcaggtc

SEQ ID NO: 196742 - DNA, 20 bp, Artificial Sequence
  Description of Artificial Sequence: Synthetic oligonucleotide
  Target: LAMA2; (-) strand; PAM type: YTN; PAM sequence: CTT
tcattccatggctttcaggt

SEQ ID NO: 196743 - DNA, 20 bp, Artificial Sequence
  Description of Artificial Sequence: Synthetic oligonucleotide
  Target: LAMA2; (-) strand; PAM type: YTN; PAM sequence: TTA
tcaaacctttcattccatgg

SEQ ID NO: 196744 - DNA, 20 bp, Artificial Sequence
  Description of Artificial Sequence: Synthetic oligonucleotide
  Target: LAMA2; (-) strand; PAM type: YTN; PAM sequence: TTT
atcaaacctttcattccatg

SEQ ID NO: 196745 - DNA, 20 bp, Artificial Sequence
  Description of Artificial Sequence: Synthetic oligonucleotide
  Target: LAMA2; (-) strand; PAM type: YTN; PAM sequence: CTT
tatcaaacctttcattccat

SEQ ID NO: 196746 - DNA, 20 bp, Artificial Sequence
  Description of Artificial Sequence: Synthetic oligonucleotide
  Target: LAMA2; (-) strand; PAM type: YTN; PAM sequence: CTA
ccacgtccagctttatcaaa

SEQ ID NO: 196747 - DNA, 20 bp, Artificial Sequence
  Description of Artificial Sequence: Synthetic oligonucleotide
  Target: LAMA2; (-) strand; PAM type: YTN; PAM sequence: CTG
ggatcacaggtgtgagctac

SEQ ID NO: 196748 - DNA, 20 bp, Artificial Sequence
  Description of Artificial Sequence: Synthetic oligonucleotide
  Target: LAMA2; (-) strand; PAM type: YTN; PAM sequence: CTA
gaaatgctgggatcacaggt

SEQ ID NO: 196749 - DNA, 20 bp, Artificial Sequence
  Description of Artificial Sequence: Synthetic oligonucleotide
  Target: LAMA2; (-) strand; PAM type: YTN; PAM sequence: CTC
tagaaatgctgggatcacag

SEQ ID NO: 196750 - DNA, 20 bp, Artificial Sequence
  Description of Artificial Sequence: Synthetic oligonucleotide
  Target: LAMA2; (-) strand; PAM type: YTN; PAM sequence: CTG
gtctctagaaatgctgggat

SEQ ID NO: 196751 - DNA, 20 bp, Artificial Sequence
  Description of Artificial Sequence: Synthetic oligonucleotide
  Target: LAMA2; (-) strand; PAM type: YTN; PAM sequence: CTC
accctggtctctagaaatgc

SEQ ID NO: 196752 - DNA, 20 bp, Artificial Sequence
  Description of Artificial Sequence: Synthetic oligonucleotide
  Target: LAMA2; (-) strand; PAM type: YTN; PAM sequence: CTC
tcaccctggtctctagaaat

SEQ ID NO: 196753 - DNA, 20 bp, Artificial Sequence
  Description of Artificial Sequence: Synthetic oligonucleotide
  Target: LAMA2; (-) strand; PAM type: YTN; PAM sequence: TTC
tctcaccctggtctctagaa

SEQ ID NO: 196754 - DNA, 20 bp, Artificial Sequence
  Description of Artificial Sequence: Synthetic oligonucleotide
  Target: LAMA2; (-) strand; PAM type: YTN; PAM sequence: CTC
aagcgattctctcaccctgg

SEQ ID NO: 196755 - DNA, 20 bp, Artificial Sequence
  Description of Artificial Sequence: Synthetic oligonucleotide
  Target: LAMA2; (-) strand; PAM type: YTN; PAM sequence: CTG
agctcaagcgattctctcac

SEQ ID NO: 196756 - DNA, 20 bp, Artificial Sequence
  Description of Artificial Sequence: Synthetic oligonucleotide
  Target: LAMA2; (-) strand; PAM type: YTN; PAM sequence: TTC
tgagctcaagcgattctctc

SEQ ID NO: 196757 - DNA, 20 bp, Artificial Sequence
  Description of Artificial Sequence: Synthetic oligonucleotide
  Target: LAMA2; (-) strand; PAM type: YTN; PAM sequence: CTT
ctgagctcaagcgattctct

SEQ ID NO: 196758 - DNA, 20 bp, Artificial Sequence
  Description of Artificial Sequence: Synthetic oligonucleotide
  Target: LAMA2; (-) strand; PAM type: YTN; PAM sequence: TTG
aacttctgagctcaagcgat

SEQ ID NO: 196759 - DNA, 20 bp, Artificial Sequence
  Description of Artificial Sequence: Synthetic oligonucleotide
  Target: LAMA2; (-) strand; PAM type: YTN; PAM sequence: CTT
gaacttctgagctcaagcga

SEQ ID NO: 196760 - DNA, 20 bp, Artificial Sequence
  Description of Artificial Sequence: Synthetic oligonucleotide
  Target: LAMA2; (-) strand; PAM type: YTN; PAM sequence: CTG
gccttgaacttctgagctca

SEQ ID NO: 196761 - DNA, 20 bp, Artificial Sequence
  Description of Artificial Sequence: Synthetic oligonucleotide
  Target: LAMA2; (-) strand; PAM type: YTN; PAM sequence: CTA
cccaggctggccttgaactt

SEQ ID NO: 196762 - DNA, 20 bp, Artificial Sequence
  Description of Artificial Sequence: Synthetic oligonucleotide
  Target: LAMA2; (-) strand; PAM type: YTN; PAM sequence: TTG
tgctacccaggctggccttg

SEQ ID NO: 196763 - DNA, 20 bp, Artificial Sequence
  Description of Artificial Sequence: Synthetic oligonucleotide
  Target: LAMA2; (-) strand; PAM type: YTN; PAM sequence: TTG
tagagacaaggtattgtgct

SEQ ID NO: 196764 - DNA, 20 bp, Artificial Sequence
  Description of Artificial Sequence: Synthetic oligonucleotide
  Target: LAMA2; (-) strand; PAM type: YTN; PAM sequence: TTT
gtagagacaaggtattgtgc

SEQ ID NO: 196765 - DNA, 20 bp, Artificial Sequence
  Description of Artificial Sequence: Synthetic oligonucleotide
  Target: LAMA2; (-) strand; PAM type: YTN; PAM sequence: TTT
tgtagagacaaggtattgtg

SEQ ID NO: 196766 - DNA, 20 bp, Artificial Sequence
  Description of Artificial Sequence: Synthetic oligonucleotide
  Target: LAMA2; (-) strand; PAM type: YTN; PAM sequence: TTT
ttgtagagacaaggtattgt

SEQ ID NO: 196767 - DNA, 20 bp, Artificial Sequence
  Description of Artificial Sequence: Synthetic oligonucleotide
  Target: LAMA2; (-) strand; PAM type: YTN; PAM sequence: TTT
tttgtagagacaaggtattg

SEQ ID NO: 196768 - DNA, 20 bp, Artificial Sequence
  Description of Artificial Sequence: Synthetic oligonucleotide
  Target: LAMA2; (-) strand; PAM type: YTN; PAM sequence: TTT
ttttgtagagacaaggtatt

SEQ ID NO: 196769 - DNA, 20 bp, Artificial Sequence
  Description of Artificial Sequence: Synthetic oligonucleotide
  Target: LAMA2; (-) strand; PAM type: YTN; PAM sequence: CTT
tttttgtagagacaaggtat

SEQ ID NO: 196770 - DNA, 20 bp, Artificial Sequence
  Description of Artificial Sequence: Synthetic oligonucleotide
  Target: LAMA2; (-) strand; PAM type: YTN; PAM sequence: TTC
tttttttgtagagacaaggt

SEQ ID NO: 196771 - DNA, 20 bp, Artificial Sequence
  Description of Artificial Sequence: Synthetic oligonucleotide
  Target: LAMA2; (-) strand; PAM type: YTN; PAM sequence: TTT
ctttttttgtagagacaagg

SEQ ID NO: 196772 - DNA, 20 bp, Artificial Sequence
  Description of Artificial Sequence: Synthetic oligonucleotide
  Target: LAMA2; (-) strand; PAM type: YTN; PAM sequence: TTG
tttctttttttgtagagaca

SEQ ID NO: 196773 - DNA, 20 bp, Artificial Sequence
  Description of Artificial Sequence: Synthetic oligonucleotide
  Target: LAMA2; (-) strand; PAM type: YTN; PAM sequence: TTT
gtttctttttttgtagagac

SEQ ID NO: 196774 - DNA, 20 bp, Artificial Sequence
  Description of Artificial Sequence: Synthetic oligonucleotide
  Target: LAMA2; (-) strand; PAM type: YTN; PAM sequence: TTT
tgtttctttttttgtagaga

SEQ ID NO: 196775 - DNA, 20 bp, Artificial Sequence
  Description of Artificial Sequence: Synthetic oligonucleotide
  Target: LAMA2; (-) strand; PAM type: YTN; PAM sequence: CTA
attttgtttctttttttgta

SEQ ID NO: 196776 - DNA, 20 bp, Artificial Sequence
  Description of Artificial Sequence: Synthetic oligonucleotide
  Target: LAMA2; (-) strand; PAM type: YTN; PAM sequence: CTC
aactaattttgtttcttttt

SEQ ID NO: 196777 - DNA, 20 bp, Artificial Sequence
  Description of Artificial Sequence: Synthetic oligonucleotide
  Target: LAMA2; (-) strand; PAM type: YTN; PAM sequence: CTA
ccatgctcaactaattttgt

SEQ ID NO: 196778 - DNA, 20 bp, Artificial Sequence
  Description of Artificial Sequence: Synthetic oligonucleotide
  Target: LAMA2; (-) strand; PAM type: YTN; PAM sequence: CTA
caggtgtgtactaccatgct

SEQ ID NO: 196779 - DNA, 20 bp, Artificial Sequence
  Description of Artificial Sequence: Synthetic oligonucleotide
  Target: LAMA2; (-) strand; PAM type: YTN; PAM sequence: TTG
gagtaggtgggactacaggt

SEQ ID NO: 196780 - DNA, 20 bp, Artificial Sequence
  Description of Artificial Sequence: Synthetic oligonucleotide
  Target: LAMA2; (-) strand; PAM type: YTN; PAM sequence: TTT
ggagtaggtgggactacagg

SEQ ID NO: 196781 - DNA, 20 bp, Artificial Sequence
  Description of Artificial Sequence: Synthetic oligonucleotide
  Target: LAMA2; (-) strand; PAM type: YTN; PAM sequence: CTT
tggagtaggtgggactacag

SEQ ID NO: 196782 - DNA, 20 bp, Artificial Sequence
  Description of Artificial Sequence: Synthetic oligonucleotide
  Target: LAMA2; (-) strand; PAM type: YTN; PAM sequence: TTC
agcctttggagtaggtggga

SEQ ID NO: 196783 - DNA, 20 bp, Artificial Sequence
  Description of Artificial Sequence: Synthetic oligonucleotide
  Target: LAMA2; (-) strand; PAM type: YTN; PAM sequence: CTT
cagcctttggagtaggtggg

SEQ ID NO: 196784 - DNA, 20 bp, Artificial Sequence
  Description of Artificial Sequence: Synthetic oligonucleotide
  Target: LAMA2; (-) strand; PAM type: YTN; PAM sequence: CTC
ccacttcagcctttggagta

SEQ ID NO: 196785 - DNA, 20 bp, Artificial Sequence
  Description of Artificial Sequence: Synthetic oligonucleotide
  Target: LAMA2; (-) strand; PAM type: YTN; PAM sequence: CTC
atgcaatcctcccacttcag

SEQ ID NO: 196786 - DNA, 20 bp, Artificial Sequence
  Description of Artificial Sequence: Synthetic oligonucleotide
  Target: LAMA2; (-) strand; PAM type: YTN; PAM sequence: CTG
ggctcatgcaatcctcccac

SEQ ID NO: 196787 - DNA, 20 bp, Artificial Sequence
  Description of Artificial Sequence: Synthetic oligonucleotide
  Target: LAMA2; (-) strand; PAM type: YTN; PAM sequence: CTC
ctgggctcatgcaatcctcc

SEQ ID NO: 196788 - DNA, 20 bp, Artificial Sequence
  Description of Artificial Sequence: Synthetic oligonucleotide
  Target: LAMA2; (-) strand; PAM type: YTN; PAM sequence: CTG
gaactcctgggctcatgcaa

SEQ ID NO: 196789 - DNA, 20 bp, Artificial Sequence
  Description of Artificial Sequence: Synthetic oligonucleotide
  Target: LAMA2; (-) strand; PAM type: YTN; PAM sequence: CTG
cagcctggaactcctgggct

SEQ ID NO: 196790 - DNA, 20 bp, Artificial Sequence
  Description of Artificial Sequence: Synthetic oligonucleotide
  Target: LAMA2; (-) strand; PAM type: YTN; PAM sequence: CTC
agcacgctgcagcctggaac

SEQ ID NO: 196791 - DNA, 20 bp, Artificial Sequence
  Description of Artificial Sequence: Synthetic oligonucleotide
  Target: LAMA2; (-) strand; PAM type: YTN; PAM sequence: CTG
gagcacagtggcatgatctc

SEQ ID NO: 196792 - DNA, 20 bp, Artificial Sequence
  Description of Artificial Sequence: Synthetic oligonucleotide
  Target: LAMA2; (-) strand; PAM type: YTN; PAM sequence: CTG
tcacccagcctggagcacag

SEQ ID NO: 196793 - DNA, 20 bp, Artificial Sequence
  Description of Artificial Sequence: Synthetic oligonucleotide
  Target: LAMA2; (-) strand; PAM type: YTN; PAM sequence: CTC
tgtcacccagcctggagcac

SEQ ID NO: 196794 - DNA, 20 bp, Artificial Sequence
  Description of Artificial Sequence: Synthetic oligonucleotide
  Target: LAMA2; (-) strand; PAM type: YTN; PAM sequence: TTG
ctctgtcacccagcctggag

SEQ ID NO: 196795 - DNA, 20 bp, Artificial Sequence
  Description of Artificial Sequence: Synthetic oligonucleotide
  Target: LAMA2; (-) strand; PAM type: YTN; PAM sequence: CTT
gctctgtcacccagcctgga

SEQ ID NO: 196796 - DNA, 20 bp, Artificial Sequence
  Description of Artificial Sequence: Synthetic oligonucleotide
  Target: LAMA2; (-) strand; PAM type: YTN; PAM sequence: CTC
ttgctctgtcacccagcctg

SEQ ID NO: 196797 - DNA, 20 bp, Artificial Sequence
  Description of Artificial Sequence: Synthetic oligonucleotide
  Target: LAMA2; (-) strand; PAM type: YTN; PAM sequence: TTG
ggggggacaggctcttgctc

SEQ ID NO: 196798 - DNA, 20 bp, Artificial Sequence
  Description of Artificial Sequence: Synthetic oligonucleotide
  Target: LAMA2; (-) strand; PAM type: YTN; PAM sequence: TTT
gggggggacaggctcttgct

SEQ ID NO: 196799 - DNA, 20 bp, Artificial Sequence
  Description of Artificial Sequence: Synthetic oligonucleotide
  Target: LAMA2; (-) strand; PAM type: YTN; PAM sequence: TTT
tgggggggacaggctcttgc

SEQ ID NO: 196800 - DNA, 20 bp, Artificial Sequence
  Description of Artificial Sequence: Synthetic oligonucleotide
  Target: LAMA2; (-) strand; PAM type: YTN; PAM sequence: TTA
aaaaaattttgggggggaca

SEQ ID NO: 196801 - DNA, 20 bp, Artificial Sequence
  Description of Artificial Sequence: Synthetic oligonucleotide
  Target: LAMA2; (-) strand; PAM type: YTN; PAM sequence: TTT
aaaaaaattttgggggggac

SEQ ID NO: 196802 - DNA, 20 bp, Artificial Sequence
  Description of Artificial Sequence: Synthetic oligonucleotide
  Target: LAMA2; (-) strand; PAM type: YTN; PAM sequence: TTA
tttaaaaaaattttgggggg

SEQ ID NO: 196803 - DNA, 20 bp, Artificial Sequence
  Description of Artificial Sequence: Synthetic oligonucleotide
  Target: LAMA2; (-) strand; PAM type: YTN; PAM sequence: CTT
atttaaaaaaattttggggg

SEQ ID NO: 196804 - DNA, 20 bp, Artificial Sequence
  Description of Artificial Sequence: Synthetic oligonucleotide
  Target: LAMA2; (-) strand; PAM type: YTN; PAM sequence: TTC
ttatttaaaaaaattttggg

SEQ ID NO: 196805 - DNA, 20 bp, Artificial Sequence
  Description of Artificial Sequence: Synthetic oligonucleotide
  Target: LAMA2; (-) strand; PAM type: YTN; PAM sequence: TTT
cttatttaaaaaaattttgg

SEQ ID NO: 196806 - DNA, 20 bp, Artificial Sequence
  Description of Artificial Sequence: Synthetic oligonucleotide
  Target: LAMA2; (-) strand; PAM type: YTN; PAM sequence: CTT
tcttatttaaaaaaattttg

SEQ ID NO: 196807 - DNA, 20 bp, Artificial Sequence
  Description of Artificial Sequence: Synthetic oligonucleotide
  Target: LAMA2; (-) strand; PAM type: YTN; PAM sequence: TTA
aaactttcttatttaaaaaa

SEQ ID NO: 196808 - DNA, 20 bp, Artificial Sequence
  Description of Artificial Sequence: Synthetic oligonucleotide
  Target: LAMA2; (-) strand; PAM type: YTN; PAM sequence: TTA
ttaaaactttcttatttaaa

SEQ ID NO: 196809 - DNA, 20 bp, Artificial Sequence
  Description of Artificial Sequence: Synthetic oligonucleotide
  Target: LAMA2; (-) strand; PAM type: YTN; PAM sequence: CTT
attaaaactttcttatttaa

SEQ ID NO: 196810 - DNA, 20 bp, Artificial Sequence
  Description of Artificial Sequence: Synthetic oligonucleotide
  Target: LAMA2; (-) strand; PAM type: YTN; PAM sequence: CTG
cttattaaaactttcttatt

SEQ ID NO: 196811 - DNA, 20 bp, Artificial Sequence
  Description of Artificial Sequence: Synthetic oligonucleotide
  Target: LAMA2; (-) strand; PAM type: YTN; PAM sequence: TTC
tgcttattaaaactttctta

SEQ ID NO: 196812 - DNA, 20 bp, Artificial Sequence
  Description of Artificial Sequence: Synthetic oligonucleotide
  Target: LAMA2; (-) strand; PAM type: YTN; PAM sequence: CTA
atattctgcttattaaaact

SEQ ID NO: 196813 - DNA, 20 bp, Artificial Sequence
  Description of Artificial Sequence: Synthetic oligonucleotide
  Target: LAMA2; (-) strand; PAM type: YTN; PAM sequence: TTA
aactaatattctgcttatta

SEQ ID NO: 196814 - DNA, 20 bp, Artificial Sequence
  Description of Artificial Sequence: Synthetic oligonucleotide
  Target: LAMA2; (-) strand; PAM type: YTN; PAM sequence: TTC
ataattaaactaatattctg

SEQ ID NO: 196815 - DNA, 20 bp, Artificial Sequence
  Description of Artificial Sequence: Synthetic oligonucleotide
  Target: LAMA2; (-) strand; PAM type: YTN; PAM sequence: CTC
attcataattaaactaatat

SEQ ID NO: 196816 - DNA, 20 bp, Artificial Sequence
  Description of Artificial Sequence: Synthetic oligonucleotide
  Target: LAMA2; (-) strand; PAM type: YTN; PAM sequence: TTC
tcattcataattaaactaat

SEQ ID NO: 196817 - DNA, 20 bp, Artificial Sequence
  Description of Artificial Sequence: Synthetic oligonucleotide
  Target: LAMA2; (-) strand; PAM type: YTN; PAM sequence: CTT
ctcattcataattaaactaa

SEQ ID NO: 196818 - DNA, 20 bp, Artificial Sequence
  Description of Artificial Sequence: Synthetic oligonucleotide
  Target: LAMA2; (-) strand; PAM type: YTN; PAM sequence: CTC
ttctcattcataattaaact

SEQ ID NO: 196819 - DNA, 20 bp, Artificial Sequence
  Description of Artificial Sequence: Synthetic oligonucleotide
  Target: LAMA2; (-) strand; PAM type: YTN; PAM sequence: CTA
tacatctcttctcattcata

SEQ ID NO: 196820 - DNA, 20 bp, Artificial Sequence
  Description of Artificial Sequence: Synthetic oligonucleotide
  Target: LAMA2; (-) strand; PAM type: YTN; PAM sequence: CTA
caaatgctatacatctcttc

SEQ ID NO: 196821 - DNA, 20 bp, Artificial Sequence
  Description of Artificial Sequence: Synthetic oligonucleotide
  Target: LAMA2; (-) strand; PAM type: YTN; PAM sequence: CTG
tacccctacaaatgctatac

SEQ ID NO: 196822 - DNA, 20 bp, Artificial Sequence
  Description of Artificial Sequence: Synthetic oligonucleotide
  Target: LAMA2; (-) strand; PAM type: YTN; PAM sequence: TTC
tgtacccctacaaatgctat

SEQ ID NO: 196823 - DNA, 20 bp, Artificial Sequence
  Description of Artificial Sequence: Synthetic oligonucleotide
  Target: LAMA2; (-) strand; PAM type: YTN; PAM sequence: TTA
tggaatacatggttctgtac

SEQ ID NO: 196824 - DNA, 20 bp, Artificial Sequence
  Description of Artificial Sequence: Synthetic oligonucleotide
  Target: LAMA2; (-) strand; PAM type: YTN; PAM sequence: TTT
atggaatacatggttctgta

SEQ ID NO: 196825 - DNA, 20 bp, Artificial Sequence
  Description of Artificial Sequence: Synthetic oligonucleotide
  Target: LAMA2; (-) strand; PAM type: YTN; PAM sequence: CTT
tatggaatacatggttctgt

SEQ ID NO: 196826 - DNA, 20 bp, Artificial Sequence
  Description of Artificial Sequence: Synthetic oligonucleotide
  Target: LAMA2; (-) strand; PAM type: YTN; PAM sequence: TTC
ctttatggaatacatggttc

SEQ ID NO: 196827 - DNA, 20 bp, Artificial Sequence
  Description of Artificial Sequence: Synthetic oligonucleotide
  Target: LAMA2; (-) strand; PAM type: YTN; PAM sequence: CTT
cctttatggaatacatggtt

SEQ ID NO: 196828 - DNA, 20 bp, Artificial Sequence
  Description of Artificial Sequence: Synthetic oligonucleotide
  Target: LAMA2; (-) strand; PAM type: YTN; PAM sequence: TTC
ttcctttatggaatacatgg

SEQ ID NO: 196829 - DNA, 20 bp, Artificial Sequence
  Description of Artificial Sequence: Synthetic oligonucleotide
  Target: LAMA2; (-) strand; PAM type: YTN; PAM sequence: CTT
cttcctttatggaatacatg

SEQ ID NO: 196830 - DNA, 20 bp, Artificial Sequence
  Description of Artificial Sequence: Synthetic oligonucleotide
  Target: LAMA2; (-) strand; PAM type: YTN; PAM sequence: TTA
acttcttcctttatggaata

SEQ ID NO: 196831 - DNA, 20 bp, Artificial Sequence
  Description of Artificial Sequence: Synthetic oligonucleotide
  Target: LAMA2; (-) strand; PAM type: YTN; PAM sequence: CTT
aacttcttcctttatggaat

SEQ ID NO: 196832 - DNA, 20 bp, Artificial Sequence
  Description of Artificial Sequence: Synthetic oligonucleotide
  Target: LAMA2; (-) strand; PAM type: YTN; PAM sequence: CTC
ttaacttcttcctttatgga

SEQ ID NO: 196833 - DNA, 20 bp, Artificial Sequence
  Description of Artificial Sequence: Synthetic oligonucleotide
  Target: LAMA2; (-) strand; PAM type: YTN; PAM sequence: TTG
ctcttaacttcttcctttat

SEQ ID NO: 196834 - DNA, 20 bp, Artificial Sequence
  Description of Artificial Sequence: Synthetic oligonucleotide
  Target: LAMA2; (-) strand; PAM type: YTN; PAM sequence: TTC
cacatcattgctcttaactt

SEQ ID NO: 196835 - DNA, 20 bp, Artificial Sequence
  Description of Artificial Sequence: Synthetic oligonucleotide
  Target: LAMA2; (-) strand; PAM type: YTN; PAM sequence: TTA
ttccacatcattgctcttaa

SEQ ID NO: 196836 - DNA, 20 bp, Artificial Sequence
  Description of Artificial Sequence: Synthetic oligonucleotide
  Target: LAMA2; (-) strand; PAM type: YTN; PAM sequence: CTT
attccacatcattgctctta

SEQ ID NO: 196837 - DNA, 20 bp, Artificial Sequence
  Description of Artificial Sequence: Synthetic oligonucleotide
  Target: LAMA2; (-) strand; PAM type: YTN; PAM sequence: TTA
aaagccccatgcttattcca

SEQ ID NO: 196838 - DNA, 20 bp, Artificial Sequence
  Description of Artificial Sequence: Synthetic oligonucleotide
  Target: LAMA2; (-) strand; PAM type: YTN; PAM sequence: CTT
aaaagccccatgcttattcc

SEQ ID NO: 196839 - DNA, 20 bp, Artificial Sequence
  Description of Artificial Sequence: Synthetic oligonucleotide
  Target: LAMA2; (-) strand; PAM type: YTN; PAM sequence: TTC
ttaaaagccccatgcttatt

SEQ ID NO: 196840 - DNA, 20 bp, Artificial Sequence
  Description of Artificial Sequence: Synthetic oligonucleotide
  Target: LAMA2; (-) strand; PAM type: YTN; PAM sequence: TTC
agacaagttcttaaaagccc

SEQ ID NO: 196841 - DNA, 20 bp, Artificial Sequence
  Description of Artificial Sequence: Synthetic oligonucleotide
  Target: LAMA2; (-) strand; PAM type: YTN; PAM sequence: TTT
cagacaagttcttaaaagcc

SEQ ID NO: 196842 - DNA, 20 bp, Artificial Sequence
  Description of Artificial Sequence: Synthetic oligonucleotide
  Target: LAMA2; (-) strand; PAM type: YTN; PAM sequence: TTT
tcagacaagttcttaaaagc

SEQ ID NO: 196843 - DNA, 20 bp, Artificial Sequence
  Description of Artificial Sequence: Synthetic oligonucleotide
  Target: LAMA2; (-) strand; PAM type: YTN; PAM sequence: CTT
ttcagacaagttcttaaaag

SEQ ID NO: 196844 - DNA, 20 bp, Artificial Sequence
  Description of Artificial Sequence: Synthetic oligonucleotide
  Target: LAMA2; (-) strand; PAM type: YTN; PAM sequence: CTC
ttttcagacaagttcttaaa

SEQ ID NO: 196845 - DNA, 20 bp, Artificial Sequence
  Description of Artificial Sequence: Synthetic oligonucleotide
  Target: LAMA2; (-) strand; PAM type: YTN; PAM sequence: TTG
accaaagaatatcctctttt

SEQ ID NO: 196846 - DNA, 20 bp, Artificial Sequence
  Description of Artificial Sequence: Synthetic oligonucleotide
  Target: LAMA2; (-) strand; PAM type: YTN; PAM sequence: CTA
ttgaccaaagaatatcctct

SEQ ID NO: 196847 - DNA, 20 bp, Artificial Sequence
  Description of Artificial Sequence: Synthetic oligonucleotide
  Target: LAMA2; (-) strand; PAM type: YTN; PAM sequence: TTC
aactattgaccaaagaatat

SEQ ID NO: 196848 - DNA, 20 bp, Artificial Sequence
  Description of Artificial Sequence: Synthetic oligonucleotide
  Target: LAMA2; (-) strand; PAM type: YTN; PAM sequence: TTT
caactattgaccaaagaata

SEQ ID NO: 196849 - DNA, 20 bp, Artificial Sequence
  Description of Artificial Sequence: Synthetic oligonucleotide
  Target: LAMA2; (-) strand; PAM type: YTN; PAM sequence: TTT
tcaactattgaccaaagaat

SEQ ID NO: 196850 - DNA, 20 bp, Artificial Sequence
  Description of Artificial Sequence: Synthetic oligonucleotide
  Target: LAMA2; (-) strand; PAM type: YTN; PAM sequence: TTT
ttcaactattgaccaaagaa

SEQ ID NO: 196851 - DNA, 20 bp, Artificial Sequence
  Description of Artificial Sequence: Synthetic oligonucleotide
  Target: LAMA2; (-) strand; PAM type: YTN; PAM sequence: TTT
tttcaactattgaccaaaga

SEQ ID NO: 196852 - DNA, 20 bp, Artificial Sequence
  Description of Artificial Sequence: Synthetic oligonucleotide
  Target: LAMA2; (-) strand; PAM type: YTN; PAM sequence: TTA
ttttttcaactattgaccaa

SEQ ID NO: 196853 - DNA, 20 bp, Artificial Sequence
  Description of Artificial Sequence: Synthetic oligonucleotide
  Target: LAMA2; (-) strand; PAM type: YTN; PAM sequence: TTT
attttttcaactattgacca

SEQ ID NO: 196854 - DNA, 20 bp, Artificial Sequence
  Description of Artificial Sequence: Synthetic oligonucleotide
  Target: LAMA2; (-) strand; PAM type: YTN; PAM sequence: TTT
tattttttcaactattgacc

SEQ ID NO: 196855 - DNA, 20 bp, Artificial Sequence
  Description of Artificial Sequence: Synthetic oligonucleotide
  Target: LAMA2; (-) strand; PAM type: YTN; PAM sequence: TTA
ttttattttttcaactattg

SEQ ID NO: 196856 - DNA, 20 bp, Artificial Sequence
  Description of Artificial Sequence: Synthetic oligonucleotide
  Target: LAMA2; (-) strand; PAM type: YTN; PAM sequence: CTT
attttattttttcaactatt

SEQ ID NO: 196857 - DNA, 20 bp, Artificial Sequence
  Description of Artificial Sequence: Synthetic oligonucleotide
  Target: LAMA2; (-) strand; PAM type: YTN; PAM sequence: CTC
cagcaaggcttattttattt

SEQ ID NO: 196858 - DNA, 20 bp, Artificial Sequence
  Description of Artificial Sequence: Synthetic oligonucleotide
  Target: LAMA2; (-) strand; PAM type: YTN; PAM sequence: CTC
cactccagcaaggcttattt

SEQ ID NO: 196859 - DNA, 20 bp, Artificial Sequence
  Description of Artificial Sequence: Synthetic oligonucleotide
  Target: LAMA2; (-) strand; PAM type: YTN; PAM sequence: TTG
ctccactccagcaaggctta

SEQ ID NO: 196860 - DNA, 20 bp, Artificial Sequence
  Description of Artificial Sequence: Synthetic oligonucleotide
  Target: LAMA2; (-) strand; PAM type: YTN; PAM sequence: CTT
gctccactccagcaaggctt

SEQ ID NO: 196861 - DNA, 20 bp, Artificial Sequence
  Description of Artificial Sequence: Synthetic oligonucleotide
  Target: LAMA2; (-) strand; PAM type: YTN; PAM sequence: TTG
acttgctccactccagcaag

SEQ ID NO: 196862 - DNA, 20 bp, Artificial Sequence
  Description of Artificial Sequence: Synthetic oligonucleotide
  Target: LAMA2; (-) strand; PAM type: YTN; PAM sequence: TTC
cattgacttgctccactcca

SEQ ID NO: 196863 - DNA, 20 bp, Artificial Sequence
  Description of Artificial Sequence: Synthetic oligonucleotide
  Target: LAMA2; (-) strand; PAM type: YTN; PAM sequence: TTT
ccattgacttgctccactcc

SEQ ID NO: 196864 - DNA, 20 bp, Artificial Sequence
  Description of Artificial Sequence: Synthetic oligonucleotide
  Target: LAMA2; (-) strand; PAM type: YTN; PAM sequence: CTT
tccattgacttgctccactc

SEQ ID NO: 196865 - DNA, 20 bp, Artificial Sequence
  Description of Artificial Sequence: Synthetic oligonucleotide
  Target: LAMA2; (-) strand; PAM type: YTN; PAM sequence: CTG
tgaaggctttccattgactt

SEQ ID NO: 196866 - DNA, 20 bp, Artificial Sequence
  Description of Artificial Sequence: Synthetic oligonucleotide
  Target: LAMA2; (-) strand; PAM type: YTN; PAM sequence: CTA
actgtgaaggctttccattg

SEQ ID NO: 196867 - DNA, 20 bp, Artificial Sequence
  Description of Artificial Sequence: Synthetic oligonucleotide
  Target: LAMA2; (-) strand; PAM type: YTN; PAM sequence: CTC
cacctaactgtgaaggcttt

SEQ ID NO: 196868 - DNA, 20 bp, Artificial Sequence
  Description of Artificial Sequence: Synthetic oligonucleotide
  Target: LAMA2; (-) strand; PAM type: YTN; PAM sequence: TTA
gtgtaaatgctccacctaac

SEQ ID NO: 196869 - DNA, 20 bp, Artificial Sequence
  Description of Artificial Sequence: Synthetic oligonucleotide
  Target: LAMA2; (-) strand; PAM type: YTN; PAM sequence: TTT
agtgtaaatgctccacctaa

SEQ ID NO: 196870 - DNA, 20 bp, Artificial Sequence
  Description of Artificial Sequence: Synthetic oligonucleotide
  Target: LAMA2; (-) strand; PAM type: YTN; PAM sequence: TTC
gaaataaagtcatttagtgt

SEQ ID NO: 196871 - DNA, 20 bp, Artificial Sequence
  Description of Artificial Sequence: Synthetic oligonucleotide
  Target: LAMA2; (-) strand; PAM type: YTN; PAM sequence: TTG
aatgttcgaaataaagtcat

SEQ ID NO: 196872 - DNA, 20 bp, Artificial Sequence
  Description of Artificial Sequence: Synthetic oligonucleotide
  Target: LAMA2; (-) strand; PAM type: YTN; PAM sequence: TTG
ttgaatgttcgaaataaagt

SEQ ID NO: 196873 - DNA, 20 bp, Artificial Sequence
  Description of Artificial Sequence: Synthetic oligonucleotide
  Target: LAMA2; (-) strand; PAM type: YTN; PAM sequence: TTT
gttgaatgttcgaaataaag

SEQ ID NO: 196874 - DNA, 20 bp, Artificial Sequence
  Description of Artificial Sequence: Synthetic oligonucleotide
  Target: LAMA2; (-) strand; PAM type: YTN; PAM sequence: TTA
tatggcgggtaaccaataga

SEQ ID NO: 196875 - DNA, 20 bp, Artificial Sequence
  Description of Artificial Sequence: Synthetic oligonucleotide
  Target: LAMA2; (-) strand; PAM type: YTN; PAM sequence: CTA
acattatatggcgggtaacc

SEQ ID NO: 196876 - DNA, 20 bp, Artificial Sequence
  Description of Artificial Sequence: Synthetic oligonucleotide
  Target: LAMA2; (-) strand; PAM type: YTN; PAM sequence: TTC
cccagcacctaacattatat

SEQ ID NO: 196877 - DNA, 20 bp, Artificial Sequence
  Description of Artificial Sequence: Synthetic oligonucleotide
  Target: LAMA2; (-) strand; PAM type: YTN; PAM sequence: TTT
ccccagcacctaacattata

SEQ ID NO: 196878 - DNA, 20 bp, Artificial Sequence
  Description of Artificial Sequence: Synthetic oligonucleotide
  Target: LAMA2; (-) strand; PAM type: YTN; PAM sequence: CTA
tttccccagcacctaacatt

SEQ ID NO: 196879 - DNA, 20 bp, Artificial Sequence
  Description of Artificial Sequence: Synthetic oligonucleotide
  Target: LAMA2; (-) strand; PAM type: YTN; PAM sequence: TTC
tatttccccagcacctaaca

SEQ ID NO: 196880 - DNA, 20 bp, Artificial Sequence
  Description of Artificial Sequence: Synthetic oligonucleotide
  Target: LAMA2; (-) strand; PAM type: YTN; PAM sequence: CTT
ctatttccccagcacctaac

SEQ ID NO: 196881 - DNA, 20 bp, Artificial Sequence
  Description of Artificial Sequence: Synthetic oligonucleotide
  Target: LAMA2; (-) strand; PAM type: YTN; PAM sequence: TTA
cttctatttccccagcacct

SEQ ID NO: 196882 - DNA, 20 bp, Artificial Sequence
  Description of Artificial Sequence: Synthetic oligonucleotide
  Target: LAMA2; (-) strand; PAM type: YTN; PAM sequence: CTT
acttctatttccccagcacc

SEQ ID NO: 196883 - DNA, 20 bp, Artificial Sequence
  Description of Artificial Sequence: Synthetic oligonucleotide
  Target: LAMA2; (-) strand; PAM type: YTN; PAM sequence: CTA
cttacttctatttccccagc

SEQ ID NO: 196884 - DNA, 20 bp, Artificial Sequence
  Description of Artificial Sequence: Synthetic oligonucleotide
  Target: LAMA2; (-) strand; PAM type: YTN; PAM sequence: TTC
tacttacttctatttcccca

SEQ ID NO: 196885 - DNA, 20 bp, Artificial Sequence
  Description of Artificial Sequence: Synthetic oligonucleotide
  Target: LAMA2; (-) strand; PAM type: YTN; PAM sequence: CTC
attctacttacttctatttc

SEQ ID NO: 196886 - DNA, 20 bp, Artificial Sequence
  Description of Artificial Sequence: Synthetic oligonucleotide
  Target: LAMA2; (-) strand; PAM type: YTN; PAM sequence: CTC
ccccacctcattctacttac

SEQ ID NO: 196887 - DNA, 20 bp, Artificial Sequence
  Description of Artificial Sequence: Synthetic oligonucleotide
  Target: LAMA2; (-) strand; PAM type: YTN; PAM sequence: TTC
caagagccacagtgaacctc

SEQ ID NO: 196888 - DNA, 20 bp, Artificial Sequence
  Description of Artificial Sequence: Synthetic oligonucleotide
  Target: LAMA2; (-) strand; PAM type: YTN; PAM sequence: TTT
ccaagagccacagtgaacct

SEQ ID NO: 196889 - DNA, 20 bp, Artificial Sequence
  Description of Artificial Sequence: Synthetic oligonucleotide
  Target: LAMA2; (-) strand; PAM type: YTN; PAM sequence: CTT
tccaagagccacagtgaacc

SEQ ID NO: 196890 - DNA, 20 bp, Artificial Sequence
  Description of Artificial Sequence: Synthetic oligonucleotide
  Target: LAMA2; (-) strand; PAM type: YTN; PAM sequence: TTC
ctttccaagagccacagtga

SEQ ID NO: 196891 - DNA, 20 bp, Artificial Sequence
  Description of Artificial Sequence: Synthetic oligonucleotide
  Target: LAMA2; (-) strand; PAM type: YTN; PAM sequence: TTT
cctttccaagagccacagtg

SEQ ID NO: 196892 - DNA, 20 bp, Artificial Sequence
  Description of Artificial Sequence: Synthetic oligonucleotide
  Target: LAMA2; (-) strand; PAM type: YTN; PAM sequence: TTT
tcctttccaagagccacagt

SEQ ID NO: 196893 - DNA, 20 bp, Artificial Sequence
  Description of Artificial Sequence: Synthetic oligonucleotide
  Target: LAMA2; (-) strand; PAM type: YTN; PAM sequence: TTA
tgtattttcctttccaagag

SEQ ID NO: 196894 - DNA, 20 bp, Artificial Sequence
  Description of Artificial Sequence: Synthetic oligonucleotide
  Target: LAMA2; (-) strand; PAM type: YTN; PAM sequence: TTG
attatgtattttcctttcca

SEQ ID NO: 196895 - DNA, 20 bp, Artificial Sequence
  Description of Artificial Sequence: Synthetic oligonucleotide
  Target: LAMA2; (-) strand; PAM type: YTN; PAM sequence: TTT
gattatgtattttcctttcc

SEQ ID NO: 196896 - DNA, 20 bp, Artificial Sequence
  Description of Artificial Sequence: Synthetic oligonucleotide
  Target: LAMA2; (-) strand; PAM type: YTN; PAM sequence: CTT
tgattatgtattttcctttc

SEQ ID NO: 196897 - DNA, 20 bp, Artificial Sequence
  Description of Artificial Sequence: Synthetic oligonucleotide
  Target: LAMA2; (-) strand; PAM type: YTN; PAM sequence: CTA
acacaaactttgattatgta

SEQ ID NO: 196898 - DNA, 20 bp, Artificial Sequence
  Description of Artificial Sequence: Synthetic oligonucleotide
  Target: LAMA2; (-) strand; PAM type: YTN; PAM sequence: TTC
taacacaaactttgattatg

SEQ ID NO: 196899 - DNA, 20 bp, Artificial Sequence
  Description of Artificial Sequence: Synthetic oligonucleotide
  Target: LAMA2; (-) strand; PAM type: YTN; PAM sequence: CTT
ctaacacaaactttgattat

SEQ ID NO: 196900 - DNA, 20 bp, Artificial Sequence
  Description of Artificial Sequence: Synthetic oligonucleotide
  Target: LAMA2; (-) strand; PAM type: YTN; PAM sequence: TTG
acccttctaacacaaacttt

SEQ ID NO: 196901 - DNA, 20 bp, Artificial Sequence
  Description of Artificial Sequence: Synthetic oligonucleotide
  Target: LAMA2; (-) strand; PAM type: YTN; PAM sequence: TTC
agattgacccttctaacaca

SEQ ID NO: 196902 - DNA, 20 bp, Artificial Sequence
  Description of Artificial Sequence: Synthetic oligonucleotide
  Target: LAMA2; (-) strand; PAM type: YTN; PAM sequence: CTT
cagattgacccttctaacac

SEQ ID NO: 196903 - DNA, 20 bp, Artificial Sequence
  Description of Artificial Sequence: Synthetic oligonucleotide
  Target: LAMA2; (-) strand; PAM type: YTN; PAM sequence: TTC
aaaagccttcagattgaccc

SEQ ID NO: 196904 - DNA, 20 bp, Artificial Sequence
  Description of Artificial Sequence: Synthetic oligonucleotide
  Target: LAMA2; (-) strand; PAM type: YTN; PAM sequence: TTT
caaaagccttcagattgacc

SEQ ID NO: 196905 - DNA, 20 bp, Artificial Sequence
  Description of Artificial Sequence: Synthetic oligonucleotide
  Target: LAMA2; (-) strand; PAM type: YTN; PAM sequence: TTT
tcaaaagccttcagattgac

SEQ ID NO: 196906 - DNA, 20 bp, Artificial Sequence
  Description of Artificial Sequence: Synthetic oligonucleotide
  Target: LAMA2; (-) strand; PAM type: YTN; PAM sequence: TTT
ttcaaaagccttcagattga

SEQ ID NO: 196907 - DNA, 20 bp, Artificial Sequence
  Description of Artificial Sequence: Synthetic oligonucleotide
  Target: LAMA2; (-) strand; PAM type: YTN; PAM sequence: CTA
tcccagatccatttttcaaa

SEQ ID NO: 196908 - DNA, 20 bp, Artificial Sequence
  Description of Artificial Sequence: Synthetic oligonucleotide
  Target: LAMA2; (-) strand; PAM type: YTN; PAM sequence: CTC
cctatcccagatccattttt

SEQ ID NO: 196909 - DNA, 20 bp, Artificial Sequence
  Description of Artificial Sequence: Synthetic oligonucleotide
  Target: LAMA2; (-) strand; PAM type: YTN; PAM sequence: TTC
aacaaacatcctccctatcc

SEQ ID NO: 196910 - DNA, 20 bp, Artificial Sequence
  Description of Artificial Sequence: Synthetic oligonucleotide
  Target: LAMA2; (-) strand; PAM type: YTN; PAM sequence: TTC
attcaacaaacatcctccct

SEQ ID NO: 196911 - DNA, 20 bp, Artificial Sequence
  Description of Artificial Sequence: Synthetic oligonucleotide
  Target: LAMA2; (-) strand; PAM type: YTN; PAM sequence: TTC
attcattcaacaaacatcct

SEQ ID NO: 196912 - DNA, 20 bp, Artificial Sequence
  Description of Artificial Sequence: Synthetic oligonucleotide
  Target: LAMA2; (-) strand; PAM type: YTN; PAM sequence: TTG
attcattcattcaacaaaca

SEQ ID NO: 196913 - DNA, 20 bp, Artificial Sequence
  Description of Artificial Sequence: Synthetic oligonucleotide
  Target: LAMA2; (-) strand; PAM type: YTN; PAM sequence: TTG
attgattcattcattcaaca

SEQ ID NO: 196914 - DNA, 20 bp, Artificial Sequence
  Description of Artificial Sequence: Synthetic oligonucleotide
  Target: LAMA2; (-) strand; PAM type: YTN; PAM sequence: TTG
gattgattgattcattcatt

SEQ ID NO: 196915 - DNA, 20 bp, Artificial Sequence
  Description of Artificial Sequence: Synthetic oligonucleotide
  Target: LAMA2; (-) strand; PAM type: YTN; PAM sequence: TTA
attggattgattgattcatt

SEQ ID NO: 196916 - DNA, 20 bp, Artificial Sequence
  Description of Artificial Sequence: Synthetic oligonucleotide
  Target: LAMA2; (-) strand; PAM type: YTN; PAM sequence: TTG
aattaattggattgattgat

SEQ ID NO: 196917 - DNA, 20 bp, Artificial Sequence
  Description of Artificial Sequence: Synthetic oligonucleotide
  Target: LAMA2; (-) strand; PAM type: YTN; PAM sequence: TTA
ttgaattaattggattgatt

SEQ ID NO: 196918 - DNA, 20 bp, Artificial Sequence
  Description of Artificial Sequence: Synthetic oligonucleotide
  Target: LAMA2; (-) strand; PAM type: YTN; PAM sequence: TTT
attgaattaattggattgat

SEQ ID NO: 196919 - DNA, 20 bp, Artificial Sequence
  Description of Artificial Sequence: Synthetic oligonucleotide
  Target: LAMA2; (-) strand; PAM type: YTN; PAM sequence: TTA
gtttattgaattaattggat

SEQ ID NO: 196920 - DNA, 20 bp, Artificial Sequence
  Description of Artificial Sequence: Synthetic oligonucleotide
  Target: LAMA2; (-) strand; PAM type: YTN; PAM sequence: CTA
aaatcatgattagtttattg

SEQ ID NO: 196921 - DNA, 20 bp, Artificial Sequence
  Description of Artificial Sequence: Synthetic oligonucleotide
  Target: LAMA2; (-) strand; PAM type: YTN; PAM sequence: CTC
actaaaatcatgattagttt

SEQ ID NO: 196922 - DNA, 20 bp, Artificial Sequence
  Description of Artificial Sequence: Synthetic oligonucleotide
  Target: LAMA2; (-) strand; PAM type: YTN; PAM sequence: TTC
atagaatactcactaaaatc

SEQ ID NO: 196923 - DNA, 20 bp, Artificial Sequence
  Description of Artificial Sequence: Synthetic oligonucleotide
  Target: LAMA2; (-) strand; PAM type: YTN; PAM sequence: CTA
agtgagggttcatagaatac

SEQ ID NO: 196924 - DNA, 20 bp, Artificial Sequence
  Description of Artificial Sequence: Synthetic oligonucleotide
  Target: LAMA2; (-) strand; PAM type: YTN; PAM sequence: TTA
aatgtcacagtcaaggtaat

SEQ ID NO: 196925 - DNA, 20 bp, Artificial Sequence
  Description of Artificial Sequence: Synthetic oligonucleotide
  Target: LAMA2; (-) strand; PAM type: YTN; PAM sequence: CTG
aatgtaagagaagcaaagaa

SEQ ID NO: 196926 - DNA, 20 bp, Artificial Sequence
  Description of Artificial Sequence: Synthetic oligonucleotide
  Target: LAMA2; (-) strand; PAM type: YTN; PAM sequence: TTA
actgaatgtaagagaagcaa

SEQ ID NO: 196927 - DNA, 20 bp, Artificial Sequence
  Description of Artificial Sequence: Synthetic oligonucleotide
  Target: LAMA2; (-) strand; PAM type: YTN; PAM sequence: TTT
aactgaatgtaagagaagca

SEQ ID NO: 196928 - DNA, 20 bp, Artificial Sequence
  Description of Artificial Sequence: Synthetic oligonucleotide
  Target: LAMA2; (-) strand; PAM type: YTN; PAM sequence: TTT
taactgaatgtaagagaagc

SEQ ID NO: 196929 - DNA, 20 bp, Artificial Sequence
  Description of Artificial Sequence: Synthetic oligonucleotide
  Target: LAMA2; (-) strand; PAM type: YTN; PAM sequence: TTT
ttaactgaatgtaagagaag

SEQ ID NO: 196930 - DNA, 20 bp, Artificial Sequence
  Description of Artificial Sequence: Synthetic oligonucleotide
  Target: LAMA2; (-) strand; PAM type: YTN; PAM sequence: TTA
aaaatatttttaactgaatg

SEQ ID NO: 196931 - DNA, 20 bp, Artificial Sequence
  Description of Artificial Sequence: Synthetic oligonucleotide
  Target: LAMA2; (-) strand; PAM type: YTN; PAM sequence: TTT
aaaaatatttttaactgaat

SEQ ID NO: 196932 - DNA, 20 bp, Artificial Sequence
  Description of Artificial Sequence: Synthetic oligonucleotide
  Target: LAMA2; (-) strand; PAM type: YTN; PAM sequence: TTT
taaaaatatttttaactgaa

SEQ ID NO: 196933 - DNA, 20 bp, Artificial Sequence
  Description of Artificial Sequence: Synthetic oligonucleotide
  Target: LAMA2; (-) strand; PAM type: YTN; PAM sequence: TTG
tattttaaaaatatttttaa

SEQ ID NO: 196934 - DNA, 20 bp, Artificial Sequence
  Description of Artificial Sequence: Synthetic oligonucleotide
  Target: LAMA2; (-) strand; PAM type: YTN; PAM sequence: TTG
aaaattgtattttaaaaata

SEQ ID NO: 196935 - DNA, 20 bp, Artificial Sequence
  Description of Artificial Sequence: Synthetic oligonucleotide
  Target: LAMA2; (-) strand; PAM type: YTN; PAM sequence: CTT
gaaaattgtattttaaaaat

SEQ ID NO: 196936 - DNA, 20 bp, Artificial Sequence
  Description of Artificial Sequence: Synthetic oligonucleotide
  Target: LAMA2; (-) strand; PAM type: YTN; PAM sequence: CTG
aaccttgaaaattgtatttt

SEQ ID NO: 196937 - DNA, 20 bp, Artificial Sequence
  Description of Artificial Sequence: Synthetic oligonucleotide
  Target: LAMA2; (-) strand; PAM type: YTN; PAM sequence: TTC
tgaaccttgaaaattgtatt

SEQ ID NO: 196938 - DNA, 20 bp, Artificial Sequence
  Description of Artificial Sequence: Synthetic oligonucleotide
  Target: LAMA2; (-) strand; PAM type: YTN; PAM sequence: TTT
ctgaaccttgaaaattgtat

SEQ ID NO: 196939 - DNA, 20 bp, Artificial Sequence
  Description of Artificial Sequence: Synthetic oligonucleotide
  Target: LAMA2; (-) strand; PAM type: YTN; PAM sequence: TTG
tttctgaaccttgaaaattg

SEQ ID NO: 196940 - DNA, 20 bp, Artificial Sequence
  Description of Artificial Sequence: Synthetic oligonucleotide
  Target: LAMA2; (-) strand; PAM type: YTN; PAM sequence: TTT
gtttctgaaccttgaaaatt

SEQ ID NO: 196941 - DNA, 20 bp, Artificial Sequence
  Description of Artificial Sequence: Synthetic oligonucleotide
  Target: LAMA2; (-) strand; PAM type: YTN; PAM sequence: TTT
tgtttctgaaccttgaaaat

SEQ ID NO: 196942 - DNA, 20 bp, Artificial Sequence
  Description of Artificial Sequence: Synthetic oligonucleotide
  Target: LAMA2; (-) strand; PAM type: YTN; PAM sequence: TTT
ttgtttctgaaccttgaaaa

SEQ ID NO: 196943 - DNA, 20 bp, Artificial Sequence
  Description of Artificial Sequence: Synthetic oligonucleotide
  Target: LAMA2; (-) strand; PAM type: YTN; PAM sequence: TTT
tttgtttctgaaccttgaaa

SEQ ID NO: 196944 - DNA, 20 bp, Artificial Sequence
  Description of Artificial Sequence: Synthetic oligonucleotide
  Target: LAMA2; (-) strand; PAM type: YTN; PAM sequence: TTT
ttttgtttctgaaccttgaa

SEQ ID NO: 196945 - DNA, 20 bp, Artificial Sequence
  Description of Artificial Sequence: Synthetic oligonucleotide
  Target: LAMA2; (-) strand; PAM type: YTN; PAM sequence: TTT
tttttgtttctgaaccttga

SEQ ID NO: 196946 - DNA, 20 bp, Artificial Sequence
  Description of Artificial Sequence: Synthetic oligonucleotide
  Target: LAMA2; (-) strand; PAM type: YTN; PAM sequence: TTA
ttttttttgtttctgaacct

SEQ ID NO: 196947 - DNA, 20 bp, Artificial Sequence
  Description of Artificial Sequence: Synthetic oligonucleotide
  Target: LAMA2; (-) strand; PAM type: YTN; PAM sequence: TTT
attttttttgtttctgaacc

SEQ ID NO: 196948 - DNA, 20 bp, Artificial Sequence
  Description of Artificial Sequence: Synthetic oligonucleotide
  Target: LAMA2; (-) strand; PAM type: YTN; PAM sequence: TTC
cagaatgtcatttatttttt

SEQ ID NO: 196949 - DNA, 20 bp, Artificial Sequence
  Description of Artificial Sequence: Synthetic oligonucleotide
  Target: LAMA2; (-) strand; PAM type: YTN; PAM sequence: TTT
ccagaatgtcatttattttt

SEQ ID NO: 196950 - DNA, 20 bp, Artificial Sequence
  Description of Artificial Sequence: Synthetic oligonucleotide
  Target: LAMA2; (-) strand; PAM type: YTN; PAM sequence: TTT
tccagaatgtcatttatttt

SEQ ID NO: 196951 - DNA, 20 bp, Artificial Sequence
  Description of Artificial Sequence: Synthetic oligonucleotide
  Target: LAMA2; (-) strand; PAM type: YTN; PAM sequence: TTT
ttccagaatgtcatttattt

SEQ ID NO: 196952 - DNA, 20 bp, Artificial Sequence
  Description of Artificial Sequence: Synthetic oligonucleotide
  Target: LAMA2; (-) strand; PAM type: YTN; PAM sequence: TTT
tttccagaatgtcatttatt

SEQ ID NO: 196953 - DNA, 20 bp, Artificial Sequence
  Description of Artificial Sequence: Synthetic oligonucleotide
  Target: LAMA2; (-) strand; PAM type: YTN; PAM sequence: CTA
ttttttccagaatgtcattt

SEQ ID NO: 196954 - DNA, 20 bp, Artificial Sequence
  Description of Artificial Sequence: Synthetic oligonucleotide
  Target: LAMA2; (-) strand; PAM type: YTN; PAM sequence: CTG
agcacatctattttttccag

SEQ ID NO: 196955 - DNA, 20 bp, Artificial Sequence
  Description of Artificial Sequence: Synthetic oligonucleotide
  Target: LAMA2; (-) strand; PAM type: YTN; PAM sequence: TTC
tgagcacatctattttttcc

SEQ ID NO: 196956 - DNA, 20 bp, Artificial Sequence
  Description of Artificial Sequence: Synthetic oligonucleotide
  Target: LAMA2; (-) strand; PAM type: YTN; PAM sequence: TTA
gttctgagcacatctatttt

SEQ ID NO: 196957 - DNA, 20 bp, Artificial Sequence
  Description of Artificial Sequence: Synthetic oligonucleotide
  Target: LAMA2; (-) strand; PAM type: YTN; PAM sequence: TTT
agttctgagcacatctattt

SEQ ID NO: 196958 - DNA, 20 bp, Artificial Sequence
  Description of Artificial Sequence: Synthetic oligonucleotide
  Target: LAMA2; (-) strand; PAM type: YTN; PAM sequence: TTT
tagttctgagcacatctatt

SEQ ID NO: 196959 - DNA, 20 bp, Artificial Sequence
  Description of Artificial Sequence: Synthetic oligonucleotide
  Target: LAMA2; (-) strand; PAM type: YTN; PAM sequence: TTT
ttagttctgagcacatctat

SEQ ID NO: 196960 - DNA, 20 bp, Artificial Sequence
  Description of Artificial Sequence: Synthetic oligonucleotide
  Target: LAMA2; (-) strand; PAM type: YTN; PAM sequence: TTT
tttagttctgagcacatcta

SEQ ID NO: 196961 - DNA, 20 bp, Artificial Sequence
  Description of Artificial Sequence: Synthetic oligonucleotide
  Target: LAMA2; (-) strand; PAM type: YTN; PAM sequence: TTA
ttttttagttctgagcacat

SEQ ID NO: 196962 - DNA, 20 bp, Artificial Sequence
  Description of Artificial Sequence: Synthetic oligonucleotide
  Target: LAMA2; (-) strand; PAM type: YTN; PAM sequence: TTT
attttttagttctgagcaca

SEQ ID NO: 196963 - DNA, 20 bp, Artificial Sequence
  Description of Artificial Sequence: Synthetic oligonucleotide
  Target: LAMA2; (-) strand; PAM type: YTN; PAM sequence: TTT
tattttttagttctgagcac

SEQ ID NO: 196964 - DNA, 20 bp, Artificial Sequence
  Description of Artificial Sequence: Synthetic oligonucleotide
  Target: LAMA2; (-) strand; PAM type: YTN; PAM sequence: TTT
ttattttttagttctgagca

SEQ ID NO: 196965 - DNA, 20 bp, Artificial Sequence
  Description of Artificial Sequence: Synthetic oligonucleotide
  Target: LAMA2; (-) strand; PAM type: YTN; PAM sequence: TTA
tttttattttttagttctga

SEQ ID NO: 196966 - DNA, 20 bp, Artificial Sequence
  Description of Artificial Sequence: Synthetic oligonucleotide
  Target: LAMA2; (-) strand; PAM type: YTN; PAM sequence: CTC
cattatttttattttttagt

SEQ ID NO: 196967 - DNA, 20 bp, Artificial Sequence
  Description of Artificial Sequence: Synthetic oligonucleotide
  Target: LAMA2; (-) strand; PAM type: YTN; PAM sequence: TTA
ccatctccattatttttatt

SEQ ID NO: 196968 - DNA, 20 bp, Artificial Sequence
  Description of Artificial Sequence: Synthetic oligonucleotide
  Target: LAMA2; (-) strand; PAM type: YTN; PAM sequence: TTT
accatctccattatttttat

SEQ ID NO: 196969 - DNA, 20 bp, Artificial Sequence
  Description of Artificial Sequence: Synthetic oligonucleotide
  Target: LAMA2; (-) strand; PAM type: YTN; PAM sequence: TTA
tatatttaccatctccatta

SEQ ID NO: 196970 - DNA, 20 bp, Artificial Sequence
  Description of Artificial Sequence: Synthetic oligonucleotide
  Target: LAMA2; (-) strand; PAM type: YTN; PAM sequence: CTT
atatatttaccatctccatt

SEQ ID NO: 196971 - DNA, 20 bp, Artificial Sequence
  Description of Artificial Sequence: Synthetic oligonucleotide
  Target: LAMA2; (-) strand; PAM type: YTN; PAM sequence: CTC
acttatatatttaccatctc

SEQ ID NO: 196972 - DNA, 20 bp, Artificial Sequence
  Description of Artificial Sequence: Synthetic oligonucleotide
  Target: LAMA2; (-) strand; PAM type: YTN; PAM sequence: TTC
tcacttatatatttaccatc

SEQ ID NO: 196973 - DNA, 20 bp, Artificial Sequence
  Description of Artificial Sequence: Synthetic oligonucleotide
  Target: LAMA2; (-) strand; PAM type: YTN; PAM sequence: TTT
ctcacttatatatttaccat

SEQ ID NO: 196974 - DNA, 20 bp, Artificial Sequence
  Description of Artificial Sequence: Synthetic oligonucleotide
  Target: LAMA2; (-) strand; PAM type: YTN; PAM sequence: TTA
atgaaaatcatcatcatatt

SEQ ID NO: 196975 - DNA, 20 bp, Artificial Sequence
  Description of Artificial Sequence: Synthetic oligonucleotide
  Target: LAMA2; (-) strand; PAM type: YTN; PAM sequence: TTG
ttaatgaaaatcatcatcat

SEQ ID NO: 196976 - DNA, 20 bp, Artificial Sequence
  Description of Artificial Sequence: Synthetic oligonucleotide
  Target: LAMA2; (-) strand; PAM type: YTN; PAM sequence: CTT
gttaatgaaaatcatcatca

SEQ ID NO: 196977 - DNA, 20 bp, Artificial Sequence
  Description of Artificial Sequence: Synthetic oligonucleotide
  Target: LAMA2; (-) strand; PAM type: YTN; PAM sequence: TTA
atggtgtatcttgttaatga

SEQ ID NO: 196978 - DNA, 20 bp, Artificial Sequence
  Description of Artificial Sequence: Synthetic oligonucleotide
  Target: LAMA2; (-) strand; PAM type: YTN; PAM sequence: TTT
aatggtgtatcttgttaatg

SEQ ID NO: 196979 - DNA, 20 bp, Artificial Sequence
  Description of Artificial Sequence: Synthetic oligonucleotide
  Target: LAMA2; (-) strand; PAM type: YTN; PAM sequence: TTG
gatcacgtgagaatatattt

SEQ ID NO: 196980 - DNA, 20 bp, Artificial Sequence
  Description of Artificial Sequence: Synthetic oligonucleotide
  Target: LAMA2; (-) strand; PAM type: YTN; PAM sequence: TTT
ggatcacgtgagaatatatt

SEQ ID NO: 196981 - DNA, 20 bp, Artificial Sequence
  Description of Artificial Sequence: Synthetic oligonucleotide
  Target: LAMA2; (-) strand; PAM type: YTN; PAM sequence: CTT
tggatcacgtgagaatatat

SEQ ID NO: 196982 - DNA, 20 bp, Artificial Sequence
  Description of Artificial Sequence: Synthetic oligonucleotide
  Target: LAMA2; (-) strand; PAM type: YTN; PAM sequence: TTA
ctttggatcacgtgagaata

SEQ ID NO: 196983 - DNA, 20 bp, Artificial Sequence
  Description of Artificial Sequence: Synthetic oligonucleotide
  Target: LAMA2; (-) strand; PAM type: YTN; PAM sequence: CTG
ggcacagagaacgaaattac

SEQ ID NO: 196984 - DNA, 20 bp, Artificial Sequence
  Description of Artificial Sequence: Synthetic oligonucleotide
  Target: LAMA2; (-) strand; PAM type: YTN; PAM sequence: CTC
gctgggcacagagaacgaaa

SEQ ID NO: 196985 - DNA, 20 bp, Artificial Sequence
  Description of Artificial Sequence: Synthetic oligonucleotide
  Target: LAMA2; (-) strand; PAM type: YTN; PAM sequence: TTG
aaaaaccaccatcagtagat

SEQ ID NO: 196986 - DNA, 20 bp, Artificial Sequence
  Description of Artificial Sequence: Synthetic oligonucleotide
  Target: LAMA2; (-) strand; PAM type: YTN; PAM sequence: TTT
gaaaaaccaccatcagtaga

SEQ ID NO: 196987 - DNA, 20 bp, Artificial Sequence
  Description of Artificial Sequence: Synthetic oligonucleotide
  Target: LAMA2; (-) strand; PAM type: YTN; PAM sequence: CTG
cacggtgcatttgaaaaacc

SEQ ID NO: 196988 - DNA, 20 bp, Artificial Sequence
  Description of Artificial Sequence: Synthetic oligonucleotide
  Target: LAMA2; (-) strand; PAM type: YTN; PAM sequence: CTA
actgcacggtgcatttgaaa

SEQ ID NO: 196989 - DNA, 20 bp, Artificial Sequence
  Description of Artificial Sequence: Synthetic oligonucleotide
  Target: LAMA2; (-) strand; PAM type: YTN; PAM sequence: CTC
agtgatgacgtctaactgca

SEQ ID NO: 196990 - DNA, 20 bp, Artificial Sequence
  Description of Artificial Sequence: Synthetic oligonucleotide
  Target: LAMA2; (-) strand; PAM type: YTN; PAM sequence: TTG
aggtctcagtgatgacgtct

SEQ ID NO: 196991 - DNA, 20 bp, Artificial Sequence
  Description of Artificial Sequence: Synthetic oligonucleotide
  Target: LAMA2; (-) strand; PAM type: YTN; PAM sequence: TTA
ttgaggtctcagtgatgacg

SEQ ID NO: 196992 - DNA, 20 bp, Artificial Sequence
  Description of Artificial Sequence: Synthetic oligonucleotide
  Target: LAMA2; (-) strand; PAM type: YTN; PAM sequence: CTA
ttattgaggtctcagtgatg

SEQ ID NO: 196993 - DNA, 20 bp, Artificial Sequence
  Description of Artificial Sequence: Synthetic oligonucleotide
  Target: LAMA2; (-) strand; PAM type: YTN; PAM sequence: CTC
agtgatggaggtctattatt

SEQ ID NO: 196994 - DNA, 20 bp, Artificial Sequence
  Description of Artificial Sequence: Synthetic oligonucleotide
  Target: LAMA2; (-) strand; PAM type: YTN; PAM sequence: TTC
tcagtgatggaggtctatta

SEQ ID NO: 196995 - DNA, 20 bp, Artificial Sequence
  Description of Artificial Sequence: Synthetic oligonucleotide
  Target: LAMA2; (-) strand; PAM type: YTN; PAM sequence: CTT
ctcagtgatggaggtctatt

SEQ ID NO: 196996 - DNA, 20 bp, Artificial Sequence
  Description of Artificial Sequence: Synthetic oligonucleotide
  Target: LAMA2; (-) strand; PAM type: YTN; PAM sequence: CTG
aacttctcagtgatggaggt

SEQ ID NO: 196997 - DNA, 20 bp, Artificial Sequence
  Description of Artificial Sequence: Synthetic oligonucleotide
  Target: LAMA2; (-) strand; PAM type: YTN; PAM sequence: CTC
tgaacttctcagtgatggag

SEQ ID NO: 196998 - DNA, 20 bp, Artificial Sequence
  Description of Artificial Sequence: Synthetic oligonucleotide
  Target: LAMA2; (-) strand; PAM type: YTN; PAM sequence: CTA
cctctgaacttctcagtgat

SEQ ID NO: 196999 - DNA, 20 bp, Artificial Sequence
  Description of Artificial Sequence: Synthetic oligonucleotide
  Target: LAMA2; (-) strand; PAM type: YTN; PAM sequence: TTC
tacctctgaacttctcagtg

SEQ ID NO: 197000 - DNA, 20 bp, Artificial Sequence
  Description of Artificial Sequence: Synthetic oligonucleotide
  Target: LAMA2; (-) strand; PAM type: YTN; PAM sequence: CTT
ctacctctgaacttctcagt

SEQ ID NO: 197001 - DNA, 20 bp, Artificial Sequence
  Description of Artificial Sequence: Synthetic oligonucleotide
  Target: LAMA2; (-) strand; PAM type: YTN; PAM sequence: CTG
catcttctacctctgaactt

SEQ ID NO: 197002 - DNA, 20 bp, Artificial Sequence
  Description of Artificial Sequence: Synthetic oligonucleotide
  Target: LAMA2; (-) strand; PAM type: YTN; PAM sequence: TTG
tccccctgcatcttctacct

SEQ ID NO: 197003 - DNA, 20 bp, Artificial Sequence
  Description of Artificial Sequence: Synthetic oligonucleotide
  Target: LAMA2; (-) strand; PAM type: YTN; PAM sequence: TTA
atgcaggccaacattgtccc

SEQ ID NO: 197004 - DNA, 20 bp, Artificial Sequence
  Description of Artificial Sequence: Synthetic oligonucleotide
  Target: LAMA2; (-) strand; PAM type: YTN; PAM sequence: CTA
agattaatgcaggccaacat

SEQ ID NO: 197005 - DNA, 20 bp, Artificial Sequence
  Description of Artificial Sequence: Synthetic oligonucleotide
  Target: LAMA2; (-) strand; PAM type: YTN; PAM sequence: TTC
aagctaagattaatgcaggc

SEQ ID NO: 197006 - DNA, 20 bp, Artificial Sequence
  Description of Artificial Sequence: Synthetic oligonucleotide
  Target: LAMA2; (-) strand; PAM type: YTN; PAM sequence: TTT
caagctaagattaatgcagg

SEQ ID NO: 197007 - DNA, 20 bp, Artificial Sequence
  Description of Artificial Sequence: Synthetic oligonucleotide
  Target: LAMA2; (-) strand; PAM type: YTN; PAM sequence: TTT
tcaagctaagattaatgcag

SEQ ID NO: 197008 - DNA, 20 bp, Artificial Sequence
  Description of Artificial Sequence: Synthetic oligonucleotide
  Target: LAMA2; (-) strand; PAM type: YTN; PAM sequence: CTT
ttcaagctaagattaatgca

SEQ ID NO: 197009 - DNA, 20 bp, Artificial Sequence
  Description of Artificial Sequence: Synthetic oligonucleotide
  Target: LAMA2; (-) strand; PAM type: YTN; PAM sequence: CTC
ttttcaagctaagattaatg

SEQ ID NO: 197010 - DNA, 20 bp, Artificial Sequence
  Description of Artificial Sequence: Synthetic oligonucleotide
  Target: LAMA2; (-) strand; PAM type: YTN; PAM sequence: CTA
aagatcctcttttcaagcta

SEQ ID NO: 197011 - DNA, 20 bp, Artificial Sequence
  Description of Artificial Sequence: Synthetic oligonucleotide
  Target: LAMA2; (-) strand; PAM type: YTN; PAM sequence: TTA
tctaaagatcctcttttcaa

SEQ ID NO: 197012 - DNA, 20 bp, Artificial Sequence
  Description of Artificial Sequence: Synthetic oligonucleotide
  Target: LAMA2; (-) strand; PAM type: YTN; PAM sequence: TTA
gatagtgttatctaaagatc

SEQ ID NO: 197013 - DNA, 20 bp, Artificial Sequence
  Description of Artificial Sequence: Synthetic oligonucleotide
  Target: LAMA2; (-) strand; PAM type: YTN; PAM sequence: TTT
agatagtgttatctaaagat

SEQ ID NO: 197014 - DNA, 20 bp, Artificial Sequence
  Description of Artificial Sequence: Synthetic oligonucleotide
  Target: LAMA2; (-) strand; PAM type: YTN; PAM sequence: CTA
aatttagatagtgttatcta

SEQ ID NO: 197015 - DNA, 20 bp, Artificial Sequence
  Description of Artificial Sequence: Synthetic oligonucleotide
  Target: LAMA2; (-) strand; PAM type: YTN; PAM sequence: TTG
aacacagctaaatttagata

SEQ ID NO: 197016 - DNA, 20 bp, Artificial Sequence
  Description of Artificial Sequence: Synthetic oligonucleotide
  Target: LAMA2; (-) strand; PAM type: YTN; PAM sequence: TTT
gaacacagctaaatttagat

SEQ ID NO: 197017 - DNA, 20 bp, Artificial Sequence
  Description of Artificial Sequence: Synthetic oligonucleotide
  Target: LAMA2; (-) strand; PAM type: YTN; PAM sequence: TTT
tgaacacagctaaatttaga

SEQ ID NO: 197018 - DNA, 20 bp, Artificial Sequence
  Description of Artificial Sequence: Synthetic oligonucleotide
  Target: LAMA2; (-) strand; PAM type: YTN; PAM sequence: CTG
tggtggagcattttgaacac

SEQ ID NO: 197019 - DNA, 20 bp, Artificial Sequence
  Description of Artificial Sequence: Synthetic oligonucleotide
  Target: LAMA2; (-) strand; PAM type: YTN; PAM sequence: TTC
tgtggtggagcattttgaac

SEQ ID NO: 197020 - DNA, 20 bp, Artificial Sequence
  Description of Artificial Sequence: Synthetic oligonucleotide
  Target: LAMA2; (-) strand; PAM type: YTN; PAM sequence: CTT
ctgtggtggagcattttgaa

SEQ ID NO: 197021 - DNA, 20 bp, Artificial Sequence
  Description of Artificial Sequence: Synthetic oligonucleotide
  Target: LAMA2; (-) strand; PAM type: YTN; PAM sequence: CTC
ttctgtggtggagcattttg

SEQ ID NO: 197022 - DNA, 20 bp, Artificial Sequence
  Description of Artificial Sequence: Synthetic oligonucleotide
  Target: LAMA2; (-) strand; PAM type: YTN; PAM sequence: CTG
ctcttctgtggtggagcatt

SEQ ID NO: 197023 - DNA, 20 bp, Artificial Sequence
  Description of Artificial Sequence: Synthetic oligonucleotide
  Target: LAMA2; (-) strand; PAM type: YTN; PAM sequence: TTG
ctgctcttctgtggtggagc

SEQ ID NO: 197024 - DNA, 20 bp, Artificial Sequence
  Description of Artificial Sequence: Synthetic oligonucleotide
  Target: LAMA2; (-) strand; PAM type: YTN; PAM sequence: TTT
gctgctcttctgtggtggag

SEQ ID NO: 197025 - DNA, 20 bp, Artificial Sequence
  Description of Artificial Sequence: Synthetic oligonucleotide
  Target: LAMA2; (-) strand; PAM type: YTN; PAM sequence: TTT
tgctgctcttctgtggtgga

SEQ ID NO: 197026 - DNA, 20 bp, Artificial Sequence
  Description of Artificial Sequence: Synthetic oligonucleotide
  Target: LAMA2; (-) strand; PAM type: YTN; PAM sequence: TTT
ttgctgctcttctgtggtgg

SEQ ID NO: 197027 - DNA, 20 bp, Artificial Sequence
  Description of Artificial Sequence: Synthetic oligonucleotide
  Target: LAMA2; (-) strand; PAM type: YTN; PAM sequence: CTT
tttgctgctcttctgtggtg

SEQ ID NO: 197028 - DNA, 20 bp, Artificial Sequence
  Description of Artificial Sequence: Synthetic oligonucleotide
  Target: LAMA2; (-) strand; PAM type: YTN; PAM sequence: TTG
ctttttgctgctcttctgtg

SEQ ID NO: 197029 - DNA, 20 bp, Artificial Sequence
  Description of Artificial Sequence: Synthetic oligonucleotide
  Target: LAMA2; (-) strand; PAM type: YTN; PAM sequence: TTA
atgagattgctttttgctgc

SEQ ID NO: 197030 - DNA, 20 bp, Artificial Sequence
  Description of Artificial Sequence: Synthetic oligonucleotide
  Target: LAMA2; (-) strand; PAM type: YTN; PAM sequence: TTT
aatgagattgctttttgctg

SEQ ID NO: 197031 - DNA, 20 bp, Artificial Sequence
  Description of Artificial Sequence: Synthetic oligonucleotide
  Target: LAMA2; (-) strand; PAM type: YTN; PAM sequence: TTT
taatgagattgctttttgct

SEQ ID NO: 197032 - DNA, 20 bp, Artificial Sequence
  Description of Artificial Sequence: Synthetic oligonucleotide
  Target: LAMA2; (-) strand; PAM type: YTN; PAM sequence: TTG
ttttaatgagattgcttttt

SEQ ID NO: 197033 - DNA, 20 bp, Artificial Sequence
  Description of Artificial Sequence: Synthetic oligonucleotide
  Target: LAMA2; (-) strand; PAM type: YTN; PAM sequence: CTT
gttttaatgagattgctttt

SEQ ID NO: 197034 - DNA, 20 bp, Artificial Sequence
  Description of Artificial Sequence: Synthetic oligonucleotide
  Target: LAMA2; (-) strand; PAM type: YTN; PAM sequence: CTG
agcttgttttaatgagattg

SEQ ID NO: 197035 - DNA, 20 bp, Artificial Sequence
  Description of Artificial Sequence: Synthetic oligonucleotide
  Target: LAMA2; (-) strand; PAM type: YTN; PAM sequence: TTC
tgagcttgttttaatgagat

SEQ ID NO: 197036 - DNA, 20 bp, Artificial Sequence
  Description of Artificial Sequence: Synthetic oligonucleotide
  Target: LAMA2; (-) strand; PAM type: YTN; PAM sequence: TTT
ctgagcttgttttaatgaga

SEQ ID NO: 197037 - DNA, 20 bp, Artificial Sequence
  Description of Artificial Sequence: Synthetic oligonucleotide
  Target: LAMA2; (-) strand; PAM type: YTN; PAM sequence: TTT
tctgagcttgttttaatgag

SEQ ID NO: 197038 - DNA, 20 bp, Artificial Sequence
  Description of Artificial Sequence: Synthetic oligonucleotide
  Target: LAMA2; (-) strand; PAM type: YTN; PAM sequence: TTG
ttttctgagcttgttttaat

SEQ ID NO: 197039 - DNA, 20 bp, Artificial Sequence
  Description of Artificial Sequence: Synthetic oligonucleotide
  Target: LAMA2; (-) strand; PAM type: YTN; PAM sequence: TTG
gaattgttttctgagcttgt

SEQ ID NO: 197040 - DNA, 20 bp, Artificial Sequence
  Description of Artificial Sequence: Synthetic oligonucleotide
  Target: LAMA2; (-) strand; PAM type: YTN; PAM sequence: CTT
ggaattgttttctgagcttg

SEQ ID NO: 197041 - DNA, 20 bp, Artificial Sequence
  Description of Artificial Sequence: Synthetic oligonucleotide
  Target: LAMA2; (-) strand; PAM type: YTN; PAM sequence: CTC
atatatcttggaattgtttt

SEQ ID NO: 197042 - DNA, 20 bp, Artificial Sequence
  Description of Artificial Sequence: Synthetic oligonucleotide
  Target: LAMA2; (-) strand; PAM type: YTN; PAM sequence: TTA
ctcatatatcttggaattgt

SEQ ID NO: 197043 - DNA, 20 bp, Artificial Sequence
  Description of Artificial Sequence: Synthetic oligonucleotide
  Target: LAMA2; (-) strand; PAM type: YTN; PAM sequence: TTT
actcatatatcttggaattg

SEQ ID NO: 197044 - DNA, 20 bp, Artificial Sequence
  Description of Artificial Sequence: Synthetic oligonucleotide
  Target: LAMA2; (-) strand; PAM type: YTN; PAM sequence: TTT
tactcatatatcttggaatt

SEQ ID NO: 197045 - DNA, 20 bp, Artificial Sequence
  Description of Artificial Sequence: Synthetic oligonucleotide
  Target: LAMA2; (-) strand; PAM type: YTN; PAM sequence: CTT
ttactcatatatcttggaat

SEQ ID NO: 197046 - DNA, 20 bp, Artificial Sequence
  Description of Artificial Sequence: Synthetic oligonucleotide
  Target: LAMA2; (-) strand; PAM type: YTN; PAM sequence: TTG
cttttactcatatatcttgg

SEQ ID NO: 197047 - DNA, 20 bp, Artificial Sequence
  Description of Artificial Sequence: Synthetic oligonucleotide
  Target: LAMA2; (-) strand; PAM type: YTN; PAM sequence: TTT
gcttttactcatatatcttg

SEQ ID NO: 197048 - DNA, 20 bp, Artificial Sequence
  Description of Artificial Sequence: Synthetic oligonucleotide
  Target: LAMA2; (-) strand; PAM type: YTN; PAM sequence: TTA
gtttgcttttactcatatat

SEQ ID NO: 197049 - DNA, 20 bp, Artificial Sequence
  Description of Artificial Sequence: Synthetic oligonucleotide
  Target: LAMA2; (-) strand; PAM type: YTN; PAM sequence: TTT
agtttgcttttactcatata

SEQ ID NO: 197050 - DNA, 20 bp, Artificial Sequence
  Description of Artificial Sequence: Synthetic oligonucleotide
  Target: LAMA2; (-) strand; PAM type: YTN; PAM sequence: TTG
tttagtttgcttttactcat

SEQ ID NO: 197051 - DNA, 20 bp, Artificial Sequence
  Description of Artificial Sequence: Synthetic oligonucleotide
  Target: LAMA2; (-) strand; PAM type: YTN; PAM sequence: TTC
cgttgtttagtttgctttta

SEQ ID NO: 197052 - DNA, 20 bp, Artificial Sequence
  Description of Artificial Sequence: Synthetic oligonucleotide
  Target: LAMA2; (-) strand; PAM type: YTN; PAM sequence: CTT
ccgttgtttagtttgctttt

SEQ ID NO: 197053 - DNA, 20 bp, Artificial Sequence
  Description of Artificial Sequence: Synthetic oligonucleotide
  Target: LAMA2; (-) strand; PAM type: YTN; PAM sequence: TTG
tgcttccgttgtttagtttg

SEQ ID NO: 197054 - DNA, 20 bp, Artificial Sequence
  Description of Artificial Sequence: Synthetic oligonucleotide
  Target: LAMA2; (-) strand; PAM type: YTN; PAM sequence: TTT
gtgcttccgttgtttagttt

SEQ ID NO: 197055 - DNA, 20 bp, Artificial Sequence
  Description of Artificial Sequence: Synthetic oligonucleotide
  Target: LAMA2; (-) strand; PAM type: YTN; PAM sequence: CTA
tttgtgcttccgttgtttag

SEQ ID NO: 197056 - DNA, 20 bp, Artificial Sequence
  Description of Artificial Sequence: Synthetic oligonucleotide
  Target: LAMA2; (-) strand; PAM type: YTN; PAM sequence: CTG
tgcaagtagaagtcaagaga

SEQ ID NO: 197057 - DNA, 20 bp, Artificial Sequence
  Description of Artificial Sequence: Synthetic oligonucleotide
  Target: LAMA2; (-) strand; PAM type: YTN; PAM sequence: TTG
aataagtagagctgtgcaag

SEQ ID NO: 197058 - DNA, 20 bp, Artificial Sequence
  Description of Artificial Sequence: Synthetic oligonucleotide
  Target: LAMA2; (-) strand; PAM type: YTN; PAM sequence: CTT
gaataagtagagctgtgcaa

SEQ ID NO: 197059 - DNA, 20 bp, Artificial Sequence
  Description of Artificial Sequence: Synthetic oligonucleotide
  Target: LAMA2; (-) strand; PAM type: YTN; PAM sequence: TTA
atgtccgaaacagagcttga

SEQ ID NO: 197060 - DNA, 20 bp, Artificial Sequence
  Description of Artificial Sequence: Synthetic oligonucleotide
  Target: LAMA2; (-) strand; PAM type: YTN; PAM sequence: CTT
aatgtccgaaacagagcttg

SEQ ID NO: 197061 - DNA, 20 bp, Artificial Sequence
  Description of Artificial Sequence: Synthetic oligonucleotide
  Target: LAMA2; (-) strand; PAM type: YTN; PAM sequence: CTA
tgaaaaaagcttaatgtccg

SEQ ID NO: 197062 - DNA, 20 bp, Artificial Sequence
  Description of Artificial Sequence: Synthetic oligonucleotide
  Target: LAMA2; (-) strand; PAM type: YTN; PAM sequence: TTA
tggctatgaaaaaagcttaa

SEQ ID NO: 197063 - DNA, 20 bp, Artificial Sequence
  Description of Artificial Sequence: Synthetic oligonucleotide
  Target: LAMA2; (-) strand; PAM type: YTN; PAM sequence: CTC
aataaaagataaaaggggaa

SEQ ID NO: 197064 - DNA, 20 bp, Artificial Sequence
  Description of Artificial Sequence: Synthetic oligonucleotide
  Target: LAMA2; (-) strand; PAM type: YTN; PAM sequence: CTA
aaagaactcaataaaagata

SEQ ID NO: 197065 - DNA, 20 bp, Artificial Sequence
  Description of Artificial Sequence: Synthetic oligonucleotide
  Target: LAMA2; (-) strand; PAM type: YTN; PAM sequence: CTC
ctaaaagaactcaataaaag

SEQ ID NO: 197066 - DNA, 20 bp, Artificial Sequence
  Description of Artificial Sequence: Synthetic oligonucleotide
  Target: LAMA2; (-) strand; PAM type: YTN; PAM sequence: TTC
tcctaaaagaactcaataaa

SEQ ID NO: 197067 - DNA, 20 bp, Artificial Sequence
  Description of Artificial Sequence: Synthetic oligonucleotide
  Target: LAMA2; (-) strand; PAM type: YTN; PAM sequence: TTT
ctcctaaaagaactcaataa

SEQ ID NO: 197068 - DNA, 20 bp, Artificial Sequence
  Description of Artificial Sequence: Synthetic oligonucleotide
  Target: LAMA2; (-) strand; PAM type: YTN; PAM sequence: TTC
aagtttctcctaaaagaact

SEQ ID NO: 197069 - DNA, 20 bp, Artificial Sequence
  Description of Artificial Sequence: Synthetic oligonucleotide
  Target: LAMA2; (-) strand; PAM type: YTN; PAM sequence: TTT
caagtttctcctaaaagaac

SEQ ID NO: 197070 - DNA, 20 bp, Artificial Sequence
  Description of Artificial Sequence: Synthetic oligonucleotide
  Target: LAMA2; (-) strand; PAM type: YTN; PAM sequence: TTT
tcaagtttctcctaaaagaa

SEQ ID NO: 197071 - DNA, 20 bp, Artificial Sequence
  Description of Artificial Sequence: Synthetic oligonucleotide
  Target: LAMA2; (-) strand; PAM type: YTN; PAM sequence: TTT
ttcaagtttctcctaaaaga

SEQ ID NO: 197072 - DNA, 20 bp, Artificial Sequence
  Description of Artificial Sequence: Synthetic oligonucleotide
  Target: LAMA2; (-) strand; PAM type: YTN; PAM sequence: TTT
tttcaagtttctcctaaaag

SEQ ID NO: 197073 - DNA, 20 bp, Artificial Sequence
  Description of Artificial Sequence: Synthetic oligonucleotide
  Target: LAMA2; (-) strand; PAM type: YTN; PAM sequence: TTT
ttttcaagtttctcctaaaa

SEQ ID NO: 197074 - DNA, 20 bp, Artificial Sequence
  Description of Artificial Sequence: Synthetic oligonucleotide
  Target: LAMA2; (-) strand; PAM type: YTN; PAM sequence: TTT
tttttcaagtttctcctaaa

SEQ ID NO: 197075 - DNA, 20 bp, Artificial Sequence
  Description of Artificial Sequence: Synthetic oligonucleotide
  Target: LAMA2; (-) strand; PAM type: YTN; PAM sequence: TTT
ttttttcaagtttctcctaa

SEQ ID NO: 197076 - DNA, 20 bp, Artificial Sequence
  Description of Artificial Sequence: Synthetic oligonucleotide
  Target: LAMA2; (-) strand; PAM type: YTN; PAM sequence: TTA
tagagatttttttttcaagt

SEQ ID NO: 197077 - DNA, 20 bp, Artificial Sequence
  Description of Artificial Sequence: Synthetic oligonucleotide
  Target: LAMA2; (-) strand; PAM type: YTN; PAM sequence: TTT
atagagatttttttttcaag

SEQ ID NO: 197078 - DNA, 20 bp, Artificial Sequence
  Description of Artificial Sequence: Synthetic oligonucleotide
  Target: LAMA2; (-) strand; PAM type: YTN; PAM sequence: CTC
catttatagagatttttttt

SEQ ID NO: 197079 - DNA, 20 bp, Artificial Sequence
  Description of Artificial Sequence: Synthetic oligonucleotide
  Target: LAMA2; (-) strand; PAM type: YTN; PAM sequence: TTG
agtaaaaaacctccatttat

SEQ ID NO: 197080 - DNA, 20 bp, Artificial Sequence
  Description of Artificial Sequence: Synthetic oligonucleotide
  Target: LAMA2; (-) strand; PAM type: YTN; PAM sequence: CTT
gagtaaaaaacctccattta

SEQ ID NO: 197081 - DNA, 20 bp, Artificial Sequence
  Description of Artificial Sequence: Synthetic oligonucleotide
  Target: LAMA2; (-) strand; PAM type: YTN; PAM sequence: CTC
ttgagtaaaaaacctccatt

SEQ ID NO: 197082 - DNA, 20 bp, Artificial Sequence
  Description of Artificial Sequence: Synthetic oligonucleotide
  Target: LAMA2; (-) strand; PAM type: YTN; PAM sequence: TTA
aaagctcttgagtaaaaaac

SEQ ID NO: 197083 - DNA, 20 bp, Artificial Sequence
  Description of Artificial Sequence: Synthetic oligonucleotide
  Target: LAMA2; (-) strand; PAM type: YTN; PAM sequence: TTT
aaaagctcttgagtaaaaaa

SEQ ID NO: 197084 - DNA, 20 bp, Artificial Sequence
  Description of Artificial Sequence: Synthetic oligonucleotide
  Target: LAMA2; (-) strand; PAM type: YTN; PAM sequence: TTT
taaaagctcttgagtaaaaa

SEQ ID NO: 197085 - DNA, 20 bp, Artificial Sequence
  Description of Artificial Sequence: Synthetic oligonucleotide
  Target: LAMA2; (-) strand; PAM type: YTN; PAM sequence: TTA
ttttaaaagctcttgagtaa

SEQ ID NO: 197086 - DNA, 20 bp, Artificial Sequence
  Description of Artificial Sequence: Synthetic oligonucleotide
  Target: LAMA2; (-) strand; PAM type: YTN; PAM sequence: CTG
ttattttaaaagctcttgag

SEQ ID NO: 197087 - DNA, 20 bp, Artificial Sequence
  Description of Artificial Sequence: Synthetic oligonucleotide
  Target: LAMA2; (-) strand; PAM type: YTN; PAM sequence: CTG
gtgatgtactgttattttaa

SEQ ID NO: 197088 - DNA, 20 bp, Artificial Sequence
  Description of Artificial Sequence: Synthetic oligonucleotide
  Target: LAMA2; (-) strand; PAM type: YTN; PAM sequence: TTA
aaaatgatctggtgatgtac

SEQ ID NO: 197089 - DNA, 20 bp, Artificial Sequence
  Description of Artificial Sequence: Synthetic oligonucleotide
  Target: LAMA2; (-) strand; PAM type: YTN; PAM sequence: TTT
aaaaatgatctggtgatgta

SEQ ID NO: 197090 - DNA, 20 bp, Artificial Sequence
  Description of Artificial Sequence: Synthetic oligonucleotide
  Target: LAMA2; (-) strand; PAM type: YTN; PAM sequence: TTT
taaaaatgatctggtgatgt

SEQ ID NO: 197091 - DNA, 20 bp, Artificial Sequence
  Description of Artificial Sequence: Synthetic oligonucleotide
  Target: LAMA2; (-) strand; PAM type: YTN; PAM sequence: TTT
ttaaaaatgatctggtgatg

SEQ ID NO: 197092 - DNA, 20 bp, Artificial Sequence
  Description of Artificial Sequence: Synthetic oligonucleotide
  Target: LAMA2; (-) strand; PAM type: YTN; PAM sequence: CTT
tttaaaaatgatctggtgat

SEQ ID NO: 197093 - DNA, 20 bp, Artificial Sequence
  Description of Artificial Sequence: Synthetic oligonucleotide
  Target: LAMA2; (-) strand; PAM type: YTN; PAM sequence: CTA
caatagaacactttttaaaa

SEQ ID NO: 197094 - DNA, 20 bp, Artificial Sequence
  Description of Artificial Sequence: Synthetic oligonucleotide
  Target: LAMA2; (-) strand; PAM type: YTN; PAM sequence: TTA
actacaatagaacacttttt

SEQ ID NO: 197095 - DNA, 20 bp, Artificial Sequence
  Description of Artificial Sequence: Synthetic oligonucleotide
  Target: LAMA2; (-) strand; PAM type: YTN; PAM sequence: CTT
aactacaatagaacactttt

SEQ ID NO: 197096 - DNA, 20 bp, Artificial Sequence
  Description of Artificial Sequence: Synthetic oligonucleotide
  Target: LAMA2; (-) strand; PAM type: YTN; PAM sequence: TTC
acttaactacaatagaacac

SEQ ID NO: 197097 - DNA, 20 bp, Artificial Sequence
  Description of Artificial Sequence: Synthetic oligonucleotide
  Target: LAMA2; (-) strand; PAM type: YTN; PAM sequence: TTC
aataaatattcacttaacta

SEQ ID NO: 197098 - DNA, 20 bp, Artificial Sequence
  Description of Artificial Sequence: Synthetic oligonucleotide
  Target: LAMA2; (-) strand; PAM type: YTN; PAM sequence: TTT
caataaatattcacttaact

SEQ ID NO: 197099 - DNA, 20 bp, Artificial Sequence
  Description of Artificial Sequence: Synthetic oligonucleotide
  Target: LAMA2; (-) strand; PAM type: YTN; PAM sequence: TTC
aatgggaagacgagaaaaat

SEQ ID NO: 197100 - DNA, 20 bp, Artificial Sequence
  Description of Artificial Sequence: Synthetic oligonucleotide
  Target: LAMA2; (-) strand; PAM type: YTN; PAM sequence: CTT
caatgggaagacgagaaaaa

SEQ ID NO: 197101 - DNA, 20 bp, Artificial Sequence
  Description of Artificial Sequence: Synthetic oligonucleotide
  Target: LAMA2; (-) strand; PAM type: YTN; PAM sequence: CTG
tagtcttcaatgggaagacg

SEQ ID NO: 197102 - DNA, 20 bp, Artificial Sequence
  Description of Artificial Sequence: Synthetic oligonucleotide
  Target: LAMA2; (-) strand; PAM type: YTN; PAM sequence: TTC
tgtagtcttcaatgggaaga

SEQ ID NO: 197103 - DNA, 20 bp, Artificial Sequence
  Description of Artificial Sequence: Synthetic oligonucleotide
  Target: LAMA2; (-) strand; PAM type: YTN; PAM sequence: TTT
ctgtagtcttcaatgggaag

SEQ ID NO: 197104 - DNA, 20 bp, Artificial Sequence
  Description of Artificial Sequence: Synthetic oligonucleotide
  Target: LAMA2; (-) strand; PAM type: YTN; PAM sequence: CTG
gaagaaagagatttctgtag

SEQ ID NO: 197105 - DNA, 20 bp, Artificial Sequence
  Description of Artificial Sequence: Synthetic oligonucleotide
  Target: LAMA2; (-) strand; PAM type: YTN; PAM sequence: CTC
aactggaagaaagagatttc

SEQ ID NO: 197106 - DNA, 20 bp, Artificial Sequence
  Description of Artificial Sequence: Synthetic oligonucleotide
  Target: LAMA2; (-) strand; PAM type: YTN; PAM sequence: TTG
agctcaactggaagaaagag

SEQ ID NO: 197107 - DNA, 20 bp, Artificial Sequence
  Description of Artificial Sequence: Synthetic oligonucleotide
  Target: LAMA2; (-) strand; PAM type: YTN; PAM sequence: TTT
gagctcaactggaagaaaga

SEQ ID NO: 197108 - DNA, 20 bp, Artificial Sequence
  Description of Artificial Sequence: Synthetic oligonucleotide
  Target: LAMA2; (-) strand; PAM type: YTN; PAM sequence: TTT
tgagctcaactggaagaaag

SEQ ID NO: 197109 - DNA, 20 bp, Artificial Sequence
  Description of Artificial Sequence: Synthetic oligonucleotide
  Target: LAMA2; (-) strand; PAM type: YTN; PAM sequence: CTT
ttgagctcaactggaagaaa

SEQ ID NO: 197110 - DNA, 20 bp, Artificial Sequence
  Description of Artificial Sequence: Synthetic oligonucleotide
  Target: LAMA2; (-) strand; PAM type: YTN; PAM sequence: TTC
cttttgagctcaactggaag

SEQ ID NO: 197111 - DNA, 20 bp, Artificial Sequence
  Description of Artificial Sequence: Synthetic oligonucleotide
  Target: LAMA2; (-) strand; PAM type: YTN; PAM sequence: TTT
ccttttgagctcaactggaa

SEQ ID NO: 197112 - DNA, 20 bp, Artificial Sequence
  Description of Artificial Sequence: Synthetic oligonucleotide
  Target: LAMA2; (-) strand; PAM type: YTN; PAM sequence: TTT
tccttttgagctcaactgga

SEQ ID NO: 197113 - DNA, 20 bp, Artificial Sequence
  Description of Artificial Sequence: Synthetic oligonucleotide
  Target: LAMA2; (-) strand; PAM type: YTN; PAM sequence: CTT
ttccttttgagctcaactgg

SEQ ID NO: 197114 - DNA, 20 bp, Artificial Sequence
  Description of Artificial Sequence: Synthetic oligonucleotide
  Target: LAMA2; (-) strand; PAM type: YTN; PAM sequence: TTG
cttttccttttgagctcaac

SEQ ID NO: 197115 - DNA, 20 bp, Artificial Sequence
  Description of Artificial Sequence: Synthetic oligonucleotide
  Target: LAMA2; (-) strand; PAM type: YTN; PAM sequence: TTT
gcttttccttttgagctcaa

SEQ ID NO: 197116 - DNA, 20 bp, Artificial Sequence
  Description of Artificial Sequence: Synthetic oligonucleotide
  Target: LAMA2; (-) strand; PAM type: YTN; PAM sequence: TTT
tgcttttccttttgagctca

SEQ ID NO: 197117 - DNA, 20 bp, Artificial Sequence
  Description of Artificial Sequence: Synthetic oligonucleotide
  Target: LAMA2; (-) strand; PAM type: YTN; PAM sequence: TTT
ttgcttttccttttgagctc

SEQ ID NO: 197118 - DNA, 20 bp, Artificial Sequence
  Description of Artificial Sequence: Synthetic oligonucleotide
  Target: LAMA2; (-) strand; PAM type: YTN; PAM sequence: TTT
tttgcttttccttttgagct

SEQ ID NO: 197119 - DNA, 20 bp, Artificial Sequence
  Description of Artificial Sequence: Synthetic oligonucleotide
  Target: LAMA2; (-) strand; PAM type: YTN; PAM sequence: TTT
ttttgcttttccttttgagc

SEQ ID NO: 197120 - DNA, 20 bp, Artificial Sequence
  Description of Artificial Sequence: Synthetic oligonucleotide
  Target: LAMA2; (-) strand; PAM type: YTN; PAM sequence: CTT
tttttgcttttccttttgag

SEQ ID NO: 197121 - DNA, 20 bp, Artificial Sequence
  Description of Artificial Sequence: Synthetic oligonucleotide
  Target: LAMA2; (-) strand; PAM type: YTN; PAM sequence: CTG
tccatctttttttgcttttc

SEQ ID NO: 197122 - DNA, 20 bp, Artificial Sequence
  Description of Artificial Sequence: Synthetic oligonucleotide
  Target: LAMA2; (-) strand; PAM type: YTN; PAM sequence: TTC
tgtccatctttttttgcttt

SEQ ID NO: 197123 - DNA, 20 bp, Artificial Sequence
  Description of Artificial Sequence: Synthetic oligonucleotide
  Target: LAMA2; (-) strand; PAM type: YTN; PAM sequence: CTT
ctgtccatctttttttgctt

SEQ ID NO: 197124 - DNA, 20 bp, Artificial Sequence
  Description of Artificial Sequence: Synthetic oligonucleotide
  Target: LAMA2; (-) strand; PAM type: YTN; PAM sequence: CTG
gcttctgtccatcttttttt

SEQ ID NO: 197125 - DNA, 20 bp, Artificial Sequence
  Description of Artificial Sequence: Synthetic oligonucleotide
  Target: LAMA2; (-) strand; PAM type: YTN; PAM sequence: TTC
tggcttctgtccatcttttt

SEQ ID NO: 197126 - DNA, 20 bp, Artificial Sequence
  Description of Artificial Sequence: Synthetic oligonucleotide
  Target: LAMA2; (-) strand; PAM type: YTN; PAM sequence: TTT
ctggcttctgtccatctttt

SEQ ID NO: 197127 - DNA, 20 bp, Artificial Sequence
  Description of Artificial Sequence: Synthetic oligonucleotide
  Target: LAMA2; (-) strand; PAM type: YTN; PAM sequence: TTC
agcatttctggcttctgtcc

SEQ ID NO: 197128 - DNA, 20 bp, Artificial Sequence
  Description of Artificial Sequence: Synthetic oligonucleotide
  Target: LAMA2; (-) strand; PAM type: YTN; PAM sequence: TTA
ttcagcatttctggcttctg

SEQ ID NO: 197129 - DNA, 20 bp, Artificial Sequence
  Description of Artificial Sequence: Synthetic oligonucleotide
  Target: LAMA2; (-) strand; PAM type: YTN; PAM sequence: TTT
attcagcatttctggcttct

SEQ ID NO: 197130 - DNA, 20 bp, Artificial Sequence
  Description of Artificial Sequence: Synthetic oligonucleotide
  Target: LAMA2; (-) strand; PAM type: YTN; PAM sequence: CTA
atttattcagcatttctggc

SEQ ID NO: 197131 - DNA, 20 bp, Artificial Sequence
  Description of Artificial Sequence: Synthetic oligonucleotide
  Target: LAMA2; (-) strand; PAM type: YTN; PAM sequence: TTA
aaaagtaaataaaaaggaca

SEQ ID NO: 197132 - DNA, 20 bp, Artificial Sequence
  Description of Artificial Sequence: Synthetic oligonucleotide
  Target: LAMA2; (-) strand; PAM type: YTN; PAM sequence: TTT
aaaaagtaaataaaaaggac

SEQ ID NO: 197133 - DNA, 20 bp, Artificial Sequence
  Description of Artificial Sequence: Synthetic oligonucleotide
  Target: LAMA2; (-) strand; PAM type: YTN; PAM sequence: TTT
taaaaagtaaataaaaagga

SEQ ID NO: 197134 - DNA, 20 bp, Artificial Sequence
  Description of Artificial Sequence: Synthetic oligonucleotide
  Target: LAMA2; (-) strand; PAM type: YTN; PAM sequence: TTT
ttaaaaagtaaataaaaagg

SEQ ID NO: 197135 - DNA, 20 bp, Artificial Sequence
  Description of Artificial Sequence: Synthetic oligonucleotide
  Target: LAMA2; (-) strand; PAM type: YTN; PAM sequence: TTC
atagtttttaaaaagtaaat

SEQ ID NO: 197136 - DNA, 20 bp, Artificial Sequence
  Description of Artificial Sequence: Synthetic oligonucleotide
  Target: LAMA2; (-) strand; PAM type: YTN; PAM sequence: TTA
aatgagccaattcatagttt

SEQ ID NO: 197137 - DNA, 20 bp, Artificial Sequence
  Description of Artificial Sequence: Synthetic oligonucleotide
  Target: LAMA2; (-) strand; PAM type: YTN; PAM sequence: TTT
aaatgagccaattcatagtt

SEQ ID NO: 197138 - DNA, 20 bp, Artificial Sequence
  Description of Artificial Sequence: Synthetic oligonucleotide
  Target: LAMA2; (-) strand; PAM type: YTN; PAM sequence: CTA
tttaaatgagccaattcata

SEQ ID NO: 197139 - DNA, 20 bp, Artificial Sequence
  Description of Artificial Sequence: Synthetic oligonucleotide
  Target: LAMA2; (-) strand; PAM type: YTN; PAM sequence: TTA
gaatctatttaaatgagcca

SEQ ID NO: 197140 - DNA, 20 bp, Artificial Sequence
  Description of Artificial Sequence: Synthetic oligonucleotide
  Target: LAMA2; (-) strand; PAM type: YTN; PAM sequence: TTT
agaatctatttaaatgagcc

SEQ ID NO: 197141 - DNA, 20 bp, Artificial Sequence
  Description of Artificial Sequence: Synthetic oligonucleotide
  Target: LAMA2; (-) strand; PAM type: YTN; PAM sequence: TTT
tagaatctatttaaatgagc

SEQ ID NO: 197142 - DNA, 20 bp, Artificial Sequence
  Description of Artificial Sequence: Synthetic oligonucleotide
  Target: LAMA2; (-) strand; PAM type: YTN; PAM sequence: CTT
ttagaatctatttaaatgag

SEQ ID NO: 197143 - DNA, 20 bp, Artificial Sequence
  Description of Artificial Sequence: Synthetic oligonucleotide
  Target: LAMA2; (-) strand; PAM type: YTN; PAM sequence: TTC
agacccacatacaaatactt

SEQ ID NO: 197144 - DNA, 20 bp, Artificial Sequence
  Description of Artificial Sequence: Synthetic oligonucleotide
  Target: LAMA2; (-) strand; PAM type: YTN; PAM sequence: CTC
catgacaacagtgttcagac

SEQ ID NO: 197145 - DNA, 20 bp, Artificial Sequence
  Description of Artificial Sequence: Synthetic oligonucleotide
  Target: LAMA2; (-) strand; PAM type: YTN; PAM sequence: TTA
atctccatgacaacagtgtt

SEQ ID NO: 197146 - DNA, 20 bp, Artificial Sequence
  Description of Artificial Sequence: Synthetic oligonucleotide
  Target: LAMA2; (-) strand; PAM type: YTN; PAM sequence: TTT
aatctccatgacaacagtgt

SEQ ID NO: 197147 - DNA, 20 bp, Artificial Sequence
  Description of Artificial Sequence: Synthetic oligonucleotide
  Target: LAMA2; (-) strand; PAM type: YTN; PAM sequence: TTT
taatctccatgacaacagtg

SEQ ID NO: 197148 - DNA, 20 bp, Artificial Sequence
  Description of Artificial Sequence: Synthetic oligonucleotide
  Target: LAMA2; (-) strand; PAM type: YTN; PAM sequence: CTG
tacacaacaacaacaaaaat

SEQ ID NO: 197149 - DNA, 20 bp, Artificial Sequence
  Description of Artificial Sequence: Synthetic oligonucleotide
  Target: LAMA2; (-) strand; PAM type: YTN; PAM sequence: CTC
cactgtacacaacaacaaca

SEQ ID NO: 197150 - DNA, 20 bp, Artificial Sequence
  Description of Artificial Sequence: Synthetic oligonucleotide
  Target: LAMA2; (-) strand; PAM type: YTN; PAM sequence: CTG
ccatctccactgtacacaac

SEQ ID NO: 197151 - DNA, 20 bp, Artificial Sequence
  Description of Artificial Sequence: Synthetic oligonucleotide
  Target: LAMA2; (-) strand; PAM type: YTN; PAM sequence: CTA
gaagaaaactgccatctcca

SEQ ID NO: 197152 - DNA, 20 bp, Artificial Sequence
  Description of Artificial Sequence: Synthetic oligonucleotide
  Target: LAMA2; (-) strand; PAM type: YTN; PAM sequence: CTA
cagaagcatcaactagaaga

SEQ ID NO: 197153 - DNA, 20 bp, Artificial Sequence
  Description of Artificial Sequence: Synthetic oligonucleotide
  Target: LAMA2; (-) strand; PAM type: YTN; PAM sequence: TTC
tacagaagcatcaactagaa

SEQ ID NO: 197154 - DNA, 20 bp, Artificial Sequence
  Description of Artificial Sequence: Synthetic oligonucleotide
  Target: LAMA2; (-) strand; PAM type: YTN; PAM sequence: TTA
ttctacagaagcatcaacta

SEQ ID NO: 197155 - DNA, 20 bp, Artificial Sequence
  Description of Artificial Sequence: Synthetic oligonucleotide
  Target: LAMA2; (-) strand; PAM type: YTN; PAM sequence: TTT
attctacagaagcatcaact

SEQ ID NO: 197156 - DNA, 20 bp, Artificial Sequence
  Description of Artificial Sequence: Synthetic oligonucleotide
  Target: LAMA2; (-) strand; PAM type: YTN; PAM sequence: TTT
tattctacagaagcatcaac

SEQ ID NO: 197157 - DNA, 20 bp, Artificial Sequence
  Description of Artificial Sequence: Synthetic oligonucleotide
  Target: LAMA2; (-) strand; PAM type: YTN; PAM sequence: TTT
ttattctacagaagcatcaa

SEQ ID NO: 197158 - DNA, 20 bp, Artificial Sequence
  Description of Artificial Sequence: Synthetic oligonucleotide
  Target: LAMA2; (-) strand; PAM type: YTN; PAM sequence: TTT
tttattctacagaagcatca

SEQ ID NO: 197159 - DNA, 20 bp, Artificial Sequence
  Description of Artificial Sequence: Synthetic oligonucleotide
  Target: LAMA2; (-) strand; PAM type: YTN; PAM sequence: TTT
ttttattctacagaagcatc

SEQ ID NO: 197160 - DNA, 20 bp, Artificial Sequence
  Description of Artificial Sequence: Synthetic oligonucleotide
  Target: LAMA2; (-) strand; PAM type: YTN; PAM sequence: TTT
tttttattctacagaagcat

SEQ ID NO: 197161 - DNA, 20 bp, Artificial Sequence
  Description of Artificial Sequence: Synthetic oligonucleotide
  Target: LAMA2; (-) strand; PAM type: YTN; PAM sequence: TTT
ttttttattctacagaagca

SEQ ID NO: 197162 - DNA, 20 bp, Artificial Sequence
  Description of Artificial Sequence: Synthetic oligonucleotide
  Target: LAMA2; (-) strand; PAM type: YTN; PAM sequence: TTT
tttttttattctacagaagc

SEQ ID NO: 197163 - DNA, 20 bp, Artificial Sequence
  Description of Artificial Sequence: Synthetic oligonucleotide
  Target: LAMA2; (-) strand; PAM type: YTN; PAM sequence: CTT
ttttttttattctacagaag

SEQ ID NO: 197164 - DNA, 20 bp, Artificial Sequence
  Description of Artificial Sequence: Synthetic oligonucleotide
  Target: LAMA2; (-) strand; PAM type: YTN; PAM sequence: CTA
aacttttttttttattctac

SEQ ID NO: 197165 - DNA, 20 bp, Artificial Sequence
  Description of Artificial Sequence: Synthetic oligonucleotide
  Target: LAMA2; (-) strand; PAM type: YTN; PAM sequence: CTC
agctaaacttttttttttat

SEQ ID NO: 197166 - DNA, 20 bp, Artificial Sequence
  Description of Artificial Sequence: Synthetic oligonucleotide
  Target: LAMA2; (-) strand; PAM type: YTN; PAM sequence: TTC
tcagctaaactttttttttt

SEQ ID NO: 197167 - DNA, 20 bp, Artificial Sequence
  Description of Artificial Sequence: Synthetic oligonucleotide
  Target: LAMA2; (-) strand; PAM type: YTN; PAM sequence: TTT
ctcagctaaacttttttttt

SEQ ID NO: 197168 - DNA, 20 bp, Artificial Sequence
  Description of Artificial Sequence: Synthetic oligonucleotide
  Target: LAMA2; (-) strand; PAM type: YTN; PAM sequence: CTT
tctcagctaaactttttttt

SEQ ID NO: 197169 - DNA, 20 bp, Artificial Sequence
  Description of Artificial Sequence: Synthetic oligonucleotide
  Target: LAMA2; (-) strand; PAM type: YTN; PAM sequence: CTA
cctttctcagctaaactttt

SEQ ID NO: 197170 - DNA, 20 bp, Artificial Sequence
  Description of Artificial Sequence: Synthetic oligonucleotide
  Target: LAMA2; (-) strand; PAM type: YTN; PAM sequence: TTA
agacctacctttctcagcta

SEQ ID NO: 197171 - DNA, 20 bp, Artificial Sequence
  Description of Artificial Sequence: Synthetic oligonucleotide
  Target: LAMA2; (-) strand; PAM type: YTN; PAM sequence: TTC
cattaagacctacctttctc

SEQ ID NO: 197172 - DNA, 20 bp, Artificial Sequence
  Description of Artificial Sequence: Synthetic oligonucleotide
  Target: LAMA2; (-) strand; PAM type: YTN; PAM sequence: TTA
acaattccattaagacctac

SEQ ID NO: 197173 - DNA, 20 bp, Artificial Sequence
  Description of Artificial Sequence: Synthetic oligonucleotide
  Target: LAMA2; (-) strand; PAM type: YTN; PAM sequence: CTA
catattaacaattccattaa

SEQ ID NO: 197174 - DNA, 20 bp, Artificial Sequence
  Description of Artificial Sequence: Synthetic oligonucleotide
  Target: LAMA2; (-) strand; PAM type: YTN; PAM sequence: TTA
aaatgtcatccaaaataaga

SEQ ID NO: 197175 - DNA, 20 bp, Artificial Sequence
  Description of Artificial Sequence: Synthetic oligonucleotide
  Target: LAMA2; (-) strand; PAM type: YTN; PAM sequence: TTT
aaaatgtcatccaaaataag

SEQ ID NO: 197176 - DNA, 20 bp, Artificial Sequence
  Description of Artificial Sequence: Synthetic oligonucleotide
  Target: LAMA2; (-) strand; PAM type: YTN; PAM sequence: TTT
taaaatgtcatccaaaataa

SEQ ID NO: 197177 - DNA, 20 bp, Artificial Sequence
  Description of Artificial Sequence: Synthetic oligonucleotide
  Target: LAMA2; (-) strand; PAM type: YTN; PAM sequence: TTA
aatacgtaagtgattttaaa

SEQ ID NO: 197178 - DNA, 20 bp, Artificial Sequence
  Description of Artificial Sequence: Synthetic oligonucleotide
  Target: LAMA2; (-) strand; PAM type: YTN; PAM sequence: CTA
caatccacagattaaatacg

SEQ ID NO: 197179 - DNA, 20 bp, Artificial Sequence
  Description of Artificial Sequence: Synthetic oligonucleotide
  Target: LAMA2; (-) strand; PAM type: YTN; PAM sequence: CTC
tacaatccacagattaaata

SEQ ID NO: 197180 - DNA, 20 bp, Artificial Sequence
  Description of Artificial Sequence: Synthetic oligonucleotide
  Target: LAMA2; (-) strand; PAM type: YTN; PAM sequence: TTC
ccagcatgctctacaatcca

SEQ ID NO: 197181 - DNA, 20 bp, Artificial Sequence
  Description of Artificial Sequence: Synthetic oligonucleotide
  Target: LAMA2; (-) strand; PAM type: YTN; PAM sequence: CTT
cccagcatgctctacaatcc

SEQ ID NO: 197182 - DNA, 20 bp, Artificial Sequence
  Description of Artificial Sequence: Synthetic oligonucleotide
  Target: LAMA2; (-) strand; PAM type: YTN; PAM sequence: TTG
ataacttcccagcatgctct

SEQ ID NO: 197183 - DNA, 20 bp, Artificial Sequence
  Description of Artificial Sequence: Synthetic oligonucleotide
  Target: LAMA2; (-) strand; PAM type: YTN; PAM sequence: CTG
aggcaggtaccaatggaatt

SEQ ID NO: 197184 - DNA, 20 bp, Artificial Sequence
  Description of Artificial Sequence: Synthetic oligonucleotide
  Target: LAMA2; (-) strand; PAM type: YTN; PAM sequence: CTG
caactgaggcaggtaccaat

SEQ ID NO: 197185 - DNA, 20 bp, Artificial Sequence
  Description of Artificial Sequence: Synthetic oligonucleotide
  Target: LAMA2; (-) strand; PAM type: YTN; PAM sequence: CTG
aactgcaactgaggcaggta

SEQ ID NO: 197186 - DNA, 20 bp, Artificial Sequence
  Description of Artificial Sequence: Synthetic oligonucleotide
  Target: LAMA2; (-) strand; PAM type: YTN; PAM sequence: TTA
aggctgaactgcaactgagg

SEQ ID NO: 197187 - DNA, 20 bp, Artificial Sequence
  Description of Artificial Sequence: Synthetic oligonucleotide
  Target: LAMA2; (-) strand; PAM type: YTN; PAM sequence: CTT
aaggctgaactgcaactgag

SEQ ID NO: 197188 - DNA, 20 bp, Artificial Sequence
  Description of Artificial Sequence: Synthetic oligonucleotide
  Target: LAMA2; (-) strand; PAM type: YTN; PAM sequence: TTG
gtaagtacttaaggctgaac

SEQ ID NO: 197189 - DNA, 20 bp, Artificial Sequence
  Description of Artificial Sequence: Synthetic oligonucleotide
  Target: LAMA2; (-) strand; PAM type: YTN; PAM sequence: TTT
ggtaagtacttaaggctgaa

SEQ ID NO: 197190 - DNA, 20 bp, Artificial Sequence
  Description of Artificial Sequence: Synthetic oligonucleotide
  Target: LAMA2; (-) strand; PAM type: YTN; PAM sequence: CTT
tggtaagtacttaaggctga

SEQ ID NO: 197191 - DNA, 20 bp, Artificial Sequence
  Description of Artificial Sequence: Synthetic oligonucleotide
  Target: LAMA2; (-) strand; PAM type: YTN; PAM sequence: CTC
cctttggtaagtacttaagg

SEQ ID NO: 197192 - DNA, 20 bp, Artificial Sequence
  Description of Artificial Sequence: Synthetic oligonucleotide
  Target: LAMA2; (-) strand; PAM type: YTN; PAM sequence: CTG
ccaccccaaatgagctccct

SEQ ID NO: 197193 - DNA, 20 bp, Artificial Sequence
  Description of Artificial Sequence: Synthetic oligonucleotide
  Target: LAMA2; (-) strand; PAM type: YTN; PAM sequence: TTA
cccctgccaccccaaatgag

SEQ ID NO: 197194 - DNA, 20 bp, Artificial Sequence
  Description of Artificial Sequence: Synthetic oligonucleotide
  Target: LAMA2; (-) strand; PAM type: YTN; PAM sequence: TTC
ggttacccctgccaccccaa

SEQ ID NO: 197195 - DNA, 20 bp, Artificial Sequence
  Description of Artificial Sequence: Synthetic oligonucleotide
  Target: LAMA2; (-) strand; PAM type: YTN; PAM sequence: TTT
cggttacccctgccacccca

SEQ ID NO: 197196 - DNA, 20 bp, Artificial Sequence
  Description of Artificial Sequence: Synthetic oligonucleotide
  Target: LAMA2; (-) strand; PAM type: YTN; PAM sequence: TTT
tcggttacccctgccacccc

SEQ ID NO: 197197 - DNA, 20 bp, Artificial Sequence
  Description of Artificial Sequence: Synthetic oligonucleotide
  Target: LAMA2; (-) strand; PAM type: YTN; PAM sequence: CTT
ttcggttacccctgccaccc

SEQ ID NO: 197198 - DNA, 20 bp, Artificial Sequence
  Description of Artificial Sequence: Synthetic oligonucleotide
  Target: LAMA2; (-) strand; PAM type: YTN; PAM sequence: CTC
ccacacttttcggttacccc

SEQ ID NO: 197199 - DNA, 20 bp, Artificial Sequence
  Description of Artificial Sequence: Synthetic oligonucleotide
  Target: LAMA2; (-) strand; PAM type: YTN; PAM sequence: CTC
agctcccacacttttcggtt

SEQ ID NO: 197200 - DNA, 20 bp, Artificial Sequence
  Description of Artificial Sequence: Synthetic oligonucleotide
  Target: LAMA2; (-) strand; PAM type: YTN; PAM sequence: CTC
aaacaatacctcagctccca

SEQ ID NO: 197201 - DNA, 20 bp, Artificial Sequence
  Description of Artificial Sequence: Synthetic oligonucleotide
  Target: LAMA2; (-) strand; PAM type: YTN; PAM sequence: CTC
tcaaacaatacctcagctcc

SEQ ID NO: 197202 - DNA, 20 bp, Artificial Sequence
  Description of Artificial Sequence: Synthetic oligonucleotide
  Target: LAMA2; (-) strand; PAM type: YTN; PAM sequence: CTG
cccacaggctctcaaacaat

SEQ ID NO: 197203 - DNA, 20 bp, Artificial Sequence
  Description of Artificial Sequence: Synthetic oligonucleotide
  Target: LAMA2; (-) strand; PAM type: YTN; PAM sequence: TTG
gagcagtcacactgcccaca

SEQ ID NO: 197204 - DNA, 20 bp, Artificial Sequence
  Description of Artificial Sequence: Synthetic oligonucleotide
  Target: LAMA2; (-) strand; PAM type: YTN; PAM sequence: CTA
cgattggagcagtcacactg

SEQ ID NO: 197205 - DNA, 20 bp, Artificial Sequence
  Description of Artificial Sequence: Synthetic oligonucleotide
  Target: LAMA2; (-) strand; PAM type: YTN; PAM sequence: CTG
aaactacgattggagcagtc

SEQ ID NO: 197206 - DNA, 20 bp, Artificial Sequence
  Description of Artificial Sequence: Synthetic oligonucleotide
  Target: LAMA2; (-) strand; PAM type: YTN; PAM sequence: CTC
actgaaactacgattggagc

SEQ ID NO: 197207 - DNA, 20 bp, Artificial Sequence
  Description of Artificial Sequence: Synthetic oligonucleotide
  Target: LAMA2; (-) strand; PAM type: YTN; PAM sequence: TTC
ctcactgaaactacgattgg

SEQ ID NO: 197208 - DNA, 20 bp, Artificial Sequence
  Description of Artificial Sequence: Synthetic oligonucleotide
  Target: LAMA2; (-) strand; PAM type: YTN; PAM sequence: CTT
cctcactgaaactacgattg

SEQ ID NO: 197209 - DNA, 20 bp, Artificial Sequence
  Description of Artificial Sequence: Synthetic oligonucleotide
  Target: LAMA2; (-) strand; PAM type: YTN; PAM sequence: CTC
ttcctcactgaaactacgat

SEQ ID NO: 197210 - DNA, 20 bp, Artificial Sequence
  Description of Artificial Sequence: Synthetic oligonucleotide
  Target: LAMA2; (-) strand; PAM type: YTN; PAM sequence: TTG
cacagatggtgctcttcctc

SEQ ID NO: 197211 - DNA, 20 bp, Artificial Sequence
  Description of Artificial Sequence: Synthetic oligonucleotide
  Target: LAMA2; (-) strand; PAM type: YTN; PAM sequence: CTT
gcacagatggtgctcttcct

SEQ ID NO: 197212 - DNA, 20 bp, Artificial Sequence
  Description of Artificial Sequence: Synthetic oligonucleotide
  Target: LAMA2; (-) strand; PAM type: YTN; PAM sequence: CTG
agaaaatcttgcacagatgg

SEQ ID NO: 197213 - DNA, 20 bp, Artificial Sequence
  Description of Artificial Sequence: Synthetic oligonucleotide
  Target: LAMA2; (-) strand; PAM type: YTN; PAM sequence: TTA
tagaggacatctgagaaaat

SEQ ID NO: 197214 - DNA, 20 bp, Artificial Sequence
  Description of Artificial Sequence: Synthetic oligonucleotide
  Target: LAMA2; (-) strand; PAM type: YTN; PAM sequence: CTT
atagaggacatctgagaaaa

SEQ ID NO: 197215 - DNA, 20 bp, Artificial Sequence
  Description of Artificial Sequence: Synthetic oligonucleotide
  Target: LAMA2; (-) strand; PAM type: YTN; PAM sequence: CTG
atgacaatgaaagtcttata

SEQ ID NO: 197216 - DNA, 20 bp, Artificial Sequence
  Description of Artificial Sequence: Synthetic oligonucleotide
  Target: LAMA2; (-) strand; PAM type: YTN; PAM sequence: TTG
agagcacatagaactgatga

SEQ ID NO: 197217 - DNA, 20 bp, Artificial Sequence
  Description of Artificial Sequence: Synthetic oligonucleotide
  Target: LAMA2; (-) strand; PAM type: YTN; PAM sequence: TTT
gagagcacatagaactgatg

SEQ ID NO: 197218 - DNA, 20 bp, Artificial Sequence
  Description of Artificial Sequence: Synthetic oligonucleotide
  Target: LAMA2; (-) strand; PAM type: YTN; PAM sequence: TTA
tgtgcaaaataaagaagaaa

SEQ ID NO: 197219 - DNA, 20 bp, Artificial Sequence
  Description of Artificial Sequence: Synthetic oligonucleotide
  Target: LAMA2; (-) strand; PAM type: YTN; PAM sequence: CTT
atgtgcaaaataaagaagaa

SEQ ID NO: 197220 - DNA, 20 bp, Artificial Sequence
  Description of Artificial Sequence: Synthetic oligonucleotide
  Target: LAMA2; (-) strand; PAM type: YTN; PAM sequence: TTA
tagcttatgtgcaaaataaa

SEQ ID NO: 197221 - DNA, 20 bp, Artificial Sequence
  Description of Artificial Sequence: Synthetic oligonucleotide
  Target: LAMA2; (-) strand; PAM type: YTN; PAM sequence: CTT
atagcttatgtgcaaaataa

SEQ ID NO: 197222 - DNA, 20 bp, Artificial Sequence
  Description of Artificial Sequence: Synthetic oligonucleotide
  Target: LAMA2; (-) strand; PAM type: YTN; PAM sequence: TTA
aaaaatagcttatagcttat

SEQ ID NO: 197223 - DNA, 20 bp, Artificial Sequence
  Description of Artificial Sequence: Synthetic oligonucleotide
  Target: LAMA2; (-) strand; PAM type: YTN; PAM sequence: CTT
aaaaaatagcttatagctta

SEQ ID NO: 197224 - DNA, 20 bp, Artificial Sequence
  Description of Artificial Sequence: Synthetic oligonucleotide
  Target: LAMA2; (-) strand; PAM type: YTN; PAM sequence: CTA
tatgtcttaaaaaatagctt

SEQ ID NO: 197225 - DNA, 20 bp, Artificial Sequence
  Description of Artificial Sequence: Synthetic oligonucleotide
  Target: LAMA2; (-) strand; PAM type: YTN; PAM sequence: TTG
atcacacagaaataaaacct

SEQ ID NO: 197226 - DNA, 20 bp, Artificial Sequence
  Description of Artificial Sequence: Synthetic oligonucleotide
  Target: LAMA2; (-) strand; PAM type: YTN; PAM sequence: TTT
gatcacacagaaataaaacc

SEQ ID NO: 197227 - DNA, 20 bp, Artificial Sequence
  Description of Artificial Sequence: Synthetic oligonucleotide
  Target: LAMA2; (-) strand; PAM type: YTN; PAM sequence: TTT
tgatcacacagaaataaaac

SEQ ID NO: 197228 - DNA, 20 bp, Artificial Sequence
  Description of Artificial Sequence: Synthetic oligonucleotide
  Target: LAMA2; (-) strand; PAM type: YTN; PAM sequence: TTT
ttgatcacacagaaataaaa

SEQ ID NO: 197229 - DNA, 20 bp, Artificial Sequence
  Description of Artificial Sequence: Synthetic oligonucleotide
  Target: LAMA2; (-) strand; PAM type: YTN; PAM sequence: TTG
cccgagacatagtttttgat

SEQ ID NO: 197230 - DNA, 20 bp, Artificial Sequence
  Description of Artificial Sequence: Synthetic oligonucleotide
  Target: LAMA2; (-) strand; PAM type: YTN; PAM sequence: TTC
caaaaagtagaagttgcccg

SEQ ID NO: 197231 - DNA, 20 bp, Artificial Sequence
  Description of Artificial Sequence: Synthetic oligonucleotide
  Target: LAMA2; (-) strand; PAM type: YTN; PAM sequence: TTA
attccaaaaagtagaagttg

SEQ ID NO: 197232 - DNA, 20 bp, Artificial Sequence
  Description of Artificial Sequence: Synthetic oligonucleotide
  Target: LAMA2; (-) strand; PAM type: YTN; PAM sequence: TTG
ttaattccaaaaagtagaag

SEQ ID NO: 197233 - DNA, 20 bp, Artificial Sequence
  Description of Artificial Sequence: Synthetic oligonucleotide
  Target: LAMA2; (-) strand; PAM type: YTN; PAM sequence: TTA
tatatatacacacacacaca

SEQ ID NO: 197234 - DNA, 20 bp, Artificial Sequence
  Description of Artificial Sequence: Synthetic oligonucleotide
  Target: LAMA2; (-) strand; PAM type: YTN; PAM sequence: TTT
atatatatacacacacacac

SEQ ID NO: 197235 - DNA, 20 bp, Artificial Sequence
  Description of Artificial Sequence: Synthetic oligonucleotide
  Target: LAMA2; (-) strand; PAM type: YTN; PAM sequence: TTG
tgcgtatgtgtttatatata

SEQ ID NO: 197236 - DNA, 20 bp, Artificial Sequence
  Description of Artificial Sequence: Synthetic oligonucleotide
  Target: LAMA2; (-) strand; PAM type: YTN; PAM sequence: CTT
gtgcgtatgtgtttatatat

SEQ ID NO: 197237 - DNA, 20 bp, Artificial Sequence
  Description of Artificial Sequence: Synthetic oligonucleotide
  Target: LAMA2; (-) strand; PAM type: YTN; PAM sequence: TTC
ttgtgcgtatgtgtttatat

SEQ ID NO: 197238 - DNA, 20 bp, Artificial Sequence
  Description of Artificial Sequence: Synthetic oligonucleotide
  Target: LAMA2; (-) strand; PAM type: YTN; PAM sequence: CTT
cttgtgcgtatgtgtttata

SEQ ID NO: 197239 - DNA, 20 bp, Artificial Sequence
  Description of Artificial Sequence: Synthetic oligonucleotide
  Target: LAMA2; (-) strand; PAM type: YTN; PAM sequence: TTA
tatgtgcgtgtatgtatata

SEQ ID NO: 197240 - DNA, 20 bp, Artificial Sequence
  Description of Artificial Sequence: Synthetic oligonucleotide
  Target: LAMA2; (-) strand; PAM type: YTN; PAM sequence: TTT
atatgtgcgtgtatgtatat

SEQ ID NO: 197241 - DNA, 20 bp, Artificial Sequence
  Description of Artificial Sequence: Synthetic oligonucleotide
  Target: LAMA2; (-) strand; PAM type: YTN; PAM sequence: CTG
tgtatttatatgtgcgtgta

SEQ ID NO: 197242 - DNA, 20 bp, Artificial Sequence
  Description of Artificial Sequence: Synthetic oligonucleotide
  Target: LAMA2; (-) strand; PAM type: YTN; PAM sequence: CTC
tgtgtatttatatgtgcgtg

SEQ ID NO: 197243 - DNA, 20 bp, Artificial Sequence
  Description of Artificial Sequence: Synthetic oligonucleotide
  Target: LAMA2; (-) strand; PAM type: YTN; PAM sequence: CTC
tctgtgtatttatatgtgcg

SEQ ID NO: 197244 - DNA, 20 bp, Artificial Sequence
  Description of Artificial Sequence: Synthetic oligonucleotide
  Target: LAMA2; (-) strand; PAM type: YTN; PAM sequence: CTC
tctctgtgtatttatatgtg

SEQ ID NO: 197245 - DNA, 20 bp, Artificial Sequence
  Description of Artificial Sequence: Synthetic oligonucleotide
  Target: LAMA2; (-) strand; PAM type: YTN; PAM sequence: CTG
tgtatatatacacacacact

SEQ ID NO: 197246 - DNA, 20 bp, Artificial Sequence
  Description of Artificial Sequence: Synthetic oligonucleotide
  Target: LAMA2; (-) strand; PAM type: YTN; PAM sequence: CTC
tgtgtatatatacacacaca

SEQ ID NO: 197247 - DNA, 20 bp, Artificial Sequence
  Description of Artificial Sequence: Synthetic oligonucleotide
  Target: LAMA2; (-) strand; PAM type: YTN; PAM sequence: CTC
tctgtgtatatatacacaca

SEQ ID NO: 197248 - DNA, 20 bp, Artificial Sequence
  Description of Artificial Sequence: Synthetic oligonucleotide
  Target: LAMA2; (-) strand; PAM type: YTN; PAM sequence: CTC
tctctgtgtatatatacaca

SEQ ID NO: 197249 - DNA, 20 bp, Artificial Sequence
  Description of Artificial Sequence: Synthetic oligonucleotide
  Target: LAMA2; (-) strand; PAM type: YTN; PAM sequence: CTC
tctctctgtgtatatataca

SEQ ID NO: 197250 - DNA, 20 bp, Artificial Sequence
  Description of Artificial Sequence: Synthetic oligonucleotide
  Target: LAMA2; (-) strand; PAM type: YTN; PAM sequence: CTC
tctctctctgtgtatatata

SEQ ID NO: 197251 - DNA, 20 bp, Artificial Sequence
  Description of Artificial Sequence: Synthetic oligonucleotide
  Target: LAMA2; (-) strand; PAM type: YTN; PAM sequence: CTC
tctctctctctgtgtatata

SEQ ID NO: 197252 - DNA, 20 bp, Artificial Sequence
  Description of Artificial Sequence: Synthetic oligonucleotide
  Target: LAMA2; (-) strand; PAM type: YTN; PAM sequence: CTC
tctctctctctctgtgtata

SEQ ID NO: 197253 - DNA, 20 bp, Artificial Sequence
  Description of Artificial Sequence: Synthetic oligonucleotide
  Target: LAMA2; (-) strand; PAM type: YTN; PAM sequence: CTC
tctctctctctctctgtgta

SEQ ID NO: 197254 - DNA, 20 bp, Artificial Sequence
  Description of Artificial Sequence: Synthetic oligonucleotide
  Target: LAMA2; (-) strand; PAM type: YTN; PAM sequence: CTC
tctctctctctctctctgtg

SEQ ID NO: 197255 - DNA, 20 bp, Artificial Sequence
  Description of Artificial Sequence: Synthetic oligonucleotide
  Target: LAMA2; (-) strand; PAM type: YTN; PAM sequence: CTC
tctctctctctctctctctg

SEQ ID NO: 197256 - DNA, 20 bp, Artificial Sequence
  Description of Artificial Sequence: Synthetic oligonucleotide
  Target: LAMA2; (-) strand; PAM type: YTN; PAM sequence: CTC
tctctctctctctctctctc

SEQ ID NO: 197257 - DNA, 20 bp, Artificial Sequence
  Description of Artificial Sequence: Synthetic oligonucleotide
  Target: LAMA2; (-) strand; PAM type: YTN; PAM sequence: CTC
tctctctctctctctctctc

SEQ ID NO: 197258 - DNA, 20 bp, Artificial Sequence
  Description of Artificial Sequence: Synthetic oligonucleotide
  Target: LAMA2; (-) strand; PAM type: YTN; PAM sequence: CTC
tctctctctctctctctctc

SEQ ID NO: 197259 - DNA, 20 bp, Artificial Sequence
  Description of Artificial Sequence: Synthetic oligonucleotide
  Target: LAMA2; (-) strand; PAM type: YTN; PAM sequence: CTC
tctctctctctctctctctc

SEQ ID NO: 197260 - DNA, 20 bp, Artificial Sequence
  Description of Artificial Sequence: Synthetic oligonucleotide
  Target: LAMA2; (-) strand; PAM type: YTN; PAM sequence: CTC
tctctctctctctctctctc

SEQ ID NO: 197261 - DNA, 20 bp, Artificial Sequence
  Description of Artificial Sequence: Synthetic oligonucleotide
  Target: LAMA2; (-) strand; PAM type: YTN; PAM sequence: CTC
tctctctctctctctctctc

SEQ ID NO: 197262 - DNA, 20 bp, Artificial Sequence
  Description of Artificial Sequence: Synthetic oligonucleotide
  Target: LAMA2; (-) strand; PAM type: YTN; PAM sequence: CTC
tctctctctctctctctctc

SEQ ID NO: 197263 - DNA, 20 bp, Artificial Sequence
  Description of Artificial Sequence: Synthetic oligonucleotide
  Target: LAMA2; (-) strand; PAM type: YTN; PAM sequence: CTC
tctctctctctctctctctc

SEQ ID NO: 197264 - DNA, 20 bp, Artificial Sequence
  Description of Artificial Sequence: Synthetic oligonucleotide
  Target: LAMA2; (-) strand; PAM type: YTN; PAM sequence: CTG
actctctctctctctctctc

SEQ ID NO: 197265 - DNA, 20 bp, Artificial Sequence
  Description of Artificial Sequence: Synthetic oligonucleotide
  Target: LAMA2; (-) strand; PAM type: YTN; PAM sequence: TTA
acagagcaagactgactctc

SEQ ID NO: 197266 - DNA, 20 bp, Artificial Sequence
  Description of Artificial Sequence: Synthetic oligonucleotide
  Target: LAMA2; (-) strand; PAM type: YTN; PAM sequence: CTG
gttaacagagcaagactgac

SEQ ID NO: 197267 - DNA, 20 bp, Artificial Sequence
  Description of Artificial Sequence: Synthetic oligonucleotide
  Target: LAMA2; (-) strand; PAM type: YTN; PAM sequence: TTG
caccacagcaccccagctgg

SEQ ID NO: 197268 - DNA, 20 bp, Artificial Sequence
  Description of Artificial Sequence: Synthetic oligonucleotide
  Target: LAMA2; (-) strand; PAM type: YTN; PAM sequence: CTC
cagtgagccataattgcacc

SEQ ID NO: 197269 - DNA, 20 bp, Artificial Sequence
  Description of Artificial Sequence: Synthetic oligonucleotide
  Target: LAMA2; (-) strand; PAM type: YTN; PAM sequence: CTG
ggaggtggaggctccagtga

SEQ ID NO: 197270 - DNA, 20 bp, Artificial Sequence
  Description of Artificial Sequence: Synthetic oligonucleotide
  Target: LAMA2; (-) strand; PAM type: YTN; PAM sequence: TTG
agtctgggaggtggaggctc

SEQ ID NO: 197271 - DNA, 20 bp, Artificial Sequence
  Description of Artificial Sequence: Synthetic oligonucleotide
  Target: LAMA2; (-) strand; PAM type: YTN; PAM sequence: CTT
gagtctgggaggtggaggct

SEQ ID NO: 197272 - DNA, 20 bp, Artificial Sequence
  Description of Artificial Sequence: Synthetic oligonucleotide
  Target: LAMA2; (-) strand; PAM type: YTN; PAM sequence: TTG
cttgagtctgggaggtggag

SEQ ID NO: 197273 - DNA, 20 bp, Artificial Sequence
  Description of Artificial Sequence: Synthetic oligonucleotide
  Target: LAMA2; (-) strand; PAM type: YTN; PAM sequence: CTG
aggcatgagaattgcttgag

SEQ ID NO: 197274 - DNA, 20 bp, Artificial Sequence
  Description of Artificial Sequence: Synthetic oligonucleotide
  Target: LAMA2; (-) strand; PAM type: YTN; PAM sequence: CTC
agaaggctgaggcatgagaa

SEQ ID NO: 197275 - DNA, 20 bp, Artificial Sequence
  Description of Artificial Sequence: Synthetic oligonucleotide
  Target: LAMA2; (-) strand; PAM type: YTN; PAM sequence: CTG
ggagtcccagccactcagaa

SEQ ID NO: 197276 - DNA, 20 bp, Artificial Sequence
  Description of Artificial Sequence: Synthetic oligonucleotide
  Target: LAMA2; (-) strand; PAM type: YTN; PAM sequence: CTG
ggtgtggtggtgaatgctgg

SEQ ID NO: 197277 - DNA, 20 bp, Artificial Sequence
  Description of Artificial Sequence: Synthetic oligonucleotide
  Target: LAMA2; (-) strand; PAM type: YTN; PAM sequence: CTA
actgggtgtggtggtgaatg

SEQ ID NO: 197278 - DNA, 20 bp, Artificial Sequence
  Description of Artificial Sequence: Synthetic oligonucleotide
  Target: LAMA2; (-) strand; PAM type: YTN; PAM sequence: TTC
aaaaaaaaaaaaagtacaat

SEQ ID NO: 197279 - DNA, 20 bp, Artificial Sequence
  Description of Artificial Sequence: Synthetic oligonucleotide
  Target: LAMA2; (-) strand; PAM type: YTN; PAM sequence: CTT
caaaaaaaaaaaaagtacaa

SEQ ID NO: 197280 - DNA, 20 bp, Artificial Sequence
  Description of Artificial Sequence: Synthetic oligonucleotide
  Target: LAMA2; (-) strand; PAM type: YTN; PAM sequence: CTC
ttcaaaaaaaaaaaaagtac

SEQ ID NO: 197281 - DNA, 20 bp, Artificial Sequence
  Description of Artificial Sequence: Synthetic oligonucleotide
  Target: LAMA2; (-) strand; PAM type: YTN; PAM sequence: CTG
tctcttcaaaaaaaaaaaaa

SEQ ID NO: 197282 - DNA, 20 bp, Artificial Sequence
  Description of Artificial Sequence: Synthetic oligonucleotide
  Target: LAMA2; (-) strand; PAM type: YTN; PAM sequence: TTG
ggcaacacagcaaaaccctg

SEQ ID NO: 197283 - DNA, 20 bp, Artificial Sequence
  Description of Artificial Sequence: Synthetic oligonucleotide
  Target: LAMA2; (-) strand; PAM type: YTN; PAM sequence: CTT
gggcaacacagcaaaaccct

SEQ ID NO: 197284 - DNA, 20 bp, Artificial Sequence
  Description of Artificial Sequence: Synthetic oligonucleotide
  Target: LAMA2; (-) strand; PAM type: YTN; PAM sequence: TTC
aagatcagcttgggcaacac

SEQ ID NO: 197285 - DNA, 20 bp, Artificial Sequence
  Description of Artificial Sequence: Synthetic oligonucleotide
  Target: LAMA2; (-) strand; PAM type: YTN; PAM sequence: CTG
gaggtccaggagttcaagat

SEQ ID NO: 197286 - DNA, 20 bp, Artificial Sequence
  Description of Artificial Sequence: Synthetic oligonucleotide
  Target: LAMA2; (-) strand; PAM type: YTN; PAM sequence: TTG
ctggaggtccaggagttcaa

SEQ ID NO: 197287 - DNA, 20 bp, Artificial Sequence
  Description of Artificial Sequence: Synthetic oligonucleotide
  Target: LAMA2; (-) strand; PAM type: YTN; PAM sequence: TTG
agaagccaagccaggagaat

SEQ ID NO: 197288 - DNA, 20 bp, Artificial Sequence
  Description of Artificial Sequence: Synthetic oligonucleotide
  Target: LAMA2; (-) strand; PAM type: YTN; PAM sequence: TTC
agcatattgagaagccaagc

SEQ ID NO: 197289 - DNA, 20 bp, Artificial Sequence
  Description of Artificial Sequence: Synthetic oligonucleotide
  Target: LAMA2; (-) strand; PAM type: YTN; PAM sequence: TTT
cagcatattgagaagccaag

SEQ ID NO: 197290 - DNA, 20 bp, Artificial Sequence
  Description of Artificial Sequence: Synthetic oligonucleotide
  Target: LAMA2; (-) strand; PAM type: YTN; PAM sequence: CTA
taatttcagcatattgagaa

SEQ ID NO: 197291 - DNA, 20 bp, Artificial Sequence
  Description of Artificial Sequence: Synthetic oligonucleotide
  Target: LAMA2; (-) strand; PAM type: YTN; PAM sequence: TTA
cgcctataatttcagcatat

SEQ ID NO: 197292 - DNA, 20 bp, Artificial Sequence
  Description of Artificial Sequence: Synthetic oligonucleotide
  Target: LAMA2; (-) strand; PAM type: YTN; PAM sequence: CTT
acgcctataatttcagcata

SEQ ID NO: 197293 - DNA, 20 bp, Artificial Sequence
  Description of Artificial Sequence: Synthetic oligonucleotide
  Target: LAMA2; (-) strand; PAM type: YTN; PAM sequence: TTC
aaaaatatatggacgatggt

SEQ ID NO: 197294 - DNA, 20 bp, Artificial Sequence
  Description of Artificial Sequence: Synthetic oligonucleotide
  Target: LAMA2; (-) strand; PAM type: YTN; PAM sequence: TTT
caaaaatatatggacgatgg

SEQ ID NO: 197295 - DNA, 20 bp, Artificial Sequence
  Description of Artificial Sequence: Synthetic oligonucleotide
  Target: LAMA2; (-) strand; PAM type: YTN; PAM sequence: TTT
tcaaaaatatatggacgatg

SEQ ID NO: 197296 - DNA, 20 bp, Artificial Sequence
  Description of Artificial Sequence: Synthetic oligonucleotide
  Target: LAMA2; (-) strand; PAM type: YTN; PAM sequence: CTA
ggtcattttcaaaaatatat

SEQ ID NO: 197297 - DNA, 20 bp, Artificial Sequence
  Description of Artificial Sequence: Synthetic oligonucleotide
  Target: LAMA2; (-) strand; PAM type: YTN; PAM sequence: TTC
ctaggtcattttcaaaaata

SEQ ID NO: 197298 - DNA, 20 bp, Artificial Sequence
  Description of Artificial Sequence: Synthetic oligonucleotide
  Target: LAMA2; (-) strand; PAM type: YTN; PAM sequence: TTG
ttcctaggtcattttcaaaa

SEQ ID NO: 197299 - DNA, 20 bp, Artificial Sequence
  Description of Artificial Sequence: Synthetic oligonucleotide
  Target: LAMA2; (-) strand; PAM type: YTN; PAM sequence: CTC
attgttcctaggtcattttc

SEQ ID NO: 197300 - DNA, 20 bp, Artificial Sequence
  Description of Artificial Sequence: Synthetic oligonucleotide
  Target: LAMA2; (-) strand; PAM type: YTN; PAM sequence: TTC
aaaaagtctcattgttccta

SEQ ID NO: 197301 - DNA, 20 bp, Artificial Sequence
  Description of Artificial Sequence: Synthetic oligonucleotide
  Target: LAMA2; (-) strand; PAM type: YTN; PAM sequence: CTT
caaaaagtctcattgttcct

SEQ ID NO: 197302 - DNA, 20 bp, Artificial Sequence
  Description of Artificial Sequence: Synthetic oligonucleotide
  Target: LAMA2; (-) strand; PAM type: YTN; PAM sequence: TTA
gcaaacggaaaaaacttcaa

SEQ ID NO: 197303 - DNA, 20 bp, Artificial Sequence
  Description of Artificial Sequence: Synthetic oligonucleotide
  Target: LAMA2; (-) strand; PAM type: YTN; PAM sequence: CTG
ataagttagcaaacggaaaa

SEQ ID NO: 197304 - DNA, 20 bp, Artificial Sequence
  Description of Artificial Sequence: Synthetic oligonucleotide
  Target: LAMA2; (-) strand; PAM type: YTN; PAM sequence: CTC
tgataagttagcaaacggaa

SEQ ID NO: 197305 - DNA, 20 bp, Artificial Sequence
  Description of Artificial Sequence: Synthetic oligonucleotide
  Target: LAMA2; (-) strand; PAM type: YTN; PAM sequence: TTC
tctgataagttagcaaacgg

SEQ ID NO: 197306 - DNA, 20 bp, Artificial Sequence
  Description of Artificial Sequence: Synthetic oligonucleotide
  Target: LAMA2; (-) strand; PAM type: YTN; PAM sequence: TTT
ctctgataagttagcaaacg

SEQ ID NO: 197307 - DNA, 20 bp, Artificial Sequence
  Description of Artificial Sequence: Synthetic oligonucleotide
  Target: LAMA2; (-) strand; PAM type: YTN; PAM sequence: TTT
tctctgataagttagcaaac

SEQ ID NO: 197308 - DNA, 20 bp, Artificial Sequence
  Description of Artificial Sequence: Synthetic oligonucleotide
  Target: LAMA2; (-) strand; PAM type: YTN; PAM sequence: CTA
gttttctctgataagttagc

SEQ ID NO: 197309 - DNA, 20 bp, Artificial Sequence
  Description of Artificial Sequence: Synthetic oligonucleotide
  Target: LAMA2; (-) strand; PAM type: YTN; PAM sequence: TTC
cactagttttctctgataag

SEQ ID NO: 197310 - DNA, 20 bp, Artificial Sequence
  Description of Artificial Sequence: Synthetic oligonucleotide
  Target: LAMA2; (-) strand; PAM type: YTN; PAM sequence: TTT
ccactagttttctctgataa

SEQ ID NO: 197311 - DNA, 20 bp, Artificial Sequence
  Description of Artificial Sequence: Synthetic oligonucleotide
  Target: LAMA2; (-) strand; PAM type: YTN; PAM sequence: TTA
tttccactagttttctctga

SEQ ID NO: 197312 - DNA, 20 bp, Artificial Sequence
  Description of Artificial Sequence: Synthetic oligonucleotide
  Target: LAMA2; (-) strand; PAM type: YTN; PAM sequence: TTG
atattatttccactagtttt

SEQ ID NO: 197313 - DNA, 20 bp, Artificial Sequence
  Description of Artificial Sequence: Synthetic oligonucleotide
  Target: LAMA2; (-) strand; PAM type: YTN; PAM sequence: TTT
gatattatttccactagttt

SEQ ID NO: 197314 - DNA, 20 bp, Artificial Sequence
  Description of Artificial Sequence: Synthetic oligonucleotide
  Target: LAMA2; (-) strand; PAM type: YTN; PAM sequence: TTT
tgatattatttccactagtt

SEQ ID NO: 197315 - DNA, 20 bp, Artificial Sequence
  Description of Artificial Sequence: Synthetic oligonucleotide
  Target: LAMA2; (-) strand; PAM type: YTN; PAM sequence: TTT
ttgatattatttccactagt

SEQ ID NO: 197316 - DNA, 20 bp, Artificial Sequence
  Description of Artificial Sequence: Synthetic oligonucleotide
  Target: LAMA2; (-) strand; PAM type: YTN; PAM sequence: CTT
tttgatattatttccactag

SEQ ID NO: 197317 - DNA, 20 bp, Artificial Sequence
  Description of Artificial Sequence: Synthetic oligonucleotide
  Target: LAMA2; (-) strand; PAM type: YTN; PAM sequence: TTC
tttttgatattatttccact

SEQ ID NO: 197318 - DNA, 20 bp, Artificial Sequence
  Description of Artificial Sequence: Synthetic oligonucleotide
  Target: LAMA2; (-) strand; PAM type: YTN; PAM sequence: TTT
ctttttgatattatttccac

SEQ ID NO: 197319 - DNA, 20 bp, Artificial Sequence
  Description of Artificial Sequence: Synthetic oligonucleotide
  Target: LAMA2; (-) strand; PAM type: YTN; PAM sequence: TTG
atgatttctttttgatatta

SEQ ID NO: 197320 - DNA, 20 bp, Artificial Sequence
  Description of Artificial Sequence: Synthetic oligonucleotide
  Target: LAMA2; (-) strand; PAM type: YTN; PAM sequence: TTT
gatgatttctttttgatatt

SEQ ID NO: 197321 - DNA, 20 bp, Artificial Sequence
  Description of Artificial Sequence: Synthetic oligonucleotide
  Target: LAMA2; (-) strand; PAM type: YTN; PAM sequence: TTA
tccatgggtagcatttgatg

SEQ ID NO: 197322 - DNA, 20 bp, Artificial Sequence
  Description of Artificial Sequence: Synthetic oligonucleotide
  Target: LAMA2; (-) strand; PAM type: YTN; PAM sequence: TTG
tacattatccatgggtagca

SEQ ID NO: 197323 - DNA, 20 bp, Artificial Sequence
  Description of Artificial Sequence: Synthetic oligonucleotide
  Target: LAMA2; (-) strand; PAM type: YTN; PAM sequence: CTT
gtacattatccatgggtagc

SEQ ID NO: 197324 - DNA, 20 bp, Artificial Sequence
  Description of Artificial Sequence: Synthetic oligonucleotide
  Target: LAMA2; (-) strand; PAM type: YTN; PAM sequence: TTC
ttgtacattatccatgggta

SEQ ID NO: 197325 - DNA, 20 bp, Artificial Sequence
  Description of Artificial Sequence: Synthetic oligonucleotide
  Target: LAMA2; (-) strand; PAM type: YTN; PAM sequence: TTT
cttgtacattatccatgggt

SEQ ID NO: 197326 - DNA, 20 bp, Artificial Sequence
  Description of Artificial Sequence: Synthetic oligonucleotide
  Target: LAMA2; (-) strand; PAM type: YTN; PAM sequence: TTT
tcttgtacattatccatggg

SEQ ID NO: 197327 - DNA, 20 bp, Artificial Sequence
  Description of Artificial Sequence: Synthetic oligonucleotide
  Target: LAMA2; (-) strand; PAM type: YTN; PAM sequence: CTG
agttttcttgtacattatcc

SEQ ID NO: 197328 - DNA, 20 bp, Artificial Sequence
  Description of Artificial Sequence: Synthetic oligonucleotide
  Target: LAMA2; (-) strand; PAM type: YTN; PAM sequence: TTG
ctgagttttcttgtacatta

SEQ ID NO: 197329 - DNA, 20 bp, Artificial Sequence
  Description of Artificial Sequence: Synthetic oligonucleotide
  Target: LAMA2; (-) strand; PAM type: YTN; PAM sequence: TTT
gctgagttttcttgtacatt

SEQ ID NO: 197330 - DNA, 20 bp, Artificial Sequence
  Description of Artificial Sequence: Synthetic oligonucleotide
  Target: LAMA2; (-) strand; PAM type: YTN; PAM sequence: TTT
tgctgagttttcttgtacat

SEQ ID NO: 197331 - DNA, 20 bp, Artificial Sequence
  Description of Artificial Sequence: Synthetic oligonucleotide
  Target: LAMA2; (-) strand; PAM type: YTN; PAM sequence: CTG
tgccaaataattttgctgag

SEQ ID NO: 197332 - DNA, 20 bp, Artificial Sequence
  Description of Artificial Sequence: Synthetic oligonucleotide
  Target: LAMA2; (-) strand; PAM type: YTN; PAM sequence: TTC
atctgtgccaaataattttg

SEQ ID NO: 197333 - DNA, 20 bp, Artificial Sequence
  Description of Artificial Sequence: Synthetic oligonucleotide
  Target: LAMA2; (-) strand; PAM type: YTN; PAM sequence: CTT
catctgtgccaaataatttt

SEQ ID NO: 197334 - DNA, 20 bp, Artificial Sequence
  Description of Artificial Sequence: Synthetic oligonucleotide
  Target: LAMA2; (-) strand; PAM type: YTN; PAM sequence: TTC
ttcatctgtgccaaataatt

SEQ ID NO: 197335 - DNA, 20 bp, Artificial Sequence
  Description of Artificial Sequence: Synthetic oligonucleotide
  Target: LAMA2; (-) strand; PAM type: YTN; PAM sequence: CTT
cttcatctgtgccaaataat

SEQ ID NO: 197336 - DNA, 20 bp, Artificial Sequence
  Description of Artificial Sequence: Synthetic oligonucleotide
  Target: LAMA2; (-) strand; PAM type: YTN; PAM sequence: TTG
tcttcttcatctgtgccaaa

SEQ ID NO: 197337 - DNA, 20 bp, Artificial Sequence
  Description of Artificial Sequence: Synthetic oligonucleotide
  Target: LAMA2; (-) strand; PAM type: YTN; PAM sequence: CTT
gtcttcttcatctgtgccaa

SEQ ID NO: 197338 - DNA, 20 bp, Artificial Sequence
  Description of Artificial Sequence: Synthetic oligonucleotide
  Target: LAMA2; (-) strand; PAM type: YTN; PAM sequence: TTC
ttgtcttcttcatctgtgcc

SEQ ID NO: 197339 - DNA, 20 bp, Artificial Sequence
  Description of Artificial Sequence: Synthetic oligonucleotide
  Target: LAMA2; (-) strand; PAM type: YTN; PAM sequence: TTT
cttgtcttcttcatctgtgc

SEQ ID NO: 197340 - DNA, 20 bp, Artificial Sequence
  Description of Artificial Sequence: Synthetic oligonucleotide
  Target: LAMA2; (-) strand; PAM type: YTN; PAM sequence: TTT
tcttgtcttcttcatctgtg

SEQ ID NO: 197341 - DNA, 20 bp, Artificial Sequence
  Description of Artificial Sequence: Synthetic oligonucleotide
  Target: LAMA2; (-) strand; PAM type: YTN; PAM sequence: TTT
ttcttgtcttcttcatctgt

SEQ ID NO: 197342 - DNA, 20 bp, Artificial Sequence
  Description of Artificial Sequence: Synthetic oligonucleotide
  Target: LAMA2; (-) strand; PAM type: YTN; PAM sequence: CTC
acaaagcagacatttttctt

SEQ ID NO: 197343 - DNA, 20 bp, Artificial Sequence
  Description of Artificial Sequence: Synthetic oligonucleotide
  Target: LAMA2; (-) strand; PAM type: YTN; PAM sequence: TTC
tcacaaagcagacatttttc

SEQ ID NO: 197344 - DNA, 20 bp, Artificial Sequence
  Description of Artificial Sequence: Synthetic oligonucleotide
  Target: LAMA2; (-) strand; PAM type: YTN; PAM sequence: CTA
tggtattctcacaaagcaga

SEQ ID NO: 197345 - DNA, 20 bp, Artificial Sequence
  Description of Artificial Sequence: Synthetic oligonucleotide
  Target: LAMA2; (-) strand; PAM type: YTN; PAM sequence: CTA
ctatggtattctcacaaagc

SEQ ID NO: 197346 - DNA, 20 bp, Artificial Sequence
  Description of Artificial Sequence: Synthetic oligonucleotide
  Target: LAMA2; (-) strand; PAM type: YTN; PAM sequence: CTG
aaggacctactatggtattc

SEQ ID NO: 197347 - DNA, 20 bp, Artificial Sequence
  Description of Artificial Sequence: Synthetic oligonucleotide
  Target: LAMA2; (-) strand; PAM type: YTN; PAM sequence: CTG
tctgaaggacctactatggt

SEQ ID NO: 197348 - DNA, 20 bp, Artificial Sequence
  Description of Artificial Sequence: Synthetic oligonucleotide
  Target: LAMA2; (-) strand; PAM type: YTN; PAM sequence: CTC
ctgtctgaaggacctactat

SEQ ID NO: 197349 - DNA, 20 bp, Artificial Sequence
  Description of Artificial Sequence: Synthetic oligonucleotide
  Target: LAMA2; (-) strand; PAM type: YTN; PAM sequence: TTA
ataaagtacctcctgtctga

SEQ ID NO: 197350 - DNA, 20 bp, Artificial Sequence
  Description of Artificial Sequence: Synthetic oligonucleotide
  Target: LAMA2; (-) strand; PAM type: YTN; PAM sequence: CTT
aataaagtacctcctgtctg

SEQ ID NO: 197351 - DNA, 20 bp, Artificial Sequence
  Description of Artificial Sequence: Synthetic oligonucleotide
  Target: LAMA2; (-) strand; PAM type: YTN; PAM sequence: TTC
ttaataaagtacctcctgtc

SEQ ID NO: 197352 - DNA, 20 bp, Artificial Sequence
  Description of Artificial Sequence: Synthetic oligonucleotide
  Target: LAMA2; (-) strand; PAM type: YTN; PAM sequence: CTT
cttaataaagtacctcctgt

SEQ ID NO: 197353 - DNA, 20 bp, Artificial Sequence
  Description of Artificial Sequence: Synthetic oligonucleotide
  Target: LAMA2; (-) strand; PAM type: YTN; PAM sequence: CTC
cttcttaataaagtacctcc

SEQ ID NO: 197354 - DNA, 20 bp, Artificial Sequence
  Description of Artificial Sequence: Synthetic oligonucleotide
  Target: LAMA2; (-) strand; PAM type: YTN; PAM sequence: TTG
ctccttcttaataaagtacc

SEQ ID NO: 197355 - DNA, 20 bp, Artificial Sequence
  Description of Artificial Sequence: Synthetic oligonucleotide
  Target: LAMA2; (-) strand; PAM type: YTN; PAM sequence: TTA
atgagaattgctccttctta

SEQ ID NO: 197356 - DNA, 20 bp, Artificial Sequence
  Description of Artificial Sequence: Synthetic oligonucleotide
  Target: LAMA2; (-) strand; PAM type: YTN; PAM sequence: TTA
ttaatgagaattgctccttc

SEQ ID NO: 197357 - DNA, 20 bp, Artificial Sequence
  Description of Artificial Sequence: Synthetic oligonucleotide
  Target: LAMA2; (-) strand; PAM type: YTN; PAM sequence: TTT
attaatgagaattgctcctt

SEQ ID NO: 197358 - DNA, 20 bp, Artificial Sequence
  Description of Artificial Sequence: Synthetic oligonucleotide
  Target: LAMA2; (-) strand; PAM type: YTN; PAM sequence: CTT
tattaatgagaattgctcct

SEQ ID NO: 197359 - DNA, 20 bp, Artificial Sequence
  Description of Artificial Sequence: Synthetic oligonucleotide
  Target: LAMA2; (-) strand; PAM type: YTN; PAM sequence: CTA
aatctttattaatgagaatt

SEQ ID NO: 197360 - DNA, 20 bp, Artificial Sequence
  Description of Artificial Sequence: Synthetic oligonucleotide
  Target: LAMA2; (-) strand; PAM type: YTN; PAM sequence: CTC
taaatctttattaatgagaa

SEQ ID NO: 197361 - DNA, 20 bp, Artificial Sequence
  Description of Artificial Sequence: Synthetic oligonucleotide
  Target: LAMA2; (-) strand; PAM type: YTN; PAM sequence: CTC
tctaaatctttattaatgag

SEQ ID NO: 197362 - DNA, 20 bp, Artificial Sequence
  Description of Artificial Sequence: Synthetic oligonucleotide
  Target: LAMA2; (-) strand; PAM type: YTN; PAM sequence: TTA
taagtgatctctctaaatct

SEQ ID NO: 197363 - DNA, 20 bp, Artificial Sequence
  Description of Artificial Sequence: Synthetic oligonucleotide
  Target: LAMA2; (-) strand; PAM type: YTN; PAM sequence: CTT
ataagtgatctctctaaatc

SEQ ID NO: 197364 - DNA, 20 bp, Artificial Sequence
  Description of Artificial Sequence: Synthetic oligonucleotide
  Target: LAMA2; (-) strand; PAM type: YTN; PAM sequence: CTG
ccataaatacatcttataag

SEQ ID NO: 197365 - DNA, 20 bp, Artificial Sequence
  Description of Artificial Sequence: Synthetic oligonucleotide
  Target: LAMA2; (-) strand; PAM type: YTN; PAM sequence: TTG
ctgccataaatacatcttat

SEQ ID NO: 197366 - DNA, 20 bp, Artificial Sequence
  Description of Artificial Sequence: Synthetic oligonucleotide
  Target: LAMA2; (-) strand; PAM type: YTN; PAM sequence: CTT
gctgccataaatacatctta

SEQ ID NO: 197367 - DNA, 20 bp, Artificial Sequence
  Description of Artificial Sequence: Synthetic oligonucleotide
  Target: LAMA2; (-) strand; PAM type: YTN; PAM sequence: CTC
atacatacatgtaccaaatg

SEQ ID NO: 197368 - DNA, 20 bp, Artificial Sequence
  Description of Artificial Sequence: Synthetic oligonucleotide
  Target: LAMA2; (-) strand; PAM type: YTN; PAM sequence: TTC
cctcatacatacatgtacca

SEQ ID NO: 197369 - DNA, 20 bp, Artificial Sequence
  Description of Artificial Sequence: Synthetic oligonucleotide
  Target: LAMA2; (-) strand; PAM type: YTN; PAM sequence: TTG
attccctcatacatacatgt

SEQ ID NO: 197370 - DNA, 20 bp, Artificial Sequence
  Description of Artificial Sequence: Synthetic oligonucleotide
  Target: LAMA2; (-) strand; PAM type: YTN; PAM sequence: CTT
gattccctcatacatacatg

SEQ ID NO: 197371 - DNA, 20 bp, Artificial Sequence
  Description of Artificial Sequence: Synthetic oligonucleotide
  Target: LAMA2; (-) strand; PAM type: YTN; PAM sequence: TTC
agatcttgattccctcatac

SEQ ID NO: 197372 - DNA, 20 bp, Artificial Sequence
  Description of Artificial Sequence: Synthetic oligonucleotide
  Target: LAMA2; (-) strand; PAM type: YTN; PAM sequence: TTT
cagatcttgattccctcata

SEQ ID NO: 197373 - DNA, 20 bp, Artificial Sequence
  Description of Artificial Sequence: Synthetic oligonucleotide
  Target: LAMA2; (-) strand; PAM type: YTN; PAM sequence: TTT
tcagatcttgattccctcat

SEQ ID NO: 197374 - DNA, 20 bp, Artificial Sequence
  Description of Artificial Sequence: Synthetic oligonucleotide
  Target: LAMA2; (-) strand; PAM type: YTN; PAM sequence: CTT
ttcagatcttgattccctca

SEQ ID NO: 197375 - DNA, 20 bp, Artificial Sequence
  Description of Artificial Sequence: Synthetic oligonucleotide
  Target: LAMA2; (-) strand; PAM type: YTN; PAM sequence: CTA
accgatgaaaatcttttcag

SEQ ID NO: 197376 - DNA, 20 bp, Artificial Sequence
  Description of Artificial Sequence: Synthetic oligonucleotide
  Target: LAMA2; (-) strand; PAM type: YTN; PAM sequence: CTC
taaccgatgaaaatcttttc

SEQ ID NO: 197377 - DNA, 20 bp, Artificial Sequence
  Description of Artificial Sequence: Synthetic oligonucleotide
  Target: LAMA2; (-) strand; PAM type: YTN; PAM sequence: TTG
catcataacagacgtatcac

SEQ ID NO: 197378 - DNA, 20 bp, Artificial Sequence
  Description of Artificial Sequence: Synthetic oligonucleotide
  Target: LAMA2; (-) strand; PAM type: YTN; PAM sequence: TTA
attgcatcataacagacgta

SEQ ID NO: 197379 - DNA, 20 bp, Artificial Sequence
  Description of Artificial Sequence: Synthetic oligonucleotide
  Target: LAMA2; (-) strand; PAM type: YTN; PAM sequence: CTC
cagtagacagtatatcacaa

SEQ ID NO: 197380 - DNA, 20 bp, Artificial Sequence
  Description of Artificial Sequence: Synthetic oligonucleotide
  Target: LAMA2; (-) strand; PAM type: YTN; PAM sequence: TTG
gagaacaaatctccagtaga

SEQ ID NO: 197381 - DNA, 20 bp, Artificial Sequence
  Description of Artificial Sequence: Synthetic oligonucleotide
  Target: LAMA2; (-) strand; PAM type: YTN; PAM sequence: TTT
ggagaacaaatctccagtag

SEQ ID NO: 197382 - DNA, 20 bp, Artificial Sequence
  Description of Artificial Sequence: Synthetic oligonucleotide
  Target: LAMA2; (-) strand; PAM type: YTN; PAM sequence: TTT
tggagaacaaatctccagta

SEQ ID NO: 197383 - DNA, 20 bp, Artificial Sequence
  Description of Artificial Sequence: Synthetic oligonucleotide
  Target: LAMA2; (-) strand; PAM type: YTN; PAM sequence: TTG
tcaggttttggagaacaaat

SEQ ID NO: 197384 - DNA, 20 bp, Artificial Sequence
  Description of Artificial Sequence: Synthetic oligonucleotide
  Target: LAMA2; (-) strand; PAM type: YTN; PAM sequence: CTA
gattgtcaggttttggagaa

SEQ ID NO: 197385 - DNA, 20 bp, Artificial Sequence
  Description of Artificial Sequence: Synthetic oligonucleotide
  Target: LAMA2; (-) strand; PAM type: YTN; PAM sequence: CTA
caaagtactagattgtcagg

SEQ ID NO: 197386 - DNA, 20 bp, Artificial Sequence
  Description of Artificial Sequence: Synthetic oligonucleotide
  Target: LAMA2; (-) strand; PAM type: YTN; PAM sequence: TTC
ctacaaagtactagattgtc

SEQ ID NO: 197387 - DNA, 20 bp, Artificial Sequence
  Description of Artificial Sequence: Synthetic oligonucleotide
  Target: LAMA2; (-) strand; PAM type: YTN; PAM sequence: TTA
gttcctacaaagtactagat

SEQ ID NO: 197388 - DNA, 20 bp, Artificial Sequence
  Description of Artificial Sequence: Synthetic oligonucleotide
  Target: LAMA2; (-) strand; PAM type: YTN; PAM sequence: TTA
tacacattagttcctacaaa

SEQ ID NO: 197389 - DNA, 20 bp, Artificial Sequence
  Description of Artificial Sequence: Synthetic oligonucleotide
  Target: LAMA2; (-) strand; PAM type: YTN; PAM sequence: CTA
agattatacacattagttcc

SEQ ID NO: 197390 - DNA, 20 bp, Artificial Sequence
  Description of Artificial Sequence: Synthetic oligonucleotide
  Target: LAMA2; (-) strand; PAM type: YTN; PAM sequence: CTA
agccccctaagattatacac

SEQ ID NO: 197391 - DNA, 20 bp, Artificial Sequence
  Description of Artificial Sequence: Synthetic oligonucleotide
  Target: LAMA2; (-) strand; PAM type: YTN; PAM sequence: CTG
tccactaagccccctaagat

SEQ ID NO: 197392 - DNA, 20 bp, Artificial Sequence
  Description of Artificial Sequence: Synthetic oligonucleotide
  Target: LAMA2; (-) strand; PAM type: YTN; PAM sequence: TTC
tgtccactaagccccctaag

SEQ ID NO: 197393 - DNA, 20 bp, Artificial Sequence
  Description of Artificial Sequence: Synthetic oligonucleotide
  Target: LAMA2; (-) strand; PAM type: YTN; PAM sequence: TTT
ctgtccactaagccccctaa

SEQ ID NO: 197394 - DNA, 20 bp, Artificial Sequence
  Description of Artificial Sequence: Synthetic oligonucleotide
  Target: LAMA2; (-) strand; PAM type: YTN; PAM sequence: CTT
tctgtccactaagcccccta

SEQ ID NO: 197395 - DNA, 20 bp, Artificial Sequence
  Description of Artificial Sequence: Synthetic oligonucleotide
  Target: LAMA2; (-) strand; PAM type: YTN; PAM sequence: CTA
atgaactttctgtccactaa

SEQ ID NO: 197396 - DNA, 20 bp, Artificial Sequence
  Description of Artificial Sequence: Synthetic oligonucleotide
  Target: LAMA2; (-) strand; PAM type: YTN; PAM sequence: CTA
tcacagtaccaacggctaat

SEQ ID NO: 197397 - DNA, 20 bp, Artificial Sequence
  Description of Artificial Sequence: Synthetic oligonucleotide
  Target: LAMA2; (-) strand; PAM type: YTN; PAM sequence: TTC
ccctatcacagtaccaacgg

SEQ ID NO: 197398 - DNA, 20 bp, Artificial Sequence
  Description of Artificial Sequence: Synthetic oligonucleotide
  Target: LAMA2; (-) strand; PAM type: YTN; PAM sequence: TTT
cccctatcacagtaccaacg

SEQ ID NO: 197399 - DNA, 20 bp, Artificial Sequence
  Description of Artificial Sequence: Synthetic oligonucleotide
  Target: LAMA2; (-) strand; PAM type: YTN; PAM sequence: TTT
tcccctatcacagtaccaac

SEQ ID NO: 197400 - DNA, 20 bp, Artificial Sequence
  Description of Artificial Sequence: Synthetic oligonucleotide
  Target: LAMA2; (-) strand; PAM type: YTN; PAM sequence: TTT
ttcccctatcacagtaccaa

SEQ ID NO: 197401 - DNA, 20 bp, Artificial Sequence
  Description of Artificial Sequence: Synthetic oligonucleotide
  Target: LAMA2; (-) strand; PAM type: YTN; PAM sequence: CTT
tttcccctatcacagtacca

SEQ ID NO: 197402 - DNA, 20 bp, Artificial Sequence
  Description of Artificial Sequence: Synthetic oligonucleotide
  Target: LAMA2; (-) strand; PAM type: YTN; PAM sequence: TTG
ctttttcccctatcacagta

SEQ ID NO: 197403 - DNA, 20 bp, Artificial Sequence
  Description of Artificial Sequence: Synthetic oligonucleotide
  Target: LAMA2; (-) strand; PAM type: YTN; PAM sequence: TTT
gctttttcccctatcacagt

SEQ ID NO: 197404 - DNA, 20 bp, Artificial Sequence
  Description of Artificial Sequence: Synthetic oligonucleotide
  Target: LAMA2; (-) strand; PAM type: YTN; PAM sequence: TTA
aggtcccatttgctttttcc

SEQ ID NO: 197405 - DNA, 20 bp, Artificial Sequence
  Description of Artificial Sequence: Synthetic oligonucleotide
  Target: LAMA2; (-) strand; PAM type: YTN; PAM sequence: TTT
aaggtcccatttgctttttc

SEQ ID NO: 197406 - DNA, 20 bp, Artificial Sequence
  Description of Artificial Sequence: Synthetic oligonucleotide
  Target: LAMA2; (-) strand; PAM type: YTN; PAM sequence: TTG
tttaaggtcccatttgcttt

SEQ ID NO: 197407 - DNA, 20 bp, Artificial Sequence
  Description of Artificial Sequence: Synthetic oligonucleotide
  Target: LAMA2; (-) strand; PAM type: YTN; PAM sequence: TTC
atattgtttaaggtcccatt

SEQ ID NO: 197408 - DNA, 20 bp, Artificial Sequence
  Description of Artificial Sequence: Synthetic oligonucleotide
  Target: LAMA2; (-) strand; PAM type: YTN; PAM sequence: CTA
ttcatattgtttaaggtccc

SEQ ID NO: 197409 - DNA, 20 bp, Artificial Sequence
  Description of Artificial Sequence: Synthetic oligonucleotide
  Target: LAMA2; (-) strand; PAM type: YTN; PAM sequence: TTG
agaaaccatgtctattcata

SEQ ID NO: 197410 - DNA, 20 bp, Artificial Sequence
  Description of Artificial Sequence: Synthetic oligonucleotide
  Target: LAMA2; (-) strand; PAM type: YTN; PAM sequence: TTT
gagaaaccatgtctattcat

SEQ ID NO: 197411 - DNA, 20 bp, Artificial Sequence
  Description of Artificial Sequence: Synthetic oligonucleotide
  Target: LAMA2; (-) strand; PAM type: YTN; PAM sequence: CTT
tgagaaaccatgtctattca

SEQ ID NO: 197412 - DNA, 20 bp, Artificial Sequence
  Description of Artificial Sequence: Synthetic oligonucleotide
  Target: LAMA2; (-) strand; PAM type: YTN; PAM sequence: TTC
tttgagaaaccatgtctatt

SEQ ID NO: 197413 - DNA, 20 bp, Artificial Sequence
  Description of Artificial Sequence: Synthetic oligonucleotide
  Target: LAMA2; (-) strand; PAM type: YTN; PAM sequence: CTA
ttctttgagaaaccatgtct

SEQ ID NO: 197414 - DNA, 20 bp, Artificial Sequence
  Description of Artificial Sequence: Synthetic oligonucleotide
  Target: LAMA2; (-) strand; PAM type: YTN; PAM sequence: CTC
aggtgaaccatagactattc

SEQ ID NO: 197415 - DNA, 20 bp, Artificial Sequence
  Description of Artificial Sequence: Synthetic oligonucleotide
  Target: LAMA2; (-) strand; PAM type: YTN; PAM sequence: TTG
tgatgtgtgctcaggtgaac

SEQ ID NO: 197416 - DNA, 20 bp, Artificial Sequence
  Description of Artificial Sequence: Synthetic oligonucleotide
  Target: LAMA2; (-) strand; PAM type: YTN; PAM sequence: TTT
gtgatgtgtgctcaggtgaa

SEQ ID NO: 197417 - DNA, 20 bp, Artificial Sequence
  Description of Artificial Sequence: Synthetic oligonucleotide
  Target: LAMA2; (-) strand; PAM type: YTN; PAM sequence: CTT
tgtgatgtgtgctcaggtga

SEQ ID NO: 197418 - DNA, 20 bp, Artificial Sequence
  Description of Artificial Sequence: Synthetic oligonucleotide
  Target: LAMA2; (-) strand; PAM type: YTN; PAM sequence: TTG
tcagcatcctttgtgatgtg

SEQ ID NO: 197419 - DNA, 20 bp, Artificial Sequence
  Description of Artificial Sequence: Synthetic oligonucleotide
  Target: LAMA2; (-) strand; PAM type: YTN; PAM sequence: CTG
tgcattgtcagcatcctttg

SEQ ID NO: 197420 - DNA, 20 bp, Artificial Sequence
  Description of Artificial Sequence: Synthetic oligonucleotide
  Target: LAMA2; (-) strand; PAM type: YTN; PAM sequence: TTA
actgtgcattgtcagcatcc

SEQ ID NO: 197421 - DNA, 20 bp, Artificial Sequence
  Description of Artificial Sequence: Synthetic oligonucleotide
  Target: LAMA2; (-) strand; PAM type: YTN; PAM sequence: CTT
aactgtgcattgtcagcatc

SEQ ID NO: 197422 - DNA, 20 bp, Artificial Sequence
  Description of Artificial Sequence: Synthetic oligonucleotide
  Target: LAMA2; (-) strand; PAM type: YTN; PAM sequence: CTA
ggtggggtaccttaactgtg

SEQ ID NO: 197423 - DNA, 20 bp, Artificial Sequence
  Description of Artificial Sequence: Synthetic oligonucleotide
  Target: LAMA2; (-) strand; PAM type: YTN; PAM sequence: TTA
atctaggtggggtaccttaa

SEQ ID NO: 197424 - DNA, 20 bp, Artificial Sequence
  Description of Artificial Sequence: Synthetic oligonucleotide
  Target: LAMA2; (-) strand; PAM type: YTN; PAM sequence: TTT
aatctaggtggggtacctta

SEQ ID NO: 197425 - DNA, 20 bp, Artificial Sequence
  Description of Artificial Sequence: Synthetic oligonucleotide
  Target: LAMA2; (-) strand; PAM type: YTN; PAM sequence: TTC
atttaatctaggtggggtac

SEQ ID NO: 197426 - DNA, 20 bp, Artificial Sequence
  Description of Artificial Sequence: Synthetic oligonucleotide
  Target: LAMA2; (-) strand; PAM type: YTN; PAM sequence: TTA
attcatttaatctaggtggg

SEQ ID NO: 197427 - DNA, 20 bp, Artificial Sequence
  Description of Artificial Sequence: Synthetic oligonucleotide
  Target: LAMA2; (-) strand; PAM type: YTN; PAM sequence: CTA
aacccaagtccaaaattaat

SEQ ID NO: 197428 - DNA, 20 bp, Artificial Sequence
  Description of Artificial Sequence: Synthetic oligonucleotide
  Target: LAMA2; (-) strand; PAM type: YTN; PAM sequence: CTG
ataaaaatgtaaatatctaa

SEQ ID NO: 197429 - DNA, 20 bp, Artificial Sequence
  Description of Artificial Sequence: Synthetic oligonucleotide
  Target: LAMA2; (-) strand; PAM type: YTN; PAM sequence: TTG
gggtgaacataagaagtcct

SEQ ID NO: 197430 - DNA, 20 bp, Artificial Sequence
  Description of Artificial Sequence: Synthetic oligonucleotide
  Target: LAMA2; (-) strand; PAM type: YTN; PAM sequence: TTT
ggggtgaacataagaagtcc

SEQ ID NO: 197431 - DNA, 20 bp, Artificial Sequence
  Description of Artificial Sequence: Synthetic oligonucleotide
  Target: LAMA2; (-) strand; PAM type: YTN; PAM sequence: CTT
tggggtgaacataagaagtc

SEQ ID NO: 197432 - DNA, 20 bp, Artificial Sequence
  Description of Artificial Sequence: Synthetic oligonucleotide
  Target: LAMA2; (-) strand; PAM type: YTN; PAM sequence: TTG
caaactttggggtgaacata

SEQ ID NO: 197433 - DNA, 20 bp, Artificial Sequence
  Description of Artificial Sequence: Synthetic oligonucleotide
  Target: LAMA2; (-) strand; PAM type: YTN; PAM sequence: TTT
gcaaactttggggtgaacat

SEQ ID NO: 197434 - DNA, 20 bp, Artificial Sequence
  Description of Artificial Sequence: Synthetic oligonucleotide
  Target: LAMA2; (-) strand; PAM type: YTN; PAM sequence: TTT
tgcaaactttggggtgaaca

SEQ ID NO: 197435 - DNA, 20 bp, Artificial Sequence
  Description of Artificial Sequence: Synthetic oligonucleotide
  Target: LAMA2; (-) strand; PAM type: YTN; PAM sequence: TTA
gatgagcattttgcaaactt

SEQ ID NO: 197436 - DNA, 20 bp, Artificial Sequence
  Description of Artificial Sequence: Synthetic oligonucleotide
  Target: LAMA2; (-) strand; PAM type: YTN; PAM sequence: TTT
agatgagcattttgcaaact

SEQ ID NO: 197437 - DNA, 20 bp, Artificial Sequence
  Description of Artificial Sequence: Synthetic oligonucleotide
  Target: LAMA2; (-) strand; PAM type: YTN; PAM sequence: TTT
tagatgagcattttgcaaac

SEQ ID NO: 197438 - DNA, 20 bp, Artificial Sequence
  Description of Artificial Sequence: Synthetic oligonucleotide
  Target: LAMA2; (-) strand; PAM type: YTN; PAM sequence: TTA
ttttagatgagcattttgca

SEQ ID NO: 197439 - DNA, 20 bp, Artificial Sequence
  Description of Artificial Sequence: Synthetic oligonucleotide
  Target: LAMA2; (-) strand; PAM type: YTN; PAM sequence: CTT
attttagatgagcattttgc

SEQ ID NO: 197440 - DNA, 20 bp, Artificial Sequence
  Description of Artificial Sequence: Synthetic oligonucleotide
  Target: LAMA2; (-) strand; PAM type: YTN; PAM sequence: TTC
ttattttagatgagcatttt

SEQ ID NO: 197441 - DNA, 20 bp, Artificial Sequence
  Description of Artificial Sequence: Synthetic oligonucleotide
  Target: LAMA2; (-) strand; PAM type: YTN; PAM sequence: TTT
cttattttagatgagcattt

SEQ ID NO: 197442 - DNA, 20 bp, Artificial Sequence
  Description of Artificial Sequence: Synthetic oligonucleotide
  Target: LAMA2; (-) strand; PAM type: YTN; PAM sequence: CTT
tcttattttagatgagcatt

SEQ ID NO: 197443 - DNA, 20 bp, Artificial Sequence
  Description of Artificial Sequence: Synthetic oligonucleotide
  Target: LAMA2; (-) strand; PAM type: YTN; PAM sequence: CTA
tcatctttcttattttagat

SEQ ID NO: 197444 - DNA, 20 bp, Artificial Sequence
  Description of Artificial Sequence: Synthetic oligonucleotide
  Target: LAMA2; (-) strand; PAM type: YTN; PAM sequence: CTA
gtaaacagaagatggatcag

SEQ ID NO: 197445 - DNA, 20 bp, Artificial Sequence
  Description of Artificial Sequence: Synthetic oligonucleotide
  Target: LAMA2; (-) strand; PAM type: YTN; PAM sequence: TTA
acctagtaaacagaagatgg

SEQ ID NO: 197446 - DNA, 20 bp, Artificial Sequence
  Description of Artificial Sequence: Synthetic oligonucleotide
  Target: LAMA2; (-) strand; PAM type: YTN; PAM sequence: TTT
aacctagtaaacagaagatg

SEQ ID NO: 197447 - DNA, 20 bp, Artificial Sequence
  Description of Artificial Sequence: Synthetic oligonucleotide
  Target: LAMA2; (-) strand; PAM type: YTN; PAM sequence: TTC
cagatttaacctagtaaaca

SEQ ID NO: 197448 - DNA, 20 bp, Artificial Sequence
  Description of Artificial Sequence: Synthetic oligonucleotide
  Target: LAMA2; (-) strand; PAM type: YTN; PAM sequence: TTT
ccagatttaacctagtaaac

SEQ ID NO: 197449 - DNA, 20 bp, Artificial Sequence
  Description of Artificial Sequence: Synthetic oligonucleotide
  Target: LAMA2; (-) strand; PAM type: YTN; PAM sequence: TTT
tccagatttaacctagtaaa

SEQ ID NO: 197450 - DNA, 20 bp, Artificial Sequence
  Description of Artificial Sequence: Synthetic oligonucleotide
  Target: LAMA2; (-) strand; PAM type: YTN; PAM sequence: TTA
tattttccagatttaaccta

SEQ ID NO: 197451 - DNA, 20 bp, Artificial Sequence
  Description of Artificial Sequence: Synthetic oligonucleotide
  Target: LAMA2; (-) strand; PAM type: YTN; PAM sequence: TTT
atattttccagatttaacct

SEQ ID NO: 197452 - DNA, 20 bp, Artificial Sequence
  Description of Artificial Sequence: Synthetic oligonucleotide
  Target: LAMA2; (-) strand; PAM type: YTN; PAM sequence: CTG
aggtttatattttccagatt

SEQ ID NO: 197453 - DNA, 20 bp, Artificial Sequence
  Description of Artificial Sequence: Synthetic oligonucleotide
  Target: LAMA2; (-) strand; PAM type: YTN; PAM sequence: CTG
gcacctgaggtttatatttt

SEQ ID NO: 197454 - DNA, 20 bp, Artificial Sequence
  Description of Artificial Sequence: Synthetic oligonucleotide
  Target: LAMA2; (-) strand; PAM type: YTN; PAM sequence: CTG
aagtctggcacctgaggttt

SEQ ID NO: 197455 - DNA, 20 bp, Artificial Sequence
  Description of Artificial Sequence: Synthetic oligonucleotide
  Target: LAMA2; (-) strand; PAM type: YTN; PAM sequence: CTC
tgaagtctggcacctgaggt

SEQ ID NO: 197456 - DNA, 20 bp, Artificial Sequence
  Description of Artificial Sequence: Synthetic oligonucleotide
  Target: LAMA2; (-) strand; PAM type: YTN; PAM sequence: CTA
tatccctctgaagtctggca

SEQ ID NO: 197457 - DNA, 20 bp, Artificial Sequence
  Description of Artificial Sequence: Synthetic oligonucleotide
  Target: LAMA2; (-) strand; PAM type: YTN; PAM sequence: TTC
tatatccctctgaagtctgg

SEQ ID NO: 197458 - DNA, 20 bp, Artificial Sequence
  Description of Artificial Sequence: Synthetic oligonucleotide
  Target: LAMA2; (-) strand; PAM type: YTN; PAM sequence: TTT
ctatatccctctgaagtctg

SEQ ID NO: 197459 - DNA, 20 bp, Artificial Sequence
  Description of Artificial Sequence: Synthetic oligonucleotide
  Target: LAMA2; (-) strand; PAM type: YTN; PAM sequence: TTT
tctatatccctctgaagtct

SEQ ID NO: 197460 - DNA, 20 bp, Artificial Sequence
  Description of Artificial Sequence: Synthetic oligonucleotide
  Target: LAMA2; (-) strand; PAM type: YTN; PAM sequence: TTT
ttctatatccctctgaagtc

SEQ ID NO: 197461 - DNA, 20 bp, Artificial Sequence
  Description of Artificial Sequence: Synthetic oligonucleotide
  Target: LAMA2; (-) strand; PAM type: YTN; PAM sequence: TTG
tttttctatatccctctgaa

SEQ ID NO: 197462 - DNA, 20 bp, Artificial Sequence
  Description of Artificial Sequence: Synthetic oligonucleotide
  Target: LAMA2; (-) strand; PAM type: YTN; PAM sequence: CTA
atgcaaaaagtaattgtttt

SEQ ID NO: 197463 - DNA, 20 bp, Artificial Sequence
  Description of Artificial Sequence: Synthetic oligonucleotide
  Target: LAMA2; (-) strand; PAM type: YTN; PAM sequence: TTA
gcaatgcaagaatggactaa

SEQ ID NO: 197464 - DNA, 20 bp, Artificial Sequence
  Description of Artificial Sequence: Synthetic oligonucleotide
  Target: LAMA2; (-) strand; PAM type: YTN; PAM sequence: TTT
agcaatgcaagaatggacta

SEQ ID NO: 197465 - DNA, 20 bp, Artificial Sequence
  Description of Artificial Sequence: Synthetic oligonucleotide
  Target: LAMA2; (-) strand; PAM type: YTN; PAM sequence: TTT
tagcaatgcaagaatggact

SEQ ID NO: 197466 - DNA, 20 bp, Artificial Sequence
  Description of Artificial Sequence: Synthetic oligonucleotide
  Target: LAMA2; (-) strand; PAM type: YTN; PAM sequence: TTA
ggattttagcaatgcaagaa

SEQ ID NO: 197467 - DNA, 20 bp, Artificial Sequence
  Description of Artificial Sequence: Synthetic oligonucleotide
  Target: LAMA2; (-) strand; PAM type: YTN; PAM sequence: TTT
aggattttagcaatgcaaga

SEQ ID NO: 197468 - DNA, 20 bp, Artificial Sequence
  Description of Artificial Sequence: Synthetic oligonucleotide
  Target: LAMA2; (-) strand; PAM type: YTN; PAM sequence: CTT
taggattttagcaatgcaag

SEQ ID NO: 197469 - DNA, 20 bp, Artificial Sequence
  Description of Artificial Sequence: Synthetic oligonucleotide
  Target: LAMA2; (-) strand; PAM type: YTN; PAM sequence: TTA
tccagtctttaggattttag

SEQ ID NO: 197470 - DNA, 20 bp, Artificial Sequence
  Description of Artificial Sequence: Synthetic oligonucleotide
  Target: LAMA2; (-) strand; PAM type: YTN; PAM sequence: TTA
gaaattatccagtctttagg

SEQ ID NO: 197471 - DNA, 20 bp, Artificial Sequence
  Description of Artificial Sequence: Synthetic oligonucleotide
  Target: LAMA2; (-) strand; PAM type: YTN; PAM sequence: TTT
agaaattatccagtctttag

SEQ ID NO: 197472 - DNA, 20 bp, Artificial Sequence
  Description of Artificial Sequence: Synthetic oligonucleotide
  Target: LAMA2; (-) strand; PAM type: YTN; PAM sequence: CTT
tagaaattatccagtcttta

SEQ ID NO: 197473 - DNA, 20 bp, Artificial Sequence
  Description of Artificial Sequence: Synthetic oligonucleotide
  Target: LAMA2; (-) strand; PAM type: YTN; PAM sequence: TTC
tttagaaattatccagtctt

SEQ ID NO: 197474 - DNA, 20 bp, Artificial Sequence
  Description of Artificial Sequence: Synthetic oligonucleotide
  Target: LAMA2; (-) strand; PAM type: YTN; PAM sequence: TTT
ctttagaaattatccagtct

SEQ ID NO: 197475 - DNA, 20 bp, Artificial Sequence
  Description of Artificial Sequence: Synthetic oligonucleotide
  Target: LAMA2; (-) strand; PAM type: YTN; PAM sequence: TTT
tctttagaaattatccagtc

SEQ ID NO: 197476 - DNA, 20 bp, Artificial Sequence
  Description of Artificial Sequence: Synthetic oligonucleotide
  Target: LAMA2; (-) strand; PAM type: YTN; PAM sequence: CTT
ttctttagaaattatccagt

SEQ ID NO: 197477 - DNA, 20 bp, Artificial Sequence
  Description of Artificial Sequence: Synthetic oligonucleotide
  Target: LAMA2; (-) strand; PAM type: YTN; PAM sequence: TTA
atcatcttttctttagaaat

SEQ ID NO: 197478 - DNA, 20 bp, Artificial Sequence
  Description of Artificial Sequence: Synthetic oligonucleotide
  Target: LAMA2; (-) strand; PAM type: YTN; PAM sequence: CTT
aatcatcttttctttagaaa

SEQ ID NO: 197479 - DNA, 20 bp, Artificial Sequence
  Description of Artificial Sequence: Synthetic oligonucleotide
  Target: LAMA2; (-) strand; PAM type: YTN; PAM sequence: CTG
catcccgccttaatcatctt

SEQ ID NO: 197480 - DNA, 20 bp, Artificial Sequence
  Description of Artificial Sequence: Synthetic oligonucleotide
  Target: LAMA2; (-) strand; PAM type: YTN; PAM sequence: TTA
caggcgtgagccactgcatc

SEQ ID NO: 197481 - DNA, 20 bp, Artificial Sequence
  Description of Artificial Sequence: Synthetic oligonucleotide
  Target: LAMA2; (-) strand; PAM type: YTN; PAM sequence: CTG
ggattacaggcgtgagccac

SEQ ID NO: 197482 - DNA, 20 bp, Artificial Sequence
  Description of Artificial Sequence: Synthetic oligonucleotide
  Target: LAMA2; (-) strand; PAM type: YTN; PAM sequence: CTC
ccaaaatcctgggattacag

SEQ ID NO: 197483 - DNA, 20 bp, Artificial Sequence
  Description of Artificial Sequence: Synthetic oligonucleotide
  Target: LAMA2; (-) strand; PAM type: YTN; PAM sequence: CTC
ggcctcccaaaatcctggga

SEQ ID NO: 197484 - DNA, 20 bp, Artificial Sequence
  Description of Artificial Sequence: Synthetic oligonucleotide
  Target: LAMA2; (-) strand; PAM type: YTN; PAM sequence: CTC
acctcggcctcccaaaatcc

SEQ ID NO: 197485 - DNA, 20 bp, Artificial Sequence
  Description of Artificial Sequence: Synthetic oligonucleotide
  Target: LAMA2; (-) strand; PAM type: YTN; PAM sequence: CTG
ctcacctcggcctcccaaaa

SEQ ID NO: 197486 - DNA, 20 bp, Artificial Sequence
  Description of Artificial Sequence: Synthetic oligonucleotide
  Target: LAMA2; (-) strand; PAM type: YTN; PAM sequence: CTG
acatcgtggtctgctcacct

SEQ ID NO: 197487 - DNA, 20 bp, Artificial Sequence
  Description of Artificial Sequence: Synthetic oligonucleotide
  Target: LAMA2; (-) strand; PAM type: YTN; PAM sequence: CTC
ctgacatcgtggtctgctca

SEQ ID NO: 197488 - DNA, 20 bp, Artificial Sequence
  Description of Artificial Sequence: Synthetic oligonucleotide
  Target: LAMA2; (-) strand; PAM type: YTN; PAM sequence: TTG
aactcctgacatcgtggtct

SEQ ID NO: 197489 - DNA, 20 bp, Artificial Sequence
  Description of Artificial Sequence: Synthetic oligonucleotide
  Target: LAMA2; (-) strand; PAM type: YTN; PAM sequence: CTT
gaactcctgacatcgtggtc

SEQ ID NO: 197490 - DNA, 20 bp, Artificial Sequence
  Description of Artificial Sequence: Synthetic oligonucleotide
  Target: LAMA2; (-) strand; PAM type: YTN; PAM sequence: CTG
gtcttgaactcctgacatcg

SEQ ID NO: 197491 - DNA, 20 bp, Artificial Sequence
  Description of Artificial Sequence: Synthetic oligonucleotide
  Target: LAMA2; (-) strand; PAM type: YTN; PAM sequence: TTG
gccaggctggtcttgaactc

SEQ ID NO: 197492 - DNA, 20 bp, Artificial Sequence
  Description of Artificial Sequence: Synthetic oligonucleotide
  Target: LAMA2; (-) strand; PAM type: YTN; PAM sequence: TTC
accatgttggccaggctggt

SEQ ID NO: 197493 - DNA, 20 bp, Artificial Sequence
  Description of Artificial Sequence: Synthetic oligonucleotide
  Target: LAMA2; (-) strand; PAM type: YTN; PAM sequence: TTT
caccatgttggccaggctgg

SEQ ID NO: 197494 - DNA, 20 bp, Artificial Sequence
  Description of Artificial Sequence: Synthetic oligonucleotide
  Target: LAMA2; (-) strand; PAM type: YTN; PAM sequence: TTA
gcagagacgaggtttcacca

SEQ ID NO: 197495 - DNA, 20 bp, Artificial Sequence
  Description of Artificial Sequence: Synthetic oligonucleotide
  Target: LAMA2; (-) strand; PAM type: YTN; PAM sequence: TTT
agcagagacgaggtttcacc

SEQ ID NO: 197496 - DNA, 20 bp, Artificial Sequence
  Description of Artificial Sequence: Synthetic oligonucleotide
  Target: LAMA2; (-) strand; PAM type: YTN; PAM sequence: TTT
tagcagagacgaggtttcac

SEQ ID NO: 197497 - DNA, 20 bp, Artificial Sequence
  Description of Artificial Sequence: Synthetic oligonucleotide
  Target: LAMA2; (-) strand; PAM type: YTN; PAM sequence: CTT
ttagcagagacgaggtttca

SEQ ID NO: 197498 - DNA, 20 bp, Artificial Sequence
  Description of Artificial Sequence: Synthetic oligonucleotide
  Target: LAMA2; (-) strand; PAM type: YTN; PAM sequence: CTA
cttttagcagagacgaggtt

SEQ ID NO: 197499 - DNA, 20 bp, Artificial Sequence
  Description of Artificial Sequence: Synthetic oligonucleotide
  Target: LAMA2; (-) strand; PAM type: YTN; PAM sequence: TTC
tacttttagcagagacgagg

SEQ ID NO: 197500 - DNA, 20 bp, Artificial Sequence
  Description of Artificial Sequence: Synthetic oligonucleotide
  Target: LAMA2; (-) strand; PAM type: YTN; PAM sequence: TTT
ctacttttagcagagacgag

SEQ ID NO: 197501 - DNA, 20 bp, Artificial Sequence
  Description of Artificial Sequence: Synthetic oligonucleotide
  Target: LAMA2; (-) strand; PAM type: YTN; PAM sequence: TTT
tctacttttagcagagacga

SEQ ID NO: 197502 - DNA, 20 bp, Artificial Sequence
  Description of Artificial Sequence: Synthetic oligonucleotide
  Target: LAMA2; (-) strand; PAM type: YTN; PAM sequence: TTT
ttctacttttagcagagacg

SEQ ID NO: 197503 - DNA, 20 bp, Artificial Sequence
  Description of Artificial Sequence: Synthetic oligonucleotide
  Target: LAMA2; (-) strand; PAM type: YTN; PAM sequence: TTT
tttctacttttagcagagac

SEQ ID NO: 197504 - DNA, 20 bp, Artificial Sequence
  Description of Artificial Sequence: Synthetic oligonucleotide
  Target: LAMA2; (-) strand; PAM type: YTN; PAM sequence: TTT
ttttctacttttagcagaga

SEQ ID NO: 197505 - DNA, 20 bp, Artificial Sequence
  Description of Artificial Sequence: Synthetic oligonucleotide
  Target: LAMA2; (-) strand; PAM type: YTN; PAM sequence: TTT
tttttctacttttagcagag

SEQ ID NO: 197506 - DNA, 20 bp, Artificial Sequence
  Description of Artificial Sequence: Synthetic oligonucleotide
  Target: LAMA2; (-) strand; PAM type: YTN; PAM sequence: TTT
ttttttctacttttagcaga

SEQ ID NO: 197507 - DNA, 20 bp, Artificial Sequence
  Description of Artificial Sequence: Synthetic oligonucleotide
  Target: LAMA2; (-) strand; PAM type: YTN; PAM sequence: TTT
tttttttctacttttagcag

SEQ ID NO: 197508 - DNA, 20 bp, Artificial Sequence
  Description of Artificial Sequence: Synthetic oligonucleotide
  Target: LAMA2; (-) strand; PAM type: YTN; PAM sequence: TTT
ttttttttctacttttagca

SEQ ID NO: 197509 - DNA, 20 bp, Artificial Sequence
  Description of Artificial Sequence: Synthetic oligonucleotide
  Target: LAMA2; (-) strand; PAM type: YTN; PAM sequence: TTT
tttttttttctacttttagc

SEQ ID NO: 197510 - DNA, 20 bp, Artificial Sequence
  Description of Artificial Sequence: Synthetic oligonucleotide
  Target: LAMA2; (-) strand; PAM type: YTN; PAM sequence: TTT
ttttttttttctacttttag

SEQ ID NO: 197511 - DNA, 20 bp, Artificial Sequence
  Description of Artificial Sequence: Synthetic oligonucleotide
  Target: LAMA2; (-) strand; PAM type: YTN; PAM sequence: TTT
tttttttttttctactttta

SEQ ID NO: 197512 - DNA, 20 bp, Artificial Sequence
  Description of Artificial Sequence: Synthetic oligonucleotide
  Target: LAMA2; (-) strand; PAM type: YTN; PAM sequence: CTT
ttttttttttttctactttt

SEQ ID NO: 197513 - DNA, 20 bp, Artificial Sequence
  Description of Artificial Sequence: Synthetic oligonucleotide
  Target: LAMA2; (-) strand; PAM type: YTN; PAM sequence: TTC
ttttttttttttttctactt

SEQ ID NO: 197514 - DNA, 20 bp, Artificial Sequence
  Description of Artificial Sequence: Synthetic oligonucleotide
  Target: LAMA2; (-) strand; PAM type: YTN; PAM sequence: CTT
cttttttttttttttctact

SEQ ID NO: 197515 - DNA, 20 bp, Artificial Sequence
  Description of Artificial Sequence: Synthetic oligonucleotide
  Target: LAMA2; (-) strand; PAM type: YTN; PAM sequence: TTC
ttcttttttttttttttcta

SEQ ID NO: 197516 - DNA, 20 bp, Artificial Sequence
  Description of Artificial Sequence: Synthetic oligonucleotide
  Target: LAMA2; (-) strand; PAM type: YTN; PAM sequence: TTT
cttcttttttttttttttct

SEQ ID NO: 197517 - DNA, 20 bp, Artificial Sequence
  Description of Artificial Sequence: Synthetic oligonucleotide
  Target: LAMA2; (-) strand; PAM type: YTN; PAM sequence: CTT
tcttcttttttttttttttc

SEQ ID NO: 197518 - DNA, 20 bp, Artificial Sequence
  Description of Artificial Sequence: Synthetic oligonucleotide
  Target: LAMA2; (-) strand; PAM type: YTN; PAM sequence: TTC
tttcttcttttttttttttt

SEQ ID NO: 197519 - DNA, 20 bp, Artificial Sequence
  Description of Artificial Sequence: Synthetic oligonucleotide
  Target: LAMA2; (-) strand; PAM type: YTN; PAM sequence: TTT
ctttcttctttttttttttt

SEQ ID NO: 197520 - DNA, 20 bp, Artificial Sequence
  Description of Artificial Sequence: Synthetic oligonucleotide
  Target: LAMA2; (-) strand; PAM type: YTN; PAM sequence: CTT
tctttcttcttttttttttt

SEQ ID NO: 197521 - DNA, 20 bp, Artificial Sequence
  Description of Artificial Sequence: Synthetic oligonucleotide
  Target: LAMA2; (-) strand; PAM type: YTN; PAM sequence: TTC
tttctttcttcttttttttt

SEQ ID NO: 197522 - DNA, 20 bp, Artificial Sequence
  Description of Artificial Sequence: Synthetic oligonucleotide
  Target: LAMA2; (-) strand; PAM type: YTN; PAM sequence: TTT
ctttctttcttctttttttt

SEQ ID NO: 197523 - DNA, 20 bp, Artificial Sequence
  Description of Artificial Sequence: Synthetic oligonucleotide
  Target: LAMA2; (-) strand; PAM type: YTN; PAM sequence: TTT
tctttctttcttcttttttt

SEQ ID NO: 197524 - DNA, 20 bp, Artificial Sequence
  Description of Artificial Sequence: Synthetic oligonucleotide
  Target: LAMA2; (-) strand; PAM type: YTN; PAM sequence: CTT
ttctttctttcttctttttt

SEQ ID NO: 197525 - DNA, 20 bp, Artificial Sequence
  Description of Artificial Sequence: Synthetic oligonucleotide
  Target: LAMA2; (-) strand; PAM type: YTN; PAM sequence: TTA
atcgtcttttctttctttct

SEQ ID NO: 197526 - DNA, 20 bp, Artificial Sequence
  Description of Artificial Sequence: Synthetic oligonucleotide
  Target: LAMA2; (-) strand; PAM type: YTN; PAM sequence: CTT
aatcgtcttttctttctttc

SEQ ID NO: 197527 - DNA, 20 bp, Artificial Sequence
  Description of Artificial Sequence: Synthetic oligonucleotide
  Target: LAMA2; (-) strand; PAM type: YTN; PAM sequence: CTA
gaaccacttaatcgtctttt

SEQ ID NO: 197528 - DNA, 20 bp, Artificial Sequence
  Description of Artificial Sequence: Synthetic oligonucleotide
  Target: LAMA2; (-) strand; PAM type: YTN; PAM sequence: CTG
tagaatctagaaccacttaa

SEQ ID NO: 197529 - DNA, 20 bp, Artificial Sequence
  Description of Artificial Sequence: Synthetic oligonucleotide
  Target: LAMA2; (-) strand; PAM type: YTN; PAM sequence: CTG
tacagcctgtagaatctaga

SEQ ID NO: 197530 - DNA, 20 bp, Artificial Sequence
  Description of Artificial Sequence: Synthetic oligonucleotide
  Target: LAMA2; (-) strand; PAM type: YTN; PAM sequence: TTC
ctgtacagcctgtagaatct

SEQ ID NO: 197531 - DNA, 20 bp, Artificial Sequence
  Description of Artificial Sequence: Synthetic oligonucleotide
  Target: LAMA2; (-) strand; PAM type: YTN; PAM sequence: CTT
cctgtacagcctgtagaatc

SEQ ID NO: 197532 - DNA, 20 bp, Artificial Sequence
  Description of Artificial Sequence: Synthetic oligonucleotide
  Target: LAMA2; (-) strand; PAM type: YTN; PAM sequence: TTG
tgcttcctgtacagcctgta

SEQ ID NO: 197533 - DNA, 20 bp, Artificial Sequence
  Description of Artificial Sequence: Synthetic oligonucleotide
  Target: LAMA2; (-) strand; PAM type: YTN; PAM sequence: CTG
ttgtgcttcctgtacagcct

SEQ ID NO: 197534 - DNA, 20 bp, Artificial Sequence
  Description of Artificial Sequence: Synthetic oligonucleotide
  Target: LAMA2; (-) strand; PAM type: YTN; PAM sequence: CTC
cccagaggcagatgctgttg

SEQ ID NO: 197535 - DNA, 20 bp, Artificial Sequence
  Description of Artificial Sequence: Synthetic oligonucleotide
  Target: LAMA2; (-) strand; PAM type: YTN; PAM sequence: CTG
aggcctccccagaggcagat

SEQ ID NO: 197536 - DNA, 20 bp, Artificial Sequence
  Description of Artificial Sequence: Synthetic oligonucleotide
  Target: LAMA2; (-) strand; PAM type: YTN; PAM sequence: TTC
ctgaggcctccccagaggca

SEQ ID NO: 197537 - DNA, 20 bp, Artificial Sequence
  Description of Artificial Sequence: Synthetic oligonucleotide
  Target: LAMA2; (-) strand; PAM type: YTN; PAM sequence: CTT
cctgaggcctccccagaggc

SEQ ID NO: 197538 - DNA, 20 bp, Artificial Sequence
  Description of Artificial Sequence: Synthetic oligonucleotide
  Target: LAMA2; (-) strand; PAM type: YTN; PAM sequence: TTG
gaagcttcctgaggcctccc

SEQ ID NO: 197539 - DNA, 20 bp, Artificial Sequence
  Description of Artificial Sequence: Synthetic oligonucleotide
  Target: LAMA2; (-) strand; PAM type: YTN; PAM sequence: CTG
ccatgattggaagcttcctg

SEQ ID NO: 197540 - DNA, 20 bp, Artificial Sequence
  Description of Artificial Sequence: Synthetic oligonucleotide
  Target: LAMA2; (-) strand; PAM type: YTN; PAM sequence: TTC
tgccatgattggaagcttcc

SEQ ID NO: 197541 - DNA, 20 bp, Artificial Sequence
  Description of Artificial Sequence: Synthetic oligonucleotide
  Target: LAMA2; (-) strand; PAM type: YTN; PAM sequence: CTT
ctgccatgattggaagcttc

SEQ ID NO: 197542 - DNA, 20 bp, Artificial Sequence
  Description of Artificial Sequence: Synthetic oligonucleotide
  Target: LAMA2; (-) strand; PAM type: YTN; PAM sequence: TTA
accttctgccatgattggaa

SEQ ID NO: 197543 - DNA, 20 bp, Artificial Sequence
  Description of Artificial Sequence: Synthetic oligonucleotide
  Target: LAMA2; (-) strand; PAM type: YTN; PAM sequence: CTT
aaccttctgccatgattgga

SEQ ID NO: 197544 - DNA, 20 bp, Artificial Sequence
  Description of Artificial Sequence: Synthetic oligonucleotide
  Target: LAMA2; (-) strand; PAM type: YTN; PAM sequence: CTC
cttaaccttctgccatgatt

SEQ ID NO: 197545 - DNA, 20 bp, Artificial Sequence
  Description of Artificial Sequence: Synthetic oligonucleotide
  Target: LAMA2; (-) strand; PAM type: YTN; PAM sequence: CTC
ctccttaaccttctgccatg

SEQ ID NO: 197546 - DNA, 20 bp, Artificial Sequence
  Description of Artificial Sequence: Synthetic oligonucleotide
  Target: LAMA2; (-) strand; PAM type: YTN; PAM sequence: CTG
ctcctccttaaccttctgcc

SEQ ID NO: 197547 - DNA, 20 bp, Artificial Sequence
  Description of Artificial Sequence: Synthetic oligonucleotide
  Target: LAMA2; (-) strand; PAM type: YTN; PAM sequence: TTA
tgcagtgtggcatgcctgct

SEQ ID NO: 197548 - DNA, 20 bp, Artificial Sequence
  Description of Artificial Sequence: Synthetic oligonucleotide
  Target: LAMA2; (-) strand; PAM type: YTN; PAM sequence: TTT
atgcagtgtggcatgcctgc

SEQ ID NO: 197549 - DNA, 20 bp, Artificial Sequence
  Description of Artificial Sequence: Synthetic oligonucleotide
  Target: LAMA2; (-) strand; PAM type: YTN; PAM sequence: CTG
tttatgcagtgtggcatgcc

SEQ ID NO: 197550 - DNA, 20 bp, Artificial Sequence
  Description of Artificial Sequence: Synthetic oligonucleotide
  Target: LAMA2; (-) strand; PAM type: YTN; PAM sequence: CTC
ctgtttatgcagtgtggcat

SEQ ID NO: 197551 - DNA, 20 bp, Artificial Sequence
  Description of Artificial Sequence: Synthetic oligonucleotide
  Target: LAMA2; (-) strand; PAM type: YTN; PAM sequence: TTG
ctcctgtttatgcagtgtgg

SEQ ID NO: 197552 - DNA, 20 bp, Artificial Sequence
  Description of Artificial Sequence: Synthetic oligonucleotide
  Target: LAMA2; (-) strand; PAM type: YTN; PAM sequence: CTT
gctcctgtttatgcagtgtg

SEQ ID NO: 197553 - DNA, 20 bp, Artificial Sequence
  Description of Artificial Sequence: Synthetic oligonucleotide
  Target: LAMA2; (-) strand; PAM type: YTN; PAM sequence: CTC
ttgctcctgtttatgcagtg

SEQ ID NO: 197554 - DNA, 20 bp, Artificial Sequence
  Description of Artificial Sequence: Synthetic oligonucleotide
  Target: LAMA2; (-) strand; PAM type: YTN; PAM sequence: CTC
tcttgctcctgtttatgcag

SEQ ID NO: 197555 - DNA, 20 bp, Artificial Sequence
  Description of Artificial Sequence: Synthetic oligonucleotide
  Target: LAMA2; (-) strand; PAM type: YTN; PAM sequence: CTC
tctcttgctcctgtttatgc

SEQ ID NO: 197556 - DNA, 20 bp, Artificial Sequence
  Description of Artificial Sequence: Synthetic oligonucleotide
  Target: LAMA2; (-) strand; PAM type: YTN; PAM sequence: TTC
ccactctctcttgctcctgt

SEQ ID NO: 197557 - DNA, 20 bp, Artificial Sequence
  Description of Artificial Sequence: Synthetic oligonucleotide
  Target: LAMA2; (-) strand; PAM type: YTN; PAM sequence: CTT
cccactctctcttgctcctg

SEQ ID NO: 197558 - DNA, 20 bp, Artificial Sequence
  Description of Artificial Sequence: Synthetic oligonucleotide
  Target: LAMA2; (-) strand; PAM type: YTN; PAM sequence: TTA
aagtatgtagcaccttccca

SEQ ID NO: 197559 - DNA, 20 bp, Artificial Sequence
  Description of Artificial Sequence: Synthetic oligonucleotide
  Target: LAMA2; (-) strand; PAM type: YTN; PAM sequence: TTT
aaagtatgtagcaccttccc

SEQ ID NO: 197560 - DNA, 20 bp, Artificial Sequence
  Description of Artificial Sequence: Synthetic oligonucleotide
  Target: LAMA2; (-) strand; PAM type: YTN; PAM sequence: TTT
taaagtatgtagcaccttcc

SEQ ID NO: 197561 - DNA, 20 bp, Artificial Sequence
  Description of Artificial Sequence: Synthetic oligonucleotide
  Target: LAMA2; (-) strand; PAM type: YTN; PAM sequence: CTC
atgaggtcattttaaagtat

SEQ ID NO: 197562 - DNA, 20 bp, Artificial Sequence
  Description of Artificial Sequence: Synthetic oligonucleotide
  Target: LAMA2; (-) strand; PAM type: YTN; PAM sequence: TTC
tcatgaggtcattttaaagt

SEQ ID NO: 197563 - DNA, 20 bp, Artificial Sequence
  Description of Artificial Sequence: Synthetic oligonucleotide
  Target: LAMA2; (-) strand; PAM type: YTN; PAM sequence: CTC
atgacagtgagttctcatga

SEQ ID NO: 197564 - DNA, 20 bp, Artificial Sequence
  Description of Artificial Sequence: Synthetic oligonucleotide
  Target: LAMA2; (-) strand; PAM type: YTN; PAM sequence: CTG
tcctcatgacagtgagttct

SEQ ID NO: 197565 - DNA, 20 bp, Artificial Sequence
  Description of Artificial Sequence: Synthetic oligonucleotide
  Target: LAMA2; (-) strand; PAM type: YTN; PAM sequence: TTG
gaactgtcctcatgacagtg

SEQ ID NO: 197566 - DNA, 20 bp, Artificial Sequence
  Description of Artificial Sequence: Synthetic oligonucleotide
  Target: LAMA2; (-) strand; PAM type: YTN; PAM sequence: CTT
ggaactgtcctcatgacagt

SEQ ID NO: 197567 - DNA, 20 bp, Artificial Sequence
  Description of Artificial Sequence: Synthetic oligonucleotide
  Target: LAMA2; (-) strand; PAM type: YTN; PAM sequence: TTA
gcaccatcccccttggaact

SEQ ID NO: 197568 - DNA, 20 bp, Artificial Sequence
  Description of Artificial Sequence: Synthetic oligonucleotide
  Target: LAMA2; (-) strand; PAM type: YTN; PAM sequence: TTT
agcaccatcccccttggaac

SEQ ID NO: 197569 - DNA, 20 bp, Artificial Sequence
  Description of Artificial Sequence: Synthetic oligonucleotide
  Target: LAMA2; (-) strand; PAM type: YTN; PAM sequence: CTC
ataagtggtttagcaccatc

SEQ ID NO: 197570 - DNA, 20 bp, Artificial Sequence
  Description of Artificial Sequence: Synthetic oligonucleotide
  Target: LAMA2; (-) strand; PAM type: YTN; PAM sequence: TTC
tcataagtggtttagcacca

SEQ ID NO: 197571 - DNA, 20 bp, Artificial Sequence
  Description of Artificial Sequence: Synthetic oligonucleotide
  Target: LAMA2; (-) strand; PAM type: YTN; PAM sequence: TTT
ctcataagtggtttagcacc

SEQ ID NO: 197572 - DNA, 20 bp, Artificial Sequence
  Description of Artificial Sequence: Synthetic oligonucleotide
  Target: LAMA2; (-) strand; PAM type: YTN; PAM sequence: CTG
atttctcataagtggtttag

SEQ ID NO: 197573 - DNA, 20 bp, Artificial Sequence
  Description of Artificial Sequence: Synthetic oligonucleotide
  Target: LAMA2; (-) strand; PAM type: YTN; PAM sequence: TTG
gagaataggggctgatttct

SEQ ID NO: 197574 - DNA, 20 bp, Artificial Sequence
  Description of Artificial Sequence: Synthetic oligonucleotide
  Target: LAMA2; (-) strand; PAM type: YTN; PAM sequence: CTG
gtgggagatgattggagaat

SEQ ID NO: 197575 - DNA, 20 bp, Artificial Sequence
  Description of Artificial Sequence: Synthetic oligonucleotide
  Target: LAMA2; (-) strand; PAM type: YTN; PAM sequence: TTA
ggggaggggcctggtgggag

SEQ ID NO: 197576 - DNA, 20 bp, Artificial Sequence
  Description of Artificial Sequence: Synthetic oligonucleotide
  Target: LAMA2; (-) strand; PAM type: YTN; PAM sequence: CTC
caatgttaggggaggggcct

SEQ ID NO: 197577 - DNA, 20 bp, Artificial Sequence
  Description of Artificial Sequence: Synthetic oligonucleotide
  Target: LAMA2; (-) strand; PAM type: YTN; PAM sequence: TTG
aaatgtaatctccaatgtta

SEQ ID NO: 197578 - DNA, 20 bp, Artificial Sequence
  Description of Artificial Sequence: Synthetic oligonucleotide
  Target: LAMA2; (-) strand; PAM type: YTN; PAM sequence: CTC
gtattgaaatgtaatctcca

SEQ ID NO: 197579 - DNA, 20 bp, Artificial Sequence
  Description of Artificial Sequence: Synthetic oligonucleotide
  Target: LAMA2; (-) strand; PAM type: YTN; PAM sequence: CTA
cccaaatctcgtattgaaat

SEQ ID NO: 197580 - DNA, 20 bp, Artificial Sequence
  Description of Artificial Sequence: Synthetic oligonucleotide
  Target: LAMA2; (-) strand; PAM type: YTN; PAM sequence: CTC
caaaagtgatataggatgtg

SEQ ID NO: 197581 - DNA, 20 bp, Artificial Sequence
  Description of Artificial Sequence: Synthetic oligonucleotide
  Target: LAMA2; (-) strand; PAM type: YTN; PAM sequence: TTC
tccaaaagtgatataggatg

SEQ ID NO: 197582 - DNA, 20 bp, Artificial Sequence
  Description of Artificial Sequence: Synthetic oligonucleotide
  Target: LAMA2; (-) strand; PAM type: YTN; PAM sequence: TTT
ctccaaaagtgatataggat

SEQ ID NO: 197583 - DNA, 20 bp, Artificial Sequence
  Description of Artificial Sequence: Synthetic oligonucleotide
  Target: LAMA2; (-) strand; PAM type: YTN; PAM sequence: CTT
tctccaaaagtgatatagga

SEQ ID NO: 197584 - DNA, 20 bp, Artificial Sequence
  Description of Artificial Sequence: Synthetic oligonucleotide
  Target: LAMA2; (-) strand; PAM type: YTN; PAM sequence: CTC
tttctccaaaagtgatatag

SEQ ID NO: 197585 - DNA, 20 bp, Artificial Sequence
  Description of Artificial Sequence: Synthetic oligonucleotide
  Target: LAMA2; (-) strand; PAM type: YTN; PAM sequence: CTC
cactctttctccaaaagtga

SEQ ID NO: 197586 - DNA, 20 bp, Artificial Sequence
  Description of Artificial Sequence: Synthetic oligonucleotide
  Target: LAMA2; (-) strand; PAM type: YTN; PAM sequence: CTA
cctccactctttctccaaaa

SEQ ID NO: 197587 - DNA, 20 bp, Artificial Sequence
  Description of Artificial Sequence: Synthetic oligonucleotide
  Target: LAMA2; (-) strand; PAM type: YTN; PAM sequence: TTC
agagctacctccactctttc

SEQ ID NO: 197588 - DNA, 20 bp, Artificial Sequence
  Description of Artificial Sequence: Synthetic oligonucleotide
  Target: LAMA2; (-) strand; PAM type: YTN; PAM sequence: CTT
cagagctacctccactcttt

SEQ ID NO: 197589 - DNA, 20 bp, Artificial Sequence
  Description of Artificial Sequence: Synthetic oligonucleotide
  Target: LAMA2; (-) strand; PAM type: YTN; PAM sequence: CTG
tgatgtaacaaaccttcaga

SEQ ID NO: 197590 - DNA, 20 bp, Artificial Sequence
  Description of Artificial Sequence: Synthetic oligonucleotide
  Target: LAMA2; (-) strand; PAM type: YTN; PAM sequence: CTC
aaatgctgtgatgtaacaaa

SEQ ID NO: 197591 - DNA, 20 bp, Artificial Sequence
  Description of Artificial Sequence: Synthetic oligonucleotide
  Target: LAMA2; (-) strand; PAM type: YTN; PAM sequence: TTC
ctcaaatgctgtgatgtaac

SEQ ID NO: 197592 - DNA, 20 bp, Artificial Sequence
  Description of Artificial Sequence: Synthetic oligonucleotide
  Target: LAMA2; (-) strand; PAM type: YTN; PAM sequence: TTG
ccatcaccccagccattcct

SEQ ID NO: 197593 - DNA, 20 bp, Artificial Sequence
  Description of Artificial Sequence: Synthetic oligonucleotide
  Target: LAMA2; (-) strand; PAM type: YTN; PAM sequence: TTT
gccatcaccccagccattcc

SEQ ID NO: 197594 - DNA, 20 bp, Artificial Sequence
  Description of Artificial Sequence: Synthetic oligonucleotide
  Target: LAMA2; (-) strand; PAM type: YTN; PAM sequence: CTG
tatgatatttgccatcaccc

SEQ ID NO: 197595 - DNA, 20 bp, Artificial Sequence
  Description of Artificial Sequence: Synthetic oligonucleotide
  Target: LAMA2; (-) strand; PAM type: YTN; PAM sequence: TTC
tgtatgatatttgccatcac

SEQ ID NO: 197596 - DNA, 20 bp, Artificial Sequence
  Description of Artificial Sequence: Synthetic oligonucleotide
  Target: LAMA2; (-) strand; PAM type: YTN; PAM sequence: CTT
ctgtatgatatttgccatca

SEQ ID NO: 197597 - DNA, 20 bp, Artificial Sequence
  Description of Artificial Sequence: Synthetic oligonucleotide
  Target: LAMA2; (-) strand; PAM type: YTN; PAM sequence: CTC
ttctgtatgatatttgccat

SEQ ID NO: 197598 - DNA, 20 bp, Artificial Sequence
  Description of Artificial Sequence: Synthetic oligonucleotide
  Target: LAMA2; (-) strand; PAM type: YTN; PAM sequence: CTG
ctcttctgtatgatatttgc

SEQ ID NO: 197599 - DNA, 20 bp, Artificial Sequence
  Description of Artificial Sequence: Synthetic oligonucleotide
  Target: LAMA2; (-) strand; PAM type: YTN; PAM sequence: CTA
cgcctgctcttctgtatgat

SEQ ID NO: 197600 - DNA, 20 bp, Artificial Sequence
  Description of Artificial Sequence: Synthetic oligonucleotide
  Target: LAMA2; (-) strand; PAM type: YTN; PAM sequence: TTG
tctacgcctgctcttctgta

SEQ ID NO: 197601 - DNA, 20 bp, Artificial Sequence
  Description of Artificial Sequence: Synthetic oligonucleotide
  Target: LAMA2; (-) strand; PAM type: YTN; PAM sequence: CTT
gtctacgcctgctcttctgt

SEQ ID NO: 197602 - DNA, 20 bp, Artificial Sequence
  Description of Artificial Sequence: Synthetic oligonucleotide
  Target: LAMA2; (-) strand; PAM type: YTN; PAM sequence: CTG
gtatatcttgtctacgcctg

SEQ ID NO: 197603 - DNA, 20 bp, Artificial Sequence
  Description of Artificial Sequence: Synthetic oligonucleotide
  Target: LAMA2; (-) strand; PAM type: YTN; PAM sequence: TTG
aaaacaactggtatatcttg

SEQ ID NO: 197604 - DNA, 20 bp, Artificial Sequence
  Description of Artificial Sequence: Synthetic oligonucleotide
  Target: LAMA2; (-) strand; PAM type: YTN; PAM sequence: TTT
gaaaacaactggtatatctt

SEQ ID NO: 197605 - DNA, 20 bp, Artificial Sequence
  Description of Artificial Sequence: Synthetic oligonucleotide
  Target: LAMA2; (-) strand; PAM type: YTN; PAM sequence: CTC
agatatttgaaaacaactgg

SEQ ID NO: 197606 - DNA, 20 bp, Artificial Sequence
  Description of Artificial Sequence: Synthetic oligonucleotide
  Target: LAMA2; (-) strand; PAM type: YTN; PAM sequence: TTC
tcagatatttgaaaacaact

SEQ ID NO: 197607 - DNA, 20 bp, Artificial Sequence
  Description of Artificial Sequence: Synthetic oligonucleotide
  Target: LAMA2; (-) strand; PAM type: YTN; PAM sequence: TTT
ctcagatatttgaaaacaac

SEQ ID NO: 197608 - DNA, 20 bp, Artificial Sequence
  Description of Artificial Sequence: Synthetic oligonucleotide
  Target: LAMA2; (-) strand; PAM type: YTN; PAM sequence: TTT
tctcagatatttgaaaacaa

SEQ ID NO: 197609 - DNA, 20 bp, Artificial Sequence
  Description of Artificial Sequence: Synthetic oligonucleotide
  Target: LAMA2; (-) strand; PAM type: YTN; PAM sequence: CTG
atattttctcagatatttga

SEQ ID NO: 197610 - DNA, 20 bp, Artificial Sequence
  Description of Artificial Sequence: Synthetic oligonucleotide
  Target: LAMA2; (-) strand; PAM type: YTN; PAM sequence: TTA
ctgatattttctcagatatt

SEQ ID NO: 197611 - DNA, 20 bp, Artificial Sequence
  Description of Artificial Sequence: Synthetic oligonucleotide
  Target: LAMA2; (-) strand; PAM type: YTN; PAM sequence: CTT
actgatattttctcagatat

SEQ ID NO: 197612 - DNA, 20 bp, Artificial Sequence
  Description of Artificial Sequence: Synthetic oligonucleotide
  Target: LAMA2; (-) strand; PAM type: YTN; PAM sequence: TTC
ttactgatattttctcagat

SEQ ID NO: 197613 - DNA, 20 bp, Artificial Sequence
  Description of Artificial Sequence: Synthetic oligonucleotide
  Target: LAMA2; (-) strand; PAM type: YTN; PAM sequence: CTT
cttactgatattttctcaga

SEQ ID NO: 197614 - DNA, 20 bp, Artificial Sequence
  Description of Artificial Sequence: Synthetic oligonucleotide
  Target: LAMA2; (-) strand; PAM type: YTN; PAM sequence: TTC
ttcttactgatattttctca

SEQ ID NO: 197615 - DNA, 20 bp, Artificial Sequence
  Description of Artificial Sequence: Synthetic oligonucleotide
  Target: LAMA2; (-) strand; PAM type: YTN; PAM sequence: CTT
cttcttactgatattttctc

SEQ ID NO: 197616 - DNA, 20 bp, Artificial Sequence
  Description of Artificial Sequence: Synthetic oligonucleotide
  Target: LAMA2; (-) strand; PAM type: YTN; PAM sequence: CTA
tacttcttcttactgatatt

SEQ ID NO: 197617 - DNA, 20 bp, Artificial Sequence
  Description of Artificial Sequence: Synthetic oligonucleotide
  Target: LAMA2; (-) strand; PAM type: YTN; PAM sequence: CTC
atgactatacttcttcttac

SEQ ID NO: 197618 - DNA, 20 bp, Artificial Sequence
  Description of Artificial Sequence: Synthetic oligonucleotide
  Target: LAMA2; (-) strand; PAM type: YTN; PAM sequence: TTA
ggcaagtgaggcacactcat

SEQ ID NO: 197619 - DNA, 20 bp, Artificial Sequence
  Description of Artificial Sequence: Synthetic oligonucleotide
  Target: LAMA2; (-) strand; PAM type: YTN; PAM sequence: TTT
aggcaagtgaggcacactca

SEQ ID NO: 197620 - DNA, 20 bp, Artificial Sequence
  Description of Artificial Sequence: Synthetic oligonucleotide
  Target: LAMA2; (-) strand; PAM type: YTN; PAM sequence: TTA
atcaaaatgtttaggcaagt

SEQ ID NO: 197621 - DNA, 20 bp, Artificial Sequence
  Description of Artificial Sequence: Synthetic oligonucleotide
  Target: LAMA2; (-) strand; PAM type: YTN; PAM sequence: TTT
aatcaaaatgtttaggcaag

SEQ ID NO: 197622 - DNA, 20 bp, Artificial Sequence
  Description of Artificial Sequence: Synthetic oligonucleotide
  Target: LAMA2; (-) strand; PAM type: YTN; PAM sequence: TTT
taatcaaaatgtttaggcaa

SEQ ID NO: 197623 - DNA, 20 bp, Artificial Sequence
  Description of Artificial Sequence: Synthetic oligonucleotide
  Target: LAMA2; (-) strand; PAM type: YTN; PAM sequence: TTT
ttaatcaaaatgtttaggca

SEQ ID NO: 197624 - DNA, 20 bp, Artificial Sequence
  Description of Artificial Sequence: Synthetic oligonucleotide
  Target: LAMA2; (-) strand; PAM type: YTN; PAM sequence: CTA
aaatgcatttttaatcaaaa

SEQ ID NO: 197625 - DNA, 20 bp, Artificial Sequence
  Description of Artificial Sequence: Synthetic oligonucleotide
  Target: LAMA2; (-) strand; PAM type: YTN; PAM sequence: CTA
ctaaaatgcatttttaatca

SEQ ID NO: 197626 - DNA, 20 bp, Artificial Sequence
  Description of Artificial Sequence: Synthetic oligonucleotide
  Target: LAMA2; (-) strand; PAM type: YTN; PAM sequence: TTA
aatctactaaaatgcatttt

SEQ ID NO: 197627 - DNA, 20 bp, Artificial Sequence
  Description of Artificial Sequence: Synthetic oligonucleotide
  Target: LAMA2; (-) strand; PAM type: YTN; PAM sequence: TTA
acagatggtcaccagaggaa

SEQ ID NO: 197628 - DNA, 20 bp, Artificial Sequence
  Description of Artificial Sequence: Synthetic oligonucleotide
  Target: LAMA2; (-) strand; PAM type: YTN; PAM sequence: TTT
aacagatggtcaccagagga

SEQ ID NO: 197629 - DNA, 20 bp, Artificial Sequence
  Description of Artificial Sequence: Synthetic oligonucleotide
  Target: LAMA2; (-) strand; PAM type: YTN; PAM sequence: TTT
taacagatggtcaccagagg

SEQ ID NO: 197630 - DNA, 20 bp, Artificial Sequence
  Description of Artificial Sequence: Synthetic oligonucleotide
  Target: LAMA2; (-) strand; PAM type: YTN; PAM sequence: TTT
ttaacagatggtcaccagag

SEQ ID NO: 197631 - DNA, 20 bp, Artificial Sequence
  Description of Artificial Sequence: Synthetic oligonucleotide
  Target: LAMA2; (-) strand; PAM type: YTN; PAM sequence: TTA
aaaatttttaacagatggtc

SEQ ID NO: 197632 - DNA, 20 bp, Artificial Sequence
  Description of Artificial Sequence: Synthetic oligonucleotide
  Target: LAMA2; (-) strand; PAM type: YTN; PAM sequence: TTT
aaaaatttttaacagatggt

SEQ ID NO: 197633 - DNA, 20 bp, Artificial Sequence
  Description of Artificial Sequence: Synthetic oligonucleotide
  Target: LAMA2; (-) strand; PAM type: YTN; PAM sequence: TTT
taaaaatttttaacagatgg

SEQ ID NO: 197634 - DNA, 20 bp, Artificial Sequence
  Description of Artificial Sequence: Synthetic oligonucleotide
  Target: LAMA2; (-) strand; PAM type: YTN; PAM sequence: TTC
ataggtcaaggttttaaaaa

SEQ ID NO: 197635 - DNA, 20 bp, Artificial Sequence
  Description of Artificial Sequence: Synthetic oligonucleotide
  Target: LAMA2; (-) strand; PAM type: YTN; PAM sequence: TTT
cataggtcaaggttttaaaa

SEQ ID NO: 197636 - DNA, 20 bp, Artificial Sequence
  Description of Artificial Sequence: Synthetic oligonucleotide
  Target: LAMA2; (-) strand; PAM type: YTN; PAM sequence: TTT
tcataggtcaaggttttaaa

SEQ ID NO: 197637 - DNA, 20 bp, Artificial Sequence
  Description of Artificial Sequence: Synthetic oligonucleotide
  Target: LAMA2; (-) strand; PAM type: YTN; PAM sequence: TTT
ttcataggtcaaggttttaa

SEQ ID NO: 197638 - DNA, 20 bp, Artificial Sequence
  Description of Artificial Sequence: Synthetic oligonucleotide
  Target: LAMA2; (-) strand; PAM type: YTN; PAM sequence: TTT
tttcataggtcaaggtttta

SEQ ID NO: 197639 - DNA, 20 bp, Artificial Sequence
  Description of Artificial Sequence: Synthetic oligonucleotide
  Target: LAMA2; (-) strand; PAM type: YTN; PAM sequence: CTG
acaaattttttcataggtca

SEQ ID NO: 197640 - DNA, 20 bp, Artificial Sequence
  Description of Artificial Sequence: Synthetic oligonucleotide
  Target: LAMA2; (-) strand; PAM type: YTN; PAM sequence: TTA
ctgacaaattttttcatagg

SEQ ID NO: 197641 - DNA, 20 bp, Artificial Sequence
  Description of Artificial Sequence: Synthetic oligonucleotide
  Target: LAMA2; (-) strand; PAM type: YTN; PAM sequence: CTT
actgacaaattttttcatag

SEQ ID NO: 197642 - DNA, 20 bp, Artificial Sequence
  Description of Artificial Sequence: Synthetic oligonucleotide
  Target: LAMA2; (-) strand; PAM type: YTN; PAM sequence: TTG
gtacaacaaatgcatcttac

SEQ ID NO: 197643 - DNA, 20 bp, Artificial Sequence
  Description of Artificial Sequence: Synthetic oligonucleotide
  Target: LAMA2; (-) strand; PAM type: YTN; PAM sequence: TTT
ggtacaacaaatgcatctta

SEQ ID NO: 197644 - DNA, 20 bp, Artificial Sequence
  Description of Artificial Sequence: Synthetic oligonucleotide
  Target: LAMA2; (-) strand; PAM type: YTN; PAM sequence: CTG
agaagtttggtacaacaaat

SEQ ID NO: 197645 - DNA, 20 bp, Artificial Sequence
  Description of Artificial Sequence: Synthetic oligonucleotide
  Target: LAMA2; (-) strand; PAM type: YTN; PAM sequence: TTA
aaaagtccagaactgagaag

SEQ ID NO: 197646 - DNA, 20 bp, Artificial Sequence
  Description of Artificial Sequence: Synthetic oligonucleotide
  Target: LAMA2; (-) strand; PAM type: YTN; PAM sequence: CTG
attaaaaagtccagaactga

SEQ ID NO: 197647 - DNA, 20 bp, Artificial Sequence
  Description of Artificial Sequence: Synthetic oligonucleotide
  Target: LAMA2; (-) strand; PAM type: YTN; PAM sequence: CTA
cactgattaaaaagtccaga

SEQ ID NO: 197648 - DNA, 20 bp, Artificial Sequence
  Description of Artificial Sequence: Synthetic oligonucleotide
  Target: LAMA2; (-) strand; PAM type: YTN; PAM sequence: CTG
gtgggtgagtccgatggcaa

SEQ ID NO: 197649 - DNA, 20 bp, Artificial Sequence
  Description of Artificial Sequence: Synthetic oligonucleotide
  Target: LAMA2; (-) strand; PAM type: YTN; PAM sequence: TTA
gcaggcaagctggtgggtga

SEQ ID NO: 197650 - DNA, 20 bp, Artificial Sequence
  Description of Artificial Sequence: Synthetic oligonucleotide
  Target: LAMA2; (-) strand; PAM type: YTN; PAM sequence: TTG
agtgacacagatcagatgga

SEQ ID NO: 197651 - DNA, 20 bp, Artificial Sequence
  Description of Artificial Sequence: Synthetic oligonucleotide
  Target: LAMA2; (-) strand; PAM type: YTN; PAM sequence: TTT
gagtgacacagatcagatgg

SEQ ID NO: 197652 - DNA, 20 bp, Artificial Sequence
  Description of Artificial Sequence: Synthetic oligonucleotide
  Target: LAMA2; (-) strand; PAM type: YTN; PAM sequence: CTG
tatttgagtgacacagatca

SEQ ID NO: 197653 - DNA, 20 bp, Artificial Sequence
  Description of Artificial Sequence: Synthetic oligonucleotide
  Target: LAMA2; (-) strand; PAM type: YTN; PAM sequence: CTG
ctgtatttgagtgacacaga

SEQ ID NO: 197654 - DNA, 20 bp, Artificial Sequence
  Description of Artificial Sequence: Synthetic oligonucleotide
  Target: LAMA2; (-) strand; PAM type: YTN; PAM sequence: CTG
cctgctgtatttgagtgaca

SEQ ID NO: 197655 - DNA, 20 bp, Artificial Sequence
  Description of Artificial Sequence: Synthetic oligonucleotide
  Target: LAMA2; (-) strand; PAM type: YTN; PAM sequence: TTC
actgcctgctgtatttgagt

SEQ ID NO: 197656 - DNA, 20 bp, Artificial Sequence
  Description of Artificial Sequence: Synthetic oligonucleotide
  Target: LAMA2; (-) strand; PAM type: YTN; PAM sequence: CTT
cactgcctgctgtatttgag

SEQ ID NO: 197657 - DNA, 20 bp, Artificial Sequence
  Description of Artificial Sequence: Synthetic oligonucleotide
  Target: LAMA2; (-) strand; PAM type: YTN; PAM sequence: TTC
ttcactgcctgctgtatttg

SEQ ID NO: 197658 - DNA, 20 bp, Artificial Sequence
  Description of Artificial Sequence: Synthetic oligonucleotide
  Target: LAMA2; (-) strand; PAM type: YTN; PAM sequence: CTG
ttcttcactgcctgctgtat

SEQ ID NO: 197659 - DNA, 20 bp, Artificial Sequence
  Description of Artificial Sequence: Synthetic oligonucleotide
  Target: LAMA2; (-) strand; PAM type: YTN; PAM sequence: TTA
tgacagatagaaggagaatg

SEQ ID NO: 197660 - DNA, 20 bp, Artificial Sequence
  Description of Artificial Sequence: Synthetic oligonucleotide
  Target: LAMA2; (-) strand; PAM type: YTN; PAM sequence: TTT
atgacagatagaaggagaat

SEQ ID NO: 197661 - DNA, 20 bp, Artificial Sequence
  Description of Artificial Sequence: Synthetic oligonucleotide
  Target: LAMA2; (-) strand; PAM type: YTN; PAM sequence: TTT
tatgacagatagaaggagaa

SEQ ID NO: 197662 - DNA, 20 bp, Artificial Sequence
  Description of Artificial Sequence: Synthetic oligonucleotide
  Target: LAMA2; (-) strand; PAM type: YTN; PAM sequence: CTG
gattttatgacagatagaag

SEQ ID NO: 197663 - DNA, 20 bp, Artificial Sequence
  Description of Artificial Sequence: Synthetic oligonucleotide
  Target: LAMA2; (-) strand; PAM type: YTN; PAM sequence: TTG
gtacctggattttatgacag

SEQ ID NO: 197664 - DNA, 20 bp, Artificial Sequence
  Description of Artificial Sequence: Synthetic oligonucleotide
  Target: LAMA2; (-) strand; PAM type: YTN; PAM sequence: TTA
ttggtacctggattttatga

SEQ ID NO: 197665 - DNA, 20 bp, Artificial Sequence
  Description of Artificial Sequence: Synthetic oligonucleotide
  Target: LAMA2; (-) strand; PAM type: YTN; PAM sequence: CTA
gttattggtacctggatttt

SEQ ID NO: 197666 - DNA, 20 bp, Artificial Sequence
  Description of Artificial Sequence: Synthetic oligonucleotide
  Target: LAMA2; (-) strand; PAM type: YTN; PAM sequence: TTA
tccctagttattggtacctg

SEQ ID NO: 197667 - DNA, 20 bp, Artificial Sequence
  Description of Artificial Sequence: Synthetic oligonucleotide
  Target: LAMA2; (-) strand; PAM type: YTN; PAM sequence: CTT
atccctagttattggtacct

SEQ ID NO: 197668 - DNA, 20 bp, Artificial Sequence
  Description of Artificial Sequence: Synthetic oligonucleotide
  Target: LAMA2; (-) strand; PAM type: YTN; PAM sequence: TTG
gtaaaacacttatccctagt

SEQ ID NO: 197669 - DNA, 20 bp, Artificial Sequence
  Description of Artificial Sequence: Synthetic oligonucleotide
  Target: LAMA2; (-) strand; PAM type: YTN; PAM sequence: CTT
ggtaaaacacttatccctag

SEQ ID NO: 197670 - DNA, 20 bp, Artificial Sequence
  Description of Artificial Sequence: Synthetic oligonucleotide
  Target: LAMA2; (-) strand; PAM type: YTN; PAM sequence: CTC
ttggtaaaacacttatccct

SEQ ID NO: 197671 - DNA, 20 bp, Artificial Sequence
  Description of Artificial Sequence: Synthetic oligonucleotide
  Target: LAMA2; (-) strand; PAM type: YTN; PAM sequence: CTG
ctcttggtaaaacacttatc

SEQ ID NO: 197672 - DNA, 20 bp, Artificial Sequence
  Description of Artificial Sequence: Synthetic oligonucleotide
  Target: LAMA2; (-) strand; PAM type: YTN; PAM sequence: TTG
aaataactgctcttggtaaa

SEQ ID NO: 197673 - DNA, 20 bp, Artificial Sequence
  Description of Artificial Sequence: Synthetic oligonucleotide
  Target: LAMA2; (-) strand; PAM type: YTN; PAM sequence: CTA
ttgaaataactgctcttggt

SEQ ID NO: 197674 - DNA, 20 bp, Artificial Sequence
  Description of Artificial Sequence: Synthetic oligonucleotide
  Target: LAMA2; (-) strand; PAM type: YTN; PAM sequence: TTC
aagctattgaaataactgct

SEQ ID NO: 197675 - DNA, 20 bp, Artificial Sequence
  Description of Artificial Sequence: Synthetic oligonucleotide
  Target: LAMA2; (-) strand; PAM type: YTN; PAM sequence: TTA
agttcaagctattgaaataa

SEQ ID NO: 197676 - DNA, 20 bp, Artificial Sequence
  Description of Artificial Sequence: Synthetic oligonucleotide
  Target: LAMA2; (-) strand; PAM type: YTN; PAM sequence: TTT
aagttcaagctattgaaata

SEQ ID NO: 197677 - DNA, 20 bp, Artificial Sequence
  Description of Artificial Sequence: Synthetic oligonucleotide
  Target: LAMA2; (-) strand; PAM type: YTN; PAM sequence: CTG
gtatttaagttcaagctatt

SEQ ID NO: 197678 - DNA, 20 bp, Artificial Sequence
  Description of Artificial Sequence: Synthetic oligonucleotide
  Target: LAMA2; (-) strand; PAM type: YTN; PAM sequence: TTA
atctggtatttaagttcaag

SEQ ID NO: 197679 - DNA, 20 bp, Artificial Sequence
  Description of Artificial Sequence: Synthetic oligonucleotide
  Target: LAMA2; (-) strand; PAM type: YTN; PAM sequence: CTG
tgaaaattaatctggtattt

SEQ ID NO: 197680 - DNA, 20 bp, Artificial Sequence
  Description of Artificial Sequence: Synthetic oligonucleotide
  Target: LAMA2; (-) strand; PAM type: YTN; PAM sequence: TTC
tgtgaaaattaatctggtat

SEQ ID NO: 197681 - DNA, 20 bp, Artificial Sequence
  Description of Artificial Sequence: Synthetic oligonucleotide
  Target: LAMA2; (-) strand; PAM type: YTN; PAM sequence: TTA
ttctgtgaaaattaatctgg

SEQ ID NO: 197682 - DNA, 20 bp, Artificial Sequence
  Description of Artificial Sequence: Synthetic oligonucleotide
  Target: LAMA2; (-) strand; PAM type: YTN; PAM sequence: TTT
attctgtgaaaattaatctg

SEQ ID NO: 197683 - DNA, 20 bp, Artificial Sequence
  Description of Artificial Sequence: Synthetic oligonucleotide
  Target: LAMA2; (-) strand; PAM type: YTN; PAM sequence: TTT
tattctgtgaaaattaatct

SEQ ID NO: 197684 - DNA, 20 bp, Artificial Sequence
  Description of Artificial Sequence: Synthetic oligonucleotide
  Target: LAMA2; (-) strand; PAM type: YTN; PAM sequence: TTT
ttattctgtgaaaattaatc

SEQ ID NO: 197685 - DNA, 20 bp, Artificial Sequence
  Description of Artificial Sequence: Synthetic oligonucleotide
  Target: LAMA2; (-) strand; PAM type: YTN; PAM sequence: TTA
tttttattctgtgaaaatta

SEQ ID NO: 197686 - DNA, 20 bp, Artificial Sequence
  Description of Artificial Sequence: Synthetic oligonucleotide
  Target: LAMA2; (-) strand; PAM type: YTN; PAM sequence: CTA
aacattatttttattctgtg

SEQ ID NO: 197687 - DNA, 20 bp, Artificial Sequence
  Description of Artificial Sequence: Synthetic oligonucleotide
  Target: LAMA2; (-) strand; PAM type: YTN; PAM sequence: TTA
tactaaacattatttttatt

SEQ ID NO: 197688 - DNA, 20 bp, Artificial Sequence
  Description of Artificial Sequence: Synthetic oligonucleotide
  Target: LAMA2; (-) strand; PAM type: YTN; PAM sequence: CTT
atactaaacattatttttat

SEQ ID NO: 197689 - DNA, 20 bp, Artificial Sequence
  Description of Artificial Sequence: Synthetic oligonucleotide
  Target: LAMA2; (-) strand; PAM type: YTN; PAM sequence: TTA
aaacttatactaaacattat

SEQ ID NO: 197690 - DNA, 20 bp, Artificial Sequence
  Description of Artificial Sequence: Synthetic oligonucleotide
  Target: LAMA2; (-) strand; PAM type: YTN; PAM sequence: TTA
ttaaaacttatactaaacat

SEQ ID NO: 197691 - DNA, 20 bp, Artificial Sequence
  Description of Artificial Sequence: Synthetic oligonucleotide
  Target: LAMA2; (-) strand; PAM type: YTN; PAM sequence: CTA
catgccattattaaaactta

SEQ ID NO: 197692 - DNA, 20 bp, Artificial Sequence
  Description of Artificial Sequence: Synthetic oligonucleotide
  Target: LAMA2; (-) strand; PAM type: YTN; PAM sequence: TTC
atctacatgccattattaaa

SEQ ID NO: 197693 - DNA, 20 bp, Artificial Sequence
  Description of Artificial Sequence: Synthetic oligonucleotide
  Target: LAMA2; (-) strand; PAM type: YTN; PAM sequence: TTT
catctacatgccattattaa

SEQ ID NO: 197694 - DNA, 20 bp, Artificial Sequence
  Description of Artificial Sequence: Synthetic oligonucleotide
  Target: LAMA2; (-) strand; PAM type: YTN; PAM sequence: TTA
aaagtcaccaagtccaaata

SEQ ID NO: 197695 - DNA, 20 bp, Artificial Sequence
  Description of Artificial Sequence: Synthetic oligonucleotide
  Target: LAMA2; (-) strand; PAM type: YTN; PAM sequence: CTT
aaaagtcaccaagtccaaat

SEQ ID NO: 197696 - DNA, 20 bp, Artificial Sequence
  Description of Artificial Sequence: Synthetic oligonucleotide
  Target: LAMA2; (-) strand; PAM type: YTN; PAM sequence: TTA
aaaagcaaccacaacttaaa

SEQ ID NO: 197697 - DNA, 20 bp, Artificial Sequence
  Description of Artificial Sequence: Synthetic oligonucleotide
  Target: LAMA2; (-) strand; PAM type: YTN; PAM sequence: TTT
aaaaagcaaccacaacttaa

SEQ ID NO: 197698 - DNA, 20 bp, Artificial Sequence
  Description of Artificial Sequence: Synthetic oligonucleotide
  Target: LAMA2; (-) strand; PAM type: YTN; PAM sequence: CTC
aaacagagaagtcatttaaa

SEQ ID NO: 197699 - DNA, 20 bp, Artificial Sequence
  Description of Artificial Sequence: Synthetic oligonucleotide
  Target: LAMA2; (-) strand; PAM type: YTN; PAM sequence: CTA
ccacaaatgtgataggaaat

SEQ ID NO: 197700 - DNA, 20 bp, Artificial Sequence
  Description of Artificial Sequence: Synthetic oligonucleotide
  Target: LAMA2; (-) strand; PAM type: YTN; PAM sequence: TTC
ctaccacaaatgtgatagga

SEQ ID NO: 197701 - DNA, 20 bp, Artificial Sequence
  Description of Artificial Sequence: Synthetic oligonucleotide
  Target: LAMA2; (-) strand; PAM type: YTN; PAM sequence: CTT
cctaccacaaatgtgatagg

SEQ ID NO: 197702 - DNA, 20 bp, Artificial Sequence
  Description of Artificial Sequence: Synthetic oligonucleotide
  Target: LAMA2; (-) strand; PAM type: YTN; PAM sequence: TTA
gaatcttcctaccacaaatg

SEQ ID NO: 197703 - DNA, 20 bp, Artificial Sequence
  Description of Artificial Sequence: Synthetic oligonucleotide
  Target: LAMA2; (-) strand; PAM type: YTN; PAM sequence: CTT
agaatcttcctaccacaaat

SEQ ID NO: 197704 - DNA, 20 bp, Artificial Sequence
  Description of Artificial Sequence: Synthetic oligonucleotide
  Target: LAMA2; (-) strand; PAM type: YTN; PAM sequence: TTG
agggtcatcttagaatcttc

SEQ ID NO: 197705 - DNA, 20 bp, Artificial Sequence
  Description of Artificial Sequence: Synthetic oligonucleotide
  Target: LAMA2; (-) strand; PAM type: YTN; PAM sequence: CTT
gagggtcatcttagaatctt

SEQ ID NO: 197706 - DNA, 20 bp, Artificial Sequence
  Description of Artificial Sequence: Synthetic oligonucleotide
  Target: LAMA2; (-) strand; PAM type: YTN; PAM sequence: TTG
tgaatcttgagggtcatctt

SEQ ID NO: 197707 - DNA, 20 bp, Artificial Sequence
  Description of Artificial Sequence: Synthetic oligonucleotide
  Target: LAMA2; (-) strand; PAM type: YTN; PAM sequence: CTC
aacaggaggggatcatatag

SEQ ID NO: 197708 - DNA, 20 bp, Artificial Sequence
  Description of Artificial Sequence: Synthetic oligonucleotide
  Target: LAMA2; (-) strand; PAM type: YTN; PAM sequence: CTC
caatcacactcaacaggagg

SEQ ID NO: 197709 - DNA, 20 bp, Artificial Sequence
  Description of Artificial Sequence: Synthetic oligonucleotide
  Target: LAMA2; (-) strand; PAM type: YTN; PAM sequence: TTC
acaggctccaatcacactca

SEQ ID NO: 197710 - DNA, 20 bp, Artificial Sequence
  Description of Artificial Sequence: Synthetic oligonucleotide
  Target: LAMA2; (-) strand; PAM type: YTN; PAM sequence: CTA
atcatgggaatgatgtccca

SEQ ID NO: 197711 - DNA, 20 bp, Artificial Sequence
  Description of Artificial Sequence: Synthetic oligonucleotide
  Target: LAMA2; (-) strand; PAM type: YTN; PAM sequence: TTA
cctaatcatgggaatgatgt

SEQ ID NO: 197712 - DNA, 20 bp, Artificial Sequence
  Description of Artificial Sequence: Synthetic oligonucleotide
  Target: LAMA2; (-) strand; PAM type: YTN; PAM sequence: TTG
taaaatgttacctaatcatg

SEQ ID NO: 197713 - DNA, 20 bp, Artificial Sequence
  Description of Artificial Sequence: Synthetic oligonucleotide
  Target: LAMA2; (-) strand; PAM type: YTN; PAM sequence: TTG
ttgtaaaatgttacctaatc

SEQ ID NO: 197714 - DNA, 20 bp, Artificial Sequence
  Description of Artificial Sequence: Synthetic oligonucleotide
  Target: LAMA2; (-) strand; PAM type: YTN; PAM sequence: TTT
gttgtaaaatgttacctaat

SEQ ID NO: 197715 - DNA, 20 bp, Artificial Sequence
  Description of Artificial Sequence: Synthetic oligonucleotide
  Target: LAMA2; (-) strand; PAM type: YTN; PAM sequence: CTT
tgttgtaaaatgttacctaa

SEQ ID NO: 197716 - DNA, 20 bp, Artificial Sequence
  Description of Artificial Sequence: Synthetic oligonucleotide
  Target: LAMA2; (-) strand; PAM type: YTN; PAM sequence: CTA
ctttgttgtaaaatgttacc

SEQ ID NO: 197717 - DNA, 20 bp, Artificial Sequence
  Description of Artificial Sequence: Synthetic oligonucleotide
  Target: LAMA2; (-) strand; PAM type: YTN; PAM sequence: TTC
tactttgttgtaaaatgtta

SEQ ID NO: 197718 - DNA, 20 bp, Artificial Sequence
  Description of Artificial Sequence: Synthetic oligonucleotide
  Target: LAMA2; (-) strand; PAM type: YTN; PAM sequence: CTT
ctactttgttgtaaaatgtt

SEQ ID NO: 197719 - DNA, 20 bp, Artificial Sequence
  Description of Artificial Sequence: Synthetic oligonucleotide
  Target: LAMA2; (-) strand; PAM type: YTN; PAM sequence: TTA
tatcttctactttgttgtaa

SEQ ID NO: 197720 - DNA, 20 bp, Artificial Sequence
  Description of Artificial Sequence: Synthetic oligonucleotide
  Target: LAMA2; (-) strand; PAM type: YTN; PAM sequence: TTA
tatccgaattatatcttcta

SEQ ID NO: 197721 - DNA, 20 bp, Artificial Sequence
  Description of Artificial Sequence: Synthetic oligonucleotide
  Target: LAMA2; (-) strand; PAM type: YTN; PAM sequence: CTG
agttatatccgaattatatc

SEQ ID NO: 197722 - DNA, 20 bp, Artificial Sequence
  Description of Artificial Sequence: Synthetic oligonucleotide
  Target: LAMA2; (-) strand; PAM type: YTN; PAM sequence: TTA
gccacctgagttatatccga

SEQ ID NO: 197723 - DNA, 20 bp, Artificial Sequence
  Description of Artificial Sequence: Synthetic oligonucleotide
  Target: LAMA2; (-) strand; PAM type: YTN; PAM sequence: TTT
agccacctgagttatatccg

SEQ ID NO: 197724 - DNA, 20 bp, Artificial Sequence
  Description of Artificial Sequence: Synthetic oligonucleotide
  Target: LAMA2; (-) strand; PAM type: YTN; PAM sequence: CTA
atttagccacctgagttata

SEQ ID NO: 197725 - DNA, 20 bp, Artificial Sequence
  Description of Artificial Sequence: Synthetic oligonucleotide
  Target: LAMA2; (-) strand; PAM type: YTN; PAM sequence: TTG
aagaaaactaatttagccac

SEQ ID NO: 197726 - DNA, 20 bp, Artificial Sequence
  Description of Artificial Sequence: Synthetic oligonucleotide
  Target: LAMA2; (-) strand; PAM type: YTN; PAM sequence: CTT
gaagaaaactaatttagcca

SEQ ID NO: 197727 - DNA, 20 bp, Artificial Sequence
  Description of Artificial Sequence: Synthetic oligonucleotide
  Target: LAMA2; (-) strand; PAM type: YTN; PAM sequence: TTG
agtagcttgaagaaaactaa

SEQ ID NO: 197728 - DNA, 20 bp, Artificial Sequence
  Description of Artificial Sequence: Synthetic oligonucleotide
  Target: LAMA2; (-) strand; PAM type: YTN; PAM sequence: TTT
gagtagcttgaagaaaacta

SEQ ID NO: 197729 - DNA, 20 bp, Artificial Sequence
  Description of Artificial Sequence: Synthetic oligonucleotide
  Target: LAMA2; (-) strand; PAM type: YTN; PAM sequence: TTT
tgagtagcttgaagaaaact

SEQ ID NO: 197730 - DNA, 20 bp, Artificial Sequence
  Description of Artificial Sequence: Synthetic oligonucleotide
  Target: LAMA2; (-) strand; PAM type: YTN; PAM sequence: CTT
ttgagtagcttgaagaaaac

SEQ ID NO: 197731 - DNA, 20 bp, Artificial Sequence
  Description of Artificial Sequence: Synthetic oligonucleotide
  Target: LAMA2; (-) strand; PAM type: YTN; PAM sequence: TTC
cttttgagtagcttgaagaa

SEQ ID NO: 197732 - DNA, 20 bp, Artificial Sequence
  Description of Artificial Sequence: Synthetic oligonucleotide
  Target: LAMA2; (-) strand; PAM type: YTN; PAM sequence: CTT
ccttttgagtagcttgaaga

SEQ ID NO: 197733 - DNA, 20 bp, Artificial Sequence
  Description of Artificial Sequence: Synthetic oligonucleotide
  Target: LAMA2; (-) strand; PAM type: YTN; PAM sequence: CTC
agaataatcttccttttgag

SEQ ID NO: 197734 - DNA, 20 bp, Artificial Sequence
  Description of Artificial Sequence: Synthetic oligonucleotide
  Target: LAMA2; (-) strand; PAM type: YTN; PAM sequence: TTG
ggtgccctcagaataatctt

SEQ ID NO: 197735 - DNA, 20 bp, Artificial Sequence
  Description of Artificial Sequence: Synthetic oligonucleotide
  Target: LAMA2; (-) strand; PAM type: YTN; PAM sequence: TTA
agttgggtgccctcagaata

SEQ ID NO: 197736 - DNA, 20 bp, Artificial Sequence
  Description of Artificial Sequence: Synthetic oligonucleotide
  Target: LAMA2; (-) strand; PAM type: YTN; PAM sequence: TTG
attaagttgggtgccctcag

SEQ ID NO: 197737 - DNA, 20 bp, Artificial Sequence
  Description of Artificial Sequence: Synthetic oligonucleotide
  Target: LAMA2; (-) strand; PAM type: YTN; PAM sequence: CTT
gattaagttgggtgccctca

SEQ ID NO: 197738 - DNA, 20 bp, Artificial Sequence
  Description of Artificial Sequence: Synthetic oligonucleotide
  Target: LAMA2; (-) strand; PAM type: YTN; PAM sequence: TTC
acttgattaagttgggtgcc

SEQ ID NO: 197739 - DNA, 20 bp, Artificial Sequence
  Description of Artificial Sequence: Synthetic oligonucleotide
  Target: LAMA2; (-) strand; PAM type: YTN; PAM sequence: TTA
ggagttcacttgattaagtt

SEQ ID NO: 197740 - DNA, 20 bp, Artificial Sequence
  Description of Artificial Sequence: Synthetic oligonucleotide
  Target: LAMA2; (-) strand; PAM type: YTN; PAM sequence: TTT
aggagttcacttgattaagt

SEQ ID NO: 197741 - DNA, 20 bp, Artificial Sequence
  Description of Artificial Sequence: Synthetic oligonucleotide
  Target: LAMA2; (-) strand; PAM type: YTN; PAM sequence: TTT
taggagttcacttgattaag

SEQ ID NO: 197742 - DNA, 20 bp, Artificial Sequence
  Description of Artificial Sequence: Synthetic oligonucleotide
  Target: LAMA2; (-) strand; PAM type: YTN; PAM sequence: CTT
ttaggagttcacttgattaa

SEQ ID NO: 197743 - DNA, 20 bp, Artificial Sequence
  Description of Artificial Sequence: Synthetic oligonucleotide
  Target: LAMA2; (-) strand; PAM type: YTN; PAM sequence: CTC
ttttaggagttcacttgatt

SEQ ID NO: 197744 - DNA, 20 bp, Artificial Sequence
  Description of Artificial Sequence: Synthetic oligonucleotide
  Target: LAMA2; (-) strand; PAM type: YTN; PAM sequence: CTA
gacactcttttaggagttca

SEQ ID NO: 197745 - DNA, 20 bp, Artificial Sequence
  Description of Artificial Sequence: Synthetic oligonucleotide
  Target: LAMA2; (-) strand; PAM type: YTN; PAM sequence: CTG
agaactagacactcttttag

SEQ ID NO: 197746 - DNA, 20 bp, Artificial Sequence
  Description of Artificial Sequence: Synthetic oligonucleotide
  Target: LAMA2; (-) strand; PAM type: YTN; PAM sequence: CTC
tgagaactagacactctttt

SEQ ID NO: 197747 - DNA, 20 bp, Artificial Sequence
  Description of Artificial Sequence: Synthetic oligonucleotide
  Target: LAMA2; (-) strand; PAM type: YTN; PAM sequence: CTC
tctgagaactagacactctt

SEQ ID NO: 197748 - DNA, 20 bp, Artificial Sequence
  Description of Artificial Sequence: Synthetic oligonucleotide
  Target: LAMA2; (-) strand; PAM type: YTN; PAM sequence: TTC
aagagcaggaaaagctctct

SEQ ID NO: 197749 - DNA, 20 bp, Artificial Sequence
  Description of Artificial Sequence: Synthetic oligonucleotide
  Target: LAMA2; (-) strand; PAM type: YTN; PAM sequence: CTT
caagagcaggaaaagctctc

SEQ ID NO: 197750 - DNA, 20 bp, Artificial Sequence
  Description of Artificial Sequence: Synthetic oligonucleotide
  Target: LAMA2; (-) strand; PAM type: YTN; PAM sequence: TTC
ttcaagagcaggaaaagctc

SEQ ID NO: 197751 - DNA, 20 bp, Artificial Sequence
  Description of Artificial Sequence: Synthetic oligonucleotide
  Target: LAMA2; (-) strand; PAM type: YTN; PAM sequence: CTT
cttcaagagcaggaaaagct

SEQ ID NO: 197752 - DNA, 20 bp, Artificial Sequence
  Description of Artificial Sequence: Synthetic oligonucleotide
  Target: LAMA2; (-) strand; PAM type: YTN; PAM sequence: TTG
cttcttcaagagcaggaaaa

SEQ ID NO: 197753 - DNA, 20 bp, Artificial Sequence
  Description of Artificial Sequence: Synthetic oligonucleotide
  Target: LAMA2; (-) strand; PAM type: YTN; PAM sequence: TTT
gcttcttcaagagcaggaaa

SEQ ID NO: 197754 - DNA, 20 bp, Artificial Sequence
  Description of Artificial Sequence: Synthetic oligonucleotide
  Target: LAMA2; (-) strand; PAM type: YTN; PAM sequence: TTA
tttgcttcttcaagagcagg

SEQ ID NO: 197755 - DNA, 20 bp, Artificial Sequence
  Description of Artificial Sequence: Synthetic oligonucleotide
  Target: LAMA2; (-) strand; PAM type: YTN; PAM sequence: CTC
acatgattatttgcttcttc

SEQ ID NO: 197756 - DNA, 20 bp, Artificial Sequence
  Description of Artificial Sequence: Synthetic oligonucleotide
  Target: LAMA2; (-) strand; PAM type: YTN; PAM sequence: TTC
tcacatgattatttgcttct

SEQ ID NO: 197757 - DNA, 20 bp, Artificial Sequence
  Description of Artificial Sequence: Synthetic oligonucleotide
  Target: LAMA2; (-) strand; PAM type: YTN; PAM sequence: CTT
ctcacatgattatttgcttc

SEQ ID NO: 197758 - DNA, 20 bp, Artificial Sequence
  Description of Artificial Sequence: Synthetic oligonucleotide
  Target: LAMA2; (-) strand; PAM type: YTN; PAM sequence: CTG
tgtggccttctcacatgatt

SEQ ID NO: 197759 - DNA, 20 bp, Artificial Sequence
  Description of Artificial Sequence: Synthetic oligonucleotide
  Target: LAMA2; (-) strand; PAM type: YTN; PAM sequence: TTG
ctgtgtggccttctcacatg

SEQ ID NO: 197760 - DNA, 20 bp, Artificial Sequence
  Description of Artificial Sequence: Synthetic oligonucleotide
  Target: LAMA2; (-) strand; PAM type: YTN; PAM sequence: CTT
gctgtgtggccttctcacat

SEQ ID NO: 197761 - DNA, 20 bp, Artificial Sequence
  Description of Artificial Sequence: Synthetic oligonucleotide
  Target: LAMA2; (-) strand; PAM type: YTN; PAM sequence: CTC
ttgctgtgtggccttctcac

SEQ ID NO: 197762 - DNA, 20 bp, Artificial Sequence
  Description of Artificial Sequence: Synthetic oligonucleotide
  Target: LAMA2; (-) strand; PAM type: YTN; PAM sequence: CTA
agcctcttgctgtgtggcct

SEQ ID NO: 197763 - DNA, 20 bp, Artificial Sequence
  Description of Artificial Sequence: Synthetic oligonucleotide
  Target: LAMA2; (-) strand; PAM type: YTN; PAM sequence: CTC
ctaagcctcttgctgtgtgg

SEQ ID NO: 197764 - DNA, 20 bp, Artificial Sequence
  Description of Artificial Sequence: Synthetic oligonucleotide
  Target: LAMA2; (-) strand; PAM type: YTN; PAM sequence: CTA
gaggcctcctaagcctcttg

SEQ ID NO: 197765 - DNA, 20 bp, Artificial Sequence
  Description of Artificial Sequence: Synthetic oligonucleotide
  Target: LAMA2; (-) strand; PAM type: YTN; PAM sequence: TTC
tagaggcctcctaagcctct

SEQ ID NO: 197766 - DNA, 20 bp, Artificial Sequence
  Description of Artificial Sequence: Synthetic oligonucleotide
  Target: LAMA2; (-) strand; PAM type: YTN; PAM sequence: CTT
ctagaggcctcctaagcctc

SEQ ID NO: 197767 - DNA, 20 bp, Artificial Sequence
  Description of Artificial Sequence: Synthetic oligonucleotide
  Target: LAMA2; (-) strand; PAM type: YTN; PAM sequence: CTC
agcttctagaggcctcctaa

SEQ ID NO: 197768 - DNA, 20 bp, Artificial Sequence
  Description of Artificial Sequence: Synthetic oligonucleotide
  Target: LAMA2; (-) strand; PAM type: YTN; PAM sequence: CTC
tcagcttctagaggcctcct

SEQ ID NO: 197769 - DNA, 20 bp, Artificial Sequence
  Description of Artificial Sequence: Synthetic oligonucleotide
  Target: LAMA2; (-) strand; PAM type: YTN; PAM sequence: CTG
ctctcagcttctagaggcct

SEQ ID NO: 197770 - DNA, 20 bp, Artificial Sequence
  Description of Artificial Sequence: Synthetic oligonucleotide
  Target: LAMA2; (-) strand; PAM type: YTN; PAM sequence: TTA
tcaatccagtgctgctctca

SEQ ID NO: 197771 - DNA, 20 bp, Artificial Sequence
  Description of Artificial Sequence: Synthetic oligonucleotide
  Target: LAMA2; (-) strand; PAM type: YTN; PAM sequence: CTG
attatcaatccagtgctgct

SEQ ID NO: 197772 - DNA, 20 bp, Artificial Sequence
  Description of Artificial Sequence: Synthetic oligonucleotide
  Target: LAMA2; (-) strand; PAM type: YTN; PAM sequence: TTG
ctgattatcaatccagtgct

SEQ ID NO: 197773 - DNA, 20 bp, Artificial Sequence
  Description of Artificial Sequence: Synthetic oligonucleotide
  Target: LAMA2; (-) strand; PAM type: YTN; PAM sequence: CTT
gctgattatcaatccagtgc

SEQ ID NO: 197774 - DNA, 20 bp, Artificial Sequence
  Description of Artificial Sequence: Synthetic oligonucleotide
  Target: LAMA2; (-) strand; PAM type: YTN; PAM sequence: TTC
ttgctgattatcaatccagt

SEQ ID NO: 197775 - DNA, 20 bp, Artificial Sequence
  Description of Artificial Sequence: Synthetic oligonucleotide
  Target: LAMA2; (-) strand; PAM type: YTN; PAM sequence: TTT
cttgctgattatcaatccag

SEQ ID NO: 197776 - DNA, 20 bp, Artificial Sequence
  Description of Artificial Sequence: Synthetic oligonucleotide
  Target: LAMA2; (-) strand; PAM type: YTN; PAM sequence: CTT
tcttgctgattatcaatcca

SEQ ID NO: 197777 - DNA, 20 bp, Artificial Sequence
  Description of Artificial Sequence: Synthetic oligonucleotide
  Target: LAMA2; (-) strand; PAM type: YTN; PAM sequence: CTG
tgctttcttgctgattatca

SEQ ID NO: 197778 - DNA, 20 bp, Artificial Sequence
  Description of Artificial Sequence: Synthetic oligonucleotide
  Target: LAMA2; (-) strand; PAM type: YTN; PAM sequence: CTC
agctgtgctttcttgctgat

SEQ ID NO: 197779 - DNA, 20 bp, Artificial Sequence
  Description of Artificial Sequence: Synthetic oligonucleotide
  Target: LAMA2; (-) strand; PAM type: YTN; PAM sequence: TTA
gctcagctgtgctttcttgc

SEQ ID NO: 197780 - DNA, 20 bp, Artificial Sequence
  Description of Artificial Sequence: Synthetic oligonucleotide
  Target: LAMA2; (-) strand; PAM type: YTN; PAM sequence: CTC
catgttagctcagctgtgct

SEQ ID NO: 197781 - DNA, 20 bp, Artificial Sequence
  Description of Artificial Sequence: Synthetic oligonucleotide
  Target: LAMA2; (-) strand; PAM type: YTN; PAM sequence: CTG
cagtctccatgttagctcag

SEQ ID NO: 197782 - DNA, 20 bp, Artificial Sequence
  Description of Artificial Sequence: Synthetic oligonucleotide
  Target: LAMA2; (-) strand; PAM type: YTN; PAM sequence: CTA
gagaggctgcagtctccatg

SEQ ID NO: 197783 - DNA, 20 bp, Artificial Sequence
  Description of Artificial Sequence: Synthetic oligonucleotide
  Target: LAMA2; (-) strand; PAM type: YTN; PAM sequence: CTG
tcgacctagagaggctgcag

SEQ ID NO: 197784 - DNA, 20 bp, Artificial Sequence
  Description of Artificial Sequence: Synthetic oligonucleotide
  Target: LAMA2; (-) strand; PAM type: YTN; PAM sequence: TTC
ctgtcgacctagagaggctg

SEQ ID NO: 197785 - DNA, 20 bp, Artificial Sequence
  Description of Artificial Sequence: Synthetic oligonucleotide
  Target: LAMA2; (-) strand; PAM type: YTN; PAM sequence: TTG
ataatcagttcctgtcgacc

SEQ ID NO: 197786 - DNA, 20 bp, Artificial Sequence
  Description of Artificial Sequence: Synthetic oligonucleotide
  Target: LAMA2; (-) strand; PAM type: YTN; PAM sequence: TTC
attgataatcagttcctgtc

SEQ ID NO: 197787 - DNA, 20 bp, Artificial Sequence
  Description of Artificial Sequence: Synthetic oligonucleotide
  Target: LAMA2; (-) strand; PAM type: YTN; PAM sequence: TTA
aaacaacattcattgataat

SEQ ID NO: 197788 - DNA, 20 bp, Artificial Sequence
  Description of Artificial Sequence: Synthetic oligonucleotide
  Target: LAMA2; (-) strand; PAM type: YTN; PAM sequence: CTT
aaaacaacattcattgataa

SEQ ID NO: 197789 - DNA, 20 bp, Artificial Sequence
  Description of Artificial Sequence: Synthetic oligonucleotide
  Target: LAMA2; (-) strand; PAM type: YTN; PAM sequence: TTA
tcacaaacgtagtgacttaa

SEQ ID NO: 197790 - DNA, 20 bp, Artificial Sequence
  Description of Artificial Sequence: Synthetic oligonucleotide
  Target: LAMA2; (-) strand; PAM type: YTN; PAM sequence: CTG
tataataaattatcacaaac

SEQ ID NO: 197791 - DNA, 20 bp, Artificial Sequence
  Description of Artificial Sequence: Synthetic oligonucleotide
  Target: LAMA2; (-) strand; PAM type: YTN; PAM sequence: TTA
ctgtataataaattatcaca

SEQ ID NO: 197792 - DNA, 20 bp, Artificial Sequence
  Description of Artificial Sequence: Synthetic oligonucleotide
  Target: LAMA2; (-) strand; PAM type: YTN; PAM sequence: TTA
ttactgtataataaattatc

SEQ ID NO: 197793 - DNA, 20 bp, Artificial Sequence
  Description of Artificial Sequence: Synthetic oligonucleotide
  Target: LAMA2; (-) strand; PAM type: YTN; PAM sequence: TTT
attactgtataataaattat

SEQ ID NO: 197794 - DNA, 20 bp, Artificial Sequence
  Description of Artificial Sequence: Synthetic oligonucleotide
  Target: LAMA2; (-) strand; PAM type: YTN; PAM sequence: TTT
tattactgtataataaatta

SEQ ID NO: 197795 - DNA, 20 bp, Artificial Sequence
  Description of Artificial Sequence: Synthetic oligonucleotide
  Target: LAMA2; (-) strand; PAM type: YTN; PAM sequence: TTT
ttattactgtataataaatt

SEQ ID NO: 197796 - DNA, 20 bp, Artificial Sequence
  Description of Artificial Sequence: Synthetic oligonucleotide
  Target: LAMA2; (-) strand; PAM type: YTN; PAM sequence: TTG
gtttttattactgtataata

SEQ ID NO: 197797 - DNA, 20 bp, Artificial Sequence
  Description of Artificial Sequence: Synthetic oligonucleotide
  Target: LAMA2; (-) strand; PAM type: YTN; PAM sequence: TTT
ggtttttattactgtataat

SEQ ID NO: 197798 - DNA, 20 bp, Artificial Sequence
  Description of Artificial Sequence: Synthetic oligonucleotide
  Target: LAMA2; (-) strand; PAM type: YTN; PAM sequence: TTG
tatttggtttttattactgt

SEQ ID NO: 197799 - DNA, 20 bp, Artificial Sequence
  Description of Artificial Sequence: Synthetic oligonucleotide
  Target: LAMA2; (-) strand; PAM type: YTN; PAM sequence: TTT
gtatttggtttttattactg

SEQ ID NO: 197800 - DNA, 20 bp, Artificial Sequence
  Description of Artificial Sequence: Synthetic oligonucleotide
  Target: LAMA2; (-) strand; PAM type: YTN; PAM sequence: TTT
tgtatttggtttttattact

SEQ ID NO: 197801 - DNA, 20 bp, Artificial Sequence
  Description of Artificial Sequence: Synthetic oligonucleotide
  Target: LAMA2; (-) strand; PAM type: YTN; PAM sequence: CTT
ttgtatttggtttttattac

SEQ ID NO: 197802 - DNA, 20 bp, Artificial Sequence
  Description of Artificial Sequence: Synthetic oligonucleotide
  Target: LAMA2; (-) strand; PAM type: YTN; PAM sequence: TTA
atcttttgtatttggttttt

SEQ ID NO: 197803 - DNA, 20 bp, Artificial Sequence
  Description of Artificial Sequence: Synthetic oligonucleotide
  Target: LAMA2; (-) strand; PAM type: YTN; PAM sequence: TTT
aatcttttgtatttggtttt

SEQ ID NO: 197804 - DNA, 20 bp, Artificial Sequence
  Description of Artificial Sequence: Synthetic oligonucleotide
  Target: LAMA2; (-) strand; PAM type: YTN; PAM sequence: TTT
taatcttttgtatttggttt

SEQ ID NO: 197805 - DNA, 20 bp, Artificial Sequence
  Description of Artificial Sequence: Synthetic oligonucleotide
  Target: LAMA2; (-) strand; PAM type: YTN; PAM sequence: TTT
ttaatcttttgtatttggtt

SEQ ID NO: 197806 - DNA, 20 bp, Artificial Sequence
  Description of Artificial Sequence: Synthetic oligonucleotide
  Target: LAMA2; (-) strand; PAM type: YTN; PAM sequence: CTT
tttaatcttttgtatttggt

SEQ ID NO: 197807 - DNA, 20 bp, Artificial Sequence
  Description of Artificial Sequence: Synthetic oligonucleotide
  Target: LAMA2; (-) strand; PAM type: YTN; PAM sequence: TTC
tttttaatcttttgtatttg

SEQ ID NO: 197808 - DNA, 20 bp, Artificial Sequence
  Description of Artificial Sequence: Synthetic oligonucleotide
  Target: LAMA2; (-) strand; PAM type: YTN; PAM sequence: TTT
ctttttaatcttttgtattt

SEQ ID NO: 197809 - DNA, 20 bp, Artificial Sequence
  Description of Artificial Sequence: Synthetic oligonucleotide
  Target: LAMA2; (-) strand; PAM type: YTN; PAM sequence: TTA
gatttctttttaatcttttg

SEQ ID NO: 197810 - DNA, 20 bp, Artificial Sequence
  Description of Artificial Sequence: Synthetic oligonucleotide
  Target: LAMA2; (-) strand; PAM type: YTN; PAM sequence: CTT
agatttctttttaatctttt

SEQ ID NO: 197811 - DNA, 20 bp, Artificial Sequence
  Description of Artificial Sequence: Synthetic oligonucleotide
  Target: LAMA2; (-) strand; PAM type: YTN; PAM sequence: TTC
aacttagatttctttttaat

SEQ ID NO: 197812 - DNA, 20 bp, Artificial Sequence
  Description of Artificial Sequence: Synthetic oligonucleotide
  Target: LAMA2; (-) strand; PAM type: YTN; PAM sequence: CTT
caacttagatttctttttaa

SEQ ID NO: 197813 - DNA, 20 bp, Artificial Sequence
  Description of Artificial Sequence: Synthetic oligonucleotide
  Target: LAMA2; (-) strand; PAM type: YTN; PAM sequence: TTA
agatatcttcaacttagatt

SEQ ID NO: 197814 - DNA, 20 bp, Artificial Sequence
  Description of Artificial Sequence: Synthetic oligonucleotide
  Target: LAMA2; (-) strand; PAM type: YTN; PAM sequence: TTT
aagatatcttcaacttagat

SEQ ID NO: 197815 - DNA, 20 bp, Artificial Sequence
  Description of Artificial Sequence: Synthetic oligonucleotide
  Target: LAMA2; (-) strand; PAM type: YTN; PAM sequence: TTC
ggtttaagatatcttcaact

SEQ ID NO: 197816 - DNA, 20 bp, Artificial Sequence
  Description of Artificial Sequence: Synthetic oligonucleotide
  Target: LAMA2; (-) strand; PAM type: YTN; PAM sequence: TTA
aatgcaattcggtttaagat

SEQ ID NO: 197817 - DNA, 20 bp, Artificial Sequence
  Description of Artificial Sequence: Synthetic oligonucleotide
  Target: LAMA2; (-) strand; PAM type: YTN; PAM sequence: TTA
ggtgtattaaatgcaattcg

SEQ ID NO: 197818 - DNA, 20 bp, Artificial Sequence
  Description of Artificial Sequence: Synthetic oligonucleotide
  Target: LAMA2; (-) strand; PAM type: YTN; PAM sequence: TTC
agtaggttaggtgtattaaa

SEQ ID NO: 197819 - DNA, 20 bp, Artificial Sequence
  Description of Artificial Sequence: Synthetic oligonucleotide
  Target: LAMA2; (-) strand; PAM type: YTN; PAM sequence: CTA
tgatgttcagtaggttaggt

SEQ ID NO: 197820 - DNA, 20 bp, Artificial Sequence
  Description of Artificial Sequence: Synthetic oligonucleotide
  Target: LAMA2; (-) strand; PAM type: YTN; PAM sequence: CTA
aactatgatgttcagtaggt

SEQ ID NO: 197821 - DNA, 20 bp, Artificial Sequence
  Description of Artificial Sequence: Synthetic oligonucleotide
  Target: LAMA2; (-) strand; PAM type: YTN; PAM sequence: CTA
ggctaaactatgatgttcag

SEQ ID NO: 197822 - DNA, 20 bp, Artificial Sequence
  Description of Artificial Sequence: Synthetic oligonucleotide
  Target: LAMA2; (-) strand; PAM type: YTN; PAM sequence: TTA
aaggtaggctaggctaaact

SEQ ID NO: 197823 - DNA, 20 bp, Artificial Sequence
  Description of Artificial Sequence: Synthetic oligonucleotide
  Target: LAMA2; (-) strand; PAM type: YTN; PAM sequence: CTG
agtatgttaaaggtaggcta

SEQ ID NO: 197824 - DNA, 20 bp, Artificial Sequence
  Description of Artificial Sequence: Synthetic oligonucleotide
  Target: LAMA2; (-) strand; PAM type: YTN; PAM sequence: TTC
tgagtatgttaaaggtaggc

SEQ ID NO: 197825 - DNA, 20 bp, Artificial Sequence
  Description of Artificial Sequence: Synthetic oligonucleotide
  Target: LAMA2; (-) strand; PAM type: YTN; PAM sequence: CTA
atgtgagtgttctgagtatg

SEQ ID NO: 197826 - DNA, 20 bp, Artificial Sequence
  Description of Artificial Sequence: Synthetic oligonucleotide
  Target: LAMA2; (-) strand; PAM type: YTN; PAM sequence: CTG
tgggctaatgtgagtgttct

SEQ ID NO: 197827 - DNA, 20 bp, Artificial Sequence
  Description of Artificial Sequence: Synthetic oligonucleotide
  Target: LAMA2; (-) strand; PAM type: YTN; PAM sequence: TTG
tccaactgtgggctaatgtg

SEQ ID NO: 197828 - DNA, 20 bp, Artificial Sequence
  Description of Artificial Sequence: Synthetic oligonucleotide
  Target: LAMA2; (-) strand; PAM type: YTN; PAM sequence: TTT
gtccaactgtgggctaatgt

SEQ ID NO: 197829 - DNA, 20 bp, Artificial Sequence
  Description of Artificial Sequence: Synthetic oligonucleotide
  Target: LAMA2; (-) strand; PAM type: YTN; PAM sequence: TTT
tgtccaactgtgggctaatg

SEQ ID NO: 197830 - DNA, 20 bp, Artificial Sequence
  Description of Artificial Sequence: Synthetic oligonucleotide
  Target: LAMA2; (-) strand; PAM type: YTN; PAM sequence: TTG
ccaggtaattttgtccaact

SEQ ID NO: 197831 - DNA, 20 bp, Artificial Sequence
  Description of Artificial Sequence: Synthetic oligonucleotide
  Target: LAMA2; (-) strand; PAM type: YTN; PAM sequence: CTG
tgttgccaggtaattttgtc

SEQ ID NO: 197832 - DNA, 20 bp, Artificial Sequence
  Description of Artificial Sequence: Synthetic oligonucleotide
  Target: LAMA2; (-) strand; PAM type: YTN; PAM sequence: TTC
cacagtgtactgtgttgcca

SEQ ID NO: 197833 - DNA, 20 bp, Artificial Sequence
  Description of Artificial Sequence: Synthetic oligonucleotide
  Target: LAMA2; (-) strand; PAM type: YTN; PAM sequence: TTC
atgagggtgaaccaacaata

SEQ ID NO: 197834 - DNA, 20 bp, Artificial Sequence
  Description of Artificial Sequence: Synthetic oligonucleotide
  Target: LAMA2; (-) strand; PAM type: YTN; PAM sequence: CTG
aggatcccagtccaccacat

SEQ ID NO: 197835 - DNA, 20 bp, Artificial Sequence
  Description of Artificial Sequence: Synthetic oligonucleotide
  Target: LAMA2; (-) strand; PAM type: YTN; PAM sequence: CTG
ggcaggggcagcaagctgag

SEQ ID NO: 197836 - DNA, 20 bp, Artificial Sequence
  Description of Artificial Sequence: Synthetic oligonucleotide
  Target: LAMA2; (-) strand; PAM type: YTN; PAM sequence: CTG
tgatgctgggcaggggcagc

SEQ ID NO: 197837 - DNA, 20 bp, Artificial Sequence
  Description of Artificial Sequence: Synthetic oligonucleotide
  Target: LAMA2; (-) strand; PAM type: YTN; PAM sequence: CTC
tgtgatgctgggcaggggca

SEQ ID NO: 197838 - DNA, 20 bp, Artificial Sequence
  Description of Artificial Sequence: Synthetic oligonucleotide
  Target: LAMA2; (-) strand; PAM type: YTN; PAM sequence: CTC
tctgtgatgctgggcagggg

SEQ ID NO: 197839 - DNA, 20 bp, Artificial Sequence
  Description of Artificial Sequence: Synthetic oligonucleotide
  Target: LAMA2; (-) strand; PAM type: YTN; PAM sequence: TTC
tctctgtgatgctgggcagg

SEQ ID NO: 197840 - DNA, 20 bp, Artificial Sequence
  Description of Artificial Sequence: Synthetic oligonucleotide
  Target: LAMA2; (-) strand; PAM type: YTN; PAM sequence: TTT
ctctctgtgatgctgggcag

SEQ ID NO: 197841 - DNA, 20 bp, Artificial Sequence
  Description of Artificial Sequence: Synthetic oligonucleotide
  Target: LAMA2; (-) strand; PAM type: YTN; PAM sequence: CTA
gtgatatgaagcacatttct

SEQ ID NO: 197842 - DNA, 20 bp, Artificial Sequence
  Description of Artificial Sequence: Synthetic oligonucleotide
  Target: LAMA2; (-) strand; PAM type: YTN; PAM sequence: TTC
caggctagtgatatgaagca

SEQ ID NO: 197843 - DNA, 20 bp, Artificial Sequence
  Description of Artificial Sequence: Synthetic oligonucleotide
  Target: LAMA2; (-) strand; PAM type: YTN; PAM sequence: TTT
ccaggctagtgatatgaagc

SEQ ID NO: 197844 - DNA, 20 bp, Artificial Sequence
  Description of Artificial Sequence: Synthetic oligonucleotide
  Target: LAMA2; (-) strand; PAM type: YTN; PAM sequence: TTT
tccaggctagtgatatgaag

SEQ ID NO: 197845 - DNA, 20 bp, Artificial Sequence
  Description of Artificial Sequence: Synthetic oligonucleotide
  Target: LAMA2; (-) strand; PAM type: YTN; PAM sequence: TTT
ttccaggctagtgatatgaa

SEQ ID NO: 197846 - DNA, 20 bp, Artificial Sequence
  Description of Artificial Sequence: Synthetic oligonucleotide
  Target: LAMA2; (-) strand; PAM type: YTN; PAM sequence: TTG
atatttttccaggctagtga

SEQ ID NO: 197847 - DNA, 20 bp, Artificial Sequence
  Description of Artificial Sequence: Synthetic oligonucleotide
  Target: LAMA2; (-) strand; PAM type: YTN; PAM sequence: TTT
gatatttttccaggctagtg

SEQ ID NO: 197848 - DNA, 20 bp, Artificial Sequence
  Description of Artificial Sequence: Synthetic oligonucleotide
  Target: LAMA2; (-) strand; PAM type: YTN; PAM sequence: TTT
tgatatttttccaggctagt

SEQ ID NO: 197849 - DNA, 20 bp, Artificial Sequence
  Description of Artificial Sequence: Synthetic oligonucleotide
  Target: LAMA2; (-) strand; PAM type: YTN; PAM sequence: TTG
aattttgatatttttccagg

SEQ ID NO: 197850 - DNA, 20 bp, Artificial Sequence
  Description of Artificial Sequence: Synthetic oligonucleotide
  Target: LAMA2; (-) strand; PAM type: YTN; PAM sequence: TTT
gaattttgatatttttccag

SEQ ID NO: 197851 - DNA, 20 bp, Artificial Sequence
  Description of Artificial Sequence: Synthetic oligonucleotide
  Target: LAMA2; (-) strand; PAM type: YTN; PAM sequence: TTT
tgaattttgatatttttcca

SEQ ID NO: 197852 - DNA, 20 bp, Artificial Sequence
  Description of Artificial Sequence: Synthetic oligonucleotide
  Target: LAMA2; (-) strand; PAM type: YTN; PAM sequence: TTC
aaattttgaattttgatatt

SEQ ID NO: 197853 - DNA, 20 bp, Artificial Sequence
  Description of Artificial Sequence: Synthetic oligonucleotide
  Target: LAMA2; (-) strand; PAM type: YTN; PAM sequence: CTT
caaattttgaattttgatat

SEQ ID NO: 197854 - DNA, 20 bp, Artificial Sequence
  Description of Artificial Sequence: Synthetic oligonucleotide
  Target: LAMA2; (-) strand; PAM type: YTN; PAM sequence: TTG
tgatagtgccaaagcaatac

SEQ ID NO: 197855 - DNA, 20 bp, Artificial Sequence
  Description of Artificial Sequence: Synthetic oligonucleotide
  Target: LAMA2; (-) strand; PAM type: YTN; PAM sequence: TTT
gtgatagtgccaaagcaata

SEQ ID NO: 197856 - DNA, 20 bp, Artificial Sequence
  Description of Artificial Sequence: Synthetic oligonucleotide
  Target: LAMA2; (-) strand; PAM type: YTN; PAM sequence: TTT
tgtgatagtgccaaagcaat

SEQ ID NO: 197857 - DNA, 20 bp, Artificial Sequence
  Description of Artificial Sequence: Synthetic oligonucleotide
  Target: LAMA2; (-) strand; PAM type: YTN; PAM sequence: TTC
gattttgtgatagtgccaaa

SEQ ID NO: 197858 - DNA, 20 bp, Artificial Sequence
  Description of Artificial Sequence: Synthetic oligonucleotide
  Target: LAMA2; (-) strand; PAM type: YTN; PAM sequence: TTT
cgattttgtgatagtgccaa

SEQ ID NO: 197859 - DNA, 20 bp, Artificial Sequence
  Description of Artificial Sequence: Synthetic oligonucleotide
  Target: LAMA2; (-) strand; PAM type: YTN; PAM sequence: TTT
tcgattttgtgatagtgcca

SEQ ID NO: 197860 - DNA, 20 bp, Artificial Sequence
  Description of Artificial Sequence: Synthetic oligonucleotide
  Target: LAMA2; (-) strand; PAM type: YTN; PAM sequence: TTT
ttcgattttgtgatagtgcc

SEQ ID NO: 197861 - DNA, 20 bp, Artificial Sequence
  Description of Artificial Sequence: Synthetic oligonucleotide
  Target: LAMA2; (-) strand; PAM type: YTN; PAM sequence: TTC
gtatttttcgattttgtgat

SEQ ID NO: 197862 - DNA, 20 bp, Artificial Sequence
  Description of Artificial Sequence: Synthetic oligonucleotide
  Target: LAMA2; (-) strand; PAM type: YTN; PAM sequence: CTT
cgtatttttcgattttgtga

SEQ ID NO: 197863 - DNA, 20 bp, Artificial Sequence
  Description of Artificial Sequence: Synthetic oligonucleotide
  Target: LAMA2; (-) strand; PAM type: YTN; PAM sequence: TTG
aacttcgtatttttcgattt

SEQ ID NO: 197864 - DNA, 20 bp, Artificial Sequence
  Description of Artificial Sequence: Synthetic oligonucleotide
  Target: LAMA2; (-) strand; PAM type: YTN; PAM sequence: TTA
tgacggttgaacttcgtatt

SEQ ID NO: 197865 - DNA, 20 bp, Artificial Sequence
  Description of Artificial Sequence: Synthetic oligonucleotide
  Target: LAMA2; (-) strand; PAM type: YTN; PAM sequence: TTT
atgacggttgaacttcgtat

SEQ ID NO: 197866 - DNA, 20 bp, Artificial Sequence
  Description of Artificial Sequence: Synthetic oligonucleotide
  Target: LAMA2; (-) strand; PAM type: YTN; PAM sequence: TTG
gtggtacagatagtcatcaa

SEQ ID NO: 197867 - DNA, 20 bp, Artificial Sequence
  Description of Artificial Sequence: Synthetic oligonucleotide
  Target: LAMA2; (-) strand; PAM type: YTN; PAM sequence: TTT
ggtggtacagatagtcatca

SEQ ID NO: 197868 - DNA, 20 bp, Artificial Sequence
  Description of Artificial Sequence: Synthetic oligonucleotide
  Target: LAMA2; (-) strand; PAM type: YTN; PAM sequence: CTA
tttggtggtacagatagtca

SEQ ID NO: 197869 - DNA, 20 bp, Artificial Sequence
  Description of Artificial Sequence: Synthetic oligonucleotide
  Target: LAMA2; (-) strand; PAM type: YTN; PAM sequence: TTG
agtaatgggctatttggtgg

SEQ ID NO: 197870 - DNA, 20 bp, Artificial Sequence
  Description of Artificial Sequence: Synthetic oligonucleotide
  Target: LAMA2; (-) strand; PAM type: YTN; PAM sequence: TTT
gagtaatgggctatttggtg

SEQ ID NO: 197871 - DNA, 20 bp, Artificial Sequence
  Description of Artificial Sequence: Synthetic oligonucleotide
  Target: LAMA2; (-) strand; PAM type: YTN; PAM sequence: TTG
aggatttgagtaatgggcta

SEQ ID NO: 197872 - DNA, 20 bp, Artificial Sequence
  Description of Artificial Sequence: Synthetic oligonucleotide
  Target: LAMA2; (-) strand; PAM type: YTN; PAM sequence: TTG
aagagaaaaagttgaggatt

SEQ ID NO: 197873 - DNA, 20 bp, Artificial Sequence
  Description of Artificial Sequence: Synthetic oligonucleotide
  Target: LAMA2; (-) strand; PAM type: YTN; PAM sequence: CTA
tataaatagaggtcacatac

SEQ ID NO: 197874 - DNA, 20 bp, Artificial Sequence
  Description of Artificial Sequence: Synthetic oligonucleotide
  Target: LAMA2; (-) strand; PAM type: YTN; PAM sequence: TTG
actatataaatagaggtcac

SEQ ID NO: 197875 - DNA, 20 bp, Artificial Sequence
  Description of Artificial Sequence: Synthetic oligonucleotide
  Target: LAMA2; (-) strand; PAM type: YTN; PAM sequence: TTC
aaatcaagaagtattgacta

SEQ ID NO: 197876 - DNA, 20 bp, Artificial Sequence
  Description of Artificial Sequence: Synthetic oligonucleotide
  Target: LAMA2; (-) strand; PAM type: YTN; PAM sequence: TTT
caaatcaagaagtattgact

SEQ ID NO: 197877 - DNA, 20 bp, Artificial Sequence
  Description of Artificial Sequence: Synthetic oligonucleotide
  Target: LAMA2; (-) strand; PAM type: YTN; PAM sequence: TTT
tcaaatcaagaagtattgac

SEQ ID NO: 197878 - DNA, 20 bp, Artificial Sequence
  Description of Artificial Sequence: Synthetic oligonucleotide
  Target: LAMA2; (-) strand; PAM type: YTN; PAM sequence: TTT
ttcaaatcaagaagtattga

SEQ ID NO: 197879 - DNA, 20 bp, Artificial Sequence
  Description of Artificial Sequence: Synthetic oligonucleotide
  Target: LAMA2; (-) strand; PAM type: YTN; PAM sequence: CTT
tttcaaatcaagaagtattg

SEQ ID NO: 197880 - DNA, 20 bp, Artificial Sequence
  Description of Artificial Sequence: Synthetic oligonucleotide
  Target: LAMA2; (-) strand; PAM type: YTN; PAM sequence: TTA
tcatccaatcctttttcaaa

SEQ ID NO: 197881 - DNA, 20 bp, Artificial Sequence
  Description of Artificial Sequence: Synthetic oligonucleotide
  Target: LAMA2; (-) strand; PAM type: YTN; PAM sequence: CTA
ttatcatccaatcctttttc

SEQ ID NO: 197882 - DNA, 20 bp, Artificial Sequence
  Description of Artificial Sequence: Synthetic oligonucleotide
  Target: LAMA2; (-) strand; PAM type: YTN; PAM sequence: TTC
tattatcatccaatcctttt

SEQ ID NO: 197883 - DNA, 20 bp, Artificial Sequence
  Description of Artificial Sequence: Synthetic oligonucleotide
  Target: LAMA2; (-) strand; PAM type: YTN; PAM sequence: CTT
ctattatcatccaatccttt

SEQ ID NO: 197884 - DNA, 20 bp, Artificial Sequence
  Description of Artificial Sequence: Synthetic oligonucleotide
  Target: LAMA2; (-) strand; PAM type: YTN; PAM sequence: TTC
acttctattatcatccaatc

SEQ ID NO: 197885 - DNA, 20 bp, Artificial Sequence
  Description of Artificial Sequence: Synthetic oligonucleotide
  Target: LAMA2; (-) strand; PAM type: YTN; PAM sequence: TTT
cacttctattatcatccaat

SEQ ID NO: 197886 - DNA, 20 bp, Artificial Sequence
  Description of Artificial Sequence: Synthetic oligonucleotide
  Target: LAMA2; (-) strand; PAM type: YTN; PAM sequence: TTT
tcacttctattatcatccaa

SEQ ID NO: 197887 - DNA, 20 bp, Artificial Sequence
  Description of Artificial Sequence: Synthetic oligonucleotide
  Target: LAMA2; (-) strand; PAM type: YTN; PAM sequence: CTT
ttcacttctattatcatcca

SEQ ID NO: 197888 - DNA, 20 bp, Artificial Sequence
  Description of Artificial Sequence: Synthetic oligonucleotide
  Target: LAMA2; (-) strand; PAM type: YTN; PAM sequence: TTC
aaacttttcacttctattat

SEQ ID NO: 197889 - DNA, 20 bp, Artificial Sequence
  Description of Artificial Sequence: Synthetic oligonucleotide
  Target: LAMA2; (-) strand; PAM type: YTN; PAM sequence: TTA
tagataaagaaaaagaaaaa

SEQ ID NO: 197890 - DNA, 20 bp, Artificial Sequence
  Description of Artificial Sequence: Synthetic oligonucleotide
  Target: LAMA2; (-) strand; PAM type: YTN; PAM sequence: TTT
atagataaagaaaaagaaaa

SEQ ID NO: 197891 - DNA, 20 bp, Artificial Sequence
  Description of Artificial Sequence: Synthetic oligonucleotide
  Target: LAMA2; (-) strand; PAM type: YTN; PAM sequence: CTG
gtttatagataaagaaaaag

SEQ ID NO: 197892 - DNA, 20 bp, Artificial Sequence
  Description of Artificial Sequence: Synthetic oligonucleotide
  Target: LAMA2; (-) strand; PAM type: YTN; PAM sequence: CTG
ggcgctggtttatagataaa

SEQ ID NO: 197893 - DNA, 20 bp, Artificial Sequence
  Description of Artificial Sequence: Synthetic oligonucleotide
  Target: LAMA2; (-) strand; PAM type: YTN; PAM sequence: TTC
caactgggcgctggtttata

SEQ ID NO: 197894 - DNA, 20 bp, Artificial Sequence
  Description of Artificial Sequence: Synthetic oligonucleotide
  Target: LAMA2; (-) strand; PAM type: YTN; PAM sequence: CTA
aaatatggaaatgttccaac

SEQ ID NO: 197895 - DNA, 20 bp, Artificial Sequence
  Description of Artificial Sequence: Synthetic oligonucleotide
  Target: LAMA2; (-) strand; PAM type: YTN; PAM sequence: TTA
gaactaaaatatggaaatgt

SEQ ID NO: 197896 - DNA, 20 bp, Artificial Sequence
  Description of Artificial Sequence: Synthetic oligonucleotide
  Target: LAMA2; (-) strand; PAM type: YTN; PAM sequence: CTT
agaactaaaatatggaaatg

SEQ ID NO: 197897 - DNA, 20 bp, Artificial Sequence
  Description of Artificial Sequence: Synthetic oligonucleotide
  Target: LAMA2; (-) strand; PAM type: YTN; PAM sequence: TTA
caaccttagaactaaaatat

SEQ ID NO: 197898 - DNA, 20 bp, Artificial Sequence
  Description of Artificial Sequence: Synthetic oligonucleotide
  Target: LAMA2; (-) strand; PAM type: YTN; PAM sequence: TTT
acaaccttagaactaaaata

SEQ ID NO: 197899 - DNA, 20 bp, Artificial Sequence
  Description of Artificial Sequence: Synthetic oligonucleotide
  Target: LAMA2; (-) strand; PAM type: YTN; PAM sequence: TTC
agcaatttacaaccttagaa

SEQ ID NO: 197900 - DNA, 20 bp, Artificial Sequence
  Description of Artificial Sequence: Synthetic oligonucleotide
  Target: LAMA2; (-) strand; PAM type: YTN; PAM sequence: TTT
cagcaatttacaaccttaga

SEQ ID NO: 197901 - DNA, 20 bp, Artificial Sequence
  Description of Artificial Sequence: Synthetic oligonucleotide
  Target: LAMA2; (-) strand; PAM type: YTN; PAM sequence: CTT
tcagcaatttacaaccttag

SEQ ID NO: 197902 - DNA, 20 bp, Artificial Sequence
  Description of Artificial Sequence: Synthetic oligonucleotide
  Target: LAMA2; (-) strand; PAM type: YTN; PAM sequence: CTA
aactttcagcaatttacaac

SEQ ID NO: 197903 - DNA, 20 bp, Artificial Sequence
  Description of Artificial Sequence: Synthetic oligonucleotide
  Target: LAMA2; (-) strand; PAM type: YTN; PAM sequence: TTA
gcagagaatcatcaataaga

SEQ ID NO: 197904 - DNA, 20 bp, Artificial Sequence
  Description of Artificial Sequence: Synthetic oligonucleotide
  Target: LAMA2; (-) strand; PAM type: YTN; PAM sequence: TTA
tcaaatgttagcagagaatc

SEQ ID NO: 197905 - DNA, 20 bp, Artificial Sequence
  Description of Artificial Sequence: Synthetic oligonucleotide
  Target: LAMA2; (-) strand; PAM type: YTN; PAM sequence: CTT
atcaaatgttagcagagaat

SEQ ID NO: 197906 - DNA, 20 bp, Artificial Sequence
  Description of Artificial Sequence: Synthetic oligonucleotide
  Target: LAMA2; (-) strand; PAM type: YTN; PAM sequence: CTA
cttatcaaatgttagcagag

SEQ ID NO: 197907 - DNA, 20 bp, Artificial Sequence
  Description of Artificial Sequence: Synthetic oligonucleotide
  Target: LAMA2; (-) strand; PAM type: YTN; PAM sequence: TTC
aatgggacctacttatcaaa

SEQ ID NO: 197908 - DNA, 20 bp, Artificial Sequence
  Description of Artificial Sequence: Synthetic oligonucleotide
  Target: LAMA2; (-) strand; PAM type: YTN; PAM sequence: TTG
tgatattcaatgggacctac

SEQ ID NO: 197909 - DNA, 20 bp, Artificial Sequence
  Description of Artificial Sequence: Synthetic oligonucleotide
  Target: LAMA2; (-) strand; PAM type: YTN; PAM sequence: TTA
attgtgatattcaatgggac

SEQ ID NO: 197910 - DNA, 20 bp, Artificial Sequence
  Description of Artificial Sequence: Synthetic oligonucleotide
  Target: LAMA2; (-) strand; PAM type: YTN; PAM sequence: TTA
aatagattaattgtgatatt

SEQ ID NO: 197911 - DNA, 20 bp, Artificial Sequence
  Description of Artificial Sequence: Synthetic oligonucleotide
  Target: LAMA2; (-) strand; PAM type: YTN; PAM sequence: CTT
aaatagattaattgtgatat

SEQ ID NO: 197912 - DNA, 20 bp, Artificial Sequence
  Description of Artificial Sequence: Synthetic oligonucleotide
  Target: LAMA2; (-) strand; PAM type: YTN; PAM sequence: TTC
ttaaatagattaattgtgat

SEQ ID NO: 197913 - DNA, 20 bp, Artificial Sequence
  Description of Artificial Sequence: Synthetic oligonucleotide
  Target: LAMA2; (-) strand; PAM type: YTN; PAM sequence: CTT
cttaaatagattaattgtga

SEQ ID NO: 197914 - DNA, 20 bp, Artificial Sequence
  Description of Artificial Sequence: Synthetic oligonucleotide
  Target: LAMA2; (-) strand; PAM type: YTN; PAM sequence: CTC
aaccttcttaaatagattaa

SEQ ID NO: 197915 - DNA, 20 bp, Artificial Sequence
  Description of Artificial Sequence: Synthetic oligonucleotide
  Target: LAMA2; (-) strand; PAM type: YTN; PAM sequence: CTC
tcaaccttcttaaatagatt

SEQ ID NO: 197916 - DNA, 20 bp, Artificial Sequence
  Description of Artificial Sequence: Synthetic oligonucleotide
  Target: LAMA2; (-) strand; PAM type: YTN; PAM sequence: TTA
acagtatatctctcaacctt

SEQ ID NO: 197917 - DNA, 20 bp, Artificial Sequence
  Description of Artificial Sequence: Synthetic oligonucleotide
  Target: LAMA2; (-) strand; PAM type: YTN; PAM sequence: TTT
aacagtatatctctcaacct

SEQ ID NO: 197918 - DNA, 20 bp, Artificial Sequence
  Description of Artificial Sequence: Synthetic oligonucleotide
  Target: LAMA2; (-) strand; PAM type: YTN; PAM sequence: TTG
gtttaacagtatatctctca

SEQ ID NO: 197919 - DNA, 20 bp, Artificial Sequence
  Description of Artificial Sequence: Synthetic oligonucleotide
  Target: LAMA2; (-) strand; PAM type: YTN; PAM sequence: TTT
ggtttaacagtatatctctc

SEQ ID NO: 197920 - DNA, 20 bp, Artificial Sequence
  Description of Artificial Sequence: Synthetic oligonucleotide
  Target: LAMA2; (-) strand; PAM type: YTN; PAM sequence: CTT
tggtttaacagtatatctct

SEQ ID NO: 197921 - DNA, 20 bp, Artificial Sequence
  Description of Artificial Sequence: Synthetic oligonucleotide
  Target: LAMA2; (-) strand; PAM type: YTN; PAM sequence: TTC
cctttggtttaacagtatat

SEQ ID NO: 197922 - DNA, 20 bp, Artificial Sequence
  Description of Artificial Sequence: Synthetic oligonucleotide
  Target: LAMA2; (-) strand; PAM type: YTN; PAM sequence: TTT
ccctttggtttaacagtata

SEQ ID NO: 197923 - DNA, 20 bp, Artificial Sequence
  Description of Artificial Sequence: Synthetic oligonucleotide
  Target: LAMA2; (-) strand; PAM type: YTN; PAM sequence: TTT
tccctttggtttaacagtat

SEQ ID NO: 197924 - DNA, 20 bp, Artificial Sequence
  Description of Artificial Sequence: Synthetic oligonucleotide
  Target: LAMA2; (-) strand; PAM type: YTN; PAM sequence: TTA
ccattttccctttggtttaa

SEQ ID NO: 197925 - DNA, 20 bp, Artificial Sequence
  Description of Artificial Sequence: Synthetic oligonucleotide
  Target: LAMA2; (-) strand; PAM type: YTN; PAM sequence: TTT
accattttccctttggttta

SEQ ID NO: 197926 - DNA, 20 bp, Artificial Sequence
  Description of Artificial Sequence: Synthetic oligonucleotide
  Target: LAMA2; (-) strand; PAM type: YTN; PAM sequence: TTC
atttaccattttccctttgg

SEQ ID NO: 197927 - DNA, 20 bp, Artificial Sequence
  Description of Artificial Sequence: Synthetic oligonucleotide
  Target: LAMA2; (-) strand; PAM type: YTN; PAM sequence: TTT
catttaccattttccctttg

SEQ ID NO: 197928 - DNA, 20 bp, Artificial Sequence
  Description of Artificial Sequence: Synthetic oligonucleotide
  Target: LAMA2; (-) strand; PAM type: YTN; PAM sequence: TTG
taatttcatttaccattttc

SEQ ID NO: 197929 - DNA, 20 bp, Artificial Sequence
  Description of Artificial Sequence: Synthetic oligonucleotide
  Target: LAMA2; (-) strand; PAM type: YTN; PAM sequence: TTA
ggggaaaaatataaattgta

SEQ ID NO: 197930 - DNA, 20 bp, Artificial Sequence
  Description of Artificial Sequence: Synthetic oligonucleotide
  Target: LAMA2; (-) strand; PAM type: YTN; PAM sequence: TTC
aatgcccatgaattagggga

SEQ ID NO: 197931 - DNA, 20 bp, Artificial Sequence
  Description of Artificial Sequence: Synthetic oligonucleotide
  Target: LAMA2; (-) strand; PAM type: YTN; PAM sequence: TTA
atattcaatgcccatgaatt

SEQ ID NO: 197932 - DNA, 20 bp, Artificial Sequence
  Description of Artificial Sequence: Synthetic oligonucleotide
  Target: LAMA2; (-) strand; PAM type: YTN; PAM sequence: CTA
agttaatattcaatgcccat

SEQ ID NO: 197933 - DNA, 20 bp, Artificial Sequence
  Description of Artificial Sequence: Synthetic oligonucleotide
  Target: LAMA2; (-) strand; PAM type: YTN; PAM sequence: CTA
caagtgcagaccactaagtt

SEQ ID NO: 197934 - DNA, 20 bp, Artificial Sequence
  Description of Artificial Sequence: Synthetic oligonucleotide
  Target: LAMA2; (-) strand; PAM type: YTN; PAM sequence: TTA
acaagctacaagtgcagacc

SEQ ID NO: 197935 - DNA, 20 bp, Artificial Sequence
  Description of Artificial Sequence: Synthetic oligonucleotide
  Target: LAMA2; (-) strand; PAM type: YTN; PAM sequence: CTA
gatgtcaaacaattaacaag

SEQ ID NO: 197936 - DNA, 20 bp, Artificial Sequence
  Description of Artificial Sequence: Synthetic oligonucleotide
  Target: LAMA2; (-) strand; PAM type: YTN; PAM sequence: TTC
agctagatgtcaaacaatta

SEQ ID NO: 197937 - DNA, 20 bp, Artificial Sequence
  Description of Artificial Sequence: Synthetic oligonucleotide
  Target: LAMA2; (-) strand; PAM type: YTN; PAM sequence: TTT
cagctagatgtcaaacaatt

SEQ ID NO: 197938 - DNA, 20 bp, Artificial Sequence
  Description of Artificial Sequence: Synthetic oligonucleotide
  Target: LAMA2; (-) strand; PAM type: YTN; PAM sequence: TTT
tcagctagatgtcaaacaat

SEQ ID NO: 197939 - DNA, 20 bp, Artificial Sequence
  Description of Artificial Sequence: Synthetic oligonucleotide
  Target: LAMA2; (-) strand; PAM type: YTN; PAM sequence: CTT
ttcagctagatgtcaaacaa

SEQ ID NO: 197940 - DNA, 20 bp, Artificial Sequence
  Description of Artificial Sequence: Synthetic oligonucleotide
  Target: LAMA2; (-) strand; PAM type: YTN; PAM sequence: TTA
cttttcagctagatgtcaaa

SEQ ID NO: 197941 - DNA, 20 bp, Artificial Sequence
  Description of Artificial Sequence: Synthetic oligonucleotide
  Target: LAMA2; (-) strand; PAM type: YTN; PAM sequence: TTT
acttttcagctagatgtcaa

SEQ ID NO: 197942 - DNA, 20 bp, Artificial Sequence
  Description of Artificial Sequence: Synthetic oligonucleotide
  Target: LAMA2; (-) strand; PAM type: YTN; PAM sequence: CTT
tacttttcagctagatgtca

SEQ ID NO: 197943 - DNA, 20 bp, Artificial Sequence
  Description of Artificial Sequence: Synthetic oligonucleotide
  Target: LAMA2; (-) strand; PAM type: YTN; PAM sequence: CTG
tgatataacactttactttt

SEQ ID NO: 197944 - DNA, 20 bp, Artificial Sequence
  Description of Artificial Sequence: Synthetic oligonucleotide
  Target: LAMA2; (-) strand; PAM type: YTN; PAM sequence: CTA
tctgtgatataacactttac

SEQ ID NO: 197945 - DNA, 20 bp, Artificial Sequence
  Description of Artificial Sequence: Synthetic oligonucleotide
  Target: LAMA2; (-) strand; PAM type: YTN; PAM sequence: TTA
gaaaagctatctgtgatata

SEQ ID NO: 197946 - DNA, 20 bp, Artificial Sequence
  Description of Artificial Sequence: Synthetic oligonucleotide
  Target: LAMA2; (-) strand; PAM type: YTN; PAM sequence: TTG
caattagaaaagctatctgt

SEQ ID NO: 197947 - DNA, 20 bp, Artificial Sequence
  Description of Artificial Sequence: Synthetic oligonucleotide
  Target: LAMA2; (-) strand; PAM type: YTN; PAM sequence: TTT
gcaattagaaaagctatctg

SEQ ID NO: 197948 - DNA, 20 bp, Artificial Sequence
  Description of Artificial Sequence: Synthetic oligonucleotide
  Target: LAMA2; (-) strand; PAM type: YTN; PAM sequence: TTA
gtgaaccaatgaataaacag

SEQ ID NO: 197949 - DNA, 20 bp, Artificial Sequence
  Description of Artificial Sequence: Synthetic oligonucleotide
  Target: LAMA2; (-) strand; PAM type: YTN; PAM sequence: CTT
agtgaaccaatgaataaaca

SEQ ID NO: 197950 - DNA, 20 bp, Artificial Sequence
  Description of Artificial Sequence: Synthetic oligonucleotide
  Target: LAMA2; (-) strand; PAM type: YTN; PAM sequence: TTA
aggcttagtgaaccaatgaa

SEQ ID NO: 197951 - DNA, 20 bp, Artificial Sequence
  Description of Artificial Sequence: Synthetic oligonucleotide
  Target: LAMA2; (-) strand; PAM type: YTN; PAM sequence: CTA
attaaggcttagtgaaccaa

SEQ ID NO: 197952 - DNA, 20 bp, Artificial Sequence
  Description of Artificial Sequence: Synthetic oligonucleotide
  Target: LAMA2; (-) strand; PAM type: YTN; PAM sequence: TTG
gtacaggatagatacctaat

SEQ ID NO: 197953 - DNA, 20 bp, Artificial Sequence
  Description of Artificial Sequence: Synthetic oligonucleotide
  Target: LAMA2; (-) strand; PAM type: YTN; PAM sequence: TTT
ggtacaggatagatacctaa

SEQ ID NO: 197954 - DNA, 20 bp, Artificial Sequence
  Description of Artificial Sequence: Synthetic oligonucleotide
  Target: LAMA2; (-) strand; PAM type: YTN; PAM sequence: CTG
gcataccatttggtacagga

SEQ ID NO: 197955 - DNA, 20 bp, Artificial Sequence
  Description of Artificial Sequence: Synthetic oligonucleotide
  Target: LAMA2; (-) strand; PAM type: YTN; PAM sequence: CTC
acccctggcataccatttgg

SEQ ID NO: 197956 - DNA, 20 bp, Artificial Sequence
  Description of Artificial Sequence: Synthetic oligonucleotide
  Target: LAMA2; (-) strand; PAM type: YTN; PAM sequence: TTG
tatcctcacccctggcatac

SEQ ID NO: 197957 - DNA, 20 bp, Artificial Sequence
  Description of Artificial Sequence: Synthetic oligonucleotide
  Target: LAMA2; (-) strand; PAM type: YTN; PAM sequence: TTT
gtatcctcacccctggcata

SEQ ID NO: 197958 - DNA, 20 bp, Artificial Sequence
  Description of Artificial Sequence: Synthetic oligonucleotide
  Target: LAMA2; (-) strand; PAM type: YTN; PAM sequence: CTT
tgtatcctcacccctggcat

SEQ ID NO: 197959 - DNA, 20 bp, Artificial Sequence
  Description of Artificial Sequence: Synthetic oligonucleotide
  Target: LAMA2; (-) strand; PAM type: YTN; PAM sequence: CTA
tctttgtatcctcacccctg

SEQ ID NO: 197960 - DNA, 20 bp, Artificial Sequence
  Description of Artificial Sequence: Synthetic oligonucleotide
  Target: LAMA2; (-) strand; PAM type: YTN; PAM sequence: TTC
tatctttgtatcctcacccc

SEQ ID NO: 197961 - DNA, 20 bp, Artificial Sequence
  Description of Artificial Sequence: Synthetic oligonucleotide
  Target: LAMA2; (-) strand; PAM type: YTN; PAM sequence: CTA
ttctatctttgtatcctcac

SEQ ID NO: 197962 - DNA, 20 bp, Artificial Sequence
  Description of Artificial Sequence: Synthetic oligonucleotide
  Target: LAMA2; (-) strand; PAM type: YTN; PAM sequence: TTC
tattctatctttgtatcctc

SEQ ID NO: 197963 - DNA, 20 bp, Artificial Sequence
  Description of Artificial Sequence: Synthetic oligonucleotide
  Target: LAMA2; (-) strand; PAM type: YTN; PAM sequence: CTA
aaaagttctattctatcttt

SEQ ID NO: 197964 - DNA, 20 bp, Artificial Sequence
  Description of Artificial Sequence: Synthetic oligonucleotide
  Target: LAMA2; (-) strand; PAM type: YTN; PAM sequence: TTG
tactaaaaagttctattcta

SEQ ID NO: 197965 - DNA, 20 bp, Artificial Sequence
  Description of Artificial Sequence: Synthetic oligonucleotide
  Target: LAMA2; (-) strand; PAM type: YTN; PAM sequence: TTC
acattgtactaaaaagttct

SEQ ID NO: 197966 - DNA, 20 bp, Artificial Sequence
  Description of Artificial Sequence: Synthetic oligonucleotide
  Target: LAMA2; (-) strand; PAM type: YTN; PAM sequence: CTT
cacattgtactaaaaagttc

SEQ ID NO: 197967 - DNA, 20 bp, Artificial Sequence
  Description of Artificial Sequence: Synthetic oligonucleotide
  Target: LAMA2; (-) strand; PAM type: YTN; PAM sequence: TTC
ttcacattgtactaaaaagt

SEQ ID NO: 197968 - DNA, 20 bp, Artificial Sequence
  Description of Artificial Sequence: Synthetic oligonucleotide
  Target: LAMA2; (-) strand; PAM type: YTN; PAM sequence: TTT
cttcacattgtactaaaaag

SEQ ID NO: 197969 - DNA, 20 bp, Artificial Sequence
  Description of Artificial Sequence: Synthetic oligonucleotide
  Target: LAMA2; (-) strand; PAM type: YTN; PAM sequence: CTT
tcttcacattgtactaaaaa

SEQ ID NO: 197970 - DNA, 20 bp, Artificial Sequence
  Description of Artificial Sequence: Synthetic oligonucleotide
  Target: LAMA2; (-) strand; PAM type: YTN; PAM sequence: TTC
tttcttcacattgtactaaa

SEQ ID NO: 197971 - DNA, 20 bp, Artificial Sequence
  Description of Artificial Sequence: Synthetic oligonucleotide
  Target: LAMA2; (-) strand; PAM type: YTN; PAM sequence: TTT
ctttcttcacattgtactaa

SEQ ID NO: 197972 - DNA, 20 bp, Artificial Sequence
  Description of Artificial Sequence: Synthetic oligonucleotide
  Target: LAMA2; (-) strand; PAM type: YTN; PAM sequence: TTA
tgtttctttcttcacattgt

SEQ ID NO: 197973 - DNA, 20 bp, Artificial Sequence
  Description of Artificial Sequence: Synthetic oligonucleotide
  Target: LAMA2; (-) strand; PAM type: YTN; PAM sequence: TTT
atgtttctttcttcacattg

SEQ ID NO: 197974 - DNA, 20 bp, Artificial Sequence
  Description of Artificial Sequence: Synthetic oligonucleotide
  Target: LAMA2; (-) strand; PAM type: YTN; PAM sequence: CTT
tatgtttctttcttcacatt

SEQ ID NO: 197975 - DNA, 20 bp, Artificial Sequence
  Description of Artificial Sequence: Synthetic oligonucleotide
  Target: LAMA2; (-) strand; PAM type: YTN; PAM sequence: TTC
tttatgtttctttcttcaca

SEQ ID NO: 197976 - DNA, 20 bp, Artificial Sequence
  Description of Artificial Sequence: Synthetic oligonucleotide
  Target: LAMA2; (-) strand; PAM type: YTN; PAM sequence: TTT
ctttatgtttctttcttcac

SEQ ID NO: 197977 - DNA, 20 bp, Artificial Sequence
  Description of Artificial Sequence: Synthetic oligonucleotide
  Target: LAMA2; (-) strand; PAM type: YTN; PAM sequence: TTA
tttctttatgtttctttctt

SEQ ID NO: 197978 - DNA, 20 bp, Artificial Sequence
  Description of Artificial Sequence: Synthetic oligonucleotide
  Target: LAMA2; (-) strand; PAM type: YTN; PAM sequence: CTT
atttctttatgtttctttct

SEQ ID NO: 197979 - DNA, 20 bp, Artificial Sequence
  Description of Artificial Sequence: Synthetic oligonucleotide
  Target: LAMA2; (-) strand; PAM type: YTN; PAM sequence: TTC
agcagtcttatttctttatg

SEQ ID NO: 197980 - DNA, 20 bp, Artificial Sequence
  Description of Artificial Sequence: Synthetic oligonucleotide
  Target: LAMA2; (-) strand; PAM type: YTN; PAM sequence: CTT
cagcagtcttatttctttat

SEQ ID NO: 197981 - DNA, 20 bp, Artificial Sequence
  Description of Artificial Sequence: Synthetic oligonucleotide
  Target: LAMA2; (-) strand; PAM type: YTN; PAM sequence: TTA
aaatacttcagcagtcttat

SEQ ID NO: 197982 - DNA, 20 bp, Artificial Sequence
  Description of Artificial Sequence: Synthetic oligonucleotide
  Target: LAMA2; (-) strand; PAM type: YTN; PAM sequence: CTG
gtagttaaaatacttcagca

SEQ ID NO: 197983 - DNA, 20 bp, Artificial Sequence
  Description of Artificial Sequence: Synthetic oligonucleotide
  Target: LAMA2; (-) strand; PAM type: YTN; PAM sequence: CTC
agaaaatccaaatgaagcat

SEQ ID NO: 197984 - DNA, 20 bp, Artificial Sequence
  Description of Artificial Sequence: Synthetic oligonucleotide
  Target: LAMA2; (-) strand; PAM type: YTN; PAM sequence: TTA
aagcctcagaaaatccaaat

SEQ ID NO: 197985 - DNA, 20 bp, Artificial Sequence
  Description of Artificial Sequence: Synthetic oligonucleotide
  Target: LAMA2; (-) strand; PAM type: YTN; PAM sequence: TTA
aaaacggaaaacgttaaagc

SEQ ID NO: 197986 - DNA, 20 bp, Artificial Sequence
  Description of Artificial Sequence: Synthetic oligonucleotide
  Target: LAMA2; (-) strand; PAM type: YTN; PAM sequence: CTT
aaaaacggaaaacgttaaag

SEQ ID NO: 197987 - DNA, 20 bp, Artificial Sequence
  Description of Artificial Sequence: Synthetic oligonucleotide
  Target: LAMA2; (-) strand; PAM type: YTN; PAM sequence: TTA
gtcttaaaaacggaaaacgt

SEQ ID NO: 197988 - DNA, 20 bp, Artificial Sequence
  Description of Artificial Sequence: Synthetic oligonucleotide
  Target: LAMA2; (-) strand; PAM type: YTN; PAM sequence: CTT
agtcttaaaaacggaaaacg

SEQ ID NO: 197989 - DNA, 20 bp, Artificial Sequence
  Description of Artificial Sequence: Synthetic oligonucleotide
  Target: LAMA2; (-) strand; PAM type: YTN; PAM sequence: TTG
agcttagtcttaaaaacgga

SEQ ID NO: 197990 - DNA, 20 bp, Artificial Sequence
  Description of Artificial Sequence: Synthetic oligonucleotide
  Target: LAMA2; (-) strand; PAM type: YTN; PAM sequence: CTT
gagcttagtcttaaaaacgg

SEQ ID NO: 197991 - DNA, 20 bp, Artificial Sequence
  Description of Artificial Sequence: Synthetic oligonucleotide
  Target: LAMA2; (-) strand; PAM type: YTN; PAM sequence: TTG
acccttgagcttagtcttaa

SEQ ID NO: 197992 - DNA, 20 bp, Artificial Sequence
  Description of Artificial Sequence: Synthetic oligonucleotide
  Target: LAMA2; (-) strand; PAM type: YTN; PAM sequence: TTC
atgaaagagttgacccttga

SEQ ID NO: 197993 - DNA, 20 bp, Artificial Sequence
  Description of Artificial Sequence: Synthetic oligonucleotide
  Target: LAMA2; (-) strand; PAM type: YTN; PAM sequence: TTT
catgaaagagttgacccttg

SEQ ID NO: 197994 - DNA, 20 bp, Artificial Sequence
  Description of Artificial Sequence: Synthetic oligonucleotide
  Target: LAMA2; (-) strand; PAM type: YTN; PAM sequence: TTT
tcatgaaagagttgaccctt

SEQ ID NO: 197995 - DNA, 20 bp, Artificial Sequence
  Description of Artificial Sequence: Synthetic oligonucleotide
  Target: LAMA2; (-) strand; PAM type: YTN; PAM sequence: TTA
attttcatgaaagagttgac

SEQ ID NO: 197996 - DNA, 20 bp, Artificial Sequence
  Description of Artificial Sequence: Synthetic oligonucleotide
  Target: LAMA2; (-) strand; PAM type: YTN; PAM sequence: TTA
tagatggaaacataaatagc

SEQ ID NO: 197997 - DNA, 20 bp, Artificial Sequence
  Description of Artificial Sequence: Synthetic oligonucleotide
  Target: LAMA2; (-) strand; PAM type: YTN; PAM sequence: CTT
atagatggaaacataaatag

SEQ ID NO: 197998 - DNA, 20 bp, Artificial Sequence
  Description of Artificial Sequence: Synthetic oligonucleotide
  Target: LAMA2; (-) strand; PAM type: YTN; PAM sequence: TTC
ttatagatggaaacataaat

SEQ ID NO: 197999 - DNA, 20 bp, Artificial Sequence
  Description of Artificial Sequence: Synthetic oligonucleotide
  Target: LAMA2; (-) strand; PAM type: YTN; PAM sequence: CTT
cttatagatggaaacataaa

SEQ ID NO: 198000 - DNA, 20 bp, Artificial Sequence
  Description of Artificial Sequence: Synthetic oligonucleotide
  Target: LAMA2; (-) strand; PAM type: YTN; PAM sequence: CTC
ttcttatagatggaaacata

SEQ ID NO: 198001 - DNA, 20 bp, Artificial Sequence
  Description of Artificial Sequence: Synthetic oligonucleotide
  Target: LAMA2; (-) strand; PAM type: YTN; PAM sequence: TTC
actcttcttatagatggaaa

SEQ ID NO: 198002 - DNA, 20 bp, Artificial Sequence
  Description of Artificial Sequence: Synthetic oligonucleotide
  Target: LAMA2; (-) strand; PAM type: YTN; PAM sequence: TTT
cactcttcttatagatggaa

SEQ ID NO: 198003 - DNA, 20 bp, Artificial Sequence
  Description of Artificial Sequence: Synthetic oligonucleotide
  Target: LAMA2; (-) strand; PAM type: YTN; PAM sequence: TTA
tttcactcttcttatagatg

SEQ ID NO: 198004 - DNA, 20 bp, Artificial Sequence
  Description of Artificial Sequence: Synthetic oligonucleotide
  Target: LAMA2; (-) strand; PAM type: YTN; PAM sequence: TTT
atttcactcttcttatagat

SEQ ID NO: 198005 - DNA, 20 bp, Artificial Sequence
  Description of Artificial Sequence: Synthetic oligonucleotide
  Target: LAMA2; (-) strand; PAM type: YTN; PAM sequence: TTG
tttatttcactcttcttata

SEQ ID NO: 198006 - DNA, 20 bp, Artificial Sequence
  Description of Artificial Sequence: Synthetic oligonucleotide
  Target: LAMA2; (-) strand; PAM type: YTN; PAM sequence: TTC
attgtttatttcactcttct

SEQ ID NO: 198007 - DNA, 20 bp, Artificial Sequence
  Description of Artificial Sequence: Synthetic oligonucleotide
  Target: LAMA2; (-) strand; PAM type: YTN; PAM sequence: TTT
cattgtttatttcactcttc

SEQ ID NO: 198008 - DNA, 20 bp, Artificial Sequence
  Description of Artificial Sequence: Synthetic oligonucleotide
  Target: LAMA2; (-) strand; PAM type: YTN; PAM sequence: TTA
gatttcattgtttatttcac

SEQ ID NO: 198009 - DNA, 20 bp, Artificial Sequence
  Description of Artificial Sequence: Synthetic oligonucleotide
  Target: LAMA2; (-) strand; PAM type: YTN; PAM sequence: TTC
agtgtcattagatttcattg

SEQ ID NO: 198010 - DNA, 20 bp, Artificial Sequence
  Description of Artificial Sequence: Synthetic oligonucleotide
  Target: LAMA2; (-) strand; PAM type: YTN; PAM sequence: TTT
cagtgtcattagatttcatt

SEQ ID NO: 198011 - DNA, 20 bp, Artificial Sequence
  Description of Artificial Sequence: Synthetic oligonucleotide
  Target: LAMA2; (-) strand; PAM type: YTN; PAM sequence: TTT
tcagtgtcattagatttcat

SEQ ID NO: 198012 - DNA, 20 bp, Artificial Sequence
  Description of Artificial Sequence: Synthetic oligonucleotide
  Target: LAMA2; (-) strand; PAM type: YTN; PAM sequence: CTT
ttcagtgtcattagatttca

SEQ ID NO: 198013 - DNA, 20 bp, Artificial Sequence
  Description of Artificial Sequence: Synthetic oligonucleotide
  Target: LAMA2; (-) strand; PAM type: YTN; PAM sequence: TTG
aaagcacttttcagtgtcat

SEQ ID NO: 198014 - DNA, 20 bp, Artificial Sequence
  Description of Artificial Sequence: Synthetic oligonucleotide
  Target: LAMA2; (-) strand; PAM type: YTN; PAM sequence: CTC
aacagtacattgaaagcact

SEQ ID NO: 198015 - DNA, 20 bp, Artificial Sequence
  Description of Artificial Sequence: Synthetic oligonucleotide
  Target: LAMA2; (-) strand; PAM type: YTN; PAM sequence: TTC
ccactcaacagtacattgaa

SEQ ID NO: 198016 - DNA, 20 bp, Artificial Sequence
  Description of Artificial Sequence: Synthetic oligonucleotide
  Target: LAMA2; (-) strand; PAM type: YTN; PAM sequence: TTT
cccactcaacagtacattga

SEQ ID NO: 198017 - DNA, 20 bp, Artificial Sequence
  Description of Artificial Sequence: Synthetic oligonucleotide
  Target: LAMA2; (-) strand; PAM type: YTN; PAM sequence: TTT
tcccactcaacagtacattg

SEQ ID NO: 198018 - DNA, 20 bp, Artificial Sequence
  Description of Artificial Sequence: Synthetic oligonucleotide
  Target: LAMA2; (-) strand; PAM type: YTN; PAM sequence: CTT
ttcccactcaacagtacatt

SEQ ID NO: 198019 - DNA, 20 bp, Artificial Sequence
  Description of Artificial Sequence: Synthetic oligonucleotide
  Target: LAMA2; (-) strand; PAM type: YTN; PAM sequence: TTA
aaaatgtggcttttcccact

SEQ ID NO: 198020 - DNA, 20 bp, Artificial Sequence
  Description of Artificial Sequence: Synthetic oligonucleotide
  Target: LAMA2; (-) strand; PAM type: YTN; PAM sequence: CTG
aatatacaagttaaaaatgt

SEQ ID NO: 198021 - DNA, 20 bp, Artificial Sequence
  Description of Artificial Sequence: Synthetic oligonucleotide
  Target: LAMA2; (-) strand; PAM type: YTN; PAM sequence: TTG
ggatcacactgaatatacaa

SEQ ID NO: 198022 - DNA, 20 bp, Artificial Sequence
  Description of Artificial Sequence: Synthetic oligonucleotide
  Target: LAMA2; (-) strand; PAM type: YTN; PAM sequence: TTA
taaaattgggatcacactga

SEQ ID NO: 198023 - DNA, 20 bp, Artificial Sequence
  Description of Artificial Sequence: Synthetic oligonucleotide
  Target: LAMA2; (-) strand; PAM type: YTN; PAM sequence: TTG
agagtaaaattataaaattg

SEQ ID NO: 198024 - DNA, 20 bp, Artificial Sequence
  Description of Artificial Sequence: Synthetic oligonucleotide
  Target: LAMA2; (-) strand; PAM type: YTN; PAM sequence: TTC
acatatatggattgagagta

SEQ ID NO: 198025 - DNA, 20 bp, Artificial Sequence
  Description of Artificial Sequence: Synthetic oligonucleotide
  Target: LAMA2; (-) strand; PAM type: YTN; PAM sequence: TTA
tattcacatatatggattga

SEQ ID NO: 198026 - DNA, 20 bp, Artificial Sequence
  Description of Artificial Sequence: Synthetic oligonucleotide
  Target: LAMA2; (-) strand; PAM type: YTN; PAM sequence: CTA
tgtattatattcacatatat

SEQ ID NO: 198027 - DNA, 20 bp, Artificial Sequence
  Description of Artificial Sequence: Synthetic oligonucleotide
  Target: LAMA2; (-) strand; PAM type: YTN; PAM sequence: TTC
ctatgtattatattcacata

SEQ ID NO: 198028 - DNA, 20 bp, Artificial Sequence
  Description of Artificial Sequence: Synthetic oligonucleotide
  Target: LAMA2; (-) strand; PAM type: YTN; PAM sequence: TTT
cctatgtattatattcacat

SEQ ID NO: 198029 - DNA, 20 bp, Artificial Sequence
  Description of Artificial Sequence: Synthetic oligonucleotide
  Target: LAMA2; (-) strand; PAM type: YTN; PAM sequence: CTT
tcctatgtattatattcaca

SEQ ID NO: 198030 - DNA, 20 bp, Artificial Sequence
  Description of Artificial Sequence: Synthetic oligonucleotide
  Target: LAMA2; (-) strand; PAM type: YTN; PAM sequence: CTC
tttcctatgtattatattca

SEQ ID NO: 198031 - DNA, 20 bp, Artificial Sequence
  Description of Artificial Sequence: Synthetic oligonucleotide
  Target: LAMA2; (-) strand; PAM type: YTN; PAM sequence: TTC
caacctctttcctatgtatt

SEQ ID NO: 198032 - DNA, 20 bp, Artificial Sequence
  Description of Artificial Sequence: Synthetic oligonucleotide
  Target: LAMA2; (-) strand; PAM type: YTN; PAM sequence: CTT
ccaacctctttcctatgtat

SEQ ID NO: 198033 - DNA, 20 bp, Artificial Sequence
  Description of Artificial Sequence: Synthetic oligonucleotide
  Target: LAMA2; (-) strand; PAM type: YTN; PAM sequence: TTA
cttccaacctctttcctatg

SEQ ID NO: 198034 - DNA, 20 bp, Artificial Sequence
  Description of Artificial Sequence: Synthetic oligonucleotide
  Target: LAMA2; (-) strand; PAM type: YTN; PAM sequence: TTG
aattacttccaacctctttc

SEQ ID NO: 198035 - DNA, 20 bp, Artificial Sequence
  Description of Artificial Sequence: Synthetic oligonucleotide
  Target: LAMA2; (-) strand; PAM type: YTN; PAM sequence: CTC
atgattgaattacttccaac

SEQ ID NO: 198036 - DNA, 20 bp, Artificial Sequence
  Description of Artificial Sequence: Synthetic oligonucleotide
  Target: LAMA2; (-) strand; PAM type: YTN; PAM sequence: TTA
acctcatgattgaattactt

SEQ ID NO: 198037 - DNA, 20 bp, Artificial Sequence
  Description of Artificial Sequence: Synthetic oligonucleotide
  Target: LAMA2; (-) strand; PAM type: YTN; PAM sequence: TTG
ttaacctcatgattgaatta

SEQ ID NO: 198038 - DNA, 20 bp, Artificial Sequence
  Description of Artificial Sequence: Synthetic oligonucleotide
  Target: LAMA2; (-) strand; PAM type: YTN; PAM sequence: CTT
gttaacctcatgattgaatt

SEQ ID NO: 198039 - DNA, 20 bp, Artificial Sequence
  Description of Artificial Sequence: Synthetic oligonucleotide
  Target: LAMA2; (-) strand; PAM type: YTN; PAM sequence: CTG
agataaaacttgttaacctc

SEQ ID NO: 198040 - DNA, 20 bp, Artificial Sequence
  Description of Artificial Sequence: Synthetic oligonucleotide
  Target: LAMA2; (-) strand; PAM type: YTN; PAM sequence: CTC
atctgagataaaacttgtta

SEQ ID NO: 198041 - DNA, 20 bp, Artificial Sequence
  Description of Artificial Sequence: Synthetic oligonucleotide
  Target: LAMA2; (-) strand; PAM type: YTN; PAM sequence: TTA
aaaatcacacacaatctcat

SEQ ID NO: 198042 - DNA, 20 bp, Artificial Sequence
  Description of Artificial Sequence: Synthetic oligonucleotide
  Target: LAMA2; (-) strand; PAM type: YTN; PAM sequence: TTT
aaaaatcacacacaatctca

SEQ ID NO: 198043 - DNA, 20 bp, Artificial Sequence
  Description of Artificial Sequence: Synthetic oligonucleotide
  Target: LAMA2; (-) strand; PAM type: YTN; PAM sequence: TTT
taaaaatcacacacaatctc

SEQ ID NO: 198044 - DNA, 20 bp, Artificial Sequence
  Description of Artificial Sequence: Synthetic oligonucleotide
  Target: LAMA2; (-) strand; PAM type: YTN; PAM sequence: TTT
ttaaaaatcacacacaatct

SEQ ID NO: 198045 - DNA, 20 bp, Artificial Sequence
  Description of Artificial Sequence: Synthetic oligonucleotide
  Target: LAMA2; (-) strand; PAM type: YTN; PAM sequence: TTA
ggtagaataaatataatttt

SEQ ID NO: 198046 - DNA, 20 bp, Artificial Sequence
  Description of Artificial Sequence: Synthetic oligonucleotide
  Target: LAMA2; (-) strand; PAM type: YTN; PAM sequence: TTA
ttaggtagaataaatataat

SEQ ID NO: 198047 - DNA, 20 bp, Artificial Sequence
  Description of Artificial Sequence: Synthetic oligonucleotide
  Target: LAMA2; (-) strand; PAM type: YTN; PAM sequence: CTT
attaggtagaataaatataa

SEQ ID NO: 198048 - DNA, 20 bp, Artificial Sequence
  Description of Artificial Sequence: Synthetic oligonucleotide
  Target: LAMA2; (-) strand; PAM type: YTN; PAM sequence: TTA
taaaagtaataaatgcttat

SEQ ID NO: 198049 - DNA, 20 bp, Artificial Sequence
  Description of Artificial Sequence: Synthetic oligonucleotide
  Target: LAMA2; (-) strand; PAM type: YTN; PAM sequence: CTC
aggttataaaagtaataaat

SEQ ID NO: 198050 - DNA, 20 bp, Artificial Sequence
  Description of Artificial Sequence: Synthetic oligonucleotide
  Target: LAMA2; (-) strand; PAM type: YTN; PAM sequence: CTC
tcaggttataaaagtaataa

SEQ ID NO: 198051 - DNA, 20 bp, Artificial Sequence
  Description of Artificial Sequence: Synthetic oligonucleotide
  Target: LAMA2; (-) strand; PAM type: YTN; PAM sequence: TTA
tctctcaggttataaaagta

SEQ ID NO: 198052 - DNA, 20 bp, Artificial Sequence
  Description of Artificial Sequence: Synthetic oligonucleotide
  Target: LAMA2; (-) strand; PAM type: YTN; PAM sequence: TTT
atctctcaggttataaaagt

SEQ ID NO: 198053 - DNA, 20 bp, Artificial Sequence
  Description of Artificial Sequence: Synthetic oligonucleotide
  Target: LAMA2; (-) strand; PAM type: YTN; PAM sequence: TTC
aataatgtttatctctcagg

SEQ ID NO: 198054 - DNA, 20 bp, Artificial Sequence
  Description of Artificial Sequence: Synthetic oligonucleotide
  Target: LAMA2; (-) strand; PAM type: YTN; PAM sequence: TTT
caataatgtttatctctcag

SEQ ID NO: 198055 - DNA, 20 bp, Artificial Sequence
  Description of Artificial Sequence: Synthetic oligonucleotide
  Target: LAMA2; (-) strand; PAM type: YTN; PAM sequence: TTT
tcaataatgtttatctctca

SEQ ID NO: 198056 - DNA, 20 bp, Artificial Sequence
  Description of Artificial Sequence: Synthetic oligonucleotide
  Target: LAMA2; (-) strand; PAM type: YTN; PAM sequence: TTT
ttcaataatgtttatctctc

SEQ ID NO: 198057 - DNA, 20 bp, Artificial Sequence
  Description of Artificial Sequence: Synthetic oligonucleotide
  Target: LAMA2; (-) strand; PAM type: YTN; PAM sequence: CTT
tttcaataatgtttatctct

SEQ ID NO: 198058 - DNA, 20 bp, Artificial Sequence
  Description of Artificial Sequence: Synthetic oligonucleotide
  Target: LAMA2; (-) strand; PAM type: YTN; PAM sequence: TTC
tttttcaataatgtttatct

SEQ ID NO: 198059 - DNA, 20 bp, Artificial Sequence
  Description of Artificial Sequence: Synthetic oligonucleotide
  Target: LAMA2; (-) strand; PAM type: YTN; PAM sequence: CTT
ctttttcaataatgtttatc

SEQ ID NO: 198060 - DNA, 20 bp, Artificial Sequence
  Description of Artificial Sequence: Synthetic oligonucleotide
  Target: LAMA2; (-) strand; PAM type: YTN; PAM sequence: CTC
ttctttttcaataatgttta

SEQ ID NO: 198061 - DNA, 20 bp, Artificial Sequence
  Description of Artificial Sequence: Synthetic oligonucleotide
  Target: LAMA2; (-) strand; PAM type: YTN; PAM sequence: TTA
aatccatgctcttctttttc

SEQ ID NO: 198062 - DNA, 20 bp, Artificial Sequence
  Description of Artificial Sequence: Synthetic oligonucleotide
  Target: LAMA2; (-) strand; PAM type: YTN; PAM sequence: TTT
aaatccatgctcttcttttt

SEQ ID NO: 198063 - DNA, 20 bp, Artificial Sequence
  Description of Artificial Sequence: Synthetic oligonucleotide
  Target: LAMA2; (-) strand; PAM type: YTN; PAM sequence: CTT
taaatccatgctcttctttt

SEQ ID NO: 198064 - DNA, 20 bp, Artificial Sequence
  Description of Artificial Sequence: Synthetic oligonucleotide
  Target: LAMA2; (-) strand; PAM type: YTN; PAM sequence: CTC
gctttaaatccatgctcttc

SEQ ID NO: 198065 - DNA, 20 bp, Artificial Sequence
  Description of Artificial Sequence: Synthetic oligonucleotide
  Target: LAMA2; (-) strand; PAM type: YTN; PAM sequence: CTC
acatcctcgctttaaatcca

SEQ ID NO: 198066 - DNA, 20 bp, Artificial Sequence
  Description of Artificial Sequence: Synthetic oligonucleotide
  Target: LAMA2; (-) strand; PAM type: YTN; PAM sequence: TTA
accaaggtccaaaccaaaaa

SEQ ID NO: 198067 - DNA, 20 bp, Artificial Sequence
  Description of Artificial Sequence: Synthetic oligonucleotide
  Target: LAMA2; (-) strand; PAM type: YTN; PAM sequence: CTT
aaccaaggtccaaaccaaaa

SEQ ID NO: 198068 - DNA, 20 bp, Artificial Sequence
  Description of Artificial Sequence: Synthetic oligonucleotide
  Target: LAMA2; (-) strand; PAM type: YTN; PAM sequence: TTC
ttaaccaaggtccaaaccaa

SEQ ID NO: 198069 - DNA, 20 bp, Artificial Sequence
  Description of Artificial Sequence: Synthetic oligonucleotide
  Target: LAMA2; (-) strand; PAM type: YTN; PAM sequence: CTT
cttaaccaaggtccaaacca

SEQ ID NO: 198070 - DNA, 20 bp, Artificial Sequence
  Description of Artificial Sequence: Synthetic oligonucleotide
  Target: LAMA2; (-) strand; PAM type: YTN; PAM sequence: TTG
ccttcttaaccaaggtccaa

SEQ ID NO: 198071 - DNA, 20 bp, Artificial Sequence
  Description of Artificial Sequence: Synthetic oligonucleotide
  Target: LAMA2; (-) strand; PAM type: YTN; PAM sequence: TTT
gccttcttaaccaaggtcca

SEQ ID NO: 198072 - DNA, 20 bp, Artificial Sequence
  Description of Artificial Sequence: Synthetic oligonucleotide
  Target: LAMA2; (-) strand; PAM type: YTN; PAM sequence: CTT
tgccttcttaaccaaggtcc

SEQ ID NO: 198073 - DNA, 20 bp, Artificial Sequence
  Description of Artificial Sequence: Synthetic oligonucleotide
  Target: LAMA2; (-) strand; PAM type: YTN; PAM sequence: CTC
tttgccttcttaaccaaggt

SEQ ID NO: 198074 - DNA, 20 bp, Artificial Sequence
  Description of Artificial Sequence: Synthetic oligonucleotide
  Target: LAMA2; (-) strand; PAM type: YTN; PAM sequence: CTA
tccctctttgccttcttaac

SEQ ID NO: 198075 - DNA, 20 bp, Artificial Sequence
  Description of Artificial Sequence: Synthetic oligonucleotide
  Target: LAMA2; (-) strand; PAM type: YTN; PAM sequence: CTC
tatccctctttgccttctta

SEQ ID NO: 198076 - DNA, 20 bp, Artificial Sequence
  Description of Artificial Sequence: Synthetic oligonucleotide
  Target: LAMA2; (-) strand; PAM type: YTN; PAM sequence: CTA
tgtcccacaatctctatccc

SEQ ID NO: 198077 - DNA, 20 bp, Artificial Sequence
  Description of Artificial Sequence: Synthetic oligonucleotide
  Target: LAMA2; (-) strand; PAM type: YTN; PAM sequence: CTC
tatgtcccacaatctctatc

SEQ ID NO: 198078 - DNA, 20 bp, Artificial Sequence
  Description of Artificial Sequence: Synthetic oligonucleotide
  Target: LAMA2; (-) strand; PAM type: YTN; PAM sequence: CTC
cctctatgtcccacaatctc

SEQ ID NO: 198079 - DNA, 20 bp, Artificial Sequence
  Description of Artificial Sequence: Synthetic oligonucleotide
  Target: LAMA2; (-) strand; PAM type: YTN; PAM sequence: CTG
cgtctccctctatgtcccac

SEQ ID NO: 198080 - DNA, 20 bp, Artificial Sequence
  Description of Artificial Sequence: Synthetic oligonucleotide
  Target: LAMA2; (-) strand; PAM type: YTN; PAM sequence: CTC
aggcctgcgtctccctctat

SEQ ID NO: 198081 - DNA, 20 bp, Artificial Sequence
  Description of Artificial Sequence: Synthetic oligonucleotide
  Target: LAMA2; (-) strand; PAM type: YTN; PAM sequence: CTG
tcctcaggcctgcgtctccc

SEQ ID NO: 198082 - DNA, 20 bp, Artificial Sequence
  Description of Artificial Sequence: Synthetic oligonucleotide
  Target: LAMA2; (-) strand; PAM type: YTN; PAM sequence: CTG
taactgtcctcaggcctgcg

SEQ ID NO: 198083 - DNA, 20 bp, Artificial Sequence
  Description of Artificial Sequence: Synthetic oligonucleotide
  Target: LAMA2; (-) strand; PAM type: YTN; PAM sequence: TTA
taacactgtaactgtcctca

SEQ ID NO: 198084 - DNA, 20 bp, Artificial Sequence
  Description of Artificial Sequence: Synthetic oligonucleotide
  Target: LAMA2; (-) strand; PAM type: YTN; PAM sequence: TTT
ataacactgtaactgtcctc

SEQ ID NO: 198085 - DNA, 20 bp, Artificial Sequence
  Description of Artificial Sequence: Synthetic oligonucleotide
  Target: LAMA2; (-) strand; PAM type: YTN; PAM sequence: CTT
tataacactgtaactgtcct

SEQ ID NO: 198086 - DNA, 20 bp, Artificial Sequence
  Description of Artificial Sequence: Synthetic oligonucleotide
  Target: LAMA2; (-) strand; PAM type: YTN; PAM sequence: CTC
cctttataacactgtaactg

SEQ ID NO: 198087 - DNA, 20 bp, Artificial Sequence
  Description of Artificial Sequence: Synthetic oligonucleotide
  Target: LAMA2; (-) strand; PAM type: YTN; PAM sequence: CTC
tccctttataacactgtaac

SEQ ID NO: 198088 - DNA, 20 bp, Artificial Sequence
  Description of Artificial Sequence: Synthetic oligonucleotide
  Target: LAMA2; (-) strand; PAM type: YTN; PAM sequence: TTA
agcctctccctttataacac

SEQ ID NO: 198089 - DNA, 20 bp, Artificial Sequence
  Description of Artificial Sequence: Synthetic oligonucleotide
  Target: LAMA2; (-) strand; PAM type: YTN; PAM sequence: CTT
aagcctctccctttataaca

SEQ ID NO: 198090 - DNA, 20 bp, Artificial Sequence
  Description of Artificial Sequence: Synthetic oligonucleotide
  Target: LAMA2; (-) strand; PAM type: YTN; PAM sequence: TTA
taatgatacttaagcctctc

SEQ ID NO: 198091 - DNA, 20 bp, Artificial Sequence
  Description of Artificial Sequence: Synthetic oligonucleotide
  Target: LAMA2; (-) strand; PAM type: YTN; PAM sequence: CTC
atattataatgatacttaag

SEQ ID NO: 198092 - DNA, 20 bp, Artificial Sequence
  Description of Artificial Sequence: Synthetic oligonucleotide
  Target: LAMA2; (-) strand; PAM type: YTN; PAM sequence: CTG
ctcatattataatgatactt

SEQ ID NO: 198093 - DNA, 20 bp, Artificial Sequence
  Description of Artificial Sequence: Synthetic oligonucleotide
  Target: LAMA2; (-) strand; PAM type: YTN; PAM sequence: TTC
tgctcatattataatgatac

SEQ ID NO: 198094 - DNA, 20 bp, Artificial Sequence
  Description of Artificial Sequence: Synthetic oligonucleotide
  Target: LAMA2; (-) strand; PAM type: YTN; PAM sequence: TTT
ctgctcatattataatgata

SEQ ID NO: 198095 - DNA, 20 bp, Artificial Sequence
  Description of Artificial Sequence: Synthetic oligonucleotide
  Target: LAMA2; (-) strand; PAM type: YTN; PAM sequence: TTG
caatttctgctcatattata

SEQ ID NO: 198096 - DNA, 20 bp, Artificial Sequence
  Description of Artificial Sequence: Synthetic oligonucleotide
  Target: LAMA2; (-) strand; PAM type: YTN; PAM sequence: TTT
gcaatttctgctcatattat

SEQ ID NO: 198097 - DNA, 20 bp, Artificial Sequence
  Description of Artificial Sequence: Synthetic oligonucleotide
  Target: LAMA2; (-) strand; PAM type: YTN; PAM sequence: CTT
tgcaatttctgctcatatta

SEQ ID NO: 198098 - DNA, 20 bp, Artificial Sequence
  Description of Artificial Sequence: Synthetic oligonucleotide
  Target: LAMA2; (-) strand; PAM type: YTN; PAM sequence: CTC
tttgcaatttctgctcatat

SEQ ID NO: 198099 - DNA, 20 bp, Artificial Sequence
  Description of Artificial Sequence: Synthetic oligonucleotide
  Target: LAMA2; (-) strand; PAM type: YTN; PAM sequence: CTC
actctttgcaatttctgctc

SEQ ID NO: 198100 - DNA, 20 bp, Artificial Sequence
  Description of Artificial Sequence: Synthetic oligonucleotide
  Target: LAMA2; (-) strand; PAM type: YTN; PAM sequence: TTC
tcactctttgcaatttctgc

SEQ ID NO: 198101 - DNA, 20 bp, Artificial Sequence
  Description of Artificial Sequence: Synthetic oligonucleotide
  Target: LAMA2; (-) strand; PAM type: YTN; PAM sequence: CTT
ctcactctttgcaatttctg

SEQ ID NO: 198102 - DNA, 20 bp, Artificial Sequence
  Description of Artificial Sequence: Synthetic oligonucleotide
  Target: LAMA2; (-) strand; PAM type: YTN; PAM sequence: TTA
gcttctcactctttgcaatt

SEQ ID NO: 198103 - DNA, 20 bp, Artificial Sequence
  Description of Artificial Sequence: Synthetic oligonucleotide
  Target: LAMA2; (-) strand; PAM type: YTN; PAM sequence: TTT
agcttctcactctttgcaat

SEQ ID NO: 198104 - DNA, 20 bp, Artificial Sequence
  Description of Artificial Sequence: Synthetic oligonucleotide
  Target: LAMA2; (-) strand; PAM type: YTN; PAM sequence: TTT
tagcttctcactctttgcaa

SEQ ID NO: 198105 - DNA, 20 bp, Artificial Sequence
  Description of Artificial Sequence: Synthetic oligonucleotide
  Target: LAMA2; (-) strand; PAM type: YTN; PAM sequence: TTC
cattttagcttctcactctt

SEQ ID NO: 198106 - DNA, 20 bp, Artificial Sequence
  Description of Artificial Sequence: Synthetic oligonucleotide
  Target: LAMA2; (-) strand; PAM type: YTN; PAM sequence: CTT
ccattttagcttctcactct

SEQ ID NO: 198107 - DNA, 20 bp, Artificial Sequence
  Description of Artificial Sequence: Synthetic oligonucleotide
  Target: LAMA2; (-) strand; PAM type: YTN; PAM sequence: CTC
ccttccattttagcttctca

SEQ ID NO: 198108 - DNA, 20 bp, Artificial Sequence
  Description of Artificial Sequence: Synthetic oligonucleotide
  Target: LAMA2; (-) strand; PAM type: YTN; PAM sequence: TTA
tcgtctcccttccattttag

SEQ ID NO: 198109 - DNA, 20 bp, Artificial Sequence
  Description of Artificial Sequence: Synthetic oligonucleotide
  Target: LAMA2; (-) strand; PAM type: YTN; PAM sequence: TTT
atcgtctcccttccatttta

SEQ ID NO: 198110 - DNA, 20 bp, Artificial Sequence
  Description of Artificial Sequence: Synthetic oligonucleotide
  Target: LAMA2; (-) strand; PAM type: YTN; PAM sequence: CTA
tttatcgtctcccttccatt

SEQ ID NO: 198111 - DNA, 20 bp, Artificial Sequence
  Description of Artificial Sequence: Synthetic oligonucleotide
  Target: LAMA2; (-) strand; PAM type: YTN; PAM sequence: CTG
agctatttatcgtctccctt

SEQ ID NO: 198112 - DNA, 20 bp, Artificial Sequence
  Description of Artificial Sequence: Synthetic oligonucleotide
  Target: LAMA2; (-) strand; PAM type: YTN; PAM sequence: TTG
ctgagctatttatcgtctcc

SEQ ID NO: 198113 - DNA, 20 bp, Artificial Sequence
  Description of Artificial Sequence: Synthetic oligonucleotide
  Target: LAMA2; (-) strand; PAM type: YTN; PAM sequence: CTT
gctgagctatttatcgtctc

SEQ ID NO: 198114 - DNA, 20 bp, Artificial Sequence
  Description of Artificial Sequence: Synthetic oligonucleotide
  Target: LAMA2; (-) strand; PAM type: YTN; PAM sequence: CTA
aaaaccttgctgagctattt

SEQ ID NO: 198115 - DNA, 20 bp, Artificial Sequence
  Description of Artificial Sequence: Synthetic oligonucleotide
  Target: LAMA2; (-) strand; PAM type: YTN; PAM sequence: TTC
cctaaaaaccttgctgagct

SEQ ID NO: 198116 - DNA, 20 bp, Artificial Sequence
  Description of Artificial Sequence: Synthetic oligonucleotide
  Target: LAMA2; (-) strand; PAM type: YTN; PAM sequence: CTT
ccctaaaaaccttgctgagc

SEQ ID NO: 198117 - DNA, 20 bp, Artificial Sequence
  Description of Artificial Sequence: Synthetic oligonucleotide
  Target: LAMA2; (-) strand; PAM type: YTN; PAM sequence: CTG
cttccctaaaaaccttgctg

SEQ ID NO: 198118 - DNA, 20 bp, Artificial Sequence
  Description of Artificial Sequence: Synthetic oligonucleotide
  Target: LAMA2; (-) strand; PAM type: YTN; PAM sequence: TTC
tgcttccctaaaaaccttgc

SEQ ID NO: 198119 - DNA, 20 bp, Artificial Sequence
  Description of Artificial Sequence: Synthetic oligonucleotide
  Target: LAMA2; (-) strand; PAM type: YTN; PAM sequence: TTT
ctgcttccctaaaaaccttg

SEQ ID NO: 198120 - DNA, 20 bp, Artificial Sequence
  Description of Artificial Sequence: Synthetic oligonucleotide
  Target: LAMA2; (-) strand; PAM type: YTN; PAM sequence: CTG
agtcatttctgcttccctaa

SEQ ID NO: 198121 - DNA, 20 bp, Artificial Sequence
  Description of Artificial Sequence: Synthetic oligonucleotide
  Target: LAMA2; (-) strand; PAM type: YTN; PAM sequence: TTC
aaatctgagtcatttctgct

SEQ ID NO: 198122 - DNA, 20 bp, Artificial Sequence
  Description of Artificial Sequence: Synthetic oligonucleotide
  Target: LAMA2; (-) strand; PAM type: YTN; PAM sequence: TTT
caaatctgagtcatttctgc

SEQ ID NO: 198123 - DNA, 20 bp, Artificial Sequence
  Description of Artificial Sequence: Synthetic oligonucleotide
  Target: LAMA2; (-) strand; PAM type: YTN; PAM sequence: CTA
tatttcaaatctgagtcatt

SEQ ID NO: 198124 - DNA, 20 bp, Artificial Sequence
  Description of Artificial Sequence: Synthetic oligonucleotide
  Target: LAMA2; (-) strand; PAM type: YTN; PAM sequence: CTG
tcacctatatttcaaatctg

SEQ ID NO: 198125 - DNA, 20 bp, Artificial Sequence
  Description of Artificial Sequence: Synthetic oligonucleotide
  Target: LAMA2; (-) strand; PAM type: YTN; PAM sequence: TTC
tgtcacctatatttcaaatc

SEQ ID NO: 198126 - DNA, 20 bp, Artificial Sequence
  Description of Artificial Sequence: Synthetic oligonucleotide
  Target: LAMA2; (-) strand; PAM type: YTN; PAM sequence: CTA
attctgtcacctatatttca

SEQ ID NO: 198127 - DNA, 20 bp, Artificial Sequence
  Description of Artificial Sequence: Synthetic oligonucleotide
  Target: LAMA2; (-) strand; PAM type: YTN; PAM sequence: TTA
aggctaattctgtcacctat

SEQ ID NO: 198128 - DNA, 20 bp, Artificial Sequence
  Description of Artificial Sequence: Synthetic oligonucleotide
  Target: LAMA2; (-) strand; PAM type: YTN; PAM sequence: CTT
aaggctaattctgtcaccta

SEQ ID NO: 198129 - DNA, 20 bp, Artificial Sequence
  Description of Artificial Sequence: Synthetic oligonucleotide
  Target: LAMA2; (-) strand; PAM type: YTN; PAM sequence: CTC
cttaaggctaattctgtcac

SEQ ID NO: 198130 - DNA, 20 bp, Artificial Sequence
  Description of Artificial Sequence: Synthetic oligonucleotide
  Target: LAMA2; (-) strand; PAM type: YTN; PAM sequence: CTC
ctccttaaggctaattctgt

SEQ ID NO: 198131 - DNA, 20 bp, Artificial Sequence
  Description of Artificial Sequence: Synthetic oligonucleotide
  Target: LAMA2; (-) strand; PAM type: YTN; PAM sequence: TTC
tcctccttaaggctaattct

SEQ ID NO: 198132 - DNA, 20 bp, Artificial Sequence
  Description of Artificial Sequence: Synthetic oligonucleotide
  Target: LAMA2; (-) strand; PAM type: YTN; PAM sequence: TTT
ctcctccttaaggctaattc

SEQ ID NO: 198133 - DNA, 20 bp, Artificial Sequence
  Description of Artificial Sequence: Synthetic oligonucleotide
  Target: LAMA2; (-) strand; PAM type: YTN; PAM sequence: CTT
tctcctccttaaggctaatt

SEQ ID NO: 198134 - DNA, 20 bp, Artificial Sequence
  Description of Artificial Sequence: Synthetic oligonucleotide
  Target: LAMA2; (-) strand; PAM type: YTN; PAM sequence: TTC
tttctcctccttaaggctaa

SEQ ID NO: 198135 - DNA, 20 bp, Artificial Sequence
  Description of Artificial Sequence: Synthetic oligonucleotide
  Target: LAMA2; (-) strand; PAM type: YTN; PAM sequence: TTT
ctttctcctccttaaggcta

SEQ ID NO: 198136 - DNA, 20 bp, Artificial Sequence
  Description of Artificial Sequence: Synthetic oligonucleotide
  Target: LAMA2; (-) strand; PAM type: YTN; PAM sequence: TTT
tctttctcctccttaaggct

SEQ ID NO: 198137 - DNA, 20 bp, Artificial Sequence
  Description of Artificial Sequence: Synthetic oligonucleotide
  Target: LAMA2; (-) strand; PAM type: YTN; PAM sequence: CTT
ttctttctcctccttaaggc

SEQ ID NO: 198138 - DNA, 20 bp, Artificial Sequence
  Description of Artificial Sequence: Synthetic oligonucleotide
  Target: LAMA2; (-) strand; PAM type: YTN; PAM sequence: CTC
aaaagatcttttctttctcc

SEQ ID NO: 198139 - DNA, 20 bp, Artificial Sequence
  Description of Artificial Sequence: Synthetic oligonucleotide
  Target: LAMA2; (-) strand; PAM type: YTN; PAM sequence: TTA
tagtctcaaaagatcttttc

SEQ ID NO: 198140 - DNA, 20 bp, Artificial Sequence
  Description of Artificial Sequence: Synthetic oligonucleotide
  Target: LAMA2; (-) strand; PAM type: YTN; PAM sequence: CTT
atagtctcaaaagatctttt

SEQ ID NO: 198141 - DNA, 20 bp, Artificial Sequence
  Description of Artificial Sequence: Synthetic oligonucleotide
  Target: LAMA2; (-) strand; PAM type: YTN; PAM sequence: TTC
ttatagtctcaaaagatctt

SEQ ID NO: 198142 - DNA, 20 bp, Artificial Sequence
  Description of Artificial Sequence: Synthetic oligonucleotide
  Target: LAMA2; (-) strand; PAM type: YTN; PAM sequence: TTT
cttatagtctcaaaagatct

SEQ ID NO: 198143 - DNA, 20 bp, Artificial Sequence
  Description of Artificial Sequence: Synthetic oligonucleotide
  Target: LAMA2; (-) strand; PAM type: YTN; PAM sequence: CTT
tcttatagtctcaaaagatc

SEQ ID NO: 198144 - DNA, 20 bp, Artificial Sequence
  Description of Artificial Sequence: Synthetic oligonucleotide
  Target: LAMA2; (-) strand; PAM type: YTN; PAM sequence: CTC
ctttcttatagtctcaaaag

SEQ ID NO: 198145 - DNA, 20 bp, Artificial Sequence
  Description of Artificial Sequence: Synthetic oligonucleotide
  Target: LAMA2; (-) strand; PAM type: YTN; PAM sequence: CTC
acctcctttcttatagtctc

SEQ ID NO: 198146 - DNA, 20 bp, Artificial Sequence
  Description of Artificial Sequence: Synthetic oligonucleotide
  Target: LAMA2; (-) strand; PAM type: YTN; PAM sequence: CTC
tcacctcctttcttatagtc

SEQ ID NO: 198147 - DNA, 20 bp, Artificial Sequence
  Description of Artificial Sequence: Synthetic oligonucleotide
  Target: LAMA2; (-) strand; PAM type: YTN; PAM sequence: CTA
catcaactctcacctccttt

SEQ ID NO: 198148 - DNA, 20 bp, Artificial Sequence
  Description of Artificial Sequence: Synthetic oligonucleotide
  Target: LAMA2; (-) strand; PAM type: YTN; PAM sequence: TTA
tggctacatcaactctcacc

SEQ ID NO: 198149 - DNA, 20 bp, Artificial Sequence
  Description of Artificial Sequence: Synthetic oligonucleotide
  Target: LAMA2; (-) strand; PAM type: YTN; PAM sequence: TTT
atggctacatcaactctcac

SEQ ID NO: 198150 - DNA, 20 bp, Artificial Sequence
  Description of Artificial Sequence: Synthetic oligonucleotide
  Target: LAMA2; (-) strand; PAM type: YTN; PAM sequence: TTT
tatggctacatcaactctca

SEQ ID NO: 198151 - DNA, 20 bp, Artificial Sequence
  Description of Artificial Sequence: Synthetic oligonucleotide
  Target: LAMA2; (-) strand; PAM type: YTN; PAM sequence: TTT
ttatggctacatcaactctc

SEQ ID NO: 198152 - DNA, 20 bp, Artificial Sequence
  Description of Artificial Sequence: Synthetic oligonucleotide
  Target: LAMA2; (-) strand; PAM type: YTN; PAM sequence: TTT
tttatggctacatcaactct

SEQ ID NO: 198153 - DNA, 20 bp, Artificial Sequence
  Description of Artificial Sequence: Synthetic oligonucleotide
  Target: LAMA2; (-) strand; PAM type: YTN; PAM sequence: CTG
tattttttatggctacatca

SEQ ID NO: 198154 - DNA, 20 bp, Artificial Sequence
  Description of Artificial Sequence: Synthetic oligonucleotide
  Target: LAMA2; (-) strand; PAM type: YTN; PAM sequence: CTC
tgtattttttatggctacat

SEQ ID NO: 198155 - DNA, 20 bp, Artificial Sequence
  Description of Artificial Sequence: Synthetic oligonucleotide
  Target: LAMA2; (-) strand; PAM type: YTN; PAM sequence: TTC
atctctgtattttttatggc

SEQ ID NO: 198156 - DNA, 20 bp, Artificial Sequence
  Description of Artificial Sequence: Synthetic oligonucleotide
  Target: LAMA2; (-) strand; PAM type: YTN; PAM sequence: TTT
catctctgtattttttatgg

SEQ ID NO: 198157 - DNA, 20 bp, Artificial Sequence
  Description of Artificial Sequence: Synthetic oligonucleotide
  Target: LAMA2; (-) strand; PAM type: YTN; PAM sequence: CTT
tcatctctgtattttttatg

SEQ ID NO: 198158 - DNA, 20 bp, Artificial Sequence
  Description of Artificial Sequence: Synthetic oligonucleotide
  Target: LAMA2; (-) strand; PAM type: YTN; PAM sequence: CTC
cccaccctttcatctctgta

SEQ ID NO: 198159 - DNA, 20 bp, Artificial Sequence
  Description of Artificial Sequence: Synthetic oligonucleotide
  Target: LAMA2; (-) strand; PAM type: YTN; PAM sequence: TTA
actccccaccctttcatctc

SEQ ID NO: 198160 - DNA, 20 bp, Artificial Sequence
  Description of Artificial Sequence: Synthetic oligonucleotide
  Target: LAMA2; (-) strand; PAM type: YTN; PAM sequence: TTT
aactccccaccctttcatct

SEQ ID NO: 198161 - DNA, 20 bp, Artificial Sequence
  Description of Artificial Sequence: Synthetic oligonucleotide
  Target: LAMA2; (-) strand; PAM type: YTN; PAM sequence: TTT
taactccccaccctttcatc

SEQ ID NO: 198162 - DNA, 20 bp, Artificial Sequence
  Description of Artificial Sequence: Synthetic oligonucleotide
  Target: LAMA2; (-) strand; PAM type: YTN; PAM sequence: CTT
ttaactccccaccctttcat

SEQ ID NO: 198163 - DNA, 20 bp, Artificial Sequence
  Description of Artificial Sequence: Synthetic oligonucleotide
  Target: LAMA2; (-) strand; PAM type: YTN; PAM sequence: CTC
ttttaactccccaccctttc

SEQ ID NO: 198164 - DNA, 20 bp, Artificial Sequence
  Description of Artificial Sequence: Synthetic oligonucleotide
  Target: LAMA2; (-) strand; PAM type: YTN; PAM sequence: CTA
catacacaggctcttttaac

SEQ ID NO: 198165 - DNA, 20 bp, Artificial Sequence
  Description of Artificial Sequence: Synthetic oligonucleotide
  Target: LAMA2; (-) strand; PAM type: YTN; PAM sequence: TTA
ggctacatacacaggctctt

SEQ ID NO: 198166 - DNA, 20 bp, Artificial Sequence
  Description of Artificial Sequence: Synthetic oligonucleotide
  Target: LAMA2; (-) strand; PAM type: YTN; PAM sequence: TTT
aggctacatacacaggctct

SEQ ID NO: 198167 - DNA, 20 bp, Artificial Sequence
  Description of Artificial Sequence: Synthetic oligonucleotide
  Target: LAMA2; (-) strand; PAM type: YTN; PAM sequence: TTC
atagcaagaatttaggctac

SEQ ID NO: 198168 - DNA, 20 bp, Artificial Sequence
  Description of Artificial Sequence: Synthetic oligonucleotide
  Target: LAMA2; (-) strand; PAM type: YTN; PAM sequence: CTA
gttcatagcaagaatttagg

SEQ ID NO: 198169 - DNA, 20 bp, Artificial Sequence
  Description of Artificial Sequence: Synthetic oligonucleotide
  Target: LAMA2; (-) strand; PAM type: YTN; PAM sequence: TTC
tagttcatagcaagaattta

SEQ ID NO: 198170 - DNA, 20 bp, Artificial Sequence
  Description of Artificial Sequence: Synthetic oligonucleotide
  Target: LAMA2; (-) strand; PAM type: YTN; PAM sequence: TTT
ctagttcatagcaagaattt

SEQ ID NO: 198171 - DNA, 20 bp, Artificial Sequence
  Description of Artificial Sequence: Synthetic oligonucleotide
  Target: LAMA2; (-) strand; PAM type: YTN; PAM sequence: CTT
tctagttcatagcaagaatt

SEQ ID NO: 198172 - DNA, 20 bp, Artificial Sequence
  Description of Artificial Sequence: Synthetic oligonucleotide
  Target: LAMA2; (-) strand; PAM type: YTN; PAM sequence: CTG
gctttctagttcatagcaag

SEQ ID NO: 198173 - DNA, 20 bp, Artificial Sequence
  Description of Artificial Sequence: Synthetic oligonucleotide
  Target: LAMA2; (-) strand; PAM type: YTN; PAM sequence: CTA
atgacctggctttctagttc

SEQ ID NO: 198174 - DNA, 20 bp, Artificial Sequence
  Description of Artificial Sequence: Synthetic oligonucleotide
  Target: LAMA2; (-) strand; PAM type: YTN; PAM sequence: TTC
ggctaatgacctggctttct

SEQ ID NO: 198175 - DNA, 20 bp, Artificial Sequence
  Description of Artificial Sequence: Synthetic oligonucleotide
  Target: LAMA2; (-) strand; PAM type: YTN; PAM sequence: TTT
cggctaatgacctggctttc

SEQ ID NO: 198176 - DNA, 20 bp, Artificial Sequence
  Description of Artificial Sequence: Synthetic oligonucleotide
  Target: LAMA2; (-) strand; PAM type: YTN; PAM sequence: TTG
tcaatttcggctaatgacct

SEQ ID NO: 198177 - DNA, 20 bp, Artificial Sequence
  Description of Artificial Sequence: Synthetic oligonucleotide
  Target: LAMA2; (-) strand; PAM type: YTN; PAM sequence: CTA
tcccattgtcaatttcggct

SEQ ID NO: 198178 - DNA, 20 bp, Artificial Sequence
  Description of Artificial Sequence: Synthetic oligonucleotide
  Target: LAMA2; (-) strand; PAM type: YTN; PAM sequence: CTC
cccaagaccacccctatccc

SEQ ID NO: 198179 - DNA, 20 bp, Artificial Sequence
  Description of Artificial Sequence: Synthetic oligonucleotide
  Target: LAMA2; (-) strand; PAM type: YTN; PAM sequence: TTA
acctccccaagaccacccct

SEQ ID NO: 198180 - DNA, 20 bp, Artificial Sequence
  Description of Artificial Sequence: Synthetic oligonucleotide
  Target: LAMA2; (-) strand; PAM type: YTN; PAM sequence: CTT
aacctccccaagaccacccc

SEQ ID NO: 198181 - DNA, 20 bp, Artificial Sequence
  Description of Artificial Sequence: Synthetic oligonucleotide
  Target: LAMA2; (-) strand; PAM type: YTN; PAM sequence: CTA
gccttaacctccccaagacc

SEQ ID NO: 198182 - DNA, 20 bp, Artificial Sequence
  Description of Artificial Sequence: Synthetic oligonucleotide
  Target: LAMA2; (-) strand; PAM type: YTN; PAM sequence: TTC
tagccttaacctccccaaga

SEQ ID NO: 198183 - DNA, 20 bp, Artificial Sequence
  Description of Artificial Sequence: Synthetic oligonucleotide
  Target: LAMA2; (-) strand; PAM type: YTN; PAM sequence: TTT
ctagccttaacctccccaag

SEQ ID NO: 198184 - DNA, 20 bp, Artificial Sequence
  Description of Artificial Sequence: Synthetic oligonucleotide
  Target: LAMA2; (-) strand; PAM type: YTN; PAM sequence: TTT
tctagccttaacctccccaa

SEQ ID NO: 198185 - DNA, 20 bp, Artificial Sequence
  Description of Artificial Sequence: Synthetic oligonucleotide
  Target: LAMA2; (-) strand; PAM type: YTN; PAM sequence: TTT
ttctagccttaacctcccca

SEQ ID NO: 198186 - DNA, 20 bp, Artificial Sequence
  Description of Artificial Sequence: Synthetic oligonucleotide
  Target: LAMA2; (-) strand; PAM type: YTN; PAM sequence: TTG
gatttttctagccttaacct

SEQ ID NO: 198187 - DNA, 20 bp, Artificial Sequence
  Description of Artificial Sequence: Synthetic oligonucleotide
  Target: LAMA2; (-) strand; PAM type: YTN; PAM sequence: CTT
ggatttttctagccttaacc

SEQ ID NO: 198188 - DNA, 20 bp, Artificial Sequence
  Description of Artificial Sequence: Synthetic oligonucleotide
  Target: LAMA2; (-) strand; PAM type: YTN; PAM sequence: TTG
cttggatttttctagcctta

SEQ ID NO: 198189 - DNA, 20 bp, Artificial Sequence
  Description of Artificial Sequence: Synthetic oligonucleotide
  Target: LAMA2; (-) strand; PAM type: YTN; PAM sequence: TTT
gcttggatttttctagcctt

SEQ ID NO: 198190 - DNA, 20 bp, Artificial Sequence
  Description of Artificial Sequence: Synthetic oligonucleotide
  Target: LAMA2; (-) strand; PAM type: YTN; PAM sequence: CTT
tgcttggatttttctagcct

SEQ ID NO: 198191 - DNA, 20 bp, Artificial Sequence
  Description of Artificial Sequence: Synthetic oligonucleotide
  Target: LAMA2; (-) strand; PAM type: YTN; PAM sequence: CTG
ctttgcttggatttttctag

SEQ ID NO: 198192 - DNA, 20 bp, Artificial Sequence
  Description of Artificial Sequence: Synthetic oligonucleotide
  Target: LAMA2; (-) strand; PAM type: YTN; PAM sequence: TTA
cctgctttgcttggattttt

SEQ ID NO: 198193 - DNA, 20 bp, Artificial Sequence
  Description of Artificial Sequence: Synthetic oligonucleotide
  Target: LAMA2; (-) strand; PAM type: YTN; PAM sequence: TTG
ttacctgctttgcttggatt

SEQ ID NO: 198194 - DNA, 20 bp, Artificial Sequence
  Description of Artificial Sequence: Synthetic oligonucleotide
  Target: LAMA2; (-) strand; PAM type: YTN; PAM sequence: CTT
gttacctgctttgcttggat

SEQ ID NO: 198195 - DNA, 20 bp, Artificial Sequence
  Description of Artificial Sequence: Synthetic oligonucleotide
  Target: LAMA2; (-) strand; PAM type: YTN; PAM sequence: CTC
ttgttacctgctttgcttgg

SEQ ID NO: 198196 - DNA, 20 bp, Artificial Sequence
  Description of Artificial Sequence: Synthetic oligonucleotide
  Target: LAMA2; (-) strand; PAM type: YTN; PAM sequence: CTG
gaatcaagtcctcttgttac

SEQ ID NO: 198197 - DNA, 20 bp, Artificial Sequence
  Description of Artificial Sequence: Synthetic oligonucleotide
  Target: LAMA2; (-) strand; PAM type: YTN; PAM sequence: TTC
acagtctggaatcaagtcct

SEQ ID NO: 198198 - DNA, 20 bp, Artificial Sequence
  Description of Artificial Sequence: Synthetic oligonucleotide
  Target: LAMA2; (-) strand; PAM type: YTN; PAM sequence: CTG
ttcacagtctggaatcaagt

SEQ ID NO: 198199 - DNA, 20 bp, Artificial Sequence
  Description of Artificial Sequence: Synthetic oligonucleotide
  Target: LAMA2; (-) strand; PAM type: YTN; PAM sequence: CTC
aaatctgttcacagtctgga

SEQ ID NO: 198200 - DNA, 20 bp, Artificial Sequence
  Description of Artificial Sequence: Synthetic oligonucleotide
  Target: LAMA2; (-) strand; PAM type: YTN; PAM sequence: CTG
cctcaaatctgttcacagtc

SEQ ID NO: 198201 - DNA, 20 bp, Artificial Sequence
  Description of Artificial Sequence: Synthetic oligonucleotide
  Target: LAMA2; (-) strand; PAM type: YTN; PAM sequence: CTG
accctgcctcaaatctgttc

SEQ ID NO: 198202 - DNA, 20 bp, Artificial Sequence
  Description of Artificial Sequence: Synthetic oligonucleotide
  Target: LAMA2; (-) strand; PAM type: YTN; PAM sequence: TTC
tgaccctgcctcaaatctgt

SEQ ID NO: 198203 - DNA, 20 bp, Artificial Sequence
  Description of Artificial Sequence: Synthetic oligonucleotide
  Target: LAMA2; (-) strand; PAM type: YTN; PAM sequence: TTT
ctgaccctgcctcaaatctg

SEQ ID NO: 198204 - DNA, 20 bp, Artificial Sequence
  Description of Artificial Sequence: Synthetic oligonucleotide
  Target: LAMA2; (-) strand; PAM type: YTN; PAM sequence: CTT
tctgaccctgcctcaaatct

SEQ ID NO: 198205 - DNA, 20 bp, Artificial Sequence
  Description of Artificial Sequence: Synthetic oligonucleotide
  Target: LAMA2; (-) strand; PAM type: YTN; PAM sequence: TTC
agggtggctttctgaccctg

SEQ ID NO: 198206 - DNA, 20 bp, Artificial Sequence
  Description of Artificial Sequence: Synthetic oligonucleotide
  Target: LAMA2; (-) strand; PAM type: YTN; PAM sequence: TTT
cagggtggctttctgaccct

SEQ ID NO: 198207 - DNA, 20 bp, Artificial Sequence
  Description of Artificial Sequence: Synthetic oligonucleotide
  Target: LAMA2; (-) strand; PAM type: YTN; PAM sequence: CTG
aaatttcagggtggctttct

SEQ ID NO: 198208 - DNA, 20 bp, Artificial Sequence
  Description of Artificial Sequence: Synthetic oligonucleotide
  Target: LAMA2; (-) strand; PAM type: YTN; PAM sequence: TTA
tagcactgaaatttcagggt

SEQ ID NO: 198209 - DNA, 20 bp, Artificial Sequence
  Description of Artificial Sequence: Synthetic oligonucleotide
  Target: LAMA2; (-) strand; PAM type: YTN; PAM sequence: TTT
atagcactgaaatttcaggg

SEQ ID NO: 198210 - DNA, 20 bp, Artificial Sequence
  Description of Artificial Sequence: Synthetic oligonucleotide
  Target: LAMA2; (-) strand; PAM type: YTN; PAM sequence: CTA
caggtttatagcactgaaat

SEQ ID NO: 198211 - DNA, 20 bp, Artificial Sequence
  Description of Artificial Sequence: Synthetic oligonucleotide
  Target: LAMA2; (-) strand; PAM type: YTN; PAM sequence: TTC
ccactacaggtttatagcac

SEQ ID NO: 198212 - DNA, 20 bp, Artificial Sequence
  Description of Artificial Sequence: Synthetic oligonucleotide
  Target: LAMA2; (-) strand; PAM type: YTN; PAM sequence: CTA
tagagttcccactacaggtt

SEQ ID NO: 198213 - DNA, 20 bp, Artificial Sequence
  Description of Artificial Sequence: Synthetic oligonucleotide
  Target: LAMA2; (-) strand; PAM type: YTN; PAM sequence: TTC
ctatagagttcccactacag

SEQ ID NO: 198214 - DNA, 20 bp, Artificial Sequence
  Description of Artificial Sequence: Synthetic oligonucleotide
  Target: LAMA2; (-) strand; PAM type: YTN; PAM sequence: TTA
gtattcctatagagttccca

SEQ ID NO: 198215 - DNA, 20 bp, Artificial Sequence
  Description of Artificial Sequence: Synthetic oligonucleotide
  Target: LAMA2; (-) strand; PAM type: YTN; PAM sequence: TTG
atgaagggagaaattagtat

SEQ ID NO: 198216 - DNA, 20 bp, Artificial Sequence
  Description of Artificial Sequence: Synthetic oligonucleotide
  Target: LAMA2; (-) strand; PAM type: YTN; PAM sequence: TTG
ttgatgaagggagaaattag

SEQ ID NO: 198217 - DNA, 20 bp, Artificial Sequence
  Description of Artificial Sequence: Synthetic oligonucleotide
  Target: LAMA2; (-) strand; PAM type: YTN; PAM sequence: TTT
gttgatgaagggagaaatta

SEQ ID NO: 198218 - DNA, 20 bp, Artificial Sequence
  Description of Artificial Sequence: Synthetic oligonucleotide
  Target: LAMA2; (-) strand; PAM type: YTN; PAM sequence: CTT
tgttgatgaagggagaaatt

SEQ ID NO: 198219 - DNA, 20 bp, Artificial Sequence
  Description of Artificial Sequence: Synthetic oligonucleotide
  Target: LAMA2; (-) strand; PAM type: YTN; PAM sequence: TTC
acaggaccagtataatatct

SEQ ID NO: 198220 - DNA, 20 bp, Artificial Sequence
  Description of Artificial Sequence: Synthetic oligonucleotide
  Target: LAMA2; (-) strand; PAM type: YTN; PAM sequence: CTT
cacaggaccagtataatatc

SEQ ID NO: 198221 - DNA, 20 bp, Artificial Sequence
  Description of Artificial Sequence: Synthetic oligonucleotide
  Target: LAMA2; (-) strand; PAM type: YTN; PAM sequence: CTC
ttcacaggaccagtataata

SEQ ID NO: 198222 - DNA, 20 bp, Artificial Sequence
  Description of Artificial Sequence: Synthetic oligonucleotide
  Target: LAMA2; (-) strand; PAM type: YTN; PAM sequence: CTA
agcctcttcacaggaccagt

SEQ ID NO: 198223 - DNA, 20 bp, Artificial Sequence
  Description of Artificial Sequence: Synthetic oligonucleotide
  Target: LAMA2; (-) strand; PAM type: YTN; PAM sequence: CTG
ggaagtgactaagcctcttc

SEQ ID NO: 198224 - DNA, 20 bp, Artificial Sequence
  Description of Artificial Sequence: Synthetic oligonucleotide
  Target: LAMA2; (-) strand; PAM type: YTN; PAM sequence: TTG
aaatacataaactgggaagt

SEQ ID NO: 198225 - DNA, 20 bp, Artificial Sequence
  Description of Artificial Sequence: Synthetic oligonucleotide
  Target: LAMA2; (-) strand; PAM type: YTN; PAM sequence: CTT
gaaatacataaactgggaag

SEQ ID NO: 198226 - DNA, 20 bp, Artificial Sequence
  Description of Artificial Sequence: Synthetic oligonucleotide
  Target: LAMA2; (-) strand; PAM type: YTN; PAM sequence: TTA
ggaatataatcttgaaatac

SEQ ID NO: 198227 - DNA, 20 bp, Artificial Sequence
  Description of Artificial Sequence: Synthetic oligonucleotide
  Target: LAMA2; (-) strand; PAM type: YTN; PAM sequence: TTT
aggaatataatcttgaaata

SEQ ID NO: 198228 - DNA, 20 bp, Artificial Sequence
  Description of Artificial Sequence: Synthetic oligonucleotide
  Target: LAMA2; (-) strand; PAM type: YTN; PAM sequence: TTT
taggaatataatcttgaaat

SEQ ID NO: 198229 - DNA, 20 bp, Artificial Sequence
  Description of Artificial Sequence: Synthetic oligonucleotide
  Target: LAMA2; (-) strand; PAM type: YTN; PAM sequence: CTG
tgttttaggaatataatctt

SEQ ID NO: 198230 - DNA, 20 bp, Artificial Sequence
  Description of Artificial Sequence: Synthetic oligonucleotide
  Target: LAMA2; (-) strand; PAM type: YTN; PAM sequence: TTC
tgtgttttaggaatataatc

SEQ ID NO: 198231 - DNA, 20 bp, Artificial Sequence
  Description of Artificial Sequence: Synthetic oligonucleotide
  Target: LAMA2; (-) strand; PAM type: YTN; PAM sequence: CTT
ctgtgttttaggaatataat

SEQ ID NO: 198232 - DNA, 20 bp, Artificial Sequence
  Description of Artificial Sequence: Synthetic oligonucleotide
  Target: LAMA2; (-) strand; PAM type: YTN; PAM sequence: CTG
aaaaacttctgtgttttagg

SEQ ID NO: 198233 - DNA, 20 bp, Artificial Sequence
  Description of Artificial Sequence: Synthetic oligonucleotide
  Target: LAMA2; (-) strand; PAM type: YTN; PAM sequence: TTA
gggaacaaactgaaaaactt

SEQ ID NO: 198234 - DNA, 20 bp, Artificial Sequence
  Description of Artificial Sequence: Synthetic oligonucleotide
  Target: LAMA2; (-) strand; PAM type: YTN; PAM sequence: CTG
gggtcaggttagggaacaaa

SEQ ID NO: 198235 - DNA, 20 bp, Artificial Sequence
  Description of Artificial Sequence: Synthetic oligonucleotide
  Target: LAMA2; (-) strand; PAM type: YTN; PAM sequence: TTG
gatggaaacaggtagactgg

SEQ ID NO: 198236 - DNA, 20 bp, Artificial Sequence
  Description of Artificial Sequence: Synthetic oligonucleotide
  Target: LAMA2; (-) strand; PAM type: YTN; PAM sequence: CTT
ggatggaaacaggtagactg

SEQ ID NO: 198237 - DNA, 20 bp, Artificial Sequence
  Description of Artificial Sequence: Synthetic oligonucleotide
  Target: LAMA2; (-) strand; PAM type: YTN; PAM sequence: TTA
gaagtggtagtgatagtctt

SEQ ID NO: 198238 - DNA, 20 bp, Artificial Sequence
  Description of Artificial Sequence: Synthetic oligonucleotide
  Target: LAMA2; (-) strand; PAM type: YTN; PAM sequence: TTT
agaagtggtagtgatagtct

SEQ ID NO: 198239 - DNA, 20 bp, Artificial Sequence
  Description of Artificial Sequence: Synthetic oligonucleotide
  Target: LAMA2; (-) strand; PAM type: YTN; PAM sequence: CTG
gaggtggtttagaagtggta

SEQ ID NO: 198240 - DNA, 20 bp, Artificial Sequence
  Description of Artificial Sequence: Synthetic oligonucleotide
  Target: LAMA2; (-) strand; PAM type: YTN; PAM sequence: TTG
tgtggctggaggtggtttag

SEQ ID NO: 198241 - DNA, 20 bp, Artificial Sequence
  Description of Artificial Sequence: Synthetic oligonucleotide
  Target: LAMA2; (-) strand; PAM type: YTN; PAM sequence: TTT
gtgtggctggaggtggttta

SEQ ID NO: 198242 - DNA, 20 bp, Artificial Sequence
  Description of Artificial Sequence: Synthetic oligonucleotide
  Target: LAMA2; (-) strand; PAM type: YTN; PAM sequence: TTT
tgtgtggctggaggtggttt

SEQ ID NO: 198243 - DNA, 20 bp, Artificial Sequence
  Description of Artificial Sequence: Synthetic oligonucleotide
  Target: LAMA2; (-) strand; PAM type: YTN; PAM sequence: TTT
ttgtgtggctggaggtggtt

SEQ ID NO: 198244 - DNA, 20 bp, Artificial Sequence
  Description of Artificial Sequence: Synthetic oligonucleotide
  Target: LAMA2; (-) strand; PAM type: YTN; PAM sequence: TTT
tttgtgtggctggaggtggt

SEQ ID NO: 198245 - DNA, 20 bp, Artificial Sequence
  Description of Artificial Sequence: Synthetic oligonucleotide
  Target: LAMA2; (-) strand; PAM type: YTN; PAM sequence: CTC
aagcatagtgtgtgtttttt

SEQ ID NO: 198246 - DNA, 20 bp, Artificial Sequence
  Description of Artificial Sequence: Synthetic oligonucleotide
  Target: LAMA2; (-) strand; PAM type: YTN; PAM sequence: TTG
gaatgactcaagcatagtgt

SEQ ID NO: 198247 - DNA, 20 bp, Artificial Sequence
  Description of Artificial Sequence: Synthetic oligonucleotide
  Target: LAMA2; (-) strand; PAM type: YTN; PAM sequence: TTT
ggaatgactcaagcatagtg

SEQ ID NO: 198248 - DNA, 20 bp, Artificial Sequence
  Description of Artificial Sequence: Synthetic oligonucleotide
  Target: LAMA2; (-) strand; PAM type: YTN; PAM sequence: TTA
gaggaaggtgtgtaatttgg

SEQ ID NO: 198249 - DNA, 20 bp, Artificial Sequence
  Description of Artificial Sequence: Synthetic oligonucleotide
  Target: LAMA2; (-) strand; PAM type: YTN; PAM sequence: TTT
agaggaaggtgtgtaatttg

SEQ ID NO: 198250 - DNA, 20 bp, Artificial Sequence
  Description of Artificial Sequence: Synthetic oligonucleotide
  Target: LAMA2; (-) strand; PAM type: YTN; PAM sequence: CTA
atgtttagaggaaggtgtgt

SEQ ID NO: 198251 - DNA, 20 bp, Artificial Sequence
  Description of Artificial Sequence: Synthetic oligonucleotide
  Target: LAMA2; (-) strand; PAM type: YTN; PAM sequence: TTC
acactaatgtttagaggaag

SEQ ID NO: 198252 - DNA, 20 bp, Artificial Sequence
  Description of Artificial Sequence: Synthetic oligonucleotide
  Target: LAMA2; (-) strand; PAM type: YTN; PAM sequence: TTT
cacactaatgtttagaggaa

SEQ ID NO: 198253 - DNA, 20 bp, Artificial Sequence
  Description of Artificial Sequence: Synthetic oligonucleotide
  Target: LAMA2; (-) strand; PAM type: YTN; PAM sequence: CTA
atttcacactaatgtttaga

SEQ ID NO: 198254 - DNA, 20 bp, Artificial Sequence
  Description of Artificial Sequence: Synthetic oligonucleotide
  Target: LAMA2; (-) strand; PAM type: YTN; PAM sequence: TTC
ccaaatgtcctaatttcaca

SEQ ID NO: 198255 - DNA, 20 bp, Artificial Sequence
  Description of Artificial Sequence: Synthetic oligonucleotide
  Target: LAMA2; (-) strand; PAM type: YTN; PAM sequence: TTT
cccaaatgtcctaatttcac

SEQ ID NO: 198256 - DNA, 20 bp, Artificial Sequence
  Description of Artificial Sequence: Synthetic oligonucleotide
  Target: LAMA2; (-) strand; PAM type: YTN; PAM sequence: TTG
aagggggcaaacatgcaaat

SEQ ID NO: 198257 - DNA, 20 bp, Artificial Sequence
  Description of Artificial Sequence: Synthetic oligonucleotide
  Target: LAMA2; (-) strand; PAM type: YTN; PAM sequence: TTT
gaagggggcaaacatgcaaa

SEQ ID NO: 198258 - DNA, 20 bp, Artificial Sequence
  Description of Artificial Sequence: Synthetic oligonucleotide
  Target: LAMA2; (-) strand; PAM type: YTN; PAM sequence: TTC
aacatgcgatttgaaggggg

SEQ ID NO: 198259 - DNA, 20 bp, Artificial Sequence
  Description of Artificial Sequence: Synthetic oligonucleotide
  Target: LAMA2; (-) strand; PAM type: YTN; PAM sequence: TTT
caacatgcgatttgaagggg

SEQ ID NO: 198260 - DNA, 20 bp, Artificial Sequence
  Description of Artificial Sequence: Synthetic oligonucleotide
  Target: LAMA2; (-) strand; PAM type: YTN; PAM sequence: CTG
ggaataccatttcaacatgc

SEQ ID NO: 198261 - DNA, 20 bp, Artificial Sequence
  Description of Artificial Sequence: Synthetic oligonucleotide
  Target: LAMA2; (-) strand; PAM type: YTN; PAM sequence: CTC
ccaccagtccccacgtccaa

SEQ ID NO: 198262 - DNA, 20 bp, Artificial Sequence
  Description of Artificial Sequence: Synthetic oligonucleotide
  Target: LAMA2; (-) strand; PAM type: YTN; PAM sequence: CTG
tccccatgatccaatcacct

SEQ ID NO: 198263 - DNA, 20 bp, Artificial Sequence
  Description of Artificial Sequence: Synthetic oligonucleotide
  Target: LAMA2; (-) strand; PAM type: YTN; PAM sequence: TTC
atgagggatctgtccccatg

SEQ ID NO: 198264 - DNA, 20 bp, Artificial Sequence
  Description of Artificial Sequence: Synthetic oligonucleotide
  Target: LAMA2; (-) strand; PAM type: YTN; PAM sequence: CTA
caccattcatgagggatctg

SEQ ID NO: 198265 - DNA, 20 bp, Artificial Sequence
  Description of Artificial Sequence: Synthetic oligonucleotide
  Target: LAMA2; (-) strand; PAM type: YTN; PAM sequence: TTA
tcaccaaggggatggtgcta

SEQ ID NO: 198266 - DNA, 20 bp, Artificial Sequence
  Description of Artificial Sequence: Synthetic oligonucleotide
  Target: LAMA2; (-) strand; PAM type: YTN; PAM sequence: CTT
atcaccaaggggatggtgct

SEQ ID NO: 198267 - DNA, 20 bp, Artificial Sequence
  Description of Artificial Sequence: Synthetic oligonucleotide
  Target: LAMA2; (-) strand; PAM type: YTN; PAM sequence: CTC
acttatcaccaaggggatgg

SEQ ID NO: 198268 - DNA, 20 bp, Artificial Sequence
  Description of Artificial Sequence: Synthetic oligonucleotide
  Target: LAMA2; (-) strand; PAM type: YTN; PAM sequence: CTA
agggagaactcacttatcac

SEQ ID NO: 198269 - DNA, 20 bp, Artificial Sequence
  Description of Artificial Sequence: Synthetic oligonucleotide
  Target: LAMA2; (-) strand; PAM type: YTN; PAM sequence: CTC
atgggaactaagggagaact

SEQ ID NO: 198270 - DNA, 20 bp, Artificial Sequence
  Description of Artificial Sequence: Synthetic oligonucleotide
  Target: LAMA2; (-) strand; PAM type: YTN; PAM sequence: TTA
aacaaccagatctcatggga

SEQ ID NO: 198271 - DNA, 20 bp, Artificial Sequence
  Description of Artificial Sequence: Synthetic oligonucleotide
  Target: LAMA2; (-) strand; PAM type: YTN; PAM sequence: TTT
aaacaaccagatctcatggg

SEQ ID NO: 198272 - DNA, 20 bp, Artificial Sequence
  Description of Artificial Sequence: Synthetic oligonucleotide
  Target: LAMA2; (-) strand; PAM type: YTN; PAM sequence: TTT
taaacaaccagatctcatgg

SEQ ID NO: 198273 - DNA, 20 bp, Artificial Sequence
  Description of Artificial Sequence: Synthetic oligonucleotide
  Target: LAMA2; (-) strand; PAM type: YTN; PAM sequence: CTT
ttaaacaaccagatctcatg

SEQ ID NO: 198274 - DNA, 20 bp, Artificial Sequence
  Description of Artificial Sequence: Synthetic oligonucleotide
  Target: LAMA2; (-) strand; PAM type: YTN; PAM sequence: TTC
ttttaaacaaccagatctca

SEQ ID NO: 198275 - DNA, 20 bp, Artificial Sequence
  Description of Artificial Sequence: Synthetic oligonucleotide
  Target: LAMA2; (-) strand; PAM type: YTN; PAM sequence: TTT
cttttaaacaaccagatctc

SEQ ID NO: 198276 - DNA, 20 bp, Artificial Sequence
  Description of Artificial Sequence: Synthetic oligonucleotide
  Target: LAMA2; (-) strand; PAM type: YTN; PAM sequence: CTG
gagcacacatgtcacatgga

SEQ ID NO: 198277 - DNA, 20 bp, Artificial Sequence
  Description of Artificial Sequence: Synthetic oligonucleotide
  Target: LAMA2; (-) strand; PAM type: YTN; PAM sequence: TTC
cagtcatggcagaagataaa

SEQ ID NO: 198278 - DNA, 20 bp, Artificial Sequence
  Description of Artificial Sequence: Synthetic oligonucleotide
  Target: LAMA2; (-) strand; PAM type: YTN; PAM sequence: CTT
ccagtcatggcagaagataa

SEQ ID NO: 198279 - DNA, 20 bp, Artificial Sequence
  Description of Artificial Sequence: Synthetic oligonucleotide
  Target: LAMA2; (-) strand; PAM type: YTN; PAM sequence: CTC
aggaagcttccagtcatggc

SEQ ID NO: 198280 - DNA, 20 bp, Artificial Sequence
  Description of Artificial Sequence: Synthetic oligonucleotide
  Target: LAMA2; (-) strand; PAM type: YTN; PAM sequence: CTG
gtgagggcctcaggaagctt

SEQ ID NO: 198281 - DNA, 20 bp, Artificial Sequence
  Description of Artificial Sequence: Synthetic oligonucleotide
  Target: LAMA2; (-) strand; PAM type: YTN; PAM sequence: TTC
tggtgagggcctcaggaagc

SEQ ID NO: 198282 - DNA, 20 bp, Artificial Sequence
  Description of Artificial Sequence: Synthetic oligonucleotide
  Target: LAMA2; (-) strand; PAM type: YTN; PAM sequence: CTG
attctggtgagggcctcagg

SEQ ID NO: 198283 - DNA, 20 bp, Artificial Sequence
  Description of Artificial Sequence: Synthetic oligonucleotide
  Target: LAMA2; (-) strand; PAM type: YTN; PAM sequence: CTG
tacaggaaccatggtgcaga

SEQ ID NO: 198284 - DNA, 20 bp, Artificial Sequence
  Description of Artificial Sequence: Synthetic oligonucleotide
  Target: LAMA2; (-) strand; PAM type: YTN; PAM sequence: CTG
caggctgtacaggaaccatg

SEQ ID NO: 198285 - DNA, 20 bp, Artificial Sequence
  Description of Artificial Sequence: Synthetic oligonucleotide
  Target: LAMA2; (-) strand; PAM type: YTN; PAM sequence: TTC
tgcaggctgtacaggaacca

SEQ ID NO: 198286 - DNA, 20 bp, Artificial Sequence
  Description of Artificial Sequence: Synthetic oligonucleotide
  Target: LAMA2; (-) strand; PAM type: YTN; PAM sequence: CTG
ttctgcaggctgtacaggaa

SEQ ID NO: 198287 - DNA, 20 bp, Artificial Sequence
  Description of Artificial Sequence: Synthetic oligonucleotide
  Target: LAMA2; (-) strand; PAM type: YTN; PAM sequence: CTC
tgttctgcaggctgtacagg

SEQ ID NO: 198288 - DNA, 20 bp, Artificial Sequence
  Description of Artificial Sequence: Synthetic oligonucleotide
  Target: LAMA2; (-) strand; PAM type: YTN; PAM sequence: TTC
tctgttctgcaggctgtaca

SEQ ID NO: 198289 - DNA, 20 bp, Artificial Sequence
  Description of Artificial Sequence: Synthetic oligonucleotide
  Target: LAMA2; (-) strand; PAM type: YTN; PAM sequence: TTG
gttctctgttctgcaggctg

SEQ ID NO: 198290 - DNA, 20 bp, Artificial Sequence
  Description of Artificial Sequence: Synthetic oligonucleotide
  Target: LAMA2; (-) strand; PAM type: YTN; PAM sequence: TTA
attggttctctgttctgcag

SEQ ID NO: 198291 - DNA, 20 bp, Artificial Sequence
  Description of Artificial Sequence: Synthetic oligonucleotide
  Target: LAMA2; (-) strand; PAM type: YTN; PAM sequence: TTT
aattggttctctgttctgca

SEQ ID NO: 198292 - DNA, 20 bp, Artificial Sequence
  Description of Artificial Sequence: Synthetic oligonucleotide
  Target: LAMA2; (-) strand; PAM type: YTN; PAM sequence: TTA
taaagaaaagatatttaatt

SEQ ID NO: 198293 - DNA, 20 bp, Artificial Sequence
  Description of Artificial Sequence: Synthetic oligonucleotide
  Target: LAMA2; (-) strand; PAM type: YTN; PAM sequence: TTT
ataaagaaaagatatttaat

SEQ ID NO: 198294 - DNA, 20 bp, Artificial Sequence
  Description of Artificial Sequence: Synthetic oligonucleotide
  Target: LAMA2; (-) strand; PAM type: YTN; PAM sequence: CTG
ggtaatttataaagaaaaga

SEQ ID NO: 198295 - DNA, 20 bp, Artificial Sequence
  Description of Artificial Sequence: Synthetic oligonucleotide
  Target: LAMA2; (-) strand; PAM type: YTN; PAM sequence: CTG
aggctgggtaatttataaag

SEQ ID NO: 198296 - DNA, 20 bp, Artificial Sequence
  Description of Artificial Sequence: Synthetic oligonucleotide
  Target: LAMA2; (-) strand; PAM type: YTN; PAM sequence: TTA
agaaacatctgaggctgggt

SEQ ID NO: 198297 - DNA, 20 bp, Artificial Sequence
  Description of Artificial Sequence: Synthetic oligonucleotide
  Target: LAMA2; (-) strand; PAM type: YTN; PAM sequence: TTT
aagaaacatctgaggctggg

SEQ ID NO: 198298 - DNA, 20 bp, Artificial Sequence
  Description of Artificial Sequence: Synthetic oligonucleotide
  Target: LAMA2; (-) strand; PAM type: YTN; PAM sequence: TTT
taagaaacatctgaggctgg

SEQ ID NO: 198299 - DNA, 20 bp, Artificial Sequence
  Description of Artificial Sequence: Synthetic oligonucleotide
  Target: LAMA2; (-) strand; PAM type: YTN; PAM sequence: CTT
ttaagaaacatctgaggctg

SEQ ID NO: 198300 - DNA, 20 bp, Artificial Sequence
  Description of Artificial Sequence: Synthetic oligonucleotide
  Target: LAMA2; (-) strand; PAM type: YTN; PAM sequence: CTG
cttttaagaaacatctgagg

SEQ ID NO: 198301 - DNA, 20 bp, Artificial Sequence
  Description of Artificial Sequence: Synthetic oligonucleotide
  Target: LAMA2; (-) strand; PAM type: YTN; PAM sequence: TTG
cactgcttttaagaaacatc

SEQ ID NO: 198302 - DNA, 20 bp, Artificial Sequence
  Description of Artificial Sequence: Synthetic oligonucleotide
  Target: LAMA2; (-) strand; PAM type: YTN; PAM sequence: TTT
gcactgcttttaagaaacat

SEQ ID NO: 198303 - DNA, 20 bp, Artificial Sequence
  Description of Artificial Sequence: Synthetic oligonucleotide
  Target: LAMA2; (-) strand; PAM type: YTN; PAM sequence: TTT
tgcactgcttttaagaaaca

SEQ ID NO: 198304 - DNA, 20 bp, Artificial Sequence
  Description of Artificial Sequence: Synthetic oligonucleotide
  Target: LAMA2; (-) strand; PAM type: YTN; PAM sequence: TTT
ttgcactgcttttaagaaac

SEQ ID NO: 198305 - DNA, 20 bp, Artificial Sequence
  Description of Artificial Sequence: Synthetic oligonucleotide
  Target: LAMA2; (-) strand; PAM type: YTN; PAM sequence: TTT
tttgcactgcttttaagaaa

SEQ ID NO: 198306 - DNA, 20 bp, Artificial Sequence
  Description of Artificial Sequence: Synthetic oligonucleotide
  Target: LAMA2; (-) strand; PAM type: YTN; PAM sequence: TTA
agccattttttgcactgctt

SEQ ID NO: 198307 - DNA, 20 bp, Artificial Sequence
  Description of Artificial Sequence: Synthetic oligonucleotide
  Target: LAMA2; (-) strand; PAM type: YTN; PAM sequence: CTA
gaaaataccaaatatcacag

SEQ ID NO: 198308 - DNA, 20 bp, Artificial Sequence
  Description of Artificial Sequence: Synthetic oligonucleotide
  Target: LAMA2; (-) strand; PAM type: YTN; PAM sequence: CTA
atggactagaaaataccaaa

SEQ ID NO: 198309 - DNA, 20 bp, Artificial Sequence
  Description of Artificial Sequence: Synthetic oligonucleotide
  Target: LAMA2; (-) strand; PAM type: YTN; PAM sequence: CTA
catcggggggatgtgcacta

SEQ ID NO: 198310 - DNA, 20 bp, Artificial Sequence
  Description of Artificial Sequence: Synthetic oligonucleotide
  Target: LAMA2; (-) strand; PAM type: YTN; PAM sequence: TTA
tcctacatcggggggatgtg

SEQ ID NO: 198311 - DNA, 20 bp, Artificial Sequence
  Description of Artificial Sequence: Synthetic oligonucleotide
  Target: LAMA2; (-) strand; PAM type: YTN; PAM sequence: TTT
atcctacatcggggggatgt

SEQ ID NO: 198312 - DNA, 20 bp, Artificial Sequence
  Description of Artificial Sequence: Synthetic oligonucleotide
  Target: LAMA2; (-) strand; PAM type: YTN; PAM sequence: TTC
ataccatatttatcctacat

SEQ ID NO: 198313 - DNA, 20 bp, Artificial Sequence
  Description of Artificial Sequence: Synthetic oligonucleotide
  Target: LAMA2; (-) strand; PAM type: YTN; PAM sequence: TTC
aaatattcataccatattta

SEQ ID NO: 198314 - DNA, 20 bp, Artificial Sequence
  Description of Artificial Sequence: Synthetic oligonucleotide
  Target: LAMA2; (-) strand; PAM type: YTN; PAM sequence: CTC
ataaaaatattcaaatattc

SEQ ID NO: 198315 - DNA, 20 bp, Artificial Sequence
  Description of Artificial Sequence: Synthetic oligonucleotide
  Target: LAMA2; (-) strand; PAM type: YTN; PAM sequence: TTA
ctcataaaaatattcaaata

SEQ ID NO: 198316 - DNA, 20 bp, Artificial Sequence
  Description of Artificial Sequence: Synthetic oligonucleotide
  Target: LAMA2; (-) strand; PAM type: YTN; PAM sequence: TTA
ttactcataaaaatattcaa

SEQ ID NO: 198317 - DNA, 20 bp, Artificial Sequence
  Description of Artificial Sequence: Synthetic oligonucleotide
  Target: LAMA2; (-) strand; PAM type: YTN; PAM sequence: TTA
attattactcataaaaatat

SEQ ID NO: 198318 - DNA, 20 bp, Artificial Sequence
  Description of Artificial Sequence: Synthetic oligonucleotide
  Target: LAMA2; (-) strand; PAM type: YTN; PAM sequence: CTT
aattattactcataaaaata

SEQ ID NO: 198319 - DNA, 20 bp, Artificial Sequence
  Description of Artificial Sequence: Synthetic oligonucleotide
  Target: LAMA2; (-) strand; PAM type: YTN; PAM sequence: TTC
aataagcttaattattactc

SEQ ID NO: 198320 - DNA, 20 bp, Artificial Sequence
  Description of Artificial Sequence: Synthetic oligonucleotide
  Target: LAMA2; (-) strand; PAM type: YTN; PAM sequence: TTG
tgataattcaataagcttaa

SEQ ID NO: 198321 - DNA, 20 bp, Artificial Sequence
  Description of Artificial Sequence: Synthetic oligonucleotide
  Target: LAMA2; (-) strand; PAM type: YTN; PAM sequence: CTG
gagttgtgataattcaataa

SEQ ID NO: 198322 - DNA, 20 bp, Artificial Sequence
  Description of Artificial Sequence: Synthetic oligonucleotide
  Target: LAMA2; (-) strand; PAM type: YTN; PAM sequence: CTC
actggagttgtgataattca

SEQ ID NO: 198323 - DNA, 20 bp, Artificial Sequence
  Description of Artificial Sequence: Synthetic oligonucleotide
  Target: LAMA2; (-) strand; PAM type: YTN; PAM sequence: TTA
tctcactggagttgtgataa

SEQ ID NO: 198324 - DNA, 20 bp, Artificial Sequence
  Description of Artificial Sequence: Synthetic oligonucleotide
  Target: LAMA2; (-) strand; PAM type: YTN; PAM sequence: CTT
atctcactggagttgtgata

SEQ ID NO: 198325 - DNA, 20 bp, Artificial Sequence
  Description of Artificial Sequence: Synthetic oligonucleotide
  Target: LAMA2; (-) strand; PAM type: YTN; PAM sequence: TTA
gacttatctcactggagttg

SEQ ID NO: 198326 - DNA, 20 bp, Artificial Sequence
  Description of Artificial Sequence: Synthetic oligonucleotide
  Target: LAMA2; (-) strand; PAM type: YTN; PAM sequence: TTA
aaattagacttatctcactg

SEQ ID NO: 198327 - DNA, 20 bp, Artificial Sequence
  Description of Artificial Sequence: Synthetic oligonucleotide
  Target: LAMA2; (-) strand; PAM type: YTN; PAM sequence: CTA
atgatattaaaattagactt

SEQ ID NO: 198328 - DNA, 20 bp, Artificial Sequence
  Description of Artificial Sequence: Synthetic oligonucleotide
  Target: LAMA2; (-) strand; PAM type: YTN; PAM sequence: TTC
taatgatattaaaattagac

SEQ ID NO: 198329 - DNA, 20 bp, Artificial Sequence
  Description of Artificial Sequence: Synthetic oligonucleotide
  Target: LAMA2; (-) strand; PAM type: YTN; PAM sequence: TTT
ctaatgatattaaaattaga

SEQ ID NO: 198330 - DNA, 20 bp, Artificial Sequence
  Description of Artificial Sequence: Synthetic oligonucleotide
  Target: LAMA2; (-) strand; PAM type: YTN; PAM sequence: CTT
tctaatgatattaaaattag

SEQ ID NO: 198331 - DNA, 20 bp, Artificial Sequence
  Description of Artificial Sequence: Synthetic oligonucleotide
  Target: LAMA2; (-) strand; PAM type: YTN; PAM sequence: TTC
acctttctaatgatattaaa

SEQ ID NO: 198332 - DNA, 20 bp, Artificial Sequence
  Description of Artificial Sequence: Synthetic oligonucleotide
  Target: LAMA2; (-) strand; PAM type: YTN; PAM sequence: CTT
cacctttctaatgatattaa

SEQ ID NO: 198333 - DNA, 20 bp, Artificial Sequence
  Description of Artificial Sequence: Synthetic oligonucleotide
  Target: LAMA2; (-) strand; PAM type: YTN; PAM sequence: TTC
ttcacctttctaatgatatt

SEQ ID NO: 198334 - DNA, 20 bp, Artificial Sequence
  Description of Artificial Sequence: Synthetic oligonucleotide
  Target: LAMA2; (-) strand; PAM type: YTN; PAM sequence: CTT
cttcacctttctaatgatat

SEQ ID NO: 198335 - DNA, 20 bp, Artificial Sequence
  Description of Artificial Sequence: Synthetic oligonucleotide
  Target: LAMA2; (-) strand; PAM type: YTN; PAM sequence: TTG
tcttcttcacctttctaatg

SEQ ID NO: 198336 - DNA, 20 bp, Artificial Sequence
  Description of Artificial Sequence: Synthetic oligonucleotide
  Target: LAMA2; (-) strand; PAM type: YTN; PAM sequence: CTT
gtcttcttcacctttctaat

SEQ ID NO: 198337 - DNA, 20 bp, Artificial Sequence
  Description of Artificial Sequence: Synthetic oligonucleotide
  Target: LAMA2; (-) strand; PAM type: YTN; PAM sequence: CTG
gtcttgtcttcttcaccttt

SEQ ID NO: 198338 - DNA, 20 bp, Artificial Sequence
  Description of Artificial Sequence: Synthetic oligonucleotide
  Target: LAMA2; (-) strand; PAM type: YTN; PAM sequence: CTC
gctggtcttgtcttcttcac

SEQ ID NO: 198339 - DNA, 20 bp, Artificial Sequence
  Description of Artificial Sequence: Synthetic oligonucleotide
  Target: LAMA2; (-) strand; PAM type: YTN; PAM sequence: TTA
gtagccctcgctggtcttgt

SEQ ID NO: 198340 - DNA, 20 bp, Artificial Sequence
  Description of Artificial Sequence: Synthetic oligonucleotide
  Target: LAMA2; (-) strand; PAM type: YTN; PAM sequence: TTG
agaaattagtagccctcgct

SEQ ID NO: 198341 - DNA, 20 bp, Artificial Sequence
  Description of Artificial Sequence: Synthetic oligonucleotide
  Target: LAMA2; (-) strand; PAM type: YTN; PAM sequence: CTT
gagaaattagtagccctcgc

SEQ ID NO: 198342 - DNA, 20 bp, Artificial Sequence
  Description of Artificial Sequence: Synthetic oligonucleotide
  Target: LAMA2; (-) strand; PAM type: YTN; PAM sequence: CTC
acatgaggatgagcgtgtcc

SEQ ID NO: 198343 - DNA, 20 bp, Artificial Sequence
  Description of Artificial Sequence: Synthetic oligonucleotide
  Target: LAMA2; (-) strand; PAM type: YTN; PAM sequence: CTC
tcacatgaggatgagcgtgt

SEQ ID NO: 198344 - DNA, 20 bp, Artificial Sequence
  Description of Artificial Sequence: Synthetic oligonucleotide
  Target: LAMA2; (-) strand; PAM type: YTN; PAM sequence: TTC
cagctctcacatgaggatga

SEQ ID NO: 198345 - DNA, 20 bp, Artificial Sequence
  Description of Artificial Sequence: Synthetic oligonucleotide
  Target: LAMA2; (-) strand; PAM type: YTN; PAM sequence: TTG
agttccagctctcacatgag

SEQ ID NO: 198346 - DNA, 20 bp, Artificial Sequence
  Description of Artificial Sequence: Synthetic oligonucleotide
  Target: LAMA2; (-) strand; PAM type: YTN; PAM sequence: TTT
gagttccagctctcacatga

SEQ ID NO: 198347 - DNA, 20 bp, Artificial Sequence
  Description of Artificial Sequence: Synthetic oligonucleotide
  Target: LAMA2; (-) strand; PAM type: YTN; PAM sequence: TTT
tgagttccagctctcacatg

SEQ ID NO: 198348 - DNA, 20 bp, Artificial Sequence
  Description of Artificial Sequence: Synthetic oligonucleotide
  Target: LAMA2; (-) strand; PAM type: YTN; PAM sequence: CTG
gttttgagttccagctctca

SEQ ID NO: 198349 - DNA, 20 bp, Artificial Sequence
  Description of Artificial Sequence: Synthetic oligonucleotide
  Target: LAMA2; (-) strand; PAM type: YTN; PAM sequence: TTG
acaaagtcaaggtctggttt

SEQ ID NO: 198350 - DNA, 20 bp, Artificial Sequence
  Description of Artificial Sequence: Synthetic oligonucleotide
  Target: LAMA2; (-) strand; PAM type: YTN; PAM sequence: TTT
gacaaagtcaaggtctggtt

SEQ ID NO: 198351 - DNA, 20 bp, Artificial Sequence
  Description of Artificial Sequence: Synthetic oligonucleotide
  Target: LAMA2; (-) strand; PAM type: YTN; PAM sequence: TTT
tgacaaagtcaaggtctggt

SEQ ID NO: 198352 - DNA, 20 bp, Artificial Sequence
  Description of Artificial Sequence: Synthetic oligonucleotide
  Target: LAMA2; (-) strand; PAM type: YTN; PAM sequence: TTG
ggaaccaaaagtgcattttg

SEQ ID NO: 198353 - DNA, 20 bp, Artificial Sequence
  Description of Artificial Sequence: Synthetic oligonucleotide
  Target: LAMA2; (-) strand; PAM type: YTN; PAM sequence: CTA
atatcagattgggaaccaaa

SEQ ID NO: 198354 - DNA, 20 bp, Artificial Sequence
  Description of Artificial Sequence: Synthetic oligonucleotide
  Target: LAMA2; (-) strand; PAM type: YTN; PAM sequence: CTG
cacctaatatcagattggga

SEQ ID NO: 198355 - DNA, 20 bp, Artificial Sequence
  Description of Artificial Sequence: Synthetic oligonucleotide
  Target: LAMA2; (-) strand; PAM type: YTN; PAM sequence: TTA
aagaagagaagaatctgcac

SEQ ID NO: 198356 - DNA, 20 bp, Artificial Sequence
  Description of Artificial Sequence: Synthetic oligonucleotide
  Target: LAMA2; (-) strand; PAM type: YTN; PAM sequence: TTG
gttaaagaagagaagaatct

SEQ ID NO: 198357 - DNA, 20 bp, Artificial Sequence
  Description of Artificial Sequence: Synthetic oligonucleotide
  Target: LAMA2; (-) strand; PAM type: YTN; PAM sequence: CTT
ggttaaagaagagaagaatc

SEQ ID NO: 198358 - DNA, 20 bp, Artificial Sequence
  Description of Artificial Sequence: Synthetic oligonucleotide
  Target: LAMA2; (-) strand; PAM type: YTN; PAM sequence: TTG
gcccttggttaaagaagaga

SEQ ID NO: 198359 - DNA, 20 bp, Artificial Sequence
  Description of Artificial Sequence: Synthetic oligonucleotide
  Target: LAMA2; (-) strand; PAM type: YTN; PAM sequence: TTT
ggcccttggttaaagaagag

SEQ ID NO: 198360 - DNA, 20 bp, Artificial Sequence
  Description of Artificial Sequence: Synthetic oligonucleotide
  Target: LAMA2; (-) strand; PAM type: YTN; PAM sequence: TTA
tttggcccttggttaaagaa

SEQ ID NO: 198361 - DNA, 20 bp, Artificial Sequence
  Description of Artificial Sequence: Synthetic oligonucleotide
  Target: LAMA2; (-) strand; PAM type: YTN; PAM sequence: CTG
tattatttggcccttggtta

SEQ ID NO: 198362 - DNA, 20 bp, Artificial Sequence
  Description of Artificial Sequence: Synthetic oligonucleotide
  Target: LAMA2; (-) strand; PAM type: YTN; PAM sequence: CTG
gggcagggtggggtgggtgg

SEQ ID NO: 198363 - DNA, 20 bp, Artificial Sequence
  Description of Artificial Sequence: Synthetic oligonucleotide
  Target: LAMA2; (-) strand; PAM type: YTN; PAM sequence: CTA
aaaggagagctggggcaggg

SEQ ID NO: 198364 - DNA, 20 bp, Artificial Sequence
  Description of Artificial Sequence: Synthetic oligonucleotide
  Target: LAMA2; (-) strand; PAM type: YTN; PAM sequence: TTC
taaaaggagagctggggcag

SEQ ID NO: 198365 - DNA, 20 bp, Artificial Sequence
  Description of Artificial Sequence: Synthetic oligonucleotide
  Target: LAMA2; (-) strand; PAM type: YTN; PAM sequence: TTG
gttctaaaaggagagctggg

SEQ ID NO: 198366 - DNA, 20 bp, Artificial Sequence
  Description of Artificial Sequence: Synthetic oligonucleotide
  Target: LAMA2; (-) strand; PAM type: YTN; PAM sequence: TTT
ggttctaaaaggagagctgg

SEQ ID NO: 198367 - DNA, 20 bp, Artificial Sequence
  Description of Artificial Sequence: Synthetic oligonucleotide
  Target: LAMA2; (-) strand; PAM type: YTN; PAM sequence: CTA
aagtgagagagcaacagttt

SEQ ID NO: 198368 - DNA, 20 bp, Artificial Sequence
  Description of Artificial Sequence: Synthetic oligonucleotide
  Target: LAMA2; (-) strand; PAM type: YTN; PAM sequence: CTC
actaaagtgagagagcaaca

SEQ ID NO: 198369 - DNA, 20 bp, Artificial Sequence
  Description of Artificial Sequence: Synthetic oligonucleotide
  Target: LAMA2; (-) strand; PAM type: YTN; PAM sequence: TTC
cacctcactaaagtgagaga

SEQ ID NO: 198370 - DNA, 20 bp, Artificial Sequence
  Description of Artificial Sequence: Synthetic oligonucleotide
  Target: LAMA2; (-) strand; PAM type: YTN; PAM sequence: CTT
ccacctcactaaagtgagag

SEQ ID NO: 198371 - DNA, 20 bp, Artificial Sequence
  Description of Artificial Sequence: Synthetic oligonucleotide
  Target: LAMA2; (-) strand; PAM type: YTN; PAM sequence: TTC
cttccacctcactaaagtga

SEQ ID NO: 198372 - DNA, 20 bp, Artificial Sequence
  Description of Artificial Sequence: Synthetic oligonucleotide
  Target: LAMA2; (-) strand; PAM type: YTN; PAM sequence: CTT
ccttccacctcactaaagtg

SEQ ID NO: 198373 - DNA, 20 bp, Artificial Sequence
  Description of Artificial Sequence: Synthetic oligonucleotide
  Target: LAMA2; (-) strand; PAM type: YTN; PAM sequence: TTG
aaatagtcttccttccacct

SEQ ID NO: 198374 - DNA, 20 bp, Artificial Sequence
  Description of Artificial Sequence: Synthetic oligonucleotide
  Target: LAMA2; (-) strand; PAM type: YTN; PAM sequence: TTT
gaaatagtcttccttccacc

SEQ ID NO: 198375 - DNA, 20 bp, Artificial Sequence
  Description of Artificial Sequence: Synthetic oligonucleotide
  Target: LAMA2; (-) strand; PAM type: YTN; PAM sequence: TTC
atcagtcaatttgaaatagt

SEQ ID NO: 198376 - DNA, 20 bp, Artificial Sequence
  Description of Artificial Sequence: Synthetic oligonucleotide
  Target: LAMA2; (-) strand; PAM type: YTN; PAM sequence: TTA
attcatcagtcaatttgaaa

SEQ ID NO: 198377 - DNA, 20 bp, Artificial Sequence
  Description of Artificial Sequence: Synthetic oligonucleotide
  Target: LAMA2; (-) strand; PAM type: YTN; PAM sequence: TTC
gatagggttaattcatcagt

SEQ ID NO: 198378 - DNA, 20 bp, Artificial Sequence
  Description of Artificial Sequence: Synthetic oligonucleotide
  Target: LAMA2; (-) strand; PAM type: YTN; PAM sequence: CTT
cgatagggttaattcatcag

SEQ ID NO: 198379 - DNA, 20 bp, Artificial Sequence
  Description of Artificial Sequence: Synthetic oligonucleotide
  Target: LAMA2; (-) strand; PAM type: YTN; PAM sequence: CTG
accttcgatagggttaattc

SEQ ID NO: 198380 - DNA, 20 bp, Artificial Sequence
  Description of Artificial Sequence: Synthetic oligonucleotide
  Target: LAMA2; (-) strand; PAM type: YTN; PAM sequence: TTC
tgaccttcgatagggttaat

SEQ ID NO: 198381 - DNA, 20 bp, Artificial Sequence
  Description of Artificial Sequence: Synthetic oligonucleotide
  Target: LAMA2; (-) strand; PAM type: YTN; PAM sequence: TTT
ctgaccttcgatagggttaa

SEQ ID NO: 198382 - DNA, 20 bp, Artificial Sequence
  Description of Artificial Sequence: Synthetic oligonucleotide
  Target: LAMA2; (-) strand; PAM type: YTN; PAM sequence: TTT
tctgaccttcgatagggtta

SEQ ID NO: 198383 - DNA, 20 bp, Artificial Sequence
  Description of Artificial Sequence: Synthetic oligonucleotide
  Target: LAMA2; (-) strand; PAM type: YTN; PAM sequence: TTT
ttctgaccttcgatagggtt

SEQ ID NO: 198384 - DNA, 20 bp, Artificial Sequence
  Description of Artificial Sequence: Synthetic oligonucleotide
  Target: LAMA2; (-) strand; PAM type: YTN; PAM sequence: CTA
acatttttctgaccttcgat

SEQ ID NO: 198385 - DNA, 20 bp, Artificial Sequence
  Description of Artificial Sequence: Synthetic oligonucleotide
  Target: LAMA2; (-) strand; PAM type: YTN; PAM sequence: TTA
tctaacatttttctgacctt

SEQ ID NO: 198386 - DNA, 20 bp, Artificial Sequence
  Description of Artificial Sequence: Synthetic oligonucleotide
  Target: LAMA2; (-) strand; PAM type: YTN; PAM sequence: TTA
agttatctaacatttttctg

SEQ ID NO: 198387 - DNA, 20 bp, Artificial Sequence
  Description of Artificial Sequence: Synthetic oligonucleotide
  Target: LAMA2; (-) strand; PAM type: YTN; PAM sequence: CTT
aagttatctaacatttttct

SEQ ID NO: 198388 - DNA, 20 bp, Artificial Sequence
  Description of Artificial Sequence: Synthetic oligonucleotide
  Target: LAMA2; (-) strand; PAM type: YTN; PAM sequence: TTC
ccccttaagttatctaacat

SEQ ID NO: 198389 - DNA, 20 bp, Artificial Sequence
  Description of Artificial Sequence: Synthetic oligonucleotide
  Target: LAMA2; (-) strand; PAM type: YTN; PAM sequence: TTT
cccccttaagttatctaaca

SEQ ID NO: 198390 - DNA, 20 bp, Artificial Sequence
  Description of Artificial Sequence: Synthetic oligonucleotide
  Target: LAMA2; (-) strand; PAM type: YTN; PAM sequence: TTT
tcccccttaagttatctaac

SEQ ID NO: 198391 - DNA, 20 bp, Artificial Sequence
  Description of Artificial Sequence: Synthetic oligonucleotide
  Target: LAMA2; (-) strand; PAM type: YTN; PAM sequence: TTT
ttcccccttaagttatctaa

SEQ ID NO: 198392 - DNA, 20 bp, Artificial Sequence
  Description of Artificial Sequence: Synthetic oligonucleotide
  Target: LAMA2; (-) strand; PAM type: YTN; PAM sequence: TTT
tttcccccttaagttatcta

SEQ ID NO: 198393 - DNA, 20 bp, Artificial Sequence
  Description of Artificial Sequence: Synthetic oligonucleotide
  Target: LAMA2; (-) strand; PAM type: YTN; PAM sequence: TTT
ttttcccccttaagttatct

SEQ ID NO: 198394 - DNA, 20 bp, Artificial Sequence
  Description of Artificial Sequence: Synthetic oligonucleotide
  Target: LAMA2; (-) strand; PAM type: YTN; PAM sequence: CTT
tttttcccccttaagttatc

SEQ ID NO: 198395 - DNA, 20 bp, Artificial Sequence
  Description of Artificial Sequence: Synthetic oligonucleotide
  Target: LAMA2; (-) strand; PAM type: YTN; PAM sequence: TTC
tttttttcccccttaagtta

SEQ ID NO: 198396 - DNA, 20 bp, Artificial Sequence
  Description of Artificial Sequence: Synthetic oligonucleotide
  Target: LAMA2; (-) strand; PAM type: YTN; PAM sequence: TTT
ctttttttcccccttaagtt

SEQ ID NO: 198397 - DNA, 20 bp, Artificial Sequence
  Description of Artificial Sequence: Synthetic oligonucleotide
  Target: LAMA2; (-) strand; PAM type: YTN; PAM sequence: TTT
tctttttttcccccttaagt

SEQ ID NO: 198398 - DNA, 20 bp, Artificial Sequence
  Description of Artificial Sequence: Synthetic oligonucleotide
  Target: LAMA2; (-) strand; PAM type: YTN; PAM sequence: TTA
ttttctttttttccccctta

SEQ ID NO: 198399 - DNA, 20 bp, Artificial Sequence
  Description of Artificial Sequence: Synthetic oligonucleotide
  Target: LAMA2; (-) strand; PAM type: YTN; PAM sequence: TTT
attttctttttttccccctt

SEQ ID NO: 198400 - DNA, 20 bp, Artificial Sequence
  Description of Artificial Sequence: Synthetic oligonucleotide
  Target: LAMA2; (-) strand; PAM type: YTN; PAM sequence: TTG
atatttattttctttttttc

SEQ ID NO: 198401 - DNA, 20 bp, Artificial Sequence
  Description of Artificial Sequence: Synthetic oligonucleotide
  Target: LAMA2; (-) strand; PAM type: YTN; PAM sequence: TTT
gatatttattttcttttttt

SEQ ID NO: 198402 - DNA, 20 bp, Artificial Sequence
  Description of Artificial Sequence: Synthetic oligonucleotide
  Target: LAMA2; (-) strand; PAM type: YTN; PAM sequence: TTT
tgatatttattttctttttt

SEQ ID NO: 198403 - DNA, 20 bp, Artificial Sequence
  Description of Artificial Sequence: Synthetic oligonucleotide
  Target: LAMA2; (-) strand; PAM type: YTN; PAM sequence: TTC
cacattttgatatttatttt

SEQ ID NO: 198404 - DNA, 20 bp, Artificial Sequence
  Description of Artificial Sequence: Synthetic oligonucleotide
  Target: LAMA2; (-) strand; PAM type: YTN; PAM sequence: TTT
ccacattttgatatttattt

SEQ ID NO: 198405 - DNA, 20 bp, Artificial Sequence
  Description of Artificial Sequence: Synthetic oligonucleotide
  Target: LAMA2; (-) strand; PAM type: YTN; PAM sequence: TTC
aaacatttccacattttgat

SEQ ID NO: 198406 - DNA, 20 bp, Artificial Sequence
  Description of Artificial Sequence: Synthetic oligonucleotide
  Target: LAMA2; (-) strand; PAM type: YTN; PAM sequence: TTT
caaacatttccacattttga

SEQ ID NO: 198407 - DNA, 20 bp, Artificial Sequence
  Description of Artificial Sequence: Synthetic oligonucleotide
  Target: LAMA2; (-) strand; PAM type: YTN; PAM sequence: TTT
tcaaacatttccacattttg

SEQ ID NO: 198408 - DNA, 20 bp, Artificial Sequence
  Description of Artificial Sequence: Synthetic oligonucleotide
  Target: LAMA2; (-) strand; PAM type: YTN; PAM sequence: TTT
ttcaaacatttccacatttt

SEQ ID NO: 198409 - DNA, 20 bp, Artificial Sequence
  Description of Artificial Sequence: Synthetic oligonucleotide
  Target: LAMA2; (-) strand; PAM type: YTN; PAM sequence: CTT
tttcaaacatttccacattt

SEQ ID NO: 198410 - DNA, 20 bp, Artificial Sequence
  Description of Artificial Sequence: Synthetic oligonucleotide
  Target: LAMA2; (-) strand; PAM type: YTN; PAM sequence: TTC
tttttcaaacatttccacat

SEQ ID NO: 198411 - DNA, 20 bp, Artificial Sequence
  Description of Artificial Sequence: Synthetic oligonucleotide
  Target: LAMA2; (-) strand; PAM type: YTN; PAM sequence: TTT
ctttttcaaacatttccaca

SEQ ID NO: 198412 - DNA, 20 bp, Artificial Sequence
  Description of Artificial Sequence: Synthetic oligonucleotide
  Target: LAMA2; (-) strand; PAM type: YTN; PAM sequence: CTT
tctttttcaaacatttccac

SEQ ID NO: 198413 - DNA, 20 bp, Artificial Sequence
  Description of Artificial Sequence: Synthetic oligonucleotide
  Target: LAMA2; (-) strand; PAM type: YTN; PAM sequence: TTG
tctttctttttcaaacattt

SEQ ID NO: 198414 - DNA, 20 bp, Artificial Sequence
  Description of Artificial Sequence: Synthetic oligonucleotide
  Target: LAMA2; (-) strand; PAM type: YTN; PAM sequence: CTT
gtctttctttttcaaacatt

SEQ ID NO: 198415 - DNA, 20 bp, Artificial Sequence
  Description of Artificial Sequence: Synthetic oligonucleotide
  Target: LAMA2; (-) strand; PAM type: YTN; PAM sequence: TTC
ttgtctttctttttcaaaca

SEQ ID NO: 198416 - DNA, 20 bp, Artificial Sequence
  Description of Artificial Sequence: Synthetic oligonucleotide
  Target: LAMA2; (-) strand; PAM type: YTN; PAM sequence: CTT
cttgtctttctttttcaaac

SEQ ID NO: 198417 - DNA, 20 bp, Artificial Sequence
  Description of Artificial Sequence: Synthetic oligonucleotide
  Target: LAMA2; (-) strand; PAM type: YTN; PAM sequence: CTA
tccttcttgtctttcttttt

SEQ ID NO: 198418 - DNA, 20 bp, Artificial Sequence
  Description of Artificial Sequence: Synthetic oligonucleotide
  Target: LAMA2; (-) strand; PAM type: YTN; PAM sequence: TTC
ccctatccttcttgtctttc

SEQ ID NO: 198419 - DNA, 20 bp, Artificial Sequence
  Description of Artificial Sequence: Synthetic oligonucleotide
  Target: LAMA2; (-) strand; PAM type: YTN; PAM sequence: TTT
cccctatccttcttgtcttt

SEQ ID NO: 198420 - DNA, 20 bp, Artificial Sequence
  Description of Artificial Sequence: Synthetic oligonucleotide
  Target: LAMA2; (-) strand; PAM type: YTN; PAM sequence: TTT
tcccctatccttcttgtctt

SEQ ID NO: 198421 - DNA, 20 bp, Artificial Sequence
  Description of Artificial Sequence: Synthetic oligonucleotide
  Target: LAMA2; (-) strand; PAM type: YTN; PAM sequence: CTA
ttttcccctatccttcttgt

SEQ ID NO: 198422 - DNA, 20 bp, Artificial Sequence
  Description of Artificial Sequence: Synthetic oligonucleotide
  Target: LAMA2; (-) strand; PAM type: YTN; PAM sequence: CTC
tattttcccctatccttctt

SEQ ID NO: 198423 - DNA, 20 bp, Artificial Sequence
  Description of Artificial Sequence: Synthetic oligonucleotide
  Target: LAMA2; (-) strand; PAM type: YTN; PAM sequence: TTC
tctattttcccctatccttc

SEQ ID NO: 198424 - DNA, 20 bp, Artificial Sequence
  Description of Artificial Sequence: Synthetic oligonucleotide
  Target: LAMA2; (-) strand; PAM type: YTN; PAM sequence: CTT
ctctattttcccctatcctt

SEQ ID NO: 198425 - DNA, 20 bp, Artificial Sequence
  Description of Artificial Sequence: Synthetic oligonucleotide
  Target: LAMA2; (-) strand; PAM type: YTN; PAM sequence: TTC
ttctctattttcccctatcc

SEQ ID NO: 198426 - DNA, 20 bp, Artificial Sequence
  Description of Artificial Sequence: Synthetic oligonucleotide
  Target: LAMA2; (-) strand; PAM type: YTN; PAM sequence: CTA
ttcttctctattttccccta

SEQ ID NO: 198427 - DNA, 20 bp, Artificial Sequence
  Description of Artificial Sequence: Synthetic oligonucleotide
  Target: LAMA2; (-) strand; PAM type: YTN; PAM sequence: CTC
tattcttctctattttcccc

SEQ ID NO: 198428 - DNA, 20 bp, Artificial Sequence
  Description of Artificial Sequence: Synthetic oligonucleotide
  Target: LAMA2; (-) strand; PAM type: YTN; PAM sequence: CTC
tctattcttctctattttcc

SEQ ID NO: 198429 - DNA, 20 bp, Artificial Sequence
  Description of Artificial Sequence: Synthetic oligonucleotide
  Target: LAMA2; (-) strand; PAM type: YTN; PAM sequence: CTC
tctctattcttctctatttt

SEQ ID NO: 198430 - DNA, 20 bp, Artificial Sequence
  Description of Artificial Sequence: Synthetic oligonucleotide
  Target: LAMA2; (-) strand; PAM type: YTN; PAM sequence: TTC
tctctctattcttctctatt

SEQ ID NO: 198431 - DNA, 20 bp, Artificial Sequence
  Description of Artificial Sequence: Synthetic oligonucleotide
  Target: LAMA2; (-) strand; PAM type: YTN; PAM sequence: TTT
ctctctctattcttctctat

SEQ ID NO: 198432 - DNA, 20 bp, Artificial Sequence
  Description of Artificial Sequence: Synthetic oligonucleotide
  Target: LAMA2; (-) strand; PAM type: YTN; PAM sequence: CTT
tctctctctattcttctcta

SEQ ID NO: 198433 - DNA, 20 bp, Artificial Sequence
  Description of Artificial Sequence: Synthetic oligonucleotide
  Target: LAMA2; (-) strand; PAM type: YTN; PAM sequence: TTC
ctttctctctctattcttct

SEQ ID NO: 198434 - DNA, 20 bp, Artificial Sequence
  Description of Artificial Sequence: Synthetic oligonucleotide
  Target: LAMA2; (-) strand; PAM type: YTN; PAM sequence: CTT
cctttctctctctattcttc

SEQ ID NO: 198435 - DNA, 20 bp, Artificial Sequence
  Description of Artificial Sequence: Synthetic oligonucleotide
  Target: LAMA2; (-) strand; PAM type: YTN; PAM sequence: TTC
ttcctttctctctctattct

SEQ ID NO: 198436 - DNA, 20 bp, Artificial Sequence
  Description of Artificial Sequence: Synthetic oligonucleotide
  Target: LAMA2; (-) strand; PAM type: YTN; PAM sequence: TTT
cttcctttctctctctattc

SEQ ID NO: 198437 - DNA, 20 bp, Artificial Sequence
  Description of Artificial Sequence: Synthetic oligonucleotide
  Target: LAMA2; (-) strand; PAM type: YTN; PAM sequence: CTT
tcttcctttctctctctatt

SEQ ID NO: 198438 - DNA, 20 bp, Artificial Sequence
  Description of Artificial Sequence: Synthetic oligonucleotide
  Target: LAMA2; (-) strand; PAM type: YTN; PAM sequence: TTC
tttcttcctttctctctcta

SEQ ID NO: 198439 - DNA, 20 bp, Artificial Sequence
  Description of Artificial Sequence: Synthetic oligonucleotide
  Target: LAMA2; (-) strand; PAM type: YTN; PAM sequence: TTT
ctttcttcctttctctctct

SEQ ID NO: 198440 - DNA, 20 bp, Artificial Sequence
  Description of Artificial Sequence: Synthetic oligonucleotide
  Target: LAMA2; (-) strand; PAM type: YTN; PAM sequence: CTT
tctttcttcctttctctctc

SEQ ID NO: 198441 - DNA, 20 bp, Artificial Sequence
  Description of Artificial Sequence: Synthetic oligonucleotide
  Target: LAMA2; (-) strand; PAM type: YTN; PAM sequence: CTC
ctttctttcttcctttctct

SEQ ID NO: 198442 - DNA, 20 bp, Artificial Sequence
  Description of Artificial Sequence: Synthetic oligonucleotide
  Target: LAMA2; (-) strand; PAM type: YTN; PAM sequence: CTC
ctcctttctttcttcctttc

SEQ ID NO: 198443 - DNA, 20 bp, Artificial Sequence
  Description of Artificial Sequence: Synthetic oligonucleotide
  Target: LAMA2; (-) strand; PAM type: YTN; PAM sequence: CTC
tcctcctttctttcttcctt

SEQ ID NO: 198444 - DNA, 20 bp, Artificial Sequence
  Description of Artificial Sequence: Synthetic oligonucleotide
  Target: LAMA2; (-) strand; PAM type: YTN; PAM sequence: TTC
tctcctcctttctttcttcc

SEQ ID NO: 198445 - DNA, 20 bp, Artificial Sequence
  Description of Artificial Sequence: Synthetic oligonucleotide
  Target: LAMA2; (-) strand; PAM type: YTN; PAM sequence: CTT
ctctcctcctttctttcttc

SEQ ID NO: 198446 - DNA, 20 bp, Artificial Sequence
  Description of Artificial Sequence: Synthetic oligonucleotide
  Target: LAMA2; (-) strand; PAM type: YTN; PAM sequence: TTC
ccttctctcctcctttcttt

SEQ ID NO: 198447 - DNA, 20 bp, Artificial Sequence
  Description of Artificial Sequence: Synthetic oligonucleotide
  Target: LAMA2; (-) strand; PAM type: YTN; PAM sequence: CTT
cccttctctcctcctttctt

SEQ ID NO: 198448 - DNA, 20 bp, Artificial Sequence
  Description of Artificial Sequence: Synthetic oligonucleotide
  Target: LAMA2; (-) strand; PAM type: YTN; PAM sequence: TTC
cttcccttctctcctccttt

SEQ ID NO: 198449 - DNA, 20 bp, Artificial Sequence
  Description of Artificial Sequence: Synthetic oligonucleotide
  Target: LAMA2; (-) strand; PAM type: YTN; PAM sequence: CTT
ccttcccttctctcctcctt

SEQ ID NO: 198450 - DNA, 20 bp, Artificial Sequence
  Description of Artificial Sequence: Synthetic oligonucleotide
  Target: LAMA2; (-) strand; PAM type: YTN; PAM sequence: CTC
cttccttcccttctctcctc

SEQ ID NO: 198451 - DNA, 20 bp, Artificial Sequence
  Description of Artificial Sequence: Synthetic oligonucleotide
  Target: LAMA2; (-) strand; PAM type: YTN; PAM sequence: TTC
tccttccttcccttctctcc

SEQ ID NO: 198452 - DNA, 20 bp, Artificial Sequence
  Description of Artificial Sequence: Synthetic oligonucleotide
  Target: LAMA2; (-) strand; PAM type: YTN; PAM sequence: CTC
atcaaacattctccttcctt

SEQ ID NO: 198453 - DNA, 20 bp, Artificial Sequence
  Description of Artificial Sequence: Synthetic oligonucleotide
  Target: LAMA2; (-) strand; PAM type: YTN; PAM sequence: TTC
ataagctcatcaaacattct

SEQ ID NO: 198454 - DNA, 20 bp, Artificial Sequence
  Description of Artificial Sequence: Synthetic oligonucleotide
  Target: LAMA2; (-) strand; PAM type: YTN; PAM sequence: CTT
cataagctcatcaaacattc

SEQ ID NO: 198455 - DNA, 20 bp, Artificial Sequence
  Description of Artificial Sequence: Synthetic oligonucleotide
  Target: LAMA2; (-) strand; PAM type: YTN; PAM sequence: TTG
caaagagacatccttcataa

SEQ ID NO: 198456 - DNA, 20 bp, Artificial Sequence
  Description of Artificial Sequence: Synthetic oligonucleotide
  Target: LAMA2; (-) strand; PAM type: YTN; PAM sequence: CTC
agttgcaaagagacatcctt

SEQ ID NO: 198457 - DNA, 20 bp, Artificial Sequence
  Description of Artificial Sequence: Synthetic oligonucleotide
  Target: LAMA2; (-) strand; PAM type: YTN; PAM sequence: TTC
acactcagttgcaaagagac

SEQ ID NO: 198458 - DNA, 20 bp, Artificial Sequence
  Description of Artificial Sequence: Synthetic oligonucleotide
  Target: LAMA2; (-) strand; PAM type: YTN; PAM sequence: CTA
aattcacactcagttgcaaa

SEQ ID NO: 198459 - DNA, 20 bp, Artificial Sequence
  Description of Artificial Sequence: Synthetic oligonucleotide
  Target: LAMA2; (-) strand; PAM type: YTN; PAM sequence: TTA
tgtaatcccatctaaattca

SEQ ID NO: 198460 - DNA, 20 bp, Artificial Sequence
  Description of Artificial Sequence: Synthetic oligonucleotide
  Target: LAMA2; (-) strand; PAM type: YTN; PAM sequence: TTC
atgttatgtaatcccatcta

SEQ ID NO: 198461 - DNA, 20 bp, Artificial Sequence
  Description of Artificial Sequence: Synthetic oligonucleotide
  Target: LAMA2; (-) strand; PAM type: YTN; PAM sequence: TTT
catgttatgtaatcccatct

SEQ ID NO: 198462 - DNA, 20 bp, Artificial Sequence
  Description of Artificial Sequence: Synthetic oligonucleotide
  Target: LAMA2; (-) strand; PAM type: YTN; PAM sequence: TTG
tttcatgttatgtaatccca

SEQ ID NO: 198463 - DNA, 20 bp, Artificial Sequence
  Description of Artificial Sequence: Synthetic oligonucleotide
  Target: LAMA2; (-) strand; PAM type: YTN; PAM sequence: TTT
gtttcatgttatgtaatccc

SEQ ID NO: 198464 - DNA, 20 bp, Artificial Sequence
  Description of Artificial Sequence: Synthetic oligonucleotide
  Target: LAMA2; (-) strand; PAM type: YTN; PAM sequence: TTT
tgtttcatgttatgtaatcc

SEQ ID NO: 198465 - DNA, 20 bp, Artificial Sequence
  Description of Artificial Sequence: Synthetic oligonucleotide
  Target: LAMA2; (-) strand; PAM type: YTN; PAM sequence: TTC
attttgtttcatgttatgta

SEQ ID NO: 198466 - DNA, 20 bp, Artificial Sequence
  Description of Artificial Sequence: Synthetic oligonucleotide
  Target: LAMA2; (-) strand; PAM type: YTN; PAM sequence: TTT
cattttgtttcatgttatgt

SEQ ID NO: 198467 - DNA, 20 bp, Artificial Sequence
  Description of Artificial Sequence: Synthetic oligonucleotide
  Target: LAMA2; (-) strand; PAM type: YTN; PAM sequence: TTT
tcattttgtttcatgttatg

SEQ ID NO: 198468 - DNA, 20 bp, Artificial Sequence
  Description of Artificial Sequence: Synthetic oligonucleotide
  Target: LAMA2; (-) strand; PAM type: YTN; PAM sequence: CTT
ttcattttgtttcatgttat

SEQ ID NO: 198469 - DNA, 20 bp, Artificial Sequence
  Description of Artificial Sequence: Synthetic oligonucleotide
  Target: LAMA2; (-) strand; PAM type: YTN; PAM sequence: TTC
ttttcattttgtttcatgtt

SEQ ID NO: 198470 - DNA, 20 bp, Artificial Sequence
  Description of Artificial Sequence: Synthetic oligonucleotide
  Target: LAMA2; (-) strand; PAM type: YTN; PAM sequence: CTT
cttttcattttgtttcatgt

SEQ ID NO: 198471 - DNA, 20 bp, Artificial Sequence
  Description of Artificial Sequence: Synthetic oligonucleotide
  Target: LAMA2; (-) strand; PAM type: YTN; PAM sequence: TTC
ttcttttcattttgtttcat

SEQ ID NO: 198472 - DNA, 20 bp, Artificial Sequence
  Description of Artificial Sequence: Synthetic oligonucleotide
  Target: LAMA2; (-) strand; PAM type: YTN; PAM sequence: TTT
cttcttttcattttgtttca

SEQ ID NO: 198473 - DNA, 20 bp, Artificial Sequence
  Description of Artificial Sequence: Synthetic oligonucleotide
  Target: LAMA2; (-) strand; PAM type: YTN; PAM sequence: TTT
tcttcttttcattttgtttc

SEQ ID NO: 198474 - DNA, 20 bp, Artificial Sequence
  Description of Artificial Sequence: Synthetic oligonucleotide
  Target: LAMA2; (-) strand; PAM type: YTN; PAM sequence: TTT
ttcttcttttcattttgttt

SEQ ID NO: 198475 - DNA, 20 bp, Artificial Sequence
  Description of Artificial Sequence: Synthetic oligonucleotide
  Target: LAMA2; (-) strand; PAM type: YTN; PAM sequence: TTT
tttcttcttttcattttgtt

SEQ ID NO: 198476 - DNA, 20 bp, Artificial Sequence
  Description of Artificial Sequence: Synthetic oligonucleotide
  Target: LAMA2; (-) strand; PAM type: YTN; PAM sequence: CTG
ttttttcttcttttcatttt

SEQ ID NO: 198477 - DNA, 20 bp, Artificial Sequence
  Description of Artificial Sequence: Synthetic oligonucleotide
  Target: LAMA2; (-) strand; PAM type: YTN; PAM sequence: CTG
aatgtatctgttttttcttc

SEQ ID NO: 198478 - DNA, 20 bp, Artificial Sequence
  Description of Artificial Sequence: Synthetic oligonucleotide
  Target: LAMA2; (-) strand; PAM type: YTN; PAM sequence: TTA
aatcactgaatgtatctgtt

SEQ ID NO: 198479 - DNA, 20 bp, Artificial Sequence
  Description of Artificial Sequence: Synthetic oligonucleotide
  Target: LAMA2; (-) strand; PAM type: YTN; PAM sequence: TTT
aaatcactgaatgtatctgt

SEQ ID NO: 198480 - DNA, 20 bp, Artificial Sequence
  Description of Artificial Sequence: Synthetic oligonucleotide
  Target: LAMA2; (-) strand; PAM type: YTN; PAM sequence: TTT
taaatcactgaatgtatctg

SEQ ID NO: 198481 - DNA, 20 bp, Artificial Sequence
  Description of Artificial Sequence: Synthetic oligonucleotide
  Target: LAMA2; (-) strand; PAM type: YTN; PAM sequence: TTT
ttaaatcactgaatgtatct

SEQ ID NO: 198482 - DNA, 20 bp, Artificial Sequence
  Description of Artificial Sequence: Synthetic oligonucleotide
  Target: LAMA2; (-) strand; PAM type: YTN; PAM sequence: TTA
ccccatttttaaatcactga

SEQ ID NO: 198483 - DNA, 20 bp, Artificial Sequence
  Description of Artificial Sequence: Synthetic oligonucleotide
  Target: LAMA2; (-) strand; PAM type: YTN; PAM sequence: TTG
tgaaataaaaacagaaagaa

SEQ ID NO: 198484 - DNA, 20 bp, Artificial Sequence
  Description of Artificial Sequence: Synthetic oligonucleotide
  Target: LAMA2; (-) strand; PAM type: YTN; PAM sequence: CTT
gtgaaataaaaacagaaaga

SEQ ID NO: 198485 - DNA, 20 bp, Artificial Sequence
  Description of Artificial Sequence: Synthetic oligonucleotide
  Target: LAMA2; (-) strand; PAM type: YTN; PAM sequence: TTA
caaaagacttgtgaaataaa

SEQ ID NO: 198486 - DNA, 20 bp, Artificial Sequence
  Description of Artificial Sequence: Synthetic oligonucleotide
  Target: LAMA2; (-) strand; PAM type: YTN; PAM sequence: CTA
aaataagttacaaaagactt

SEQ ID NO: 198487 - DNA, 20 bp, Artificial Sequence
  Description of Artificial Sequence: Synthetic oligonucleotide
  Target: LAMA2; (-) strand; PAM type: YTN; PAM sequence: CTC
taaaataagttacaaaagac

SEQ ID NO: 198488 - DNA, 20 bp, Artificial Sequence
  Description of Artificial Sequence: Synthetic oligonucleotide
  Target: LAMA2; (-) strand; PAM type: YTN; PAM sequence: TTA
aaactctaaaataagttaca

SEQ ID NO: 198489 - DNA, 20 bp, Artificial Sequence
  Description of Artificial Sequence: Synthetic oligonucleotide
  Target: LAMA2; (-) strand; PAM type: YTN; PAM sequence: TTT
aaaactctaaaataagttac

SEQ ID NO: 198490 - DNA, 20 bp, Artificial Sequence
  Description of Artificial Sequence: Synthetic oligonucleotide
  Target: LAMA2; (-) strand; PAM type: YTN; PAM sequence: TTT
taaaactctaaaataagtta

SEQ ID NO: 198491 - DNA, 20 bp, Artificial Sequence
  Description of Artificial Sequence: Synthetic oligonucleotide
  Target: LAMA2; (-) strand; PAM type: YTN; PAM sequence: CTA
caaagttttaaaactctaaa

SEQ ID NO: 198492 - DNA, 20 bp, Artificial Sequence
  Description of Artificial Sequence: Synthetic oligonucleotide
  Target: LAMA2; (-) strand; PAM type: YTN; PAM sequence: TTA
aatatgtctacaaagtttta

SEQ ID NO: 198493 - DNA, 20 bp, Artificial Sequence
  Description of Artificial Sequence: Synthetic oligonucleotide
  Target: LAMA2; (-) strand; PAM type: YTN; PAM sequence: TTT
aaatatgtctacaaagtttt

SEQ ID NO: 198494 - DNA, 20 bp, Artificial Sequence
  Description of Artificial Sequence: Synthetic oligonucleotide
  Target: LAMA2; (-) strand; PAM type: YTN; PAM sequence: TTT
taaatatgtctacaaagttt

SEQ ID NO: 198495 - DNA, 20 bp, Artificial Sequence
  Description of Artificial Sequence: Synthetic oligonucleotide
  Target: LAMA2; (-) strand; PAM type: YTN; PAM sequence: TTG
aacattttaaatatgtctac

SEQ ID NO: 198496 - DNA, 20 bp, Artificial Sequence
  Description of Artificial Sequence: Synthetic oligonucleotide
  Target: LAMA2; (-) strand; PAM type: YTN; PAM sequence: TTA
gtgaaaattgaacattttaa

SEQ ID NO: 198497 - DNA, 20 bp, Artificial Sequence
  Description of Artificial Sequence: Synthetic oligonucleotide
  Target: LAMA2; (-) strand; PAM type: YTN; PAM sequence: TTT
agtgaaaattgaacatttta

SEQ ID NO: 198498 - DNA, 20 bp, Artificial Sequence
  Description of Artificial Sequence: Synthetic oligonucleotide
  Target: LAMA2; (-) strand; PAM type: YTN; PAM sequence: TTT
tagtgaaaattgaacatttt

SEQ ID NO: 198499 - DNA, 20 bp, Artificial Sequence
  Description of Artificial Sequence: Synthetic oligonucleotide
  Target: LAMA2; (-) strand; PAM type: YTN; PAM sequence: TTG
ttttagtgaaaattgaacat

SEQ ID NO: 198500 - DNA, 20 bp, Artificial Sequence
  Description of Artificial Sequence: Synthetic oligonucleotide
  Target: LAMA2; (-) strand; PAM type: YTN; PAM sequence: TTA
aaaatgtgattgttttagtg

SEQ ID NO: 198501 - DNA, 20 bp, Artificial Sequence
  Description of Artificial Sequence: Synthetic oligonucleotide
  Target: LAMA2; (-) strand; PAM type: YTN; PAM sequence: TTT
aaaaatgtgattgttttagt

SEQ ID NO: 198502 - DNA, 20 bp, Artificial Sequence
  Description of Artificial Sequence: Synthetic oligonucleotide
  Target: LAMA2; (-) strand; PAM type: YTN; PAM sequence: TTA
tgtttaaaaatgtgattgtt

SEQ ID NO: 198503 - DNA, 20 bp, Artificial Sequence
  Description of Artificial Sequence: Synthetic oligonucleotide
  Target: LAMA2; (-) strand; PAM type: YTN; PAM sequence: CTT
atgtttaaaaatgtgattgt

SEQ ID NO: 198504 - DNA, 20 bp, Artificial Sequence
  Description of Artificial Sequence: Synthetic oligonucleotide
  Target: LAMA2; (-) strand; PAM type: YTN; PAM sequence: TTG
tcacaccaaatatatgccct

SEQ ID NO: 198505 - DNA, 20 bp, Artificial Sequence
  Description of Artificial Sequence: Synthetic oligonucleotide
  Target: LAMA2; (-) strand; PAM type: YTN; PAM sequence: TTA
ggttgtcacaccaaatatat

SEQ ID NO: 198506 - DNA, 20 bp, Artificial Sequence
  Description of Artificial Sequence: Synthetic oligonucleotide
  Target: LAMA2; (-) strand; PAM type: YTN; PAM sequence: TTG
gtggcaaatgttaggttgtc

SEQ ID NO: 198507 - DNA, 20 bp, Artificial Sequence
  Description of Artificial Sequence: Synthetic oligonucleotide
  Target: LAMA2; (-) strand; PAM type: YTN; PAM sequence: CTT
ggtggcaaatgttaggttgt

SEQ ID NO: 198508 - DNA, 20 bp, Artificial Sequence
  Description of Artificial Sequence: Synthetic oligonucleotide
  Target: LAMA2; (-) strand; PAM type: YTN; PAM sequence: TTA
acacttggtggcaaatgtta

SEQ ID NO: 198509 - DNA, 20 bp, Artificial Sequence
  Description of Artificial Sequence: Synthetic oligonucleotide
  Target: LAMA2; (-) strand; PAM type: YTN; PAM sequence: TTT
aacacttggtggcaaatgtt

SEQ ID NO: 198510 - DNA, 20 bp, Artificial Sequence
  Description of Artificial Sequence: Synthetic oligonucleotide
  Target: LAMA2; (-) strand; PAM type: YTN; PAM sequence: CTT
taacacttggtggcaaatgt

SEQ ID NO: 198511 - DNA, 20 bp, Artificial Sequence
  Description of Artificial Sequence: Synthetic oligonucleotide
  Target: LAMA2; (-) strand; PAM type: YTN; PAM sequence: TTC
atctttaacacttggtggca

SEQ ID NO: 198512 - DNA, 20 bp, Artificial Sequence
  Description of Artificial Sequence: Synthetic oligonucleotide
  Target: LAMA2; (-) strand; PAM type: YTN; PAM sequence: CTG
gttcatctttaacacttggt

SEQ ID NO: 198513 - DNA, 20 bp, Artificial Sequence
  Description of Artificial Sequence: Synthetic oligonucleotide
  Target: LAMA2; (-) strand; PAM type: YTN; PAM sequence: TTA
aaactggttcatctttaaca

SEQ ID NO: 198514 - DNA, 20 bp, Artificial Sequence
  Description of Artificial Sequence: Synthetic oligonucleotide
  Target: LAMA2; (-) strand; PAM type: YTN; PAM sequence: TTA
aaattaaaactggttcatct

SEQ ID NO: 198515 - DNA, 20 bp, Artificial Sequence
  Description of Artificial Sequence: Synthetic oligonucleotide
  Target: LAMA2; (-) strand; PAM type: YTN; PAM sequence: CTA
gttaaaattaaaactggttc

SEQ ID NO: 198516 - DNA, 20 bp, Artificial Sequence
  Description of Artificial Sequence: Synthetic oligonucleotide
  Target: LAMA2; (-) strand; PAM type: YTN; PAM sequence: TTC
aaatcgtctagttaaaatta

SEQ ID NO: 198517 - DNA, 20 bp, Artificial Sequence
  Description of Artificial Sequence: Synthetic oligonucleotide
  Target: LAMA2; (-) strand; PAM type: YTN; PAM sequence: TTT
caaatcgtctagttaaaatt

SEQ ID NO: 198518 - DNA, 20 bp, Artificial Sequence
  Description of Artificial Sequence: Synthetic oligonucleotide
  Target: LAMA2; (-) strand; PAM type: YTN; PAM sequence: CTC
aagtatatcaaaaaagtttc

SEQ ID NO: 198519 - DNA, 20 bp, Artificial Sequence
  Description of Artificial Sequence: Synthetic oligonucleotide
  Target: LAMA2; (-) strand; PAM type: YTN; PAM sequence: TTC
tcaagtatatcaaaaaagtt

SEQ ID NO: 198520 - DNA, 20 bp, Artificial Sequence
  Description of Artificial Sequence: Synthetic oligonucleotide
  Target: LAMA2; (-) strand; PAM type: YTN; PAM sequence: TTG
gtagtcccaaattctcaagt

SEQ ID NO: 198521 - DNA, 20 bp, Artificial Sequence
  Description of Artificial Sequence: Synthetic oligonucleotide
  Target: LAMA2; (-) strand; PAM type: YTN; PAM sequence: TTT
ggtagtcccaaattctcaag

SEQ ID NO: 198522 - DNA, 20 bp, Artificial Sequence
  Description of Artificial Sequence: Synthetic oligonucleotide
  Target: LAMA2; (-) strand; PAM type: YTN; PAM sequence: TTT
tggtagtcccaaattctcaa

SEQ ID NO: 198523 - DNA, 20 bp, Artificial Sequence
  Description of Artificial Sequence: Synthetic oligonucleotide
  Target: LAMA2; (-) strand; PAM type: YTN; PAM sequence: TTT
ttggtagtcccaaattctca

SEQ ID NO: 198524 - DNA, 20 bp, Artificial Sequence
  Description of Artificial Sequence: Synthetic oligonucleotide
  Target: LAMA2; (-) strand; PAM type: YTN; PAM sequence: TTT
tttggtagtcccaaattctc

SEQ ID NO: 198525 - DNA, 20 bp, Artificial Sequence
  Description of Artificial Sequence: Synthetic oligonucleotide
  Target: LAMA2; (-) strand; PAM type: YTN; PAM sequence: TTA
ggggttttttggtagtccca

SEQ ID NO: 198526 - DNA, 20 bp, Artificial Sequence
  Description of Artificial Sequence: Synthetic oligonucleotide
  Target: LAMA2; (-) strand; PAM type: YTN; PAM sequence: TTT
aggggttttttggtagtccc

SEQ ID NO: 198527 - DNA, 20 bp, Artificial Sequence
  Description of Artificial Sequence: Synthetic oligonucleotide
  Target: LAMA2; (-) strand; PAM type: YTN; PAM sequence: TTA
gaagtaataaaaaatataaa

SEQ ID NO: 198528 - DNA, 20 bp, Artificial Sequence
  Description of Artificial Sequence: Synthetic oligonucleotide
  Target: LAMA2; (-) strand; PAM type: YTN; PAM sequence: TTT
agaagtaataaaaaatataa

SEQ ID NO: 198529 - DNA, 20 bp, Artificial Sequence
  Description of Artificial Sequence: Synthetic oligonucleotide
  Target: LAMA2; (-) strand; PAM type: YTN; PAM sequence: TTT
tagaagtaataaaaaatata

SEQ ID NO: 198530 - DNA, 20 bp, Artificial Sequence
  Description of Artificial Sequence: Synthetic oligonucleotide
  Target: LAMA2; (-) strand; PAM type: YTN; PAM sequence: TTA
gaatcaaaatattttagaag

SEQ ID NO: 198531 - DNA, 20 bp, Artificial Sequence
  Description of Artificial Sequence: Synthetic oligonucleotide
  Target: LAMA2; (-) strand; PAM type: YTN; PAM sequence: TTT
agaatcaaaatattttagaa

SEQ ID NO: 198532 - DNA, 20 bp, Artificial Sequence
  Description of Artificial Sequence: Synthetic oligonucleotide
  Target: LAMA2; (-) strand; PAM type: YTN; PAM sequence: TTG
tttagaatcaaaatatttta

SEQ ID NO: 198533 - DNA, 20 bp, Artificial Sequence
  Description of Artificial Sequence: Synthetic oligonucleotide
  Target: LAMA2; (-) strand; PAM type: YTN; PAM sequence: TTT
gtttagaatcaaaatatttt

SEQ ID NO: 198534 - DNA, 20 bp, Artificial Sequence
  Description of Artificial Sequence: Synthetic oligonucleotide
  Target: LAMA2; (-) strand; PAM type: YTN; PAM sequence: TTA
catatatttgtttagaatca

SEQ ID NO: 198535 - DNA, 20 bp, Artificial Sequence
  Description of Artificial Sequence: Synthetic oligonucleotide
  Target: LAMA2; (-) strand; PAM type: YTN; PAM sequence: TTT
acatatatttgtttagaatc

SEQ ID NO: 198536 - DNA, 20 bp, Artificial Sequence
  Description of Artificial Sequence: Synthetic oligonucleotide
  Target: LAMA2; (-) strand; PAM type: YTN; PAM sequence: CTC
cacatagtatttacatatat

SEQ ID NO: 198537 - DNA, 20 bp, Artificial Sequence
  Description of Artificial Sequence: Synthetic oligonucleotide
  Target: LAMA2; (-) strand; PAM type: YTN; PAM sequence: TTC
tccacatagtatttacatat

SEQ ID NO: 198538 - DNA, 20 bp, Artificial Sequence
  Description of Artificial Sequence: Synthetic oligonucleotide
  Target: LAMA2; (-) strand; PAM type: YTN; PAM sequence: CTA
aattctccacatagtattta

SEQ ID NO: 198539 - DNA, 20 bp, Artificial Sequence
  Description of Artificial Sequence: Synthetic oligonucleotide
  Target: LAMA2; (-) strand; PAM type: YTN; PAM sequence: TTA
gtatctaaattctccacata

SEQ ID NO: 198540 - DNA, 20 bp, Artificial Sequence
  Description of Artificial Sequence: Synthetic oligonucleotide
  Target: LAMA2; (-) strand; PAM type: YTN; PAM sequence: TTT
agtatctaaattctccacat

SEQ ID NO: 198541 - DNA, 20 bp, Artificial Sequence
  Description of Artificial Sequence: Synthetic oligonucleotide
  Target: LAMA2; (-) strand; PAM type: YTN; PAM sequence: TTT
tagtatctaaattctccaca

SEQ ID NO: 198542 - DNA, 20 bp, Artificial Sequence
  Description of Artificial Sequence: Synthetic oligonucleotide
  Target: LAMA2; (-) strand; PAM type: YTN; PAM sequence: TTT
ttagtatctaaattctccac

SEQ ID NO: 198543 - DNA, 20 bp, Artificial Sequence
  Description of Artificial Sequence: Synthetic oligonucleotide
  Target: LAMA2; (-) strand; PAM type: YTN; PAM sequence: TTA
aatttttagtatctaaattc

SEQ ID NO: 198544 - DNA, 20 bp, Artificial Sequence
  Description of Artificial Sequence: Synthetic oligonucleotide
  Target: LAMA2; (-) strand; PAM type: YTN; PAM sequence: CTT
aaatttttagtatctaaatt

SEQ ID NO: 198545 - DNA, 20 bp, Artificial Sequence
  Description of Artificial Sequence: Synthetic oligonucleotide
  Target: LAMA2; (-) strand; PAM type: YTN; PAM sequence: TTG
acttaaatttttagtatcta

SEQ ID NO: 198546 - DNA, 20 bp, Artificial Sequence
  Description of Artificial Sequence: Synthetic oligonucleotide
  Target: LAMA2; (-) strand; PAM type: YTN; PAM sequence: TTT
gacttaaatttttagtatct

SEQ ID NO: 198547 - DNA, 20 bp, Artificial Sequence
  Description of Artificial Sequence: Synthetic oligonucleotide
  Target: LAMA2; (-) strand; PAM type: YTN; PAM sequence: TTA
aacaatatttgacttaaatt

SEQ ID NO: 198548 - DNA, 20 bp, Artificial Sequence
  Description of Artificial Sequence: Synthetic oligonucleotide
  Target: LAMA2; (-) strand; PAM type: YTN; PAM sequence: CTT
aaacaatatttgacttaaat

SEQ ID NO: 198549 - DNA, 20 bp, Artificial Sequence
  Description of Artificial Sequence: Synthetic oligonucleotide
  Target: LAMA2; (-) strand; PAM type: YTN; PAM sequence: TTG
taagtacttaaacaatattt

SEQ ID NO: 198550 - DNA, 20 bp, Artificial Sequence
  Description of Artificial Sequence: Synthetic oligonucleotide
  Target: LAMA2; (-) strand; PAM type: YTN; PAM sequence: TTA
gcatcatgtacagtcccggg

SEQ ID NO: 198551 - DNA, 20 bp, Artificial Sequence
  Description of Artificial Sequence: Synthetic oligonucleotide
  Target: LAMA2; (-) strand; PAM type: YTN; PAM sequence: TTT
agcatcatgtacagtcccgg

SEQ ID NO: 198552 - DNA, 20 bp, Artificial Sequence
  Description of Artificial Sequence: Synthetic oligonucleotide
  Target: LAMA2; (-) strand; PAM type: YTN; PAM sequence: TTT
tagcatcatgtacagtcccg

SEQ ID NO: 198553 - DNA, 20 bp, Artificial Sequence
  Description of Artificial Sequence: Synthetic oligonucleotide
  Target: LAMA2; (-) strand; PAM type: YTN; PAM sequence: CTT
ttagcatcatgtacagtccc

SEQ ID NO: 198554 - DNA, 20 bp, Artificial Sequence
  Description of Artificial Sequence: Synthetic oligonucleotide
  Target: LAMA2; (-) strand; PAM type: YTN; PAM sequence: CTA
cttttagcatcatgtacagt

SEQ ID NO: 198555 - DNA, 20 bp, Artificial Sequence
  Description of Artificial Sequence: Synthetic oligonucleotide
  Target: LAMA2; (-) strand; PAM type: YTN; PAM sequence: CTG
gctacttttagcatcatgta

SEQ ID NO: 198556 - DNA, 20 bp, Artificial Sequence
  Description of Artificial Sequence: Synthetic oligonucleotide
  Target: LAMA2; (-) strand; PAM type: YTN; PAM sequence: TTG
catctggctacttttagcat

SEQ ID NO: 198557 - DNA, 20 bp, Artificial Sequence
  Description of Artificial Sequence: Synthetic oligonucleotide
  Target: LAMA2; (-) strand; PAM type: YTN; PAM sequence: CTC
gaagtcagtaaccattgcat

SEQ ID NO: 198558 - DNA, 20 bp, Artificial Sequence
  Description of Artificial Sequence: Synthetic oligonucleotide
  Target: LAMA2; (-) strand; PAM type: YTN; PAM sequence: TTC
aaaaagatgccactcgaagt

SEQ ID NO: 198559 - DNA, 20 bp, Artificial Sequence
  Description of Artificial Sequence: Synthetic oligonucleotide
  Target: LAMA2; (-) strand; PAM type: YTN; PAM sequence: TTT
caaaaagatgccactcgaag

SEQ ID NO: 198560 - DNA, 20 bp, Artificial Sequence
  Description of Artificial Sequence: Synthetic oligonucleotide
  Target: LAMA2; (-) strand; PAM type: YTN; PAM sequence: CTG
tttcaaaaagatgccactcg

SEQ ID NO: 198561 - DNA, 20 bp, Artificial Sequence
  Description of Artificial Sequence: Synthetic oligonucleotide
  Target: LAMA2; (-) strand; PAM type: YTN; PAM sequence: CTC
tgtttcaaaaagatgccact

SEQ ID NO: 198562 - DNA, 20 bp, Artificial Sequence
  Description of Artificial Sequence: Synthetic oligonucleotide
  Target: LAMA2; (-) strand; PAM type: YTN; PAM sequence: CTG
ccctctgtttcaaaaagatg

SEQ ID NO: 198563 - DNA, 20 bp, Artificial Sequence
  Description of Artificial Sequence: Synthetic oligonucleotide
  Target: LAMA2; (-) strand; PAM type: YTN; PAM sequence: TTC
tgccctctgtttcaaaaaga

SEQ ID NO: 198564 - DNA, 20 bp, Artificial Sequence
  Description of Artificial Sequence: Synthetic oligonucleotide
  Target: LAMA2; (-) strand; PAM type: YTN; PAM sequence: TTT
ctgccctctgtttcaaaaag

SEQ ID NO: 198565 - DNA, 20 bp, Artificial Sequence
  Description of Artificial Sequence: Synthetic oligonucleotide
  Target: LAMA2; (-) strand; PAM type: YTN; PAM sequence: TTC
atttctgccctctgtttcaa

SEQ ID NO: 198566 - DNA, 20 bp, Artificial Sequence
  Description of Artificial Sequence: Synthetic oligonucleotide
  Target: LAMA2; (-) strand; PAM type: YTN; PAM sequence: TTA
ttcatttctgccctctgttt

SEQ ID NO: 198567 - DNA, 20 bp, Artificial Sequence
  Description of Artificial Sequence: Synthetic oligonucleotide
  Target: LAMA2; (-) strand; PAM type: YTN; PAM sequence: TTT
attcatttctgccctctgtt

SEQ ID NO: 198568 - DNA, 20 bp, Artificial Sequence
  Description of Artificial Sequence: Synthetic oligonucleotide
  Target: LAMA2; (-) strand; PAM type: YTN; PAM sequence: CTC
agatttattcatttctgccc

SEQ ID NO: 198569 - DNA, 20 bp, Artificial Sequence
  Description of Artificial Sequence: Synthetic oligonucleotide
  Target: LAMA2; (-) strand; PAM type: YTN; PAM sequence: TTA
tctcagatttattcatttct

SEQ ID NO: 198570 - DNA, 20 bp, Artificial Sequence
  Description of Artificial Sequence: Synthetic oligonucleotide
  Target: LAMA2; (-) strand; PAM type: YTN; PAM sequence: CTC
acatcatgttatctcagatt

SEQ ID NO: 198571 - DNA, 20 bp, Artificial Sequence
  Description of Artificial Sequence: Synthetic oligonucleotide
  Target: LAMA2; (-) strand; PAM type: YTN; PAM sequence: CTC
cagtatggaacaagctcaca

SEQ ID NO: 198572 - DNA, 20 bp, Artificial Sequence
  Description of Artificial Sequence: Synthetic oligonucleotide
  Target: LAMA2; (-) strand; PAM type: YTN; PAM sequence: TTC
tccagtatggaacaagctca

SEQ ID NO: 198573 - DNA, 20 bp, Artificial Sequence
  Description of Artificial Sequence: Synthetic oligonucleotide
  Target: LAMA2; (-) strand; PAM type: YTN; PAM sequence: CTG
agtgccccattctccagtat

SEQ ID NO: 198574 - DNA, 20 bp, Artificial Sequence
  Description of Artificial Sequence: Synthetic oligonucleotide
  Target: LAMA2; (-) strand; PAM type: YTN; PAM sequence: CTC
tgagtgccccattctccagt

SEQ ID NO: 198575 - DNA, 20 bp, Artificial Sequence
  Description of Artificial Sequence: Synthetic oligonucleotide
  Target: LAMA2; (-) strand; PAM type: YTN; PAM sequence: TTC
tctgagtgccccattctcca

SEQ ID NO: 198576 - DNA, 20 bp, Artificial Sequence
  Description of Artificial Sequence: Synthetic oligonucleotide
  Target: LAMA2; (-) strand; PAM type: YTN; PAM sequence: TTT
ctctgagtgccccattctcc

SEQ ID NO: 198577 - DNA, 20 bp, Artificial Sequence
  Description of Artificial Sequence: Synthetic oligonucleotide
  Target: LAMA2; (-) strand; PAM type: YTN; PAM sequence: TTT
tctctgagtgccccattctc

SEQ ID NO: 198578 - DNA, 20 bp, Artificial Sequence
  Description of Artificial Sequence: Synthetic oligonucleotide
  Target: LAMA2; (-) strand; PAM type: YTN; PAM sequence: CTT
ttctctgagtgccccattct

SEQ ID NO: 198579 - DNA, 20 bp, Artificial Sequence
  Description of Artificial Sequence: Synthetic oligonucleotide
  Target: LAMA2; (-) strand; PAM type: YTN; PAM sequence: CTC
ttttctctgagtgccccatt

SEQ ID NO: 198580 - DNA, 20 bp, Artificial Sequence
  Description of Artificial Sequence: Synthetic oligonucleotide
  Target: LAMA2; (-) strand; PAM type: YTN; PAM sequence: TTG
cacacactcttttctctgag

SEQ ID NO: 198581 - DNA, 20 bp, Artificial Sequence
  Description of Artificial Sequence: Synthetic oligonucleotide
  Target: LAMA2; (-) strand; PAM type: YTN; PAM sequence: CTG
cagttgcacacactcttttc

SEQ ID NO: 198582 - DNA, 20 bp, Artificial Sequence
  Description of Artificial Sequence: Synthetic oligonucleotide
  Target: LAMA2; (-) strand; PAM type: YTN; PAM sequence: CTC
cccacctgcagttgcacaca

SEQ ID NO: 198583 - DNA, 20 bp, Artificial Sequence
  Description of Artificial Sequence: Synthetic oligonucleotide
  Target: LAMA2; (-) strand; PAM type: YTN; PAM sequence: TTC
tccccacctgcagttgcaca

SEQ ID NO: 198584 - DNA, 20 bp, Artificial Sequence
  Description of Artificial Sequence: Synthetic oligonucleotide
  Target: LAMA2; (-) strand; PAM type: YTN; PAM sequence: CTT
ctccccacctgcagttgcac

SEQ ID NO: 198585 - DNA, 20 bp, Artificial Sequence
  Description of Artificial Sequence: Synthetic oligonucleotide
  Target: LAMA2; (-) strand; PAM type: YTN; PAM sequence: CTG
gagtgccaaacccaaagctt

SEQ ID NO: 198586 - DNA, 20 bp, Artificial Sequence
  Description of Artificial Sequence: Synthetic oligonucleotide
  Target: LAMA2; (-) strand; PAM type: YTN; PAM sequence: TTC
ctggagtgccaaacccaaag

SEQ ID NO: 198587 - DNA, 20 bp, Artificial Sequence
  Description of Artificial Sequence: Synthetic oligonucleotide
  Target: LAMA2; (-) strand; PAM type: YTN; PAM sequence: CTT
cctggagtgccaaacccaaa

SEQ ID NO: 198588 - DNA, 20 bp, Artificial Sequence
  Description of Artificial Sequence: Synthetic oligonucleotide
  Target: LAMA2; (-) strand; PAM type: YTN; PAM sequence: TTG
aacatatcttcctggagtgc

SEQ ID NO: 198589 - DNA, 20 bp, Artificial Sequence
  Description of Artificial Sequence: Synthetic oligonucleotide
  Target: LAMA2; (-) strand; PAM type: YTN; PAM sequence: TTT
gaacatatcttcctggagtg

SEQ ID NO: 198590 - DNA, 20 bp, Artificial Sequence
  Description of Artificial Sequence: Synthetic oligonucleotide
  Target: LAMA2; (-) strand; PAM type: YTN; PAM sequence: CTT
tgaacatatcttcctggagt

SEQ ID NO: 198591 - DNA, 20 bp, Artificial Sequence
  Description of Artificial Sequence: Synthetic oligonucleotide
  Target: LAMA2; (-) strand; PAM type: YTN; PAM sequence: CTG
ctttgaacatatcttcctgg

SEQ ID NO: 198592 - DNA, 20 bp, Artificial Sequence
  Description of Artificial Sequence: Synthetic oligonucleotide
  Target: LAMA2; (-) strand; PAM type: YTN; PAM sequence: TTC
tgctttgaacatatcttcct

SEQ ID NO: 198593 - DNA, 20 bp, Artificial Sequence
  Description of Artificial Sequence: Synthetic oligonucleotide
  Target: LAMA2; (-) strand; PAM type: YTN; PAM sequence: CTT
ctgctttgaacatatcttcc

SEQ ID NO: 198594 - DNA, 20 bp, Artificial Sequence
  Description of Artificial Sequence: Synthetic oligonucleotide
  Target: LAMA2; (-) strand; PAM type: YTN; PAM sequence: TTA
cccttctgctttgaacatat

SEQ ID NO: 198595 - DNA, 20 bp, Artificial Sequence
  Description of Artificial Sequence: Synthetic oligonucleotide
  Target: LAMA2; (-) strand; PAM type: YTN; PAM sequence: TTT
acccttctgctttgaacata

SEQ ID NO: 198596 - DNA, 20 bp, Artificial Sequence
  Description of Artificial Sequence: Synthetic oligonucleotide
  Target: LAMA2; (-) strand; PAM type: YTN; PAM sequence: CTT
tacccttctgctttgaacat

SEQ ID NO: 198597 - DNA, 20 bp, Artificial Sequence
  Description of Artificial Sequence: Synthetic oligonucleotide
  Target: LAMA2; (-) strand; PAM type: YTN; PAM sequence: TTG
aacaatcagtgccctttacc

SEQ ID NO: 198598 - DNA, 20 bp, Artificial Sequence
  Description of Artificial Sequence: Synthetic oligonucleotide
  Target: LAMA2; (-) strand; PAM type: YTN; PAM sequence: CTT
gaacaatcagtgccctttac

SEQ ID NO: 198599 - DNA, 20 bp, Artificial Sequence
  Description of Artificial Sequence: Synthetic oligonucleotide
  Target: LAMA2; (-) strand; PAM type: YTN; PAM sequence: TTC
ttgaacaatcagtgcccttt

SEQ ID NO: 198600 - DNA, 20 bp, Artificial Sequence
  Description of Artificial Sequence: Synthetic oligonucleotide
  Target: LAMA2; (-) strand; PAM type: YTN; PAM sequence: TTT
cttgaacaatcagtgccctt

SEQ ID NO: 198601 - DNA, 20 bp, Artificial Sequence
  Description of Artificial Sequence: Synthetic oligonucleotide
  Target: LAMA2; (-) strand; PAM type: YTN; PAM sequence: TTT
tcttgaacaatcagtgccct

SEQ ID NO: 198602 - DNA, 20 bp, Artificial Sequence
  Description of Artificial Sequence: Synthetic oligonucleotide
  Target: LAMA2; (-) strand; PAM type: YTN; PAM sequence: CTT
ttcttgaacaatcagtgccc

SEQ ID NO: 198603 - DNA, 20 bp, Artificial Sequence
  Description of Artificial Sequence: Synthetic oligonucleotide
  Target: LAMA2; (-) strand; PAM type: YTN; PAM sequence: CTC
acttttcttgaacaatcagt

SEQ ID NO: 198604 - DNA, 20 bp, Artificial Sequence
  Description of Artificial Sequence: Synthetic oligonucleotide
  Target: LAMA2; (-) strand; PAM type: YTN; PAM sequence: CTA
ctcacttttcttgaacaatc

SEQ ID NO: 198605 - DNA, 20 bp, Artificial Sequence
  Description of Artificial Sequence: Synthetic oligonucleotide
  Target: LAMA2; (-) strand; PAM type: YTN; PAM sequence: TTC
cagactactcacttttcttg

SEQ ID NO: 198606 - DNA, 20 bp, Artificial Sequence
  Description of Artificial Sequence: Synthetic oligonucleotide
  Target: LAMA2; (-) strand; PAM type: YTN; PAM sequence: TTT
ccagactactcacttttctt

SEQ ID NO: 198607 - DNA, 20 bp, Artificial Sequence
  Description of Artificial Sequence: Synthetic oligonucleotide
  Target: LAMA2; (-) strand; PAM type: YTN; PAM sequence: CTT
tccagactactcacttttct

SEQ ID NO: 198608 - DNA, 20 bp, Artificial Sequence
  Description of Artificial Sequence: Synthetic oligonucleotide
  Target: LAMA2; (-) strand; PAM type: YTN; PAM sequence: CTG
aaataatgaccctttccaga

SEQ ID NO: 198609 - DNA, 20 bp, Artificial Sequence
  Description of Artificial Sequence: Synthetic oligonucleotide
  Target: LAMA2; (-) strand; PAM type: YTN; PAM sequence: TTC
tgaaataatgaccctttcca

SEQ ID NO: 198610 - DNA, 20 bp, Artificial Sequence
  Description of Artificial Sequence: Synthetic oligonucleotide
  Target: LAMA2; (-) strand; PAM type: YTN; PAM sequence: CTT
ctgaaataatgaccctttcc

SEQ ID NO: 198611 - DNA, 20 bp, Artificial Sequence
  Description of Artificial Sequence: Synthetic oligonucleotide
  Target: LAMA2; (-) strand; PAM type: YTN; PAM sequence: TTG
cttctgaaataatgaccctt

SEQ ID NO: 198612 - DNA, 20 bp, Artificial Sequence
  Description of Artificial Sequence: Synthetic oligonucleotide
  Target: LAMA2; (-) strand; PAM type: YTN; PAM sequence: TTG
gtatgttgcttctgaaataa

SEQ ID NO: 198613 - DNA, 20 bp, Artificial Sequence
  Description of Artificial Sequence: Synthetic oligonucleotide
  Target: LAMA2; (-) strand; PAM type: YTN; PAM sequence: CTT
ggtatgttgcttctgaaata

SEQ ID NO: 198614 - DNA, 20 bp, Artificial Sequence
  Description of Artificial Sequence: Synthetic oligonucleotide
  Target: LAMA2; (-) strand; PAM type: YTN; PAM sequence: TTC
ttggtatgttgcttctgaaa

SEQ ID NO: 198615 - DNA, 20 bp, Artificial Sequence
  Description of Artificial Sequence: Synthetic oligonucleotide
  Target: LAMA2; (-) strand; PAM type: YTN; PAM sequence: CTT
cttggtatgttgcttctgaa

SEQ ID NO: 198616 - DNA, 20 bp, Artificial Sequence
  Description of Artificial Sequence: Synthetic oligonucleotide
  Target: LAMA2; (-) strand; PAM type: YTN; PAM sequence: CTC
cttcttggtatgttgcttct

SEQ ID NO: 198617 - DNA, 20 bp, Artificial Sequence
  Description of Artificial Sequence: Synthetic oligonucleotide
  Target: LAMA2; (-) strand; PAM type: YTN; PAM sequence: CTG
cctccttcttggtatgttgc

SEQ ID NO: 198618 - DNA, 20 bp, Artificial Sequence
  Description of Artificial Sequence: Synthetic oligonucleotide
  Target: LAMA2; (-) strand; PAM type: YTN; PAM sequence: TTC
ctgcctccttcttggtatgt

SEQ ID NO: 198619 - DNA, 20 bp, Artificial Sequence
  Description of Artificial Sequence: Synthetic oligonucleotide
  Target: LAMA2; (-) strand; PAM type: YTN; PAM sequence: TTT
cctgcctccttcttggtatg

SEQ ID NO: 198620 - DNA, 20 bp, Artificial Sequence
  Description of Artificial Sequence: Synthetic oligonucleotide
  Target: LAMA2; (-) strand; PAM type: YTN; PAM sequence: TTT
tcctgcctccttcttggtat

SEQ ID NO: 198621 - DNA, 20 bp, Artificial Sequence
  Description of Artificial Sequence: Synthetic oligonucleotide
  Target: LAMA2; (-) strand; PAM type: YTN; PAM sequence: CTT
ttcctgcctccttcttggta

SEQ ID NO: 198622 - DNA, 20 bp, Artificial Sequence
  Description of Artificial Sequence: Synthetic oligonucleotide
  Target: LAMA2; (-) strand; PAM type: YTN; PAM sequence: CTC
ttttcctgcctccttcttgg

SEQ ID NO: 198623 - DNA, 20 bp, Artificial Sequence
  Description of Artificial Sequence: Synthetic oligonucleotide
  Target: LAMA2; (-) strand; PAM type: YTN; PAM sequence: TTC
tcttttcctgcctccttctt

SEQ ID NO: 198624 - DNA, 20 bp, Artificial Sequence
  Description of Artificial Sequence: Synthetic oligonucleotide
  Target: LAMA2; (-) strand; PAM type: YTN; PAM sequence: CTT
ctcttttcctgcctccttct

SEQ ID NO: 198625 - DNA, 20 bp, Artificial Sequence
  Description of Artificial Sequence: Synthetic oligonucleotide
  Target: LAMA2; (-) strand; PAM type: YTN; PAM sequence: TTG
tcttctcttttcctgcctcc

SEQ ID NO: 198626 - DNA, 20 bp, Artificial Sequence
  Description of Artificial Sequence: Synthetic oligonucleotide
  Target: LAMA2; (-) strand; PAM type: YTN; PAM sequence: TTT
gtcttctcttttcctgcctc

SEQ ID NO: 198627 - DNA, 20 bp, Artificial Sequence
  Description of Artificial Sequence: Synthetic oligonucleotide
  Target: LAMA2; (-) strand; PAM type: YTN; PAM sequence: TTT
tgtcttctcttttcctgcct

SEQ ID NO: 198628 - DNA, 20 bp, Artificial Sequence
  Description of Artificial Sequence: Synthetic oligonucleotide
  Target: LAMA2; (-) strand; PAM type: YTN; PAM sequence: CTG
ttttgtcttctcttttcctg

SEQ ID NO: 198629 - DNA, 20 bp, Artificial Sequence
  Description of Artificial Sequence: Synthetic oligonucleotide
  Target: LAMA2; (-) strand; PAM type: YTN; PAM sequence: CTG
ctgttttgtcttctcttttc

SEQ ID NO: 198630 - DNA, 20 bp, Artificial Sequence
  Description of Artificial Sequence: Synthetic oligonucleotide
  Target: LAMA2; (-) strand; PAM type: YTN; PAM sequence: TTC
catgctgctgttttgtcttc

SEQ ID NO: 198631 - DNA, 20 bp, Artificial Sequence
  Description of Artificial Sequence: Synthetic oligonucleotide
  Target: LAMA2; (-) strand; PAM type: YTN; PAM sequence: CTT
ccatgctgctgttttgtctt

SEQ ID NO: 198632 - DNA, 20 bp, Artificial Sequence
  Description of Artificial Sequence: Synthetic oligonucleotide
  Target: LAMA2; (-) strand; PAM type: YTN; PAM sequence: CTC
acccatcttccatgctgctg

SEQ ID NO: 198633 - DNA, 20 bp, Artificial Sequence
  Description of Artificial Sequence: Synthetic oligonucleotide
  Target: LAMA2; (-) strand; PAM type: YTN; PAM sequence: CTC
ctcacccatcttccatgctg

SEQ ID NO: 198634 - DNA, 20 bp, Artificial Sequence
  Description of Artificial Sequence: Synthetic oligonucleotide
  Target: LAMA2; (-) strand; PAM type: YTN; PAM sequence: CTG
gctcctcacccatcttccat

SEQ ID NO: 198635 - DNA, 20 bp, Artificial Sequence
  Description of Artificial Sequence: Synthetic oligonucleotide
  Target: LAMA2; (-) strand; PAM type: YTN; PAM sequence: CTA
cccacgtggcctggctcctc

SEQ ID NO: 198636 - DNA, 20 bp, Artificial Sequence
  Description of Artificial Sequence: Synthetic oligonucleotide
  Target: LAMA2; (-) strand; PAM type: YTN; PAM sequence: TTC
tacccacgtggcctggctcc

SEQ ID NO: 198637 - DNA, 20 bp, Artificial Sequence
  Description of Artificial Sequence: Synthetic oligonucleotide
  Target: LAMA2; (-) strand; PAM type: YTN; PAM sequence: CTC
aagttctacccacgtggcct

SEQ ID NO: 198638 - DNA, 20 bp, Artificial Sequence
  Description of Artificial Sequence: Synthetic oligonucleotide
  Target: LAMA2; (-) strand; PAM type: YTN; PAM sequence: TTA
tgatactcaagttctaccca

SEQ ID NO: 198639 - DNA, 20 bp, Artificial Sequence
  Description of Artificial Sequence: Synthetic oligonucleotide
  Target: LAMA2; (-) strand; PAM type: YTN; PAM sequence: TTA
gatggagaaatattatgata

SEQ ID NO: 198640 - DNA, 20 bp, Artificial Sequence
  Description of Artificial Sequence: Synthetic oligonucleotide
  Target: LAMA2; (-) strand; PAM type: YTN; PAM sequence: TTT
agatggagaaatattatgat

SEQ ID NO: 198641 - DNA, 20 bp, Artificial Sequence
  Description of Artificial Sequence: Synthetic oligonucleotide
  Target: LAMA2; (-) strand; PAM type: YTN; PAM sequence: CTA
gtagaatttagatggagaaa

SEQ ID NO: 198642 - DNA, 20 bp, Artificial Sequence
  Description of Artificial Sequence: Synthetic oligonucleotide
  Target: LAMA2; (-) strand; PAM type: YTN; PAM sequence: CTA
gtcctagtagaatttagatg

SEQ ID NO: 198643 - DNA, 20 bp, Artificial Sequence
  Description of Artificial Sequence: Synthetic oligonucleotide
  Target: LAMA2; (-) strand; PAM type: YTN; PAM sequence: TTC
tagtcctagtagaatttaga

SEQ ID NO: 198644 - DNA, 20 bp, Artificial Sequence
  Description of Artificial Sequence: Synthetic oligonucleotide
  Target: LAMA2; (-) strand; PAM type: YTN; PAM sequence: CTT
ctagtcctagtagaatttag

SEQ ID NO: 198645 - DNA, 20 bp, Artificial Sequence
  Description of Artificial Sequence: Synthetic oligonucleotide
  Target: LAMA2; (-) strand; PAM type: YTN; PAM sequence: TTG
tagagtaaataaaatgtcca

SEQ ID NO: 198646 - DNA, 20 bp, Artificial Sequence
  Description of Artificial Sequence: Synthetic oligonucleotide
  Target: LAMA2; (-) strand; PAM type: YTN; PAM sequence: TTT
gtagagtaaataaaatgtcc

SEQ ID NO: 198647 - DNA, 20 bp, Artificial Sequence
  Description of Artificial Sequence: Synthetic oligonucleotide
  Target: LAMA2; (-) strand; PAM type: YTN; PAM sequence: CTT
tgtagagtaaataaaatgtc

SEQ ID NO: 198648 - DNA, 20 bp, Artificial Sequence
  Description of Artificial Sequence: Synthetic oligonucleotide
  Target: LAMA2; (-) strand; PAM type: YTN; PAM sequence: CTG
acgtgggcactttgtagagt

SEQ ID NO: 198649 - DNA, 20 bp, Artificial Sequence
  Description of Artificial Sequence: Synthetic oligonucleotide
  Target: LAMA2; (-) strand; PAM type: YTN; PAM sequence: CTG
tcactgacgtgggcactttg

SEQ ID NO: 198650 - DNA, 20 bp, Artificial Sequence
  Description of Artificial Sequence: Synthetic oligonucleotide
  Target: LAMA2; (-) strand; PAM type: YTN; PAM sequence: TTA
tctgtcactgacgtgggcac

SEQ ID NO: 198651 - DNA, 20 bp, Artificial Sequence
  Description of Artificial Sequence: Synthetic oligonucleotide
  Target: LAMA2; (-) strand; PAM type: YTN; PAM sequence: TTT
atctgtcactgacgtgggca

SEQ ID NO: 198652 - DNA, 20 bp, Artificial Sequence
  Description of Artificial Sequence: Synthetic oligonucleotide
  Target: LAMA2; (-) strand; PAM type: YTN; PAM sequence: CTT
tatctgtcactgacgtgggc

SEQ ID NO: 198653 - DNA, 20 bp, Artificial Sequence
  Description of Artificial Sequence: Synthetic oligonucleotide
  Target: LAMA2; (-) strand; PAM type: YTN; PAM sequence: CTC
tttatctgtcactgacgtgg

SEQ ID NO: 198654 - DNA, 20 bp, Artificial Sequence
  Description of Artificial Sequence: Synthetic oligonucleotide
  Target: LAMA2; (-) strand; PAM type: YTN; PAM sequence: TTG
actctttatctgtcactgac

SEQ ID NO: 198655 - DNA, 20 bp, Artificial Sequence
  Description of Artificial Sequence: Synthetic oligonucleotide
  Target: LAMA2; (-) strand; PAM type: YTN; PAM sequence: CTC
ccagatgttgactctttatc

SEQ ID NO: 198656 - DNA, 20 bp, Artificial Sequence
  Description of Artificial Sequence: Synthetic oligonucleotide
  Target: LAMA2; (-) strand; PAM type: YTN; PAM sequence: CTA
ctcccagatgttgactcttt

SEQ ID NO: 198657 - DNA, 20 bp, Artificial Sequence
  Description of Artificial Sequence: Synthetic oligonucleotide
  Target: LAMA2; (-) strand; PAM type: YTN; PAM sequence: CTA
agctactcccagatgttgac

SEQ ID NO: 198658 - DNA, 20 bp, Artificial Sequence
  Description of Artificial Sequence: Synthetic oligonucleotide
  Target: LAMA2; (-) strand; PAM type: YTN; PAM sequence: CTG
ggccatgtggaacccaccta

SEQ ID NO: 198659 - DNA, 20 bp, Artificial Sequence
  Description of Artificial Sequence: Synthetic oligonucleotide
  Target: LAMA2; (-) strand; PAM type: YTN; PAM sequence: TTC
aatcctgggccatgtggaac

SEQ ID NO: 198660 - DNA, 20 bp, Artificial Sequence
  Description of Artificial Sequence: Synthetic oligonucleotide
  Target: LAMA2; (-) strand; PAM type: YTN; PAM sequence: CTA
agaagggagagaaagaggtt

SEQ ID NO: 198661 - DNA, 20 bp, Artificial Sequence
  Description of Artificial Sequence: Synthetic oligonucleotide
  Target: LAMA2; (-) strand; PAM type: YTN; PAM sequence: CTG
aggtcaaacagctaagaagg

SEQ ID NO: 198662 - DNA, 20 bp, Artificial Sequence
  Description of Artificial Sequence: Synthetic oligonucleotide
  Target: LAMA2; (-) strand; PAM type: YTN; PAM sequence: TTG
actgaggtcaaacagctaag

SEQ ID NO: 198663 - DNA, 20 bp, Artificial Sequence
  Description of Artificial Sequence: Synthetic oligonucleotide
  Target: LAMA2; (-) strand; PAM type: YTN; PAM sequence: CTT
gactgaggtcaaacagctaa

SEQ ID NO: 198664 - DNA, 20 bp, Artificial Sequence
  Description of Artificial Sequence: Synthetic oligonucleotide
  Target: LAMA2; (-) strand; PAM type: YTN; PAM sequence: TTA
cagacaagaaaacagaggca

SEQ ID NO: 198665 - DNA, 20 bp, Artificial Sequence
  Description of Artificial Sequence: Synthetic oligonucleotide
  Target: LAMA2; (-) strand; PAM type: YTN; PAM sequence: TTT
acagacaagaaaacagaggc

SEQ ID NO: 198666 - DNA, 20 bp, Artificial Sequence
  Description of Artificial Sequence: Synthetic oligonucleotide
  Target: LAMA2; (-) strand; PAM type: YTN; PAM sequence: TTC
ccaatttacagacaagaaaa

SEQ ID NO: 198667 - DNA, 20 bp, Artificial Sequence
  Description of Artificial Sequence: Synthetic oligonucleotide
  Target: LAMA2; (-) strand; PAM type: YTN; PAM sequence: TTA
ttcccaatttacagacaaga

SEQ ID NO: 198668 - DNA, 20 bp, Artificial Sequence
  Description of Artificial Sequence: Synthetic oligonucleotide
  Target: LAMA2; (-) strand; PAM type: YTN; PAM sequence: TTA
ttattcccaatttacagaca

SEQ ID NO: 198669 - DNA, 20 bp, Artificial Sequence
  Description of Artificial Sequence: Synthetic oligonucleotide
  Target: LAMA2; (-) strand; PAM type: YTN; PAM sequence: CTT
attattcccaatttacagac

SEQ ID NO: 198670 - DNA, 20 bp, Artificial Sequence
  Description of Artificial Sequence: Synthetic oligonucleotide
  Target: LAMA2; (-) strand; PAM type: YTN; PAM sequence: TTA
ccttattattcccaatttac

SEQ ID NO: 198671 - DNA, 20 bp, Artificial Sequence
  Description of Artificial Sequence: Synthetic oligonucleotide
  Target: LAMA2; (-) strand; PAM type: YTN; PAM sequence: TTA
ttaccttattattcccaatt

SEQ ID NO: 198672 - DNA, 20 bp, Artificial Sequence
  Description of Artificial Sequence: Synthetic oligonucleotide
  Target: LAMA2; (-) strand; PAM type: YTN; PAM sequence: TTA
ttattaccttattattccca

SEQ ID NO: 198673 - DNA, 20 bp, Artificial Sequence
  Description of Artificial Sequence: Synthetic oligonucleotide
  Target: LAMA2; (-) strand; PAM type: YTN; PAM sequence: CTT
attattaccttattattccc

SEQ ID NO: 198674 - DNA, 20 bp, Artificial Sequence
  Description of Artificial Sequence: Synthetic oligonucleotide
  Target: LAMA2; (-) strand; PAM type: YTN; PAM sequence: CTC
acaatacttattattacctt

SEQ ID NO: 198675 - DNA, 20 bp, Artificial Sequence
  Description of Artificial Sequence: Synthetic oligonucleotide
  Target: LAMA2; (-) strand; PAM type: YTN; PAM sequence: TTA
tatacatgtatatataatcc

SEQ ID NO: 198676 - DNA, 20 bp, Artificial Sequence
  Description of Artificial Sequence: Synthetic oligonucleotide
  Target: LAMA2; (-) strand; PAM type: YTN; PAM sequence: TTA
ttatatacatgtatatataa

SEQ ID NO: 198677 - DNA, 20 bp, Artificial Sequence
  Description of Artificial Sequence: Synthetic oligonucleotide
  Target: LAMA2; (-) strand; PAM type: YTN; PAM sequence: TTA
tatatgatgtattattatat

SEQ ID NO: 198678 - DNA, 20 bp, Artificial Sequence
  Description of Artificial Sequence: Synthetic oligonucleotide
  Target: LAMA2; (-) strand; PAM type: YTN; PAM sequence: TTA
atgttatatatgatgtatta

SEQ ID NO: 198679 - DNA, 20 bp, Artificial Sequence
  Description of Artificial Sequence: Synthetic oligonucleotide
  Target: LAMA2; (-) strand; PAM type: YTN; PAM sequence: TTA
ataaatattaatgttatata

SEQ ID NO: 198680 - DNA, 20 bp, Artificial Sequence
  Description of Artificial Sequence: Synthetic oligonucleotide
  Target: LAMA2; (-) strand; PAM type: YTN; PAM sequence: TTA
tatatgtgtgttaataaata

SEQ ID NO: 198681 - DNA, 20 bp, Artificial Sequence
  Description of Artificial Sequence: Synthetic oligonucleotide
  Target: LAMA2; (-) strand; PAM type: YTN; PAM sequence: TTA
catgtatatgtatacatgaa

SEQ ID NO: 198682 - DNA, 20 bp, Artificial Sequence
  Description of Artificial Sequence: Synthetic oligonucleotide
  Target: LAMA2; (-) strand; PAM type: YTN; PAM sequence: CTT
acatgtatatgtatacatga

SEQ ID NO: 198683 - DNA, 20 bp, Artificial Sequence
  Description of Artificial Sequence: Synthetic oligonucleotide
  Target: LAMA2; (-) strand; PAM type: YTN; PAM sequence: TTA
agcaccttacatgtatatgt

SEQ ID NO: 198684 - DNA, 20 bp, Artificial Sequence
  Description of Artificial Sequence: Synthetic oligonucleotide
  Target: LAMA2; (-) strand; PAM type: YTN; PAM sequence: CTG
ttaagcaccttacatgtata

SEQ ID NO: 198685 - DNA, 20 bp, Artificial Sequence
  Description of Artificial Sequence: Synthetic oligonucleotide
  Target: LAMA2; (-) strand; PAM type: YTN; PAM sequence: CTC
tgttaagcaccttacatgta

SEQ ID NO: 198686 - DNA, 20 bp, Artificial Sequence
  Description of Artificial Sequence: Synthetic oligonucleotide
  Target: LAMA2; (-) strand; PAM type: YTN; PAM sequence: TTG
gtaccagggactctgttaag

SEQ ID NO: 198687 - DNA, 20 bp, Artificial Sequence
  Description of Artificial Sequence: Synthetic oligonucleotide
  Target: LAMA2; (-) strand; PAM type: YTN; PAM sequence: TTT
ggtaccagggactctgttaa

SEQ ID NO: 198688 - DNA, 20 bp, Artificial Sequence
  Description of Artificial Sequence: Synthetic oligonucleotide
  Target: LAMA2; (-) strand; PAM type: YTN; PAM sequence: TTA
tttggtaccagggactctgt

SEQ ID NO: 198689 - DNA, 20 bp, Artificial Sequence
  Description of Artificial Sequence: Synthetic oligonucleotide
  Target: LAMA2; (-) strand; PAM type: YTN; PAM sequence: CTT
atttggtaccagggactctg

SEQ ID NO: 198690 - DNA, 20 bp, Artificial Sequence
  Description of Artificial Sequence: Synthetic oligonucleotide
  Target: LAMA2; (-) strand; PAM type: YTN; PAM sequence: TTC
agtgcttatttggtaccagg

SEQ ID NO: 198691 - DNA, 20 bp, Artificial Sequence
  Description of Artificial Sequence: Synthetic oligonucleotide
  Target: LAMA2; (-) strand; PAM type: YTN; PAM sequence: TTG
attcagtgcttatttggtac

SEQ ID NO: 198692 - DNA, 20 bp, Artificial Sequence
  Description of Artificial Sequence: Synthetic oligonucleotide
  Target: LAMA2; (-) strand; PAM type: YTN; PAM sequence: TTA
atgttgattcagtgcttatt

SEQ ID NO: 198693 - DNA, 20 bp, Artificial Sequence
  Description of Artificial Sequence: Synthetic oligonucleotide
  Target: LAMA2; (-) strand; PAM type: YTN; PAM sequence: TTC
agataaaccaaataataata

SEQ ID NO: 198694 - DNA, 20 bp, Artificial Sequence
  Description of Artificial Sequence: Synthetic oligonucleotide
  Target: LAMA2; (-) strand; PAM type: YTN; PAM sequence: TTT
cagataaaccaaataataat

SEQ ID NO: 198695 - DNA, 20 bp, Artificial Sequence
  Description of Artificial Sequence: Synthetic oligonucleotide
  Target: LAMA2; (-) strand; PAM type: YTN; PAM sequence: TTG
aatgtttcagataaaccaaa

SEQ ID NO: 198696 - DNA, 20 bp, Artificial Sequence
  Description of Artificial Sequence: Synthetic oligonucleotide
  Target: LAMA2; (-) strand; PAM type: YTN; PAM sequence: TTT
gaatgtttcagataaaccaa

SEQ ID NO: 198697 - DNA, 20 bp, Artificial Sequence
  Description of Artificial Sequence: Synthetic oligonucleotide
  Target: LAMA2; (-) strand; PAM type: YTN; PAM sequence: CTA
taccatttgaatgtttcaga

SEQ ID NO: 198698 - DNA, 20 bp, Artificial Sequence
  Description of Artificial Sequence: Synthetic oligonucleotide
  Target: LAMA2; (-) strand; PAM type: YTN; PAM sequence: TTA
gtgctataccatttgaatgt

SEQ ID NO: 198699 - DNA, 20 bp, Artificial Sequence
  Description of Artificial Sequence: Synthetic oligonucleotide
  Target: LAMA2; (-) strand; PAM type: YTN; PAM sequence: CTT
agtgctataccatttgaatg

SEQ ID NO: 198700 - DNA, 20 bp, Artificial Sequence
  Description of Artificial Sequence: Synthetic oligonucleotide
  Target: LAMA2; (-) strand; PAM type: YTN; PAM sequence: TTA
catggccttagtgctatacc

SEQ ID NO: 198701 - DNA, 20 bp, Artificial Sequence
  Description of Artificial Sequence: Synthetic oligonucleotide
  Target: LAMA2; (-) strand; PAM type: YTN; PAM sequence: TTT
acatggccttagtgctatac

SEQ ID NO: 198702 - DNA, 20 bp, Artificial Sequence
  Description of Artificial Sequence: Synthetic oligonucleotide
  Target: LAMA2; (-) strand; PAM type: YTN; PAM sequence: TTT
tacatggccttagtgctata

SEQ ID NO: 198703 - DNA, 20 bp, Artificial Sequence
  Description of Artificial Sequence: Synthetic oligonucleotide
  Target: LAMA2; (-) strand; PAM type: YTN; PAM sequence: TTT
ttacatggccttagtgctat

SEQ ID NO: 198704 - DNA, 20 bp, Artificial Sequence
  Description of Artificial Sequence: Synthetic oligonucleotide
  Target: LAMA2; (-) strand; PAM type: YTN; PAM sequence: TTG
aaatacatgatatttttaca

SEQ ID NO: 198705 - DNA, 20 bp, Artificial Sequence
  Description of Artificial Sequence: Synthetic oligonucleotide
  Target: LAMA2; (-) strand; PAM type: YTN; PAM sequence: TTC
aataattgaaatacatgata

SEQ ID NO: 198706 - DNA, 20 bp, Artificial Sequence
  Description of Artificial Sequence: Synthetic oligonucleotide
  Target: LAMA2; (-) strand; PAM type: YTN; PAM sequence: TTT
caataattgaaatacatgat

SEQ ID NO: 198707 - DNA, 20 bp, Artificial Sequence
  Description of Artificial Sequence: Synthetic oligonucleotide
  Target: LAMA2; (-) strand; PAM type: YTN; PAM sequence: CTG
gatacccaaaaatgtgaaaa

SEQ ID NO: 198708 - DNA, 20 bp, Artificial Sequence
  Description of Artificial Sequence: Synthetic oligonucleotide
  Target: LAMA2; (-) strand; PAM type: YTN; PAM sequence: CTA
tcctggatacccaaaaatgt

SEQ ID NO: 198709 - DNA, 20 bp, Artificial Sequence
  Description of Artificial Sequence: Synthetic oligonucleotide
  Target: LAMA2; (-) strand; PAM type: YTN; PAM sequence: CTC
tatcctggatacccaaaaat

SEQ ID NO: 198710 - DNA, 20 bp, Artificial Sequence
  Description of Artificial Sequence: Synthetic oligonucleotide
  Target: LAMA2; (-) strand; PAM type: YTN; PAM sequence: TTC
tctatcctggatacccaaaa

SEQ ID NO: 198711 - DNA, 20 bp, Artificial Sequence
  Description of Artificial Sequence: Synthetic oligonucleotide
  Target: LAMA2; (-) strand; PAM type: YTN; PAM sequence: CTT
ctctatcctggatacccaaa

SEQ ID NO: 198712 - DNA, 20 bp, Artificial Sequence
  Description of Artificial Sequence: Synthetic oligonucleotide
  Target: LAMA2; (-) strand; PAM type: YTN; PAM sequence: CTC
cccttctctatcctggatac

SEQ ID NO: 198713 - DNA, 20 bp, Artificial Sequence
  Description of Artificial Sequence: Synthetic oligonucleotide
  Target: LAMA2; (-) strand; PAM type: YTN; PAM sequence: TTC
ctccccttctctatcctgga

SEQ ID NO: 198714 - DNA, 20 bp, Artificial Sequence
  Description of Artificial Sequence: Synthetic oligonucleotide
  Target: LAMA2; (-) strand; PAM type: YTN; PAM sequence: CTT
cctccccttctctatcctgg

SEQ ID NO: 198715 - DNA, 20 bp, Artificial Sequence
  Description of Artificial Sequence: Synthetic oligonucleotide
  Target: LAMA2; (-) strand; PAM type: YTN; PAM sequence: CTA
gatccttcctccccttctct

SEQ ID NO: 198716 - DNA, 20 bp, Artificial Sequence
  Description of Artificial Sequence: Synthetic oligonucleotide
  Target: LAMA2; (-) strand; PAM type: YTN; PAM sequence: TTA
tgtgactagatccttcctcc

SEQ ID NO: 198717 - DNA, 20 bp, Artificial Sequence
  Description of Artificial Sequence: Synthetic oligonucleotide
  Target: LAMA2; (-) strand; PAM type: YTN; PAM sequence: CTC
aaatattatgtgactagatc

SEQ ID NO: 198718 - DNA, 20 bp, Artificial Sequence
  Description of Artificial Sequence: Synthetic oligonucleotide
  Target: LAMA2; (-) strand; PAM type: YTN; PAM sequence: CTC
tcaaatattatgtgactaga

SEQ ID NO: 198719 - DNA, 20 bp, Artificial Sequence
  Description of Artificial Sequence: Synthetic oligonucleotide
  Target: LAMA2; (-) strand; PAM type: YTN; PAM sequence: CTG
actctcaaatattatgtgac

SEQ ID NO: 198720 - DNA, 20 bp, Artificial Sequence
  Description of Artificial Sequence: Synthetic oligonucleotide
  Target: LAMA2; (-) strand; PAM type: YTN; PAM sequence: TTG
ctgactctcaaatattatgt

SEQ ID NO: 198721 - DNA, 20 bp, Artificial Sequence
  Description of Artificial Sequence: Synthetic oligonucleotide
  Target: LAMA2; (-) strand; PAM type: YTN; PAM sequence: TTT
gctgactctcaaatattatg

SEQ ID NO: 198722 - DNA, 20 bp, Artificial Sequence
  Description of Artificial Sequence: Synthetic oligonucleotide
  Target: LAMA2; (-) strand; PAM type: YTN; PAM sequence: TTG
aaagaatttgctgactctca

SEQ ID NO: 198723 - DNA, 20 bp, Artificial Sequence
  Description of Artificial Sequence: Synthetic oligonucleotide
  Target: LAMA2; (-) strand; PAM type: YTN; PAM sequence: TTG
ttgaaagaatttgctgactc

SEQ ID NO: 198724 - DNA, 20 bp, Artificial Sequence
  Description of Artificial Sequence: Synthetic oligonucleotide
  Target: LAMA2; (-) strand; PAM type: YTN; PAM sequence: TTA
ttgttgaaagaatttgctga

SEQ ID NO: 198725 - DNA, 20 bp, Artificial Sequence
  Description of Artificial Sequence: Synthetic oligonucleotide
  Target: LAMA2; (-) strand; PAM type: YTN; PAM sequence: CTC
acacagacaaatacaatcac

SEQ ID NO: 198726 - DNA, 20 bp, Artificial Sequence
  Description of Artificial Sequence: Synthetic oligonucleotide
  Target: LAMA2; (-) strand; PAM type: YTN; PAM sequence: CTC
catgaaaatgaccatcatag

SEQ ID NO: 198727 - DNA, 20 bp, Artificial Sequence
  Description of Artificial Sequence: Synthetic oligonucleotide
  Target: LAMA2; (-) strand; PAM type: YTN; PAM sequence: CTG
gctccatgaaaatgaccatc

SEQ ID NO: 198728 - DNA, 20 bp, Artificial Sequence
  Description of Artificial Sequence: Synthetic oligonucleotide
  Target: LAMA2; (-) strand; PAM type: YTN; PAM sequence: TTG
actggctccatgaaaatgac

SEQ ID NO: 198729 - DNA, 20 bp, Artificial Sequence
  Description of Artificial Sequence: Synthetic oligonucleotide
  Target: LAMA2; (-) strand; PAM type: YTN; PAM sequence: CTT
gactggctccatgaaaatga

SEQ ID NO: 198730 - DNA, 20 bp, Artificial Sequence
  Description of Artificial Sequence: Synthetic oligonucleotide
  Target: LAMA2; (-) strand; PAM type: YTN; PAM sequence: TTC
aaagtcaatgcttgactggc

SEQ ID NO: 198731 - DNA, 20 bp, Artificial Sequence
  Description of Artificial Sequence: Synthetic oligonucleotide
  Target: LAMA2; (-) strand; PAM type: YTN; PAM sequence: TTT
caaagtcaatgcttgactgg

SEQ ID NO: 198732 - DNA, 20 bp, Artificial Sequence
  Description of Artificial Sequence: Synthetic oligonucleotide
  Target: LAMA2; (-) strand; PAM type: YTN; PAM sequence: CTA
atttcaaagtcaatgcttga

SEQ ID NO: 198733 - DNA, 20 bp, Artificial Sequence
  Description of Artificial Sequence: Synthetic oligonucleotide
  Target: LAMA2; (-) strand; PAM type: YTN; PAM sequence: CTG
cctaatttcaaagtcaatgc

SEQ ID NO: 198734 - DNA, 20 bp, Artificial Sequence
  Description of Artificial Sequence: Synthetic oligonucleotide
  Target: LAMA2; (-) strand; PAM type: YTN; PAM sequence: TTC
atatctgcctaatttcaaag

SEQ ID NO: 198735 - DNA, 20 bp, Artificial Sequence
  Description of Artificial Sequence: Synthetic oligonucleotide
  Target: LAMA2; (-) strand; PAM type: YTN; PAM sequence: TTC
aaattcatatctgcctaatt

SEQ ID NO: 198736 - DNA, 20 bp, Artificial Sequence
  Description of Artificial Sequence: Synthetic oligonucleotide
  Target: LAMA2; (-) strand; PAM type: YTN; PAM sequence: TTT
caaattcatatctgcctaat

SEQ ID NO: 198737 - DNA, 20 bp, Artificial Sequence
  Description of Artificial Sequence: Synthetic oligonucleotide
  Target: LAMA2; (-) strand; PAM type: YTN; PAM sequence: TTT
tcaaattcatatctgcctaa

SEQ ID NO: 198738 - DNA, 20 bp, Artificial Sequence
  Description of Artificial Sequence: Synthetic oligonucleotide
  Target: LAMA2; (-) strand; PAM type: YTN; PAM sequence: CTT
ttcaaattcatatctgccta

SEQ ID NO: 198739 - DNA, 20 bp, Artificial Sequence
  Description of Artificial Sequence: Synthetic oligonucleotide
  Target: LAMA2; (-) strand; PAM type: YTN; PAM sequence: CTA
cttttcaaattcatatctgc

SEQ ID NO: 198740 - DNA, 20 bp, Artificial Sequence
  Description of Artificial Sequence: Synthetic oligonucleotide
  Target: LAMA2; (-) strand; PAM type: YTN; PAM sequence: CTA
gtggagggaaaactactttt

SEQ ID NO: 198741 - DNA, 20 bp, Artificial Sequence
  Description of Artificial Sequence: Synthetic oligonucleotide
  Target: LAMA2; (-) strand; PAM type: YTN; PAM sequence: TTG
tacaaggtcaaacggctagt

SEQ ID NO: 198742 - DNA, 20 bp, Artificial Sequence
  Description of Artificial Sequence: Synthetic oligonucleotide
  Target: LAMA2; (-) strand; PAM type: YTN; PAM sequence: CTT
gtacaaggtcaaacggctag

SEQ ID NO: 198743 - DNA, 20 bp, Artificial Sequence
  Description of Artificial Sequence: Synthetic oligonucleotide
  Target: LAMA2; (-) strand; PAM type: YTN; PAM sequence: TTA
aagtcacttgtacaaggtca

SEQ ID NO: 198744 - DNA, 20 bp, Artificial Sequence
  Description of Artificial Sequence: Synthetic oligonucleotide
  Target: LAMA2; (-) strand; PAM type: YTN; PAM sequence: TTA
ataataaaaaatgagttaaa

SEQ ID NO: 198745 - DNA, 20 bp, Artificial Sequence
  Description of Artificial Sequence: Synthetic oligonucleotide
  Target: LAMA2; (-) strand; PAM type: YTN; PAM sequence: TTT
aataataaaaaatgagttaa

SEQ ID NO: 198746 - DNA, 20 bp, Artificial Sequence
  Description of Artificial Sequence: Synthetic oligonucleotide
  Target: LAMA2; (-) strand; PAM type: YTN; PAM sequence: TTT
taataataaaaaatgagtta

SEQ ID NO: 198747 - DNA, 20 bp, Artificial Sequence
  Description of Artificial Sequence: Synthetic oligonucleotide
  Target: LAMA2; (-) strand; PAM type: YTN; PAM sequence: TTT
ttaataataaaaaatgagtt

SEQ ID NO: 198748 - DNA, 20 bp, Artificial Sequence
  Description of Artificial Sequence: Synthetic oligonucleotide
  Target: LAMA2; (-) strand; PAM type: YTN; PAM sequence: TTT
tttaataataaaaaatgagt

SEQ ID NO: 198749 - DNA, 20 bp, Artificial Sequence
  Description of Artificial Sequence: Synthetic oligonucleotide
  Target: LAMA2; (-) strand; PAM type: YTN; PAM sequence: TTT
ttttaataataaaaaatgag

SEQ ID NO: 198750 - DNA, 20 bp, Artificial Sequence
  Description of Artificial Sequence: Synthetic oligonucleotide
  Target: LAMA2; (-) strand; PAM type: YTN; PAM sequence: CTA
tttttttaataataaaaaat

SEQ ID NO: 198751 - DNA, 20 bp, Artificial Sequence
  Description of Artificial Sequence: Synthetic oligonucleotide
  Target: LAMA2; (-) strand; PAM type: YTN; PAM sequence: TTA
caaagaaaaaatccctattt

SEQ ID NO: 198752 - DNA, 20 bp, Artificial Sequence
  Description of Artificial Sequence: Synthetic oligonucleotide
  Target: LAMA2; (-) strand; PAM type: YTN; PAM sequence: CTT
acaaagaaaaaatccctatt

SEQ ID NO: 198753 - DNA, 20 bp, Artificial Sequence
  Description of Artificial Sequence: Synthetic oligonucleotide
  Target: LAMA2; (-) strand; PAM type: YTN; PAM sequence: TTG
aaaaatcttacaaagaaaaa

SEQ ID NO: 198754 - DNA, 20 bp, Artificial Sequence
  Description of Artificial Sequence: Synthetic oligonucleotide
  Target: LAMA2; (-) strand; PAM type: YTN; PAM sequence: CTT
gaaaaatcttacaaagaaaa

SEQ ID NO: 198755 - DNA, 20 bp, Artificial Sequence
  Description of Artificial Sequence: Synthetic oligonucleotide
  Target: LAMA2; (-) strand; PAM type: YTN; PAM sequence: CTC
ttgaaaaatcttacaaagaa

SEQ ID NO: 198756 - DNA, 20 bp, Artificial Sequence
  Description of Artificial Sequence: Synthetic oligonucleotide
  Target: LAMA2; (-) strand; PAM type: YTN; PAM sequence: TTG
aatcctcttgaaaaatctta

SEQ ID NO: 198757 - DNA, 20 bp, Artificial Sequence
  Description of Artificial Sequence: Synthetic oligonucleotide
  Target: LAMA2; (-) strand; PAM type: YTN; PAM sequence: TTA
ccacattgaatcctcttgaa

SEQ ID NO: 198758 - DNA, 20 bp, Artificial Sequence
  Description of Artificial Sequence: Synthetic oligonucleotide
  Target: LAMA2; (-) strand; PAM type: YTN; PAM sequence: CTG
ttaccacattgaatcctctt

SEQ ID NO: 198759 - DNA, 20 bp, Artificial Sequence
  Description of Artificial Sequence: Synthetic oligonucleotide
  Target: LAMA2; (-) strand; PAM type: YTN; PAM sequence: TTA
tacctgttaccacattgaat

SEQ ID NO: 198760 - DNA, 20 bp, Artificial Sequence
  Description of Artificial Sequence: Synthetic oligonucleotide
  Target: LAMA2; (-) strand; PAM type: YTN; PAM sequence: CTT
atacctgttaccacattgaa

SEQ ID NO: 198761 - DNA, 20 bp, Artificial Sequence
  Description of Artificial Sequence: Synthetic oligonucleotide
  Target: LAMA2; (-) strand; PAM type: YTN; PAM sequence: CTA
acaggcacttatacctgtta

SEQ ID NO: 198762 - DNA, 20 bp, Artificial Sequence
  Description of Artificial Sequence: Synthetic oligonucleotide
  Target: LAMA2; (-) strand; PAM type: YTN; PAM sequence: CTC
taacaggcacttatacctgt

SEQ ID NO: 198763 - DNA, 20 bp, Artificial Sequence
  Description of Artificial Sequence: Synthetic oligonucleotide
  Target: LAMA2; (-) strand; PAM type: YTN; PAM sequence: CTA
tgacaggccctctaacaggc

SEQ ID NO: 198764 - DNA, 20 bp, Artificial Sequence
  Description of Artificial Sequence: Synthetic oligonucleotide
  Target: LAMA2; (-) strand; PAM type: YTN; PAM sequence: TTA
tctatgacaggccctctaac

SEQ ID NO: 198765 - DNA, 20 bp, Artificial Sequence
  Description of Artificial Sequence: Synthetic oligonucleotide
  Target: LAMA2; (-) strand; PAM type: YTN; PAM sequence: TTT
atctatgacaggccctctaa

SEQ ID NO: 198766 - DNA, 20 bp, Artificial Sequence
  Description of Artificial Sequence: Synthetic oligonucleotide
  Target: LAMA2; (-) strand; PAM type: YTN; PAM sequence: TTG
aggatttatctatgacaggc

SEQ ID NO: 198767 - DNA, 20 bp, Artificial Sequence
  Description of Artificial Sequence: Synthetic oligonucleotide
  Target: LAMA2; (-) strand; PAM type: YTN; PAM sequence: TTC
attgaggatttatctatgac

SEQ ID NO: 198768 - DNA, 20 bp, Artificial Sequence
  Description of Artificial Sequence: Synthetic oligonucleotide
  Target: LAMA2; (-) strand; PAM type: YTN; PAM sequence: CTT
cattgaggatttatctatga

SEQ ID NO: 198769 - DNA, 20 bp, Artificial Sequence
  Description of Artificial Sequence: Synthetic oligonucleotide
  Target: LAMA2; (-) strand; PAM type: YTN; PAM sequence: TTA
cccttcattgaggatttatc

SEQ ID NO: 198770 - DNA, 20 bp, Artificial Sequence
  Description of Artificial Sequence: Synthetic oligonucleotide
  Target: LAMA2; (-) strand; PAM type: YTN; PAM sequence: TTA
gtaacagttacccttcattg

SEQ ID NO: 198771 - DNA, 20 bp, Artificial Sequence
  Description of Artificial Sequence: Synthetic oligonucleotide
  Target: LAMA2; (-) strand; PAM type: YTN; PAM sequence: TTT
agtaacagttacccttcatt

SEQ ID NO: 198772 - DNA, 20 bp, Artificial Sequence
  Description of Artificial Sequence: Synthetic oligonucleotide
  Target: LAMA2; (-) strand; PAM type: YTN; PAM sequence: TTT
tagtaacagttacccttcat

SEQ ID NO: 198773 - DNA, 20 bp, Artificial Sequence
  Description of Artificial Sequence: Synthetic oligonucleotide
  Target: LAMA2; (-) strand; PAM type: YTN; PAM sequence: CTT
ttagtaacagttacccttca

SEQ ID NO: 198774 - DNA, 20 bp, Artificial Sequence
  Description of Artificial Sequence: Synthetic oligonucleotide
  Target: LAMA2; (-) strand; PAM type: YTN; PAM sequence: TTC
cttttagtaacagttaccct

SEQ ID NO: 198775 - DNA, 20 bp, Artificial Sequence
  Description of Artificial Sequence: Synthetic oligonucleotide
  Target: LAMA2; (-) strand; PAM type: YTN; PAM sequence: CTT
ccttttagtaacagttaccc

SEQ ID NO: 198776 - DNA, 20 bp, Artificial Sequence
  Description of Artificial Sequence: Synthetic oligonucleotide
  Target: LAMA2; (-) strand; PAM type: YTN; PAM sequence: TTA
tatcttccttttagtaacag

SEQ ID NO: 198777 - DNA, 20 bp, Artificial Sequence
  Description of Artificial Sequence: Synthetic oligonucleotide
  Target: LAMA2; (-) strand; PAM type: YTN; PAM sequence: CTT
atatcttccttttagtaaca

SEQ ID NO: 198778 - DNA, 20 bp, Artificial Sequence
  Description of Artificial Sequence: Synthetic oligonucleotide
  Target: LAMA2; (-) strand; PAM type: YTN; PAM sequence: CTC
cttatatcttccttttagta

SEQ ID NO: 198779 - DNA, 20 bp, Artificial Sequence
  Description of Artificial Sequence: Synthetic oligonucleotide
  Target: LAMA2; (-) strand; PAM type: YTN; PAM sequence: CTC
tccttatatcttccttttag

SEQ ID NO: 198780 - DNA, 20 bp, Artificial Sequence
  Description of Artificial Sequence: Synthetic oligonucleotide
  Target: LAMA2; (-) strand; PAM type: YTN; PAM sequence: TTG
gaagtagtgtcatatctctc

SEQ ID NO: 198781 - DNA, 20 bp, Artificial Sequence
  Description of Artificial Sequence: Synthetic oligonucleotide
  Target: LAMA2; (-) strand; PAM type: YTN; PAM sequence: TTT
ggaagtagtgtcatatctct

SEQ ID NO: 198782 - DNA, 20 bp, Artificial Sequence
  Description of Artificial Sequence: Synthetic oligonucleotide
  Target: LAMA2; (-) strand; PAM type: YTN; PAM sequence: TTA
tttggaagtagtgtcatatc

SEQ ID NO: 198783 - DNA, 20 bp, Artificial Sequence
  Description of Artificial Sequence: Synthetic oligonucleotide
  Target: LAMA2; (-) strand; PAM type: YTN; PAM sequence: TTT
atttggaagtagtgtcatat

SEQ ID NO: 198784 - DNA, 20 bp, Artificial Sequence
  Description of Artificial Sequence: Synthetic oligonucleotide
  Target: LAMA2; (-) strand; PAM type: YTN; PAM sequence: TTT
tatttggaagtagtgtcata

SEQ ID NO: 198785 - DNA, 20 bp, Artificial Sequence
  Description of Artificial Sequence: Synthetic oligonucleotide
  Target: LAMA2; (-) strand; PAM type: YTN; PAM sequence: TTT
ttatttggaagtagtgtcat

SEQ ID NO: 198786 - DNA, 20 bp, Artificial Sequence
  Description of Artificial Sequence: Synthetic oligonucleotide
  Target: LAMA2; (-) strand; PAM type: YTN; PAM sequence: TTG
aaccagggtttttatttgga

SEQ ID NO: 198787 - DNA, 20 bp, Artificial Sequence
  Description of Artificial Sequence: Synthetic oligonucleotide
  Target: LAMA2; (-) strand; PAM type: YTN; PAM sequence: CTC
caatattgaaccagggtttt

SEQ ID NO: 198788 - DNA, 20 bp, Artificial Sequence
  Description of Artificial Sequence: Synthetic oligonucleotide
  Target: LAMA2; (-) strand; PAM type: YTN; PAM sequence: TTA
aagggggtccccatgctcca

SEQ ID NO: 198789 - DNA, 20 bp, Artificial Sequence
  Description of Artificial Sequence: Synthetic oligonucleotide
  Target: LAMA2; (-) strand; PAM type: YTN; PAM sequence: CTT
aaagggggtccccatgctcc

SEQ ID NO: 198790 - DNA, 20 bp, Artificial Sequence
  Description of Artificial Sequence: Synthetic oligonucleotide
  Target: LAMA2; (-) strand; PAM type: YTN; PAM sequence: CTC
ttaaagggggtccccatgct

SEQ ID NO: 198791 - DNA, 20 bp, Artificial Sequence
  Description of Artificial Sequence: Synthetic oligonucleotide
  Target: LAMA2; (-) strand; PAM type: YTN; PAM sequence: TTC
tcttaaagggggtccccatg

SEQ ID NO: 198792 - DNA, 20 bp, Artificial Sequence
  Description of Artificial Sequence: Synthetic oligonucleotide
  Target: LAMA2; (-) strand; PAM type: YTN; PAM sequence: CTT
ctcttaaagggggtccccat

SEQ ID NO: 198793 - DNA, 20 bp, Artificial Sequence
  Description of Artificial Sequence: Synthetic oligonucleotide
  Target: LAMA2; (-) strand; PAM type: YTN; PAM sequence: CTG
ggaggatgcttctcttaaag

SEQ ID NO: 198794 - DNA, 20 bp, Artificial Sequence
  Description of Artificial Sequence: Synthetic oligonucleotide
  Target: LAMA2; (-) strand; PAM type: YTN; PAM sequence: TTA
tgctgggaggatgcttctct

SEQ ID NO: 198795 - DNA, 20 bp, Artificial Sequence
  Description of Artificial Sequence: Synthetic oligonucleotide
  Target: LAMA2; (-) strand; PAM type: YTN; PAM sequence: TTG
gacattatgctgggaggatg

SEQ ID NO: 198796 - DNA, 20 bp, Artificial Sequence
  Description of Artificial Sequence: Synthetic oligonucleotide
  Target: LAMA2; (-) strand; PAM type: YTN; PAM sequence: TTT
ggacattatgctgggaggat

SEQ ID NO: 198797 - DNA, 20 bp, Artificial Sequence
  Description of Artificial Sequence: Synthetic oligonucleotide
  Target: LAMA2; (-) strand; PAM type: YTN; PAM sequence: TTT
tggacattatgctgggagga

SEQ ID NO: 198798 - DNA, 20 bp, Artificial Sequence
  Description of Artificial Sequence: Synthetic oligonucleotide
  Target: LAMA2; (-) strand; PAM type: YTN; PAM sequence: TTC
attttggacattatgctggg

SEQ ID NO: 198799 - DNA, 20 bp, Artificial Sequence
  Description of Artificial Sequence: Synthetic oligonucleotide
  Target: LAMA2; (-) strand; PAM type: YTN; PAM sequence: TTT
cattttggacattatgctgg

SEQ ID NO: 198800 - DNA, 20 bp, Artificial Sequence
  Description of Artificial Sequence: Synthetic oligonucleotide
  Target: LAMA2; (-) strand; PAM type: YTN; PAM sequence: TTT
tcattttggacattatgctg

SEQ ID NO: 198801 - DNA, 20 bp, Artificial Sequence
  Description of Artificial Sequence: Synthetic oligonucleotide
  Target: LAMA2; (-) strand; PAM type: YTN; PAM sequence: TTA
caaatgaaatattttcattt

SEQ ID NO: 198802 - DNA, 20 bp, Artificial Sequence
  Description of Artificial Sequence: Synthetic oligonucleotide
  Target: LAMA2; (-) strand; PAM type: YTN; PAM sequence: CTT
acaaatgaaatattttcatt

SEQ ID NO: 198803 - DNA, 20 bp, Artificial Sequence
  Description of Artificial Sequence: Synthetic oligonucleotide
  Target: LAMA2; (-) strand; PAM type: YTN; PAM sequence: TTA
tgcttacaaatgaaatattt

SEQ ID NO: 198804 - DNA, 20 bp, Artificial Sequence
  Description of Artificial Sequence: Synthetic oligonucleotide
  Target: LAMA2; (-) strand; PAM type: YTN; PAM sequence: CTT
atgcttacaaatgaaatatt

SEQ ID NO: 198805 - DNA, 20 bp, Artificial Sequence
  Description of Artificial Sequence: Synthetic oligonucleotide
  Target: LAMA2; (-) strand; PAM type: YTN; PAM sequence: TTC
ttatgcttacaaatgaaata

SEQ ID NO: 198806 - DNA, 20 bp, Artificial Sequence
  Description of Artificial Sequence: Synthetic oligonucleotide
  Target: LAMA2; (-) strand; PAM type: YTN; PAM sequence: TTT
cttatgcttacaaatgaaat

SEQ ID NO: 198807 - DNA, 20 bp, Artificial Sequence
  Description of Artificial Sequence: Synthetic oligonucleotide
  Target: LAMA2; (-) strand; PAM type: YTN; PAM sequence: CTT
tcttatgcttacaaatgaaa

SEQ ID NO: 198808 - DNA, 20 bp, Artificial Sequence
  Description of Artificial Sequence: Synthetic oligonucleotide
  Target: LAMA2; (-) strand; PAM type: YTN; PAM sequence: TTA
aaatgacccctttcttatgc

SEQ ID NO: 198809 - DNA, 20 bp, Artificial Sequence
  Description of Artificial Sequence: Synthetic oligonucleotide
  Target: LAMA2; (-) strand; PAM type: YTN; PAM sequence: CTT
aaaatgacccctttcttatg

SEQ ID NO: 198810 - DNA, 20 bp, Artificial Sequence
  Description of Artificial Sequence: Synthetic oligonucleotide
  Target: LAMA2; (-) strand; PAM type: YTN; PAM sequence: TTC
acttaaaatgacccctttct

SEQ ID NO: 198811 - DNA, 20 bp, Artificial Sequence
  Description of Artificial Sequence: Synthetic oligonucleotide
  Target: LAMA2; (-) strand; PAM type: YTN; PAM sequence: TTT
cacttaaaatgacccctttc

SEQ ID NO: 198812 - DNA, 20 bp, Artificial Sequence
  Description of Artificial Sequence: Synthetic oligonucleotide
  Target: LAMA2; (-) strand; PAM type: YTN; PAM sequence: TTG
ataagtcggtcatttcactt

SEQ ID NO: 198813 - DNA, 20 bp, Artificial Sequence
  Description of Artificial Sequence: Synthetic oligonucleotide
  Target: LAMA2; (-) strand; PAM type: YTN; PAM sequence: CTT
gataagtcggtcatttcact

SEQ ID NO: 198814 - DNA, 20 bp, Artificial Sequence
  Description of Artificial Sequence: Synthetic oligonucleotide
  Target: LAMA2; (-) strand; PAM type: YTN; PAM sequence: CTG
gcttgataagtcggtcattt

SEQ ID NO: 198815 - DNA, 20 bp, Artificial Sequence
  Description of Artificial Sequence: Synthetic oligonucleotide
  Target: LAMA2; (-) strand; PAM type: YTN; PAM sequence: TTC
agtggactggcttgataagt

SEQ ID NO: 198816 - DNA, 20 bp, Artificial Sequence
  Description of Artificial Sequence: Synthetic oligonucleotide
  Target: LAMA2; (-) strand; PAM type: YTN; PAM sequence: CTA
cagttcagtggactggcttg

SEQ ID NO: 198817 - DNA, 20 bp, Artificial Sequence
  Description of Artificial Sequence: Synthetic oligonucleotide
  Target: LAMA2; (-) strand; PAM type: YTN; PAM sequence: CTC
caagctacagttcagtggac

SEQ ID NO: 198818 - DNA, 20 bp, Artificial Sequence
  Description of Artificial Sequence: Synthetic oligonucleotide
  Target: LAMA2; (-) strand; PAM type: YTN; PAM sequence: CTC
agactccaagctacagttca

SEQ ID NO: 198819 - DNA, 20 bp, Artificial Sequence
  Description of Artificial Sequence: Synthetic oligonucleotide
  Target: LAMA2; (-) strand; PAM type: YTN; PAM sequence: TTG
taactcagactccaagctac

SEQ ID NO: 198820 - DNA, 20 bp, Artificial Sequence
  Description of Artificial Sequence: Synthetic oligonucleotide
  Target: LAMA2; (-) strand; PAM type: YTN; PAM sequence: TTT
gtaactcagactccaagcta

SEQ ID NO: 198821 - DNA, 20 bp, Artificial Sequence
  Description of Artificial Sequence: Synthetic oligonucleotide
  Target: LAMA2; (-) strand; PAM type: YTN; PAM sequence: CTT
tgtaactcagactccaagct

SEQ ID NO: 198822 - DNA, 20 bp, Artificial Sequence
  Description of Artificial Sequence: Synthetic oligonucleotide
  Target: LAMA2; (-) strand; PAM type: YTN; PAM sequence: TTA
ctttgtaactcagactccaa

SEQ ID NO: 198823 - DNA, 20 bp, Artificial Sequence
  Description of Artificial Sequence: Synthetic oligonucleotide
  Target: LAMA2; (-) strand; PAM type: YTN; PAM sequence: CTA
tagattactttgtaactcag

SEQ ID NO: 198824 - DNA, 20 bp, Artificial Sequence
  Description of Artificial Sequence: Synthetic oligonucleotide
  Target: LAMA2; (-) strand; PAM type: YTN; PAM sequence: CTC
agatcactatagattacttt

SEQ ID NO: 198825 - DNA, 20 bp, Artificial Sequence
  Description of Artificial Sequence: Synthetic oligonucleotide
  Target: LAMA2; (-) strand; PAM type: YTN; PAM sequence: CTC
cctcagatcactatagatta

SEQ ID NO: 198826 - DNA, 20 bp, Artificial Sequence
  Description of Artificial Sequence: Synthetic oligonucleotide
  Target: LAMA2; (-) strand; PAM type: YTN; PAM sequence: TTA
ctccctcagatcactataga

SEQ ID NO: 198827 - DNA, 20 bp, Artificial Sequence
  Description of Artificial Sequence: Synthetic oligonucleotide
  Target: LAMA2; (-) strand; PAM type: YTN; PAM sequence: TTG
tattactccctcagatcact

SEQ ID NO: 198828 - DNA, 20 bp, Artificial Sequence
  Description of Artificial Sequence: Synthetic oligonucleotide
  Target: LAMA2; (-) strand; PAM type: YTN; PAM sequence: TTT
gtattactccctcagatcac

SEQ ID NO: 198829 - DNA, 20 bp, Artificial Sequence
  Description of Artificial Sequence: Synthetic oligonucleotide
  Target: LAMA2; (-) strand; PAM type: YTN; PAM sequence: TTG
gagtttgtattactccctca

SEQ ID NO: 198830 - DNA, 20 bp, Artificial Sequence
  Description of Artificial Sequence: Synthetic oligonucleotide
  Target: LAMA2; (-) strand; PAM type: YTN; PAM sequence: CTT
ggagtttgtattactccctc

SEQ ID NO: 198831 - DNA, 20 bp, Artificial Sequence
  Description of Artificial Sequence: Synthetic oligonucleotide
  Target: LAMA2; (-) strand; PAM type: YTN; PAM sequence: TTA
acttggagtttgtattactc

SEQ ID NO: 198832 - DNA, 20 bp, Artificial Sequence
  Description of Artificial Sequence: Synthetic oligonucleotide
  Target: LAMA2; (-) strand; PAM type: YTN; PAM sequence: CTA
cagtcattaacttggagttt

SEQ ID NO: 198833 - DNA, 20 bp, Artificial Sequence
  Description of Artificial Sequence: Synthetic oligonucleotide
  Target: LAMA2; (-) strand; PAM type: YTN; PAM sequence: TTC
tacagtcattaacttggagt

SEQ ID NO: 198834 - DNA, 20 bp, Artificial Sequence
  Description of Artificial Sequence: Synthetic oligonucleotide
  Target: LAMA2; (-) strand; PAM type: YTN; PAM sequence: TTA
ttctacagtcattaacttgg

SEQ ID NO: 198835 - DNA, 20 bp, Artificial Sequence
  Description of Artificial Sequence: Synthetic oligonucleotide
  Target: LAMA2; (-) strand; PAM type: YTN; PAM sequence: TTT
attctacagtcattaacttg

SEQ ID NO: 198836 - DNA, 20 bp, Artificial Sequence
  Description of Artificial Sequence: Synthetic oligonucleotide
  Target: LAMA2; (-) strand; PAM type: YTN; PAM sequence: CTG
caaatatcagtagaatttat

SEQ ID NO: 198837 - DNA, 20 bp, Artificial Sequence
  Description of Artificial Sequence: Synthetic oligonucleotide
  Target: LAMA2; (-) strand; PAM type: YTN; PAM sequence: CTA
gactgcaaatatcagtagaa

SEQ ID NO: 198838 - DNA, 20 bp, Artificial Sequence
  Description of Artificial Sequence: Synthetic oligonucleotide
  Target: LAMA2; (-) strand; PAM type: YTN; PAM sequence: TTG
atgacactagactgcaaata

SEQ ID NO: 198839 - DNA, 20 bp, Artificial Sequence
  Description of Artificial Sequence: Synthetic oligonucleotide
  Target: LAMA2; (-) strand; PAM type: YTN; PAM sequence: CTT
gatgacactagactgcaaat

SEQ ID NO: 198840 - DNA, 20 bp, Artificial Sequence
  Description of Artificial Sequence: Synthetic oligonucleotide
  Target: LAMA2; (-) strand; PAM type: YTN; PAM sequence: TTA
gccttgatgacactagactg

SEQ ID NO: 198841 - DNA, 20 bp, Artificial Sequence
  Description of Artificial Sequence: Synthetic oligonucleotide
  Target: LAMA2; (-) strand; PAM type: YTN; PAM sequence: TTA
aaggagaattagccttgatg

SEQ ID NO: 198842 - DNA, 20 bp, Artificial Sequence
  Description of Artificial Sequence: Synthetic oligonucleotide
  Target: LAMA2; (-) strand; PAM type: YTN; PAM sequence: TTT
aaaggagaattagccttgat

SEQ ID NO: 198843 - DNA, 20 bp, Artificial Sequence
  Description of Artificial Sequence: Synthetic oligonucleotide
  Target: LAMA2; (-) strand; PAM type: YTN; PAM sequence: CTT
taaaggagaattagccttga

SEQ ID NO: 198844 - DNA, 20 bp, Artificial Sequence
  Description of Artificial Sequence: Synthetic oligonucleotide
  Target: LAMA2; (-) strand; PAM type: YTN; PAM sequence: CTC
tttaaaggagaattagcctt

SEQ ID NO: 198845 - DNA, 20 bp, Artificial Sequence
  Description of Artificial Sequence: Synthetic oligonucleotide
  Target: LAMA2; (-) strand; PAM type: YTN; PAM sequence: TTG
cctctttaaaggagaattag

SEQ ID NO: 198846 - DNA, 20 bp, Artificial Sequence
  Description of Artificial Sequence: Synthetic oligonucleotide
  Target: LAMA2; (-) strand; PAM type: YTN; PAM sequence: TTT
gcctctttaaaggagaatta

SEQ ID NO: 198847 - DNA, 20 bp, Artificial Sequence
  Description of Artificial Sequence: Synthetic oligonucleotide
  Target: LAMA2; (-) strand; PAM type: YTN; PAM sequence: TTT
tgcctctttaaaggagaatt

SEQ ID NO: 198848 - DNA, 20 bp, Artificial Sequence
  Description of Artificial Sequence: Synthetic oligonucleotide
  Target: LAMA2; (-) strand; PAM type: YTN; PAM sequence: CTT
ttgcctctttaaaggagaat

SEQ ID NO: 198849 - DNA, 20 bp, Artificial Sequence
  Description of Artificial Sequence: Synthetic oligonucleotide
  Target: LAMA2; (-) strand; PAM type: YTN; PAM sequence: TTG
gggacaataagaagcttttg

SEQ ID NO: 198850 - DNA, 20 bp, Artificial Sequence
  Description of Artificial Sequence: Synthetic oligonucleotide
  Target: LAMA2; (-) strand; PAM type: YTN; PAM sequence: TTT
ggggacaataagaagctttt

SEQ ID NO: 198851 - DNA, 20 bp, Artificial Sequence
  Description of Artificial Sequence: Synthetic oligonucleotide
  Target: LAMA2; (-) strand; PAM type: YTN; PAM sequence: TTT
tggggacaataagaagcttt

SEQ ID NO: 198852 - DNA, 20 bp, Artificial Sequence
  Description of Artificial Sequence: Synthetic oligonucleotide
  Target: LAMA2; (-) strand; PAM type: YTN; PAM sequence: CTA
tatcaacagttttggggaca

SEQ ID NO: 198853 - DNA, 20 bp, Artificial Sequence
  Description of Artificial Sequence: Synthetic oligonucleotide
  Target: LAMA2; (-) strand; PAM type: YTN; PAM sequence: TTA
catactatatcaacagtttt

SEQ ID NO: 198854 - DNA, 20 bp, Artificial Sequence
  Description of Artificial Sequence: Synthetic oligonucleotide
  Target: LAMA2; (-) strand; PAM type: YTN; PAM sequence: CTG
agttacatactatatcaaca

SEQ ID NO: 198855 - DNA, 20 bp, Artificial Sequence
  Description of Artificial Sequence: Synthetic oligonucleotide
  Target: LAMA2; (-) strand; PAM type: YTN; PAM sequence: CTG
tgacatgctgagttacatac

SEQ ID NO: 198856 - DNA, 20 bp, Artificial Sequence
  Description of Artificial Sequence: Synthetic oligonucleotide
  Target: LAMA2; (-) strand; PAM type: YTN; PAM sequence: TTC
tgtgacatgctgagttacat

SEQ ID NO: 198857 - DNA, 20 bp, Artificial Sequence
  Description of Artificial Sequence: Synthetic oligonucleotide
  Target: LAMA2; (-) strand; PAM type: YTN; PAM sequence: TTT
ctgtgacatgctgagttaca

SEQ ID NO: 198858 - DNA, 20 bp, Artificial Sequence
  Description of Artificial Sequence: Synthetic oligonucleotide
  Target: LAMA2; (-) strand; PAM type: YTN; PAM sequence: TTA
aacaaaatagccaaagtgga

SEQ ID NO: 198859 - DNA, 20 bp, Artificial Sequence
  Description of Artificial Sequence: Synthetic oligonucleotide
  Target: LAMA2; (-) strand; PAM type: YTN; PAM sequence: TTT
aaacaaaatagccaaagtgg

SEQ ID NO: 198860 - DNA, 20 bp, Artificial Sequence
  Description of Artificial Sequence: Synthetic oligonucleotide
  Target: LAMA2; (-) strand; PAM type: YTN; PAM sequence: TTT
taaacaaaatagccaaagtg

SEQ ID NO: 198861 - DNA, 20 bp, Artificial Sequence
  Description of Artificial Sequence: Synthetic oligonucleotide
  Target: LAMA2; (-) strand; PAM type: YTN; PAM sequence: TTT
ttaaacaaaatagccaaagt

SEQ ID NO: 198862 - DNA, 20 bp, Artificial Sequence
  Description of Artificial Sequence: Synthetic oligonucleotide
  Target: LAMA2; (-) strand; PAM type: YTN; PAM sequence: TTT
tttaaacaaaatagccaaag

SEQ ID NO: 198863 - DNA, 20 bp, Artificial Sequence
  Description of Artificial Sequence: Synthetic oligonucleotide
  Target: LAMA2; (-) strand; PAM type: YTN; PAM sequence: TTT
ttttaaacaaaatagccaaa

SEQ ID NO: 198864 - DNA, 20 bp, Artificial Sequence
  Description of Artificial Sequence: Synthetic oligonucleotide
  Target: LAMA2; (-) strand; PAM type: YTN; PAM sequence: TTT
tttttaaacaaaatagccaa

SEQ ID NO: 198865 - DNA, 20 bp, Artificial Sequence
  Description of Artificial Sequence: Synthetic oligonucleotide
  Target: LAMA2; (-) strand; PAM type: YTN; PAM sequence: TTA
aaaataaataaataaaaagg

SEQ ID NO: 198866 - DNA, 20 bp, Artificial Sequence
  Description of Artificial Sequence: Synthetic oligonucleotide
  Target: LAMA2; (-) strand; PAM type: YTN; PAM sequence: TTT
aaaaataaataaataaaaag

SEQ ID NO: 198867 - DNA, 20 bp, Artificial Sequence
  Description of Artificial Sequence: Synthetic oligonucleotide
  Target: LAMA2; (-) strand; PAM type: YTN; PAM sequence: TTA
tgaaatatagaaatttaaaa

SEQ ID NO: 198868 - DNA, 20 bp, Artificial Sequence
  Description of Artificial Sequence: Synthetic oligonucleotide
  Target: LAMA2; (-) strand; PAM type: YTN; PAM sequence: CTT
atgaaatatagaaatttaaa

SEQ ID NO: 198869 - DNA, 20 bp, Artificial Sequence
  Description of Artificial Sequence: Synthetic oligonucleotide
  Target: LAMA2; (-) strand; PAM type: YTN; PAM sequence: TTA
cttatgaaatatagaaattt

SEQ ID NO: 198870 - DNA, 20 bp, Artificial Sequence
  Description of Artificial Sequence: Synthetic oligonucleotide
  Target: LAMA2; (-) strand; PAM type: YTN; PAM sequence: TTT
acttatgaaatatagaaatt

SEQ ID NO: 198871 - DNA, 20 bp, Artificial Sequence
  Description of Artificial Sequence: Synthetic oligonucleotide
  Target: LAMA2; (-) strand; PAM type: YTN; PAM sequence: TTG
gtttacttatgaaatataga

SEQ ID NO: 198872 - DNA, 20 bp, Artificial Sequence
  Description of Artificial Sequence: Synthetic oligonucleotide
  Target: LAMA2; (-) strand; PAM type: YTN; PAM sequence: CTT
ggtttacttatgaaatatag

SEQ ID NO: 198873 - DNA, 20 bp, Artificial Sequence
  Description of Artificial Sequence: Synthetic oligonucleotide
  Target: LAMA2; (-) strand; PAM type: YTN; PAM sequence: TTG
aggcttggtttacttatgaa

SEQ ID NO: 198874 - DNA, 20 bp, Artificial Sequence
  Description of Artificial Sequence: Synthetic oligonucleotide
  Target: LAMA2; (-) strand; PAM type: YTN; PAM sequence: CTG
aaatgccgagtgttgaggct

SEQ ID NO: 198875 - DNA, 20 bp, Artificial Sequence
  Description of Artificial Sequence: Synthetic oligonucleotide
  Target: LAMA2; (-) strand; PAM type: YTN; PAM sequence: CTG
gcctgaaatgccgagtgttg

SEQ ID NO: 198876 - DNA, 20 bp, Artificial Sequence
  Description of Artificial Sequence: Synthetic oligonucleotide
  Target: LAMA2; (-) strand; PAM type: YTN; PAM sequence: CTG
tgtgagccaccatacctggc

SEQ ID NO: 198877 - DNA, 20 bp, Artificial Sequence
  Description of Artificial Sequence: Synthetic oligonucleotide
  Target: LAMA2; (-) strand; PAM type: YTN; PAM sequence: TTA
ccacacacctgtgtgagcca

SEQ ID NO: 198878 - DNA, 20 bp, Artificial Sequence
  Description of Artificial Sequence: Synthetic oligonucleotide
  Target: LAMA2; (-) strand; PAM type: YTN; PAM sequence: CTG
tgattaccacacacctgtgt

SEQ ID NO: 198879 - DNA, 20 bp, Artificial Sequence
  Description of Artificial Sequence: Synthetic oligonucleotide
  Target: LAMA2; (-) strand; PAM type: YTN; PAM sequence: CTC
ccaaagtgctgtgattacca

SEQ ID NO: 198880 - DNA, 20 bp, Artificial Sequence
  Description of Artificial Sequence: Synthetic oligonucleotide
  Target: LAMA2; (-) strand; PAM type: YTN; PAM sequence: CTG
cacaagcctcccaaagtgct

SEQ ID NO: 198881 - DNA, 20 bp, Artificial Sequence
  Description of Artificial Sequence: Synthetic oligonucleotide
  Target: LAMA2; (-) strand; PAM type: YTN; PAM sequence: CTC
ctgcacaagcctcccaaagt

SEQ ID NO: 198882 - DNA, 20 bp, Artificial Sequence
  Description of Artificial Sequence: Synthetic oligonucleotide
  Target: LAMA2; (-) strand; PAM type: YTN; PAM sequence: CTC
aagcgatcctcctgcacaag

SEQ ID NO: 198883 - DNA, 20 bp, Artificial Sequence
  Description of Artificial Sequence: Synthetic oligonucleotide
  Target: LAMA2; (-) strand; PAM type: YTN; PAM sequence: CTG
gcctcaagcgatcctcctgc

SEQ ID NO: 198884 - DNA, 20 bp, Artificial Sequence
  Description of Artificial Sequence: Synthetic oligonucleotide
  Target: LAMA2; (-) strand; PAM type: YTN; PAM sequence: CTC
ctggcctcaagcgatcctcc

SEQ ID NO: 198885 - DNA, 20 bp, Artificial Sequence
  Description of Artificial Sequence: Synthetic oligonucleotide
  Target: LAMA2; (-) strand; PAM type: YTN; PAM sequence: CTC
gaactcctggcctcaagcga

SEQ ID NO: 198886 - DNA, 20 bp, Artificial Sequence
  Description of Artificial Sequence: Synthetic oligonucleotide
  Target: LAMA2; (-) strand; PAM type: YTN; PAM sequence: TTA
gcctcgaactcctggcctca

SEQ ID NO: 198887 - DNA, 20 bp, Artificial Sequence
  Description of Artificial Sequence: Synthetic oligonucleotide
  Target: LAMA2; (-) strand; PAM type: YTN; PAM sequence: TTG
cacaggttagcctcgaactc

SEQ ID NO: 198888 - DNA, 20 bp, Artificial Sequence
  Description of Artificial Sequence: Synthetic oligonucleotide
  Target: LAMA2; (-) strand; PAM type: YTN; PAM sequence: CTC
cccatgttgcacaggttagc

SEQ ID NO: 198889 - DNA, 20 bp, Artificial Sequence
  Description of Artificial Sequence: Synthetic oligonucleotide
  Target: LAMA2; (-) strand; PAM type: YTN; PAM sequence: CTA
gaggcagggtctccccatgt

SEQ ID NO: 198890 - DNA, 20 bp, Artificial Sequence
  Description of Artificial Sequence: Synthetic oligonucleotide
  Target: LAMA2; (-) strand; PAM type: YTN; PAM sequence: CTC
tagaggcagggtctccccat

SEQ ID NO: 198891 - DNA, 20 bp, Artificial Sequence
  Description of Artificial Sequence: Synthetic oligonucleotide
  Target: LAMA2; (-) strand; PAM type: YTN; PAM sequence: TTC
tctagaggcagggtctcccc

SEQ ID NO: 198892 - DNA, 20 bp, Artificial Sequence
  Description of Artificial Sequence: Synthetic oligonucleotide
  Target: LAMA2; (-) strand; PAM type: YTN; PAM sequence: TTT
ctctagaggcagggtctccc

SEQ ID NO: 198893 - DNA, 20 bp, Artificial Sequence
  Description of Artificial Sequence: Synthetic oligonucleotide
  Target: LAMA2; (-) strand; PAM type: YTN; PAM sequence: TTT
tctctagaggcagggtctcc

SEQ ID NO: 198894 - DNA, 20 bp, Artificial Sequence
  Description of Artificial Sequence: Synthetic oligonucleotide
  Target: LAMA2; (-) strand; PAM type: YTN; PAM sequence: TTC
attttctctagaggcagggt

SEQ ID NO: 198895 - DNA, 20 bp, Artificial Sequence
  Description of Artificial Sequence: Synthetic oligonucleotide
  Target: LAMA2; (-) strand; PAM type: YTN; PAM sequence: TTT
cattttctctagaggcaggg

SEQ ID NO: 198896 - DNA, 20 bp, Artificial Sequence
  Description of Artificial Sequence: Synthetic oligonucleotide
  Target: LAMA2; (-) strand; PAM type: YTN; PAM sequence: TTT
tcattttctctagaggcagg

SEQ ID NO: 198897 - DNA, 20 bp, Artificial Sequence
  Description of Artificial Sequence: Synthetic oligonucleotide
  Target: LAMA2; (-) strand; PAM type: YTN; PAM sequence: TTT
ttcattttctctagaggcag

SEQ ID NO: 198898 - DNA, 20 bp, Artificial Sequence
  Description of Artificial Sequence: Synthetic oligonucleotide
  Target: LAMA2; (-) strand; PAM type: YTN; PAM sequence: TTA
tttttcattttctctagagg

SEQ ID NO: 198899 - DNA, 20 bp, Artificial Sequence
  Description of Artificial Sequence: Synthetic oligonucleotide
  Target: LAMA2; (-) strand; PAM type: YTN; PAM sequence: CTA
attatttttcattttctcta

SEQ ID NO: 198900 - DNA, 20 bp, Artificial Sequence
  Description of Artificial Sequence: Synthetic oligonucleotide
  Target: LAMA2; (-) strand; PAM type: YTN; PAM sequence: CTG
cctaattatttttcattttc

SEQ ID NO: 198901 - DNA, 20 bp, Artificial Sequence
  Description of Artificial Sequence: Synthetic oligonucleotide
  Target: LAMA2; (-) strand; PAM type: YTN; PAM sequence: CTA
tgcctgcctaattatttttc

SEQ ID NO: 198902 - DNA, 20 bp, Artificial Sequence
  Description of Artificial Sequence: Synthetic oligonucleotide
  Target: LAMA2; (-) strand; PAM type: YTN; PAM sequence: CTA
cagacatgtgccactatgcc

SEQ ID NO: 198903 - DNA, 20 bp, Artificial Sequence
  Description of Artificial Sequence: Synthetic oligonucleotide
  Target: LAMA2; (-) strand; PAM type: YTN; PAM sequence: CTC
gagtatcagggactacagac

SEQ ID NO: 198904 - DNA, 20 bp, Artificial Sequence
  Description of Artificial Sequence: Synthetic oligonucleotide
  Target: LAMA2; (-) strand; PAM type: YTN; PAM sequence: CTC
tcgagtatcagggactacag

SEQ ID NO: 198905 - DNA, 20 bp, Artificial Sequence
  Description of Artificial Sequence: Synthetic oligonucleotide
  Target: LAMA2; (-) strand; PAM type: YTN; PAM sequence: CTC
agcctctcgagtatcaggga

SEQ ID NO: 198906 - DNA, 20 bp, Artificial Sequence
  Description of Artificial Sequence: Synthetic oligonucleotide
  Target: LAMA2; (-) strand; PAM type: YTN; PAM sequence: CTC
ccacctcagcctctcgagta

SEQ ID NO: 198907 - DNA, 20 bp, Artificial Sequence
  Description of Artificial Sequence: Synthetic oligonucleotide
  Target: LAMA2; (-) strand; PAM type: YTN; PAM sequence: TTC
tcccacctcagcctctcgag

SEQ ID NO: 198908 - DNA, 20 bp, Artificial Sequence
  Description of Artificial Sequence: Synthetic oligonucleotide
  Target: LAMA2; (-) strand; PAM type: YTN; PAM sequence: CTC
aagcaattctcccacctcag

SEQ ID NO: 198909 - DNA, 20 bp, Artificial Sequence
  Description of Artificial Sequence: Synthetic oligonucleotide
  Target: LAMA2; (-) strand; PAM type: YTN; PAM sequence: CTG
gactcaagcaattctcccac

SEQ ID NO: 198910 - DNA, 20 bp, Artificial Sequence
  Description of Artificial Sequence: Synthetic oligonucleotide
  Target: LAMA2; (-) strand; PAM type: YTN; PAM sequence: CTC
ctggactcaagcaattctcc

SEQ ID NO: 198911 - DNA, 20 bp, Artificial Sequence
  Description of Artificial Sequence: Synthetic oligonucleotide
  Target: LAMA2; (-) strand; PAM type: YTN; PAM sequence: CTC
aaactcctggactcaagcaa

SEQ ID NO: 198912 - DNA, 20 bp, Artificial Sequence
  Description of Artificial Sequence: Synthetic oligonucleotide
  Target: LAMA2; (-) strand; PAM type: YTN; PAM sequence: CTG
cagcctcaaactcctggact

SEQ ID NO: 198913 - DNA, 20 bp, Artificial Sequence
  Description of Artificial Sequence: Synthetic oligonucleotide
  Target: LAMA2; (-) strand; PAM type: YTN; PAM sequence: CTC
actgcagcctcaaactcctg

SEQ ID NO: 198914 - DNA, 20 bp, Artificial Sequence
  Description of Artificial Sequence: Synthetic oligonucleotide
  Target: LAMA2; (-) strand; PAM type: YTN; PAM sequence: CTG
gagcacagtggcaagatcat

SEQ ID NO: 198915 - DNA, 20 bp, Artificial Sequence
  Description of Artificial Sequence: Synthetic oligonucleotide
  Target: LAMA2; (-) strand; PAM type: YTN; PAM sequence: TTG
cccaggctggagcacagtgg

SEQ ID NO: 198916 - DNA, 20 bp, Artificial Sequence
  Description of Artificial Sequence: Synthetic oligonucleotide
  Target: LAMA2; (-) strand; PAM type: YTN; PAM sequence: CTC
cattgcccaggctggagcac

SEQ ID NO: 198917 - DNA, 20 bp, Artificial Sequence
  Description of Artificial Sequence: Synthetic oligonucleotide
  Target: LAMA2; (-) strand; PAM type: YTN; PAM sequence: TTG
ctccattgcccaggctggag

SEQ ID NO: 198918 - DNA, 20 bp, Artificial Sequence
  Description of Artificial Sequence: Synthetic oligonucleotide
  Target: LAMA2; (-) strand; PAM type: YTN; PAM sequence: CTT
gctccattgcccaggctgga

SEQ ID NO: 198919 - DNA, 20 bp, Artificial Sequence
  Description of Artificial Sequence: Synthetic oligonucleotide
  Target: LAMA2; (-) strand; PAM type: YTN; PAM sequence: TTC
aagacagggtcttgctccat

SEQ ID NO: 198920 - DNA, 20 bp, Artificial Sequence
  Description of Artificial Sequence: Synthetic oligonucleotide
  Target: LAMA2; (-) strand; PAM type: YTN; PAM sequence: TTT
caagacagggtcttgctcca

SEQ ID NO: 198921 - DNA, 20 bp, Artificial Sequence
  Description of Artificial Sequence: Synthetic oligonucleotide
  Target: LAMA2; (-) strand; PAM type: YTN; PAM sequence: TTT
tcaagacagggtcttgctcc

SEQ ID NO: 198922 - DNA, 20 bp, Artificial Sequence
  Description of Artificial Sequence: Synthetic oligonucleotide
  Target: LAMA2; (-) strand; PAM type: YTN; PAM sequence: TTT
ttcaagacagggtcttgctc

SEQ ID NO: 198923 - DNA, 20 bp, Artificial Sequence
  Description of Artificial Sequence: Synthetic oligonucleotide
  Target: LAMA2; (-) strand; PAM type: YTN; PAM sequence: TTT
tttcaagacagggtcttgct

SEQ ID NO: 198924 - DNA, 20 bp, Artificial Sequence
  Description of Artificial Sequence: Synthetic oligonucleotide
  Target: LAMA2; (-) strand; PAM type: YTN; PAM sequence: CTT
ttttcaagacagggtcttgc

SEQ ID NO: 198925 - DNA, 20 bp, Artificial Sequence
  Description of Artificial Sequence: Synthetic oligonucleotide
  Target: LAMA2; (-) strand; PAM type: YTN; PAM sequence: TTC
ttttttcaagacagggtctt

SEQ ID NO: 198926 - DNA, 20 bp, Artificial Sequence
  Description of Artificial Sequence: Synthetic oligonucleotide
  Target: LAMA2; (-) strand; PAM type: YTN; PAM sequence: TTT
cttttttcaagacagggtct

SEQ ID NO: 198927 - DNA, 20 bp, Artificial Sequence
  Description of Artificial Sequence: Synthetic oligonucleotide
  Target: LAMA2; (-) strand; PAM type: YTN; PAM sequence: TTT
tcttttttcaagacagggtc

SEQ ID NO: 198928 - DNA, 20 bp, Artificial Sequence
  Description of Artificial Sequence: Synthetic oligonucleotide
  Target: LAMA2; (-) strand; PAM type: YTN; PAM sequence: TTG
ttttcttttttcaagacagg

SEQ ID NO: 198929 - DNA, 20 bp, Artificial Sequence
  Description of Artificial Sequence: Synthetic oligonucleotide
  Target: LAMA2; (-) strand; PAM type: YTN; PAM sequence: TTT
gttttcttttttcaagacag

SEQ ID NO: 198930 - DNA, 20 bp, Artificial Sequence
  Description of Artificial Sequence: Synthetic oligonucleotide
  Target: LAMA2; (-) strand; PAM type: YTN; PAM sequence: TTT
tgttttcttttttcaagaca

SEQ ID NO: 198931 - DNA, 20 bp, Artificial Sequence
  Description of Artificial Sequence: Synthetic oligonucleotide
  Target: LAMA2; (-) strand; PAM type: YTN; PAM sequence: TTT
ttgttttcttttttcaagac

SEQ ID NO: 198932 - DNA, 20 bp, Artificial Sequence
  Description of Artificial Sequence: Synthetic oligonucleotide
  Target: LAMA2; (-) strand; PAM type: YTN; PAM sequence: TTG
tttttgttttcttttttcaa

SEQ ID NO: 198933 - DNA, 20 bp, Artificial Sequence
  Description of Artificial Sequence: Synthetic oligonucleotide
  Target: LAMA2; (-) strand; PAM type: YTN; PAM sequence: TTT
gtttttgttttcttttttca

SEQ ID NO: 198934 - DNA, 20 bp, Artificial Sequence
  Description of Artificial Sequence: Synthetic oligonucleotide
  Target: LAMA2; (-) strand; PAM type: YTN; PAM sequence: TTG
aaatggtttgtttttgtttt

SEQ ID NO: 198935 - DNA, 20 bp, Artificial Sequence
  Description of Artificial Sequence: Synthetic oligonucleotide
  Target: LAMA2; (-) strand; PAM type: YTN; PAM sequence: TTT
gaaatggtttgtttttgttt

SEQ ID NO: 198936 - DNA, 20 bp, Artificial Sequence
  Description of Artificial Sequence: Synthetic oligonucleotide
  Target: LAMA2; (-) strand; PAM type: YTN; PAM sequence: TTG
aatttgaaatggtttgtttt

SEQ ID NO: 198937 - DNA, 20 bp, Artificial Sequence
  Description of Artificial Sequence: Synthetic oligonucleotide
  Target: LAMA2; (-) strand; PAM type: YTN; PAM sequence: TTT
gaatttgaaatggtttgttt

SEQ ID NO: 198938 - DNA, 20 bp, Artificial Sequence
  Description of Artificial Sequence: Synthetic oligonucleotide
  Target: LAMA2; (-) strand; PAM type: YTN; PAM sequence: TTC
agaaaaatatgtttgaattt

SEQ ID NO: 198939 - DNA, 20 bp, Artificial Sequence
  Description of Artificial Sequence: Synthetic oligonucleotide
  Target: LAMA2; (-) strand; PAM type: YTN; PAM sequence: TTA
attcagaaaaatatgtttga

SEQ ID NO: 198940 - DNA, 20 bp, Artificial Sequence
  Description of Artificial Sequence: Synthetic oligonucleotide
  Target: LAMA2; (-) strand; PAM type: YTN; PAM sequence: TTT
aattcagaaaaatatgtttg

SEQ ID NO: 198941 - DNA, 20 bp, Artificial Sequence
  Description of Artificial Sequence: Synthetic oligonucleotide
  Target: LAMA2; (-) strand; PAM type: YTN; PAM sequence: TTT
taattcagaaaaatatgttt

SEQ ID NO: 198942 - DNA, 20 bp, Artificial Sequence
  Description of Artificial Sequence: Synthetic oligonucleotide
  Target: LAMA2; (-) strand; PAM type: YTN; PAM sequence: TTT
ttaattcagaaaaatatgtt

SEQ ID NO: 198943 - DNA, 20 bp, Artificial Sequence
  Description of Artificial Sequence: Synthetic oligonucleotide
  Target: LAMA2; (-) strand; PAM type: YTN; PAM sequence: TTT
tttaattcagaaaaatatgt

SEQ ID NO: 198944 - DNA, 20 bp, Artificial Sequence
  Description of Artificial Sequence: Synthetic oligonucleotide
  Target: LAMA2; (-) strand; PAM type: YTN; PAM sequence: CTT
ttttaattcagaaaaatatg

SEQ ID NO: 198945 - DNA, 20 bp, Artificial Sequence
  Description of Artificial Sequence: Synthetic oligonucleotide
  Target: LAMA2; (-) strand; PAM type: YTN; PAM sequence: TTC
ttttttaattcagaaaaata

SEQ ID NO: 198946 - DNA, 20 bp, Artificial Sequence
  Description of Artificial Sequence: Synthetic oligonucleotide
  Target: LAMA2; (-) strand; PAM type: YTN; PAM sequence: TTT
cttttttaattcagaaaaat

SEQ ID NO: 198947 - DNA, 20 bp, Artificial Sequence
  Description of Artificial Sequence: Synthetic oligonucleotide
  Target: LAMA2; (-) strand; PAM type: YTN; PAM sequence: TTT
tcttttttaattcagaaaaa

SEQ ID NO: 198948 - DNA, 20 bp, Artificial Sequence
  Description of Artificial Sequence: Synthetic oligonucleotide
  Target: LAMA2; (-) strand; PAM type: YTN; PAM sequence: TTT
ttcttttttaattcagaaaa

SEQ ID NO: 198949 - DNA, 20 bp, Artificial Sequence
  Description of Artificial Sequence: Synthetic oligonucleotide
  Target: LAMA2; (-) strand; PAM type: YTN; PAM sequence: TTT
tttcttttttaattcagaaa

SEQ ID NO: 198950 - DNA, 20 bp, Artificial Sequence
  Description of Artificial Sequence: Synthetic oligonucleotide
  Target: LAMA2; (-) strand; PAM type: YTN; PAM sequence: TTA
aagagagtattttttctttt

SEQ ID NO: 198951 - DNA, 20 bp, Artificial Sequence
  Description of Artificial Sequence: Synthetic oligonucleotide
  Target: LAMA2; (-) strand; PAM type: YTN; PAM sequence: CTT
aaagagagtattttttcttt

SEQ ID NO: 198952 - DNA, 20 bp, Artificial Sequence
  Description of Artificial Sequence: Synthetic oligonucleotide
  Target: LAMA2; (-) strand; PAM type: YTN; PAM sequence: TTC
atatacttaaagagagtatt

SEQ ID NO: 198953 - DNA, 20 bp, Artificial Sequence
  Description of Artificial Sequence: Synthetic oligonucleotide
  Target: LAMA2; (-) strand; PAM type: YTN; PAM sequence: TTT
catatacttaaagagagtat

SEQ ID NO: 198954 - DNA, 20 bp, Artificial Sequence
  Description of Artificial Sequence: Synthetic oligonucleotide
  Target: LAMA2; (-) strand; PAM type: YTN; PAM sequence: TTT
tcatatacttaaagagagta

SEQ ID NO: 198955 - DNA, 20 bp, Artificial Sequence
  Description of Artificial Sequence: Synthetic oligonucleotide
  Target: LAMA2; (-) strand; PAM type: YTN; PAM sequence: TTT
ttcatatacttaaagagagt

SEQ ID NO: 198956 - DNA, 20 bp, Artificial Sequence
  Description of Artificial Sequence: Synthetic oligonucleotide
  Target: LAMA2; (-) strand; PAM type: YTN; PAM sequence: CTT
tttcatatacttaaagagag

SEQ ID NO: 198957 - DNA, 20 bp, Artificial Sequence
  Description of Artificial Sequence: Synthetic oligonucleotide
  Target: LAMA2; (-) strand; PAM type: YTN; PAM sequence: TTG
ctttttcatatacttaaaga

SEQ ID NO: 198958 - DNA, 20 bp, Artificial Sequence
  Description of Artificial Sequence: Synthetic oligonucleotide
  Target: LAMA2; (-) strand; PAM type: YTN; PAM sequence: TTT
gctttttcatatacttaaag

SEQ ID NO: 198959 - DNA, 20 bp, Artificial Sequence
  Description of Artificial Sequence: Synthetic oligonucleotide
  Target: LAMA2; (-) strand; PAM type: YTN; PAM sequence: CTA
ggaaagatatttgctttttc

SEQ ID NO: 198960 - DNA, 20 bp, Artificial Sequence
  Description of Artificial Sequence: Synthetic oligonucleotide
  Target: LAMA2; (-) strand; PAM type: YTN; PAM sequence: CTC
taggaaagatatttgctttt

SEQ ID NO: 198961 - DNA, 20 bp, Artificial Sequence
  Description of Artificial Sequence: Synthetic oligonucleotide
  Target: LAMA2; (-) strand; PAM type: YTN; PAM sequence: TTA
aaatgtaatatactctagga

SEQ ID NO: 198962 - DNA, 20 bp, Artificial Sequence
  Description of Artificial Sequence: Synthetic oligonucleotide
  Target: LAMA2; (-) strand; PAM type: YTN; PAM sequence: CTG
ttaaaatgtaatatactcta

SEQ ID NO: 198963 - DNA, 20 bp, Artificial Sequence
  Description of Artificial Sequence: Synthetic oligonucleotide
  Target: LAMA2; (-) strand; PAM type: YTN; PAM sequence: TTC
aagagctgttaaaatgtaat

SEQ ID NO: 198964 - DNA, 20 bp, Artificial Sequence
  Description of Artificial Sequence: Synthetic oligonucleotide
  Target: LAMA2; (-) strand; PAM type: YTN; PAM sequence: TTT
caagagctgttaaaatgtaa

SEQ ID NO: 198965 - DNA, 20 bp, Artificial Sequence
  Description of Artificial Sequence: Synthetic oligonucleotide
  Target: LAMA2; (-) strand; PAM type: YTN; PAM sequence: TTT
tcaagagctgttaaaatgta

SEQ ID NO: 198966 - DNA, 20 bp, Artificial Sequence
  Description of Artificial Sequence: Synthetic oligonucleotide
  Target: LAMA2; (-) strand; PAM type: YTN; PAM sequence: CTG
aattttcaagagctgttaaa

SEQ ID NO: 198967 - DNA, 20 bp, Artificial Sequence
  Description of Artificial Sequence: Synthetic oligonucleotide
  Target: LAMA2; (-) strand; PAM type: YTN; PAM sequence: TTA
actgaattttcaagagctgt

SEQ ID NO: 198968 - DNA, 20 bp, Artificial Sequence
  Description of Artificial Sequence: Synthetic oligonucleotide
  Target: LAMA2; (-) strand; PAM type: YTN; PAM sequence: CTT
aactgaattttcaagagctg

SEQ ID NO: 198969 - DNA, 20 bp, Artificial Sequence
  Description of Artificial Sequence: Synthetic oligonucleotide
  Target: LAMA2; (-) strand; PAM type: YTN; PAM sequence: CTA
gaccacttaactgaattttc

SEQ ID NO: 198970 - DNA, 20 bp, Artificial Sequence
  Description of Artificial Sequence: Synthetic oligonucleotide
  Target: LAMA2; (-) strand; PAM type: YTN; PAM sequence: TTA
ccacaagcactagaccactt

SEQ ID NO: 198971 - DNA, 20 bp, Artificial Sequence
  Description of Artificial Sequence: Synthetic oligonucleotide
  Target: LAMA2; (-) strand; PAM type: YTN; PAM sequence: CTA
acatccagattaccacaagc

SEQ ID NO: 198972 - DNA, 20 bp, Artificial Sequence
  Description of Artificial Sequence: Synthetic oligonucleotide
  Target: LAMA2; (-) strand; PAM type: YTN; PAM sequence: TTA
gctaacatccagattaccac

SEQ ID NO: 198973 - DNA, 20 bp, Artificial Sequence
  Description of Artificial Sequence: Synthetic oligonucleotide
  Target: LAMA2; (-) strand; PAM type: YTN; PAM sequence: TTG
ttagctaacatccagattac

SEQ ID NO: 198974 - DNA, 20 bp, Artificial Sequence
  Description of Artificial Sequence: Synthetic oligonucleotide
  Target: LAMA2; (-) strand; PAM type: YTN; PAM sequence: CTT
gttagctaacatccagatta

SEQ ID NO: 198975 - DNA, 20 bp, Artificial Sequence
  Description of Artificial Sequence: Synthetic oligonucleotide
  Target: LAMA2; (-) strand; PAM type: YTN; PAM sequence: TTC
ttgttagctaacatccagat

SEQ ID NO: 198976 - DNA, 20 bp, Artificial Sequence
  Description of Artificial Sequence: Synthetic oligonucleotide
  Target: LAMA2; (-) strand; PAM type: YTN; PAM sequence: TTA
ttcttgttagctaacatcca

SEQ ID NO: 198977 - DNA, 20 bp, Artificial Sequence
  Description of Artificial Sequence: Synthetic oligonucleotide
  Target: LAMA2; (-) strand; PAM type: YTN; PAM sequence: TTT
attcttgttagctaacatcc

SEQ ID NO: 198978 - DNA, 20 bp, Artificial Sequence
  Description of Artificial Sequence: Synthetic oligonucleotide
  Target: LAMA2; (-) strand; PAM type: YTN; PAM sequence: TTT
tattcttgttagctaacatc

SEQ ID NO: 198979 - DNA, 20 bp, Artificial Sequence
  Description of Artificial Sequence: Synthetic oligonucleotide
  Target: LAMA2; (-) strand; PAM type: YTN; PAM sequence: TTT
ttattcttgttagctaacat

SEQ ID NO: 198980 - DNA, 20 bp, Artificial Sequence
  Description of Artificial Sequence: Synthetic oligonucleotide
  Target: LAMA2; (-) strand; PAM type: YTN; PAM sequence: TTA
atttttattcttgttagcta

SEQ ID NO: 198981 - DNA, 20 bp, Artificial Sequence
  Description of Artificial Sequence: Synthetic oligonucleotide
  Target: LAMA2; (-) strand; PAM type: YTN; PAM sequence: TTG
ataacgtatggaattaattt

SEQ ID NO: 198982 - DNA, 20 bp, Artificial Sequence
  Description of Artificial Sequence: Synthetic oligonucleotide
  Target: LAMA2; (-) strand; PAM type: YTN; PAM sequence: CTG
ttgataacgtatggaattaa

SEQ ID NO: 198983 - DNA, 20 bp, Artificial Sequence
  Description of Artificial Sequence: Synthetic oligonucleotide
  Target: LAMA2; (-) strand; PAM type: YTN; PAM sequence: TTG
ctgttgataacgtatggaat

SEQ ID NO: 198984 - DNA, 20 bp, Artificial Sequence
  Description of Artificial Sequence: Synthetic oligonucleotide
  Target: LAMA2; (-) strand; PAM type: YTN; PAM sequence: TTT
gctgttgataacgtatggaa

SEQ ID NO: 198985 - DNA, 20 bp, Artificial Sequence
  Description of Artificial Sequence: Synthetic oligonucleotide
  Target: LAMA2; (-) strand; PAM type: YTN; PAM sequence: CTT
tgctgttgataacgtatgga

SEQ ID NO: 198986 - DNA, 20 bp, Artificial Sequence
  Description of Artificial Sequence: Synthetic oligonucleotide
  Target: LAMA2; (-) strand; PAM type: YTN; PAM sequence: TTC
tttgctgttgataacgtatg

SEQ ID NO: 198987 - DNA, 20 bp, Artificial Sequence
  Description of Artificial Sequence: Synthetic oligonucleotide
  Target: LAMA2; (-) strand; PAM type: YTN; PAM sequence: CTC
caaaattctttgctgttgat

SEQ ID NO: 198988 - DNA, 20 bp, Artificial Sequence
  Description of Artificial Sequence: Synthetic oligonucleotide
  Target: LAMA2; (-) strand; PAM type: YTN; PAM sequence: CTG
ctccaaaattctttgctgtt

SEQ ID NO: 198989 - DNA, 20 bp, Artificial Sequence
  Description of Artificial Sequence: Synthetic oligonucleotide
  Target: LAMA2; (-) strand; PAM type: YTN; PAM sequence: TTA
tggtagctgctccaaaattc

SEQ ID NO: 198990 - DNA, 20 bp, Artificial Sequence
  Description of Artificial Sequence: Synthetic oligonucleotide
  Target: LAMA2; (-) strand; PAM type: YTN; PAM sequence: TTT
atggtagctgctccaaaatt

SEQ ID NO: 198991 - DNA, 20 bp, Artificial Sequence
  Description of Artificial Sequence: Synthetic oligonucleotide
  Target: LAMA2; (-) strand; PAM type: YTN; PAM sequence: TTA
tttatggtagctgctccaaa

SEQ ID NO: 198992 - DNA, 20 bp, Artificial Sequence
  Description of Artificial Sequence: Synthetic oligonucleotide
  Target: LAMA2; (-) strand; PAM type: YTN; PAM sequence: CTT
atttatggtagctgctccaa

SEQ ID NO: 198993 - DNA, 20 bp, Artificial Sequence
  Description of Artificial Sequence: Synthetic oligonucleotide
  Target: LAMA2; (-) strand; PAM type: YTN; PAM sequence: TTC
ttatttatggtagctgctcc

SEQ ID NO: 198994 - DNA, 20 bp, Artificial Sequence
  Description of Artificial Sequence: Synthetic oligonucleotide
  Target: LAMA2; (-) strand; PAM type: YTN; PAM sequence: TTT
cttatttatggtagctgctc

SEQ ID NO: 198995 - DNA, 20 bp, Artificial Sequence
  Description of Artificial Sequence: Synthetic oligonucleotide
  Target: LAMA2; (-) strand; PAM type: YTN; PAM sequence: CTA
aagcagtttcttatttatgg

SEQ ID NO: 198996 - DNA, 20 bp, Artificial Sequence
  Description of Artificial Sequence: Synthetic oligonucleotide
  Target: LAMA2; (-) strand; PAM type: YTN; PAM sequence: CTC
cagcatctaaagcagtttct

SEQ ID NO: 198997 - DNA, 20 bp, Artificial Sequence
  Description of Artificial Sequence: Synthetic oligonucleotide
  Target: LAMA2; (-) strand; PAM type: YTN; PAM sequence: TTA
gatctccagcatctaaagca

SEQ ID NO: 198998 - DNA, 20 bp, Artificial Sequence
  Description of Artificial Sequence: Synthetic oligonucleotide
  Target: LAMA2; (-) strand; PAM type: YTN; PAM sequence: TTT
agatctccagcatctaaagc

SEQ ID NO: 198999 - DNA, 20 bp, Artificial Sequence
  Description of Artificial Sequence: Synthetic oligonucleotide
  Target: LAMA2; (-) strand; PAM type: YTN; PAM sequence: TTA
ccaaatttagatctccagca

SEQ ID NO: 199000 - DNA, 20 bp, Artificial Sequence
  Description of Artificial Sequence: Synthetic oligonucleotide
  Target: LAMA2; (-) strand; PAM type: YTN; PAM sequence: CTT
accaaatttagatctccagc

SEQ ID NO: 199001 - DNA, 20 bp, Artificial Sequence
  Description of Artificial Sequence: Synthetic oligonucleotide
  Target: LAMA2; (-) strand; PAM type: YTN; PAM sequence: TTA
tatcttaccaaatttagatc

SEQ ID NO: 199002 - DNA, 20 bp, Artificial Sequence
  Description of Artificial Sequence: Synthetic oligonucleotide
  Target: LAMA2; (-) strand; PAM type: YTN; PAM sequence: CTG
aaattatatcttaccaaatt

SEQ ID NO: 199003 - DNA, 20 bp, Artificial Sequence
  Description of Artificial Sequence: Synthetic oligonucleotide
  Target: LAMA2; (-) strand; PAM type: YTN; PAM sequence: TTG
agggctgaaattatatctta

SEQ ID NO: 199004 - DNA, 20 bp, Artificial Sequence
  Description of Artificial Sequence: Synthetic oligonucleotide
  Target: LAMA2; (-) strand; PAM type: YTN; PAM sequence: CTT
gagggctgaaattatatctt

SEQ ID NO: 199005 - DNA, 20 bp, Artificial Sequence
  Description of Artificial Sequence: Synthetic oligonucleotide
  Target: LAMA2; (-) strand; PAM type: YTN; PAM sequence: CTA
gatccttgagggctgaaatt

SEQ ID NO: 199006 - DNA, 20 bp, Artificial Sequence
  Description of Artificial Sequence: Synthetic oligonucleotide
  Target: LAMA2; (-) strand; PAM type: YTN; PAM sequence: TTA
acaaactagatccttgaggg

SEQ ID NO: 199007 - DNA, 20 bp, Artificial Sequence
  Description of Artificial Sequence: Synthetic oligonucleotide
  Target: LAMA2; (-) strand; PAM type: YTN; PAM sequence: CTT
aacaaactagatccttgagg

SEQ ID NO: 199008 - DNA, 20 bp, Artificial Sequence
  Description of Artificial Sequence: Synthetic oligonucleotide
  Target: LAMA2; (-) strand; PAM type: YTN; PAM sequence: TTC
ttaacaaactagatccttga

SEQ ID NO: 199009 - DNA, 20 bp, Artificial Sequence
  Description of Artificial Sequence: Synthetic oligonucleotide
  Target: LAMA2; (-) strand; PAM type: YTN; PAM sequence: TTT
cttaacaaactagatccttg

SEQ ID NO: 199010 - DNA, 20 bp, Artificial Sequence
  Description of Artificial Sequence: Synthetic oligonucleotide
  Target: LAMA2; (-) strand; PAM type: YTN; PAM sequence: CTA
tgtttcttaacaaactagat

SEQ ID NO: 199011 - DNA, 20 bp, Artificial Sequence
  Description of Artificial Sequence: Synthetic oligonucleotide
  Target: LAMA2; (-) strand; PAM type: YTN; PAM sequence: TTA
tgatgcctatgtttcttaac

SEQ ID NO: 199012 - DNA, 20 bp, Artificial Sequence
  Description of Artificial Sequence: Synthetic oligonucleotide
  Target: LAMA2; (-) strand; PAM type: YTN; PAM sequence: TTG
ttatgatgcctatgtttctt

SEQ ID NO: 199013 - DNA, 20 bp, Artificial Sequence
  Description of Artificial Sequence: Synthetic oligonucleotide
  Target: LAMA2; (-) strand; PAM type: YTN; PAM sequence: TTT
gttatgatgcctatgtttct

SEQ ID NO: 199014 - DNA, 20 bp, Artificial Sequence
  Description of Artificial Sequence: Synthetic oligonucleotide
  Target: LAMA2; (-) strand; PAM type: YTN; PAM sequence: TTA
tttgttatgatgcctatgtt

SEQ ID NO: 199015 - DNA, 20 bp, Artificial Sequence
  Description of Artificial Sequence: Synthetic oligonucleotide
  Target: LAMA2; (-) strand; PAM type: YTN; PAM sequence: TTT
atttgttatgatgcctatgt

SEQ ID NO: 199016 - DNA, 20 bp, Artificial Sequence
  Description of Artificial Sequence: Synthetic oligonucleotide
  Target: LAMA2; (-) strand; PAM type: YTN; PAM sequence: TTC
aagaacatttatttgttatg

SEQ ID NO: 199017 - DNA, 20 bp, Artificial Sequence
  Description of Artificial Sequence: Synthetic oligonucleotide
  Target: LAMA2; (-) strand; PAM type: YTN; PAM sequence: TTG
aattcaagaacatttatttg

SEQ ID NO: 199018 - DNA, 20 bp, Artificial Sequence
  Description of Artificial Sequence: Synthetic oligonucleotide
  Target: LAMA2; (-) strand; PAM type: YTN; PAM sequence: TTT
gaattcaagaacatttattt

SEQ ID NO: 199019 - DNA, 20 bp, Artificial Sequence
  Description of Artificial Sequence: Synthetic oligonucleotide
  Target: LAMA2; (-) strand; PAM type: YTN; PAM sequence: TTT
tgaattcaagaacatttatt

SEQ ID NO: 199020 - DNA, 20 bp, Artificial Sequence
  Description of Artificial Sequence: Synthetic oligonucleotide
  Target: LAMA2; (-) strand; PAM type: YTN; PAM sequence: TTT
ttgaattcaagaacatttat

SEQ ID NO: 199021 - DNA, 20 bp, Artificial Sequence
  Description of Artificial Sequence: Synthetic oligonucleotide
  Target: LAMA2; (-) strand; PAM type: YTN; PAM sequence: TTT
tttgaattcaagaacattta

SEQ ID NO: 199022 - DNA, 20 bp, Artificial Sequence
  Description of Artificial Sequence: Synthetic oligonucleotide
  Target: LAMA2; (-) strand; PAM type: YTN; PAM sequence: TTT
ttttgaattcaagaacattt

SEQ ID NO: 199023 - DNA, 20 bp, Artificial Sequence
  Description of Artificial Sequence: Synthetic oligonucleotide
  Target: LAMA2; (-) strand; PAM type: YTN; PAM sequence: TTT
tttttgaattcaagaacatt

SEQ ID NO: 199024 - DNA, 20 bp, Artificial Sequence
  Description of Artificial Sequence: Synthetic oligonucleotide
  Target: LAMA2; (-) strand; PAM type: YTN; PAM sequence: TTA
attttttttgaattcaagaa

SEQ ID NO: 199025 - DNA, 20 bp, Artificial Sequence
  Description of Artificial Sequence: Synthetic oligonucleotide
  Target: LAMA2; (-) strand; PAM type: YTN; PAM sequence: TTT
aattttttttgaattcaaga

SEQ ID NO: 199026 - DNA, 20 bp, Artificial Sequence
  Description of Artificial Sequence: Synthetic oligonucleotide
  Target: LAMA2; (-) strand; PAM type: YTN; PAM sequence: CTT
taattttttttgaattcaag

SEQ ID NO: 199027 - DNA, 20 bp, Artificial Sequence
  Description of Artificial Sequence: Synthetic oligonucleotide
  Target: LAMA2; (-) strand; PAM type: YTN; PAM sequence: CTG
aacaatcaagctttaatttt

SEQ ID NO: 199028 - DNA, 20 bp, Artificial Sequence
  Description of Artificial Sequence: Synthetic oligonucleotide
  Target: LAMA2; (-) strand; PAM type: YTN; PAM sequence: TTC
tgaacaatcaagctttaatt

SEQ ID NO: 199029 - DNA, 20 bp, Artificial Sequence
  Description of Artificial Sequence: Synthetic oligonucleotide
  Target: LAMA2; (-) strand; PAM type: YTN; PAM sequence: TTT
ctgaacaatcaagctttaat

SEQ ID NO: 199030 - DNA, 20 bp, Artificial Sequence
  Description of Artificial Sequence: Synthetic oligonucleotide
  Target: LAMA2; (-) strand; PAM type: YTN; PAM sequence: CTT
tctgaacaatcaagctttaa

SEQ ID NO: 199031 - DNA, 20 bp, Artificial Sequence
  Description of Artificial Sequence: Synthetic oligonucleotide
  Target: LAMA2; (-) strand; PAM type: YTN; PAM sequence: TTG
ctttctgaacaatcaagctt

SEQ ID NO: 199032 - DNA, 20 bp, Artificial Sequence
  Description of Artificial Sequence: Synthetic oligonucleotide
  Target: LAMA2; (-) strand; PAM type: YTN; PAM sequence: CTA
aatatagatgaaattgcttt

SEQ ID NO: 199033 - DNA, 20 bp, Artificial Sequence
  Description of Artificial Sequence: Synthetic oligonucleotide
  Target: LAMA2; (-) strand; PAM type: YTN; PAM sequence: CTC
ctaaatatagatgaaattgc

SEQ ID NO: 199034 - DNA, 20 bp, Artificial Sequence
  Description of Artificial Sequence: Synthetic oligonucleotide
  Target: LAMA2; (-) strand; PAM type: YTN; PAM sequence: CTG
taaacatctcctaaatatag

SEQ ID NO: 199035 - DNA, 20 bp, Artificial Sequence
  Description of Artificial Sequence: Synthetic oligonucleotide
  Target: LAMA2; (-) strand; PAM type: YTN; PAM sequence: TTA
taaaatataacacctgtaaa

SEQ ID NO: 199036 - DNA, 20 bp, Artificial Sequence
  Description of Artificial Sequence: Synthetic oligonucleotide
  Target: LAMA2; (-) strand; PAM type: YTN; PAM sequence: CTG
cattataaaatataacacct

SEQ ID NO: 199037 - DNA, 20 bp, Artificial Sequence
  Description of Artificial Sequence: Synthetic oligonucleotide
  Target: LAMA2; (-) strand; PAM type: YTN; PAM sequence: CTC
agatctgcattataaaatat

SEQ ID NO: 199038 - DNA, 20 bp, Artificial Sequence
  Description of Artificial Sequence: Synthetic oligonucleotide
  Target: LAMA2; (-) strand; PAM type: YTN; PAM sequence: TTG
tacaaaaagtgaactcagat

SEQ ID NO: 199039 - DNA, 20 bp, Artificial Sequence
  Description of Artificial Sequence: Synthetic oligonucleotide
  Target: LAMA2; (-) strand; PAM type: YTN; PAM sequence: CTT
gtacaaaaagtgaactcaga

SEQ ID NO: 199040 - DNA, 20 bp, Artificial Sequence
  Description of Artificial Sequence: Synthetic oligonucleotide
  Target: LAMA2; (-) strand; PAM type: YTN; PAM sequence: CTA
cttgtacaaaaagtgaactc

SEQ ID NO: 199041 - DNA, 20 bp, Artificial Sequence
  Description of Artificial Sequence: Synthetic oligonucleotide
  Target: LAMA2; (-) strand; PAM type: YTN; PAM sequence: TTC
tacttgtacaaaaagtgaac

SEQ ID NO: 199042 - DNA, 20 bp, Artificial Sequence
  Description of Artificial Sequence: Synthetic oligonucleotide
  Target: LAMA2; (-) strand; PAM type: YTN; PAM sequence: CTT
ctacttgtacaaaaagtgaa

SEQ ID NO: 199043 - DNA, 20 bp, Artificial Sequence
  Description of Artificial Sequence: Synthetic oligonucleotide
  Target: LAMA2; (-) strand; PAM type: YTN; PAM sequence: CTC
ttctacttgtacaaaaagtg

SEQ ID NO: 199044 - DNA, 20 bp, Artificial Sequence
  Description of Artificial Sequence: Synthetic oligonucleotide
  Target: LAMA2; (-) strand; PAM type: YTN; PAM sequence: TTA
atataaaagtgtgactcttc

SEQ ID NO: 199045 - DNA, 20 bp, Artificial Sequence
  Description of Artificial Sequence: Synthetic oligonucleotide
  Target: LAMA2; (-) strand; PAM type: YTN; PAM sequence: CTA
ttaatataaaagtgtgactc

SEQ ID NO: 199046 - DNA, 20 bp, Artificial Sequence
  Description of Artificial Sequence: Synthetic oligonucleotide
  Target: LAMA2; (-) strand; PAM type: YTN; PAM sequence: TTA
tcactattaatataaaagtg

SEQ ID NO: 199047 - DNA, 20 bp, Artificial Sequence
  Description of Artificial Sequence: Synthetic oligonucleotide
  Target: LAMA2; (-) strand; PAM type: YTN; PAM sequence: TTA
ataatattatcactattaat

SEQ ID NO: 199048 - DNA, 20 bp, Artificial Sequence
  Description of Artificial Sequence: Synthetic oligonucleotide
  Target: LAMA2; (-) strand; PAM type: YTN; PAM sequence: CTA
ggacagtacatggaagaaat

SEQ ID NO: 199049 - DNA, 20 bp, Artificial Sequence
  Description of Artificial Sequence: Synthetic oligonucleotide
  Target: LAMA2; (-) strand; PAM type: YTN; PAM sequence: CTA
ggaataagtaaaatatctag

SEQ ID NO: 199050 - DNA, 20 bp, Artificial Sequence
  Description of Artificial Sequence: Synthetic oligonucleotide
  Target: LAMA2; (-) strand; PAM type: YTN; PAM sequence: TTC
taggaataagtaaaatatct

SEQ ID NO: 199051 - DNA, 20 bp, Artificial Sequence
  Description of Artificial Sequence: Synthetic oligonucleotide
  Target: LAMA2; (-) strand; PAM type: YTN; PAM sequence: CTA
taaaattctaggaataagta

SEQ ID NO: 199052 - DNA, 20 bp, Artificial Sequence
  Description of Artificial Sequence: Synthetic oligonucleotide
  Target: LAMA2; (-) strand; PAM type: YTN; PAM sequence: TTC
tataaaattctaggaataag

SEQ ID NO: 199053 - DNA, 20 bp, Artificial Sequence
  Description of Artificial Sequence: Synthetic oligonucleotide
  Target: LAMA2; (-) strand; PAM type: YTN; PAM sequence: CTA
ttctataaaattctaggaat

SEQ ID NO: 199054 - DNA, 20 bp, Artificial Sequence
  Description of Artificial Sequence: Synthetic oligonucleotide
  Target: LAMA2; (-) strand; PAM type: YTN; PAM sequence: CTA
acataagcaaaatgacctat

SEQ ID NO: 199055 - DNA, 20 bp, Artificial Sequence
  Description of Artificial Sequence: Synthetic oligonucleotide
  Target: LAMA2; (-) strand; PAM type: YTN; PAM sequence: CTG
aaggctaacataagcaaaat

SEQ ID NO: 199056 - DNA, 20 bp, Artificial Sequence
  Description of Artificial Sequence: Synthetic oligonucleotide
  Target: LAMA2; (-) strand; PAM type: YTN; PAM sequence: CTG
caactgaaggctaacataag

SEQ ID NO: 199057 - DNA, 20 bp, Artificial Sequence
  Description of Artificial Sequence: Synthetic oligonucleotide
  Target: LAMA2; (-) strand; PAM type: YTN; PAM sequence: CTA
tcacctgcaactgaaggcta

SEQ ID NO: 199058 - DNA, 20 bp, Artificial Sequence
  Description of Artificial Sequence: Synthetic oligonucleotide
  Target: LAMA2; (-) strand; PAM type: YTN; PAM sequence: TTC
tatcacctgcaactgaaggc

SEQ ID NO: 199059 - DNA, 20 bp, Artificial Sequence
  Description of Artificial Sequence: Synthetic oligonucleotide
  Target: LAMA2; (-) strand; PAM type: YTN; PAM sequence: TTT
ctatcacctgcaactgaagg

SEQ ID NO: 199060 - DNA, 20 bp, Artificial Sequence
  Description of Artificial Sequence: Synthetic oligonucleotide
  Target: LAMA2; (-) strand; PAM type: YTN; PAM sequence: TTG
gatttctatcacctgcaact

SEQ ID NO: 199061 - DNA, 20 bp, Artificial Sequence
  Description of Artificial Sequence: Synthetic oligonucleotide
  Target: LAMA2; (-) strand; PAM type: YTN; PAM sequence: TTT
ggatttctatcacctgcaac

SEQ ID NO: 199062 - DNA, 20 bp, Artificial Sequence
  Description of Artificial Sequence: Synthetic oligonucleotide
  Target: LAMA2; (-) strand; PAM type: YTN; PAM sequence: CTC
aatttggatttctatcacct

SEQ ID NO: 199063 - DNA, 20 bp, Artificial Sequence
  Description of Artificial Sequence: Synthetic oligonucleotide
  Target: LAMA2; (-) strand; PAM type: YTN; PAM sequence: CTG
gacagatcaatagaggtgtc

SEQ ID NO: 199064 - DNA, 20 bp, Artificial Sequence
  Description of Artificial Sequence: Synthetic oligonucleotide
  Target: LAMA2; (-) strand; PAM type: YTN; PAM sequence: TTC
cctggacagatcaatagagg

SEQ ID NO: 199065 - DNA, 20 bp, Artificial Sequence
  Description of Artificial Sequence: Synthetic oligonucleotide
  Target: LAMA2; (-) strand; PAM type: YTN; PAM sequence: CTT
ccctggacagatcaatagag

SEQ ID NO: 199066 - DNA, 20 bp, Artificial Sequence
  Description of Artificial Sequence: Synthetic oligonucleotide
  Target: LAMA2; (-) strand; PAM type: YTN; PAM sequence: CTG
tacttccctggacagatcaa

SEQ ID NO: 199067 - DNA, 20 bp, Artificial Sequence
  Description of Artificial Sequence: Synthetic oligonucleotide
  Target: LAMA2; (-) strand; PAM type: YTN; PAM sequence: CTC
tgtacttccctggacagatc

SEQ ID NO: 199068 - DNA, 20 bp, Artificial Sequence
  Description of Artificial Sequence: Synthetic oligonucleotide
  Target: LAMA2; (-) strand; PAM type: YTN; PAM sequence: CTC
ctctgtacttccctggacag

SEQ ID NO: 199069 - DNA, 20 bp, Artificial Sequence
  Description of Artificial Sequence: Synthetic oligonucleotide
  Target: LAMA2; (-) strand; PAM type: YTN; PAM sequence: CTA
aggcaggtctcctctgtact

SEQ ID NO: 199070 - DNA, 20 bp, Artificial Sequence
  Description of Artificial Sequence: Synthetic oligonucleotide
  Target: LAMA2; (-) strand; PAM type: YTN; PAM sequence: CTG
gtcaacagatggctaaggca

SEQ ID NO: 199071 - DNA, 20 bp, Artificial Sequence
  Description of Artificial Sequence: Synthetic oligonucleotide
  Target: LAMA2; (-) strand; PAM type: YTN; PAM sequence: CTC
tggtcaacagatggctaagg

SEQ ID NO: 199072 - DNA, 20 bp, Artificial Sequence
  Description of Artificial Sequence: Synthetic oligonucleotide
  Target: LAMA2; (-) strand; PAM type: YTN; PAM sequence: TTG
gtcctctggtcaacagatgg

SEQ ID NO: 199073 - DNA, 20 bp, Artificial Sequence
  Description of Artificial Sequence: Synthetic oligonucleotide
  Target: LAMA2; (-) strand; PAM type: YTN; PAM sequence: TTG
atgtgattggtcctctggtc

SEQ ID NO: 199074 - DNA, 20 bp, Artificial Sequence
  Description of Artificial Sequence: Synthetic oligonucleotide
  Target: LAMA2; (-) strand; PAM type: YTN; PAM sequence: CTG
ttgatgtgattggtcctctg

SEQ ID NO: 199075 - DNA, 20 bp, Artificial Sequence
  Description of Artificial Sequence: Synthetic oligonucleotide
  Target: LAMA2; (-) strand; PAM type: YTN; PAM sequence: TTA
gaagagagaggggagagtcc

SEQ ID NO: 199076 - DNA, 20 bp, Artificial Sequence
  Description of Artificial Sequence: Synthetic oligonucleotide
  Target: LAMA2; (-) strand; PAM type: YTN; PAM sequence: CTT
agaagagagaggggagagtc

SEQ ID NO: 199077 - DNA, 20 bp, Artificial Sequence
  Description of Artificial Sequence: Synthetic oligonucleotide
  Target: LAMA2; (-) strand; PAM type: YTN; PAM sequence: CTA
gtgaaaataaagacaacaaa

SEQ ID NO: 199078 - DNA, 20 bp, Artificial Sequence
  Description of Artificial Sequence: Synthetic oligonucleotide
  Target: LAMA2; (-) strand; PAM type: YTN; PAM sequence: TTA
cagagaaaaccctagtgaaa

SEQ ID NO: 199079 - DNA, 20 bp, Artificial Sequence
  Description of Artificial Sequence: Synthetic oligonucleotide
  Target: LAMA2; (-) strand; PAM type: YTN; PAM sequence: CTT
acagagaaaaccctagtgaa

SEQ ID NO: 199080 - DNA, 20 bp, Artificial Sequence
  Description of Artificial Sequence: Synthetic oligonucleotide
  Target: LAMA2; (-) strand; PAM type: YTN; PAM sequence: TTA
ggcaccttacagagaaaacc

SEQ ID NO: 199081 - DNA, 20 bp, Artificial Sequence
  Description of Artificial Sequence: Synthetic oligonucleotide
  Target: LAMA2; (-) strand; PAM type: YTN; PAM sequence: TTT
aggcaccttacagagaaaac

SEQ ID NO: 199082 - DNA, 20 bp, Artificial Sequence
  Description of Artificial Sequence: Synthetic oligonucleotide
  Target: LAMA2; (-) strand; PAM type: YTN; PAM sequence: TTT
taggcaccttacagagaaaa

SEQ ID NO: 199083 - DNA, 20 bp, Artificial Sequence
  Description of Artificial Sequence: Synthetic oligonucleotide
  Target: LAMA2; (-) strand; PAM type: YTN; PAM sequence: CTA
gtagccattttaggcacctt

SEQ ID NO: 199084 - DNA, 20 bp, Artificial Sequence
  Description of Artificial Sequence: Synthetic oligonucleotide
  Target: LAMA2; (-) strand; PAM type: YTN; PAM sequence: CTA
ctagtagccattttaggcac

SEQ ID NO: 199085 - DNA, 20 bp, Artificial Sequence
  Description of Artificial Sequence: Synthetic oligonucleotide
  Target: LAMA2; (-) strand; PAM type: YTN; PAM sequence: CTG
tagctactagtagccatttt

SEQ ID NO: 199086 - DNA, 20 bp, Artificial Sequence
  Description of Artificial Sequence: Synthetic oligonucleotide
  Target: LAMA2; (-) strand; PAM type: YTN; PAM sequence: CTA
aacctgtagctactagtagc

SEQ ID NO: 199087 - DNA, 20 bp, Artificial Sequence
  Description of Artificial Sequence: Synthetic oligonucleotide
  Target: LAMA2; (-) strand; PAM type: YTN; PAM sequence: CTA
aggaccaggtcctaaacctg

SEQ ID NO: 199088 - DNA, 20 bp, Artificial Sequence
  Description of Artificial Sequence: Synthetic oligonucleotide
  Target: LAMA2; (-) strand; PAM type: YTN; PAM sequence: CTG
ctaaggaccaggtcctaaac

SEQ ID NO: 199089 - DNA, 20 bp, Artificial Sequence
  Description of Artificial Sequence: Synthetic oligonucleotide
  Target: LAMA2; (-) strand; PAM type: YTN; PAM sequence: TTA
aactgctaaggaccaggtcc

SEQ ID NO: 199090 - DNA, 20 bp, Artificial Sequence
  Description of Artificial Sequence: Synthetic oligonucleotide
  Target: LAMA2; (-) strand; PAM type: YTN; PAM sequence: TTT
aaactgctaaggaccaggtc

SEQ ID NO: 199091 - DNA, 20 bp, Artificial Sequence
  Description of Artificial Sequence: Synthetic oligonucleotide
  Target: LAMA2; (-) strand; PAM type: YTN; PAM sequence: CTC
cgatttaaactgctaaggac

SEQ ID NO: 199092 - DNA, 20 bp, Artificial Sequence
  Description of Artificial Sequence: Synthetic oligonucleotide
  Target: LAMA2; (-) strand; PAM type: YTN; PAM sequence: CTC
ctccgatttaaactgctaag

SEQ ID NO: 199093 - DNA, 20 bp, Artificial Sequence
  Description of Artificial Sequence: Synthetic oligonucleotide
  Target: LAMA2; (-) strand; PAM type: YTN; PAM sequence: TTC
ctcctccgatttaaactgct

SEQ ID NO: 199094 - DNA, 20 bp, Artificial Sequence
  Description of Artificial Sequence: Synthetic oligonucleotide
  Target: LAMA2; (-) strand; PAM type: YTN; PAM sequence: TTT
cctcctccgatttaaactgc

SEQ ID NO: 199095 - DNA, 20 bp, Artificial Sequence
  Description of Artificial Sequence: Synthetic oligonucleotide
  Target: LAMA2; (-) strand; PAM type: YTN; PAM sequence: TTT
tcctcctccgatttaaactg

SEQ ID NO: 199096 - DNA, 20 bp, Artificial Sequence
  Description of Artificial Sequence: Synthetic oligonucleotide
  Target: LAMA2; (-) strand; PAM type: YTN; PAM sequence: TTT
ttcctcctccgatttaaact

SEQ ID NO: 199097 - DNA, 20 bp, Artificial Sequence
  Description of Artificial Sequence: Synthetic oligonucleotide
  Target: LAMA2; (-) strand; PAM type: YTN; PAM sequence: TTA
agaacaggaggtatttttcc

SEQ ID NO: 199098 - DNA, 20 bp, Artificial Sequence
  Description of Artificial Sequence: Synthetic oligonucleotide
  Target: LAMA2; (-) strand; PAM type: YTN; PAM sequence: TTT
aagaacaggaggtatttttc

SEQ ID NO: 199099 - DNA, 20 bp, Artificial Sequence
  Description of Artificial Sequence: Synthetic oligonucleotide
  Target: LAMA2; (-) strand; PAM type: YTN; PAM sequence: CTT
taagaacaggaggtattttt

SEQ ID NO: 199100 - DNA, 20 bp, Artificial Sequence
  Description of Artificial Sequence: Synthetic oligonucleotide
  Target: LAMA2; (-) strand; PAM type: YTN; PAM sequence: TTA
atagggactttaagaacagg

SEQ ID NO: 199101 - DNA, 20 bp, Artificial Sequence
  Description of Artificial Sequence: Synthetic oligonucleotide
  Target: LAMA2; (-) strand; PAM type: YTN; PAM sequence: TTG
ggcccatcacccatgcaagg

SEQ ID NO: 199102 - DNA, 20 bp, Artificial Sequence
  Description of Artificial Sequence: Synthetic oligonucleotide
  Target: LAMA2; (-) strand; PAM type: YTN; PAM sequence: CTA
catggttgggcccatcaccc

SEQ ID NO: 199103 - DNA, 20 bp, Artificial Sequence
  Description of Artificial Sequence: Synthetic oligonucleotide
  Target: LAMA2; (-) strand; PAM type: YTN; PAM sequence: TTC
ctacatggttgggcccatca

SEQ ID NO: 199104 - DNA, 20 bp, Artificial Sequence
  Description of Artificial Sequence: Synthetic oligonucleotide
  Target: LAMA2; (-) strand; PAM type: YTN; PAM sequence: CTG
tgttcctacatggttgggcc

SEQ ID NO: 199105 - DNA, 20 bp, Artificial Sequence
  Description of Artificial Sequence: Synthetic oligonucleotide
  Target: LAMA2; (-) strand; PAM type: YTN; PAM sequence: CTG
ccctgtgttcctacatggtt

SEQ ID NO: 199106 - DNA, 20 bp, Artificial Sequence
  Description of Artificial Sequence: Synthetic oligonucleotide
  Target: LAMA2; (-) strand; PAM type: YTN; PAM sequence: CTA
agctgccctgtgttcctaca

SEQ ID NO: 199107 - DNA, 20 bp, Artificial Sequence
  Description of Artificial Sequence: Synthetic oligonucleotide
  Target: LAMA2; (-) strand; PAM type: YTN; PAM sequence: TTA
tggaaatgtgacctaagctg

SEQ ID NO: 199108 - DNA, 20 bp, Artificial Sequence
  Description of Artificial Sequence: Synthetic oligonucleotide
  Target: LAMA2; (-) strand; PAM type: YTN; PAM sequence: TTT
atggaaatgtgacctaagct

SEQ ID NO: 199109 - DNA, 20 bp, Artificial Sequence
  Description of Artificial Sequence: Synthetic oligonucleotide
  Target: LAMA2; (-) strand; PAM type: YTN; PAM sequence: CTG
atatttatggaaatgtgacc

SEQ ID NO: 199110 - DNA, 20 bp, Artificial Sequence
  Description of Artificial Sequence: Synthetic oligonucleotide
  Target: LAMA2; (-) strand; PAM type: YTN; PAM sequence: CTC
tgatatttatggaaatgtga

SEQ ID NO: 199111 - DNA, 20 bp, Artificial Sequence
  Description of Artificial Sequence: Synthetic oligonucleotide
  Target: LAMA2; (-) strand; PAM type: YTN; PAM sequence: TTC
tctgatatttatggaaatgt

SEQ ID NO: 199112 - DNA, 20 bp, Artificial Sequence
  Description of Artificial Sequence: Synthetic oligonucleotide
  Target: LAMA2; (-) strand; PAM type: YTN; PAM sequence: CTT
ctctgatatttatggaaatg

SEQ ID NO: 199113 - DNA, 20 bp, Artificial Sequence
  Description of Artificial Sequence: Synthetic oligonucleotide
  Target: LAMA2; (-) strand; PAM type: YTN; PAM sequence: CTA
tgaaatacatatcaggcaat

SEQ ID NO: 199114 - DNA, 20 bp, Artificial Sequence
  Description of Artificial Sequence: Synthetic oligonucleotide
  Target: LAMA2; (-) strand; PAM type: YTN; PAM sequence: CTA
gctatgaaatacatatcagg

SEQ ID NO: 199115 - DNA, 20 bp, Artificial Sequence
  Description of Artificial Sequence: Synthetic oligonucleotide
  Target: LAMA2; (-) strand; PAM type: YTN; PAM sequence: TTG
ctagctatgaaatacatatc

SEQ ID NO: 199116 - DNA, 20 bp, Artificial Sequence
  Description of Artificial Sequence: Synthetic oligonucleotide
  Target: LAMA2; (-) strand; PAM type: YTN; PAM sequence: TTT
gctagctatgaaatacatat

SEQ ID NO: 199117 - DNA, 20 bp, Artificial Sequence
  Description of Artificial Sequence: Synthetic oligonucleotide
  Target: LAMA2; (-) strand; PAM type: YTN; PAM sequence: TTG
tcatttgctagctatgaaat

SEQ ID NO: 199118 - DNA, 20 bp, Artificial Sequence
  Description of Artificial Sequence: Synthetic oligonucleotide
  Target: LAMA2; (-) strand; PAM type: YTN; PAM sequence: TTC
cagttgtcatttgctagcta

SEQ ID NO: 199119 - DNA, 20 bp, Artificial Sequence
  Description of Artificial Sequence: Synthetic oligonucleotide
  Target: LAMA2; (-) strand; PAM type: YTN; PAM sequence: TTC
aattccagttgtcatttgct

SEQ ID NO: 199120 - DNA, 20 bp, Artificial Sequence
  Description of Artificial Sequence: Synthetic oligonucleotide
  Target: LAMA2; (-) strand; PAM type: YTN; PAM sequence: CTT
caattccagttgtcatttgc

SEQ ID NO: 199121 - DNA, 20 bp, Artificial Sequence
  Description of Artificial Sequence: Synthetic oligonucleotide
  Target: LAMA2; (-) strand; PAM type: YTN; PAM sequence: CTC
ggaagaagcatggacttcaa

SEQ ID NO: 199122 - DNA, 20 bp, Artificial Sequence
  Description of Artificial Sequence: Synthetic oligonucleotide
  Target: LAMA2; (-) strand; PAM type: YTN; PAM sequence: TTA
gagggacagtgatcactcgg

SEQ ID NO: 199123 - DNA, 20 bp, Artificial Sequence
  Description of Artificial Sequence: Synthetic oligonucleotide
  Target: LAMA2; (-) strand; PAM type: YTN; PAM sequence: CTC
aattagagggacagtgatca

SEQ ID NO: 199124 - DNA, 20 bp, Artificial Sequence
  Description of Artificial Sequence: Synthetic oligonucleotide
  Target: LAMA2; (-) strand; PAM type: YTN; PAM sequence: TTG
aaaggtactcaattagaggg

SEQ ID NO: 199125 - DNA, 20 bp, Artificial Sequence
  Description of Artificial Sequence: Synthetic oligonucleotide
  Target: LAMA2; (-) strand; PAM type: YTN; PAM sequence: TTC
aattgaaaggtactcaatta

SEQ ID NO: 199126 - DNA, 20 bp, Artificial Sequence
  Description of Artificial Sequence: Synthetic oligonucleotide
  Target: LAMA2; (-) strand; PAM type: YTN; PAM sequence: TTA
aagtaacgccaggaaacagg

SEQ ID NO: 199127 - DNA, 20 bp, Artificial Sequence
  Description of Artificial Sequence: Synthetic oligonucleotide
  Target: LAMA2; (-) strand; PAM type: YTN; PAM sequence: TTC
acacaaaattaaagtaacgc

SEQ ID NO: 199128 - DNA, 20 bp, Artificial Sequence
  Description of Artificial Sequence: Synthetic oligonucleotide
  Target: LAMA2; (-) strand; PAM type: YTN; PAM sequence: TTT
cacacaaaattaaagtaacg

SEQ ID NO: 199129 - DNA, 20 bp, Artificial Sequence
  Description of Artificial Sequence: Synthetic oligonucleotide
  Target: LAMA2; (-) strand; PAM type: YTN; PAM sequence: TTT
tcacacaaaattaaagtaac

SEQ ID NO: 199130 - DNA, 20 bp, Artificial Sequence
  Description of Artificial Sequence: Synthetic oligonucleotide
  Target: LAMA2; (-) strand; PAM type: YTN; PAM sequence: TTT
ttcacacaaaattaaagtaa

SEQ ID NO: 199131 - DNA, 20 bp, Artificial Sequence
  Description of Artificial Sequence: Synthetic oligonucleotide
  Target: LAMA2; (-) strand; PAM type: YTN; PAM sequence: TTA
aaatcaagaagatagttttt

SEQ ID NO: 199132 - DNA, 20 bp, Artificial Sequence
  Description of Artificial Sequence: Synthetic oligonucleotide
  Target: LAMA2; (-) strand; PAM type: YTN; PAM sequence: CTT
aaaatcaagaagatagtttt

SEQ ID NO: 199133 - DNA, 20 bp, Artificial Sequence
  Description of Artificial Sequence: Synthetic oligonucleotide
  Target: LAMA2; (-) strand; PAM type: YTN; PAM sequence: TTA
cttaaaatcaagaagatagt

SEQ ID NO: 199134 - DNA, 20 bp, Artificial Sequence
  Description of Artificial Sequence: Synthetic oligonucleotide
  Target: LAMA2; (-) strand; PAM type: YTN; PAM sequence: TTT
acttaaaatcaagaagatag

SEQ ID NO: 199135 - DNA, 20 bp, Artificial Sequence
  Description of Artificial Sequence: Synthetic oligonucleotide
  Target: LAMA2; (-) strand; PAM type: YTN; PAM sequence: TTT
tacttaaaatcaagaagata

SEQ ID NO: 199136 - DNA, 20 bp, Artificial Sequence
  Description of Artificial Sequence: Synthetic oligonucleotide
  Target: LAMA2; (-) strand; PAM type: YTN; PAM sequence: CTT
ttacttaaaatcaagaagat

SEQ ID NO: 199137 - DNA, 20 bp, Artificial Sequence
  Description of Artificial Sequence: Synthetic oligonucleotide
  Target: LAMA2; (-) strand; PAM type: YTN; PAM sequence: TTG
cttttacttaaaatcaagaa

SEQ ID NO: 199138 - DNA, 20 bp, Artificial Sequence
  Description of Artificial Sequence: Synthetic oligonucleotide
  Target: LAMA2; (-) strand; PAM type: YTN; PAM sequence: TTC
attgcttttacttaaaatca

SEQ ID NO: 199139 - DNA, 20 bp, Artificial Sequence
  Description of Artificial Sequence: Synthetic oligonucleotide
  Target: LAMA2; (-) strand; PAM type: YTN; PAM sequence: TTT
cattgcttttacttaaaatc

SEQ ID NO: 199140 - DNA, 20 bp, Artificial Sequence
  Description of Artificial Sequence: Synthetic oligonucleotide
  Target: LAMA2; (-) strand; PAM type: YTN; PAM sequence: TTT
tcattgcttttacttaaaat

SEQ ID NO: 199141 - DNA, 20 bp, Artificial Sequence
  Description of Artificial Sequence: Synthetic oligonucleotide
  Target: LAMA2; (-) strand; PAM type: YTN; PAM sequence: TTT
ttcattgcttttacttaaaa

SEQ ID NO: 199142 - DNA, 20 bp, Artificial Sequence
  Description of Artificial Sequence: Synthetic oligonucleotide
  Target: LAMA2; (-) strand; PAM type: YTN; PAM sequence: TTT
tttcattgcttttacttaaa

SEQ ID NO: 199143 - DNA, 20 bp, Artificial Sequence
  Description of Artificial Sequence: Synthetic oligonucleotide
  Target: LAMA2; (-) strand; PAM type: YTN; PAM sequence: CTT
ttttcattgcttttacttaa

SEQ ID NO: 199144 - DNA, 20 bp, Artificial Sequence
  Description of Artificial Sequence: Synthetic oligonucleotide
  Target: LAMA2; (-) strand; PAM type: YTN; PAM sequence: TTA
gagggccttttttcattgct

SEQ ID NO: 199145 - DNA, 20 bp, Artificial Sequence
  Description of Artificial Sequence: Synthetic oligonucleotide
  Target: LAMA2; (-) strand; PAM type: YTN; PAM sequence: TTG
tgagcagaaaatgttagagg

SEQ ID NO: 199146 - DNA, 20 bp, Artificial Sequence
  Description of Artificial Sequence: Synthetic oligonucleotide
  Target: LAMA2; (-) strand; PAM type: YTN; PAM sequence: TTT
gtgagcagaaaatgttagag

SEQ ID NO: 199147 - DNA, 20 bp, Artificial Sequence
  Description of Artificial Sequence: Synthetic oligonucleotide
  Target: LAMA2; (-) strand; PAM type: YTN; PAM sequence: TTT
tgtgagcagaaaatgttaga

SEQ ID NO: 199148 - DNA, 20 bp, Artificial Sequence
  Description of Artificial Sequence: Synthetic oligonucleotide
  Target: LAMA2; (-) strand; PAM type: YTN; PAM sequence: TTT
ttgtgagcagaaaatgttag

SEQ ID NO: 199149 - DNA, 20 bp, Artificial Sequence
  Description of Artificial Sequence: Synthetic oligonucleotide
  Target: LAMA2; (-) strand; PAM type: YTN; PAM sequence: TTT
tttgtgagcagaaaatgtta

SEQ ID NO: 199150 - DNA, 20 bp, Artificial Sequence
  Description of Artificial Sequence: Synthetic oligonucleotide
  Target: LAMA2; (-) strand; PAM type: YTN; PAM sequence: TTT
ttttgtgagcagaaaatgtt

SEQ ID NO: 199151 - DNA, 20 bp, Artificial Sequence
  Description of Artificial Sequence: Synthetic oligonucleotide
  Target: LAMA2; (-) strand; PAM type: YTN; PAM sequence: CTA
atttttttgtgagcagaaaa

SEQ ID NO: 199152 - DNA, 20 bp, Artificial Sequence
  Description of Artificial Sequence: Synthetic oligonucleotide
  Target: LAMA2; (-) strand; PAM type: YTN; PAM sequence: CTG
taaagctaatttttttgtga

SEQ ID NO: 199153 - DNA, 20 bp, Artificial Sequence
  Description of Artificial Sequence: Synthetic oligonucleotide
  Target: LAMA2; (-) strand; PAM type: YTN; PAM sequence: CTA
tctgtaaagctaattttttt

SEQ ID NO: 199154 - DNA, 20 bp, Artificial Sequence
  Description of Artificial Sequence: Synthetic oligonucleotide
  Target: LAMA2; (-) strand; PAM type: YTN; PAM sequence: CTA
ctatctgtaaagctaatttt

SEQ ID NO: 199155 - DNA, 20 bp, Artificial Sequence
  Description of Artificial Sequence: Synthetic oligonucleotide
  Target: LAMA2; (-) strand; PAM type: YTN; PAM sequence: CTG
atgaagtctactatctgtaa

SEQ ID NO: 199156 - DNA, 20 bp, Artificial Sequence
  Description of Artificial Sequence: Synthetic oligonucleotide
  Target: LAMA2; (-) strand; PAM type: YTN; PAM sequence: CTA
ctgatgaagtctactatctg

SEQ ID NO: 199157 - DNA, 20 bp, Artificial Sequence
  Description of Artificial Sequence: Synthetic oligonucleotide
  Target: LAMA2; (-) strand; PAM type: YTN; PAM sequence: CTG
tatctactgatgaagtctac

SEQ ID NO: 199158 - DNA, 20 bp, Artificial Sequence
  Description of Artificial Sequence: Synthetic oligonucleotide
  Target: LAMA2; (-) strand; PAM type: YTN; PAM sequence: TTA
aagactgtatctactgatga

SEQ ID NO: 199159 - DNA, 20 bp, Artificial Sequence
  Description of Artificial Sequence: Synthetic oligonucleotide
  Target: LAMA2; (-) strand; PAM type: YTN; PAM sequence: CTT
aaagactgtatctactgatg

SEQ ID NO: 199160 - DNA, 20 bp, Artificial Sequence
  Description of Artificial Sequence: Synthetic oligonucleotide
  Target: LAMA2; (-) strand; PAM type: YTN; PAM sequence: TTC
cttaaagactgtatctactg

SEQ ID NO: 199161 - DNA, 20 bp, Artificial Sequence
  Description of Artificial Sequence: Synthetic oligonucleotide
  Target: LAMA2; (-) strand; PAM type: YTN; PAM sequence: CTT
ccttaaagactgtatctact

SEQ ID NO: 199162 - DNA, 20 bp, Artificial Sequence
  Description of Artificial Sequence: Synthetic oligonucleotide
  Target: LAMA2; (-) strand; PAM type: YTN; PAM sequence: TTC
ttccttaaagactgtatcta

SEQ ID NO: 199163 - DNA, 20 bp, Artificial Sequence
  Description of Artificial Sequence: Synthetic oligonucleotide
  Target: LAMA2; (-) strand; PAM type: YTN; PAM sequence: TTT
cttccttaaagactgtatct

SEQ ID NO: 199164 - DNA, 20 bp, Artificial Sequence
  Description of Artificial Sequence: Synthetic oligonucleotide
  Target: LAMA2; (-) strand; PAM type: YTN; PAM sequence: TTT
tcttccttaaagactgtatc

SEQ ID NO: 199165 - DNA, 20 bp, Artificial Sequence
  Description of Artificial Sequence: Synthetic oligonucleotide
  Target: LAMA2; (-) strand; PAM type: YTN; PAM sequence: TTT
ttcttccttaaagactgtat

SEQ ID NO: 199166 - DNA, 20 bp, Artificial Sequence
  Description of Artificial Sequence: Synthetic oligonucleotide
  Target: LAMA2; (-) strand; PAM type: YTN; PAM sequence: CTA
tgtttttcttccttaaagac

SEQ ID NO: 199167 - DNA, 20 bp, Artificial Sequence
  Description of Artificial Sequence: Synthetic oligonucleotide
  Target: LAMA2; (-) strand; PAM type: YTN; PAM sequence: TTA
tacaaactatgtttttcttc

SEQ ID NO: 199168 - DNA, 20 bp, Artificial Sequence
  Description of Artificial Sequence: Synthetic oligonucleotide
  Target: LAMA2; (-) strand; PAM type: YTN; PAM sequence: TTT
atacaaactatgtttttctt

SEQ ID NO: 199169 - DNA, 20 bp, Artificial Sequence
  Description of Artificial Sequence: Synthetic oligonucleotide
  Target: LAMA2; (-) strand; PAM type: YTN; PAM sequence: TTT
tatacaaactatgtttttct

SEQ ID NO: 199170 - DNA, 20 bp, Artificial Sequence
  Description of Artificial Sequence: Synthetic oligonucleotide
  Target: LAMA2; (-) strand; PAM type: YTN; PAM sequence: TTA
catagtaaagggtatagtaa

SEQ ID NO: 199171 - DNA, 20 bp, Artificial Sequence
  Description of Artificial Sequence: Synthetic oligonucleotide
  Target: LAMA2; (-) strand; PAM type: YTN; PAM sequence: TTA
tagaatccaggagacattac

SEQ ID NO: 199172 - DNA, 20 bp, Artificial Sequence
  Description of Artificial Sequence: Synthetic oligonucleotide
  Target: LAMA2; (-) strand; PAM type: YTN; PAM sequence: TTA
ttatagaatccaggagacat

SEQ ID NO: 199173 - DNA, 20 bp, Artificial Sequence
  Description of Artificial Sequence: Synthetic oligonucleotide
  Target: LAMA2; (-) strand; PAM type: YTN; PAM sequence: TTG
gaagatggcaagcagaccac

SEQ ID NO: 199174 - DNA, 20 bp, Artificial Sequence
  Description of Artificial Sequence: Synthetic oligonucleotide
  Target: LAMA2; (-) strand; PAM type: YTN; PAM sequence: CTT
ggaagatggcaagcagacca

SEQ ID NO: 199175 - DNA, 20 bp, Artificial Sequence
  Description of Artificial Sequence: Synthetic oligonucleotide
  Target: LAMA2; (-) strand; PAM type: YTN; PAM sequence: TTC
aataaggggcacatcttgga

SEQ ID NO: 199176 - DNA, 20 bp, Artificial Sequence
  Description of Artificial Sequence: Synthetic oligonucleotide
  Target: LAMA2; (-) strand; PAM type: YTN; PAM sequence: TTT
caataaggggcacatcttgg

SEQ ID NO: 199177 - DNA, 20 bp, Artificial Sequence
  Description of Artificial Sequence: Synthetic oligonucleotide
  Target: LAMA2; (-) strand; PAM type: YTN; PAM sequence: TTT
tcaataaggggcacatcttg

SEQ ID NO: 199178 - DNA, 20 bp, Artificial Sequence
  Description of Artificial Sequence: Synthetic oligonucleotide
  Target: LAMA2; (-) strand; PAM type: YTN; PAM sequence: TTT
ttcaataaggggcacatctt

SEQ ID NO: 199179 - DNA, 20 bp, Artificial Sequence
  Description of Artificial Sequence: Synthetic oligonucleotide
  Target: LAMA2; (-) strand; PAM type: YTN; PAM sequence: TTT
tttcaataaggggcacatct

SEQ ID NO: 199180 - DNA, 20 bp, Artificial Sequence
  Description of Artificial Sequence: Synthetic oligonucleotide
  Target: LAMA2; (-) strand; PAM type: YTN; PAM sequence: TTG
ttttttcaataaggggcaca

SEQ ID NO: 199181 - DNA, 20 bp, Artificial Sequence
  Description of Artificial Sequence: Synthetic oligonucleotide
  Target: LAMA2; (-) strand; PAM type: YTN; PAM sequence: TTT
gttttttcaataaggggcac

SEQ ID NO: 199182 - DNA, 20 bp, Artificial Sequence
  Description of Artificial Sequence: Synthetic oligonucleotide
  Target: LAMA2; (-) strand; PAM type: YTN; PAM sequence: TTT
tgttttttcaataaggggca

SEQ ID NO: 199183 - DNA, 20 bp, Artificial Sequence
  Description of Artificial Sequence: Synthetic oligonucleotide
  Target: LAMA2; (-) strand; PAM type: YTN; PAM sequence: TTT
ttgttttttcaataaggggc

SEQ ID NO: 199184 - DNA, 20 bp, Artificial Sequence
  Description of Artificial Sequence: Synthetic oligonucleotide
  Target: LAMA2; (-) strand; PAM type: YTN; PAM sequence: TTG
tttttgttttttcaataagg

SEQ ID NO: 199185 - DNA, 20 bp, Artificial Sequence
  Description of Artificial Sequence: Synthetic oligonucleotide
  Target: LAMA2; (-) strand; PAM type: YTN; PAM sequence: TTT
gtttttgttttttcaataag

SEQ ID NO: 199186 - DNA, 20 bp, Artificial Sequence
  Description of Artificial Sequence: Synthetic oligonucleotide
  Target: LAMA2; (-) strand; PAM type: YTN; PAM sequence: TTT
tgtttttgttttttcaataa

SEQ ID NO: 199187 - DNA, 20 bp, Artificial Sequence
  Description of Artificial Sequence: Synthetic oligonucleotide
  Target: LAMA2; (-) strand; PAM type: YTN; PAM sequence: CTA
cagacataggttttgttttt

SEQ ID NO: 199188 - DNA, 20 bp, Artificial Sequence
  Description of Artificial Sequence: Synthetic oligonucleotide
  Target: LAMA2; (-) strand; PAM type: YTN; PAM sequence: TTA
aatgcacaaatatacatact

SEQ ID NO: 199189 - DNA, 20 bp, Artificial Sequence
  Description of Artificial Sequence: Synthetic oligonucleotide
  Target: LAMA2; (-) strand; PAM type: YTN; PAM sequence: TTT
aaatgcacaaatatacatac

SEQ ID NO: 199190 - DNA, 20 bp, Artificial Sequence
  Description of Artificial Sequence: Synthetic oligonucleotide
  Target: LAMA2; (-) strand; PAM type: YTN; PAM sequence: TTC
acacacacacacacacacac

SEQ ID NO: 199191 - DNA, 20 bp, Artificial Sequence
  Description of Artificial Sequence: Synthetic oligonucleotide
  Target: LAMA2; (-) strand; PAM type: YTN; PAM sequence: CTC
acacaaacaccatacatata

SEQ ID NO: 199192 - DNA, 20 bp, Artificial Sequence
  Description of Artificial Sequence: Synthetic oligonucleotide
  Target: LAMA2; (-) strand; PAM type: YTN; PAM sequence: CTC
tcacacaaacaccatacata

SEQ ID NO: 199193 - DNA, 20 bp, Artificial Sequence
  Description of Artificial Sequence: Synthetic oligonucleotide
  Target: LAMA2; (-) strand; PAM type: YTN; PAM sequence: TTG
cctctcacacaaacaccata

SEQ ID NO: 199194 - DNA, 20 bp, Artificial Sequence
  Description of Artificial Sequence: Synthetic oligonucleotide
  Target: LAMA2; (-) strand; PAM type: YTN; PAM sequence: TTT
gcctctcacacaaacaccat

SEQ ID NO: 199195 - DNA, 20 bp, Artificial Sequence
  Description of Artificial Sequence: Synthetic oligonucleotide
  Target: LAMA2; (-) strand; PAM type: YTN; PAM sequence: CTT
tgcctctcacacaaacacca

SEQ ID NO: 199196 - DNA, 20 bp, Artificial Sequence
  Description of Artificial Sequence: Synthetic oligonucleotide
  Target: LAMA2; (-) strand; PAM type: YTN; PAM sequence: CTC
tttgcctctcacacaaacac

SEQ ID NO: 199197 - DNA, 20 bp, Artificial Sequence
  Description of Artificial Sequence: Synthetic oligonucleotide
  Target: LAMA2; (-) strand; PAM type: YTN; PAM sequence: TTC
tctttgcctctcacacaaac

SEQ ID NO: 199198 - DNA, 20 bp, Artificial Sequence
  Description of Artificial Sequence: Synthetic oligonucleotide
  Target: LAMA2; (-) strand; PAM type: YTN; PAM sequence: CTT
ctctttgcctctcacacaaa

SEQ ID NO: 199199 - DNA, 20 bp, Artificial Sequence
  Description of Artificial Sequence: Synthetic oligonucleotide
  Target: LAMA2; (-) strand; PAM type: YTN; PAM sequence: CTC
ttctctttgcctctcacaca

SEQ ID NO: 199200 - DNA, 20 bp, Artificial Sequence
  Description of Artificial Sequence: Synthetic oligonucleotide
  Target: LAMA2; (-) strand; PAM type: YTN; PAM sequence: TTC
tcttctctttgcctctcaca

SEQ ID NO: 199201 - DNA, 20 bp, Artificial Sequence
  Description of Artificial Sequence: Synthetic oligonucleotide
  Target: LAMA2; (-) strand; PAM type: YTN; PAM sequence: TTT
ctcttctctttgcctctcac

SEQ ID NO: 199202 - DNA, 20 bp, Artificial Sequence
  Description of Artificial Sequence: Synthetic oligonucleotide
  Target: LAMA2; (-) strand; PAM type: YTN; PAM sequence: TTT
tctcttctctttgcctctca

SEQ ID NO: 199203 - DNA, 20 bp, Artificial Sequence
  Description of Artificial Sequence: Synthetic oligonucleotide
  Target: LAMA2; (-) strand; PAM type: YTN; PAM sequence: TTT
ttctcttctctttgcctctc

SEQ ID NO: 199204 - DNA, 20 bp, Artificial Sequence
  Description of Artificial Sequence: Synthetic oligonucleotide
  Target: LAMA2; (-) strand; PAM type: YTN; PAM sequence: TTT
tttctcttctctttgcctct

SEQ ID NO: 199205 - DNA, 20 bp, Artificial Sequence
  Description of Artificial Sequence: Synthetic oligonucleotide
  Target: LAMA2; (-) strand; PAM type: YTN; PAM sequence: CTT
ttttctcttctctttgcctc

SEQ ID NO: 199206 - DNA, 20 bp, Artificial Sequence
  Description of Artificial Sequence: Synthetic oligonucleotide
  Target: LAMA2; (-) strand; PAM type: YTN; PAM sequence: TTC
ttttttctcttctctttgcc

SEQ ID NO: 199207 - DNA, 20 bp, Artificial Sequence
  Description of Artificial Sequence: Synthetic oligonucleotide
  Target: LAMA2; (-) strand; PAM type: YTN; PAM sequence: CTA
acgtcattcttttttctctt

SEQ ID NO: 199208 - DNA, 20 bp, Artificial Sequence
  Description of Artificial Sequence: Synthetic oligonucleotide
  Target: LAMA2; (-) strand; PAM type: YTN; PAM sequence: TTG
ataagctaacgtcattcttt

SEQ ID NO: 199209 - DNA, 20 bp, Artificial Sequence
  Description of Artificial Sequence: Synthetic oligonucleotide
  Target: LAMA2; (-) strand; PAM type: YTN; PAM sequence: TTA
taatatattgataagctaac

SEQ ID NO: 199210 - DNA, 20 bp, Artificial Sequence
  Description of Artificial Sequence: Synthetic oligonucleotide
  Target: LAMA2; (-) strand; PAM type: YTN; PAM sequence: TTA
ttataatatattgataagct

SEQ ID NO: 199211 - DNA, 20 bp, Artificial Sequence
  Description of Artificial Sequence: Synthetic oligonucleotide
  Target: LAMA2; (-) strand; PAM type: YTN; PAM sequence: TTT
attataatatattgataagc

SEQ ID NO: 199212 - DNA, 20 bp, Artificial Sequence
  Description of Artificial Sequence: Synthetic oligonucleotide
  Target: LAMA2; (-) strand; PAM type: YTN; PAM sequence: TTT
tattataatatattgataag

SEQ ID NO: 199213 - DNA, 20 bp, Artificial Sequence
  Description of Artificial Sequence: Synthetic oligonucleotide
  Target: LAMA2; (-) strand; PAM type: YTN; PAM sequence: CTA
gtcaacacaattttattata

SEQ ID NO: 199214 - DNA, 20 bp, Artificial Sequence
  Description of Artificial Sequence: Synthetic oligonucleotide
  Target: LAMA2; (-) strand; PAM type: YTN; PAM sequence: TTG
gaagagaacgataaagaaac

SEQ ID NO: 199215 - DNA, 20 bp, Artificial Sequence
  Description of Artificial Sequence: Synthetic oligonucleotide
  Target: LAMA2; (-) strand; PAM type: YTN; PAM sequence: TTT
ggaagagaacgataaagaaa

SEQ ID NO: 199216 - DNA, 20 bp, Artificial Sequence
  Description of Artificial Sequence: Synthetic oligonucleotide
  Target: LAMA2; (-) strand; PAM type: YTN; PAM sequence: TTA
tcagtttggaagagaacgat

SEQ ID NO: 199217 - DNA, 20 bp, Artificial Sequence
  Description of Artificial Sequence: Synthetic oligonucleotide
  Target: LAMA2; (-) strand; PAM type: YTN; PAM sequence: TTT
atcagtttggaagagaacga

SEQ ID NO: 199218 - DNA, 20 bp, Artificial Sequence
  Description of Artificial Sequence: Synthetic oligonucleotide
  Target: LAMA2; (-) strand; PAM type: YTN; PAM sequence: TTT
tatcagtttggaagagaacg

SEQ ID NO: 199219 - DNA, 20 bp, Artificial Sequence
  Description of Artificial Sequence: Synthetic oligonucleotide
  Target: LAMA2; (-) strand; PAM type: YTN; PAM sequence: CTT
ttatcagtttggaagagaac

SEQ ID NO: 199220 - DNA, 20 bp, Artificial Sequence
  Description of Artificial Sequence: Synthetic oligonucleotide
  Target: LAMA2; (-) strand; PAM type: YTN; PAM sequence: TTG
tccttttatcagtttggaag

SEQ ID NO: 199221 - DNA, 20 bp, Artificial Sequence
  Description of Artificial Sequence: Synthetic oligonucleotide
  Target: LAMA2; (-) strand; PAM type: YTN; PAM sequence: TTA
aaccgcacaccaaaaattgt

SEQ ID NO: 199222 - DNA, 20 bp, Artificial Sequence
  Description of Artificial Sequence: Synthetic oligonucleotide
  Target: LAMA2; (-) strand; PAM type: YTN; PAM sequence: TTT
aaaccgcacaccaaaaattg

SEQ ID NO: 199223 - DNA, 20 bp, Artificial Sequence
  Description of Artificial Sequence: Synthetic oligonucleotide
  Target: LAMA2; (-) strand; PAM type: YTN; PAM sequence: TTT
taaaccgcacaccaaaaatt

SEQ ID NO: 199224 - DNA, 20 bp, Artificial Sequence
  Description of Artificial Sequence: Synthetic oligonucleotide
  Target: LAMA2; (-) strand; PAM type: YTN; PAM sequence: CTT
ttaaaccgcacaccaaaaat

SEQ ID NO: 199225 - DNA, 20 bp, Artificial Sequence
  Description of Artificial Sequence: Synthetic oligonucleotide
  Target: LAMA2; (-) strand; PAM type: YTN; PAM sequence: TTC
ttttaaaccgcacaccaaaa

SEQ ID NO: 199226 - DNA, 20 bp, Artificial Sequence
  Description of Artificial Sequence: Synthetic oligonucleotide
  Target: LAMA2; (-) strand; PAM type: YTN; PAM sequence: TTT
cttttaaaccgcacaccaaa

SEQ ID NO: 199227 - DNA, 20 bp, Artificial Sequence
  Description of Artificial Sequence: Synthetic oligonucleotide
  Target: LAMA2; (-) strand; PAM type: YTN; PAM sequence: TTC
atttcttttaaaccgcacac

SEQ ID NO: 199228 - DNA, 20 bp, Artificial Sequence
  Description of Artificial Sequence: Synthetic oligonucleotide
  Target: LAMA2; (-) strand; PAM type: YTN; PAM sequence: CTC
agtatagggggaaaagttca

SEQ ID NO: 199229 - DNA, 20 bp, Artificial Sequence
  Description of Artificial Sequence: Synthetic oligonucleotide
  Target: LAMA2; (-) strand; PAM type: YTN; PAM sequence: TTG
ccctcagtatagggggaaaa

SEQ ID NO: 199230 - DNA, 20 bp, Artificial Sequence
  Description of Artificial Sequence: Synthetic oligonucleotide
  Target: LAMA2; (-) strand; PAM type: YTN; PAM sequence: TTA
aaattgccctcagtataggg

SEQ ID NO: 199231 - DNA, 20 bp, Artificial Sequence
  Description of Artificial Sequence: Synthetic oligonucleotide
  Target: LAMA2; (-) strand; PAM type: YTN; PAM sequence: TTT
aaaattgccctcagtatagg

SEQ ID NO: 199232 - DNA, 20 bp, Artificial Sequence
  Description of Artificial Sequence: Synthetic oligonucleotide
  Target: LAMA2; (-) strand; PAM type: YTN; PAM sequence: TTT
taaaattgccctcagtatag

SEQ ID NO: 199233 - DNA, 20 bp, Artificial Sequence
  Description of Artificial Sequence: Synthetic oligonucleotide
  Target: LAMA2; (-) strand; PAM type: YTN; PAM sequence: CTT
ttaaaattgccctcagtata

SEQ ID NO: 199234 - DNA, 20 bp, Artificial Sequence
  Description of Artificial Sequence: Synthetic oligonucleotide
  Target: LAMA2; (-) strand; PAM type: YTN; PAM sequence: TTC
ttttaaaattgccctcagta

SEQ ID NO: 199235 - DNA, 20 bp, Artificial Sequence
  Description of Artificial Sequence: Synthetic oligonucleotide
  Target: LAMA2; (-) strand; PAM type: YTN; PAM sequence: CTT
cttttaaaattgccctcagt

SEQ ID NO: 199236 - DNA, 20 bp, Artificial Sequence
  Description of Artificial Sequence: Synthetic oligonucleotide
  Target: LAMA2; (-) strand; PAM type: YTN; PAM sequence: CTA
ccttcttttaaaattgccct

SEQ ID NO: 199237 - DNA, 20 bp, Artificial Sequence
  Description of Artificial Sequence: Synthetic oligonucleotide
  Target: LAMA2; (-) strand; PAM type: YTN; PAM sequence: CTG
agaaactaccttcttttaaa

SEQ ID NO: 199238 - DNA, 20 bp, Artificial Sequence
  Description of Artificial Sequence: Synthetic oligonucleotide
  Target: LAMA2; (-) strand; PAM type: YTN; PAM sequence: CTA
gaaacacctgagaaactacc

SEQ ID NO: 199239 - DNA, 20 bp, Artificial Sequence
  Description of Artificial Sequence: Synthetic oligonucleotide
  Target: LAMA2; (-) strand; PAM type: YTN; PAM sequence: TTG
actagaaacacctgagaaac

SEQ ID NO: 199240 - DNA, 20 bp, Artificial Sequence
  Description of Artificial Sequence: Synthetic oligonucleotide
  Target: LAMA2; (-) strand; PAM type: YTN; PAM sequence: TTT
gactagaaacacctgagaaa

SEQ ID NO: 199241 - DNA, 20 bp, Artificial Sequence
  Description of Artificial Sequence: Synthetic oligonucleotide
  Target: LAMA2; (-) strand; PAM type: YTN; PAM sequence: TTT
tgactagaaacacctgagaa

SEQ ID NO: 199242 - DNA, 20 bp, Artificial Sequence
  Description of Artificial Sequence: Synthetic oligonucleotide
  Target: LAMA2; (-) strand; PAM type: YTN; PAM sequence: TTG
tcattttgactagaaacacc

SEQ ID NO: 199243 - DNA, 20 bp, Artificial Sequence
  Description of Artificial Sequence: Synthetic oligonucleotide
  Target: LAMA2; (-) strand; PAM type: YTN; PAM sequence: TTT
gtcattttgactagaaacac

SEQ ID NO: 199244 - DNA, 20 bp, Artificial Sequence
  Description of Artificial Sequence: Synthetic oligonucleotide
  Target: LAMA2; (-) strand; PAM type: YTN; PAM sequence: TTG
taggtttgtcattttgacta

SEQ ID NO: 199245 - DNA, 20 bp, Artificial Sequence
  Description of Artificial Sequence: Synthetic oligonucleotide
  Target: LAMA2; (-) strand; PAM type: YTN; PAM sequence: TTT
gtaggtttgtcattttgact

SEQ ID NO: 199246 - DNA, 20 bp, Artificial Sequence
  Description of Artificial Sequence: Synthetic oligonucleotide
  Target: LAMA2; (-) strand; PAM type: YTN; PAM sequence: CTT
tgtaggtttgtcattttgac

SEQ ID NO: 199247 - DNA, 20 bp, Artificial Sequence
  Description of Artificial Sequence: Synthetic oligonucleotide
  Target: LAMA2; (-) strand; PAM type: YTN; PAM sequence: CTA
tcagtaaagtatacataaaa

SEQ ID NO: 199248 - DNA, 20 bp, Artificial Sequence
  Description of Artificial Sequence: Synthetic oligonucleotide
  Target: LAMA2; (-) strand; PAM type: YTN; PAM sequence: CTC
tatcagtaaagtatacataa

SEQ ID NO: 199249 - DNA, 20 bp, Artificial Sequence
  Description of Artificial Sequence: Synthetic oligonucleotide
  Target: LAMA2; (-) strand; PAM type: YTN; PAM sequence: TTA
aaggactctatcagtaaagt

SEQ ID NO: 199250 - DNA, 20 bp, Artificial Sequence
  Description of Artificial Sequence: Synthetic oligonucleotide
  Target: LAMA2; (-) strand; PAM type: YTN; PAM sequence: TTT
aaaggactctatcagtaaag

SEQ ID NO: 199251 - DNA, 20 bp, Artificial Sequence
  Description of Artificial Sequence: Synthetic oligonucleotide
  Target: LAMA2; (-) strand; PAM type: YTN; PAM sequence: CTC
aacatttaaaggactctatc

SEQ ID NO: 199252 - DNA, 20 bp, Artificial Sequence
  Description of Artificial Sequence: Synthetic oligonucleotide
  Target: LAMA2; (-) strand; PAM type: YTN; PAM sequence: TTG
aactcaacatttaaaggact

SEQ ID NO: 199253 - DNA, 20 bp, Artificial Sequence
  Description of Artificial Sequence: Synthetic oligonucleotide
  Target: LAMA2; (-) strand; PAM type: YTN; PAM sequence: CTT
gaactcaacatttaaaggac

SEQ ID NO: 199254 - DNA, 20 bp, Artificial Sequence
  Description of Artificial Sequence: Synthetic oligonucleotide
  Target: LAMA2; (-) strand; PAM type: YTN; PAM sequence: TTA
gcttgaactcaacatttaaa

SEQ ID NO: 199255 - DNA, 20 bp, Artificial Sequence
  Description of Artificial Sequence: Synthetic oligonucleotide
  Target: LAMA2; (-) strand; PAM type: YTN; PAM sequence: TTA
agaaaaattagcttgaactc

SEQ ID NO: 199256 - DNA, 20 bp, Artificial Sequence
  Description of Artificial Sequence: Synthetic oligonucleotide
  Target: LAMA2; (-) strand; PAM type: YTN; PAM sequence: TTG
aagattaagaaaaattagct

SEQ ID NO: 199257 - DNA, 20 bp, Artificial Sequence
  Description of Artificial Sequence: Synthetic oligonucleotide
  Target: LAMA2; (-) strand; PAM type: YTN; PAM sequence: TTT
gaagattaagaaaaattagc

SEQ ID NO: 199258 - DNA, 20 bp, Artificial Sequence
  Description of Artificial Sequence: Synthetic oligonucleotide
  Target: LAMA2; (-) strand; PAM type: YTN; PAM sequence: TTT
tgaagattaagaaaaattag

SEQ ID NO: 199259 - DNA, 20 bp, Artificial Sequence
  Description of Artificial Sequence: Synthetic oligonucleotide
  Target: LAMA2; (-) strand; PAM type: YTN; PAM sequence: TTT
ttgaagattaagaaaaatta

SEQ ID NO: 199260 - DNA, 20 bp, Artificial Sequence
  Description of Artificial Sequence: Synthetic oligonucleotide
  Target: LAMA2; (-) strand; PAM type: YTN; PAM sequence: CTT
tttgaagattaagaaaaatt

SEQ ID NO: 199261 - DNA, 20 bp, Artificial Sequence
  Description of Artificial Sequence: Synthetic oligonucleotide
  Target: LAMA2; (-) strand; PAM type: YTN; PAM sequence: CTA
aactttttgaagattaagaa

SEQ ID NO: 199262 - DNA, 20 bp, Artificial Sequence
  Description of Artificial Sequence: Synthetic oligonucleotide
  Target: LAMA2; (-) strand; PAM type: YTN; PAM sequence: TTG
atccctaaactttttgaaga

SEQ ID NO: 199263 - DNA, 20 bp, Artificial Sequence
  Description of Artificial Sequence: Synthetic oligonucleotide
  Target: LAMA2; (-) strand; PAM type: YTN; PAM sequence: TTT
gatccctaaactttttgaag

SEQ ID NO: 199264 - DNA, 20 bp, Artificial Sequence
  Description of Artificial Sequence: Synthetic oligonucleotide
  Target: LAMA2; (-) strand; PAM type: YTN; PAM sequence: CTG
caggatacaatttgatccct

SEQ ID NO: 199265 - DNA, 20 bp, Artificial Sequence
  Description of Artificial Sequence: Synthetic oligonucleotide
  Target: LAMA2; (-) strand; PAM type: YTN; PAM sequence: TTA
gcataacaaaaatctgcagg

SEQ ID NO: 199266 - DNA, 20 bp, Artificial Sequence
  Description of Artificial Sequence: Synthetic oligonucleotide
  Target: LAMA2; (-) strand; PAM type: YTN; PAM sequence: TTT
agcataacaaaaatctgcag

SEQ ID NO: 199267 - DNA, 20 bp, Artificial Sequence
  Description of Artificial Sequence: Synthetic oligonucleotide
  Target: LAMA2; (-) strand; PAM type: YTN; PAM sequence: CTA
aagaagaagagatgaaatga

SEQ ID NO: 199268 - DNA, 20 bp, Artificial Sequence
  Description of Artificial Sequence: Synthetic oligonucleotide
  Target: LAMA2; (-) strand; PAM type: YTN; PAM sequence: CTG
tagaactaaagaagaagaga

SEQ ID NO: 199269 - DNA, 20 bp, Artificial Sequence
  Description of Artificial Sequence: Synthetic oligonucleotide
  Target: LAMA2; (-) strand; PAM type: YTN; PAM sequence: CTC
tgtagaactaaagaagaaga

SEQ ID NO: 199270 - DNA, 20 bp, Artificial Sequence
  Description of Artificial Sequence: Synthetic oligonucleotide
  Target: LAMA2; (-) strand; PAM type: YTN; PAM sequence: TTC
tctgtagaactaaagaagaa

SEQ ID NO: 199271 - DNA, 20 bp, Artificial Sequence
  Description of Artificial Sequence: Synthetic oligonucleotide
  Target: LAMA2; (-) strand; PAM type: YTN; PAM sequence: CTT
ctctgtagaactaaagaaga

SEQ ID NO: 199272 - DNA, 20 bp, Artificial Sequence
  Description of Artificial Sequence: Synthetic oligonucleotide
  Target: LAMA2; (-) strand; PAM type: YTN; PAM sequence: CTA
acttctctgtagaactaaag

SEQ ID NO: 199273 - DNA, 20 bp, Artificial Sequence
  Description of Artificial Sequence: Synthetic oligonucleotide
  Target: LAMA2; (-) strand; PAM type: YTN; PAM sequence: TTG
acctaacttctctgtagaac

SEQ ID NO: 199274 - DNA, 20 bp, Artificial Sequence
  Description of Artificial Sequence: Synthetic oligonucleotide
  Target: LAMA2; (-) strand; PAM type: YTN; PAM sequence: CTT
gacctaacttctctgtagaa

SEQ ID NO: 199275 - DNA, 20 bp, Artificial Sequence
  Description of Artificial Sequence: Synthetic oligonucleotide
  Target: LAMA2; (-) strand; PAM type: YTN; PAM sequence: TTC
aaacaatcttgacctaactt

SEQ ID NO: 199276 - DNA, 20 bp, Artificial Sequence
  Description of Artificial Sequence: Synthetic oligonucleotide
  Target: LAMA2; (-) strand; PAM type: YTN; PAM sequence: TTT
caaacaatcttgacctaact

SEQ ID NO: 199277 - DNA, 20 bp, Artificial Sequence
  Description of Artificial Sequence: Synthetic oligonucleotide
  Target: LAMA2; (-) strand; PAM type: YTN; PAM sequence: CTT
tcaaacaatcttgacctaac

SEQ ID NO: 199278 - DNA, 20 bp, Artificial Sequence
  Description of Artificial Sequence: Synthetic oligonucleotide
  Target: LAMA2; (-) strand; PAM type: YTN; PAM sequence: CTA
ctttcaaacaatcttgacct

SEQ ID NO: 199279 - DNA, 20 bp, Artificial Sequence
  Description of Artificial Sequence: Synthetic oligonucleotide
  Target: LAMA2; (-) strand; PAM type: YTN; PAM sequence: CTC
aagtctactttcaaacaatc

SEQ ID NO: 199280 - DNA, 20 bp, Artificial Sequence
  Description of Artificial Sequence: Synthetic oligonucleotide
  Target: LAMA2; (-) strand; PAM type: YTN; PAM sequence: CTG
gactcaagtctactttcaaa

SEQ ID NO: 199281 - DNA, 20 bp, Artificial Sequence
  Description of Artificial Sequence: Synthetic oligonucleotide
  Target: LAMA2; (-) strand; PAM type: YTN; PAM sequence: TTC
tggactcaagtctactttca

SEQ ID NO: 199282 - DNA, 20 bp, Artificial Sequence
  Description of Artificial Sequence: Synthetic oligonucleotide
  Target: LAMA2; (-) strand; PAM type: YTN; PAM sequence: TTT
ctggactcaagtctactttc

SEQ ID NO: 199283 - DNA, 20 bp, Artificial Sequence
  Description of Artificial Sequence: Synthetic oligonucleotide
  Target: LAMA2; (-) strand; PAM type: YTN; PAM sequence: CTG
gtcgaagagacaagtttctg

SEQ ID NO: 199284 - DNA, 20 bp, Artificial Sequence
  Description of Artificial Sequence: Synthetic oligonucleotide
  Target: LAMA2; (-) strand; PAM type: YTN; PAM sequence: TTG
gtagataatccactggtcga

SEQ ID NO: 199285 - DNA, 20 bp, Artificial Sequence
  Description of Artificial Sequence: Synthetic oligonucleotide
  Target: LAMA2; (-) strand; PAM type: YTN; PAM sequence: TTC
aaattggtagataatccact

SEQ ID NO: 199286 - DNA, 20 bp, Artificial Sequence
  Description of Artificial Sequence: Synthetic oligonucleotide
  Target: LAMA2; (-) strand; PAM type: YTN; PAM sequence: TTT
caaattggtagataatccac

SEQ ID NO: 199287 - DNA, 20 bp, Artificial Sequence
  Description of Artificial Sequence: Synthetic oligonucleotide
  Target: LAMA2; (-) strand; PAM type: YTN; PAM sequence: TTT
tcaaattggtagataatcca

SEQ ID NO: 199288 - DNA, 20 bp, Artificial Sequence
  Description of Artificial Sequence: Synthetic oligonucleotide
  Target: LAMA2; (-) strand; PAM type: YTN; PAM sequence: TTT
ttcaaattggtagataatcc

SEQ ID NO: 199289 - DNA, 20 bp, Artificial Sequence
  Description of Artificial Sequence: Synthetic oligonucleotide
  Target: LAMA2; (-) strand; PAM type: YTN; PAM sequence: TTT
tttcaaattggtagataatc

SEQ ID NO: 199290 - DNA, 20 bp, Artificial Sequence
  Description of Artificial Sequence: Synthetic oligonucleotide
  Target: LAMA2; (-) strand; PAM type: YTN; PAM sequence: CTA
tattttttcaaattggtaga

SEQ ID NO: 199291 - DNA, 20 bp, Artificial Sequence
  Description of Artificial Sequence: Synthetic oligonucleotide
  Target: LAMA2; (-) strand; PAM type: YTN; PAM sequence: TTC
cacatgcatgctatattttt

SEQ ID NO: 199292 - DNA, 20 bp, Artificial Sequence
  Description of Artificial Sequence: Synthetic oligonucleotide
  Target: LAMA2; (-) strand; PAM type: YTN; PAM sequence: CTT
ccacatgcatgctatatttt

SEQ ID NO: 199293 - DNA, 20 bp, Artificial Sequence
  Description of Artificial Sequence: Synthetic oligonucleotide
  Target: LAMA2; (-) strand; PAM type: YTN; PAM sequence: TTC
ttccacatgcatgctatatt

SEQ ID NO: 199294 - DNA, 20 bp, Artificial Sequence
  Description of Artificial Sequence: Synthetic oligonucleotide
  Target: LAMA2; (-) strand; PAM type: YTN; PAM sequence: TTT
cttccacatgcatgctatat

SEQ ID NO: 199295 - DNA, 20 bp, Artificial Sequence
  Description of Artificial Sequence: Synthetic oligonucleotide
  Target: LAMA2; (-) strand; PAM type: YTN; PAM sequence: TTT
tcttccacatgcatgctata

SEQ ID NO: 199296 - DNA, 20 bp, Artificial Sequence
  Description of Artificial Sequence: Synthetic oligonucleotide
  Target: LAMA2; (-) strand; PAM type: YTN; PAM sequence: CTG
acatgcaaaagtaacatttt

SEQ ID NO: 199297 - DNA, 20 bp, Artificial Sequence
  Description of Artificial Sequence: Synthetic oligonucleotide
  Target: LAMA2; (-) strand; PAM type: YTN; PAM sequence: CTA
ataataatgacaacatgctg

SEQ ID NO: 199298 - DNA, 20 bp, Artificial Sequence
  Description of Artificial Sequence: Synthetic oligonucleotide
  Target: LAMA2; (-) strand; PAM type: YTN; PAM sequence: TTC
taataataatgacaacatgc

SEQ ID NO: 199299 - DNA, 20 bp, Artificial Sequence
  Description of Artificial Sequence: Synthetic oligonucleotide
  Target: LAMA2; (-) strand; PAM type: YTN; PAM sequence: CTT
ctaataataatgacaacatg

SEQ ID NO: 199300 - DNA, 20 bp, Artificial Sequence
  Description of Artificial Sequence: Synthetic oligonucleotide
  Target: LAMA2; (-) strand; PAM type: YTN; PAM sequence: TTC
ttctaataataatgacaaca

SEQ ID NO: 199301 - DNA, 20 bp, Artificial Sequence
  Description of Artificial Sequence: Synthetic oligonucleotide
  Target: LAMA2; (-) strand; PAM type: YTN; PAM sequence: TTG
aaagatgtgttcttctaata

SEQ ID NO: 199302 - DNA, 20 bp, Artificial Sequence
  Description of Artificial Sequence: Synthetic oligonucleotide
  Target: LAMA2; (-) strand; PAM type: YTN; PAM sequence: TTT
gaaagatgtgttcttctaat

SEQ ID NO: 199303 - DNA, 20 bp, Artificial Sequence
  Description of Artificial Sequence: Synthetic oligonucleotide
  Target: LAMA2; (-) strand; PAM type: YTN; PAM sequence: CTT
tgaaagatgtgttcttctaa

SEQ ID NO: 199304 - DNA, 20 bp, Artificial Sequence
  Description of Artificial Sequence: Synthetic oligonucleotide
  Target: LAMA2; (-) strand; PAM type: YTN; PAM sequence: TTC
tttgaaagatgtgttcttct

SEQ ID NO: 199305 - DNA, 20 bp, Artificial Sequence
  Description of Artificial Sequence: Synthetic oligonucleotide
  Target: LAMA2; (-) strand; PAM type: YTN; PAM sequence: TTT
ctttgaaagatgtgttcttc

SEQ ID NO: 199306 - DNA, 20 bp, Artificial Sequence
  Description of Artificial Sequence: Synthetic oligonucleotide
  Target: LAMA2; (-) strand; PAM type: YTN; PAM sequence: CTT
tctttgaaagatgtgttctt

SEQ ID NO: 199307 - DNA, 20 bp, Artificial Sequence
  Description of Artificial Sequence: Synthetic oligonucleotide
  Target: LAMA2; (-) strand; PAM type: YTN; PAM sequence: TTC
ctttctttgaaagatgtgtt

SEQ ID NO: 199308 - DNA, 20 bp, Artificial Sequence
  Description of Artificial Sequence: Synthetic oligonucleotide
  Target: LAMA2; (-) strand; PAM type: YTN; PAM sequence: TTT
cctttctttgaaagatgtgt

SEQ ID NO: 199309 - DNA, 20 bp, Artificial Sequence
  Description of Artificial Sequence: Synthetic oligonucleotide
  Target: LAMA2; (-) strand; PAM type: YTN; PAM sequence: TTA
tgtttcctttctttgaaaga

SEQ ID NO: 199310 - DNA, 20 bp, Artificial Sequence
  Description of Artificial Sequence: Synthetic oligonucleotide
  Target: LAMA2; (-) strand; PAM type: YTN; PAM sequence: TTT
atgtttcctttctttgaaag

SEQ ID NO: 199311 - DNA, 20 bp, Artificial Sequence
  Description of Artificial Sequence: Synthetic oligonucleotide
  Target: LAMA2; (-) strand; PAM type: YTN; PAM sequence: TTA
tggagtttatgtttcctttc

SEQ ID NO: 199312 - DNA, 20 bp, Artificial Sequence
  Description of Artificial Sequence: Synthetic oligonucleotide
  Target: LAMA2; (-) strand; PAM type: YTN; PAM sequence: TTC
aagaataatatcagacagca

SEQ ID NO: 199313 - DNA, 20 bp, Artificial Sequence
  Description of Artificial Sequence: Synthetic oligonucleotide
  Target: LAMA2; (-) strand; PAM type: YTN; PAM sequence: CTT
caagaataatatcagacagc

SEQ ID NO: 199314 - DNA, 20 bp, Artificial Sequence
  Description of Artificial Sequence: Synthetic oligonucleotide
  Target: LAMA2; (-) strand; PAM type: YTN; PAM sequence: CTA
aaatgatagccgtcttcaag

SEQ ID NO: 199315 - DNA, 20 bp, Artificial Sequence
  Description of Artificial Sequence: Synthetic oligonucleotide
  Target: LAMA2; (-) strand; PAM type: YTN; PAM sequence: TTA
taacagctaaaatgatagcc

SEQ ID NO: 199316 - DNA, 20 bp, Artificial Sequence
  Description of Artificial Sequence: Synthetic oligonucleotide
  Target: LAMA2; (-) strand; PAM type: YTN; PAM sequence: TTT
ataacagctaaaatgatagc

SEQ ID NO: 199317 - DNA, 20 bp, Artificial Sequence
  Description of Artificial Sequence: Synthetic oligonucleotide
  Target: LAMA2; (-) strand; PAM type: YTN; PAM sequence: TTT
tataacagctaaaatgatag

SEQ ID NO: 199318 - DNA, 20 bp, Artificial Sequence
  Description of Artificial Sequence: Synthetic oligonucleotide
  Target: LAMA2; (-) strand; PAM type: YTN; PAM sequence: CTG
ttttataacagctaaaatga

SEQ ID NO: 199319 - DNA, 20 bp, Artificial Sequence
  Description of Artificial Sequence: Synthetic oligonucleotide
  Target: LAMA2; (-) strand; PAM type: YTN; PAM sequence: TTC
ctgttttataacagctaaaa

SEQ ID NO: 199320 - DNA, 20 bp, Artificial Sequence
  Description of Artificial Sequence: Synthetic oligonucleotide
  Target: LAMA2; (-) strand; PAM type: YTN; PAM sequence: CTT
cctgttttataacagctaaa

SEQ ID NO: 199321 - DNA, 20 bp, Artificial Sequence
  Description of Artificial Sequence: Synthetic oligonucleotide
  Target: LAMA2; (-) strand; PAM type: YTN; PAM sequence: TTC
cttcctgttttataacagct

SEQ ID NO: 199322 - DNA, 20 bp, Artificial Sequence
  Description of Artificial Sequence: Synthetic oligonucleotide
  Target: LAMA2; (-) strand; PAM type: YTN; PAM sequence: CTC
catgatgttccttcctgttt

SEQ ID NO: 199323 - DNA, 20 bp, Artificial Sequence
  Description of Artificial Sequence: Synthetic oligonucleotide
  Target: LAMA2; (-) strand; PAM type: YTN; PAM sequence: CTA
atgctccatgatgttccttc

SEQ ID NO: 199324 - DNA, 20 bp, Artificial Sequence
  Description of Artificial Sequence: Synthetic oligonucleotide
  Target: LAMA2; (-) strand; PAM type: YTN; PAM sequence: TTA
taatctaatgctccatgatg

SEQ ID NO: 199325 - DNA, 20 bp, Artificial Sequence
  Description of Artificial Sequence: Synthetic oligonucleotide
  Target: LAMA2; (-) strand; PAM type: YTN; PAM sequence: CTA
tagatattataatctaatgc

SEQ ID NO: 199326 - DNA, 20 bp, Artificial Sequence
  Description of Artificial Sequence: Synthetic oligonucleotide
  Target: LAMA2; (-) strand; PAM type: YTN; PAM sequence: CTA
gtgggactatagatattata

SEQ ID NO: 199327 - DNA, 20 bp, Artificial Sequence
  Description of Artificial Sequence: Synthetic oligonucleotide
  Target: LAMA2; (-) strand; PAM type: YTN; PAM sequence: TTA
atggtgtgctagtgggacta

SEQ ID NO: 199328 - DNA, 20 bp, Artificial Sequence
  Description of Artificial Sequence: Synthetic oligonucleotide
  Target: LAMA2; (-) strand; PAM type: YTN; PAM sequence: TTT
aatggtgtgctagtgggact

SEQ ID NO: 199329 - DNA, 20 bp, Artificial Sequence
  Description of Artificial Sequence: Synthetic oligonucleotide
  Target: LAMA2; (-) strand; PAM type: YTN; PAM sequence: TTA
tttaatggtgtgctagtggg

SEQ ID NO: 199330 - DNA, 20 bp, Artificial Sequence
  Description of Artificial Sequence: Synthetic oligonucleotide
  Target: LAMA2; (-) strand; PAM type: YTN; PAM sequence: TTT
atttaatggtgtgctagtgg

SEQ ID NO: 199331 - DNA, 20 bp, Artificial Sequence
  Description of Artificial Sequence: Synthetic oligonucleotide
  Target: LAMA2; (-) strand; PAM type: YTN; PAM sequence: CTT
tatttaatggtgtgctagtg

SEQ ID NO: 199332 - DNA, 20 bp, Artificial Sequence
  Description of Artificial Sequence: Synthetic oligonucleotide
  Target: LAMA2; (-) strand; PAM type: YTN; PAM sequence: TTC
actttatttaatggtgtgct

SEQ ID NO: 199333 - DNA, 20 bp, Artificial Sequence
  Description of Artificial Sequence: Synthetic oligonucleotide
  Target: LAMA2; (-) strand; PAM type: YTN; PAM sequence: CTT
cactttatttaatggtgtgc

SEQ ID NO: 199334 - DNA, 20 bp, Artificial Sequence
  Description of Artificial Sequence: Synthetic oligonucleotide
  Target: LAMA2; (-) strand; PAM type: YTN; PAM sequence: TTC
ataccttcactttatttaat

SEQ ID NO: 199335 - DNA, 20 bp, Artificial Sequence
  Description of Artificial Sequence: Synthetic oligonucleotide
  Target: LAMA2; (-) strand; PAM type: YTN; PAM sequence: TTA
aatattcataccttcacttt

SEQ ID NO: 199336 - DNA, 20 bp, Artificial Sequence
  Description of Artificial Sequence: Synthetic oligonucleotide
  Target: LAMA2; (-) strand; PAM type: YTN; PAM sequence: TTT
aaatattcataccttcactt

SEQ ID NO: 199337 - DNA, 20 bp, Artificial Sequence
  Description of Artificial Sequence: Synthetic oligonucleotide
  Target: LAMA2; (-) strand; PAM type: YTN; PAM sequence: CTA
atttaaatattcataccttc

SEQ ID NO: 199338 - DNA, 20 bp, Artificial Sequence
  Description of Artificial Sequence: Synthetic oligonucleotide
  Target: LAMA2; (-) strand; PAM type: YTN; PAM sequence: TTC
taatttaaatattcatacct

SEQ ID NO: 199339 - DNA, 20 bp, Artificial Sequence
  Description of Artificial Sequence: Synthetic oligonucleotide
  Target: LAMA2; (-) strand; PAM type: YTN; PAM sequence: CTG
acataatatagtataaaaaa

SEQ ID NO: 199340 - DNA, 20 bp, Artificial Sequence
  Description of Artificial Sequence: Synthetic oligonucleotide
  Target: LAMA2; (-) strand; PAM type: YTN; PAM sequence: TTC
ctgacataatatagtataaa

SEQ ID NO: 199341 - DNA, 20 bp, Artificial Sequence
  Description of Artificial Sequence: Synthetic oligonucleotide
  Target: LAMA2; (-) strand; PAM type: YTN; PAM sequence: CTT
cctgacataatatagtataa

SEQ ID NO: 199342 - DNA, 20 bp, Artificial Sequence
  Description of Artificial Sequence: Synthetic oligonucleotide
  Target: LAMA2; (-) strand; PAM type: YTN; PAM sequence: TTC
ttcctgacataatatagtat

SEQ ID NO: 199343 - DNA, 20 bp, Artificial Sequence
  Description of Artificial Sequence: Synthetic oligonucleotide
  Target: LAMA2; (-) strand; PAM type: YTN; PAM sequence: TTT
cttcctgacataatatagta

SEQ ID NO: 199344 - DNA, 20 bp, Artificial Sequence
  Description of Artificial Sequence: Synthetic oligonucleotide
  Target: LAMA2; (-) strand; PAM type: YTN; PAM sequence: TTG
caatttcttcctgacataat

SEQ ID NO: 199345 - DNA, 20 bp, Artificial Sequence
  Description of Artificial Sequence: Synthetic oligonucleotide
  Target: LAMA2; (-) strand; PAM type: YTN; PAM sequence: CTT
gcaatttcttcctgacataa

SEQ ID NO: 199346 - DNA, 20 bp, Artificial Sequence
  Description of Artificial Sequence: Synthetic oligonucleotide
  Target: LAMA2; (-) strand; PAM type: YTN; PAM sequence: TTC
cagagcttgcaatttcttcc

SEQ ID NO: 199347 - DNA, 20 bp, Artificial Sequence
  Description of Artificial Sequence: Synthetic oligonucleotide
  Target: LAMA2; (-) strand; PAM type: YTN; PAM sequence: TTT
ccagagcttgcaatttcttc

SEQ ID NO: 199348 - DNA, 20 bp, Artificial Sequence
  Description of Artificial Sequence: Synthetic oligonucleotide
  Target: LAMA2; (-) strand; PAM type: YTN; PAM sequence: CTA
agacacaaagaatttccaga

SEQ ID NO: 199349 - DNA, 20 bp, Artificial Sequence
  Description of Artificial Sequence: Synthetic oligonucleotide
  Target: LAMA2; (-) strand; PAM type: YTN; PAM sequence: TTC
ctaagacacaaagaatttcc

SEQ ID NO: 199350 - DNA, 20 bp, Artificial Sequence
  Description of Artificial Sequence: Synthetic oligonucleotide
  Target: LAMA2; (-) strand; PAM type: YTN; PAM sequence: TTT
cctaagacacaaagaatttc

SEQ ID NO: 199351 - DNA, 20 bp, Artificial Sequence
  Description of Artificial Sequence: Synthetic oligonucleotide
  Target: LAMA2; (-) strand; PAM type: YTN; PAM sequence: TTT
tcctaagacacaaagaattt

SEQ ID NO: 199352 - DNA, 20 bp, Artificial Sequence
  Description of Artificial Sequence: Synthetic oligonucleotide
  Target: LAMA2; (-) strand; PAM type: YTN; PAM sequence: CTC
attttcctaagacacaaaga

SEQ ID NO: 199353 - DNA, 20 bp, Artificial Sequence
  Description of Artificial Sequence: Synthetic oligonucleotide
  Target: LAMA2; (-) strand; PAM type: YTN; PAM sequence: CTA
taaaaaatagaatctcattt

SEQ ID NO: 199354 - DNA, 20 bp, Artificial Sequence
  Description of Artificial Sequence: Synthetic oligonucleotide
  Target: LAMA2; (-) strand; PAM type: YTN; PAM sequence: TTA
aagagctataaaaaatagaa

SEQ ID NO: 199355 - DNA, 20 bp, Artificial Sequence
  Description of Artificial Sequence: Synthetic oligonucleotide
  Target: LAMA2; (-) strand; PAM type: YTN; PAM sequence: TTT
aaagagctataaaaaataga

SEQ ID NO: 199356 - DNA, 20 bp, Artificial Sequence
  Description of Artificial Sequence: Synthetic oligonucleotide
  Target: LAMA2; (-) strand; PAM type: YTN; PAM sequence: TTT
taaagagctataaaaaatag

SEQ ID NO: 199357 - DNA, 20 bp, Artificial Sequence
  Description of Artificial Sequence: Synthetic oligonucleotide
  Target: LAMA2; (-) strand; PAM type: YTN; PAM sequence: TTT
ttaaagagctataaaaaata

SEQ ID NO: 199358 - DNA, 20 bp, Artificial Sequence
  Description of Artificial Sequence: Synthetic oligonucleotide
  Target: LAMA2; (-) strand; PAM type: YTN; PAM sequence: TTT
tttaaagagctataaaaaat

SEQ ID NO: 199359 - DNA, 20 bp, Artificial Sequence
  Description of Artificial Sequence: Synthetic oligonucleotide
  Target: LAMA2; (-) strand; PAM type: YTN; PAM sequence: TTT
ttttaaagagctataaaaaa

SEQ ID NO: 199360 - DNA, 20 bp, Artificial Sequence
  Description of Artificial Sequence: Synthetic oligonucleotide
  Target: LAMA2; (-) strand; PAM type: YTN; PAM sequence: TTT
tttttaaagagctataaaaa

SEQ ID NO: 199361 - DNA, 20 bp, Artificial Sequence
  Description of Artificial Sequence: Synthetic oligonucleotide
  Target: LAMA2; (-) strand; PAM type: YTN; PAM sequence: CTG
atgcaggtattttttttaaa

SEQ ID NO: 199362 - DNA, 20 bp, Artificial Sequence
  Description of Artificial Sequence: Synthetic oligonucleotide
  Target: LAMA2; (-) strand; PAM type: YTN; PAM sequence: CTG
ctgatgcaggtatttttttt

SEQ ID NO: 199363 - DNA, 20 bp, Artificial Sequence
  Description of Artificial Sequence: Synthetic oligonucleotide
  Target: LAMA2; (-) strand; PAM type: YTN; PAM sequence: TTG
tctgctgatgcaggtatttt

SEQ ID NO: 199364 - DNA, 20 bp, Artificial Sequence
  Description of Artificial Sequence: Synthetic oligonucleotide
  Target: LAMA2; (-) strand; PAM type: YTN; PAM sequence: TTA
ccaattgtctgctgatgcag

SEQ ID NO: 199365 - DNA, 20 bp, Artificial Sequence
  Description of Artificial Sequence: Synthetic oligonucleotide
  Target: LAMA2; (-) strand; PAM type: YTN; PAM sequence: CTG
ttaccaattgtctgctgatg

SEQ ID NO: 199366 - DNA, 20 bp, Artificial Sequence
  Description of Artificial Sequence: Synthetic oligonucleotide
  Target: LAMA2; (-) strand; PAM type: YTN; PAM sequence: CTA
aataacaccaaatatgatga

SEQ ID NO: 199367 - DNA, 20 bp, Artificial Sequence
  Description of Artificial Sequence: Synthetic oligonucleotide
  Target: LAMA2; (-) strand; PAM type: YTN; PAM sequence: TTG
agaaatgctaaataacacca

SEQ ID NO: 199368 - DNA, 20 bp, Artificial Sequence
  Description of Artificial Sequence: Synthetic oligonucleotide
  Target: LAMA2; (-) strand; PAM type: YTN; PAM sequence: TTT
gagaaatgctaaataacacc

SEQ ID NO: 199369 - DNA, 20 bp, Artificial Sequence
  Description of Artificial Sequence: Synthetic oligonucleotide
  Target: LAMA2; (-) strand; PAM type: YTN; PAM sequence: TTT
tgagaaatgctaaataacac

SEQ ID NO: 199370 - DNA, 20 bp, Artificial Sequence
  Description of Artificial Sequence: Synthetic oligonucleotide
  Target: LAMA2; (-) strand; PAM type: YTN; PAM sequence: TTT
ttgagaaatgctaaataaca

SEQ ID NO: 199371 - DNA, 20 bp, Artificial Sequence
  Description of Artificial Sequence: Synthetic oligonucleotide
  Target: LAMA2; (-) strand; PAM type: YTN; PAM sequence: CTG
ccatgtttttgagaaatgct

SEQ ID NO: 199372 - DNA, 20 bp, Artificial Sequence
  Description of Artificial Sequence: Synthetic oligonucleotide
  Target: LAMA2; (-) strand; PAM type: YTN; PAM sequence: TTG
aatcaaggaatcgataatgt

SEQ ID NO: 199373 - DNA, 20 bp, Artificial Sequence
  Description of Artificial Sequence: Synthetic oligonucleotide
  Target: LAMA2; (-) strand; PAM type: YTN; PAM sequence: TTA
tcccatatgacaggtcagca

SEQ ID NO: 199374 - DNA, 20 bp, Artificial Sequence
  Description of Artificial Sequence: Synthetic oligonucleotide
  Target: LAMA2; (-) strand; PAM type: YTN; PAM sequence: TTT
atcccatatgacaggtcagc

SEQ ID NO: 199375 - DNA, 20 bp, Artificial Sequence
  Description of Artificial Sequence: Synthetic oligonucleotide
  Target: LAMA2; (-) strand; PAM type: YTN; PAM sequence: TTA
gatttatcccatatgacagg

SEQ ID NO: 199376 - DNA, 20 bp, Artificial Sequence
  Description of Artificial Sequence: Synthetic oligonucleotide
  Target: LAMA2; (-) strand; PAM type: YTN; PAM sequence: CTG
tagttagatttatcccatat

SEQ ID NO: 199377 - DNA, 20 bp, Artificial Sequence
  Description of Artificial Sequence: Synthetic oligonucleotide
  Target: LAMA2; (-) strand; PAM type: YTN; PAM sequence: TTG
ctgtagttagatttatccca

SEQ ID NO: 199378 - DNA, 20 bp, Artificial Sequence
  Description of Artificial Sequence: Synthetic oligonucleotide
  Target: LAMA2; (-) strand; PAM type: YTN; PAM sequence: TTT
gctgtagttagatttatccc

SEQ ID NO: 199379 - DNA, 20 bp, Artificial Sequence
  Description of Artificial Sequence: Synthetic oligonucleotide
  Target: LAMA2; (-) strand; PAM type: YTN; PAM sequence: CTT
tgctgtagttagatttatcc

SEQ ID NO: 199380 - DNA, 20 bp, Artificial Sequence
  Description of Artificial Sequence: Synthetic oligonucleotide
  Target: LAMA2; (-) strand; PAM type: YTN; PAM sequence: CTG
aagaataacagagctttgct

SEQ ID NO: 199381 - DNA, 20 bp, Artificial Sequence
  Description of Artificial Sequence: Synthetic oligonucleotide
  Target: LAMA2; (-) strand; PAM type: YTN; PAM sequence: CTG
tactgaagaataacagagct

SEQ ID NO: 199382 - DNA, 20 bp, Artificial Sequence
  Description of Artificial Sequence: Synthetic oligonucleotide
  Target: LAMA2; (-) strand; PAM type: YTN; PAM sequence: TTG
tactgtactgaagaataaca

SEQ ID NO: 199383 - DNA, 20 bp, Artificial Sequence
  Description of Artificial Sequence: Synthetic oligonucleotide
  Target: LAMA2; (-) strand; PAM type: YTN; PAM sequence: CTG
ttgtactgtactgaagaata

SEQ ID NO: 199384 - DNA, 20 bp, Artificial Sequence
  Description of Artificial Sequence: Synthetic oligonucleotide
  Target: LAMA2; (-) strand; PAM type: YTN; PAM sequence: TTA
tctgttgtactgtactgaag

SEQ ID NO: 199385 - DNA, 20 bp, Artificial Sequence
  Description of Artificial Sequence: Synthetic oligonucleotide
  Target: LAMA2; (-) strand; PAM type: YTN; PAM sequence: CTT
atctgttgtactgtactgaa

SEQ ID NO: 199386 - DNA, 20 bp, Artificial Sequence
  Description of Artificial Sequence: Synthetic oligonucleotide
  Target: LAMA2; (-) strand; PAM type: YTN; PAM sequence: TTA
cttatctgttgtactgtact

SEQ ID NO: 199387 - DNA, 20 bp, Artificial Sequence
  Description of Artificial Sequence: Synthetic oligonucleotide
  Target: LAMA2; (-) strand; PAM type: YTN; PAM sequence: CTT
acttatctgttgtactgtac

SEQ ID NO: 199388 - DNA, 20 bp, Artificial Sequence
  Description of Artificial Sequence: Synthetic oligonucleotide
  Target: LAMA2; (-) strand; PAM type: YTN; PAM sequence: CTG
gcttacttatctgttgtact

SEQ ID NO: 199389 - DNA, 20 bp, Artificial Sequence
  Description of Artificial Sequence: Synthetic oligonucleotide
  Target: LAMA2; (-) strand; PAM type: YTN; PAM sequence: TTA
tatctggcttacttatctgt

SEQ ID NO: 199390 - DNA, 20 bp, Artificial Sequence
  Description of Artificial Sequence: Synthetic oligonucleotide
  Target: LAMA2; (-) strand; PAM type: YTN; PAM sequence: TTC
acccaaatgtattatatctg

SEQ ID NO: 199391 - DNA, 20 bp, Artificial Sequence
  Description of Artificial Sequence: Synthetic oligonucleotide
  Target: LAMA2; (-) strand; PAM type: YTN; PAM sequence: TTT
cacccaaatgtattatatct

SEQ ID NO: 199392 - DNA, 20 bp, Artificial Sequence
  Description of Artificial Sequence: Synthetic oligonucleotide
  Target: LAMA2; (-) strand; PAM type: YTN; PAM sequence: TTT
tcacccaaatgtattatatc

SEQ ID NO: 199393 - DNA, 20 bp, Artificial Sequence
  Description of Artificial Sequence: Synthetic oligonucleotide
  Target: LAMA2; (-) strand; PAM type: YTN; PAM sequence: TTT
ttcacccaaatgtattatat

SEQ ID NO: 199394 - DNA, 20 bp, Artificial Sequence
  Description of Artificial Sequence: Synthetic oligonucleotide
  Target: LAMA2; (-) strand; PAM type: YTN; PAM sequence: TTT
tttcacccaaatgtattata

SEQ ID NO: 199395 - DNA, 20 bp, Artificial Sequence
  Description of Artificial Sequence: Synthetic oligonucleotide
  Target: LAMA2; (-) strand; PAM type: YTN; PAM sequence: TTG
tagttttttcacccaaatgt

SEQ ID NO: 199396 - DNA, 20 bp, Artificial Sequence
  Description of Artificial Sequence: Synthetic oligonucleotide
  Target: LAMA2; (-) strand; PAM type: YTN; PAM sequence: TTT
gtagttttttcacccaaatg

SEQ ID NO: 199397 - DNA, 20 bp, Artificial Sequence
  Description of Artificial Sequence: Synthetic oligonucleotide
  Target: LAMA2; (-) strand; PAM type: YTN; PAM sequence: TTT
tgtagttttttcacccaaat

SEQ ID NO: 199398 - DNA, 20 bp, Artificial Sequence
  Description of Artificial Sequence: Synthetic oligonucleotide
  Target: LAMA2; (-) strand; PAM type: YTN; PAM sequence: CTA
tgattttgtagttttttcac

SEQ ID NO: 199399 - DNA, 20 bp, Artificial Sequence
  Description of Artificial Sequence: Synthetic oligonucleotide
  Target: LAMA2; (-) strand; PAM type: YTN; PAM sequence: CTC
tatgattttgtagttttttc

SEQ ID NO: 199400 - DNA, 20 bp, Artificial Sequence
  Description of Artificial Sequence: Synthetic oligonucleotide
  Target: LAMA2; (-) strand; PAM type: YTN; PAM sequence: TTA
aaaagatccccctctatgat

SEQ ID NO: 199401 - DNA, 20 bp, Artificial Sequence
  Description of Artificial Sequence: Synthetic oligonucleotide
  Target: LAMA2; (-) strand; PAM type: YTN; PAM sequence: CTT
aaaaagatccccctctatga

SEQ ID NO: 199402 - DNA, 20 bp, Artificial Sequence
  Description of Artificial Sequence: Synthetic oligonucleotide
  Target: LAMA2; (-) strand; PAM type: YTN; PAM sequence: CTC
ttaaaaagatccccctctat

SEQ ID NO: 199403 - DNA, 20 bp, Artificial Sequence
  Description of Artificial Sequence: Synthetic oligonucleotide
  Target: LAMA2; (-) strand; PAM type: YTN; PAM sequence: TTA
aaagctcttaaaaagatccc

SEQ ID NO: 199404 - DNA, 20 bp, Artificial Sequence
  Description of Artificial Sequence: Synthetic oligonucleotide
  Target: LAMA2; (-) strand; PAM type: YTN; PAM sequence: TTT
aaaagctcttaaaaagatcc

SEQ ID NO: 199405 - DNA, 20 bp, Artificial Sequence
  Description of Artificial Sequence: Synthetic oligonucleotide
  Target: LAMA2; (-) strand; PAM type: YTN; PAM sequence: TTT
taaaagctcttaaaaagatc

SEQ ID NO: 199406 - DNA, 20 bp, Artificial Sequence
  Description of Artificial Sequence: Synthetic oligonucleotide
  Target: LAMA2; (-) strand; PAM type: YTN; PAM sequence: TTG
ttttaaaagctcttaaaaag

SEQ ID NO: 199407 - DNA, 20 bp, Artificial Sequence
  Description of Artificial Sequence: Synthetic oligonucleotide
  Target: LAMA2; (-) strand; PAM type: YTN; PAM sequence: TTA
aaccaaaagattgttttaaa

SEQ ID NO: 199408 - DNA, 20 bp, Artificial Sequence
  Description of Artificial Sequence: Synthetic oligonucleotide
  Target: LAMA2; (-) strand; PAM type: YTN; PAM sequence: CTT
aaaccaaaagattgttttaa

SEQ ID NO: 199409 - DNA, 20 bp, Artificial Sequence
  Description of Artificial Sequence: Synthetic oligonucleotide
  Target: LAMA2; (-) strand; PAM type: YTN; PAM sequence: CTG
ccttaaaccaaaagattgtt

SEQ ID NO: 199410 - DNA, 20 bp, Artificial Sequence
  Description of Artificial Sequence: Synthetic oligonucleotide
  Target: LAMA2; (-) strand; PAM type: YTN; PAM sequence: CTC
tgccttaaaccaaaagattg

SEQ ID NO: 199411 - DNA, 20 bp, Artificial Sequence
  Description of Artificial Sequence: Synthetic oligonucleotide
  Target: LAMA2; (-) strand; PAM type: YTN; PAM sequence: TTC
tctgccttaaaccaaaagat

SEQ ID NO: 199412 - DNA, 20 bp, Artificial Sequence
  Description of Artificial Sequence: Synthetic oligonucleotide
  Target: LAMA2; (-) strand; PAM type: YTN; PAM sequence: CTT
ctctgccttaaaccaaaaga

SEQ ID NO: 199413 - DNA, 20 bp, Artificial Sequence
  Description of Artificial Sequence: Synthetic oligonucleotide
  Target: LAMA2; (-) strand; PAM type: YTN; PAM sequence: TTG
tagaatacttctctgcctta

SEQ ID NO: 199414 - DNA, 20 bp, Artificial Sequence
  Description of Artificial Sequence: Synthetic oligonucleotide
  Target: LAMA2; (-) strand; PAM type: YTN; PAM sequence: TTC
attgtagaatacttctctgc

SEQ ID NO: 199415 - DNA, 20 bp, Artificial Sequence
  Description of Artificial Sequence: Synthetic oligonucleotide
  Target: LAMA2; (-) strand; PAM type: YTN; PAM sequence: TTT
cattgtagaatacttctctg

SEQ ID NO: 199416 - DNA, 20 bp, Artificial Sequence
  Description of Artificial Sequence: Synthetic oligonucleotide
  Target: LAMA2; (-) strand; PAM type: YTN; PAM sequence: CTA
gtgtttcattgtagaatact

SEQ ID NO: 199417 - DNA, 20 bp, Artificial Sequence
  Description of Artificial Sequence: Synthetic oligonucleotide
  Target: LAMA2; (-) strand; PAM type: YTN; PAM sequence: TTA
tgcaatctagtgtttcattg

SEQ ID NO: 199418 - DNA, 20 bp, Artificial Sequence
  Description of Artificial Sequence: Synthetic oligonucleotide
  Target: LAMA2; (-) strand; PAM type: YTN; PAM sequence: CTT
atgcaatctagtgtttcatt

SEQ ID NO: 199419 - DNA, 20 bp, Artificial Sequence
  Description of Artificial Sequence: Synthetic oligonucleotide
  Target: LAMA2; (-) strand; PAM type: YTN; PAM sequence: TTA
tcttatgcaatctagtgttt

SEQ ID NO: 199420 - DNA, 20 bp, Artificial Sequence
  Description of Artificial Sequence: Synthetic oligonucleotide
  Target: LAMA2; (-) strand; PAM type: YTN; PAM sequence: CTT
atcttatgcaatctagtgtt

SEQ ID NO: 199421 - DNA, 20 bp, Artificial Sequence
  Description of Artificial Sequence: Synthetic oligonucleotide
  Target: LAMA2; (-) strand; PAM type: YTN; PAM sequence: TTG
gaacaggcacaggcttatct

SEQ ID NO: 199422 - DNA, 20 bp, Artificial Sequence
  Description of Artificial Sequence: Synthetic oligonucleotide
  Target: LAMA2; (-) strand; PAM type: YTN; PAM sequence: TTA
agttggaacaggcacaggct

SEQ ID NO: 199423 - DNA, 20 bp, Artificial Sequence
  Description of Artificial Sequence: Synthetic oligonucleotide
  Target: LAMA2; (-) strand; PAM type: YTN; PAM sequence: TTA
gagtaacaaagaaaattaag

SEQ ID NO: 199424 - DNA, 20 bp, Artificial Sequence
  Description of Artificial Sequence: Synthetic oligonucleotide
  Target: LAMA2; (-) strand; PAM type: YTN; PAM sequence: CTT
agagtaacaaagaaaattaa

SEQ ID NO: 199425 - DNA, 20 bp, Artificial Sequence
  Description of Artificial Sequence: Synthetic oligonucleotide
  Target: LAMA2; (-) strand; PAM type: YTN; PAM sequence: TTC
ttagagtaacaaagaaaatt

SEQ ID NO: 199426 - DNA, 20 bp, Artificial Sequence
  Description of Artificial Sequence: Synthetic oligonucleotide
  Target: LAMA2; (-) strand; PAM type: YTN; PAM sequence: TTA
catatatatggggagttctt

SEQ ID NO: 199427 - DNA, 20 bp, Artificial Sequence
  Description of Artificial Sequence: Synthetic oligonucleotide
  Target: LAMA2; (-) strand; PAM type: YTN; PAM sequence: TTT
acatatatatggggagttct

SEQ ID NO: 199428 - DNA, 20 bp, Artificial Sequence
  Description of Artificial Sequence: Synthetic oligonucleotide
  Target: LAMA2; (-) strand; PAM type: YTN; PAM sequence: CTG
aaatttacatatatatgggg

SEQ ID NO: 199429 - DNA, 20 bp, Artificial Sequence
  Description of Artificial Sequence: Synthetic oligonucleotide
  Target: LAMA2; (-) strand; PAM type: YTN; PAM sequence: CTG
ctgaaatttacatatatatg

SEQ ID NO: 199430 - DNA, 20 bp, Artificial Sequence
  Description of Artificial Sequence: Synthetic oligonucleotide
  Target: LAMA2; (-) strand; PAM type: YTN; PAM sequence: TTA
acactgctgaaatttacata

SEQ ID NO: 199431 - DNA, 20 bp, Artificial Sequence
  Description of Artificial Sequence: Synthetic oligonucleotide
  Target: LAMA2; (-) strand; PAM type: YTN; PAM sequence: CTG
acataccaaagaaagcccat

SEQ ID NO: 199432 - DNA, 20 bp, Artificial Sequence
  Description of Artificial Sequence: Synthetic oligonucleotide
  Target: LAMA2; (-) strand; PAM type: YTN; PAM sequence: TTC
tgacataccaaagaaagccc

SEQ ID NO: 199433 - DNA, 20 bp, Artificial Sequence
  Description of Artificial Sequence: Synthetic oligonucleotide
  Target: LAMA2; (-) strand; PAM type: YTN; PAM sequence: CTT
ctgacataccaaagaaagcc

SEQ ID NO: 199434 - DNA, 20 bp, Artificial Sequence
  Description of Artificial Sequence: Synthetic oligonucleotide
  Target: LAMA2; (-) strand; PAM type: YTN; PAM sequence: TTC
ttctgacataccaaagaaag

SEQ ID NO: 199435 - DNA, 20 bp, Artificial Sequence
  Description of Artificial Sequence: Synthetic oligonucleotide
  Target: LAMA2; (-) strand; PAM type: YTN; PAM sequence: CTT
cttctgacataccaaagaaa

SEQ ID NO: 199436 - DNA, 20 bp, Artificial Sequence
  Description of Artificial Sequence: Synthetic oligonucleotide
  Target: LAMA2; (-) strand; PAM type: YTN; PAM sequence: TTC
ttcttctgacataccaaaga

SEQ ID NO: 199437 - DNA, 20 bp, Artificial Sequence
  Description of Artificial Sequence: Synthetic oligonucleotide
  Target: LAMA2; (-) strand; PAM type: YTN; PAM sequence: TTA
cattcttcttctgacatacc

SEQ ID NO: 199438 - DNA, 20 bp, Artificial Sequence
  Description of Artificial Sequence: Synthetic oligonucleotide
  Target: LAMA2; (-) strand; PAM type: YTN; PAM sequence: TTC
acaaattacattcttcttct

SEQ ID NO: 199439 - DNA, 20 bp, Artificial Sequence
  Description of Artificial Sequence: Synthetic oligonucleotide
  Target: LAMA2; (-) strand; PAM type: YTN; PAM sequence: CTA
gttcacaaattacattcttc

SEQ ID NO: 199440 - DNA, 20 bp, Artificial Sequence
  Description of Artificial Sequence: Synthetic oligonucleotide
  Target: LAMA2; (-) strand; PAM type: YTN; PAM sequence: TTA
tctagttcacaaattacatt

SEQ ID NO: 199441 - DNA, 20 bp, Artificial Sequence
  Description of Artificial Sequence: Synthetic oligonucleotide
  Target: LAMA2; (-) strand; PAM type: YTN; PAM sequence: TTT
atctagttcacaaattacat

SEQ ID NO: 199442 - DNA, 20 bp, Artificial Sequence
  Description of Artificial Sequence: Synthetic oligonucleotide
  Target: LAMA2; (-) strand; PAM type: YTN; PAM sequence: TTA
tagatttatctagttcacaa

SEQ ID NO: 199443 - DNA, 20 bp, Artificial Sequence
  Description of Artificial Sequence: Synthetic oligonucleotide
  Target: LAMA2; (-) strand; PAM type: YTN; PAM sequence: CTT
atagatttatctagttcaca

SEQ ID NO: 199444 - DNA, 20 bp, Artificial Sequence
  Description of Artificial Sequence: Synthetic oligonucleotide
  Target: LAMA2; (-) strand; PAM type: YTN; PAM sequence: CTG
tgccttatagatttatctag

SEQ ID NO: 199445 - DNA, 20 bp, Artificial Sequence
  Description of Artificial Sequence: Synthetic oligonucleotide
  Target: LAMA2; (-) strand; PAM type: YTN; PAM sequence: CTC
acacctgtgccttatagatt

SEQ ID NO: 199446 - DNA, 20 bp, Artificial Sequence
  Description of Artificial Sequence: Synthetic oligonucleotide
  Target: LAMA2; (-) strand; PAM type: YTN; PAM sequence: TTG
ctcacacctgtgccttatag

SEQ ID NO: 199447 - DNA, 20 bp, Artificial Sequence
  Description of Artificial Sequence: Synthetic oligonucleotide
  Target: LAMA2; (-) strand; PAM type: YTN; PAM sequence: TTT
gctcacacctgtgccttata

SEQ ID NO: 199448 - DNA, 20 bp, Artificial Sequence
  Description of Artificial Sequence: Synthetic oligonucleotide
  Target: LAMA2; (-) strand; PAM type: YTN; PAM sequence: TTT
tgctcacacctgtgccttat

SEQ ID NO: 199449 - DNA, 20 bp, Artificial Sequence
  Description of Artificial Sequence: Synthetic oligonucleotide
  Target: LAMA2; (-) strand; PAM type: YTN; PAM sequence: TTT
ttgctcacacctgtgcctta

SEQ ID NO: 199450 - DNA, 20 bp, Artificial Sequence
  Description of Artificial Sequence: Synthetic oligonucleotide
  Target: LAMA2; (-) strand; PAM type: YTN; PAM sequence: TTT
tttgctcacacctgtgcctt

SEQ ID NO: 199451 - DNA, 20 bp, Artificial Sequence
  Description of Artificial Sequence: Synthetic oligonucleotide
  Target: LAMA2; (-) strand; PAM type: YTN; PAM sequence: TTT
ttttgctcacacctgtgcct

SEQ ID NO: 199452 - DNA, 20 bp, Artificial Sequence
  Description of Artificial Sequence: Synthetic oligonucleotide
  Target: LAMA2; (-) strand; PAM type: YTN; PAM sequence: TTT
tttttgctcacacctgtgcc

SEQ ID NO: 199453 - DNA, 20 bp, Artificial Sequence
  Description of Artificial Sequence: Synthetic oligonucleotide
  Target: LAMA2; (-) strand; PAM type: YTN; PAM sequence: TTT
ttttttgctcacacctgtgc

SEQ ID NO: 199454 - DNA, 20 bp, Artificial Sequence
  Description of Artificial Sequence: Synthetic oligonucleotide
  Target: LAMA2; (-) strand; PAM type: YTN; PAM sequence: TTT
tttttttgctcacacctgtg

SEQ ID NO: 199455 - DNA, 20 bp, Artificial Sequence
  Description of Artificial Sequence: Synthetic oligonucleotide
  Target: LAMA2; (-) strand; PAM type: YTN; PAM sequence: TTT
ttttttttgctcacacctgt

SEQ ID NO: 199456 - DNA, 20 bp, Artificial Sequence
  Description of Artificial Sequence: Synthetic oligonucleotide
  Target: LAMA2; (-) strand; PAM type: YTN; PAM sequence: TTA
tttttttttttgctcacacc

SEQ ID NO: 199457 - DNA, 20 bp, Artificial Sequence
  Description of Artificial Sequence: Synthetic oligonucleotide
  Target: LAMA2; (-) strand; PAM type: YTN; PAM sequence: TTA
ttatttttttttttgctcac

SEQ ID NO: 199458 - DNA, 20 bp, Artificial Sequence
  Description of Artificial Sequence: Synthetic oligonucleotide
  Target: LAMA2; (-) strand; PAM type: YTN; PAM sequence: CTT
attatttttttttttgctca

SEQ ID NO: 199459 - DNA, 20 bp, Artificial Sequence
  Description of Artificial Sequence: Synthetic oligonucleotide
  Target: LAMA2; (-) strand; PAM type: YTN; PAM sequence: TTC
ttattatttttttttttgct

SEQ ID NO: 199460 - DNA, 20 bp, Artificial Sequence
  Description of Artificial Sequence: Synthetic oligonucleotide
  Target: LAMA2; (-) strand; PAM type: YTN; PAM sequence: TTG
tgaggagtgattcttattat

SEQ ID NO: 199461 - DNA, 20 bp, Artificial Sequence
  Description of Artificial Sequence: Synthetic oligonucleotide
  Target: LAMA2; (-) strand; PAM type: YTN; PAM sequence: CTT
gtgaggagtgattcttatta

SEQ ID NO: 199462 - DNA, 20 bp, Artificial Sequence
  Description of Artificial Sequence: Synthetic oligonucleotide
  Target: LAMA2; (-) strand; PAM type: YTN; PAM sequence: TTC
cttgtgaggagtgattctta

SEQ ID NO: 199463 - DNA, 20 bp, Artificial Sequence
  Description of Artificial Sequence: Synthetic oligonucleotide
  Target: LAMA2; (-) strand; PAM type: YTN; PAM sequence: TTT
ccttgtgaggagtgattctt

SEQ ID NO: 199464 - DNA, 20 bp, Artificial Sequence
  Description of Artificial Sequence: Synthetic oligonucleotide
  Target: LAMA2; (-) strand; PAM type: YTN; PAM sequence: TTA
gtatttccttgtgaggagtg

SEQ ID NO: 199465 - DNA, 20 bp, Artificial Sequence
  Description of Artificial Sequence: Synthetic oligonucleotide
  Target: LAMA2; (-) strand; PAM type: YTN; PAM sequence: TTT
agtatttccttgtgaggagt

SEQ ID NO: 199466 - DNA, 20 bp, Artificial Sequence
  Description of Artificial Sequence: Synthetic oligonucleotide
  Target: LAMA2; (-) strand; PAM type: YTN; PAM sequence: TTA
tttagtatttccttgtgagg

SEQ ID NO: 199467 - DNA, 20 bp, Artificial Sequence
  Description of Artificial Sequence: Synthetic oligonucleotide
  Target: LAMA2; (-) strand; PAM type: YTN; PAM sequence: TTG
ttatttagtatttccttgtg

SEQ ID NO: 199468 - DNA, 20 bp, Artificial Sequence
  Description of Artificial Sequence: Synthetic oligonucleotide
  Target: LAMA2; (-) strand; PAM type: YTN; PAM sequence: CTC
aataataattgttatttagt

SEQ ID NO: 199469 - DNA, 20 bp, Artificial Sequence
  Description of Artificial Sequence: Synthetic oligonucleotide
  Target: LAMA2; (-) strand; PAM type: YTN; PAM sequence: CTA
tggataaaaaaaatgcatga

SEQ ID NO: 199470 - DNA, 20 bp, Artificial Sequence
  Description of Artificial Sequence: Synthetic oligonucleotide
  Target: LAMA2; (-) strand; PAM type: YTN; PAM sequence: CTA
ctatggataaaaaaaatgca

SEQ ID NO: 199471 - DNA, 20 bp, Artificial Sequence
  Description of Artificial Sequence: Synthetic oligonucleotide
  Target: LAMA2; (-) strand; PAM type: YTN; PAM sequence: TTA
ctactatggataaaaaaaat

SEQ ID NO: 199472 - DNA, 20 bp, Artificial Sequence
  Description of Artificial Sequence: Synthetic oligonucleotide
  Target: LAMA2; (-) strand; PAM type: YTN; PAM sequence: CTT
actactatggataaaaaaaa

SEQ ID NO: 199473 - DNA, 20 bp, Artificial Sequence
  Description of Artificial Sequence: Synthetic oligonucleotide
  Target: LAMA2; (-) strand; PAM type: YTN; PAM sequence: TTA
tagagatagtagtacttact

SEQ ID NO: 199474 - DNA, 20 bp, Artificial Sequence
  Description of Artificial Sequence: Synthetic oligonucleotide
  Target: LAMA2; (-) strand; PAM type: YTN; PAM sequence: TTT
atagagatagtagtacttac

SEQ ID NO: 199475 - DNA, 20 bp, Artificial Sequence
  Description of Artificial Sequence: Synthetic oligonucleotide
  Target: LAMA2; (-) strand; PAM type: YTN; PAM sequence: CTT
tatagagatagtagtactta

SEQ ID NO: 199476 - DNA, 20 bp, Artificial Sequence
  Description of Artificial Sequence: Synthetic oligonucleotide
  Target: LAMA2; (-) strand; PAM type: YTN; PAM sequence: CTC
tttatagagatagtagtact

SEQ ID NO: 199477 - DNA, 20 bp, Artificial Sequence
  Description of Artificial Sequence: Synthetic oligonucleotide
  Target: LAMA2; (-) strand; PAM type: YTN; PAM sequence: TTC
ctctttatagagatagtagt

SEQ ID NO: 199478 - DNA, 20 bp, Artificial Sequence
  Description of Artificial Sequence: Synthetic oligonucleotide
  Target: LAMA2; (-) strand; PAM type: YTN; PAM sequence: TTT
cctctttatagagatagtag

SEQ ID NO: 199479 - DNA, 20 bp, Artificial Sequence
  Description of Artificial Sequence: Synthetic oligonucleotide
  Target: LAMA2; (-) strand; PAM type: YTN; PAM sequence: TTT
tcctctttatagagatagta

SEQ ID NO: 199480 - DNA, 20 bp, Artificial Sequence
  Description of Artificial Sequence: Synthetic oligonucleotide
  Target: LAMA2; (-) strand; PAM type: YTN; PAM sequence: TTT
ttcctctttatagagatagt

SEQ ID NO: 199481 - DNA, 20 bp, Artificial Sequence
  Description of Artificial Sequence: Synthetic oligonucleotide
  Target: LAMA2; (-) strand; PAM type: YTN; PAM sequence: TTG
aatttttcctctttatagag

SEQ ID NO: 199482 - DNA, 20 bp, Artificial Sequence
  Description of Artificial Sequence: Synthetic oligonucleotide
  Target: LAMA2; (-) strand; PAM type: YTN; PAM sequence: TTG
gattgaatttttcctcttta

SEQ ID NO: 199483 - DNA, 20 bp, Artificial Sequence
  Description of Artificial Sequence: Synthetic oligonucleotide
  Target: LAMA2; (-) strand; PAM type: YTN; PAM sequence: CTG
ttggattgaatttttcctct

SEQ ID NO: 199484 - DNA, 20 bp, Artificial Sequence
  Description of Artificial Sequence: Synthetic oligonucleotide
  Target: LAMA2; (-) strand; PAM type: YTN; PAM sequence: TTA
atgactgttggattgaattt

SEQ ID NO: 199485 - DNA, 20 bp, Artificial Sequence
  Description of Artificial Sequence: Synthetic oligonucleotide
  Target: LAMA2; (-) strand; PAM type: YTN; PAM sequence: TTT
aatgactgttggattgaatt

SEQ ID NO: 199486 - DNA, 20 bp, Artificial Sequence
  Description of Artificial Sequence: Synthetic oligonucleotide
  Target: LAMA2; (-) strand; PAM type: YTN; PAM sequence: CTT
taatgactgttggattgaat

SEQ ID NO: 199487 - DNA, 20 bp, Artificial Sequence
  Description of Artificial Sequence: Synthetic oligonucleotide
  Target: LAMA2; (-) strand; PAM type: YTN; PAM sequence: TTA
atagaacaactttaatgact

SEQ ID NO: 199488 - DNA, 20 bp, Artificial Sequence
  Description of Artificial Sequence: Synthetic oligonucleotide
  Target: LAMA2; (-) strand; PAM type: YTN; PAM sequence: TTT
aatagaacaactttaatgac

SEQ ID NO: 199489 - DNA, 20 bp, Artificial Sequence
  Description of Artificial Sequence: Synthetic oligonucleotide
  Target: LAMA2; (-) strand; PAM type: YTN; PAM sequence: CTA
catttaatagaacaacttta

SEQ ID NO: 199490 - DNA, 20 bp, Artificial Sequence
  Description of Artificial Sequence: Synthetic oligonucleotide
  Target: LAMA2; (-) strand; PAM type: YTN; PAM sequence: TTA
tcactacatttaatagaaca

SEQ ID NO: 199491 - DNA, 20 bp, Artificial Sequence
  Description of Artificial Sequence: Synthetic oligonucleotide
  Target: LAMA2; (-) strand; PAM type: YTN; PAM sequence: TTT
atcactacatttaatagaac

SEQ ID NO: 199492 - DNA, 20 bp, Artificial Sequence
  Description of Artificial Sequence: Synthetic oligonucleotide
  Target: LAMA2; (-) strand; PAM type: YTN; PAM sequence: CTG
aagatttatcactacattta

SEQ ID NO: 199493 - DNA, 20 bp, Artificial Sequence
  Description of Artificial Sequence: Synthetic oligonucleotide
  Target: LAMA2; (-) strand; PAM type: YTN; PAM sequence: TTA
aaaatacaaactgaagattt

SEQ ID NO: 199494 - DNA, 20 bp, Artificial Sequence
  Description of Artificial Sequence: Synthetic oligonucleotide
  Target: LAMA2; (-) strand; PAM type: YTN; PAM sequence: TTA
tattaaaaatacaaactgaa

SEQ ID NO: 199495 - DNA, 20 bp, Artificial Sequence
  Description of Artificial Sequence: Synthetic oligonucleotide
  Target: LAMA2; (-) strand; PAM type: YTN; PAM sequence: CTT
atattaaaaatacaaactga

SEQ ID NO: 199496 - DNA, 20 bp, Artificial Sequence
  Description of Artificial Sequence: Synthetic oligonucleotide
  Target: LAMA2; (-) strand; PAM type: YTN; PAM sequence: CTC
agatcttatattaaaaatac

SEQ ID NO: 199497 - DNA, 20 bp, Artificial Sequence
  Description of Artificial Sequence: Synthetic oligonucleotide
  Target: LAMA2; (-) strand; PAM type: YTN; PAM sequence: TTA
tccctcagatcttatattaa

SEQ ID NO: 199498 - DNA, 20 bp, Artificial Sequence
  Description of Artificial Sequence: Synthetic oligonucleotide
  Target: LAMA2; (-) strand; PAM type: YTN; PAM sequence: TTG
attatccctcagatcttata

SEQ ID NO: 199499 - DNA, 20 bp, Artificial Sequence
  Description of Artificial Sequence: Synthetic oligonucleotide
  Target: LAMA2; (-) strand; PAM type: YTN; PAM sequence: TTT
gattatccctcagatcttat

SEQ ID NO: 199500 - DNA, 20 bp, Artificial Sequence
  Description of Artificial Sequence: Synthetic oligonucleotide
  Target: LAMA2; (-) strand; PAM type: YTN; PAM sequence: CTT
tgattatccctcagatctta

SEQ ID NO: 199501 - DNA, 20 bp, Artificial Sequence
  Description of Artificial Sequence: Synthetic oligonucleotide
  Target: LAMA2; (-) strand; PAM type: YTN; PAM sequence: TTG
ctttgattatccctcagatc

SEQ ID NO: 199502 - DNA, 20 bp, Artificial Sequence
  Description of Artificial Sequence: Synthetic oligonucleotide
  Target: LAMA2; (-) strand; PAM type: YTN; PAM sequence: TTT
gctttgattatccctcagat

SEQ ID NO: 199503 - DNA, 20 bp, Artificial Sequence
  Description of Artificial Sequence: Synthetic oligonucleotide
  Target: LAMA2; (-) strand; PAM type: YTN; PAM sequence: CTT
tgctttgattatccctcaga

SEQ ID NO: 199504 - DNA, 20 bp, Artificial Sequence
  Description of Artificial Sequence: Synthetic oligonucleotide
  Target: LAMA2; (-) strand; PAM type: YTN; PAM sequence: CTA
tccacataagcctttgcttt

SEQ ID NO: 199505 - DNA, 20 bp, Artificial Sequence
  Description of Artificial Sequence: Synthetic oligonucleotide
  Target: LAMA2; (-) strand; PAM type: YTN; PAM sequence: CTG
gtatgtaataaatgccctat

SEQ ID NO: 199506 - DNA, 20 bp, Artificial Sequence
  Description of Artificial Sequence: Synthetic oligonucleotide
  Target: LAMA2; (-) strand; PAM type: YTN; PAM sequence: TTC
ctggtatgtaataaatgccc

SEQ ID NO: 199507 - DNA, 20 bp, Artificial Sequence
  Description of Artificial Sequence: Synthetic oligonucleotide
  Target: LAMA2; (-) strand; PAM type: YTN; PAM sequence: TTT
cctggtatgtaataaatgcc

SEQ ID NO: 199508 - DNA, 20 bp, Artificial Sequence
  Description of Artificial Sequence: Synthetic oligonucleotide
  Target: LAMA2; (-) strand; PAM type: YTN; PAM sequence: TTC
aggacatttcctggtatgta

SEQ ID NO: 199509 - DNA, 20 bp, Artificial Sequence
  Description of Artificial Sequence: Synthetic oligonucleotide
  Target: LAMA2; (-) strand; PAM type: YTN; PAM sequence: TTA
atgaatcatgtgtaaagagt

SEQ ID NO: 199510 - DNA, 20 bp, Artificial Sequence
  Description of Artificial Sequence: Synthetic oligonucleotide
  Target: LAMA2; (-) strand; PAM type: YTN; PAM sequence: TTC
agaaaattaatgaatcatgt

SEQ ID NO: 199511 - DNA, 20 bp, Artificial Sequence
  Description of Artificial Sequence: Synthetic oligonucleotide
  Target: LAMA2; (-) strand; PAM type: YTN; PAM sequence: CTA
caagtgtaattcagaaaatt

SEQ ID NO: 199512 - DNA, 20 bp, Artificial Sequence
  Description of Artificial Sequence: Synthetic oligonucleotide
  Target: LAMA2; (-) strand; PAM type: YTN; PAM sequence: CTA
tctacaagtgtaattcagaa

SEQ ID NO: 199513 - DNA, 20 bp, Artificial Sequence
  Description of Artificial Sequence: Synthetic oligonucleotide
  Target: LAMA2; (-) strand; PAM type: YTN; PAM sequence: TTC
ctatctacaagtgtaattca

SEQ ID NO: 199514 - DNA, 20 bp, Artificial Sequence
  Description of Artificial Sequence: Synthetic oligonucleotide
  Target: LAMA2; (-) strand; PAM type: YTN; PAM sequence: CTA
taaaatgaggataacaatag

SEQ ID NO: 199515 - DNA, 20 bp, Artificial Sequence
  Description of Artificial Sequence: Synthetic oligonucleotide
  Target: LAMA2; (-) strand; PAM type: YTN; PAM sequence: TTG
tctataaaatgaggataaca

SEQ ID NO: 199516 - DNA, 20 bp, Artificial Sequence
  Description of Artificial Sequence: Synthetic oligonucleotide
  Target: LAMA2; (-) strand; PAM type: YTN; PAM sequence: TTT
gtctataaaatgaggataac

SEQ ID NO: 199517 - DNA, 20 bp, Artificial Sequence
  Description of Artificial Sequence: Synthetic oligonucleotide
  Target: LAMA2; (-) strand; PAM type: YTN; PAM sequence: CTT
tgtctataaaatgaggataa

SEQ ID NO: 199518 - DNA, 20 bp, Artificial Sequence
  Description of Artificial Sequence: Synthetic oligonucleotide
  Target: LAMA2; (-) strand; PAM type: YTN; PAM sequence: CTG
tgtctttgtctataaaatga

SEQ ID NO: 199519 - DNA, 20 bp, Artificial Sequence
  Description of Artificial Sequence: Synthetic oligonucleotide
  Target: LAMA2; (-) strand; PAM type: YTN; PAM sequence: CTC
tgtgtctttgtctataaaat

SEQ ID NO: 199520 - DNA, 20 bp, Artificial Sequence
  Description of Artificial Sequence: Synthetic oligonucleotide
  Target: LAMA2; (-) strand; PAM type: YTN; PAM sequence: CTA
tctctgtgtctttgtctata

SEQ ID NO: 199521 - DNA, 20 bp, Artificial Sequence
  Description of Artificial Sequence: Synthetic oligonucleotide
  Target: LAMA2; (-) strand; PAM type: YTN; PAM sequence: CTC
tatctctgtgtctttgtcta

SEQ ID NO: 199522 - DNA, 20 bp, Artificial Sequence
  Description of Artificial Sequence: Synthetic oligonucleotide
  Target: LAMA2; (-) strand; PAM type: YTN; PAM sequence: TTA
acctctatctctgtgtcttt

SEQ ID NO: 199523 - DNA, 20 bp, Artificial Sequence
  Description of Artificial Sequence: Synthetic oligonucleotide
  Target: LAMA2; (-) strand; PAM type: YTN; PAM sequence: CTT
aacctctatctctgtgtctt

SEQ ID NO: 199524 - DNA, 20 bp, Artificial Sequence
  Description of Artificial Sequence: Synthetic oligonucleotide
  Target: LAMA2; (-) strand; PAM type: YTN; PAM sequence: CTG
tgtggccccagtaaagatac

SEQ ID NO: 199525 - DNA, 20 bp, Artificial Sequence
  Description of Artificial Sequence: Synthetic oligonucleotide
  Target: LAMA2; (-) strand; PAM type: YTN; PAM sequence: CTA
gctgtgtggccccagtaaag

SEQ ID NO: 199526 - DNA, 20 bp, Artificial Sequence
  Description of Artificial Sequence: Synthetic oligonucleotide
  Target: LAMA2; (-) strand; PAM type: YTN; PAM sequence: TTC
ctagctgtgtggccccagta

SEQ ID NO: 199527 - DNA, 20 bp, Artificial Sequence
  Description of Artificial Sequence: Synthetic oligonucleotide
  Target: LAMA2; (-) strand; PAM type: YTN; PAM sequence: CTG
ccaattcctagctgtgtggc

SEQ ID NO: 199528 - DNA, 20 bp, Artificial Sequence
  Description of Artificial Sequence: Synthetic oligonucleotide
  Target: LAMA2; (-) strand; PAM type: YTN; PAM sequence: TTC
tgccaattcctagctgtgtg

SEQ ID NO: 199529 - DNA, 20 bp, Artificial Sequence
  Description of Artificial Sequence: Synthetic oligonucleotide
  Target: LAMA2; (-) strand; PAM type: YTN; PAM sequence: CTG
gttctgccaattcctagctg

SEQ ID NO: 199530 - DNA, 20 bp, Artificial Sequence
  Description of Artificial Sequence: Synthetic oligonucleotide
  Target: LAMA2; (-) strand; PAM type: YTN; PAM sequence: CTA
aatcctggttctgccaattc

SEQ ID NO: 199531 - DNA, 20 bp, Artificial Sequence
  Description of Artificial Sequence: Synthetic oligonucleotide
  Target: LAMA2; (-) strand; PAM type: YTN; PAM sequence: TTA
gtgcctaaatcctggttctg

SEQ ID NO: 199532 - DNA, 20 bp, Artificial Sequence
  Description of Artificial Sequence: Synthetic oligonucleotide
  Target: LAMA2; (-) strand; PAM type: YTN; PAM sequence: TTT
agtgcctaaatcctggttct

SEQ ID NO: 199533 - DNA, 20 bp, Artificial Sequence
  Description of Artificial Sequence: Synthetic oligonucleotide
  Target: LAMA2; (-) strand; PAM type: YTN; PAM sequence: TTT
tagtgcctaaatcctggttc

SEQ ID NO: 199534 - DNA, 20 bp, Artificial Sequence
  Description of Artificial Sequence: Synthetic oligonucleotide
  Target: LAMA2; (-) strand; PAM type: YTN; PAM sequence: TTA
aataaacagattttagtgcc

SEQ ID NO: 199535 - DNA, 20 bp, Artificial Sequence
  Description of Artificial Sequence: Synthetic oligonucleotide
  Target: LAMA2; (-) strand; PAM type: YTN; PAM sequence: CTA
gtggttaaataaacagattt

SEQ ID NO: 199536 - DNA, 20 bp, Artificial Sequence
  Description of Artificial Sequence: Synthetic oligonucleotide
  Target: LAMA2; (-) strand; PAM type: YTN; PAM sequence: TTC
caatggccatgtaggctagt

SEQ ID NO: 199537 - DNA, 20 bp, Artificial Sequence
  Description of Artificial Sequence: Synthetic oligonucleotide
  Target: LAMA2; (-) strand; PAM type: YTN; PAM sequence: TTT
ccaatggccatgtaggctag

SEQ ID NO: 199538 - DNA, 20 bp, Artificial Sequence
  Description of Artificial Sequence: Synthetic oligonucleotide
  Target: LAMA2; (-) strand; PAM type: YTN; PAM sequence: TTC
atttccaatggccatgtagg

SEQ ID NO: 199539 - DNA, 20 bp, Artificial Sequence
  Description of Artificial Sequence: Synthetic oligonucleotide
  Target: LAMA2; (-) strand; PAM type: YTN; PAM sequence: CTG
tataattcatttccaatggc

SEQ ID NO: 199540 - DNA, 20 bp, Artificial Sequence
  Description of Artificial Sequence: Synthetic oligonucleotide
  Target: LAMA2; (-) strand; PAM type: YTN; PAM sequence: CTC
tgtataattcatttccaatg

SEQ ID NO: 199541 - DNA, 20 bp, Artificial Sequence
  Description of Artificial Sequence: Synthetic oligonucleotide
  Target: LAMA2; (-) strand; PAM type: YTN; PAM sequence: TTC
atctctgtataattcatttc

SEQ ID NO: 199542 - DNA, 20 bp, Artificial Sequence
  Description of Artificial Sequence: Synthetic oligonucleotide
  Target: LAMA2; (-) strand; PAM type: YTN; PAM sequence: TTT
catctctgtataattcattt

SEQ ID NO: 199543 - DNA, 20 bp, Artificial Sequence
  Description of Artificial Sequence: Synthetic oligonucleotide
  Target: LAMA2; (-) strand; PAM type: YTN; PAM sequence: TTT
tcatctctgtataattcatt

SEQ ID NO: 199544 - DNA, 20 bp, Artificial Sequence
  Description of Artificial Sequence: Synthetic oligonucleotide
  Target: LAMA2; (-) strand; PAM type: YTN; PAM sequence: CTT
ttcatctctgtataattcat

SEQ ID NO: 199545 - DNA, 20 bp, Artificial Sequence
  Description of Artificial Sequence: Synthetic oligonucleotide
  Target: LAMA2; (-) strand; PAM type: YTN; PAM sequence: CTA
taacgaaaacttttcatctc

SEQ ID NO: 199546 - DNA, 20 bp, Artificial Sequence
  Description of Artificial Sequence: Synthetic oligonucleotide
  Target: LAMA2; (-) strand; PAM type: YTN; PAM sequence: TTC
aacgagggaatctataacga

SEQ ID NO: 199547 - DNA, 20 bp, Artificial Sequence
  Description of Artificial Sequence: Synthetic oligonucleotide
  Target: LAMA2; (-) strand; PAM type: YTN; PAM sequence: TTT
caacgagggaatctataacg

SEQ ID NO: 199548 - DNA, 20 bp, Artificial Sequence
  Description of Artificial Sequence: Synthetic oligonucleotide
  Target: LAMA2; (-) strand; PAM type: YTN; PAM sequence: TTG
agtttcaacgagggaatcta

SEQ ID NO: 199549 - DNA, 20 bp, Artificial Sequence
  Description of Artificial Sequence: Synthetic oligonucleotide
  Target: LAMA2; (-) strand; PAM type: YTN; PAM sequence: TTT
gagtttcaacgagggaatct

SEQ ID NO: 199550 - DNA, 20 bp, Artificial Sequence
  Description of Artificial Sequence: Synthetic oligonucleotide
  Target: LAMA2; (-) strand; PAM type: YTN; PAM sequence: TTT
tgagtttcaacgagggaatc

SEQ ID NO: 199551 - DNA, 20 bp, Artificial Sequence
  Description of Artificial Sequence: Synthetic oligonucleotide
  Target: LAMA2; (-) strand; PAM type: YTN; PAM sequence: TTT
ttgagtttcaacgagggaat

SEQ ID NO: 199552 - DNA, 20 bp, Artificial Sequence
  Description of Artificial Sequence: Synthetic oligonucleotide
  Target: LAMA2; (-) strand; PAM type: YTN; PAM sequence: CTG
tttttgagtttcaacgaggg

SEQ ID NO: 199553 - DNA, 20 bp, Artificial Sequence
  Description of Artificial Sequence: Synthetic oligonucleotide
  Target: LAMA2; (-) strand; PAM type: YTN; PAM sequence: TTC
tgtttttgagtttcaacgag

SEQ ID NO: 199554 - DNA, 20 bp, Artificial Sequence
  Description of Artificial Sequence: Synthetic oligonucleotide
  Target: LAMA2; (-) strand; PAM type: YTN; PAM sequence: CTT
ctgtttttgagtttcaacga

SEQ ID NO: 199555 - DNA, 20 bp, Artificial Sequence
  Description of Artificial Sequence: Synthetic oligonucleotide
  Target: LAMA2; (-) strand; PAM type: YTN; PAM sequence: TTG
ccttctgtttttgagtttca

SEQ ID NO: 199556 - DNA, 20 bp, Artificial Sequence
  Description of Artificial Sequence: Synthetic oligonucleotide
  Target: LAMA2; (-) strand; PAM type: YTN; PAM sequence: TTT
gccttctgtttttgagtttc

SEQ ID NO: 199557 - DNA, 20 bp, Artificial Sequence
  Description of Artificial Sequence: Synthetic oligonucleotide
  Target: LAMA2; (-) strand; PAM type: YTN; PAM sequence: TTT
tgccttctgtttttgagttt

SEQ ID NO: 199558 - DNA, 20 bp, Artificial Sequence
  Description of Artificial Sequence: Synthetic oligonucleotide
  Target: LAMA2; (-) strand; PAM type: YTN; PAM sequence: TTA
catattttgccttctgtttt

SEQ ID NO: 199559 - DNA, 20 bp, Artificial Sequence
  Description of Artificial Sequence: Synthetic oligonucleotide
  Target: LAMA2; (-) strand; PAM type: YTN; PAM sequence: TTT
acatattttgccttctgttt

SEQ ID NO: 199560 - DNA, 20 bp, Artificial Sequence
  Description of Artificial Sequence: Synthetic oligonucleotide
  Target: LAMA2; (-) strand; PAM type: YTN; PAM sequence: TTT
tacatattttgccttctgtt

SEQ ID NO: 199561 - DNA, 20 bp, Artificial Sequence
  Description of Artificial Sequence: Synthetic oligonucleotide
  Target: LAMA2; (-) strand; PAM type: YTN; PAM sequence: CTT
ttacatattttgccttctgt

SEQ ID NO: 199562 - DNA, 20 bp, Artificial Sequence
  Description of Artificial Sequence: Synthetic oligonucleotide
  Target: LAMA2; (-) strand; PAM type: YTN; PAM sequence: TTC
ttttacatattttgccttct

SEQ ID NO: 199563 - DNA, 20 bp, Artificial Sequence
  Description of Artificial Sequence: Synthetic oligonucleotide
  Target: LAMA2; (-) strand; PAM type: YTN; PAM sequence: TTG
agttcttttacatattttgc

SEQ ID NO: 199564 - DNA, 20 bp, Artificial Sequence
  Description of Artificial Sequence: Synthetic oligonucleotide
  Target: LAMA2; (-) strand; PAM type: YTN; PAM sequence: TTT
gagttcttttacatattttg

SEQ ID NO: 199565 - DNA, 20 bp, Artificial Sequence
  Description of Artificial Sequence: Synthetic oligonucleotide
  Target: LAMA2; (-) strand; PAM type: YTN; PAM sequence: TTT
tgagttcttttacatatttt

SEQ ID NO: 199566 - DNA, 20 bp, Artificial Sequence
  Description of Artificial Sequence: Synthetic oligonucleotide
  Target: LAMA2; (-) strand; PAM type: YTN; PAM sequence: CTC
agttttgagttcttttacat

SEQ ID NO: 199567 - DNA, 20 bp, Artificial Sequence
  Description of Artificial Sequence: Synthetic oligonucleotide
  Target: LAMA2; (-) strand; PAM type: YTN; PAM sequence: TTC
tcagttttgagttcttttac

SEQ ID NO: 199568 - DNA, 20 bp, Artificial Sequence
  Description of Artificial Sequence: Synthetic oligonucleotide
  Target: LAMA2; (-) strand; PAM type: YTN; PAM sequence: TTA
aaaatattctcagttttgag

SEQ ID NO: 199569 - DNA, 20 bp, Artificial Sequence
  Description of Artificial Sequence: Synthetic oligonucleotide
  Target: LAMA2; (-) strand; PAM type: YTN; PAM sequence: TTT
aaaaatattctcagttttga

SEQ ID NO: 199570 - DNA, 20 bp, Artificial Sequence
  Description of Artificial Sequence: Synthetic oligonucleotide
  Target: LAMA2; (-) strand; PAM type: YTN; PAM sequence: TTT
taaaaatattctcagttttg

SEQ ID NO: 199571 - DNA, 20 bp, Artificial Sequence
  Description of Artificial Sequence: Synthetic oligonucleotide
  Target: LAMA2; (-) strand; PAM type: YTN; PAM sequence: TTT
ttaaaaatattctcagtttt

SEQ ID NO: 199572 - DNA, 20 bp, Artificial Sequence
  Description of Artificial Sequence: Synthetic oligonucleotide
  Target: LAMA2; (-) strand; PAM type: YTN; PAM sequence: CTA
tttttaaaaatattctcagt

SEQ ID NO: 199573 - DNA, 20 bp, Artificial Sequence
  Description of Artificial Sequence: Synthetic oligonucleotide
  Target: LAMA2; (-) strand; PAM type: YTN; PAM sequence: TTC
tatttttaaaaatattctca

SEQ ID NO: 199574 - DNA, 20 bp, Artificial Sequence
  Description of Artificial Sequence: Synthetic oligonucleotide
  Target: LAMA2; (-) strand; PAM type: YTN; PAM sequence: TTA
ttctatttttaaaaatattc

SEQ ID NO: 199575 - DNA, 20 bp, Artificial Sequence
  Description of Artificial Sequence: Synthetic oligonucleotide
  Target: LAMA2; (-) strand; PAM type: YTN; PAM sequence: TTT
attctatttttaaaaatatt

SEQ ID NO: 199576 - DNA, 20 bp, Artificial Sequence
  Description of Artificial Sequence: Synthetic oligonucleotide
  Target: LAMA2; (-) strand; PAM type: YTN; PAM sequence: TTT
tattctatttttaaaaatat

SEQ ID NO: 199577 - DNA, 20 bp, Artificial Sequence
  Description of Artificial Sequence: Synthetic oligonucleotide
  Target: LAMA2; (-) strand; PAM type: YTN; PAM sequence: CTA
tgacattttattctattttt

SEQ ID NO: 199578 - DNA, 20 bp, Artificial Sequence
  Description of Artificial Sequence: Synthetic oligonucleotide
  Target: LAMA2; (-) strand; PAM type: YTN; PAM sequence: TTC
tatgacattttattctattt

SEQ ID NO: 199579 - DNA, 20 bp, Artificial Sequence
  Description of Artificial Sequence: Synthetic oligonucleotide
  Target: LAMA2; (-) strand; PAM type: YTN; PAM sequence: TTT
ctatgacattttattctatt

SEQ ID NO: 199580 - DNA, 20 bp, Artificial Sequence
  Description of Artificial Sequence: Synthetic oligonucleotide
  Target: LAMA2; (-) strand; PAM type: YTN; PAM sequence: TTT
tctatgacattttattctat

SEQ ID NO: 199581 - DNA, 20 bp, Artificial Sequence
  Description of Artificial Sequence: Synthetic oligonucleotide
  Target: LAMA2; (-) strand; PAM type: YTN; PAM sequence: TTT
ttctatgacattttattcta

SEQ ID NO: 199582 - DNA, 20 bp, Artificial Sequence
  Description of Artificial Sequence: Synthetic oligonucleotide
  Target: LAMA2; (-) strand; PAM type: YTN; PAM sequence: TTT
tttctatgacattttattct

SEQ ID NO: 199583 - DNA, 20 bp, Artificial Sequence
  Description of Artificial Sequence: Synthetic oligonucleotide
  Target: LAMA2; (-) strand; PAM type: YTN; PAM sequence: TTT
ttttctatgacattttattc

SEQ ID NO: 199584 - DNA, 20 bp, Artificial Sequence
  Description of Artificial Sequence: Synthetic oligonucleotide
  Target: LAMA2; (-) strand; PAM type: YTN; PAM sequence: TTA
aatgtgatttttttctatga

SEQ ID NO: 199585 - DNA, 20 bp, Artificial Sequence
  Description of Artificial Sequence: Synthetic oligonucleotide
  Target: LAMA2; (-) strand; PAM type: YTN; PAM sequence: CTT
aaatgtgatttttttctatg

SEQ ID NO: 199586 - DNA, 20 bp, Artificial Sequence
  Description of Artificial Sequence: Synthetic oligonucleotide
  Target: LAMA2; (-) strand; PAM type: YTN; PAM sequence: CTC
ttaaatgtgatttttttcta

SEQ ID NO: 199587 - DNA, 20 bp, Artificial Sequence
  Description of Artificial Sequence: Synthetic oligonucleotide
  Target: LAMA2; (-) strand; PAM type: YTN; PAM sequence: CTG
caatggtaaaagtaatagaa

SEQ ID NO: 199588 - DNA, 20 bp, Artificial Sequence
  Description of Artificial Sequence: Synthetic oligonucleotide
  Target: LAMA2; (-) strand; PAM type: YTN; PAM sequence: CTG
tatccaaacgcccataactg

SEQ ID NO: 199589 - DNA, 20 bp, Artificial Sequence
  Description of Artificial Sequence: Synthetic oligonucleotide
  Target: LAMA2; (-) strand; PAM type: YTN; PAM sequence: TTA
aacccaaactgtatccaaac

SEQ ID NO: 199590 - DNA, 20 bp, Artificial Sequence
  Description of Artificial Sequence: Synthetic oligonucleotide
  Target: LAMA2; (-) strand; PAM type: YTN; PAM sequence: TTA
ttaaacccaaactgtatcca

SEQ ID NO: 199591 - DNA, 20 bp, Artificial Sequence
  Description of Artificial Sequence: Synthetic oligonucleotide
  Target: LAMA2; (-) strand; PAM type: YTN; PAM sequence: TTT
attaaacccaaactgtatcc

SEQ ID NO: 199592 - DNA, 20 bp, Artificial Sequence
  Description of Artificial Sequence: Synthetic oligonucleotide
  Target: LAMA2; (-) strand; PAM type: YTN; PAM sequence: TTT
tattaaacccaaactgtatc

SEQ ID NO: 199593 - DNA, 20 bp, Artificial Sequence
  Description of Artificial Sequence: Synthetic oligonucleotide
  Target: LAMA2; (-) strand; PAM type: YTN; PAM sequence: TTG
ggggttttattaaacccaaa

SEQ ID NO: 199594 - DNA, 20 bp, Artificial Sequence
  Description of Artificial Sequence: Synthetic oligonucleotide
  Target: LAMA2; (-) strand; PAM type: YTN; PAM sequence: CTT
gggggttttattaaacccaa

SEQ ID NO: 199595 - DNA, 20 bp, Artificial Sequence
  Description of Artificial Sequence: Synthetic oligonucleotide
  Target: LAMA2; (-) strand; PAM type: YTN; PAM sequence: TTA
ataaaaaccaaacttggggg

SEQ ID NO: 199596 - DNA, 20 bp, Artificial Sequence
  Description of Artificial Sequence: Synthetic oligonucleotide
  Target: LAMA2; (-) strand; PAM type: YTN; PAM sequence: TTT
aataaaaaccaaacttgggg

SEQ ID NO: 199597 - DNA, 20 bp, Artificial Sequence
  Description of Artificial Sequence: Synthetic oligonucleotide
  Target: LAMA2; (-) strand; PAM type: YTN; PAM sequence: TTT
taataaaaaccaaacttggg

SEQ ID NO: 199598 - DNA, 20 bp, Artificial Sequence
  Description of Artificial Sequence: Synthetic oligonucleotide
  Target: LAMA2; (-) strand; PAM type: YTN; PAM sequence: TTA
ttttaataaaaaccaaactt

SEQ ID NO: 199599 - DNA, 20 bp, Artificial Sequence
  Description of Artificial Sequence: Synthetic oligonucleotide
  Target: LAMA2; (-) strand; PAM type: YTN; PAM sequence: CTT
attttaataaaaaccaaact

SEQ ID NO: 199600 - DNA, 20 bp, Artificial Sequence
  Description of Artificial Sequence: Synthetic oligonucleotide
  Target: LAMA2; (-) strand; PAM type: YTN; PAM sequence: TTG
acttattttaataaaaacca

SEQ ID NO: 199601 - DNA, 20 bp, Artificial Sequence
  Description of Artificial Sequence: Synthetic oligonucleotide
  Target: LAMA2; (-) strand; PAM type: YTN; PAM sequence: TTG
accaatgatagattgactta

SEQ ID NO: 199602 - DNA, 20 bp, Artificial Sequence
  Description of Artificial Sequence: Synthetic oligonucleotide
  Target: LAMA2; (-) strand; PAM type: YTN; PAM sequence: CTA
gaaaagagagataaatgtga

SEQ ID NO: 199603 - DNA, 20 bp, Artificial Sequence
  Description of Artificial Sequence: Synthetic oligonucleotide
  Target: LAMA2; (-) strand; PAM type: YTN; PAM sequence: CTA
ctagaaaagagagataaatg

SEQ ID NO: 199604 - DNA, 20 bp, Artificial Sequence
  Description of Artificial Sequence: Synthetic oligonucleotide
  Target: LAMA2; (-) strand; PAM type: YTN; PAM sequence: TTG
acactactagaaaagagaga

SEQ ID NO: 199605 - DNA, 20 bp, Artificial Sequence
  Description of Artificial Sequence: Synthetic oligonucleotide
  Target: LAMA2; (-) strand; PAM type: YTN; PAM sequence: TTT
gacactactagaaaagagag

SEQ ID NO: 199606 - DNA, 20 bp, Artificial Sequence
  Description of Artificial Sequence: Synthetic oligonucleotide
  Target: LAMA2; (-) strand; PAM type: YTN; PAM sequence: CTC
agatttgacactactagaaa

SEQ ID NO: 199607 - DNA, 20 bp, Artificial Sequence
  Description of Artificial Sequence: Synthetic oligonucleotide
  Target: LAMA2; (-) strand; PAM type: YTN; PAM sequence: CTC
ctcagatttgacactactag

SEQ ID NO: 199608 - DNA, 20 bp, Artificial Sequence
  Description of Artificial Sequence: Synthetic oligonucleotide
  Target: LAMA2; (-) strand; PAM type: YTN; PAM sequence: TTG
ctcctcagatttgacactac

SEQ ID NO: 199609 - DNA, 20 bp, Artificial Sequence
  Description of Artificial Sequence: Synthetic oligonucleotide
  Target: LAMA2; (-) strand; PAM type: YTN; PAM sequence: TTT
gctcctcagatttgacacta

SEQ ID NO: 199610 - DNA, 20 bp, Artificial Sequence
  Description of Artificial Sequence: Synthetic oligonucleotide
  Target: LAMA2; (-) strand; PAM type: YTN; PAM sequence: CTA
tatatttgctcctcagattt

SEQ ID NO: 199611 - DNA, 20 bp, Artificial Sequence
  Description of Artificial Sequence: Synthetic oligonucleotide
  Target: LAMA2; (-) strand; PAM type: YTN; PAM sequence: TTG
tatagtagctatatatttgc

SEQ ID NO: 199612 - DNA, 20 bp, Artificial Sequence
  Description of Artificial Sequence: Synthetic oligonucleotide
  Target: LAMA2; (-) strand; PAM type: YTN; PAM sequence: TTT
gtatagtagctatatatttg

SEQ ID NO: 199613 - DNA, 20 bp, Artificial Sequence
  Description of Artificial Sequence: Synthetic oligonucleotide
  Target: LAMA2; (-) strand; PAM type: YTN; PAM sequence: TTT
tgtatagtagctatatattt

SEQ ID NO: 199614 - DNA, 20 bp, Artificial Sequence
  Description of Artificial Sequence: Synthetic oligonucleotide
  Target: LAMA2; (-) strand; PAM type: YTN; PAM sequence: TTT
ttgtatagtagctatatatt

SEQ ID NO: 199615 - DNA, 20 bp, Artificial Sequence
  Description of Artificial Sequence: Synthetic oligonucleotide
  Target: LAMA2; (-) strand; PAM type: YTN; PAM sequence: TTG
atttttgtatagtagctata

SEQ ID NO: 199616 - DNA, 20 bp, Artificial Sequence
  Description of Artificial Sequence: Synthetic oligonucleotide
  Target: LAMA2; (-) strand; PAM type: YTN; PAM sequence: TTT
gatttttgtatagtagctat

SEQ ID NO: 199617 - DNA, 20 bp, Artificial Sequence
  Description of Artificial Sequence: Synthetic oligonucleotide
  Target: LAMA2; (-) strand; PAM type: YTN; PAM sequence: CTT
tgatttttgtatagtagcta

SEQ ID NO: 199618 - DNA, 20 bp, Artificial Sequence
  Description of Artificial Sequence: Synthetic oligonucleotide
  Target: LAMA2; (-) strand; PAM type: YTN; PAM sequence: TTA
aatctttgatttttgtatag

SEQ ID NO: 199619 - DNA, 20 bp, Artificial Sequence
  Description of Artificial Sequence: Synthetic oligonucleotide
  Target: LAMA2; (-) strand; PAM type: YTN; PAM sequence: TTT
aaatctttgatttttgtata

SEQ ID NO: 199620 - DNA, 20 bp, Artificial Sequence
  Description of Artificial Sequence: Synthetic oligonucleotide
  Target: LAMA2; (-) strand; PAM type: YTN; PAM sequence: TTT
taaatctttgatttttgtat

SEQ ID NO: 199621 - DNA, 20 bp, Artificial Sequence
  Description of Artificial Sequence: Synthetic oligonucleotide
  Target: LAMA2; (-) strand; PAM type: YTN; PAM sequence: CTT
ttaaatctttgatttttgta

SEQ ID NO: 199622 - DNA, 20 bp, Artificial Sequence
  Description of Artificial Sequence: Synthetic oligonucleotide
  Target: LAMA2; (-) strand; PAM type: YTN; PAM sequence: CTA
aaacttttaaatctttgatt

SEQ ID NO: 199623 - DNA, 20 bp, Artificial Sequence
  Description of Artificial Sequence: Synthetic oligonucleotide
  Target: LAMA2; (-) strand; PAM type: YTN; PAM sequence: CTC
aatgcaatgctaaaactttt

SEQ ID NO: 199624 - DNA, 20 bp, Artificial Sequence
  Description of Artificial Sequence: Synthetic oligonucleotide
  Target: LAMA2; (-) strand; PAM type: YTN; PAM sequence: TTA
atagctcaatgcaatgctaa

SEQ ID NO: 199625 - DNA, 20 bp, Artificial Sequence
  Description of Artificial Sequence: Synthetic oligonucleotide
  Target: LAMA2; (-) strand; PAM type: YTN; PAM sequence: TTA
caatgattaatagctcaatg

SEQ ID NO: 199626 - DNA, 20 bp, Artificial Sequence
  Description of Artificial Sequence: Synthetic oligonucleotide
  Target: LAMA2; (-) strand; PAM type: YTN; PAM sequence: TTT
acaatgattaatagctcaat

SEQ ID NO: 199627 - DNA, 20 bp, Artificial Sequence
  Description of Artificial Sequence: Synthetic oligonucleotide
  Target: LAMA2; (-) strand; PAM type: YTN; PAM sequence: TTT
tacaatgattaatagctcaa

SEQ ID NO: 199628 - DNA, 20 bp, Artificial Sequence
  Description of Artificial Sequence: Synthetic oligonucleotide
  Target: LAMA2; (-) strand; PAM type: YTN; PAM sequence: TTT
ttacaatgattaatagctca

SEQ ID NO: 199629 - DNA, 20 bp, Artificial Sequence
  Description of Artificial Sequence: Synthetic oligonucleotide
  Target: LAMA2; (-) strand; PAM type: YTN; PAM sequence: TTA
aaatgtttttacaatgatta

SEQ ID NO: 199630 - DNA, 20 bp, Artificial Sequence
  Description of Artificial Sequence: Synthetic oligonucleotide
  Target: LAMA2; (-) strand; PAM type: YTN; PAM sequence: TTT
aaaatgtttttacaatgatt

SEQ ID NO: 199631 - DNA, 20 bp, Artificial Sequence
  Description of Artificial Sequence: Synthetic oligonucleotide
  Target: LAMA2; (-) strand; PAM type: YTN; PAM sequence: CTA
aaaaatggaggcatttaaaa

SEQ ID NO: 199632 - DNA, 20 bp, Artificial Sequence
  Description of Artificial Sequence: Synthetic oligonucleotide
  Target: LAMA2; (-) strand; PAM type: YTN; PAM sequence: CTA
tcatctaaaaaatggaggca

SEQ ID NO: 199633 - DNA, 20 bp, Artificial Sequence
  Description of Artificial Sequence: Synthetic oligonucleotide
  Target: LAMA2; (-) strand; PAM type: YTN; PAM sequence: TTA
atgtgtagctatcatctaaa

SEQ ID NO: 199634 - DNA, 20 bp, Artificial Sequence
  Description of Artificial Sequence: Synthetic oligonucleotide
  Target: LAMA2; (-) strand; PAM type: YTN; PAM sequence: TTT
aatgtgtagctatcatctaa

SEQ ID NO: 199635 - DNA, 20 bp, Artificial Sequence
  Description of Artificial Sequence: Synthetic oligonucleotide
  Target: LAMA2; (-) strand; PAM type: YTN; PAM sequence: CTT
taatgtgtagctatcatcta

SEQ ID NO: 199636 - DNA, 20 bp, Artificial Sequence
  Description of Artificial Sequence: Synthetic oligonucleotide
  Target: LAMA2; (-) strand; PAM type: YTN; PAM sequence: CTA
caccccatctttaatgtgta

SEQ ID NO: 199637 - DNA, 20 bp, Artificial Sequence
  Description of Artificial Sequence: Synthetic oligonucleotide
  Target: LAMA2; (-) strand; PAM type: YTN; PAM sequence: CTA
cctacaccccatctttaatg

SEQ ID NO: 199638 - DNA, 20 bp, Artificial Sequence
  Description of Artificial Sequence: Synthetic oligonucleotide
  Target: LAMA2; (-) strand; PAM type: YTN; PAM sequence: CTG
atcaaccaccctacctacac

SEQ ID NO: 199639 - DNA, 20 bp, Artificial Sequence
  Description of Artificial Sequence: Synthetic oligonucleotide
  Target: LAMA2; (-) strand; PAM type: YTN; PAM sequence: TTA
gatacactgatcaaccaccc

SEQ ID NO: 199640 - DNA, 20 bp, Artificial Sequence
  Description of Artificial Sequence: Synthetic oligonucleotide
  Target: LAMA2; (-) strand; PAM type: YTN; PAM sequence: TTT
agatacactgatcaaccacc

SEQ ID NO: 199641 - DNA, 20 bp, Artificial Sequence
  Description of Artificial Sequence: Synthetic oligonucleotide
  Target: LAMA2; (-) strand; PAM type: YTN; PAM sequence: CTA
tttagatacactgatcaacc

SEQ ID NO: 199642 - DNA, 20 bp, Artificial Sequence
  Description of Artificial Sequence: Synthetic oligonucleotide
  Target: LAMA2; (-) strand; PAM type: YTN; PAM sequence: CTA
tagtctatttagatacactg

SEQ ID NO: 199643 - DNA, 20 bp, Artificial Sequence
  Description of Artificial Sequence: Synthetic oligonucleotide
  Target: LAMA2; (-) strand; PAM type: YTN; PAM sequence: TTG
catactatagtctatttaga

SEQ ID NO: 199644 - DNA, 20 bp, Artificial Sequence
  Description of Artificial Sequence: Synthetic oligonucleotide
  Target: LAMA2; (-) strand; PAM type: YTN; PAM sequence: TTT
gcatactatagtctatttag

SEQ ID NO: 199645 - DNA, 20 bp, Artificial Sequence
  Description of Artificial Sequence: Synthetic oligonucleotide
  Target: LAMA2; (-) strand; PAM type: YTN; PAM sequence: TTT
tgcatactatagtctattta

SEQ ID NO: 199646 - DNA, 20 bp, Artificial Sequence
  Description of Artificial Sequence: Synthetic oligonucleotide
  Target: LAMA2; (-) strand; PAM type: YTN; PAM sequence: TTT
ttgcatactatagtctattt

SEQ ID NO: 199647 - DNA, 20 bp, Artificial Sequence
  Description of Artificial Sequence: Synthetic oligonucleotide
  Target: LAMA2; (-) strand; PAM type: YTN; PAM sequence: CTG
aatgtttttgcatactatag

SEQ ID NO: 199648 - DNA, 20 bp, Artificial Sequence
  Description of Artificial Sequence: Synthetic oligonucleotide
  Target: LAMA2; (-) strand; PAM type: YTN; PAM sequence: TTA
ctgaatgtttttgcatacta

SEQ ID NO: 199649 - DNA, 20 bp, Artificial Sequence
  Description of Artificial Sequence: Synthetic oligonucleotide
  Target: LAMA2; (-) strand; PAM type: YTN; PAM sequence: TTT
actgaatgtttttgcatact

SEQ ID NO: 199650 - DNA, 20 bp, Artificial Sequence
  Description of Artificial Sequence: Synthetic oligonucleotide
  Target: LAMA2; (-) strand; PAM type: YTN; PAM sequence: TTT
tactgaatgtttttgcatac

SEQ ID NO: 199651 - DNA, 20 bp, Artificial Sequence
  Description of Artificial Sequence: Synthetic oligonucleotide
  Target: LAMA2; (-) strand; PAM type: YTN; PAM sequence: TTT
ttactgaatgtttttgcata

SEQ ID NO: 199652 - DNA, 20 bp, Artificial Sequence
  Description of Artificial Sequence: Synthetic oligonucleotide
  Target: LAMA2; (-) strand; PAM type: YTN; PAM sequence: TTT
tttactgaatgtttttgcat

SEQ ID NO: 199653 - DNA, 20 bp, Artificial Sequence
  Description of Artificial Sequence: Synthetic oligonucleotide
  Target: LAMA2; (-) strand; PAM type: YTN; PAM sequence: CTC
aaggaacattttttactgaa

SEQ ID NO: 199654 - DNA, 20 bp, Artificial Sequence
  Description of Artificial Sequence: Synthetic oligonucleotide
  Target: LAMA2; (-) strand; PAM type: YTN; PAM sequence: TTG
ctcaaggaacattttttact

SEQ ID NO: 199655 - DNA, 20 bp, Artificial Sequence
  Description of Artificial Sequence: Synthetic oligonucleotide
  Target: LAMA2; (-) strand; PAM type: YTN; PAM sequence: CTT
gctcaaggaacattttttac

SEQ ID NO: 199656 - DNA, 20 bp, Artificial Sequence
  Description of Artificial Sequence: Synthetic oligonucleotide
  Target: LAMA2; (-) strand; PAM type: YTN; PAM sequence: TTC
ttgctcaaggaacatttttt

SEQ ID NO: 199657 - DNA, 20 bp, Artificial Sequence
  Description of Artificial Sequence: Synthetic oligonucleotide
  Target: LAMA2; (-) strand; PAM type: YTN; PAM sequence: CTT
cttgctcaaggaacattttt

SEQ ID NO: 199658 - DNA, 20 bp, Artificial Sequence
  Description of Artificial Sequence: Synthetic oligonucleotide
  Target: LAMA2; (-) strand; PAM type: YTN; PAM sequence: TTC
ttcttgctcaaggaacattt

SEQ ID NO: 199659 - DNA, 20 bp, Artificial Sequence
  Description of Artificial Sequence: Synthetic oligonucleotide
  Target: LAMA2; (-) strand; PAM type: YTN; PAM sequence: TTT
cttcttgctcaaggaacatt

SEQ ID NO: 199660 - DNA, 20 bp, Artificial Sequence
  Description of Artificial Sequence: Synthetic oligonucleotide
  Target: LAMA2; (-) strand; PAM type: YTN; PAM sequence: TTT
tcttcttgctcaaggaacat

SEQ ID NO: 199661 - DNA, 20 bp, Artificial Sequence
  Description of Artificial Sequence: Synthetic oligonucleotide
  Target: LAMA2; (-) strand; PAM type: YTN; PAM sequence: TTT
ttcttcttgctcaaggaaca

SEQ ID NO: 199662 - DNA, 20 bp, Artificial Sequence
  Description of Artificial Sequence: Synthetic oligonucleotide
  Target: LAMA2; (-) strand; PAM type: YTN; PAM sequence: TTT
tttcttcttgctcaaggaac

SEQ ID NO: 199663 - DNA, 20 bp, Artificial Sequence
  Description of Artificial Sequence: Synthetic oligonucleotide
  Target: LAMA2; (-) strand; PAM type: YTN; PAM sequence: TTA
ttttttcttcttgctcaagg

SEQ ID NO: 199664 - DNA, 20 bp, Artificial Sequence
  Description of Artificial Sequence: Synthetic oligonucleotide
  Target: LAMA2; (-) strand; PAM type: YTN; PAM sequence: TTT
attttttcttcttgctcaag

SEQ ID NO: 199665 - DNA, 20 bp, Artificial Sequence
  Description of Artificial Sequence: Synthetic oligonucleotide
  Target: LAMA2; (-) strand; PAM type: YTN; PAM sequence: CTT
tattttttcttcttgctcaa

SEQ ID NO: 199666 - DNA, 20 bp, Artificial Sequence
  Description of Artificial Sequence: Synthetic oligonucleotide
  Target: LAMA2; (-) strand; PAM type: YTN; PAM sequence: CTG
tctttattttttcttcttgc

SEQ ID NO: 199667 - DNA, 20 bp, Artificial Sequence
  Description of Artificial Sequence: Synthetic oligonucleotide
  Target: LAMA2; (-) strand; PAM type: YTN; PAM sequence: TTG
atcagctgtctttatttttt

SEQ ID NO: 199668 - DNA, 20 bp, Artificial Sequence
  Description of Artificial Sequence: Synthetic oligonucleotide
  Target: LAMA2; (-) strand; PAM type: YTN; PAM sequence: TTT
gatcagctgtctttattttt

SEQ ID NO: 199669 - DNA, 20 bp, Artificial Sequence
  Description of Artificial Sequence: Synthetic oligonucleotide
  Target: LAMA2; (-) strand; PAM type: YTN; PAM sequence: TTT
tgatcagctgtctttatttt

SEQ ID NO: 199670 - DNA, 20 bp, Artificial Sequence
  Description of Artificial Sequence: Synthetic oligonucleotide
  Target: LAMA2; (-) strand; PAM type: YTN; PAM sequence: TTC
atgtgttttgatcagctgtc

SEQ ID NO: 199671 - DNA, 20 bp, Artificial Sequence
  Description of Artificial Sequence: Synthetic oligonucleotide
  Target: LAMA2; (-) strand; PAM type: YTN; PAM sequence: CTG
agtcatataaattcatgtgt

SEQ ID NO: 199672 - DNA, 20 bp, Artificial Sequence
  Description of Artificial Sequence: Synthetic oligonucleotide
  Target: LAMA2; (-) strand; PAM type: YTN; PAM sequence: TTA
ctgagtcatataaattcatg

SEQ ID NO: 199673 - DNA, 20 bp, Artificial Sequence
  Description of Artificial Sequence: Synthetic oligonucleotide
  Target: LAMA2; (-) strand; PAM type: YTN; PAM sequence: TTA
tgataatgtaagaattactg

SEQ ID NO: 199674 - DNA, 20 bp, Artificial Sequence
  Description of Artificial Sequence: Synthetic oligonucleotide
  Target: LAMA2; (-) strand; PAM type: YTN; PAM sequence: TTT
atgataatgtaagaattact

SEQ ID NO: 199675 - DNA, 20 bp, Artificial Sequence
  Description of Artificial Sequence: Synthetic oligonucleotide
  Target: LAMA2; (-) strand; PAM type: YTN; PAM sequence: TTC
ataaaagtggtagcgaaatt

SEQ ID NO: 199676 - DNA, 20 bp, Artificial Sequence
  Description of Artificial Sequence: Synthetic oligonucleotide
  Target: LAMA2; (-) strand; PAM type: YTN; PAM sequence: TTT
cataaaagtggtagcgaaat

SEQ ID NO: 199677 - DNA, 20 bp, Artificial Sequence
  Description of Artificial Sequence: Synthetic oligonucleotide
  Target: LAMA2; (-) strand; PAM type: YTN; PAM sequence: CTT
tcataaaagtggtagcgaaa

SEQ ID NO: 199678 - DNA, 20 bp, Artificial Sequence
  Description of Artificial Sequence: Synthetic oligonucleotide
  Target: LAMA2; (-) strand; PAM type: YTN; PAM sequence: TTG
ctttcataaaagtggtagcg

SEQ ID NO: 199679 - DNA, 20 bp, Artificial Sequence
  Description of Artificial Sequence: Synthetic oligonucleotide
  Target: LAMA2; (-) strand; PAM type: YTN; PAM sequence: TTG
tgtgaattgctttcataaaa

SEQ ID NO: 199680 - DNA, 20 bp, Artificial Sequence
  Description of Artificial Sequence: Synthetic oligonucleotide
  Target: LAMA2; (-) strand; PAM type: YTN; PAM sequence: TTG
tgaattgtgtgaattgcttt

SEQ ID NO: 199681 - DNA, 20 bp, Artificial Sequence
  Description of Artificial Sequence: Synthetic oligonucleotide
  Target: LAMA2; (-) strand; PAM type: YTN; PAM sequence: CTC
acattgtgaattgtgtgaat

SEQ ID NO: 199682 - DNA, 20 bp, Artificial Sequence
  Description of Artificial Sequence: Synthetic oligonucleotide
  Target: LAMA2; (-) strand; PAM type: YTN; PAM sequence: CTC
ctcacattgtgaattgtgtg

SEQ ID NO: 199683 - DNA, 20 bp, Artificial Sequence
  Description of Artificial Sequence: Synthetic oligonucleotide
  Target: LAMA2; (-) strand; PAM type: YTN; PAM sequence: TTG
ctcctcacattgtgaattgt

SEQ ID NO: 199684 - DNA, 20 bp, Artificial Sequence
  Description of Artificial Sequence: Synthetic oligonucleotide
  Target: LAMA2; (-) strand; PAM type: YTN; PAM sequence: TTG
atggtaattgctcctcacat

SEQ ID NO: 199685 - DNA, 20 bp, Artificial Sequence
  Description of Artificial Sequence: Synthetic oligonucleotide
  Target: LAMA2; (-) strand; PAM type: YTN; PAM sequence: TTT
gatggtaattgctcctcaca

SEQ ID NO: 199686 - DNA, 20 bp, Artificial Sequence
  Description of Artificial Sequence: Synthetic oligonucleotide
  Target: LAMA2; (-) strand; PAM type: YTN; PAM sequence: CTT
tgatggtaattgctcctcac

SEQ ID NO: 199687 - DNA, 20 bp, Artificial Sequence
  Description of Artificial Sequence: Synthetic oligonucleotide
  Target: LAMA2; (-) strand; PAM type: YTN; PAM sequence: TTA
tgtatctttgatggtaattg

SEQ ID NO: 199688 - DNA, 20 bp, Artificial Sequence
  Description of Artificial Sequence: Synthetic oligonucleotide
  Target: LAMA2; (-) strand; PAM type: YTN; PAM sequence: TTA
ttatgtatctttgatggtaa

SEQ ID NO: 199689 - DNA, 20 bp, Artificial Sequence
  Description of Artificial Sequence: Synthetic oligonucleotide
  Target: LAMA2; (-) strand; PAM type: YTN; PAM sequence: CTC
catataccacatggcatatt

SEQ ID NO: 199690 - DNA, 20 bp, Artificial Sequence
  Description of Artificial Sequence: Synthetic oligonucleotide
  Target: LAMA2; (-) strand; PAM type: YTN; PAM sequence: CTG
tggctccatataccacatgg

SEQ ID NO: 199691 - DNA, 20 bp, Artificial Sequence
  Description of Artificial Sequence: Synthetic oligonucleotide
  Target: LAMA2; (-) strand; PAM type: YTN; PAM sequence: TTC
atcctgtggctccatatacc

SEQ ID NO: 199692 - DNA, 20 bp, Artificial Sequence
  Description of Artificial Sequence: Synthetic oligonucleotide
  Target: LAMA2; (-) strand; PAM type: YTN; PAM sequence: CTT
catcctgtggctccatatac

SEQ ID NO: 199693 - DNA, 20 bp, Artificial Sequence
  Description of Artificial Sequence: Synthetic oligonucleotide
  Target: LAMA2; (-) strand; PAM type: YTN; PAM sequence: CTG
ccatcttcatcctgtggctc

SEQ ID NO: 199694 - DNA, 20 bp, Artificial Sequence
  Description of Artificial Sequence: Synthetic oligonucleotide
  Target: LAMA2; (-) strand; PAM type: YTN; PAM sequence: TTG
atggcccaagaaaacctgcc

SEQ ID NO: 199695 - DNA, 20 bp, Artificial Sequence
  Description of Artificial Sequence: Synthetic oligonucleotide
  Target: LAMA2; (-) strand; PAM type: YTN; PAM sequence: TTG
agtaaaattgatggcccaag

SEQ ID NO: 199696 - DNA, 20 bp, Artificial Sequence
  Description of Artificial Sequence: Synthetic oligonucleotide
  Target: LAMA2; (-) strand; PAM type: YTN; PAM sequence: CTT
gagtaaaattgatggcccaa

SEQ ID NO: 199697 - DNA, 20 bp, Artificial Sequence
  Description of Artificial Sequence: Synthetic oligonucleotide
  Target: LAMA2; (-) strand; PAM type: YTN; PAM sequence: TTA
aaatgcccttgagtaaaatt

SEQ ID NO: 199698 - DNA, 20 bp, Artificial Sequence
  Description of Artificial Sequence: Synthetic oligonucleotide
  Target: LAMA2; (-) strand; PAM type: YTN; PAM sequence: TTT
aaaatgcccttgagtaaaat

SEQ ID NO: 199699 - DNA, 20 bp, Artificial Sequence
  Description of Artificial Sequence: Synthetic oligonucleotide
  Target: LAMA2; (-) strand; PAM type: YTN; PAM sequence: TTT
taaaatgcccttgagtaaaa

SEQ ID NO: 199700 - DNA, 20 bp, Artificial Sequence
  Description of Artificial Sequence: Synthetic oligonucleotide
  Target: LAMA2; (-) strand; PAM type: YTN; PAM sequence: TTA
ttttaaaatgcccttgagta

SEQ ID NO: 199701 - DNA, 20 bp, Artificial Sequence
  Description of Artificial Sequence: Synthetic oligonucleotide
  Target: LAMA2; (-) strand; PAM type: YTN; PAM sequence: TTA
aaatattattttaaaatgcc

SEQ ID NO: 199702 - DNA, 20 bp, Artificial Sequence
  Description of Artificial Sequence: Synthetic oligonucleotide
  Target: LAMA2; (-) strand; PAM type: YTN; PAM sequence: TTA
atattaaaatattattttaa

SEQ ID NO: 199703 - DNA, 20 bp, Artificial Sequence
  Description of Artificial Sequence: Synthetic oligonucleotide
  Target: LAMA2; (-) strand; PAM type: YTN; PAM sequence: TTT
aatattaaaatattatttta

SEQ ID NO: 199704 - DNA, 20 bp, Artificial Sequence
  Description of Artificial Sequence: Synthetic oligonucleotide
  Target: LAMA2; (-) strand; PAM type: YTN; PAM sequence: CTT
taatattaaaatattatttt

SEQ ID NO: 199705 - DNA, 20 bp, Artificial Sequence
  Description of Artificial Sequence: Synthetic oligonucleotide
  Target: LAMA2; (-) strand; PAM type: YTN; PAM sequence: TTC
ctttaatattaaaatattat

SEQ ID NO: 199706 - DNA, 20 bp, Artificial Sequence
  Description of Artificial Sequence: Synthetic oligonucleotide
  Target: LAMA2; (-) strand; PAM type: YTN; PAM sequence: CTT
cctttaatattaaaatatta

SEQ ID NO: 199707 - DNA, 20 bp, Artificial Sequence
  Description of Artificial Sequence: Synthetic oligonucleotide
  Target: LAMA2; (-) strand; PAM type: YTN; PAM sequence: CTA
cagtatcatatgcttccttt

SEQ ID NO: 199708 - DNA, 20 bp, Artificial Sequence
  Description of Artificial Sequence: Synthetic oligonucleotide
  Target: LAMA2; (-) strand; PAM type: YTN; PAM sequence: TTC
tacagtatcatatgcttcct

SEQ ID NO: 199709 - DNA, 20 bp, Artificial Sequence
  Description of Artificial Sequence: Synthetic oligonucleotide
  Target: LAMA2; (-) strand; PAM type: YTN; PAM sequence: TTA
ttctacagtatcatatgctt

SEQ ID NO: 199710 - DNA, 20 bp, Artificial Sequence
  Description of Artificial Sequence: Synthetic oligonucleotide
  Target: LAMA2; (-) strand; PAM type: YTN; PAM sequence: TTT
attctacagtatcatatgct

SEQ ID NO: 199711 - DNA, 20 bp, Artificial Sequence
  Description of Artificial Sequence: Synthetic oligonucleotide
  Target: LAMA2; (-) strand; PAM type: YTN; PAM sequence: TTT
tattctacagtatcatatgc

SEQ ID NO: 199712 - DNA, 20 bp, Artificial Sequence
  Description of Artificial Sequence: Synthetic oligonucleotide
  Target: LAMA2; (-) strand; PAM type: YTN; PAM sequence: TTA
aaaatgcaaataaattttat

SEQ ID NO: 199713 - DNA, 20 bp, Artificial Sequence
  Description of Artificial Sequence: Synthetic oligonucleotide
  Target: LAMA2; (-) strand; PAM type: YTN; PAM sequence: TTT
aaaaatgcaaataaatttta

SEQ ID NO: 199714 - DNA, 20 bp, Artificial Sequence
  Description of Artificial Sequence: Synthetic oligonucleotide
  Target: LAMA2; (-) strand; PAM type: YTN; PAM sequence: TTT
taaaaatgcaaataaatttt

SEQ ID NO: 199715 - DNA, 20 bp, Artificial Sequence
  Description of Artificial Sequence: Synthetic oligonucleotide
  Target: LAMA2; (-) strand; PAM type: YTN; PAM sequence: TTG
gagattttaaaaatgcaaat

SEQ ID NO: 199716 - DNA, 20 bp, Artificial Sequence
  Description of Artificial Sequence: Synthetic oligonucleotide
  Target: LAMA2; (-) strand; PAM type: YTN; PAM sequence: TTC
acagaagagtcaggttggag

SEQ ID NO: 199717 - DNA, 20 bp, Artificial Sequence
  Description of Artificial Sequence: Synthetic oligonucleotide
  Target: LAMA2; (-) strand; PAM type: YTN; PAM sequence: TTT
cacagaagagtcaggttgga

SEQ ID NO: 199718 - DNA, 20 bp, Artificial Sequence
  Description of Artificial Sequence: Synthetic oligonucleotide
  Target: LAMA2; (-) strand; PAM type: YTN; PAM sequence: CTG
aaatttcacagaagagtcag

SEQ ID NO: 199719 - DNA, 20 bp, Artificial Sequence
  Description of Artificial Sequence: Synthetic oligonucleotide
  Target: LAMA2; (-) strand; PAM type: YTN; PAM sequence: CTC
tgaaatttcacagaagagtc

SEQ ID NO: 199720 - DNA, 20 bp, Artificial Sequence
  Description of Artificial Sequence: Synthetic oligonucleotide
  Target: LAMA2; (-) strand; PAM type: YTN; PAM sequence: TTA
acagccacagctctgaaatt

SEQ ID NO: 199721 - DNA, 20 bp, Artificial Sequence
  Description of Artificial Sequence: Synthetic oligonucleotide
  Target: LAMA2; (-) strand; PAM type: YTN; PAM sequence: TTT
aacagccacagctctgaaat

SEQ ID NO: 199722 - DNA, 20 bp, Artificial Sequence
  Description of Artificial Sequence: Synthetic oligonucleotide
  Target: LAMA2; (-) strand; PAM type: YTN; PAM sequence: TTC
caatttaacagccacagctc

SEQ ID NO: 199723 - DNA, 20 bp, Artificial Sequence
  Description of Artificial Sequence: Synthetic oligonucleotide
  Target: LAMA2; (-) strand; PAM type: YTN; PAM sequence: CTG
gtggcatagttccaatttaa

SEQ ID NO: 199724 - DNA, 20 bp, Artificial Sequence
  Description of Artificial Sequence: Synthetic oligonucleotide
  Target: LAMA2; (-) strand; PAM type: YTN; PAM sequence: CTA
aaggcagagaagaataaata

SEQ ID NO: 199725 - DNA, 20 bp, Artificial Sequence
  Description of Artificial Sequence: Synthetic oligonucleotide
  Target: LAMA2; (-) strand; PAM type: YTN; PAM sequence: TTC
cctaaaggcagagaagaata

SEQ ID NO: 199726 - DNA, 20 bp, Artificial Sequence
  Description of Artificial Sequence: Synthetic oligonucleotide
  Target: LAMA2; (-) strand; PAM type: YTN; PAM sequence: TTA
aaaaaattccctaaaggcag

SEQ ID NO: 199727 - DNA, 20 bp, Artificial Sequence
  Description of Artificial Sequence: Synthetic oligonucleotide
  Target: LAMA2; (-) strand; PAM type: YTN; PAM sequence: TTT
aaaaaaattccctaaaggca

SEQ ID NO: 199728 - DNA, 20 bp, Artificial Sequence
  Description of Artificial Sequence: Synthetic oligonucleotide
  Target: LAMA2; (-) strand; PAM type: YTN; PAM sequence: TTT
taaaaaaattccctaaaggc

SEQ ID NO: 199729 - DNA, 20 bp, Artificial Sequence
  Description of Artificial Sequence: Synthetic oligonucleotide
  Target: LAMA2; (-) strand; PAM type: YTN; PAM sequence: TTT
ttaaaaaaattccctaaagg

SEQ ID NO: 199730 - DNA, 20 bp, Artificial Sequence
  Description of Artificial Sequence: Synthetic oligonucleotide
  Target: LAMA2; (-) strand; PAM type: YTN; PAM sequence: CTT
tttaaaaaaattccctaaag

SEQ ID NO: 199731 - DNA, 20 bp, Artificial Sequence
  Description of Artificial Sequence: Synthetic oligonucleotide
  Target: LAMA2; (-) strand; PAM type: YTN; PAM sequence: TTG
aactttttaaaaaaattccc

SEQ ID NO: 199732 - DNA, 20 bp, Artificial Sequence
  Description of Artificial Sequence: Synthetic oligonucleotide
  Target: LAMA2; (-) strand; PAM type: YTN; PAM sequence: CTT
gaactttttaaaaaaattcc

SEQ ID NO: 199733 - DNA, 20 bp, Artificial Sequence
  Description of Artificial Sequence: Synthetic oligonucleotide
  Target: LAMA2; (-) strand; PAM type: YTN; PAM sequence: TTC
ttgaactttttaaaaaaatt

SEQ ID NO: 199734 - DNA, 20 bp, Artificial Sequence
  Description of Artificial Sequence: Synthetic oligonucleotide
  Target: LAMA2; (-) strand; PAM type: YTN; PAM sequence: CTT
cttgaactttttaaaaaaat

SEQ ID NO: 199735 - DNA, 20 bp, Artificial Sequence
  Description of Artificial Sequence: Synthetic oligonucleotide
  Target: LAMA2; (-) strand; PAM type: YTN; PAM sequence: CTC
acggcttcttgaacttttta

SEQ ID NO: 199736 - DNA, 20 bp, Artificial Sequence
  Description of Artificial Sequence: Synthetic oligonucleotide
  Target: LAMA2; (-) strand; PAM type: YTN; PAM sequence: TTA
tctcacggcttcttgaactt

SEQ ID NO: 199737 - DNA, 20 bp, Artificial Sequence
  Description of Artificial Sequence: Synthetic oligonucleotide
  Target: LAMA2; (-) strand; PAM type: YTN; PAM sequence: CTG
cattatctcacggcttcttg

SEQ ID NO: 199738 - DNA, 20 bp, Artificial Sequence
  Description of Artificial Sequence: Synthetic oligonucleotide
  Target: LAMA2; (-) strand; PAM type: YTN; PAM sequence: CTA
tgaaggctgcattatctcac

SEQ ID NO: 199739 - DNA, 20 bp, Artificial Sequence
  Description of Artificial Sequence: Synthetic oligonucleotide
  Target: LAMA2; (-) strand; PAM type: YTN; PAM sequence: CTA
caaacagaataactatgaag

SEQ ID NO: 199740 - DNA, 20 bp, Artificial Sequence
  Description of Artificial Sequence: Synthetic oligonucleotide
  Target: LAMA2; (-) strand; PAM type: YTN; PAM sequence: CTA
ccaatctacaaacagaataa

SEQ ID NO: 199741 - DNA, 20 bp, Artificial Sequence
  Description of Artificial Sequence: Synthetic oligonucleotide
  Target: LAMA2; (-) strand; PAM type: YTN; PAM sequence: TTA
ctaccaatctacaaacagaa

SEQ ID NO: 199742 - DNA, 20 bp, Artificial Sequence
  Description of Artificial Sequence: Synthetic oligonucleotide
  Target: LAMA2; (-) strand; PAM type: YTN; PAM sequence: TTT
actaccaatctacaaacaga

SEQ ID NO: 199743 - DNA, 20 bp, Artificial Sequence
  Description of Artificial Sequence: Synthetic oligonucleotide
  Target: LAMA2; (-) strand; PAM type: YTN; PAM sequence: TTC
ataataagtatcaaaaattt

SEQ ID NO: 199744 - DNA, 20 bp, Artificial Sequence
  Description of Artificial Sequence: Synthetic oligonucleotide
  Target: LAMA2; (-) strand; PAM type: YTN; PAM sequence: TTG
gattcataataagtatcaaa

SEQ ID NO: 199745 - DNA, 20 bp, Artificial Sequence
  Description of Artificial Sequence: Synthetic oligonucleotide
  Target: LAMA2; (-) strand; PAM type: YTN; PAM sequence: CTT
ggattcataataagtatcaa

SEQ ID NO: 199746 - DNA, 20 bp, Artificial Sequence
  Description of Artificial Sequence: Synthetic oligonucleotide
  Target: LAMA2; (-) strand; PAM type: YTN; PAM sequence: CTC
ttggattcataataagtatc

SEQ ID NO: 199747 - DNA, 20 bp, Artificial Sequence
  Description of Artificial Sequence: Synthetic oligonucleotide
  Target: LAMA2; (-) strand; PAM type: YTN; PAM sequence: CTC
cactcttggattcataataa

SEQ ID NO: 199748 - DNA, 20 bp, Artificial Sequence
  Description of Artificial Sequence: Synthetic oligonucleotide
  Target: LAMA2; (-) strand; PAM type: YTN; PAM sequence: TTC
acctccactcttggattcat

SEQ ID NO: 199749 - DNA, 20 bp, Artificial Sequence
  Description of Artificial Sequence: Synthetic oligonucleotide
  Target: LAMA2; (-) strand; PAM type: YTN; PAM sequence: TTT
cacctccactcttggattca

SEQ ID NO: 199750 - DNA, 20 bp, Artificial Sequence
  Description of Artificial Sequence: Synthetic oligonucleotide
  Target: LAMA2; (-) strand; PAM type: YTN; PAM sequence: CTA
tgtttcacctccactcttgg

SEQ ID NO: 199751 - DNA, 20 bp, Artificial Sequence
  Description of Artificial Sequence: Synthetic oligonucleotide
  Target: LAMA2; (-) strand; PAM type: YTN; PAM sequence: TTG
acatagaccaacacatataa

SEQ ID NO: 199752 - DNA, 20 bp, Artificial Sequence
  Description of Artificial Sequence: Synthetic oligonucleotide
  Target: LAMA2; (-) strand; PAM type: YTN; PAM sequence: TTG
attgacatagaccaacacat

SEQ ID NO: 199753 - DNA, 20 bp, Artificial Sequence
  Description of Artificial Sequence: Synthetic oligonucleotide
  Target: LAMA2; (-) strand; PAM type: YTN; PAM sequence: TTT
gattgacatagaccaacaca

SEQ ID NO: 199754 - DNA, 20 bp, Artificial Sequence
  Description of Artificial Sequence: Synthetic oligonucleotide
  Target: LAMA2; (-) strand; PAM type: YTN; PAM sequence: CTA
tttgattgacatagaccaac

SEQ ID NO: 199755 - DNA, 20 bp, Artificial Sequence
  Description of Artificial Sequence: Synthetic oligonucleotide
  Target: LAMA2; (-) strand; PAM type: YTN; PAM sequence: CTC
ctatttgattgacatagacc

SEQ ID NO: 199756 - DNA, 20 bp, Artificial Sequence
  Description of Artificial Sequence: Synthetic oligonucleotide
  Target: LAMA2; (-) strand; PAM type: YTN; PAM sequence: CTC
tcctatttgattgacataga

SEQ ID NO: 199757 - DNA, 20 bp, Artificial Sequence
  Description of Artificial Sequence: Synthetic oligonucleotide
  Target: LAMA2; (-) strand; PAM type: YTN; PAM sequence: TTA
tctctcctatttgattgaca

SEQ ID NO: 199758 - DNA, 20 bp, Artificial Sequence
  Description of Artificial Sequence: Synthetic oligonucleotide
  Target: LAMA2; (-) strand; PAM type: YTN; PAM sequence: TTT
atctctcctatttgattgac

SEQ ID NO: 199759 - DNA, 20 bp, Artificial Sequence
  Description of Artificial Sequence: Synthetic oligonucleotide
  Target: LAMA2; (-) strand; PAM type: YTN; PAM sequence: TTT
tatctctcctatttgattga

SEQ ID NO: 199760 - DNA, 20 bp, Artificial Sequence
  Description of Artificial Sequence: Synthetic oligonucleotide
  Target: LAMA2; (-) strand; PAM type: YTN; PAM sequence: CTA
tcattttatctctcctattt

SEQ ID NO: 199761 - DNA, 20 bp, Artificial Sequence
  Description of Artificial Sequence: Synthetic oligonucleotide
  Target: LAMA2; (-) strand; PAM type: YTN; PAM sequence: CTA
acaagactatcattttatct

SEQ ID NO: 199762 - DNA, 20 bp, Artificial Sequence
  Description of Artificial Sequence: Synthetic oligonucleotide
  Target: LAMA2; (-) strand; PAM type: YTN; PAM sequence: TTC
actaacaagactatcatttt

SEQ ID NO: 199763 - DNA, 20 bp, Artificial Sequence
  Description of Artificial Sequence: Synthetic oligonucleotide
  Target: LAMA2; (-) strand; PAM type: YTN; PAM sequence: TTT
cactaacaagactatcattt

SEQ ID NO: 199764 - DNA, 20 bp, Artificial Sequence
  Description of Artificial Sequence: Synthetic oligonucleotide
  Target: LAMA2; (-) strand; PAM type: YTN; PAM sequence: CTT
tcactaacaagactatcatt

SEQ ID NO: 199765 - DNA, 20 bp, Artificial Sequence
  Description of Artificial Sequence: Synthetic oligonucleotide
  Target: LAMA2; (-) strand; PAM type: YTN; PAM sequence: TTC
tttcactaacaagactatca

SEQ ID NO: 199766 - DNA, 20 bp, Artificial Sequence
  Description of Artificial Sequence: Synthetic oligonucleotide
  Target: LAMA2; (-) strand; PAM type: YTN; PAM sequence: TTT
ctttcactaacaagactatc

SEQ ID NO: 199767 - DNA, 20 bp, Artificial Sequence
  Description of Artificial Sequence: Synthetic oligonucleotide
  Target: LAMA2; (-) strand; PAM type: YTN; PAM sequence: TTT
tctttcactaacaagactat

SEQ ID NO: 199768 - DNA, 20 bp, Artificial Sequence
  Description of Artificial Sequence: Synthetic oligonucleotide
  Target: LAMA2; (-) strand; PAM type: YTN; PAM sequence: CTA
ttttctttcactaacaagac

SEQ ID NO: 199769 - DNA, 20 bp, Artificial Sequence
  Description of Artificial Sequence: Synthetic oligonucleotide
  Target: LAMA2; (-) strand; PAM type: YTN; PAM sequence: TTG
tccctattttctttcactaa

SEQ ID NO: 199770 - DNA, 20 bp, Artificial Sequence
  Description of Artificial Sequence: Synthetic oligonucleotide
  Target: LAMA2; (-) strand; PAM type: YTN; PAM sequence: TTA
attgtccctattttctttca

SEQ ID NO: 199771 - DNA, 20 bp, Artificial Sequence
  Description of Artificial Sequence: Synthetic oligonucleotide
  Target: LAMA2; (-) strand; PAM type: YTN; PAM sequence: TTA
tacattaattgtccctattt

SEQ ID NO: 199772 - DNA, 20 bp, Artificial Sequence
  Description of Artificial Sequence: Synthetic oligonucleotide
  Target: LAMA2; (-) strand; PAM type: YTN; PAM sequence: TTA
ttatacattaattgtcccta

SEQ ID NO: 199773 - DNA, 20 bp, Artificial Sequence
  Description of Artificial Sequence: Synthetic oligonucleotide
  Target: LAMA2; (-) strand; PAM type: YTN; PAM sequence: TTT
attatacattaattgtccct

SEQ ID NO: 199774 - DNA, 20 bp, Artificial Sequence
  Description of Artificial Sequence: Synthetic oligonucleotide
  Target: LAMA2; (-) strand; PAM type: YTN; PAM sequence: TTA
agtttattatacattaattg

SEQ ID NO: 199775 - DNA, 20 bp, Artificial Sequence
  Description of Artificial Sequence: Synthetic oligonucleotide
  Target: LAMA2; (-) strand; PAM type: YTN; PAM sequence: TTT
aagtttattatacattaatt

SEQ ID NO: 199776 - DNA, 20 bp, Artificial Sequence
  Description of Artificial Sequence: Synthetic oligonucleotide
  Target: LAMA2; (-) strand; PAM type: YTN; PAM sequence: CTT
taagtttattatacattaat

SEQ ID NO: 199777 - DNA, 20 bp, Artificial Sequence
  Description of Artificial Sequence: Synthetic oligonucleotide
  Target: LAMA2; (-) strand; PAM type: YTN; PAM sequence: CTG
tcatatcatgtaactttaag

SEQ ID NO: 199778 - DNA, 20 bp, Artificial Sequence
  Description of Artificial Sequence: Synthetic oligonucleotide
  Target: LAMA2; (-) strand; PAM type: YTN; PAM sequence: CTA
tgctgtcatatcatgtaact

SEQ ID NO: 199779 - DNA, 20 bp, Artificial Sequence
  Description of Artificial Sequence: Synthetic oligonucleotide
  Target: LAMA2; (-) strand; PAM type: YTN; PAM sequence: TTC
tatgctgtcatatcatgtaa

SEQ ID NO: 199780 - DNA, 20 bp, Artificial Sequence
  Description of Artificial Sequence: Synthetic oligonucleotide
  Target: LAMA2; (-) strand; PAM type: YTN; PAM sequence: TTA
attctatgctgtcatatcat

SEQ ID NO: 199781 - DNA, 20 bp, Artificial Sequence
  Description of Artificial Sequence: Synthetic oligonucleotide
  Target: LAMA2; (-) strand; PAM type: YTN; PAM sequence: TTT
aattctatgctgtcatatca

SEQ ID NO: 199782 - DNA, 20 bp, Artificial Sequence
  Description of Artificial Sequence: Synthetic oligonucleotide
  Target: LAMA2; (-) strand; PAM type: YTN; PAM sequence: TTT
taattctatgctgtcatatc

SEQ ID NO: 199783 - DNA, 20 bp, Artificial Sequence
  Description of Artificial Sequence: Synthetic oligonucleotide
  Target: LAMA2; (-) strand; PAM type: YTN; PAM sequence: TTT
ttaattctatgctgtcatat

SEQ ID NO: 199784 - DNA, 20 bp, Artificial Sequence
  Description of Artificial Sequence: Synthetic oligonucleotide
  Target: LAMA2; (-) strand; PAM type: YTN; PAM sequence: CTA
gacagacatatttttaattc

SEQ ID NO: 199785 - DNA, 20 bp, Artificial Sequence
  Description of Artificial Sequence: Synthetic oligonucleotide
  Target: LAMA2; (-) strand; PAM type: YTN; PAM sequence: TTA
ctagacagacatatttttaa

SEQ ID NO: 199786 - DNA, 20 bp, Artificial Sequence
  Description of Artificial Sequence: Synthetic oligonucleotide
  Target: LAMA2; (-) strand; PAM type: YTN; PAM sequence: TTG
cgaaggagaaaaaaattact

SEQ ID NO: 199787 - DNA, 20 bp, Artificial Sequence
  Description of Artificial Sequence: Synthetic oligonucleotide
  Target: LAMA2; (-) strand; PAM type: YTN; PAM sequence: CTA
tgaagaaagcaataattgcg

SEQ ID NO: 199788 - DNA, 20 bp, Artificial Sequence
  Description of Artificial Sequence: Synthetic oligonucleotide
  Target: LAMA2; (-) strand; PAM type: YTN; PAM sequence: TTG
acagagaacaataggaaaag

SEQ ID NO: 199789 - DNA, 20 bp, Artificial Sequence
  Description of Artificial Sequence: Synthetic oligonucleotide
  Target: LAMA2; (-) strand; PAM type: YTN; PAM sequence: CTT
gacagagaacaataggaaaa

SEQ ID NO: 199790 - DNA, 20 bp, Artificial Sequence
  Description of Artificial Sequence: Synthetic oligonucleotide
  Target: LAMA2; (-) strand; PAM type: YTN; PAM sequence: CTG
cagtgtcttgacagagaaca

SEQ ID NO: 199791 - DNA, 20 bp, Artificial Sequence
  Description of Artificial Sequence: Synthetic oligonucleotide
  Target: LAMA2; (-) strand; PAM type: YTN; PAM sequence: TTA
aaacagactgcagtgtcttg

SEQ ID NO: 199792 - DNA, 20 bp, Artificial Sequence
  Description of Artificial Sequence: Synthetic oligonucleotide
  Target: LAMA2; (-) strand; PAM type: YTN; PAM sequence: TTG
tatgacataacaagtaaaat

SEQ ID NO: 199793 - DNA, 20 bp, Artificial Sequence
  Description of Artificial Sequence: Synthetic oligonucleotide
  Target: LAMA2; (-) strand; PAM type: YTN; PAM sequence: TTT
gtatgacataacaagtaaaa

SEQ ID NO: 199794 - DNA, 20 bp, Artificial Sequence
  Description of Artificial Sequence: Synthetic oligonucleotide
  Target: LAMA2; (-) strand; PAM type: YTN; PAM sequence: TTA
gtggagaaccaaacatgaat

SEQ ID NO: 199795 - DNA, 20 bp, Artificial Sequence
  Description of Artificial Sequence: Synthetic oligonucleotide
  Target: LAMA2; (-) strand; PAM type: YTN; PAM sequence: TTG
aaacagtattagtggagaac

SEQ ID NO: 199796 - DNA, 20 bp, Artificial Sequence
  Description of Artificial Sequence: Synthetic oligonucleotide
  Target: LAMA2; (-) strand; PAM type: YTN; PAM sequence: CTT
gaaacagtattagtggagaa

SEQ ID NO: 199797 - DNA, 20 bp, Artificial Sequence
  Description of Artificial Sequence: Synthetic oligonucleotide
  Target: LAMA2; (-) strand; PAM type: YTN; PAM sequence: CTC
ttgaaacagtattagtggag

SEQ ID NO: 199798 - DNA, 20 bp, Artificial Sequence
  Description of Artificial Sequence: Synthetic oligonucleotide
  Target: LAMA2; (-) strand; PAM type: YTN; PAM sequence: TTC
gtgacctcttgaaacagtat

SEQ ID NO: 199799 - DNA, 20 bp, Artificial Sequence
  Description of Artificial Sequence: Synthetic oligonucleotide
  Target: LAMA2; (-) strand; PAM type: YTN; PAM sequence: CTT
cgtgacctcttgaaacagta

SEQ ID NO: 199800 - DNA, 20 bp, Artificial Sequence
  Description of Artificial Sequence: Synthetic oligonucleotide
  Target: LAMA2; (-) strand; PAM type: YTN; PAM sequence: TTC
ttcgtgacctcttgaaacag

SEQ ID NO: 199801 - DNA, 20 bp, Artificial Sequence
  Description of Artificial Sequence: Synthetic oligonucleotide
  Target: LAMA2; (-) strand; PAM type: YTN; PAM sequence: CTT
cttcgtgacctcttgaaaca

SEQ ID NO: 199802 - DNA, 20 bp, Artificial Sequence
  Description of Artificial Sequence: Synthetic oligonucleotide
  Target: LAMA2; (-) strand; PAM type: YTN; PAM sequence: TTA
aaaaaaaaaataccttcttc

SEQ ID NO: 199803 - DNA, 20 bp, Artificial Sequence
  Description of Artificial Sequence: Synthetic oligonucleotide
  Target: LAMA2; (-) strand; PAM type: YTN; PAM sequence: TTT
aaaaaaaaaaataccttctt

SEQ ID NO: 199804 - DNA, 20 bp, Artificial Sequence
  Description of Artificial Sequence: Synthetic oligonucleotide
  Target: LAMA2; (-) strand; PAM type: YTN; PAM sequence: CTT
taaaaaaaaaaataccttct

SEQ ID NO: 199805 - DNA, 20 bp, Artificial Sequence
  Description of Artificial Sequence: Synthetic oligonucleotide
  Target: LAMA2; (-) strand; PAM type: YTN; PAM sequence: TTC
ctttaaaaaaaaaaatacct

SEQ ID NO: 199806 - DNA, 20 bp, Artificial Sequence
  Description of Artificial Sequence: Synthetic oligonucleotide
  Target: LAMA2; (-) strand; PAM type: YTN; PAM sequence: TTG
gtgttcctttaaaaaaaaaa

SEQ ID NO: 199807 - DNA, 20 bp, Artificial Sequence
  Description of Artificial Sequence: Synthetic oligonucleotide
  Target: LAMA2; (-) strand; PAM type: YTN; PAM sequence: TTT
ggtgttcctttaaaaaaaaa

SEQ ID NO: 199808 - DNA, 20 bp, Artificial Sequence
  Description of Artificial Sequence: Synthetic oligonucleotide
  Target: LAMA2; (-) strand; PAM type: YTN; PAM sequence: TTT
tggtgttcctttaaaaaaaa

SEQ ID NO: 199809 - DNA, 20 bp, Artificial Sequence
  Description of Artificial Sequence: Synthetic oligonucleotide
  Target: LAMA2; (-) strand; PAM type: YTN; PAM sequence: TTC
gattttggtgttcctttaaa

SEQ ID NO: 199810 - DNA, 20 bp, Artificial Sequence
  Description of Artificial Sequence: Synthetic oligonucleotide
  Target: LAMA2; (-) strand; PAM type: YTN; PAM sequence: CTC
agtcacacataaaatccatc

SEQ ID NO: 199811 - DNA, 20 bp, Artificial Sequence
  Description of Artificial Sequence: Synthetic oligonucleotide
  Target: LAMA2; (-) strand; PAM type: YTN; PAM sequence: CTC
cacacaagctcagtcacaca

SEQ ID NO: 199812 - DNA, 20 bp, Artificial Sequence
  Description of Artificial Sequence: Synthetic oligonucleotide
  Target: LAMA2; (-) strand; PAM type: YTN; PAM sequence: TTC
actccacacaagctcagtca

SEQ ID NO: 199813 - DNA, 20 bp, Artificial Sequence
  Description of Artificial Sequence: Synthetic oligonucleotide
  Target: LAMA2; (-) strand; PAM type: YTN; PAM sequence: CTT
cactccacacaagctcagtc

SEQ ID NO: 199814 - DNA, 20 bp, Artificial Sequence
  Description of Artificial Sequence: Synthetic oligonucleotide
  Target: LAMA2; (-) strand; PAM type: YTN; PAM sequence: TTC
ttcactccacacaagctcag

SEQ ID NO: 199815 - DNA, 20 bp, Artificial Sequence
  Description of Artificial Sequence: Synthetic oligonucleotide
  Target: LAMA2; (-) strand; PAM type: YTN; PAM sequence: TTT
cttcactccacacaagctca

SEQ ID NO: 199816 - DNA, 20 bp, Artificial Sequence
  Description of Artificial Sequence: Synthetic oligonucleotide
  Target: LAMA2; (-) strand; PAM type: YTN; PAM sequence: TTT
tcttcactccacacaagctc

SEQ ID NO: 199817 - DNA, 20 bp, Artificial Sequence
  Description of Artificial Sequence: Synthetic oligonucleotide
  Target: LAMA2; (-) strand; PAM type: YTN; PAM sequence: TTT
ttcttcactccacacaagct

SEQ ID NO: 199818 - DNA, 20 bp, Artificial Sequence
  Description of Artificial Sequence: Synthetic oligonucleotide
  Target: LAMA2; (-) strand; PAM type: YTN; PAM sequence: TTG
aatttttcttcactccacac

SEQ ID NO: 199819 - DNA, 20 bp, Artificial Sequence
  Description of Artificial Sequence: Synthetic oligonucleotide
  Target: LAMA2; (-) strand; PAM type: YTN; PAM sequence: TTT
gaatttttcttcactccaca

SEQ ID NO: 199820 - DNA, 20 bp, Artificial Sequence
  Description of Artificial Sequence: Synthetic oligonucleotide
  Target: LAMA2; (-) strand; PAM type: YTN; PAM sequence: TTT
tgaatttttcttcactccac

SEQ ID NO: 199821 - DNA, 20 bp, Artificial Sequence
  Description of Artificial Sequence: Synthetic oligonucleotide
  Target: LAMA2; (-) strand; PAM type: YTN; PAM sequence: TTA
ttttgaatttttcttcactc

SEQ ID NO: 199822 - DNA, 20 bp, Artificial Sequence
  Description of Artificial Sequence: Synthetic oligonucleotide
  Target: LAMA2; (-) strand; PAM type: YTN; PAM sequence: TTT
attttgaatttttcttcact

SEQ ID NO: 199823 - DNA, 20 bp, Artificial Sequence
  Description of Artificial Sequence: Synthetic oligonucleotide
  Target: LAMA2; (-) strand; PAM type: YTN; PAM sequence: CTC
agagaggaatttattttgaa

SEQ ID NO: 199824 - DNA, 20 bp, Artificial Sequence
  Description of Artificial Sequence: Synthetic oligonucleotide
  Target: LAMA2; (-) strand; PAM type: YTN; PAM sequence: TTC
catgcagtgtgtctcagaga

SEQ ID NO: 199825 - DNA, 20 bp, Artificial Sequence
  Description of Artificial Sequence: Synthetic oligonucleotide
  Target: LAMA2; (-) strand; PAM type: YTN; PAM sequence: TTT
ccatgcagtgtgtctcagag

SEQ ID NO: 199826 - DNA, 20 bp, Artificial Sequence
  Description of Artificial Sequence: Synthetic oligonucleotide
  Target: LAMA2; (-) strand; PAM type: YTN; PAM sequence: TTG
atatttccatgcagtgtgtc

SEQ ID NO: 199827 - DNA, 20 bp, Artificial Sequence
  Description of Artificial Sequence: Synthetic oligonucleotide
  Target: LAMA2; (-) strand; PAM type: YTN; PAM sequence: TTT
gatatttccatgcagtgtgt

SEQ ID NO: 199828 - DNA, 20 bp, Artificial Sequence
  Description of Artificial Sequence: Synthetic oligonucleotide
  Target: LAMA2; (-) strand; PAM type: YTN; PAM sequence: CTT
tgatatttccatgcagtgtg

SEQ ID NO: 199829 - DNA, 20 bp, Artificial Sequence
  Description of Artificial Sequence: Synthetic oligonucleotide
  Target: LAMA2; (-) strand; PAM type: YTN; PAM sequence: CTG
ctttgatatttccatgcagt

SEQ ID NO: 199830 - DNA, 20 bp, Artificial Sequence
  Description of Artificial Sequence: Synthetic oligonucleotide
  Target: LAMA2; (-) strand; PAM type: YTN; PAM sequence: TTG
cactgctttgatatttccat

SEQ ID NO: 199831 - DNA, 20 bp, Artificial Sequence
  Description of Artificial Sequence: Synthetic oligonucleotide
  Target: LAMA2; (-) strand; PAM type: YTN; PAM sequence: TTA
tgaaagaattgcactgcttt

SEQ ID NO: 199832 - DNA, 20 bp, Artificial Sequence
  Description of Artificial Sequence: Synthetic oligonucleotide
  Target: LAMA2; (-) strand; PAM type: YTN; PAM sequence: TTT
atgaaagaattgcactgctt

SEQ ID NO: 199833 - DNA, 20 bp, Artificial Sequence
  Description of Artificial Sequence: Synthetic oligonucleotide
  Target: LAMA2; (-) strand; PAM type: YTN; PAM sequence: TTA
atttatgaaagaattgcact

SEQ ID NO: 199834 - DNA, 20 bp, Artificial Sequence
  Description of Artificial Sequence: Synthetic oligonucleotide
  Target: LAMA2; (-) strand; PAM type: YTN; PAM sequence: TTT
aatttatgaaagaattgcac

SEQ ID NO: 199835 - DNA, 20 bp, Artificial Sequence
  Description of Artificial Sequence: Synthetic oligonucleotide
  Target: LAMA2; (-) strand; PAM type: YTN; PAM sequence: CTT
taatttatgaaagaattgca

SEQ ID NO: 199836 - DNA, 20 bp, Artificial Sequence
  Description of Artificial Sequence: Synthetic oligonucleotide
  Target: LAMA2; (-) strand; PAM type: YTN; PAM sequence: CTG
gatggacccaaaacagaatg

SEQ ID NO: 199837 - DNA, 20 bp, Artificial Sequence
  Description of Artificial Sequence: Synthetic oligonucleotide
  Target: LAMA2; (-) strand; PAM type: YTN; PAM sequence: TTC
tggatggacccaaaacagaa

SEQ ID NO: 199838 - DNA, 20 bp, Artificial Sequence
  Description of Artificial Sequence: Synthetic oligonucleotide
  Target: LAMA2; (-) strand; PAM type: YTN; PAM sequence: CTT
ctggatggacccaaaacaga

SEQ ID NO: 199839 - DNA, 20 bp, Artificial Sequence
  Description of Artificial Sequence: Synthetic oligonucleotide
  Target: LAMA2; (-) strand; PAM type: YTN; PAM sequence: TTA
tcatcttctggatggaccca

SEQ ID NO: 199840 - DNA, 20 bp, Artificial Sequence
  Description of Artificial Sequence: Synthetic oligonucleotide
  Target: LAMA2; (-) strand; PAM type: YTN; PAM sequence: CTC
gaaacattatcatcttctgg

SEQ ID NO: 199841 - DNA, 20 bp, Artificial Sequence
  Description of Artificial Sequence: Synthetic oligonucleotide
  Target: LAMA2; (-) strand; PAM type: YTN; PAM sequence: CTC
tcgaaacattatcatcttct

SEQ ID NO: 199842 - DNA, 20 bp, Artificial Sequence
  Description of Artificial Sequence: Synthetic oligonucleotide
  Target: LAMA2; (-) strand; PAM type: YTN; PAM sequence: CTG
ctctcgaaacattatcatct

SEQ ID NO: 199843 - DNA, 20 bp, Artificial Sequence
  Description of Artificial Sequence: Synthetic oligonucleotide
  Target: LAMA2; (-) strand; PAM type: YTN; PAM sequence: CTG
ctgctctcgaaacattatca

SEQ ID NO: 199844 - DNA, 20 bp, Artificial Sequence
  Description of Artificial Sequence: Synthetic oligonucleotide
  Target: LAMA2; (-) strand; PAM type: YTN; PAM sequence: CTG
agaaactgctgctctcgaaa

SEQ ID NO: 199845 - DNA, 20 bp, Artificial Sequence
  Description of Artificial Sequence: Synthetic oligonucleotide
  Target: LAMA2; (-) strand; PAM type: YTN; PAM sequence: TTG
gtaccatagtgaaacacaga

SEQ ID NO: 199846 - DNA, 20 bp, Artificial Sequence
  Description of Artificial Sequence: Synthetic oligonucleotide
  Target: LAMA2; (-) strand; PAM type: YTN; PAM sequence: CTT
ggtaccatagtgaaacacag

SEQ ID NO: 199847 - DNA, 20 bp, Artificial Sequence
  Description of Artificial Sequence: Synthetic oligonucleotide
  Target: LAMA2; (-) strand; PAM type: YTN; PAM sequence: TTC
ttggtaccatagtgaaacac

SEQ ID NO: 199848 - DNA, 20 bp, Artificial Sequence
  Description of Artificial Sequence: Synthetic oligonucleotide
  Target: LAMA2; (-) strand; PAM type: YTN; PAM sequence: TTT
cttggtaccatagtgaaaca

SEQ ID NO: 199849 - DNA, 20 bp, Artificial Sequence
  Description of Artificial Sequence: Synthetic oligonucleotide
  Target: LAMA2; (-) strand; PAM type: YTN; PAM sequence: CTG
gcaaatttcttggtaccata

SEQ ID NO: 199850 - DNA, 20 bp, Artificial Sequence
  Description of Artificial Sequence: Synthetic oligonucleotide
  Target: LAMA2; (-) strand; PAM type: YTN; PAM sequence: TTC
cctggcaaatttcttggtac

SEQ ID NO: 199851 - DNA, 20 bp, Artificial Sequence
  Description of Artificial Sequence: Synthetic oligonucleotide
  Target: LAMA2; (-) strand; PAM type: YTN; PAM sequence: TTT
ccctggcaaatttcttggta

SEQ ID NO: 199852 - DNA, 20 bp, Artificial Sequence
  Description of Artificial Sequence: Synthetic oligonucleotide
  Target: LAMA2; (-) strand; PAM type: YTN; PAM sequence: CTT
tccctggcaaatttcttggt

SEQ ID NO: 199853 - DNA, 20 bp, Artificial Sequence
  Description of Artificial Sequence: Synthetic oligonucleotide
  Target: LAMA2; (-) strand; PAM type: YTN; PAM sequence: TTC
tttccctggcaaatttcttg

SEQ ID NO: 199854 - DNA, 20 bp, Artificial Sequence
  Description of Artificial Sequence: Synthetic oligonucleotide
  Target: LAMA2; (-) strand; PAM type: YTN; PAM sequence: TTT
ctttccctggcaaatttctt

SEQ ID NO: 199855 - DNA, 20 bp, Artificial Sequence
  Description of Artificial Sequence: Synthetic oligonucleotide
  Target: LAMA2; (-) strand; PAM type: YTN; PAM sequence: TTG
acagaataaaggcaaatcat

SEQ ID NO: 199856 - DNA, 20 bp, Artificial Sequence
  Description of Artificial Sequence: Synthetic oligonucleotide
  Target: LAMA2; (-) strand; PAM type: YTN; PAM sequence: TTG
ataatattgacagaataaag

SEQ ID NO: 199857 - DNA, 20 bp, Artificial Sequence
  Description of Artificial Sequence: Synthetic oligonucleotide
  Target: LAMA2; (-) strand; PAM type: YTN; PAM sequence: TTT
gataatattgacagaataaa

SEQ ID NO: 199858 - DNA, 20 bp, Artificial Sequence
  Description of Artificial Sequence: Synthetic oligonucleotide
  Target: LAMA2; (-) strand; PAM type: YTN; PAM sequence: TTA
atttgataatattgacagaa

SEQ ID NO: 199859 - DNA, 20 bp, Artificial Sequence
  Description of Artificial Sequence: Synthetic oligonucleotide
  Target: LAMA2; (-) strand; PAM type: YTN; PAM sequence: CTT
aatttgataatattgacaga

SEQ ID NO: 199860 - DNA, 20 bp, Artificial Sequence
  Description of Artificial Sequence: Synthetic oligonucleotide
  Target: LAMA2; (-) strand; PAM type: YTN; PAM sequence: TTC
ttaatttgataatattgaca

SEQ ID NO: 199861 - DNA, 20 bp, Artificial Sequence
  Description of Artificial Sequence: Synthetic oligonucleotide
  Target: LAMA2; (-) strand; PAM type: YTN; PAM sequence: TTG
gaaaaacattcttaatttga

SEQ ID NO: 199862 - DNA, 20 bp, Artificial Sequence
  Description of Artificial Sequence: Synthetic oligonucleotide
  Target: LAMA2; (-) strand; PAM type: YTN; PAM sequence: TTT
ggaaaaacattcttaatttg

SEQ ID NO: 199863 - DNA, 20 bp, Artificial Sequence
  Description of Artificial Sequence: Synthetic oligonucleotide
  Target: LAMA2; (-) strand; PAM type: YTN; PAM sequence: TTT
tggaaaaacattcttaattt

SEQ ID NO: 199864 - DNA, 20 bp, Artificial Sequence
  Description of Artificial Sequence: Synthetic oligonucleotide
  Target: LAMA2; (-) strand; PAM type: YTN; PAM sequence: TTT
ttggaaaaacattcttaatt

SEQ ID NO: 199865 - DNA, 20 bp, Artificial Sequence
  Description of Artificial Sequence: Synthetic oligonucleotide
  Target: LAMA2; (-) strand; PAM type: YTN; PAM sequence: TTA
aaagaatttttggaaaaaca

SEQ ID NO: 199866 - DNA, 20 bp, Artificial Sequence
  Description of Artificial Sequence: Synthetic oligonucleotide
  Target: LAMA2; (-) strand; PAM type: YTN; PAM sequence: TTT
aaaagaatttttggaaaaac

SEQ ID NO: 199867 - DNA, 20 bp, Artificial Sequence
  Description of Artificial Sequence: Synthetic oligonucleotide
  Target: LAMA2; (-) strand; PAM type: YTN; PAM sequence: CTC
aataatttaaaagaattttt

SEQ ID NO: 199868 - DNA, 20 bp, Artificial Sequence
  Description of Artificial Sequence: Synthetic oligonucleotide
  Target: LAMA2; (-) strand; PAM type: YTN; PAM sequence: CTC
ataataaacactcaataatt

SEQ ID NO: 199869 - DNA, 20 bp, Artificial Sequence
  Description of Artificial Sequence: Synthetic oligonucleotide
  Target: LAMA2; (-) strand; PAM type: YTN; PAM sequence: TTG
cacatcataaatactcataa

SEQ ID NO: 199870 - DNA, 20 bp, Artificial Sequence
  Description of Artificial Sequence: Synthetic oligonucleotide
  Target: LAMA2; (-) strand; PAM type: YTN; PAM sequence: CTT
gcacatcataaatactcata

SEQ ID NO: 199871 - DNA, 20 bp, Artificial Sequence
  Description of Artificial Sequence: Synthetic oligonucleotide
  Target: LAMA2; (-) strand; PAM type: YTN; PAM sequence: CTA
gcaccttgcacatcataaat

SEQ ID NO: 199872 - DNA, 20 bp, Artificial Sequence
  Description of Artificial Sequence: Synthetic oligonucleotide
  Target: LAMA2; (-) strand; PAM type: YTN; PAM sequence: TTA
gcctagcaccttgcacatca

SEQ ID NO: 199873 - DNA, 20 bp, Artificial Sequence
  Description of Artificial Sequence: Synthetic oligonucleotide
  Target: LAMA2; (-) strand; PAM type: YTN; PAM sequence: TTA
tatacaaccagcaattagcc

SEQ ID NO: 199874 - DNA, 20 bp, Artificial Sequence
  Description of Artificial Sequence: Synthetic oligonucleotide
  Target: LAMA2; (-) strand; PAM type: YTN; PAM sequence: TTT
atatacaaccagcaattagc

SEQ ID NO: 199875 - DNA, 20 bp, Artificial Sequence
  Description of Artificial Sequence: Synthetic oligonucleotide
  Target: LAMA2; (-) strand; PAM type: YTN; PAM sequence: CTT
tatatacaaccagcaattag

SEQ ID NO: 199876 - DNA, 20 bp, Artificial Sequence
  Description of Artificial Sequence: Synthetic oligonucleotide
  Target: LAMA2; (-) strand; PAM type: YTN; PAM sequence: CTG
gagtccaaatacctttatat

SEQ ID NO: 199877 - DNA, 20 bp, Artificial Sequence
  Description of Artificial Sequence: Synthetic oligonucleotide
  Target: LAMA2; (-) strand; PAM type: YTN; PAM sequence: CTA
caaaataaaaatagaatagt

SEQ ID NO: 199878 - DNA, 20 bp, Artificial Sequence
  Description of Artificial Sequence: Synthetic oligonucleotide
  Target: LAMA2; (-) strand; PAM type: YTN; PAM sequence: TTC
acacagactacaaaataaaa

SEQ ID NO: 199879 - DNA, 20 bp, Artificial Sequence
  Description of Artificial Sequence: Synthetic oligonucleotide
  Target: LAMA2; (-) strand; PAM type: YTN; PAM sequence: TTA
taaattcacacagactacaa

SEQ ID NO: 199880 - DNA, 20 bp, Artificial Sequence
  Description of Artificial Sequence: Synthetic oligonucleotide
  Target: LAMA2; (-) strand; PAM type: YTN; PAM sequence: TTT
ataaattcacacagactaca

SEQ ID NO: 199881 - DNA, 20 bp, Artificial Sequence
  Description of Artificial Sequence: Synthetic oligonucleotide
  Target: LAMA2; (-) strand; PAM type: YTN; PAM sequence: TTA
gtggtttataaattcacaca

SEQ ID NO: 199882 - DNA, 20 bp, Artificial Sequence
  Description of Artificial Sequence: Synthetic oligonucleotide
  Target: LAMA2; (-) strand; PAM type: YTN; PAM sequence: TTT
agtggtttataaattcacac

SEQ ID NO: 199883 - DNA, 20 bp, Artificial Sequence
  Description of Artificial Sequence: Synthetic oligonucleotide
  Target: LAMA2; (-) strand; PAM type: YTN; PAM sequence: CTG
taagatttagtggtttataa

SEQ ID NO: 199884 - DNA, 20 bp, Artificial Sequence
  Description of Artificial Sequence: Synthetic oligonucleotide
  Target: LAMA2; (-) strand; PAM type: YTN; PAM sequence: TTA
aacctgtaagatttagtggt

SEQ ID NO: 199885 - DNA, 20 bp, Artificial Sequence
  Description of Artificial Sequence: Synthetic oligonucleotide
  Target: LAMA2; (-) strand; PAM type: YTN; PAM sequence: TTG
agtattaaacctgtaagatt

SEQ ID NO: 199886 - DNA, 20 bp, Artificial Sequence
  Description of Artificial Sequence: Synthetic oligonucleotide
  Target: LAMA2; (-) strand; PAM type: YTN; PAM sequence: TTT
gagtattaaacctgtaagat

SEQ ID NO: 199887 - DNA, 20 bp, Artificial Sequence
  Description of Artificial Sequence: Synthetic oligonucleotide
  Target: LAMA2; (-) strand; PAM type: YTN; PAM sequence: TTT
tgagtattaaacctgtaaga

SEQ ID NO: 199888 - DNA, 20 bp, Artificial Sequence
  Description of Artificial Sequence: Synthetic oligonucleotide
  Target: LAMA2; (-) strand; PAM type: YTN; PAM sequence: TTG
aagacaagaggagttttgag

SEQ ID NO: 199889 - DNA, 20 bp, Artificial Sequence
  Description of Artificial Sequence: Synthetic oligonucleotide
  Target: LAMA2; (-) strand; PAM type: YTN; PAM sequence: CTA
tggtaggtatattgaagaca

SEQ ID NO: 199890 - DNA, 20 bp, Artificial Sequence
  Description of Artificial Sequence: Synthetic oligonucleotide
  Target: LAMA2; (-) strand; PAM type: YTN; PAM sequence: TTA
cagtctatggtaggtatatt

SEQ ID NO: 199891 - DNA, 20 bp, Artificial Sequence
  Description of Artificial Sequence: Synthetic oligonucleotide
  Target: LAMA2; (-) strand; PAM type: YTN; PAM sequence: CTT
acagtctatggtaggtatat

SEQ ID NO: 199892 - DNA, 20 bp, Artificial Sequence
  Description of Artificial Sequence: Synthetic oligonucleotide
  Target: LAMA2; (-) strand; PAM type: YTN; PAM sequence: CTC
gaaataatcccttacagtct

SEQ ID NO: 199893 - DNA, 20 bp, Artificial Sequence
  Description of Artificial Sequence: Synthetic oligonucleotide
  Target: LAMA2; (-) strand; PAM type: YTN; PAM sequence: CTA
ctcgaaataatcccttacag

SEQ ID NO: 199894 - DNA, 20 bp, Artificial Sequence
  Description of Artificial Sequence: Synthetic oligonucleotide
  Target: LAMA2; (-) strand; PAM type: YTN; PAM sequence: CTG
actactcgaaataatccctt

SEQ ID NO: 199895 - DNA, 20 bp, Artificial Sequence
  Description of Artificial Sequence: Synthetic oligonucleotide
  Target: LAMA2; (-) strand; PAM type: YTN; PAM sequence: TTA
acaccatatcaaaccccaac

SEQ ID NO: 199896 - DNA, 20 bp, Artificial Sequence
  Description of Artificial Sequence: Synthetic oligonucleotide
  Target: LAMA2; (-) strand; PAM type: YTN; PAM sequence: TTG
atagaatgatgtaaatgcat

SEQ ID NO: 199897 - DNA, 20 bp, Artificial Sequence
  Description of Artificial Sequence: Synthetic oligonucleotide
  Target: LAMA2; (-) strand; PAM type: YTN; PAM sequence: TTG
aaattgatagaatgatgtaa

SEQ ID NO: 199898 - DNA, 20 bp, Artificial Sequence
  Description of Artificial Sequence: Synthetic oligonucleotide
  Target: LAMA2; (-) strand; PAM type: YTN; PAM sequence: CTT
gaaattgatagaatgatgta

SEQ ID NO: 199899 - DNA, 20 bp, Artificial Sequence
  Description of Artificial Sequence: Synthetic oligonucleotide
  Target: LAMA2; (-) strand; PAM type: YTN; PAM sequence: TTA
aagaaaaaagaaaaagaata

SEQ ID NO: 199900 - DNA, 20 bp, Artificial Sequence
  Description of Artificial Sequence: Synthetic oligonucleotide
  Target: LAMA2; (-) strand; PAM type: YTN; PAM sequence: CTG
gaaaaattaaagaaaaaaga

SEQ ID NO: 199901 - DNA, 20 bp, Artificial Sequence
  Description of Artificial Sequence: Synthetic oligonucleotide
  Target: LAMA2; (-) strand; PAM type: YTN; PAM sequence: TTC
agcctggaaaaattaaagaa

SEQ ID NO: 199902 - DNA, 20 bp, Artificial Sequence
  Description of Artificial Sequence: Synthetic oligonucleotide
  Target: LAMA2; (-) strand; PAM type: YTN; PAM sequence: TTT
cagcctggaaaaattaaaga

SEQ ID NO: 199903 - DNA, 20 bp, Artificial Sequence
  Description of Artificial Sequence: Synthetic oligonucleotide
  Target: LAMA2; (-) strand; PAM type: YTN; PAM sequence: CTA
tttcagcctggaaaaattaa

SEQ ID NO: 199904 - DNA, 20 bp, Artificial Sequence
  Description of Artificial Sequence: Synthetic oligonucleotide
  Target: LAMA2; (-) strand; PAM type: YTN; PAM sequence: TTA
aaagataactatttcagcct

SEQ ID NO: 199905 - DNA, 20 bp, Artificial Sequence
  Description of Artificial Sequence: Synthetic oligonucleotide
  Target: LAMA2; (-) strand; PAM type: YTN; PAM sequence: TTT
aaaagataactatttcagcc

SEQ ID NO: 199906 - DNA, 20 bp, Artificial Sequence
  Description of Artificial Sequence: Synthetic oligonucleotide
  Target: LAMA2; (-) strand; PAM type: YTN; PAM sequence: CTT
taaaagataactatttcagc

SEQ ID NO: 199907 - DNA, 20 bp, Artificial Sequence
  Description of Artificial Sequence: Synthetic oligonucleotide
  Target: LAMA2; (-) strand; PAM type: YTN; PAM sequence: CTG
tagaacagactttaaaagat

SEQ ID NO: 199908 - DNA, 20 bp, Artificial Sequence
  Description of Artificial Sequence: Synthetic oligonucleotide
  Target: LAMA2; (-) strand; PAM type: YTN; PAM sequence: CTG
ctgtagaacagactttaaaa

SEQ ID NO: 199909 - DNA, 20 bp, Artificial Sequence
  Description of Artificial Sequence: Synthetic oligonucleotide
  Target: LAMA2; (-) strand; PAM type: YTN; PAM sequence: CTG
gggtggagcagctgctgtag

SEQ ID NO: 199910 - DNA, 20 bp, Artificial Sequence
  Description of Artificial Sequence: Synthetic oligonucleotide
  Target: LAMA2; (-) strand; PAM type: YTN; PAM sequence: CTA
aaggcaatgactggggtgga

SEQ ID NO: 199911 - DNA, 20 bp, Artificial Sequence
  Description of Artificial Sequence: Synthetic oligonucleotide
  Target: LAMA2; (-) strand; PAM type: YTN; PAM sequence: CTA
gagaaagctaaaggcaatga

SEQ ID NO: 199912 - DNA, 20 bp, Artificial Sequence
  Description of Artificial Sequence: Synthetic oligonucleotide
  Target: LAMA2; (-) strand; PAM type: YTN; PAM sequence: CTA
atggcaatctagagaaagct

SEQ ID NO: 199913 - DNA, 20 bp, Artificial Sequence
  Description of Artificial Sequence: Synthetic oligonucleotide
  Target: LAMA2; (-) strand; PAM type: YTN; PAM sequence: TTC
aagaaggcctaatggcaatc

SEQ ID NO: 199914 - DNA, 20 bp, Artificial Sequence
  Description of Artificial Sequence: Synthetic oligonucleotide
  Target: LAMA2; (-) strand; PAM type: YTN; PAM sequence: CTT
caagaaggcctaatggcaat

SEQ ID NO: 199915 - DNA, 20 bp, Artificial Sequence
  Description of Artificial Sequence: Synthetic oligonucleotide
  Target: LAMA2; (-) strand; PAM type: YTN; PAM sequence: CTG
taataagcacgacttcaaga

SEQ ID NO: 199916 - DNA, 20 bp, Artificial Sequence
  Description of Artificial Sequence: Synthetic oligonucleotide
  Target: LAMA2; (-) strand; PAM type: YTN; PAM sequence: CTC
acatatctgtaataagcacg

SEQ ID NO: 199917 - DNA, 20 bp, Artificial Sequence
  Description of Artificial Sequence: Synthetic oligonucleotide
  Target: LAMA2; (-) strand; PAM type: YTN; PAM sequence: CTC
ctcacatatctgtaataagc

SEQ ID NO: 199918 - DNA, 20 bp, Artificial Sequence
  Description of Artificial Sequence: Synthetic oligonucleotide
  Target: LAMA2; (-) strand; PAM type: YTN; PAM sequence: CTA
aaaaaagcactcctcacata

SEQ ID NO: 199919 - DNA, 20 bp, Artificial Sequence
  Description of Artificial Sequence: Synthetic oligonucleotide
  Target: LAMA2; (-) strand; PAM type: YTN; PAM sequence: TTC
cccccctaaaaaaagcactc

SEQ ID NO: 199920 - DNA, 20 bp, Artificial Sequence
  Description of Artificial Sequence: Synthetic oligonucleotide
  Target: LAMA2; (-) strand; PAM type: YTN; PAM sequence: CTT
ccccccctaaaaaaagcact

SEQ ID NO: 199921 - DNA, 20 bp, Artificial Sequence
  Description of Artificial Sequence: Synthetic oligonucleotide
  Target: LAMA2; (-) strand; PAM type: YTN; PAM sequence: CTC
cccttccccccctaaaaaaa

SEQ ID NO: 199922 - DNA, 20 bp, Artificial Sequence
  Description of Artificial Sequence: Synthetic oligonucleotide
  Target: LAMA2; (-) strand; PAM type: YTN; PAM sequence: TTC
tccccttccccccctaaaaa

SEQ ID NO: 199923 - DNA, 20 bp, Artificial Sequence
  Description of Artificial Sequence: Synthetic oligonucleotide
  Target: LAMA2; (-) strand; PAM type: YTN; PAM sequence: TTT
ctccccttccccccctaaaa

SEQ ID NO: 199924 - DNA, 20 bp, Artificial Sequence
  Description of Artificial Sequence: Synthetic oligonucleotide
  Target: LAMA2; (-) strand; PAM type: YTN; PAM sequence: CTG
tttctccccttcccccccta

SEQ ID NO: 199925 - DNA, 20 bp, Artificial Sequence
  Description of Artificial Sequence: Synthetic oligonucleotide
  Target: LAMA2; (-) strand; PAM type: YTN; PAM sequence: CTA
catctgtttctccccttccc

SEQ ID NO: 199926 - DNA, 20 bp, Artificial Sequence
  Description of Artificial Sequence: Synthetic oligonucleotide
  Target: LAMA2; (-) strand; PAM type: YTN; PAM sequence: TTC
tacatctgtttctccccttc

SEQ ID NO: 199927 - DNA, 20 bp, Artificial Sequence
  Description of Artificial Sequence: Synthetic oligonucleotide
  Target: LAMA2; (-) strand; PAM type: YTN; PAM sequence: TTA
ttctacatctgtttctcccc

SEQ ID NO: 199928 - DNA, 20 bp, Artificial Sequence
  Description of Artificial Sequence: Synthetic oligonucleotide
  Target: LAMA2; (-) strand; PAM type: YTN; PAM sequence: TTA
aaaacaacaacaaaaaagga

SEQ ID NO: 199929 - DNA, 20 bp, Artificial Sequence
  Description of Artificial Sequence: Synthetic oligonucleotide
  Target: LAMA2; (-) strand; PAM type: YTN; PAM sequence: CTG
gccatcatagaaaagggtgt

SEQ ID NO: 199930 - DNA, 20 bp, Artificial Sequence
  Description of Artificial Sequence: Synthetic oligonucleotide
  Target: LAMA2; (-) strand; PAM type: YTN; PAM sequence: CTC
atccagccacggagacagcc

SEQ ID NO: 199931 - DNA, 20 bp, Artificial Sequence
  Description of Artificial Sequence: Synthetic oligonucleotide
  Target: LAMA2; (-) strand; PAM type: YTN; PAM sequence: TTC
gagacaactcatccagccac

SEQ ID NO: 199932 - DNA, 20 bp, Artificial Sequence
  Description of Artificial Sequence: Synthetic oligonucleotide
  Target: LAMA2; (-) strand; PAM type: YTN; PAM sequence: CTT
cgagacaactcatccagcca

SEQ ID NO: 199933 - DNA, 20 bp, Artificial Sequence
  Description of Artificial Sequence: Synthetic oligonucleotide
  Target: LAMA2; (-) strand; PAM type: YTN; PAM sequence: CTC
ttcgagacaactcatccagc

SEQ ID NO: 199934 - DNA, 20 bp, Artificial Sequence
  Description of Artificial Sequence: Synthetic oligonucleotide
  Target: LAMA2; (-) strand; PAM type: YTN; PAM sequence: CTG
ctcttcgagacaactcatcc

SEQ ID NO: 199935 - DNA, 20 bp, Artificial Sequence
  Description of Artificial Sequence: Synthetic oligonucleotide
  Target: LAMA2; (-) strand; PAM type: YTN; PAM sequence: CTG
agtgtaaactgctcttcgag

SEQ ID NO: 199936 - DNA, 20 bp, Artificial Sequence
  Description of Artificial Sequence: Synthetic oligonucleotide
  Target: LAMA2; (-) strand; PAM type: YTN; PAM sequence: CTA
ctgagtgtaaactgctcttc

SEQ ID NO: 199937 - DNA, 20 bp, Artificial Sequence
  Description of Artificial Sequence: Synthetic oligonucleotide
  Target: LAMA2; (-) strand; PAM type: YTN; PAM sequence: CTG
gtcactactgagtgtaaact

SEQ ID NO: 199938 - DNA, 20 bp, Artificial Sequence
  Description of Artificial Sequence: Synthetic oligonucleotide
  Target: LAMA2; (-) strand; PAM type: YTN; PAM sequence: CTC
aaggacctggtcactactga

SEQ ID NO: 199939 - DNA, 20 bp, Artificial Sequence
  Description of Artificial Sequence: Synthetic oligonucleotide
  Target: LAMA2; (-) strand; PAM type: YTN; PAM sequence: CTC
tcaaggacctggtcactact

SEQ ID NO: 199940 - DNA, 20 bp, Artificial Sequence
  Description of Artificial Sequence: Synthetic oligonucleotide
  Target: LAMA2; (-) strand; PAM type: YTN; PAM sequence: CTA
agagctctcaaggacctggt

SEQ ID NO: 199941 - DNA, 20 bp, Artificial Sequence
  Description of Artificial Sequence: Synthetic oligonucleotide
  Target: LAMA2; (-) strand; PAM type: YTN; PAM sequence: TTA
aaggatgatgagctaagagc

SEQ ID NO: 199942 - DNA, 20 bp, Artificial Sequence
  Description of Artificial Sequence: Synthetic oligonucleotide
  Target: LAMA2; (-) strand; PAM type: YTN; PAM sequence: CTT
aaaggatgatgagctaagag

SEQ ID NO: 199943 - DNA, 20 bp, Artificial Sequence
  Description of Artificial Sequence: Synthetic oligonucleotide
  Target: LAMA2; (-) strand; PAM type: YTN; PAM sequence: CTA
tacttaaaggatgatgagct

SEQ ID NO: 199944 - DNA, 20 bp, Artificial Sequence
  Description of Artificial Sequence: Synthetic oligonucleotide
  Target: LAMA2; (-) strand; PAM type: YTN; PAM sequence: CTC
caaactatacttaaaggatg

SEQ ID NO: 199945 - DNA, 20 bp, Artificial Sequence
  Description of Artificial Sequence: Synthetic oligonucleotide
  Target: LAMA2; (-) strand; PAM type: YTN; PAM sequence: CTG
ggaagaatactccaaactat

SEQ ID NO: 199946 - DNA, 20 bp, Artificial Sequence
  Description of Artificial Sequence: Synthetic oligonucleotide
  Target: LAMA2; (-) strand; PAM type: YTN; PAM sequence: CTA
aatacaataggcaaaaaaaa

SEQ ID NO: 199947 - DNA, 20 bp, Artificial Sequence
  Description of Artificial Sequence: Synthetic oligonucleotide
  Target: LAMA2; (-) strand; PAM type: YTN; PAM sequence: CTC
taaatacaataggcaaaaaa

SEQ ID NO: 199948 - DNA, 20 bp, Artificial Sequence
  Description of Artificial Sequence: Synthetic oligonucleotide
  Target: LAMA2; (-) strand; PAM type: YTN; PAM sequence: TTC
aggaaaaactctaaatacaa

SEQ ID NO: 199949 - DNA, 20 bp, Artificial Sequence
  Description of Artificial Sequence: Synthetic oligonucleotide
  Target: LAMA2; (-) strand; PAM type: YTN; PAM sequence: TTT
caggaaaaactctaaataca

SEQ ID NO: 199950 - DNA, 20 bp, Artificial Sequence
  Description of Artificial Sequence: Synthetic oligonucleotide
  Target: LAMA2; (-) strand; PAM type: YTN; PAM sequence: TTC
atttcaggaaaaactctaaa

SEQ ID NO: 199951 - DNA, 20 bp, Artificial Sequence
  Description of Artificial Sequence: Synthetic oligonucleotide
  Target: LAMA2; (-) strand; PAM type: YTN; PAM sequence: TTG
atagtcaaatacatagtgag

SEQ ID NO: 199952 - DNA, 20 bp, Artificial Sequence
  Description of Artificial Sequence: Synthetic oligonucleotide
  Target: LAMA2; (-) strand; PAM type: YTN; PAM sequence: CTT
gatagtcaaatacatagtga

SEQ ID NO: 199953 - DNA, 20 bp, Artificial Sequence
  Description of Artificial Sequence: Synthetic oligonucleotide
  Target: LAMA2; (-) strand; PAM type: YTN; PAM sequence: TTC
ttgatagtcaaatacatagt

SEQ ID NO: 199954 - DNA, 20 bp, Artificial Sequence
  Description of Artificial Sequence: Synthetic oligonucleotide
  Target: LAMA2; (-) strand; PAM type: YTN; PAM sequence: CTT
cttgatagtcaaatacatag

SEQ ID NO: 199955 - DNA, 20 bp, Artificial Sequence
  Description of Artificial Sequence: Synthetic oligonucleotide
  Target: LAMA2; (-) strand; PAM type: YTN; PAM sequence: CTC
ttcttgatagtcaaatacat

SEQ ID NO: 199956 - DNA, 20 bp, Artificial Sequence
  Description of Artificial Sequence: Synthetic oligonucleotide
  Target: LAMA2; (-) strand; PAM type: YTN; PAM sequence: TTG
cagatgatacaactcttctt

SEQ ID NO: 199957 - DNA, 20 bp, Artificial Sequence
  Description of Artificial Sequence: Synthetic oligonucleotide
  Target: LAMA2; (-) strand; PAM type: YTN; PAM sequence: CTT
gcagatgatacaactcttct

SEQ ID NO: 199958 - DNA, 20 bp, Artificial Sequence
  Description of Artificial Sequence: Synthetic oligonucleotide
  Target: LAMA2; (-) strand; PAM type: YTN; PAM sequence: CTC
aaacttgcagatgatacaac

SEQ ID NO: 199959 - DNA, 20 bp, Artificial Sequence
  Description of Artificial Sequence: Synthetic oligonucleotide
  Target: LAMA2; (-) strand; PAM type: YTN; PAM sequence: TTC
aagtgaaacctcaaacttgc

SEQ ID NO: 199960 - DNA, 20 bp, Artificial Sequence
  Description of Artificial Sequence: Synthetic oligonucleotide
  Target: LAMA2; (-) strand; PAM type: YTN; PAM sequence: TTT
caagtgaaacctcaaacttg

SEQ ID NO: 199961 - DNA, 20 bp, Artificial Sequence
  Description of Artificial Sequence: Synthetic oligonucleotide
  Target: LAMA2; (-) strand; PAM type: YTN; PAM sequence: TTT
tcaagtgaaacctcaaactt

SEQ ID NO: 199962 - DNA, 20 bp, Artificial Sequence
  Description of Artificial Sequence: Synthetic oligonucleotide
  Target: LAMA2; (-) strand; PAM type: YTN; PAM sequence: CTA
ataggattttcaagtgaaac

SEQ ID NO: 199963 - DNA, 20 bp, Artificial Sequence
  Description of Artificial Sequence: Synthetic oligonucleotide
  Target: LAMA2; (-) strand; PAM type: YTN; PAM sequence: CTG
tatgggctaataggattttc

SEQ ID NO: 199964 - DNA, 20 bp, Artificial Sequence
  Description of Artificial Sequence: Synthetic oligonucleotide
  Target: LAMA2; (-) strand; PAM type: YTN; PAM sequence: TTC
cctgtatgggctaataggat

SEQ ID NO: 199965 - DNA, 20 bp, Artificial Sequence
  Description of Artificial Sequence: Synthetic oligonucleotide
  Target: LAMA2; (-) strand; PAM type: YTN; PAM sequence: TTA
ttccctgtatgggctaatag

SEQ ID NO: 199966 - DNA, 20 bp, Artificial Sequence
  Description of Artificial Sequence: Synthetic oligonucleotide
  Target: LAMA2; (-) strand; PAM type: YTN; PAM sequence: CTG
gaatgaattattccctgtat

SEQ ID NO: 199967 - DNA, 20 bp, Artificial Sequence
  Description of Artificial Sequence: Synthetic oligonucleotide
  Target: LAMA2; (-) strand; PAM type: YTN; PAM sequence: CTA
ctggaatgaattattccctg

SEQ ID NO: 199968 - DNA, 20 bp, Artificial Sequence
  Description of Artificial Sequence: Synthetic oligonucleotide
  Target: LAMA2; (-) strand; PAM type: YTN; PAM sequence: TTA
agaacctactggaatgaatt

SEQ ID NO: 199969 - DNA, 20 bp, Artificial Sequence
  Description of Artificial Sequence: Synthetic oligonucleotide
  Target: LAMA2; (-) strand; PAM type: YTN; PAM sequence: CTA
ttaagaacctactggaatga

SEQ ID NO: 199970 - DNA, 20 bp, Artificial Sequence
  Description of Artificial Sequence: Synthetic oligonucleotide
  Target: LAMA2; (-) strand; PAM type: YTN; PAM sequence: TTA
gaaacagggaacagggaagg

SEQ ID NO: 199971 - DNA, 20 bp, Artificial Sequence
  Description of Artificial Sequence: Synthetic oligonucleotide
  Target: LAMA2; (-) strand; PAM type: YTN; PAM sequence: TTA
aagagcaataaatggattag

SEQ ID NO: 199972 - DNA, 20 bp, Artificial Sequence
  Description of Artificial Sequence: Synthetic oligonucleotide
  Target: LAMA2; (-) strand; PAM type: YTN; PAM sequence: TTT
aaagagcaataaatggatta

SEQ ID NO: 199973 - DNA, 20 bp, Artificial Sequence
  Description of Artificial Sequence: Synthetic oligonucleotide
  Target: LAMA2; (-) strand; PAM type: YTN; PAM sequence: CTT
taaagagcaataaatggatt

SEQ ID NO: 199974 - DNA, 20 bp, Artificial Sequence
  Description of Artificial Sequence: Synthetic oligonucleotide
  Target: LAMA2; (-) strand; PAM type: YTN; PAM sequence: TTA
taataagaaaaaggagtaca

SEQ ID NO: 199975 - DNA, 20 bp, Artificial Sequence
  Description of Artificial Sequence: Synthetic oligonucleotide
  Target: LAMA2; (-) strand; PAM type: YTN; PAM sequence: TTT
ataataagaaaaaggagtac

SEQ ID NO: 199976 - DNA, 20 bp, Artificial Sequence
  Description of Artificial Sequence: Synthetic oligonucleotide
  Target: LAMA2; (-) strand; PAM type: YTN; PAM sequence: TTT
tataataagaaaaaggagta

SEQ ID NO: 199977 - DNA, 20 bp, Artificial Sequence
  Description of Artificial Sequence: Synthetic oligonucleotide
  Target: LAMA2; (-) strand; PAM type: YTN; PAM sequence: TTA
atatgaatatgcaatatttt

SEQ ID NO: 199978 - DNA, 20 bp, Artificial Sequence
  Description of Artificial Sequence: Synthetic oligonucleotide
  Target: LAMA2; (-) strand; PAM type: YTN; PAM sequence: TTT
aatatgaatatgcaatattt

SEQ ID NO: 199979 - DNA, 20 bp, Artificial Sequence
  Description of Artificial Sequence: Synthetic oligonucleotide
  Target: LAMA2; (-) strand; PAM type: YTN; PAM sequence: TTT
taatatgaatatgcaatatt

SEQ ID NO: 199980 - DNA, 20 bp, Artificial Sequence
  Description of Artificial Sequence: Synthetic oligonucleotide
  Target: LAMA2; (-) strand; PAM type: YTN; PAM sequence: TTC
cagattttaatatgaatatg

SEQ ID NO: 199981 - DNA, 20 bp, Artificial Sequence
  Description of Artificial Sequence: Synthetic oligonucleotide
  Target: LAMA2; (-) strand; PAM type: YTN; PAM sequence: TTT
ccagattttaatatgaatat

SEQ ID NO: 199982 - DNA, 20 bp, Artificial Sequence
  Description of Artificial Sequence: Synthetic oligonucleotide
  Target: LAMA2; (-) strand; PAM type: YTN; PAM sequence: TTT
tccagattttaatatgaata

SEQ ID NO: 199983 - DNA, 20 bp, Artificial Sequence
  Description of Artificial Sequence: Synthetic oligonucleotide
  Target: LAMA2; (-) strand; PAM type: YTN; PAM sequence: CTA
tgaattttccagattttaat

SEQ ID NO: 199984 - DNA, 20 bp, Artificial Sequence
  Description of Artificial Sequence: Synthetic oligonucleotide
  Target: LAMA2; (-) strand; PAM type: YTN; PAM sequence: TTC
tatgaattttccagatttta

SEQ ID NO: 199985 - DNA, 20 bp, Artificial Sequence
  Description of Artificial Sequence: Synthetic oligonucleotide
  Target: LAMA2; (-) strand; PAM type: YTN; PAM sequence: CTT
ctatgaattttccagatttt

SEQ ID NO: 199986 - DNA, 20 bp, Artificial Sequence
  Description of Artificial Sequence: Synthetic oligonucleotide
  Target: LAMA2; (-) strand; PAM type: YTN; PAM sequence: CTG
cttctatgaattttccagat

SEQ ID NO: 199987 - DNA, 20 bp, Artificial Sequence
  Description of Artificial Sequence: Synthetic oligonucleotide
  Target: LAMA2; (-) strand; PAM type: YTN; PAM sequence: TTC
tgcttctatgaattttccag

SEQ ID NO: 199988 - DNA, 20 bp, Artificial Sequence
  Description of Artificial Sequence: Synthetic oligonucleotide
  Target: LAMA2; (-) strand; PAM type: YTN; PAM sequence: TTT
ctgcttctatgaattttcca

SEQ ID NO: 199989 - DNA, 20 bp, Artificial Sequence
  Description of Artificial Sequence: Synthetic oligonucleotide
  Target: LAMA2; (-) strand; PAM type: YTN; PAM sequence: TTA
tttctgcttctatgaatttt

SEQ ID NO: 199990 - DNA, 20 bp, Artificial Sequence
  Description of Artificial Sequence: Synthetic oligonucleotide
  Target: LAMA2; (-) strand; PAM type: YTN; PAM sequence: CTT
atttctgcttctatgaattt

SEQ ID NO: 199991 - DNA, 20 bp, Artificial Sequence
  Description of Artificial Sequence: Synthetic oligonucleotide
  Target: LAMA2; (-) strand; PAM type: YTN; PAM sequence: TTA
cttatttctgcttctatgaa

SEQ ID NO: 199992 - DNA, 20 bp, Artificial Sequence
  Description of Artificial Sequence: Synthetic oligonucleotide
  Target: LAMA2; (-) strand; PAM type: YTN; PAM sequence: TTA
gattacttatttctgcttct

SEQ ID NO: 199993 - DNA, 20 bp, Artificial Sequence
  Description of Artificial Sequence: Synthetic oligonucleotide
  Target: LAMA2; (-) strand; PAM type: YTN; PAM sequence: TTC
attagattacttatttctgc

SEQ ID NO: 199994 - DNA, 20 bp, Artificial Sequence
  Description of Artificial Sequence: Synthetic oligonucleotide
  Target: LAMA2; (-) strand; PAM type: YTN; PAM sequence: TTG
attcattagattacttattt

SEQ ID NO: 199995 - DNA, 20 bp, Artificial Sequence
  Description of Artificial Sequence: Synthetic oligonucleotide
  Target: LAMA2; (-) strand; PAM type: YTN; PAM sequence: TTT
gattcattagattacttatt

SEQ ID NO: 199996 - DNA, 20 bp, Artificial Sequence
  Description of Artificial Sequence: Synthetic oligonucleotide
  Target: LAMA2; (-) strand; PAM type: YTN; PAM sequence: TTT
tgattcattagattacttat

SEQ ID NO: 199997 - DNA, 20 bp, Artificial Sequence
  Description of Artificial Sequence: Synthetic oligonucleotide
  Target: LAMA2; (-) strand; PAM type: YTN; PAM sequence: TTT
ttgattcattagattactta

SEQ ID NO: 199998 - DNA, 20 bp, Artificial Sequence
  Description of Artificial Sequence: Synthetic oligonucleotide
  Target: LAMA2; (-) strand; PAM type: YTN; PAM sequence: TTG
tttttgattcattagattac

SEQ ID NO: 199999 - DNA, 20 bp, Artificial Sequence
  Description of Artificial Sequence: Synthetic oligonucleotide
  Target: LAMA2; (-) strand; PAM type: YTN; PAM sequence: TTG
acattgtttttgattcatta

SEQ ID NO: 200000 - DNA, 20 bp, Artificial Sequence
  Description of Artificial Sequence: Synthetic oligonucleotide
  Target: LAMA2; (-) strand; PAM type: YTN; PAM sequence: CTT
gacattgtttttgattcatt

SEQ ID NO: 200001 - DNA, 20 bp, Artificial Sequence
  Description of Artificial Sequence: Synthetic oligonucleotide
  Target: LAMA2; (-) strand; PAM type: YTN; PAM sequence: CTA
cttgacattgtttttgattc

SEQ ID NO: 200002 - DNA, 20 bp, Artificial Sequence
  Description of Artificial Sequence: Synthetic oligonucleotide
  Target: LAMA2; (-) strand; PAM type: YTN; PAM sequence: TTA
agaaacactacttgacattg

SEQ ID NO: 200003 - DNA, 20 bp, Artificial Sequence
  Description of Artificial Sequence: Synthetic oligonucleotide
  Target: LAMA2; (-) strand; PAM type: YTN; PAM sequence: TTG
taatgattaagaaacactac

SEQ ID NO: 200004 - DNA, 20 bp, Artificial Sequence
  Description of Artificial Sequence: Synthetic oligonucleotide
  Target: LAMA2; (-) strand; PAM type: YTN; PAM sequence: TTC
ataaataattgtaatgatta

SEQ ID NO: 200005 - DNA, 20 bp, Artificial Sequence
  Description of Artificial Sequence: Synthetic oligonucleotide
  Target: LAMA2; (-) strand; PAM type: YTN; PAM sequence: TTA
aaaccaaaattcataaataa

SEQ ID NO: 200006 - DNA, 20 bp, Artificial Sequence
  Description of Artificial Sequence: Synthetic oligonucleotide
  Target: LAMA2; (-) strand; PAM type: YTN; PAM sequence: TTG
aaaaattaaaaccaaaattc

SEQ ID NO: 200007 - DNA, 20 bp, Artificial Sequence
  Description of Artificial Sequence: Synthetic oligonucleotide
  Target: LAMA2; (-) strand; PAM type: YTN; PAM sequence: TTC
atagaacaatgtgtgccaca

SEQ ID NO: 200008 - DNA, 20 bp, Artificial Sequence
  Description of Artificial Sequence: Synthetic oligonucleotide
  Target: LAMA2; (-) strand; PAM type: YTN; PAM sequence: TTT
catagaacaatgtgtgccac

SEQ ID NO: 200009 - DNA, 20 bp, Artificial Sequence
  Description of Artificial Sequence: Synthetic oligonucleotide
  Target: LAMA2; (-) strand; PAM type: YTN; PAM sequence: TTG
gatttcatagaacaatgtgt

SEQ ID NO: 200010 - DNA, 20 bp, Artificial Sequence
  Description of Artificial Sequence: Synthetic oligonucleotide
  Target: LAMA2; (-) strand; PAM type: YTN; PAM sequence: TTT
ggatttcatagaacaatgtg

SEQ ID NO: 200011 - DNA, 20 bp, Artificial Sequence
  Description of Artificial Sequence: Synthetic oligonucleotide
  Target: LAMA2; (-) strand; PAM type: YTN; PAM sequence: CTG
tttggatttcatagaacaat

SEQ ID NO: 200012 - DNA, 20 bp, Artificial Sequence
  Description of Artificial Sequence: Synthetic oligonucleotide
  Target: LAMA2; (-) strand; PAM type: YTN; PAM sequence: TTA
caataacactgtttggattt

SEQ ID NO: 200013 - DNA, 20 bp, Artificial Sequence
  Description of Artificial Sequence: Synthetic oligonucleotide
  Target: LAMA2; (-) strand; PAM type: YTN; PAM sequence: TTT
acaataacactgtttggatt

SEQ ID NO: 200014 - DNA, 20 bp, Artificial Sequence
  Description of Artificial Sequence: Synthetic oligonucleotide
  Target: LAMA2; (-) strand; PAM type: YTN; PAM sequence: CTT
tacaataacactgtttggat

SEQ ID NO: 200015 - DNA, 20 bp, Artificial Sequence
  Description of Artificial Sequence: Synthetic oligonucleotide
  Target: LAMA2; (-) strand; PAM type: YTN; PAM sequence: CTA
agaagcccagagactttaca

SEQ ID NO: 200016 - DNA, 20 bp, Artificial Sequence
  Description of Artificial Sequence: Synthetic oligonucleotide
  Target: LAMA2; (-) strand; PAM type: YTN; PAM sequence: CTC
taagaagcccagagacttta

SEQ ID NO: 200017 - DNA, 20 bp, Artificial Sequence
  Description of Artificial Sequence: Synthetic oligonucleotide
  Target: LAMA2; (-) strand; PAM type: YTN; PAM sequence: TTG
ctctaagaagcccagagact

SEQ ID NO: 200018 - DNA, 20 bp, Artificial Sequence
  Description of Artificial Sequence: Synthetic oligonucleotide
  Target: LAMA2; (-) strand; PAM type: YTN; PAM sequence: TTT
gctctaagaagcccagagac

SEQ ID NO: 200019 - DNA, 20 bp, Artificial Sequence
  Description of Artificial Sequence: Synthetic oligonucleotide
  Target: LAMA2; (-) strand; PAM type: YTN; PAM sequence: TTT
tgctctaagaagcccagaga

SEQ ID NO: 200020 - DNA, 20 bp, Artificial Sequence
  Description of Artificial Sequence: Synthetic oligonucleotide
  Target: LAMA2; (-) strand; PAM type: YTN; PAM sequence: CTT
ttgctctaagaagcccagag

SEQ ID NO: 200021 - DNA, 20 bp, Artificial Sequence
  Description of Artificial Sequence: Synthetic oligonucleotide
  Target: LAMA2; (-) strand; PAM type: YTN; PAM sequence: TTA
aaacttttgctctaagaagc

SEQ ID NO: 200022 - DNA, 20 bp, Artificial Sequence
  Description of Artificial Sequence: Synthetic oligonucleotide
  Target: LAMA2; (-) strand; PAM type: YTN; PAM sequence: TTT
aaaacttttgctctaagaag

SEQ ID NO: 200023 - DNA, 20 bp, Artificial Sequence
  Description of Artificial Sequence: Synthetic oligonucleotide
  Target: LAMA2; (-) strand; PAM type: YTN; PAM sequence: TTT
taaaacttttgctctaagaa

SEQ ID NO: 200024 - DNA, 20 bp, Artificial Sequence
  Description of Artificial Sequence: Synthetic oligonucleotide
  Target: LAMA2; (-) strand; PAM type: YTN; PAM sequence: TTA
aacatataaatgatggtttt

SEQ ID NO: 200025 - DNA, 20 bp, Artificial Sequence
  Description of Artificial Sequence: Synthetic oligonucleotide
  Target: LAMA2; (-) strand; PAM type: YTN; PAM sequence: CTA
gaaatagataaaaatatatt

SEQ ID NO: 200026 - DNA, 20 bp, Artificial Sequence
  Description of Artificial Sequence: Synthetic oligonucleotide
  Target: LAMA2; (-) strand; PAM type: YTN; PAM sequence: TTA
aaataaatctagaaatagat

SEQ ID NO: 200027 - DNA, 20 bp, Artificial Sequence
  Description of Artificial Sequence: Synthetic oligonucleotide
  Target: LAMA2; (-) strand; PAM type: YTN; PAM sequence: TTT
aaaataaatctagaaataga

SEQ ID NO: 200028 - DNA, 20 bp, Artificial Sequence
  Description of Artificial Sequence: Synthetic oligonucleotide
  Target: LAMA2; (-) strand; PAM type: YTN; PAM sequence: CTT
taaaataaatctagaaatag

SEQ ID NO: 200029 - DNA, 20 bp, Artificial Sequence
  Description of Artificial Sequence: Synthetic oligonucleotide
  Target: LAMA2; (-) strand; PAM type: YTN; PAM sequence: CTG
cctttaaaataaatctagaa

SEQ ID NO: 200030 - DNA, 20 bp, Artificial Sequence
  Description of Artificial Sequence: Synthetic oligonucleotide
  Target: LAMA2; (-) strand; PAM type: YTN; PAM sequence: TTA
ctgcctttaaaataaatcta

SEQ ID NO: 200031 - DNA, 20 bp, Artificial Sequence
  Description of Artificial Sequence: Synthetic oligonucleotide
  Target: LAMA2; (-) strand; PAM type: YTN; PAM sequence: TTT
actgcctttaaaataaatct

SEQ ID NO: 200032 - DNA, 20 bp, Artificial Sequence
  Description of Artificial Sequence: Synthetic oligonucleotide
  Target: LAMA2; (-) strand; PAM type: YTN; PAM sequence: TTT
tactgcctttaaaataaatc

SEQ ID NO: 200033 - DNA, 20 bp, Artificial Sequence
  Description of Artificial Sequence: Synthetic oligonucleotide
  Target: LAMA2; (-) strand; PAM type: YTN; PAM sequence: TTA
ttttactgcctttaaaataa

SEQ ID NO: 200034 - DNA, 20 bp, Artificial Sequence
  Description of Artificial Sequence: Synthetic oligonucleotide
  Target: LAMA2; (-) strand; PAM type: YTN; PAM sequence: TTA
gattattttactgcctttaa

SEQ ID NO: 200035 - DNA, 20 bp, Artificial Sequence
  Description of Artificial Sequence: Synthetic oligonucleotide
  Target: LAMA2; (-) strand; PAM type: YTN; PAM sequence: CTG
ttagattattttactgcctt

SEQ ID NO: 200036 - DNA, 20 bp, Artificial Sequence
  Description of Artificial Sequence: Synthetic oligonucleotide
  Target: LAMA2; (-) strand; PAM type: YTN; PAM sequence: TTC
ataatataataaacaccatg

SEQ ID NO: 200037 - DNA, 20 bp, Artificial Sequence
  Description of Artificial Sequence: Synthetic oligonucleotide
  Target: LAMA2; (-) strand; PAM type: YTN; PAM sequence: CTT
cataatataataaacaccat

SEQ ID NO: 200038 - DNA, 20 bp, Artificial Sequence
  Description of Artificial Sequence: Synthetic oligonucleotide
  Target: LAMA2; (-) strand; PAM type: YTN; PAM sequence: TTC
ttcataatataataaacacc

SEQ ID NO: 200039 - DNA, 20 bp, Artificial Sequence
  Description of Artificial Sequence: Synthetic oligonucleotide
  Target: LAMA2; (-) strand; PAM type: YTN; PAM sequence: TTT
cttcataatataataaacac

SEQ ID NO: 200040 - DNA, 20 bp, Artificial Sequence
  Description of Artificial Sequence: Synthetic oligonucleotide
  Target: LAMA2; (-) strand; PAM type: YTN; PAM sequence: TTA
tttcttcataatataataaa

SEQ ID NO: 200041 - DNA, 20 bp, Artificial Sequence
  Description of Artificial Sequence: Synthetic oligonucleotide
  Target: LAMA2; (-) strand; PAM type: YTN; PAM sequence: TTT
atttcttcataatataataa

SEQ ID NO: 200042 - DNA, 20 bp, Artificial Sequence
  Description of Artificial Sequence: Synthetic oligonucleotide
  Target: LAMA2; (-) strand; PAM type: YTN; PAM sequence: TTT
tatttcttcataatataata

SEQ ID NO: 200043 - DNA, 20 bp, Artificial Sequence
  Description of Artificial Sequence: Synthetic oligonucleotide
  Target: LAMA2; (-) strand; PAM type: YTN; PAM sequence: CTG
tatgagtaatattttatttc

SEQ ID NO: 200044 - DNA, 20 bp, Artificial Sequence
  Description of Artificial Sequence: Synthetic oligonucleotide
  Target: LAMA2; (-) strand; PAM type: YTN; PAM sequence: TTC
gactgtatgagtaatatttt

SEQ ID NO: 200045 - DNA, 20 bp, Artificial Sequence
  Description of Artificial Sequence: Synthetic oligonucleotide
  Target: LAMA2; (-) strand; PAM type: YTN; PAM sequence: TTT
cgactgtatgagtaatattt

SEQ ID NO: 200046 - DNA, 20 bp, Artificial Sequence
  Description of Artificial Sequence: Synthetic oligonucleotide
  Target: LAMA2; (-) strand; PAM type: YTN; PAM sequence: TTG
tagggtttcgactgtatgag

SEQ ID NO: 200047 - DNA, 20 bp, Artificial Sequence
  Description of Artificial Sequence: Synthetic oligonucleotide
  Target: LAMA2; (-) strand; PAM type: YTN; PAM sequence: TTA
attgtagggtttcgactgta

SEQ ID NO: 200048 - DNA, 20 bp, Artificial Sequence
  Description of Artificial Sequence: Synthetic oligonucleotide
  Target: LAMA2; (-) strand; PAM type: YTN; PAM sequence: TTT
aattgtagggtttcgactgt

SEQ ID NO: 200049 - DNA, 20 bp, Artificial Sequence
  Description of Artificial Sequence: Synthetic oligonucleotide
  Target: LAMA2; (-) strand; PAM type: YTN; PAM sequence: CTG
aagggagggaaaggaattta

SEQ ID NO: 200050 - DNA, 20 bp, Artificial Sequence
  Description of Artificial Sequence: Synthetic oligonucleotide
  Target: LAMA2; (-) strand; PAM type: YTN; PAM sequence: CTC
tgaagggagggaaaggaatt

SEQ ID NO: 200051 - DNA, 20 bp, Artificial Sequence
  Description of Artificial Sequence: Synthetic oligonucleotide
  Target: LAMA2; (-) strand; PAM type: YTN; PAM sequence: TTC
cctctgaagggagggaaagg

SEQ ID NO: 200052 - DNA, 20 bp, Artificial Sequence
  Description of Artificial Sequence: Synthetic oligonucleotide
  Target: LAMA2; (-) strand; PAM type: YTN; PAM sequence: TTA
taataggttccctctgaagg

SEQ ID NO: 200053 - DNA, 20 bp, Artificial Sequence
  Description of Artificial Sequence: Synthetic oligonucleotide
  Target: LAMA2; (-) strand; PAM type: YTN; PAM sequence: TTC
atgatcacaaatcacacatt

SEQ ID NO: 200054 - DNA, 20 bp, Artificial Sequence
  Description of Artificial Sequence: Synthetic oligonucleotide
  Target: LAMA2; (-) strand; PAM type: YTN; PAM sequence: TTG
aaatcattcatgatcacaaa

SEQ ID NO: 200055 - DNA, 20 bp, Artificial Sequence
  Description of Artificial Sequence: Synthetic oligonucleotide
  Target: LAMA2; (-) strand; PAM type: YTN; PAM sequence: CTA
gttgaaatcattcatgatca

SEQ ID NO: 200056 - DNA, 20 bp, Artificial Sequence
  Description of Artificial Sequence: Synthetic oligonucleotide
  Target: LAMA2; (-) strand; PAM type: YTN; PAM sequence: TTG
taaggatgatgatgagggtg

SEQ ID NO: 200057 - DNA, 20 bp, Artificial Sequence
  Description of Artificial Sequence: Synthetic oligonucleotide
  Target: LAMA2; (-) strand; PAM type: YTN; PAM sequence: CTA
ttgtaaggatgatgatgagg

SEQ ID NO: 200058 - DNA, 20 bp, Artificial Sequence
  Description of Artificial Sequence: Synthetic oligonucleotide
  Target: LAMA2; (-) strand; PAM type: YTN; PAM sequence: TTC
caaaagataaagcctattgt

SEQ ID NO: 200059 - DNA, 20 bp, Artificial Sequence
  Description of Artificial Sequence: Synthetic oligonucleotide
  Target: LAMA2; (-) strand; PAM type: YTN; PAM sequence: TTT
ccaaaagataaagcctattg

SEQ ID NO: 200060 - DNA, 20 bp, Artificial Sequence
  Description of Artificial Sequence: Synthetic oligonucleotide
  Target: LAMA2; (-) strand; PAM type: YTN; PAM sequence: TTA
tatgtatttccaaaagataa

SEQ ID NO: 200061 - DNA, 20 bp, Artificial Sequence
  Description of Artificial Sequence: Synthetic oligonucleotide
  Target: LAMA2; (-) strand; PAM type: YTN; PAM sequence: TTA
aaaccagagcacatcaatat

SEQ ID NO: 200062 - DNA, 20 bp, Artificial Sequence
  Description of Artificial Sequence: Synthetic oligonucleotide
  Target: LAMA2; (-) strand; PAM type: YTN; PAM sequence: CTG
aggcaagaggcaggtgatga

SEQ ID NO: 200063 - DNA, 20 bp, Artificial Sequence
  Description of Artificial Sequence: Synthetic oligonucleotide
  Target: LAMA2; (-) strand; PAM type: YTN; PAM sequence: TTG
ctgaggcaagaggcaggtga

SEQ ID NO: 200064 - DNA, 20 bp, Artificial Sequence
  Description of Artificial Sequence: Synthetic oligonucleotide
  Target: LAMA2; (-) strand; PAM type: YTN; PAM sequence: CTT
gctgaggcaagaggcaggtg

SEQ ID NO: 200065 - DNA, 20 bp, Artificial Sequence
  Description of Artificial Sequence: Synthetic oligonucleotide
  Target: LAMA2; (-) strand; PAM type: YTN; PAM sequence: CTA
gagcttgctgaggcaagagg

SEQ ID NO: 200066 - DNA, 20 bp, Artificial Sequence
  Description of Artificial Sequence: Synthetic oligonucleotide
  Target: LAMA2; (-) strand; PAM type: YTN; PAM sequence: TTA
aaatacaacctagagcttgc

SEQ ID NO: 200067 - DNA, 20 bp, Artificial Sequence
  Description of Artificial Sequence: Synthetic oligonucleotide
  Target: LAMA2; (-) strand; PAM type: YTN; PAM sequence: TTT
aaaatacaacctagagcttg

SEQ ID NO: 200068 - DNA, 20 bp, Artificial Sequence
  Description of Artificial Sequence: Synthetic oligonucleotide
  Target: LAMA2; (-) strand; PAM type: YTN; PAM sequence: CTT
taaaatacaacctagagctt

SEQ ID NO: 200069 - DNA, 20 bp, Artificial Sequence
  Description of Artificial Sequence: Synthetic oligonucleotide
  Target: LAMA2; (-) strand; PAM type: YTN; PAM sequence: CTC
ctttaaaatacaacctagag

SEQ ID NO: 200070 - DNA, 20 bp, Artificial Sequence
  Description of Artificial Sequence: Synthetic oligonucleotide
  Target: LAMA2; (-) strand; PAM type: YTN; PAM sequence: TTA
atctcctttaaaatacaacc

SEQ ID NO: 200071 - DNA, 20 bp, Artificial Sequence
  Description of Artificial Sequence: Synthetic oligonucleotide
  Target: LAMA2; (-) strand; PAM type: YTN; PAM sequence: TTT
aatctcctttaaaatacaac

SEQ ID NO: 200072 - DNA, 20 bp, Artificial Sequence
  Description of Artificial Sequence: Synthetic oligonucleotide
  Target: LAMA2; (-) strand; PAM type: YTN; PAM sequence: TTC
agtgaaaatatatttaatct

SEQ ID NO: 200073 - DNA, 20 bp, Artificial Sequence
  Description of Artificial Sequence: Synthetic oligonucleotide
  Target: LAMA2; (-) strand; PAM type: YTN; PAM sequence: TTA
aattcagtgaaaatatattt

SEQ ID NO: 200074 - DNA, 20 bp, Artificial Sequence
  Description of Artificial Sequence: Synthetic oligonucleotide
  Target: LAMA2; (-) strand; PAM type: YTN; PAM sequence: TTA
gatacaattaaattcagtga

SEQ ID NO: 200075 - DNA, 20 bp, Artificial Sequence
  Description of Artificial Sequence: Synthetic oligonucleotide
  Target: LAMA2; (-) strand; PAM type: YTN; PAM sequence: CTT
agatacaattaaattcagtg

SEQ ID NO: 200076 - DNA, 20 bp, Artificial Sequence
  Description of Artificial Sequence: Synthetic oligonucleotide
  Target: LAMA2; (-) strand; PAM type: YTN; PAM sequence: TTA
cttagatacaattaaattca

SEQ ID NO: 200077 - DNA, 20 bp, Artificial Sequence
  Description of Artificial Sequence: Synthetic oligonucleotide
  Target: LAMA2; (-) strand; PAM type: YTN; PAM sequence: TTC
gaaaggtattacttagatac

SEQ ID NO: 200078 - DNA, 20 bp, Artificial Sequence
  Description of Artificial Sequence: Synthetic oligonucleotide
  Target: LAMA2; (-) strand; PAM type: YTN; PAM sequence: CTT
cgaaaggtattacttagata

SEQ ID NO: 200079 - DNA, 20 bp, Artificial Sequence
  Description of Artificial Sequence: Synthetic oligonucleotide
  Target: LAMA2; (-) strand; PAM type: YTN; PAM sequence: CTC
ttcgaaaggtattacttaga

SEQ ID NO: 200080 - DNA, 20 bp, Artificial Sequence
  Description of Artificial Sequence: Synthetic oligonucleotide
  Target: LAMA2; (-) strand; PAM type: YTN; PAM sequence: TTG
actcttcgaaaggtattact

SEQ ID NO: 200081 - DNA, 20 bp, Artificial Sequence
  Description of Artificial Sequence: Synthetic oligonucleotide
  Target: LAMA2; (-) strand; PAM type: YTN; PAM sequence: TTT
gactcttcgaaaggtattac

SEQ ID NO: 200082 - DNA, 20 bp, Artificial Sequence
  Description of Artificial Sequence: Synthetic oligonucleotide
  Target: LAMA2; (-) strand; PAM type: YTN; PAM sequence: TTA
tttgactcttcgaaaggtat

SEQ ID NO: 200083 - DNA, 20 bp, Artificial Sequence
  Description of Artificial Sequence: Synthetic oligonucleotide
  Target: LAMA2; (-) strand; PAM type: YTN; PAM sequence: CTG
tattatttgactcttcgaaa

SEQ ID NO: 200084 - DNA, 20 bp, Artificial Sequence
  Description of Artificial Sequence: Synthetic oligonucleotide
  Target: LAMA2; (-) strand; PAM type: YTN; PAM sequence: TTC
tgtattatttgactcttcga

SEQ ID NO: 200085 - DNA, 20 bp, Artificial Sequence
  Description of Artificial Sequence: Synthetic oligonucleotide
  Target: LAMA2; (-) strand; PAM type: YTN; PAM sequence: TTT
ctgtattatttgactcttcg

SEQ ID NO: 200086 - DNA, 20 bp, Artificial Sequence
  Description of Artificial Sequence: Synthetic oligonucleotide
  Target: LAMA2; (-) strand; PAM type: YTN; PAM sequence: TTT
tctgtattatttgactcttc

SEQ ID NO: 200087 - DNA, 20 bp, Artificial Sequence
  Description of Artificial Sequence: Synthetic oligonucleotide
  Target: LAMA2; (-) strand; PAM type: YTN; PAM sequence: CTT
ttctgtattatttgactctt

SEQ ID NO: 200088 - DNA, 20 bp, Artificial Sequence
  Description of Artificial Sequence: Synthetic oligonucleotide
  Target: LAMA2; (-) strand; PAM type: YTN; PAM sequence: TTA
tgagcttttctgtattattt

SEQ ID NO: 200089 - DNA, 20 bp, Artificial Sequence
  Description of Artificial Sequence: Synthetic oligonucleotide
  Target: LAMA2; (-) strand; PAM type: YTN; PAM sequence: TTG
ttatgagcttttctgtatta

SEQ ID NO: 200090 - DNA, 20 bp, Artificial Sequence
  Description of Artificial Sequence: Synthetic oligonucleotide
  Target: LAMA2; (-) strand; PAM type: YTN; PAM sequence: TTT
gttatgagcttttctgtatt

SEQ ID NO: 200091 - DNA, 20 bp, Artificial Sequence
  Description of Artificial Sequence: Synthetic oligonucleotide
  Target: LAMA2; (-) strand; PAM type: YTN; PAM sequence: TTT
tgttatgagcttttctgtat

SEQ ID NO: 200092 - DNA, 20 bp, Artificial Sequence
  Description of Artificial Sequence: Synthetic oligonucleotide
  Target: LAMA2; (-) strand; PAM type: YTN; PAM sequence: TTT
ttgttatgagcttttctgta

SEQ ID NO: 200093 - DNA, 20 bp, Artificial Sequence
  Description of Artificial Sequence: Synthetic oligonucleotide
  Target: LAMA2; (-) strand; PAM type: YTN; PAM sequence: CTT
tttgttatgagcttttctgt

SEQ ID NO: 200094 - DNA, 20 bp, Artificial Sequence
  Description of Artificial Sequence: Synthetic oligonucleotide
  Target: LAMA2; (-) strand; PAM type: YTN; PAM sequence: TTG
caactttttgttatgagctt

SEQ ID NO: 200095 - DNA, 20 bp, Artificial Sequence
  Description of Artificial Sequence: Synthetic oligonucleotide
  Target: LAMA2; (-) strand; PAM type: YTN; PAM sequence: CTG
agagtgaaggagggatggaa

SEQ ID NO: 200096 - DNA, 20 bp, Artificial Sequence
  Description of Artificial Sequence: Synthetic oligonucleotide
  Target: LAMA2; (-) strand; PAM type: YTN; PAM sequence: CTC
tgagagtgaaggagggatgg

SEQ ID NO: 200097 - DNA, 20 bp, Artificial Sequence
  Description of Artificial Sequence: Synthetic oligonucleotide
  Target: LAMA2; (-) strand; PAM type: YTN; PAM sequence: CTG
agatagatcagtcatgtctc

SEQ ID NO: 200098 - DNA, 20 bp, Artificial Sequence
  Description of Artificial Sequence: Synthetic oligonucleotide
  Target: LAMA2; (-) strand; PAM type: YTN; PAM sequence: CTA
gaagaaacagctgagataga

SEQ ID NO: 200099 - DNA, 20 bp, Artificial Sequence
  Description of Artificial Sequence: Synthetic oligonucleotide
  Target: LAMA2; (-) strand; PAM type: YTN; PAM sequence: TTA
aatccgggggtaaatgctag

SEQ ID NO: 200100 - DNA, 20 bp, Artificial Sequence
  Description of Artificial Sequence: Synthetic oligonucleotide
  Target: LAMA2; (-) strand; PAM type: YTN; PAM sequence: TTT
aaatccgggggtaaatgcta

SEQ ID NO: 200101 - DNA, 20 bp, Artificial Sequence
  Description of Artificial Sequence: Synthetic oligonucleotide
  Target: LAMA2; (-) strand; PAM type: YTN; PAM sequence: TTT
taaatccgggggtaaatgct

SEQ ID NO: 200102 - DNA, 20 bp, Artificial Sequence
  Description of Artificial Sequence: Synthetic oligonucleotide
  Target: LAMA2; (-) strand; PAM type: YTN; PAM sequence: TTT
ttaaatccgggggtaaatgc

SEQ ID NO: 200103 - DNA, 20 bp, Artificial Sequence
  Description of Artificial Sequence: Synthetic oligonucleotide
  Target: LAMA2; (-) strand; PAM type: YTN; PAM sequence: TTA
tttttaaatccgggggtaaa

SEQ ID NO: 200104 - DNA, 20 bp, Artificial Sequence
  Description of Artificial Sequence: Synthetic oligonucleotide
  Target: LAMA2; (-) strand; PAM type: YTN; PAM sequence: TTA
aatatattatttttaaatcc

SEQ ID NO: 200105 - DNA, 20 bp, Artificial Sequence
  Description of Artificial Sequence: Synthetic oligonucleotide
  Target: LAMA2; (-) strand; PAM type: YTN; PAM sequence: TTT
aaatatattatttttaaatc

SEQ ID NO: 200106 - DNA, 20 bp, Artificial Sequence
  Description of Artificial Sequence: Synthetic oligonucleotide
  Target: LAMA2; (-) strand; PAM type: YTN; PAM sequence: TTG
tttaaatatattatttttaa

SEQ ID NO: 200107 - DNA, 20 bp, Artificial Sequence
  Description of Artificial Sequence: Synthetic oligonucleotide
  Target: LAMA2; (-) strand; PAM type: YTN; PAM sequence: TTA
tagttgtttaaatatattat

SEQ ID NO: 200108 - DNA, 20 bp, Artificial Sequence
  Description of Artificial Sequence: Synthetic oligonucleotide
  Target: LAMA2; (-) strand; PAM type: YTN; PAM sequence: TTA
agttatagttgtttaaatat

SEQ ID NO: 200109 - DNA, 20 bp, Artificial Sequence
  Description of Artificial Sequence: Synthetic oligonucleotide
  Target: LAMA2; (-) strand; PAM type: YTN; PAM sequence: TTA
aattaagttatagttgttta

SEQ ID NO: 200110 - DNA, 20 bp, Artificial Sequence
  Description of Artificial Sequence: Synthetic oligonucleotide
  Target: LAMA2; (-) strand; PAM type: YTN; PAM sequence: TTT
aaattaagttatagttgttt

SEQ ID NO: 200111 - DNA, 20 bp, Artificial Sequence
  Description of Artificial Sequence: Synthetic oligonucleotide
  Target: LAMA2; (-) strand; PAM type: YTN; PAM sequence: CTA
aaatgtttaaattaagttat

SEQ ID NO: 200112 - DNA, 20 bp, Artificial Sequence
  Description of Artificial Sequence: Synthetic oligonucleotide
  Target: LAMA2; (-) strand; PAM type: YTN; PAM sequence: CTA
ggaaaggaagagataatgtc

SEQ ID NO: 200113 - DNA, 20 bp, Artificial Sequence
  Description of Artificial Sequence: Synthetic oligonucleotide
  Target: LAMA2; (-) strand; PAM type: YTN; PAM sequence: TTC
catactaggaaaggaagaga

SEQ ID NO: 200114 - DNA, 20 bp, Artificial Sequence
  Description of Artificial Sequence: Synthetic oligonucleotide
  Target: LAMA2; (-) strand; PAM type: YTN; PAM sequence: CTT
ccatactaggaaaggaagag

SEQ ID NO: 200115 - DNA, 20 bp, Artificial Sequence
  Description of Artificial Sequence: Synthetic oligonucleotide
  Target: LAMA2; (-) strand; PAM type: YTN; PAM sequence: TTG
tcttccatactaggaaagga

SEQ ID NO: 200116 - DNA, 20 bp, Artificial Sequence
  Description of Artificial Sequence: Synthetic oligonucleotide
  Target: LAMA2; (-) strand; PAM type: YTN; PAM sequence: TTT
gtcttccatactaggaaagg

SEQ ID NO: 200117 - DNA, 20 bp, Artificial Sequence
  Description of Artificial Sequence: Synthetic oligonucleotide
  Target: LAMA2; (-) strand; PAM type: YTN; PAM sequence: CTT
tgtcttccatactaggaaag

SEQ ID NO: 200118 - DNA, 20 bp, Artificial Sequence
  Description of Artificial Sequence: Synthetic oligonucleotide
  Target: LAMA2; (-) strand; PAM type: YTN; PAM sequence: CTC
aatctttgtcttccatacta

SEQ ID NO: 200119 - DNA, 20 bp, Artificial Sequence
  Description of Artificial Sequence: Synthetic oligonucleotide
  Target: LAMA2; (-) strand; PAM type: YTN; PAM sequence: TTG
caggatgtaggcagaaatgt

SEQ ID NO: 200120 - DNA, 20 bp, Artificial Sequence
  Description of Artificial Sequence: Synthetic oligonucleotide
  Target: LAMA2; (-) strand; PAM type: YTN; PAM sequence: TTA
agtatatgttgcaggatgta

SEQ ID NO: 200121 - DNA, 20 bp, Artificial Sequence
  Description of Artificial Sequence: Synthetic oligonucleotide
  Target: LAMA2; (-) strand; PAM type: YTN; PAM sequence: TTT
aagtatatgttgcaggatgt

SEQ ID NO: 200122 - DNA, 20 bp, Artificial Sequence
  Description of Artificial Sequence: Synthetic oligonucleotide
  Target: LAMA2; (-) strand; PAM type: YTN; PAM sequence: TTT
taagtatatgttgcaggatg

SEQ ID NO: 200123 - DNA, 20 bp, Artificial Sequence
  Description of Artificial Sequence: Synthetic oligonucleotide
  Target: LAMA2; (-) strand; PAM type: YTN; PAM sequence: TTA
ttttaagtatatgttgcagg

SEQ ID NO: 200124 - DNA, 20 bp, Artificial Sequence
  Description of Artificial Sequence: Synthetic oligonucleotide
  Target: LAMA2; (-) strand; PAM type: YTN; PAM sequence: TTT
attttaagtatatgttgcag

SEQ ID NO: 200125 - DNA, 20 bp, Artificial Sequence
  Description of Artificial Sequence: Synthetic oligonucleotide
  Target: LAMA2; (-) strand; PAM type: YTN; PAM sequence: TTA
tatatttattttaagtatat

SEQ ID NO: 200126 - DNA, 20 bp, Artificial Sequence
  Description of Artificial Sequence: Synthetic oligonucleotide
  Target: LAMA2; (-) strand; PAM type: YTN; PAM sequence: TTA
gcattatatatttattttaa

SEQ ID NO: 200127 - DNA, 20 bp, Artificial Sequence
  Description of Artificial Sequence: Synthetic oligonucleotide
  Target: LAMA2; (-) strand; PAM type: YTN; PAM sequence: TTA
acaatgttagcattatatat

SEQ ID NO: 200128 - DNA, 20 bp, Artificial Sequence
  Description of Artificial Sequence: Synthetic oligonucleotide
  Target: LAMA2; (-) strand; PAM type: YTN; PAM sequence: TTT
aacaatgttagcattatata

SEQ ID NO: 200129 - DNA, 20 bp, Artificial Sequence
  Description of Artificial Sequence: Synthetic oligonucleotide
  Target: LAMA2; (-) strand; PAM type: YTN; PAM sequence: TTT
taacaatgttagcattatat

SEQ ID NO: 200130 - DNA, 20 bp, Artificial Sequence
  Description of Artificial Sequence: Synthetic oligonucleotide
  Target: LAMA2; (-) strand; PAM type: YTN; PAM sequence: TTA
tatggttttaacaatgttag

SEQ ID NO: 200131 - DNA, 20 bp, Artificial Sequence
  Description of Artificial Sequence: Synthetic oligonucleotide
  Target: LAMA2; (-) strand; PAM type: YTN; PAM sequence: TTT
atatggttttaacaatgtta

SEQ ID NO: 200132 - DNA, 20 bp, Artificial Sequence
  Description of Artificial Sequence: Synthetic oligonucleotide
  Target: LAMA2; (-) strand; PAM type: YTN; PAM sequence: CTG
tgagtaatatttatatggtt

SEQ ID NO: 200133 - DNA, 20 bp, Artificial Sequence
  Description of Artificial Sequence: Synthetic oligonucleotide
  Target: LAMA2; (-) strand; PAM type: YTN; PAM sequence: CTC
agctgtgagtaatatttata

SEQ ID NO: 200134 - DNA, 20 bp, Artificial Sequence
  Description of Artificial Sequence: Synthetic oligonucleotide
  Target: LAMA2; (-) strand; PAM type: YTN; PAM sequence: TTA
atgccaggcaacgatgtaca

SEQ ID NO: 200135 - DNA, 20 bp, Artificial Sequence
  Description of Artificial Sequence: Synthetic oligonucleotide
  Target: LAMA2; (-) strand; PAM type: YTN; PAM sequence: TTA
ttaatgccaggcaacgatgt

SEQ ID NO: 200136 - DNA, 20 bp, Artificial Sequence
  Description of Artificial Sequence: Synthetic oligonucleotide
  Target: LAMA2; (-) strand; PAM type: YTN; PAM sequence: TTC
aaaacaaagcaattattaat

SEQ ID NO: 200137 - DNA, 20 bp, Artificial Sequence
  Description of Artificial Sequence: Synthetic oligonucleotide
  Target: LAMA2; (-) strand; PAM type: YTN; PAM sequence: TTT
caaaacaaagcaattattaa

SEQ ID NO: 200138 - DNA, 20 bp, Artificial Sequence
  Description of Artificial Sequence: Synthetic oligonucleotide
  Target: LAMA2; (-) strand; PAM type: YTN; PAM sequence: TTT
tcaaaacaaagcaattatta

SEQ ID NO: 200139 - DNA, 20 bp, Artificial Sequence
  Description of Artificial Sequence: Synthetic oligonucleotide
  Target: LAMA2; (-) strand; PAM type: YTN; PAM sequence: TTT
ttcaaaacaaagcaattatt

SEQ ID NO: 200140 - DNA, 20 bp, Artificial Sequence
  Description of Artificial Sequence: Synthetic oligonucleotide
  Target: LAMA2; (-) strand; PAM type: YTN; PAM sequence: CTA
atttttcaaaacaaagcaat

SEQ ID NO: 200141 - DNA, 20 bp, Artificial Sequence
  Description of Artificial Sequence: Synthetic oligonucleotide
  Target: LAMA2; (-) strand; PAM type: YTN; PAM sequence: CTA
agactaatttttcaaaacaa

SEQ ID NO: 200142 - DNA, 20 bp, Artificial Sequence
  Description of Artificial Sequence: Synthetic oligonucleotide
  Target: LAMA2; (-) strand; PAM type: YTN; PAM sequence: TTA
gtaaaatgtatgtagtaaac

SEQ ID NO: 200143 - DNA, 20 bp, Artificial Sequence
  Description of Artificial Sequence: Synthetic oligonucleotide
  Target: LAMA2; (-) strand; PAM type: YTN; PAM sequence: TTA
aaattagtaaaatgtatgta

SEQ ID NO: 200144 - DNA, 20 bp, Artificial Sequence
  Description of Artificial Sequence: Synthetic oligonucleotide
  Target: LAMA2; (-) strand; PAM type: YTN; PAM sequence: TTT
aaaattagtaaaatgtatgt

SEQ ID NO: 200145 - DNA, 20 bp, Artificial Sequence
  Description of Artificial Sequence: Synthetic oligonucleotide
  Target: LAMA2; (-) strand; PAM type: YTN; PAM sequence: CTG
tcagaaagtgtagtttaaaa

SEQ ID NO: 200146 - DNA, 20 bp, Artificial Sequence
  Description of Artificial Sequence: Synthetic oligonucleotide
  Target: LAMA2; (-) strand; PAM type: YTN; PAM sequence: TTC
tgtcagaaagtgtagtttaa

SEQ ID NO: 200147 - DNA, 20 bp, Artificial Sequence
  Description of Artificial Sequence: Synthetic oligonucleotide
  Target: LAMA2; (-) strand; PAM type: YTN; PAM sequence: TTA
ataattctgtcagaaagtgt

SEQ ID NO: 200148 - DNA, 20 bp, Artificial Sequence
  Description of Artificial Sequence: Synthetic oligonucleotide
  Target: LAMA2; (-) strand; PAM type: YTN; PAM sequence: TTT
aataattctgtcagaaagtg

SEQ ID NO: 200149 - DNA, 20 bp, Artificial Sequence
  Description of Artificial Sequence: Synthetic oligonucleotide
  Target: LAMA2; (-) strand; PAM type: YTN; PAM sequence: CTG
aagggagtttaataattctg

SEQ ID NO: 200150 - DNA, 20 bp, Artificial Sequence
  Description of Artificial Sequence: Synthetic oligonucleotide
  Target: LAMA2; (-) strand; PAM type: YTN; PAM sequence: TTC
caaatgtgatgaaacatact

SEQ ID NO: 200151 - DNA, 20 bp, Artificial Sequence
  Description of Artificial Sequence: Synthetic oligonucleotide
  Target: LAMA2; (-) strand; PAM type: YTN; PAM sequence: TTT
ccaaatgtgatgaaacatac

SEQ ID NO: 200152 - DNA, 20 bp, Artificial Sequence
  Description of Artificial Sequence: Synthetic oligonucleotide
  Target: LAMA2; (-) strand; PAM type: YTN; PAM sequence: TTA
atagatttccaaatgtgatg

SEQ ID NO: 200153 - DNA, 20 bp, Artificial Sequence
  Description of Artificial Sequence: Synthetic oligonucleotide
  Target: LAMA2; (-) strand; PAM type: YTN; PAM sequence: TTA
acaatgaaacacaaataata

SEQ ID NO: 200154 - DNA, 20 bp, Artificial Sequence
  Description of Artificial Sequence: Synthetic oligonucleotide
  Target: LAMA2; (-) strand; PAM type: YTN; PAM sequence: CTT
aacaatgaaacacaaataat

SEQ ID NO: 200155 - DNA, 20 bp, Artificial Sequence
  Description of Artificial Sequence: Synthetic oligonucleotide
  Target: LAMA2; (-) strand; PAM type: YTN; PAM sequence: TTC
ttaacaatgaaacacaaata

SEQ ID NO: 200156 - DNA, 20 bp, Artificial Sequence
  Description of Artificial Sequence: Synthetic oligonucleotide
  Target: LAMA2; (-) strand; PAM type: YTN; PAM sequence: TTT
cttaacaatgaaacacaaat

SEQ ID NO: 200157 - DNA, 20 bp, Artificial Sequence
  Description of Artificial Sequence: Synthetic oligonucleotide
  Target: LAMA2; (-) strand; PAM type: YTN; PAM sequence: TTT
tcttaacaatgaaacacaaa

SEQ ID NO: 200158 - DNA, 20 bp, Artificial Sequence
  Description of Artificial Sequence: Synthetic oligonucleotide
  Target: LAMA2; (-) strand; PAM type: YTN; PAM sequence: CTA
caaaaatgtgggagagaaaa

SEQ ID NO: 200159 - DNA, 20 bp, Artificial Sequence
  Description of Artificial Sequence: Synthetic oligonucleotide
  Target: LAMA2; (-) strand; PAM type: YTN; PAM sequence: CTA
aggaagctacaaaaatgtgg

SEQ ID NO: 200160 - DNA, 20 bp, Artificial Sequence
  Description of Artificial Sequence: Synthetic oligonucleotide
  Target: LAMA2; (-) strand; PAM type: YTN; PAM sequence: TTC
taaggaagctacaaaaatgt

SEQ ID NO: 200161 - DNA, 20 bp, Artificial Sequence
  Description of Artificial Sequence: Synthetic oligonucleotide
  Target: LAMA2; (-) strand; PAM type: YTN; PAM sequence: TTT
ctaaggaagctacaaaaatg

SEQ ID NO: 200162 - DNA, 20 bp, Artificial Sequence
  Description of Artificial Sequence: Synthetic oligonucleotide
  Target: LAMA2; (-) strand; PAM type: YTN; PAM sequence: CTT
tctaaggaagctacaaaaat

SEQ ID NO: 200163 - DNA, 20 bp, Artificial Sequence
  Description of Artificial Sequence: Synthetic oligonucleotide
  Target: LAMA2; (-) strand; PAM type: YTN; PAM sequence: CTC
tttctaaggaagctacaaaa

SEQ ID NO: 200164 - DNA, 20 bp, Artificial Sequence
  Description of Artificial Sequence: Synthetic oligonucleotide
  Target: LAMA2; (-) strand; PAM type: YTN; PAM sequence: TTC
actctttctaaggaagctac

SEQ ID NO: 200165 - DNA, 20 bp, Artificial Sequence
  Description of Artificial Sequence: Synthetic oligonucleotide
  Target: LAMA2; (-) strand; PAM type: YTN; PAM sequence: CTT
cactctttctaaggaagcta

SEQ ID NO: 200166 - DNA, 20 bp, Artificial Sequence
  Description of Artificial Sequence: Synthetic oligonucleotide
  Target: LAMA2; (-) strand; PAM type: YTN; PAM sequence: TTC
ttcactctttctaaggaagc

SEQ ID NO: 200167 - DNA, 20 bp, Artificial Sequence
  Description of Artificial Sequence: Synthetic oligonucleotide
  Target: LAMA2; (-) strand; PAM type: YTN; PAM sequence: TTT
cttcactctttctaaggaag

SEQ ID NO: 200168 - DNA, 20 bp, Artificial Sequence
  Description of Artificial Sequence: Synthetic oligonucleotide
  Target: LAMA2; (-) strand; PAM type: YTN; PAM sequence: TTT
tcttcactctttctaaggaa

SEQ ID NO: 200169 - DNA, 20 bp, Artificial Sequence
  Description of Artificial Sequence: Synthetic oligonucleotide
  Target: LAMA2; (-) strand; PAM type: YTN; PAM sequence: CTT
ttcttcactctttctaagga

SEQ ID NO: 200170 - DNA, 20 bp, Artificial Sequence
  Description of Artificial Sequence: Synthetic oligonucleotide
  Target: LAMA2; (-) strand; PAM type: YTN; PAM sequence: TTA
ccttttcttcactctttcta

SEQ ID NO: 200171 - DNA, 20 bp, Artificial Sequence
  Description of Artificial Sequence: Synthetic oligonucleotide
  Target: LAMA2; (-) strand; PAM type: YTN; PAM sequence: TTT
accttttcttcactctttct

SEQ ID NO: 200172 - DNA, 20 bp, Artificial Sequence
  Description of Artificial Sequence: Synthetic oligonucleotide
  Target: LAMA2; (-) strand; PAM type: YTN; PAM sequence: TTA
aaaacatttaccttttcttc

SEQ ID NO: 200173 - DNA, 20 bp, Artificial Sequence
  Description of Artificial Sequence: Synthetic oligonucleotide
  Target: LAMA2; (-) strand; PAM type: YTN; PAM sequence: TTA
ttaaaaacatttaccttttc

SEQ ID NO: 200174 - DNA, 20 bp, Artificial Sequence
  Description of Artificial Sequence: Synthetic oligonucleotide
  Target: LAMA2; (-) strand; PAM type: YTN; PAM sequence: TTT
attaaaaacatttacctttt

SEQ ID NO: 200175 - DNA, 20 bp, Artificial Sequence
  Description of Artificial Sequence: Synthetic oligonucleotide
  Target: LAMA2; (-) strand; PAM type: YTN; PAM sequence: TTC
agacacataatttattaaaa

SEQ ID NO: 200176 - DNA, 20 bp, Artificial Sequence
  Description of Artificial Sequence: Synthetic oligonucleotide
  Target: LAMA2; (-) strand; PAM type: YTN; PAM sequence: CTT
cagacacataatttattaaa

SEQ ID NO: 200177 - DNA, 20 bp, Artificial Sequence
  Description of Artificial Sequence: Synthetic oligonucleotide
  Target: LAMA2; (-) strand; PAM type: YTN; PAM sequence: TTA
aggcatcttcagacacataa

SEQ ID NO: 200178 - DNA, 20 bp, Artificial Sequence
  Description of Artificial Sequence: Synthetic oligonucleotide
  Target: LAMA2; (-) strand; PAM type: YTN; PAM sequence: CTA
aaagaggggggaattaaggc

SEQ ID NO: 200179 - DNA, 20 bp, Artificial Sequence
  Description of Artificial Sequence: Synthetic oligonucleotide
  Target: LAMA2; (-) strand; PAM type: YTN; PAM sequence: CTG
atatctaaaagaggggggaa

SEQ ID NO: 200180 - DNA, 20 bp, Artificial Sequence
  Description of Artificial Sequence: Synthetic oligonucleotide
  Target: LAMA2; (-) strand; PAM type: YTN; PAM sequence: CTA
gagccagctgatatctaaaa

SEQ ID NO: 200181 - DNA, 20 bp, Artificial Sequence
  Description of Artificial Sequence: Synthetic oligonucleotide
  Target: LAMA2; (-) strand; PAM type: YTN; PAM sequence: TTC
tagagccagctgatatctaa

SEQ ID NO: 200182 - DNA, 20 bp, Artificial Sequence
  Description of Artificial Sequence: Synthetic oligonucleotide
  Target: LAMA2; (-) strand; PAM type: YTN; PAM sequence: CTA
gaattctagagccagctgat

SEQ ID NO: 200183 - DNA, 20 bp, Artificial Sequence
  Description of Artificial Sequence: Synthetic oligonucleotide
  Target: LAMA2; (-) strand; PAM type: YTN; PAM sequence: CTA
cctagaattctagagccagc

SEQ ID NO: 200184 - DNA, 20 bp, Artificial Sequence
  Description of Artificial Sequence: Synthetic oligonucleotide
  Target: LAMA2; (-) strand; PAM type: YTN; PAM sequence: TTC
tacctagaattctagagcca

SEQ ID NO: 200185 - DNA, 20 bp, Artificial Sequence
  Description of Artificial Sequence: Synthetic oligonucleotide
  Target: LAMA2; (-) strand; PAM type: YTN; PAM sequence: TTT
ctacctagaattctagagcc

SEQ ID NO: 200186 - DNA, 20 bp, Artificial Sequence
  Description of Artificial Sequence: Synthetic oligonucleotide
  Target: LAMA2; (-) strand; PAM type: YTN; PAM sequence: CTT
tctacctagaattctagagc

SEQ ID NO: 200187 - DNA, 20 bp, Artificial Sequence
  Description of Artificial Sequence: Synthetic oligonucleotide
  Target: LAMA2; (-) strand; PAM type: YTN; PAM sequence: CTG
agaagagatgctttctacct

SEQ ID NO: 200188 - DNA, 20 bp, Artificial Sequence
  Description of Artificial Sequence: Synthetic oligonucleotide
  Target: LAMA2; (-) strand; PAM type: YTN; PAM sequence: TTC
tgagaagagatgctttctac

SEQ ID NO: 200189 - DNA, 20 bp, Artificial Sequence
  Description of Artificial Sequence: Synthetic oligonucleotide
  Target: LAMA2; (-) strand; PAM type: YTN; PAM sequence: TTC
aaaattctgagaagagatgc

SEQ ID NO: 200190 - DNA, 20 bp, Artificial Sequence
  Description of Artificial Sequence: Synthetic oligonucleotide
  Target: LAMA2; (-) strand; PAM type: YTN; PAM sequence: CTT
caaaattctgagaagagatg

SEQ ID NO: 200191 - DNA, 20 bp, Artificial Sequence
  Description of Artificial Sequence: Synthetic oligonucleotide
  Target: LAMA2; (-) strand; PAM type: YTN; PAM sequence: TTG
agagccatgaagcaatatct

SEQ ID NO: 200192 - DNA, 20 bp, Artificial Sequence
  Description of Artificial Sequence: Synthetic oligonucleotide
  Target: LAMA2; (-) strand; PAM type: YTN; PAM sequence: TTC
atagagtaaggtgagtgaag

SEQ ID NO: 200193 - DNA, 20 bp, Artificial Sequence
  Description of Artificial Sequence: Synthetic oligonucleotide
  Target: LAMA2; (-) strand; PAM type: YTN; PAM sequence: CTG
gggttcatagagtaaggtga

SEQ ID NO: 200194 - DNA, 20 bp, Artificial Sequence
  Description of Artificial Sequence: Synthetic oligonucleotide
  Target: LAMA2; (-) strand; PAM type: YTN; PAM sequence: CTC
aagggatgtaaagaccctgg

SEQ ID NO: 200195 - DNA, 20 bp, Artificial Sequence
  Description of Artificial Sequence: Synthetic oligonucleotide
  Target: LAMA2; (-) strand; PAM type: YTN; PAM sequence: TTC
agtcctcaagggatgtaaag

SEQ ID NO: 200196 - DNA, 20 bp, Artificial Sequence
  Description of Artificial Sequence: Synthetic oligonucleotide
  Target: LAMA2; (-) strand; PAM type: YTN; PAM sequence: CTT
cagtcctcaagggatgtaaa

SEQ ID NO: 200197 - DNA, 20 bp, Artificial Sequence
  Description of Artificial Sequence: Synthetic oligonucleotide
  Target: LAMA2; (-) strand; PAM type: YTN; PAM sequence: CTG
aagtggaaacacacttcagt

SEQ ID NO: 200198 - DNA, 20 bp, Artificial Sequence
  Description of Artificial Sequence: Synthetic oligonucleotide
  Target: LAMA2; (-) strand; PAM type: YTN; PAM sequence: TTC
cagatagaagaccagccagt

SEQ ID NO: 200199 - DNA, 20 bp, Artificial Sequence
  Description of Artificial Sequence: Synthetic oligonucleotide
  Target: LAMA2; (-) strand; PAM type: YTN; PAM sequence: TTG
gggagaagcattccagatag

SEQ ID NO: 200200 - DNA, 20 bp, Artificial Sequence
  Description of Artificial Sequence: Synthetic oligonucleotide
  Target: LAMA2; (-) strand; PAM type: YTN; PAM sequence: CTT
ggggagaagcattccagata

SEQ ID NO: 200201 - DNA, 20 bp, Artificial Sequence
  Description of Artificial Sequence: Synthetic oligonucleotide
  Target: LAMA2; (-) strand; PAM type: YTN; PAM sequence: TTA
gccagaagatatcttgggga

SEQ ID NO: 200202 - DNA, 20 bp, Artificial Sequence
  Description of Artificial Sequence: Synthetic oligonucleotide
  Target: LAMA2; (-) strand; PAM type: YTN; PAM sequence: CTA
agaagaaaagagagttagcc

SEQ ID NO: 200203 - DNA, 20 bp, Artificial Sequence
  Description of Artificial Sequence: Synthetic oligonucleotide
  Target: LAMA2; (-) strand; PAM type: YTN; PAM sequence: TTC
taagaagaaaagagagttag

SEQ ID NO: 200204 - DNA, 20 bp, Artificial Sequence
  Description of Artificial Sequence: Synthetic oligonucleotide
  Target: LAMA2; (-) strand; PAM type: YTN; PAM sequence: TTT
ctaagaagaaaagagagtta

SEQ ID NO: 200205 - DNA, 20 bp, Artificial Sequence
  Description of Artificial Sequence: Synthetic oligonucleotide
  Target: LAMA2; (-) strand; PAM type: YTN; PAM sequence: TTT
tctaagaagaaaagagagtt

SEQ ID NO: 200206 - DNA, 20 bp, Artificial Sequence
  Description of Artificial Sequence: Synthetic oligonucleotide
  Target: LAMA2; (-) strand; PAM type: YTN; PAM sequence: TTA
gcagttttctaagaagaaaa

SEQ ID NO: 200207 - DNA, 20 bp, Artificial Sequence
  Description of Artificial Sequence: Synthetic oligonucleotide
  Target: LAMA2; (-) strand; PAM type: YTN; PAM sequence: CTT
agcagttttctaagaagaaa

SEQ ID NO: 200208 - DNA, 20 bp, Artificial Sequence
  Description of Artificial Sequence: Synthetic oligonucleotide
  Target: LAMA2; (-) strand; PAM type: YTN; PAM sequence: TTG
ggaatggtaaatcttagcag

SEQ ID NO: 200209 - DNA, 20 bp, Artificial Sequence
  Description of Artificial Sequence: Synthetic oligonucleotide
  Target: LAMA2; (-) strand; PAM type: YTN; PAM sequence: CTC
attgggaatggtaaatctta

SEQ ID NO: 200210 - DNA, 20 bp, Artificial Sequence
  Description of Artificial Sequence: Synthetic oligonucleotide
  Target: LAMA2; (-) strand; PAM type: YTN; PAM sequence: TTG
caaaaataaataaaaggaca

SEQ ID NO: 200211 - DNA, 20 bp, Artificial Sequence
  Description of Artificial Sequence: Synthetic oligonucleotide
  Target: LAMA2; (-) strand; PAM type: YTN; PAM sequence: TTT
gcaaaaataaataaaaggac

SEQ ID NO: 200212 - DNA, 20 bp, Artificial Sequence
  Description of Artificial Sequence: Synthetic oligonucleotide
  Target: LAMA2; (-) strand; PAM type: YTN; PAM sequence: TTA
gggagaccaggaatggcagt

SEQ ID NO: 200213 - DNA, 20 bp, Artificial Sequence
  Description of Artificial Sequence: Synthetic oligonucleotide
  Target: LAMA2; (-) strand; PAM type: YTN; PAM sequence: TTT
agggagaccaggaatggcag

SEQ ID NO: 200214 - DNA, 20 bp, Artificial Sequence
  Description of Artificial Sequence: Synthetic oligonucleotide
  Target: LAMA2; (-) strand; PAM type: YTN; PAM sequence: TTG
tttagggagaccaggaatgg

SEQ ID NO: 200215 - DNA, 20 bp, Artificial Sequence
  Description of Artificial Sequence: Synthetic oligonucleotide
  Target: LAMA2; (-) strand; PAM type: YTN; PAM sequence: CTT
gtttagggagaccaggaatg

SEQ ID NO: 200216 - DNA, 20 bp, Artificial Sequence
  Description of Artificial Sequence: Synthetic oligonucleotide
  Target: LAMA2; (-) strand; PAM type: YTN; PAM sequence: CTA
agacttgtttagggagacca

SEQ ID NO: 200217 - DNA, 20 bp, Artificial Sequence
  Description of Artificial Sequence: Synthetic oligonucleotide
  Target: LAMA2; (-) strand; PAM type: YTN; PAM sequence: TTC
aacatgaaaagagaaaggga

SEQ ID NO: 200218 - DNA, 20 bp, Artificial Sequence
  Description of Artificial Sequence: Synthetic oligonucleotide
  Target: LAMA2; (-) strand; PAM type: YTN; PAM sequence: TTT
caacatgaaaagagaaaggg

SEQ ID NO: 200219 - DNA, 20 bp, Artificial Sequence
  Description of Artificial Sequence: Synthetic oligonucleotide
  Target: LAMA2; (-) strand; PAM type: YTN; PAM sequence: CTA
tatagtgtatttcaacatga

SEQ ID NO: 200220 - DNA, 20 bp, Artificial Sequence
  Description of Artificial Sequence: Synthetic oligonucleotide
  Target: LAMA2; (-) strand; PAM type: YTN; PAM sequence: CTA
atacataagtaaactatata

SEQ ID NO: 200221 - DNA, 20 bp, Artificial Sequence
  Description of Artificial Sequence: Synthetic oligonucleotide
  Target: LAMA2; (-) strand; PAM type: YTN; PAM sequence: TTA
cctaatacataagtaaacta

SEQ ID NO: 200222 - DNA, 20 bp, Artificial Sequence
  Description of Artificial Sequence: Synthetic oligonucleotide
  Target: LAMA2; (-) strand; PAM type: YTN; PAM sequence: TTT
acctaatacataagtaaact

SEQ ID NO: 200223 - DNA, 20 bp, Artificial Sequence
  Description of Artificial Sequence: Synthetic oligonucleotide
  Target: LAMA2; (-) strand; PAM type: YTN; PAM sequence: TTG
gggagtacagagagaggcaa

SEQ ID NO: 200224 - DNA, 20 bp, Artificial Sequence
  Description of Artificial Sequence: Synthetic oligonucleotide
  Target: LAMA2; (-) strand; PAM type: YTN; PAM sequence: CTT
ggggagtacagagagaggca

SEQ ID NO: 200225 - DNA, 20 bp, Artificial Sequence
  Description of Artificial Sequence: Synthetic oligonucleotide
  Target: LAMA2; (-) strand; PAM type: YTN; PAM sequence: TTC
aagggtcaagaagtagcttg

SEQ ID NO: 200226 - DNA, 20 bp, Artificial Sequence
  Description of Artificial Sequence: Synthetic oligonucleotide
  Target: LAMA2; (-) strand; PAM type: YTN; PAM sequence: TTT
caagggtcaagaagtagctt

SEQ ID NO: 200227 - DNA, 20 bp, Artificial Sequence
  Description of Artificial Sequence: Synthetic oligonucleotide
  Target: LAMA2; (-) strand; PAM type: YTN; PAM sequence: TTT
tcaagggtcaagaagtagct

SEQ ID NO: 200228 - DNA, 20 bp, Artificial Sequence
  Description of Artificial Sequence: Synthetic oligonucleotide
  Target: LAMA2; (-) strand; PAM type: YTN; PAM sequence: TTT
ttcaagggtcaagaagtagc

SEQ ID NO: 200229 - DNA, 20 bp, Artificial Sequence
  Description of Artificial Sequence: Synthetic oligonucleotide
  Target: LAMA2; (-) strand; PAM type: YTN; PAM sequence: TTT
tttcaagggtcaagaagtag

SEQ ID NO: 200230 - DNA, 20 bp, Artificial Sequence
  Description of Artificial Sequence: Synthetic oligonucleotide
  Target: LAMA2; (-) strand; PAM type: YTN; PAM sequence: CTA
cattttttcaagggtcaaga

SEQ ID NO: 200231 - DNA, 20 bp, Artificial Sequence
  Description of Artificial Sequence: Synthetic oligonucleotide
  Target: LAMA2; (-) strand; PAM type: YTN; PAM sequence: TTA
tacgatcatggaatctacat

SEQ ID NO: 200232 - DNA, 20 bp, Artificial Sequence
  Description of Artificial Sequence: Synthetic oligonucleotide
  Target: LAMA2; (-) strand; PAM type: YTN; PAM sequence: TTT
atacgatcatggaatctaca

SEQ ID NO: 200233 - DNA, 20 bp, Artificial Sequence
  Description of Artificial Sequence: Synthetic oligonucleotide
  Target: LAMA2; (-) strand; PAM type: YTN; PAM sequence: TTT
tatacgatcatggaatctac

SEQ ID NO: 200234 - DNA, 20 bp, Artificial Sequence
  Description of Artificial Sequence: Synthetic oligonucleotide
  Target: LAMA2; (-) strand; PAM type: YTN; PAM sequence: TTA
aagtaataaaaattttatac

SEQ ID NO: 200235 - DNA, 20 bp, Artificial Sequence
  Description of Artificial Sequence: Synthetic oligonucleotide
  Target: LAMA2; (-) strand; PAM type: YTN; PAM sequence: TTT
aaagtaataaaaattttata

SEQ ID NO: 200236 - DNA, 20 bp, Artificial Sequence
  Description of Artificial Sequence: Synthetic oligonucleotide
  Target: LAMA2; (-) strand; PAM type: YTN; PAM sequence: TTT
taaagtaataaaaattttat

SEQ ID NO: 200237 - DNA, 20 bp, Artificial Sequence
  Description of Artificial Sequence: Synthetic oligonucleotide
  Target: LAMA2; (-) strand; PAM type: YTN; PAM sequence: TTT
ttaaagtaataaaaatttta

SEQ ID NO: 200238 - DNA, 20 bp, Artificial Sequence
  Description of Artificial Sequence: Synthetic oligonucleotide
  Target: LAMA2; (-) strand; PAM type: YTN; PAM sequence: TTA
gaaaagtttttaaagtaata

SEQ ID NO: 200239 - DNA, 20 bp, Artificial Sequence
  Description of Artificial Sequence: Synthetic oligonucleotide
  Target: LAMA2; (-) strand; PAM type: YTN; PAM sequence: TTT
agaaaagtttttaaagtaat

SEQ ID NO: 200240 - DNA, 20 bp, Artificial Sequence
  Description of Artificial Sequence: Synthetic oligonucleotide
  Target: LAMA2; (-) strand; PAM type: YTN; PAM sequence: TTA
atttagaaaagtttttaaag

SEQ ID NO: 200241 - DNA, 20 bp, Artificial Sequence
  Description of Artificial Sequence: Synthetic oligonucleotide
  Target: LAMA2; (-) strand; PAM type: YTN; PAM sequence: TTA
ttaatttagaaaagttttta

SEQ ID NO: 200242 - DNA, 20 bp, Artificial Sequence
  Description of Artificial Sequence: Synthetic oligonucleotide
  Target: LAMA2; (-) strand; PAM type: YTN; PAM sequence: TTT
attaatttagaaaagttttt

SEQ ID NO: 200243 - DNA, 20 bp, Artificial Sequence
  Description of Artificial Sequence: Synthetic oligonucleotide
  Target: LAMA2; (-) strand; PAM type: YTN; PAM sequence: TTA
taatttattaatttagaaaa

SEQ ID NO: 200244 - DNA, 20 bp, Artificial Sequence
  Description of Artificial Sequence: Synthetic oligonucleotide
  Target: LAMA2; (-) strand; PAM type: YTN; PAM sequence: TTT
ataatttattaatttagaaa

SEQ ID NO: 200245 - DNA, 20 bp, Artificial Sequence
  Description of Artificial Sequence: Synthetic oligonucleotide
  Target: LAMA2; (-) strand; PAM type: YTN; PAM sequence: TTT
tataatttattaatttagaa

SEQ ID NO: 200246 - DNA, 20 bp, Artificial Sequence
  Description of Artificial Sequence: Synthetic oligonucleotide
  Target: LAMA2; (-) strand; PAM type: YTN; PAM sequence: TTT
ttataatttattaatttaga

SEQ ID NO: 200247 - DNA, 20 bp, Artificial Sequence
  Description of Artificial Sequence: Synthetic oligonucleotide
  Target: LAMA2; (-) strand; PAM type: YTN; PAM sequence: TTT
tttataatttattaatttag

SEQ ID NO: 200248 - DNA, 20 bp, Artificial Sequence
  Description of Artificial Sequence: Synthetic oligonucleotide
  Target: LAMA2; (-) strand; PAM type: YTN; PAM sequence: TTA
attttttataatttattaat

SEQ ID NO: 200249 - DNA, 20 bp, Artificial Sequence
  Description of Artificial Sequence: Synthetic oligonucleotide
  Target: LAMA2; (-) strand; PAM type: YTN; PAM sequence: TTG
aatatattaattttttataa

SEQ ID NO: 200250 - DNA, 20 bp, Artificial Sequence
  Description of Artificial Sequence: Synthetic oligonucleotide
  Target: LAMA2; (-) strand; PAM type: YTN; PAM sequence: TTT
gaatatattaattttttata

SEQ ID NO: 200251 - DNA, 20 bp, Artificial Sequence
  Description of Artificial Sequence: Synthetic oligonucleotide
  Target: LAMA2; (-) strand; PAM type: YTN; PAM sequence: CTT
tgaatatattaattttttat

SEQ ID NO: 200252 - DNA, 20 bp, Artificial Sequence
  Description of Artificial Sequence: Synthetic oligonucleotide
  Target: LAMA2; (-) strand; PAM type: YTN; PAM sequence: TTG
ctttgaatatattaattttt

SEQ ID NO: 200253 - DNA, 20 bp, Artificial Sequence
  Description of Artificial Sequence: Synthetic oligonucleotide
  Target: LAMA2; (-) strand; PAM type: YTN; PAM sequence: CTA
gttgctttgaatatattaat

SEQ ID NO: 200254 - DNA, 20 bp, Artificial Sequence
  Description of Artificial Sequence: Synthetic oligonucleotide
  Target: LAMA2; (-) strand; PAM type: YTN; PAM sequence: TTA
ggcatacatctagttgcttt

SEQ ID NO: 200255 - DNA, 20 bp, Artificial Sequence
  Description of Artificial Sequence: Synthetic oligonucleotide
  Target: LAMA2; (-) strand; PAM type: YTN; PAM sequence: TTT
aggcatacatctagttgctt

SEQ ID NO: 200256 - DNA, 20 bp, Artificial Sequence
  Description of Artificial Sequence: Synthetic oligonucleotide
  Target: LAMA2; (-) strand; PAM type: YTN; PAM sequence: CTA
ggtgtttaggcatacatcta

SEQ ID NO: 200257 - DNA, 20 bp, Artificial Sequence
  Description of Artificial Sequence: Synthetic oligonucleotide
  Target: LAMA2; (-) strand; PAM type: YTN; PAM sequence: TTC
taggtgtttaggcatacatc

SEQ ID NO: 200258 - DNA, 20 bp, Artificial Sequence
  Description of Artificial Sequence: Synthetic oligonucleotide
  Target: LAMA2; (-) strand; PAM type: YTN; PAM sequence: TTT
ctaggtgtttaggcatacat

SEQ ID NO: 200259 - DNA, 20 bp, Artificial Sequence
  Description of Artificial Sequence: Synthetic oligonucleotide
  Target: LAMA2; (-) strand; PAM type: YTN; PAM sequence: TTT
tctaggtgtttaggcataca

SEQ ID NO: 200260 - DNA, 20 bp, Artificial Sequence
  Description of Artificial Sequence: Synthetic oligonucleotide
  Target: LAMA2; (-) strand; PAM type: YTN; PAM sequence: CTT
ttctaggtgtttaggcatac

SEQ ID NO: 200261 - DNA, 20 bp, Artificial Sequence
  Description of Artificial Sequence: Synthetic oligonucleotide
  Target: LAMA2; (-) strand; PAM type: YTN; PAM sequence: CTA
acatgcgccaggcacttttc

SEQ ID NO: 200262 - DNA, 20 bp, Artificial Sequence
  Description of Artificial Sequence: Synthetic oligonucleotide
  Target: LAMA2; (-) strand; PAM type: YTN; PAM sequence: TTC
taacatgcgccaggcacttt

SEQ ID NO: 200263 - DNA, 20 bp, Artificial Sequence
  Description of Artificial Sequence: Synthetic oligonucleotide
  Target: LAMA2; (-) strand; PAM type: YTN; PAM sequence: TTT
ctaacatgcgccaggcactt

SEQ ID NO: 200264 - DNA, 20 bp, Artificial Sequence
  Description of Artificial Sequence: Synthetic oligonucleotide
  Target: LAMA2; (-) strand; PAM type: YTN; PAM sequence: CTA
atttctaacatgcgccaggc

SEQ ID NO: 200265 - DNA, 20 bp, Artificial Sequence
  Description of Artificial Sequence: Synthetic oligonucleotide
  Target: LAMA2; (-) strand; PAM type: YTN; PAM sequence: TTC
taatttctaacatgcgccag

SEQ ID NO: 200266 - DNA, 20 bp, Artificial Sequence
  Description of Artificial Sequence: Synthetic oligonucleotide
  Target: LAMA2; (-) strand; PAM type: YTN; PAM sequence: TTT
ctaatttctaacatgcgcca

SEQ ID NO: 200267 - DNA, 20 bp, Artificial Sequence
  Description of Artificial Sequence: Synthetic oligonucleotide
  Target: LAMA2; (-) strand; PAM type: YTN; PAM sequence: CTT
tctaatttctaacatgcgcc

SEQ ID NO: 200268 - DNA, 20 bp, Artificial Sequence
  Description of Artificial Sequence: Synthetic oligonucleotide
  Target: LAMA2; (-) strand; PAM type: YTN; PAM sequence: TTC
ataagaaatactttctaatt

SEQ ID NO: 200269 - DNA, 20 bp, Artificial Sequence
  Description of Artificial Sequence: Synthetic oligonucleotide
  Target: LAMA2; (-) strand; PAM type: YTN; PAM sequence: CTG
ttcataagaaatactttcta

SEQ ID NO: 200270 - DNA, 20 bp, Artificial Sequence
  Description of Artificial Sequence: Synthetic oligonucleotide
  Target: LAMA2; (-) strand; PAM type: YTN; PAM sequence: TTC
aatgtgaaaaatcataaaac

SEQ ID NO: 200271 - DNA, 20 bp, Artificial Sequence
  Description of Artificial Sequence: Synthetic oligonucleotide
  Target: LAMA2; (-) strand; PAM type: YTN; PAM sequence: CTT
caatgtgaaaaatcataaaa

SEQ ID NO: 200272 - DNA, 20 bp, Artificial Sequence
  Description of Artificial Sequence: Synthetic oligonucleotide
  Target: LAMA2; (-) strand; PAM type: YTN; PAM sequence: TTC
aacttcaatgtgaaaaatca

SEQ ID NO: 200273 - DNA, 20 bp, Artificial Sequence
  Description of Artificial Sequence: Synthetic oligonucleotide
  Target: LAMA2; (-) strand; PAM type: YTN; PAM sequence: CTT
caacttcaatgtgaaaaatc

SEQ ID NO: 200274 - DNA, 20 bp, Artificial Sequence
  Description of Artificial Sequence: Synthetic oligonucleotide
  Target: LAMA2; (-) strand; PAM type: YTN; PAM sequence: CTC
ttcaacttcaatgtgaaaaa

SEQ ID NO: 200275 - DNA, 20 bp, Artificial Sequence
  Description of Artificial Sequence: Synthetic oligonucleotide
  Target: LAMA2; (-) strand; PAM type: YTN; PAM sequence: TTG
gcaagactcttcaacttcaa

SEQ ID NO: 200276 - DNA, 20 bp, Artificial Sequence
  Description of Artificial Sequence: Synthetic oligonucleotide
  Target: LAMA2; (-) strand; PAM type: YTN; PAM sequence: CTG
atcacatatataagataggg

SEQ ID NO: 200277 - DNA, 20 bp, Artificial Sequence
  Description of Artificial Sequence: Synthetic oligonucleotide
  Target: LAMA2; (-) strand; PAM type: YTN; PAM sequence: TTA
cagaggcaaaaatctgatca

SEQ ID NO: 200278 - DNA, 20 bp, Artificial Sequence
  Description of Artificial Sequence: Synthetic oligonucleotide
  Target: LAMA2; (-) strand; PAM type: YTN; PAM sequence: TTT
acagaggcaaaaatctgatc

SEQ ID NO: 200279 - DNA, 20 bp, Artificial Sequence
  Description of Artificial Sequence: Synthetic oligonucleotide
  Target: LAMA2; (-) strand; PAM type: YTN; PAM sequence: CTA
aaagtttacagaggcaaaaa

SEQ ID NO: 200280 - DNA, 20 bp, Artificial Sequence
  Description of Artificial Sequence: Synthetic oligonucleotide
  Target: LAMA2; (-) strand; PAM type: YTN; PAM sequence: TTG
gggtcaagataaaatcctaa

SEQ ID NO: 200281 - DNA, 20 bp, Artificial Sequence
  Description of Artificial Sequence: Synthetic oligonucleotide
  Target: LAMA2; (-) strand; PAM type: YTN; PAM sequence: TTT
ggggtcaagataaaatccta

SEQ ID NO: 200282 - DNA, 20 bp, Artificial Sequence
  Description of Artificial Sequence: Synthetic oligonucleotide
  Target: LAMA2; (-) strand; PAM type: YTN; PAM sequence: CTA
cagaacatttggggtcaaga

SEQ ID NO: 200283 - DNA, 20 bp, Artificial Sequence
  Description of Artificial Sequence: Synthetic oligonucleotide
  Target: LAMA2; (-) strand; PAM type: YTN; PAM sequence: TTG
tgatcaaactacagaacatt

SEQ ID NO: 200284 - DNA, 20 bp, Artificial Sequence
  Description of Artificial Sequence: Synthetic oligonucleotide
  Target: LAMA2; (-) strand; PAM type: YTN; PAM sequence: TTC
atagcacaggtcatattgtg

SEQ ID NO: 200285 - DNA, 20 bp, Artificial Sequence
  Description of Artificial Sequence: Synthetic oligonucleotide
  Target: LAMA2; (-) strand; PAM type: YTN; PAM sequence: TTC
ccgggtcaaaaaattcatag

SEQ ID NO: 200286 - DNA, 20 bp, Artificial Sequence
  Description of Artificial Sequence: Synthetic oligonucleotide
  Target: LAMA2; (-) strand; PAM type: YTN; PAM sequence: TTT
cccgggtcaaaaaattcata

SEQ ID NO: 200287 - DNA, 20 bp, Artificial Sequence
  Description of Artificial Sequence: Synthetic oligonucleotide
  Target: LAMA2; (-) strand; PAM type: YTN; PAM sequence: TTA
ggtgtatgaatttcccgggt

SEQ ID NO: 200288 - DNA, 20 bp, Artificial Sequence
  Description of Artificial Sequence: Synthetic oligonucleotide
  Target: LAMA2; (-) strand; PAM type: YTN; PAM sequence: TTA
agttaggtgtatgaatttcc

SEQ ID NO: 200289 - DNA, 20 bp, Artificial Sequence
  Description of Artificial Sequence: Synthetic oligonucleotide
  Target: LAMA2; (-) strand; PAM type: YTN; PAM sequence: CTT
aagttaggtgtatgaatttc

SEQ ID NO: 200290 - DNA, 20 bp, Artificial Sequence
  Description of Artificial Sequence: Synthetic oligonucleotide
  Target: LAMA2; (-) strand; PAM type: YTN; PAM sequence: TTA
aaatccttaagttaggtgta

SEQ ID NO: 200291 - DNA, 20 bp, Artificial Sequence
  Description of Artificial Sequence: Synthetic oligonucleotide
  Target: LAMA2; (-) strand; PAM type: YTN; PAM sequence: TTA
ataatgaaaaattaaaatcc

SEQ ID NO: 200292 - DNA, 20 bp, Artificial Sequence
  Description of Artificial Sequence: Synthetic oligonucleotide
  Target: LAMA2; (-) strand; PAM type: YTN; PAM sequence: TTA
aataattaataatgaaaaat

SEQ ID NO: 200293 - DNA, 20 bp, Artificial Sequence
  Description of Artificial Sequence: Synthetic oligonucleotide
  Target: LAMA2; (-) strand; PAM type: YTN; PAM sequence: TTG
ttaaataattaataatgaaa

SEQ ID NO: 200294 - DNA, 20 bp, Artificial Sequence
  Description of Artificial Sequence: Synthetic oligonucleotide
  Target: LAMA2; (-) strand; PAM type: YTN; PAM sequence: TTC
catagataaataacacattg

SEQ ID NO: 200295 - DNA, 20 bp, Artificial Sequence
  Description of Artificial Sequence: Synthetic oligonucleotide
  Target: LAMA2; (-) strand; PAM type: YTN; PAM sequence: CTA
acaaagaagagttccataga

SEQ ID NO: 200296 - DNA, 20 bp, Artificial Sequence
  Description of Artificial Sequence: Synthetic oligonucleotide
  Target: LAMA2; (-) strand; PAM type: YTN; PAM sequence: TTC
aatatctaacaaagaagagt

SEQ ID NO: 200297 - DNA, 20 bp, Artificial Sequence
  Description of Artificial Sequence: Synthetic oligonucleotide
  Target: LAMA2; (-) strand; PAM type: YTN; PAM sequence: TTA
atccatgaaattcaatatct

SEQ ID NO: 200298 - DNA, 20 bp, Artificial Sequence
  Description of Artificial Sequence: Synthetic oligonucleotide
  Target: LAMA2; (-) strand; PAM type: YTN; PAM sequence: CTA
ggggattaatccatgaaatt

SEQ ID NO: 200299 - DNA, 20 bp, Artificial Sequence
  Description of Artificial Sequence: Synthetic oligonucleotide
  Target: LAMA2; (-) strand; PAM type: YTN; PAM sequence: CTC
aaaaaaaaaaaaggaaaaaa

SEQ ID NO: 200300 - DNA, 20 bp, Artificial Sequence
  Description of Artificial Sequence: Synthetic oligonucleotide
  Target: LAMA2; (-) strand; PAM type: YTN; PAM sequence: TTG
tctcaaaaaaaaaaaaggaa

SEQ ID NO: 200301 - DNA, 20 bp, Artificial Sequence
  Description of Artificial Sequence: Synthetic oligonucleotide
  Target: LAMA2; (-) strand; PAM type: YTN; PAM sequence: TTT
gtctcaaaaaaaaaaaagga

SEQ ID NO: 200302 - DNA, 20 bp, Artificial Sequence
  Description of Artificial Sequence: Synthetic oligonucleotide
  Target: LAMA2; (-) strand; PAM type: YTN; PAM sequence: CTT
tgtctcaaaaaaaaaaaagg

SEQ ID NO: 200303 - DNA, 20 bp, Artificial Sequence
  Description of Artificial Sequence: Synthetic oligonucleotide
  Target: LAMA2; (-) strand; PAM type: YTN; PAM sequence: CTG
ggggacaagagcgagacttt

SEQ ID NO: 200304 - DNA, 20 bp, Artificial Sequence
  Description of Artificial Sequence: Synthetic oligonucleotide
  Target: LAMA2; (-) strand; PAM type: YTN; PAM sequence: CTC
cagcctgggggacaagagcg

SEQ ID NO: 200305 - DNA, 20 bp, Artificial Sequence
  Description of Artificial Sequence: Synthetic oligonucleotide
  Target: LAMA2; (-) strand; PAM type: YTN; PAM sequence: TTG
cactccagcctgggggacaa

SEQ ID NO: 200306 - DNA, 20 bp, Artificial Sequence
  Description of Artificial Sequence: Synthetic oligonucleotide
  Target: LAMA2; (-) strand; PAM type: YTN; PAM sequence: CTG
cagtgagccaagatcatgcc

SEQ ID NO: 200307 - DNA, 20 bp, Artificial Sequence
  Description of Artificial Sequence: Synthetic oligonucleotide
  Target: LAMA2; (-) strand; PAM type: YTN; PAM sequence: CTG
ggaggcagaggctgcagtga

SEQ ID NO: 200308 - DNA, 20 bp, Artificial Sequence
  Description of Artificial Sequence: Synthetic oligonucleotide
  Target: LAMA2; (-) strand; PAM type: YTN; PAM sequence: CTG
gaacctgggaggcagaggct

SEQ ID NO: 200309 - DNA, 20 bp, Artificial Sequence
  Description of Artificial Sequence: Synthetic oligonucleotide
  Target: LAMA2; (-) strand; PAM type: YTN; PAM sequence: CTC
atgggggtcggcgggggcgg

SEQ ID NO: 200310 - DNA, 20 bp, Artificial Sequence
  Description of Artificial Sequence: Synthetic oligonucleotide
  Target: LAMA2; (-) strand; PAM type: YTN; PAM sequence: CTA
ctcatgggggtcggcggggg

SEQ ID NO: 200311 - DNA, 20 bp, Artificial Sequence
  Description of Artificial Sequence: Synthetic oligonucleotide
  Target: LAMA2; (-) strand; PAM type: YTN; PAM sequence: CTG
aaatcccagctactcatggg

SEQ ID NO: 200312 - DNA, 20 bp, Artificial Sequence
  Description of Artificial Sequence: Synthetic oligonucleotide
  Target: LAMA2; (-) strand; PAM type: YTN; PAM sequence: TTG
gtggcaggcacctgaaatcc

SEQ ID NO: 200313 - DNA, 20 bp, Artificial Sequence
  Description of Artificial Sequence: Synthetic oligonucleotide
  Target: LAMA2; (-) strand; PAM type: YTN; PAM sequence: TTT
ggtggcaggcacctgaaatc

SEQ ID NO: 200314 - DNA, 20 bp, Artificial Sequence
  Description of Artificial Sequence: Synthetic oligonucleotide
  Target: LAMA2; (-) strand; PAM type: YTN; PAM sequence: TTA
gccgggtttggtggcaggca

SEQ ID NO: 200315 - DNA, 20 bp, Artificial Sequence
  Description of Artificial Sequence: Synthetic oligonucleotide
  Target: LAMA2; (-) strand; PAM type: YTN; PAM sequence: CTA
aaaatacaaaaattagccgg

SEQ ID NO: 200316 - DNA, 20 bp, Artificial Sequence
  Description of Artificial Sequence: Synthetic oligonucleotide
  Target: LAMA2; (-) strand; PAM type: YTN; PAM sequence: CTA
ctaaaaatacaaaaattagc

SEQ ID NO: 200317 - DNA, 20 bp, Artificial Sequence
  Description of Artificial Sequence: Synthetic oligonucleotide
  Target: LAMA2; (-) strand; PAM type: YTN; PAM sequence: CTC
tactaaaaatacaaaaatta

SEQ ID NO: 200318 - DNA, 20 bp, Artificial Sequence
  Description of Artificial Sequence: Synthetic oligonucleotide
  Target: LAMA2; (-) strand; PAM type: YTN; PAM sequence: CTG
gcccacatggtgaaacccca

SEQ ID NO: 200319 - DNA, 20 bp, Artificial Sequence
  Description of Artificial Sequence: Synthetic oligonucleotide
  Target: LAMA2; (-) strand; PAM type: YTN; PAM sequence: TTC
cagaccagcctggcccacat

SEQ ID NO: 200320 - DNA, 20 bp, Artificial Sequence
  Description of Artificial Sequence: Synthetic oligonucleotide
  Target: LAMA2; (-) strand; PAM type: YTN; PAM sequence: TTG
ggaggaccaggcgggtggat

SEQ ID NO: 200321 - DNA, 20 bp, Artificial Sequence
  Description of Artificial Sequence: Synthetic oligonucleotide
  Target: LAMA2; (-) strand; PAM type: YTN; PAM sequence: TTT
gggaggaccaggcgggtgga

SEQ ID NO: 200322 - DNA, 20 bp, Artificial Sequence
  Description of Artificial Sequence: Synthetic oligonucleotide
  Target: LAMA2; (-) strand; PAM type: YTN; PAM sequence: CTT
tgggaggaccaggcgggtgg

SEQ ID NO: 200323 - DNA, 20 bp, Artificial Sequence
  Description of Artificial Sequence: Synthetic oligonucleotide
  Target: LAMA2; (-) strand; PAM type: YTN; PAM sequence: CTG
taatcccagcactttgggag

SEQ ID NO: 200324 - DNA, 20 bp, Artificial Sequence
  Description of Artificial Sequence: Synthetic oligonucleotide
  Target: LAMA2; (-) strand; PAM type: YTN; PAM sequence: CTC
acgcctgtaatcccagcact

SEQ ID NO: 200325 - DNA, 20 bp, Artificial Sequence
  Description of Artificial Sequence: Synthetic oligonucleotide
  Target: LAMA2; (-) strand; PAM type: YTN; PAM sequence: CTG
ggcgtggtggctcacgcctg

SEQ ID NO: 200326 - DNA, 20 bp, Artificial Sequence
  Description of Artificial Sequence: Synthetic oligonucleotide
  Target: LAMA2; (-) strand; PAM type: YTN; PAM sequence: CTC
cccaggggaaacaatagaat

SEQ ID NO: 200327 - DNA, 20 bp, Artificial Sequence
  Description of Artificial Sequence: Synthetic oligonucleotide
  Target: LAMA2; (-) strand; PAM type: YTN; PAM sequence: TTG
taagataaaggtgaggaggt

SEQ ID NO: 200328 - DNA, 20 bp, Artificial Sequence
  Description of Artificial Sequence: Synthetic oligonucleotide
  Target: LAMA2; (-) strand; PAM type: YTN; PAM sequence: TTA
aaatgttgtaagataaaggt

SEQ ID NO: 200329 - DNA, 20 bp, Artificial Sequence
  Description of Artificial Sequence: Synthetic oligonucleotide
  Target: LAMA2; (-) strand; PAM type: YTN; PAM sequence: TTT
aaaatgttgtaagataaagg

SEQ ID NO: 200330 - DNA, 20 bp, Artificial Sequence
  Description of Artificial Sequence: Synthetic oligonucleotide
  Target: LAMA2; (-) strand; PAM type: YTN; PAM sequence: TTA
tggtaatatttaaaatgttg

SEQ ID NO: 200331 - DNA, 20 bp, Artificial Sequence
  Description of Artificial Sequence: Synthetic oligonucleotide
  Target: LAMA2; (-) strand; PAM type: YTN; PAM sequence: TTA
aattatggtaatatttaaaa

SEQ ID NO: 200332 - DNA, 20 bp, Artificial Sequence
  Description of Artificial Sequence: Synthetic oligonucleotide
  Target: LAMA2; (-) strand; PAM type: YTN; PAM sequence: TTA
ttaaattatggtaatattta

SEQ ID NO: 200333 - DNA, 20 bp, Artificial Sequence
  Description of Artificial Sequence: Synthetic oligonucleotide
  Target: LAMA2; (-) strand; PAM type: YTN; PAM sequence: CTC
aaagcacaaaagaattatta

SEQ ID NO: 200334 - DNA, 20 bp, Artificial Sequence
  Description of Artificial Sequence: Synthetic oligonucleotide
  Target: LAMA2; (-) strand; PAM type: YTN; PAM sequence: CTA
ctcaaagcacaaaagaatta

SEQ ID NO: 200335 - DNA, 20 bp, Artificial Sequence
  Description of Artificial Sequence: Synthetic oligonucleotide
  Target: LAMA2; (-) strand; PAM type: YTN; PAM sequence: TTA
aaagactactcaaagcacaa

SEQ ID NO: 200336 - DNA, 20 bp, Artificial Sequence
  Description of Artificial Sequence: Synthetic oligonucleotide
  Target: LAMA2; (-) strand; PAM type: YTN; PAM sequence: TTT
aaaagactactcaaagcaca

SEQ ID NO: 200337 - DNA, 20 bp, Artificial Sequence
  Description of Artificial Sequence: Synthetic oligonucleotide
  Target: LAMA2; (-) strand; PAM type: YTN; PAM sequence: TTT
taaaagactactcaaagcac

SEQ ID NO: 200338 - DNA, 20 bp, Artificial Sequence
  Description of Artificial Sequence: Synthetic oligonucleotide
  Target: LAMA2; (-) strand; PAM type: YTN; PAM sequence: TTT
ttaaaagactactcaaagca

SEQ ID NO: 200339 - DNA, 20 bp, Artificial Sequence
  Description of Artificial Sequence: Synthetic oligonucleotide
  Target: LAMA2; (-) strand; PAM type: YTN; PAM sequence: TTA
atttttaaaagactactcaa

SEQ ID NO: 200340 - DNA, 20 bp, Artificial Sequence
  Description of Artificial Sequence: Synthetic oligonucleotide
  Target: LAMA2; (-) strand; PAM type: YTN; PAM sequence: CTA
gcaaaacatatggcatgcac

SEQ ID NO: 200341 - DNA, 20 bp, Artificial Sequence
  Description of Artificial Sequence: Synthetic oligonucleotide
  Target: LAMA2; (-) strand; PAM type: YTN; PAM sequence: CTC
ggagaactagcaaaacatat

SEQ ID NO: 200342 - DNA, 20 bp, Artificial Sequence
  Description of Artificial Sequence: Synthetic oligonucleotide
  Target: LAMA2; (-) strand; PAM type: YTN; PAM sequence: TTC
tcggagaactagcaaaacat

SEQ ID NO: 200343 - DNA, 20 bp, Artificial Sequence
  Description of Artificial Sequence: Synthetic oligonucleotide
  Target: LAMA2; (-) strand; PAM type: YTN; PAM sequence: TTC
aaaaatgagtcaatattctc

SEQ ID NO: 200344 - DNA, 20 bp, Artificial Sequence
  Description of Artificial Sequence: Synthetic oligonucleotide
  Target: LAMA2; (-) strand; PAM type: YTN; PAM sequence: CTT
caaaaatgagtcaatattct

SEQ ID NO: 200345 - DNA, 20 bp, Artificial Sequence
  Description of Artificial Sequence: Synthetic oligonucleotide
  Target: LAMA2; (-) strand; PAM type: YTN; PAM sequence: TTA
aaaacttcaaaaatgagtca

SEQ ID NO: 200346 - DNA, 20 bp, Artificial Sequence
  Description of Artificial Sequence: Synthetic oligonucleotide
  Target: LAMA2; (-) strand; PAM type: YTN; PAM sequence: CTC
ccatgaaagaaaacaaaaca

SEQ ID NO: 200347 - DNA, 20 bp, Artificial Sequence
  Description of Artificial Sequence: Synthetic oligonucleotide
  Target: LAMA2; (-) strand; PAM type: YTN; PAM sequence: TTG
tatctcccatgaaagaaaac

SEQ ID NO: 200348 - DNA, 20 bp, Artificial Sequence
  Description of Artificial Sequence: Synthetic oligonucleotide
  Target: LAMA2; (-) strand; PAM type: YTN; PAM sequence: TTT
gtatctcccatgaaagaaaa

SEQ ID NO: 200349 - DNA, 20 bp, Artificial Sequence
  Description of Artificial Sequence: Synthetic oligonucleotide
  Target: LAMA2; (-) strand; PAM type: YTN; PAM sequence: TTT
tgtatctcccatgaaagaaa

SEQ ID NO: 200350 - DNA, 20 bp, Artificial Sequence
  Description of Artificial Sequence: Synthetic oligonucleotide
  Target: LAMA2; (-) strand; PAM type: YTN; PAM sequence: TTC
ccagaaattttgtatctccc

SEQ ID NO: 200351 - DNA, 20 bp, Artificial Sequence
  Description of Artificial Sequence: Synthetic oligonucleotide
  Target: LAMA2; (-) strand; PAM type: YTN; PAM sequence: TTT
cccagaaattttgtatctcc

SEQ ID NO: 200352 - DNA, 20 bp, Artificial Sequence
  Description of Artificial Sequence: Synthetic oligonucleotide
  Target: LAMA2; (-) strand; PAM type: YTN; PAM sequence: TTT
tcccagaaattttgtatctc

SEQ ID NO: 200353 - DNA, 20 bp, Artificial Sequence
  Description of Artificial Sequence: Synthetic oligonucleotide
  Target: LAMA2; (-) strand; PAM type: YTN; PAM sequence: TTG
gacagcaaaattttcccaga

SEQ ID NO: 200354 - DNA, 20 bp, Artificial Sequence
  Description of Artificial Sequence: Synthetic oligonucleotide
  Target: LAMA2; (-) strand; PAM type: YTN; PAM sequence: TTA
ttggacagcaaaattttccc

SEQ ID NO: 200355 - DNA, 20 bp, Artificial Sequence
  Description of Artificial Sequence: Synthetic oligonucleotide
  Target: LAMA2; (-) strand; PAM type: YTN; PAM sequence: CTA
aacattattggacagcaaaa

SEQ ID NO: 200356 - DNA, 20 bp, Artificial Sequence
  Description of Artificial Sequence: Synthetic oligonucleotide
  Target: LAMA2; (-) strand; PAM type: YTN; PAM sequence: CTC
agctaaacattattggacag

SEQ ID NO: 200357 - DNA, 20 bp, Artificial Sequence
  Description of Artificial Sequence: Synthetic oligonucleotide
  Target: LAMA2; (-) strand; PAM type: YTN; PAM sequence: TTA
gtgtctcagctaaacattat

SEQ ID NO: 200358 - DNA, 20 bp, Artificial Sequence
  Description of Artificial Sequence: Synthetic oligonucleotide
  Target: LAMA2; (-) strand; PAM type: YTN; PAM sequence: TTT
agtgtctcagctaaacatta

SEQ ID NO: 200359 - DNA, 20 bp, Artificial Sequence
  Description of Artificial Sequence: Synthetic oligonucleotide
  Target: LAMA2; (-) strand; PAM type: YTN; PAM sequence: TTT
tagtgtctcagctaaacatt

SEQ ID NO: 200360 - DNA, 20 bp, Artificial Sequence
  Description of Artificial Sequence: Synthetic oligonucleotide
  Target: LAMA2; (-) strand; PAM type: YTN; PAM sequence: TTA
acaattttagtgtctcagct

SEQ ID NO: 200361 - DNA, 20 bp, Artificial Sequence
  Description of Artificial Sequence: Synthetic oligonucleotide
  Target: LAMA2; (-) strand; PAM type: YTN; PAM sequence: TTT
aacaattttagtgtctcagc

SEQ ID NO: 200362 - DNA, 20 bp, Artificial Sequence
  Description of Artificial Sequence: Synthetic oligonucleotide
  Target: LAMA2; (-) strand; PAM type: YTN; PAM sequence: TTC
gtgacatacagagatttaac

SEQ ID NO: 200363 - DNA, 20 bp, Artificial Sequence
  Description of Artificial Sequence: Synthetic oligonucleotide
  Target: LAMA2; (-) strand; PAM type: YTN; PAM sequence: TTT
cgtgacatacagagatttaa

SEQ ID NO: 200364 - DNA, 20 bp, Artificial Sequence
  Description of Artificial Sequence: Synthetic oligonucleotide
  Target: LAMA2; (-) strand; PAM type: YTN; PAM sequence: CTT
tcgtgacatacagagattta

SEQ ID NO: 200365 - DNA, 20 bp, Artificial Sequence
  Description of Artificial Sequence: Synthetic oligonucleotide
  Target: LAMA2; (-) strand; PAM type: YTN; PAM sequence: TTA
acatgctttcgtgacataca

SEQ ID NO: 200366 - DNA, 20 bp, Artificial Sequence
  Description of Artificial Sequence: Synthetic oligonucleotide
  Target: LAMA2; (-) strand; PAM type: YTN; PAM sequence: TTG
agttaacatgctttcgtgac

SEQ ID NO: 200367 - DNA, 20 bp, Artificial Sequence
  Description of Artificial Sequence: Synthetic oligonucleotide
  Target: LAMA2; (-) strand; PAM type: YTN; PAM sequence: TTT
gagttaacatgctttcgtga

SEQ ID NO: 200368 - DNA, 20 bp, Artificial Sequence
  Description of Artificial Sequence: Synthetic oligonucleotide
  Target: LAMA2; (-) strand; PAM type: YTN; PAM sequence: TTC
atatttgagttaacatgctt

SEQ ID NO: 200369 - DNA, 20 bp, Artificial Sequence
  Description of Artificial Sequence: Synthetic oligonucleotide
  Target: LAMA2; (-) strand; PAM type: YTN; PAM sequence: TTG
ttcatatttgagttaacatg

SEQ ID NO: 200370 - DNA, 20 bp, Artificial Sequence
  Description of Artificial Sequence: Synthetic oligonucleotide
  Target: LAMA2; (-) strand; PAM type: YTN; PAM sequence: CTT
gttcatatttgagttaacat

SEQ ID NO: 200371 - DNA, 20 bp, Artificial Sequence
  Description of Artificial Sequence: Synthetic oligonucleotide
  Target: LAMA2; (-) strand; PAM type: YTN; PAM sequence: TTC
caatgaaatgataccttgtt

SEQ ID NO: 200372 - DNA, 20 bp, Artificial Sequence
  Description of Artificial Sequence: Synthetic oligonucleotide
  Target: LAMA2; (-) strand; PAM type: YTN; PAM sequence: CTT
ccaatgaaatgataccttgt

SEQ ID NO: 200373 - DNA, 20 bp, Artificial Sequence
  Description of Artificial Sequence: Synthetic oligonucleotide
  Target: LAMA2; (-) strand; PAM type: YTN; PAM sequence: TTG
ggagtcttccaatgaaatga

SEQ ID NO: 200374 - DNA, 20 bp, Artificial Sequence
  Description of Artificial Sequence: Synthetic oligonucleotide
  Target: LAMA2; (-) strand; PAM type: YTN; PAM sequence: TTT
gggagtcttccaatgaaatg

SEQ ID NO: 200375 - DNA, 20 bp, Artificial Sequence
  Description of Artificial Sequence: Synthetic oligonucleotide
  Target: LAMA2; (-) strand; PAM type: YTN; PAM sequence: CTA
ccgagaggatatttgggagt

SEQ ID NO: 200376 - DNA, 20 bp, Artificial Sequence
  Description of Artificial Sequence: Synthetic oligonucleotide
  Target: LAMA2; (-) strand; PAM type: YTN; PAM sequence: CTG
tccataaaaatagcctaccg

SEQ ID NO: 200377 - DNA, 20 bp, Artificial Sequence
  Description of Artificial Sequence: Synthetic oligonucleotide
  Target: LAMA2; (-) strand; PAM type: YTN; PAM sequence: TTG
gaaaatacctgtccataaaa

SEQ ID NO: 200378 - DNA, 20 bp, Artificial Sequence
  Description of Artificial Sequence: Synthetic oligonucleotide
  Target: LAMA2; (-) strand; PAM type: YTN; PAM sequence: CTA
gcagacaaagattggaaaat

SEQ ID NO: 200379 - DNA, 20 bp, Artificial Sequence
  Description of Artificial Sequence: Synthetic oligonucleotide
  Target: LAMA2; (-) strand; PAM type: YTN; PAM sequence: CTC
aacaaaaatgctagcagaca

SEQ ID NO: 200380 - DNA, 20 bp, Artificial Sequence
  Description of Artificial Sequence: Synthetic oligonucleotide
  Target: LAMA2; (-) strand; PAM type: YTN; PAM sequence: TTC
tcaacaaaaatgctagcaga

SEQ ID NO: 200381 - DNA, 20 bp, Artificial Sequence
  Description of Artificial Sequence: Synthetic oligonucleotide
  Target: LAMA2; (-) strand; PAM type: YTN; PAM sequence: CTC
cgttctcaacaaaaatgcta

SEQ ID NO: 200382 - DNA, 20 bp, Artificial Sequence
  Description of Artificial Sequence: Synthetic oligonucleotide
  Target: LAMA2; (-) strand; PAM type: YTN; PAM sequence: CTC
atactccgttctcaacaaaa

SEQ ID NO: 200383 - DNA, 20 bp, Artificial Sequence
  Description of Artificial Sequence: Synthetic oligonucleotide
  Target: LAMA2; (-) strand; PAM type: YTN; PAM sequence: TTA
gctcatactccgttctcaac

SEQ ID NO: 200384 - DNA, 20 bp, Artificial Sequence
  Description of Artificial Sequence: Synthetic oligonucleotide
  Target: LAMA2; (-) strand; PAM type: YTN; PAM sequence: CTT
agctcatactccgttctcaa

SEQ ID NO: 200385 - DNA, 20 bp, Artificial Sequence
  Description of Artificial Sequence: Synthetic oligonucleotide
  Target: LAMA2; (-) strand; PAM type: YTN; PAM sequence: CTC
atccttagctcatactccgt

SEQ ID NO: 200386 - DNA, 20 bp, Artificial Sequence
  Description of Artificial Sequence: Synthetic oligonucleotide
  Target: LAMA2; (-) strand; PAM type: YTN; PAM sequence: TTC
tcatccttagctcatactcc

SEQ ID NO: 200387 - DNA, 20 bp, Artificial Sequence
  Description of Artificial Sequence: Synthetic oligonucleotide
  Target: LAMA2; (-) strand; PAM type: YTN; PAM sequence: TTA
ttctcatccttagctcatac

SEQ ID NO: 200388 - DNA, 20 bp, Artificial Sequence
  Description of Artificial Sequence: Synthetic oligonucleotide
  Target: LAMA2; (-) strand; PAM type: YTN; PAM sequence: TTG
tagagtgtgattattctcat

SEQ ID NO: 200389 - DNA, 20 bp, Artificial Sequence
  Description of Artificial Sequence: Synthetic oligonucleotide
  Target: LAMA2; (-) strand; PAM type: YTN; PAM sequence: CTA
catattgtagagtgtgatta

SEQ ID NO: 200390 - DNA, 20 bp, Artificial Sequence
  Description of Artificial Sequence: Synthetic oligonucleotide
  Target: LAMA2; (-) strand; PAM type: YTN; PAM sequence: CTA
aaaatgaaaaagtgaaaatc

SEQ ID NO: 200391 - DNA, 20 bp, Artificial Sequence
  Description of Artificial Sequence: Synthetic oligonucleotide
  Target: LAMA2; (-) strand; PAM type: YTN; PAM sequence: TTC
atactaaaaatgaaaaagtg

SEQ ID NO: 200392 - DNA, 20 bp, Artificial Sequence
  Description of Artificial Sequence: Synthetic oligonucleotide
  Target: LAMA2; (-) strand; PAM type: YTN; PAM sequence: TTA
ccatgcagtgaaggatgagg

SEQ ID NO: 200393 - DNA, 20 bp, Artificial Sequence
  Description of Artificial Sequence: Synthetic oligonucleotide
  Target: LAMA2; (-) strand; PAM type: YTN; PAM sequence: TTA
ataagaaagtgtccaattac

SEQ ID NO: 200394 - DNA, 20 bp, Artificial Sequence
  Description of Artificial Sequence: Synthetic oligonucleotide
  Target: LAMA2; (-) strand; PAM type: YTN; PAM sequence: TTT
aataagaaagtgtccaatta

SEQ ID NO: 200395 - DNA, 20 bp, Artificial Sequence
  Description of Artificial Sequence: Synthetic oligonucleotide
  Target: LAMA2; (-) strand; PAM type: YTN; PAM sequence: CTA
gggaaatttaataagaaagt

SEQ ID NO: 200396 - DNA, 20 bp, Artificial Sequence
  Description of Artificial Sequence: Synthetic oligonucleotide
  Target: LAMA2; (-) strand; PAM type: YTN; PAM sequence: CTC
tagggaaatttaataagaaa

SEQ ID NO: 200397 - DNA, 20 bp, Artificial Sequence
  Description of Artificial Sequence: Synthetic oligonucleotide
  Target: LAMA2; (-) strand; PAM type: YTN; PAM sequence: TTC
tctagggaaatttaataaga

SEQ ID NO: 200398 - DNA, 20 bp, Artificial Sequence
  Description of Artificial Sequence: Synthetic oligonucleotide
  Target: LAMA2; (-) strand; PAM type: YTN; PAM sequence: CTA
atacaattctctagggaaat

SEQ ID NO: 200399 - DNA, 20 bp, Artificial Sequence
  Description of Artificial Sequence: Synthetic oligonucleotide
  Target: LAMA2; (-) strand; PAM type: YTN; PAM sequence: CTA
cagaaccctaatacaattct

SEQ ID NO: 200400 - DNA, 20 bp, Artificial Sequence
  Description of Artificial Sequence: Synthetic oligonucleotide
  Target: LAMA2; (-) strand; PAM type: YTN; PAM sequence: CTC
tacagaaccctaatacaatt

SEQ ID NO: 200401 - DNA, 20 bp, Artificial Sequence
  Description of Artificial Sequence: Synthetic oligonucleotide
  Target: LAMA2; (-) strand; PAM type: YTN; PAM sequence: CTG
tccctctacagaaccctaat

SEQ ID NO: 200402 - DNA, 20 bp, Artificial Sequence
  Description of Artificial Sequence: Synthetic oligonucleotide
  Target: LAMA2; (-) strand; PAM type: YTN; PAM sequence: TTC
tgtccctctacagaacccta

SEQ ID NO: 200403 - DNA, 20 bp, Artificial Sequence
  Description of Artificial Sequence: Synthetic oligonucleotide
  Target: LAMA2; (-) strand; PAM type: YTN; PAM sequence: TTA
gttctgtccctctacagaac

SEQ ID NO: 200404 - DNA, 20 bp, Artificial Sequence
  Description of Artificial Sequence: Synthetic oligonucleotide
  Target: LAMA2; (-) strand; PAM type: YTN; PAM sequence: CTA
atatatatatatatatatat

SEQ ID NO: 200405 - DNA, 20 bp, Artificial Sequence
  Description of Artificial Sequence: Synthetic oligonucleotide
  Target: LAMA2; (-) strand; PAM type: YTN; PAM sequence: TTA
ataaactaatatatatatat

SEQ ID NO: 200406 - DNA, 20 bp, Artificial Sequence
  Description of Artificial Sequence: Synthetic oligonucleotide
  Target: LAMA2; (-) strand; PAM type: YTN; PAM sequence: CTT
aataaactaatatatatata

SEQ ID NO: 200407 - DNA, 20 bp, Artificial Sequence
  Description of Artificial Sequence: Synthetic oligonucleotide
  Target: LAMA2; (-) strand; PAM type: YTN; PAM sequence: TTA
atacttaataaactaatata

SEQ ID NO: 200408 - DNA, 20 bp, Artificial Sequence
  Description of Artificial Sequence: Synthetic oligonucleotide
  Target: LAMA2; (-) strand; PAM type: YTN; PAM sequence: CTC
ccatgatatatacatatata

SEQ ID NO: 200409 - DNA, 20 bp, Artificial Sequence
  Description of Artificial Sequence: Synthetic oligonucleotide
  Target: LAMA2; (-) strand; PAM type: YTN; PAM sequence: TTA
ataaactcccatgatatata

SEQ ID NO: 200410 - DNA, 20 bp, Artificial Sequence
  Description of Artificial Sequence: Synthetic oligonucleotide
  Target: LAMA2; (-) strand; PAM type: YTN; PAM sequence: CTT
aataaactcccatgatatat

SEQ ID NO: 200411 - DNA, 20 bp, Artificial Sequence
  Description of Artificial Sequence: Synthetic oligonucleotide
  Target: LAMA2; (-) strand; PAM type: YTN; PAM sequence: TTA
acacttaataaactcccatg

SEQ ID NO: 200412 - DNA, 20 bp, Artificial Sequence
  Description of Artificial Sequence: Synthetic oligonucleotide
  Target: LAMA2; (-) strand; PAM type: YTN; PAM sequence: TTG
tgatcgagtaagttaacact

SEQ ID NO: 200413 - DNA, 20 bp, Artificial Sequence
  Description of Artificial Sequence: Synthetic oligonucleotide
  Target: LAMA2; (-) strand; PAM type: YTN; PAM sequence: CTT
gtgatcgagtaagttaacac

SEQ ID NO: 200414 - DNA, 20 bp, Artificial Sequence
  Description of Artificial Sequence: Synthetic oligonucleotide
  Target: LAMA2; (-) strand; PAM type: YTN; PAM sequence: TTG
tgggaccttgtgatcgagta

SEQ ID NO: 200415 - DNA, 20 bp, Artificial Sequence
  Description of Artificial Sequence: Synthetic oligonucleotide
  Target: LAMA2; (-) strand; PAM type: YTN; PAM sequence: CTA
ttgtgggaccttgtgatcga

SEQ ID NO: 200416 - DNA, 20 bp, Artificial Sequence
  Description of Artificial Sequence: Synthetic oligonucleotide
  Target: LAMA2; (-) strand; PAM type: YTN; PAM sequence: TTG
cagacagcctattgtgggac

SEQ ID NO: 200417 - DNA, 20 bp, Artificial Sequence
  Description of Artificial Sequence: Synthetic oligonucleotide
  Target: LAMA2; (-) strand; PAM type: YTN; PAM sequence: CTT
gcagacagcctattgtggga

SEQ ID NO: 200418 - DNA, 20 bp, Artificial Sequence
  Description of Artificial Sequence: Synthetic oligonucleotide
  Target: LAMA2; (-) strand; PAM type: YTN; PAM sequence: CTC
agcttgcagacagcctattg

SEQ ID NO: 200419 - DNA, 20 bp, Artificial Sequence
  Description of Artificial Sequence: Synthetic oligonucleotide
  Target: LAMA2; (-) strand; PAM type: YTN; PAM sequence: CTC
ctcagcttgcagacagccta

SEQ ID NO: 200420 - DNA, 20 bp, Artificial Sequence
  Description of Artificial Sequence: Synthetic oligonucleotide
  Target: LAMA2; (-) strand; PAM type: YTN; PAM sequence: TTG
ctcctcagcttgcagacagc

SEQ ID NO: 200421 - DNA, 20 bp, Artificial Sequence
  Description of Artificial Sequence: Synthetic oligonucleotide
  Target: LAMA2; (-) strand; PAM type: YTN; PAM sequence: CTT
gctcctcagcttgcagacag

SEQ ID NO: 200422 - DNA, 20 bp, Artificial Sequence
  Description of Artificial Sequence: Synthetic oligonucleotide
  Target: LAMA2; (-) strand; PAM type: YTN; PAM sequence: CTC
cttgctcctcagcttgcaga

SEQ ID NO: 200423 - DNA, 20 bp, Artificial Sequence
  Description of Artificial Sequence: Synthetic oligonucleotide
  Target: LAMA2; (-) strand; PAM type: YTN; PAM sequence: CTC
tccttgctcctcagcttgca

SEQ ID NO: 200424 - DNA, 20 bp, Artificial Sequence
  Description of Artificial Sequence: Synthetic oligonucleotide
  Target: LAMA2; (-) strand; PAM type: YTN; PAM sequence: CTG
gctctccttgctcctcagct

SEQ ID NO: 200425 - DNA, 20 bp, Artificial Sequence
  Description of Artificial Sequence: Synthetic oligonucleotide
  Target: LAMA2; (-) strand; PAM type: YTN; PAM sequence: TTG
ggacccagactggctctcct

SEQ ID NO: 200426 - DNA, 20 bp, Artificial Sequence
  Description of Artificial Sequence: Synthetic oligonucleotide
  Target: LAMA2; (-) strand; PAM type: YTN; PAM sequence: TTT
gggacccagactggctctcc

SEQ ID NO: 200427 - DNA, 20 bp, Artificial Sequence
  Description of Artificial Sequence: Synthetic oligonucleotide
  Target: LAMA2; (-) strand; PAM type: YTN; PAM sequence: TTT
tgggacccagactggctctc

SEQ ID NO: 200428 - DNA, 20 bp, Artificial Sequence
  Description of Artificial Sequence: Synthetic oligonucleotide
  Target: LAMA2; (-) strand; PAM type: YTN; PAM sequence: TTC
agttttgggacccagactgg

SEQ ID NO: 200429 - DNA, 20 bp, Artificial Sequence
  Description of Artificial Sequence: Synthetic oligonucleotide
  Target: LAMA2; (-) strand; PAM type: YTN; PAM sequence: CTT
cagttttgggacccagactg

SEQ ID NO: 200430 - DNA, 20 bp, Artificial Sequence
  Description of Artificial Sequence: Synthetic oligonucleotide
  Target: LAMA2; (-) strand; PAM type: YTN; PAM sequence: TTC
ttcagttttgggacccagac

SEQ ID NO: 200431 - DNA, 20 bp, Artificial Sequence
  Description of Artificial Sequence: Synthetic oligonucleotide
  Target: LAMA2; (-) strand; PAM type: YTN; PAM sequence: CTC
caagttcttcagttttggga

SEQ ID NO: 200432 - DNA, 20 bp, Artificial Sequence
  Description of Artificial Sequence: Synthetic oligonucleotide
  Target: LAMA2; (-) strand; PAM type: YTN; PAM sequence: CTC
aaacatcagactccaagttc

SEQ ID NO: 200433 - DNA, 20 bp, Artificial Sequence
  Description of Artificial Sequence: Synthetic oligonucleotide
  Target: LAMA2; (-) strand; PAM type: YTN; PAM sequence: CTG
tcctcaaacatcagactcca

SEQ ID NO: 200434 - DNA, 20 bp, Artificial Sequence
  Description of Artificial Sequence: Synthetic oligonucleotide
  Target: LAMA2; (-) strand; PAM type: YTN; PAM sequence: TTC
ctgtcctcaaacatcagact

SEQ ID NO: 200435 - DNA, 20 bp, Artificial Sequence
  Description of Artificial Sequence: Synthetic oligonucleotide
  Target: LAMA2; (-) strand; PAM type: YTN; PAM sequence: CTT
cctgtcctcaaacatcagac

SEQ ID NO: 200436 - DNA, 20 bp, Artificial Sequence
  Description of Artificial Sequence: Synthetic oligonucleotide
  Target: LAMA2; (-) strand; PAM type: YTN; PAM sequence: CTG
gatgcttcctgtcctcaaac

SEQ ID NO: 200437 - DNA, 20 bp, Artificial Sequence
  Description of Artificial Sequence: Synthetic oligonucleotide
  Target: LAMA2; (-) strand; PAM type: YTN; PAM sequence: TTG
ctggatgcttcctgtcctca

SEQ ID NO: 200438 - DNA, 20 bp, Artificial Sequence
  Description of Artificial Sequence: Synthetic oligonucleotide
  Target: LAMA2; (-) strand; PAM type: YTN; PAM sequence: CTT
gctggatgcttcctgtcctc

SEQ ID NO: 200439 - DNA, 20 bp, Artificial Sequence
  Description of Artificial Sequence: Synthetic oligonucleotide
  Target: LAMA2; (-) strand; PAM type: YTN; PAM sequence: CTC
ccttgctggatgcttcctgt

SEQ ID NO: 200440 - DNA, 20 bp, Artificial Sequence
  Description of Artificial Sequence: Synthetic oligonucleotide
  Target: LAMA2; (-) strand; PAM type: YTN; PAM sequence: TTC
tcccttgctggatgcttcct

SEQ ID NO: 200441 - DNA, 20 bp, Artificial Sequence
  Description of Artificial Sequence: Synthetic oligonucleotide
  Target: LAMA2; (-) strand; PAM type: YTN; PAM sequence: TTT
ctcccttgctggatgcttcc

SEQ ID NO: 200442 - DNA, 20 bp, Artificial Sequence
  Description of Artificial Sequence: Synthetic oligonucleotide
  Target: LAMA2; (-) strand; PAM type: YTN; PAM sequence: CTT
tctcccttgctggatgcttc

SEQ ID NO: 200443 - DNA, 20 bp, Artificial Sequence
  Description of Artificial Sequence: Synthetic oligonucleotide
  Target: LAMA2; (-) strand; PAM type: YTN; PAM sequence: CTA
catctttctcccttgctgga

SEQ ID NO: 200444 - DNA, 20 bp, Artificial Sequence
  Description of Artificial Sequence: Synthetic oligonucleotide
  Target: LAMA2; (-) strand; PAM type: YTN; PAM sequence: CTC
ccagtctacatctttctccc

SEQ ID NO: 200445 - DNA, 20 bp, Artificial Sequence
  Description of Artificial Sequence: Synthetic oligonucleotide
  Target: LAMA2; (-) strand; PAM type: YTN; PAM sequence: CTG
gcatagcctcccagtctaca

SEQ ID NO: 200446 - DNA, 20 bp, Artificial Sequence
  Description of Artificial Sequence: Synthetic oligonucleotide
  Target: LAMA2; (-) strand; PAM type: YTN; PAM sequence: CTA
atcagccgccagcaaatata

SEQ ID NO: 200447 - DNA, 20 bp, Artificial Sequence
  Description of Artificial Sequence: Synthetic oligonucleotide
  Target: LAMA2; (-) strand; PAM type: YTN; PAM sequence: CTG
gtgggcacaatctaatcagc

SEQ ID NO: 200448 - DNA, 20 bp, Artificial Sequence
  Description of Artificial Sequence: Synthetic oligonucleotide
  Target: LAMA2; (-) strand; PAM type: YTN; PAM sequence: TTA
atctggtgggcacaatctaa

SEQ ID NO: 200449 - DNA, 20 bp, Artificial Sequence
  Description of Artificial Sequence: Synthetic oligonucleotide
  Target: LAMA2; (-) strand; PAM type: YTN; PAM sequence: CTT
aatctggtgggcacaatcta

SEQ ID NO: 200450 - DNA, 20 bp, Artificial Sequence
  Description of Artificial Sequence: Synthetic oligonucleotide
  Target: LAMA2; (-) strand; PAM type: YTN; PAM sequence: CTG
ggaaaggcagacccaccctt

SEQ ID NO: 200451 - DNA, 20 bp, Artificial Sequence
  Description of Artificial Sequence: Synthetic oligonucleotide
  Target: LAMA2; (-) strand; PAM type: YTN; PAM sequence: TTG
agtcagtgggctgggaaagg

SEQ ID NO: 200452 - DNA, 20 bp, Artificial Sequence
  Description of Artificial Sequence: Synthetic oligonucleotide
  Target: LAMA2; (-) strand; PAM type: YTN; PAM sequence: TTT
gagtcagtgggctgggaaag

SEQ ID NO: 200453 - DNA, 20 bp, Artificial Sequence
  Description of Artificial Sequence: Synthetic oligonucleotide
  Target: LAMA2; (-) strand; PAM type: YTN; PAM sequence: TTA
acatttgagtcagtgggctg

SEQ ID NO: 200454 - DNA, 20 bp, Artificial Sequence
  Description of Artificial Sequence: Synthetic oligonucleotide
  Target: LAMA2; (-) strand; PAM type: YTN; PAM sequence: TTG
ccaaaggaaattaacatttg

SEQ ID NO: 200455 - DNA, 20 bp, Artificial Sequence
  Description of Artificial Sequence: Synthetic oligonucleotide
  Target: LAMA2; (-) strand; PAM type: YTN; PAM sequence: CTG
tgagggtgttgccaaaggaa

SEQ ID NO: 200456 - DNA, 20 bp, Artificial Sequence
  Description of Artificial Sequence: Synthetic oligonucleotide
  Target: LAMA2; (-) strand; PAM type: YTN; PAM sequence: TTG
atcgtgggtgtatctgtgag

SEQ ID NO: 200457 - DNA, 20 bp, Artificial Sequence
  Description of Artificial Sequence: Synthetic oligonucleotide
  Target: LAMA2; (-) strand; PAM type: YTN; PAM sequence: TTG
aagaatacaaagtattgatc

SEQ ID NO: 200458 - DNA, 20 bp, Artificial Sequence
  Description of Artificial Sequence: Synthetic oligonucleotide
  Target: LAMA2; (-) strand; PAM type: YTN; PAM sequence: TTG
gattgaagaatacaaagtat

SEQ ID NO: 200459 - DNA, 20 bp, Artificial Sequence
  Description of Artificial Sequence: Synthetic oligonucleotide
  Target: LAMA2; (-) strand; PAM type: YTN; PAM sequence: TTG
attggattgaagaatacaaa

SEQ ID NO: 200460 - DNA, 20 bp, Artificial Sequence
  Description of Artificial Sequence: Synthetic oligonucleotide
  Target: LAMA2; (-) strand; PAM type: YTN; PAM sequence: CTT
gattggattgaagaatacaa

SEQ ID NO: 200461 - DNA, 20 bp, Artificial Sequence
  Description of Artificial Sequence: Synthetic oligonucleotide
  Target: LAMA2; (-) strand; PAM type: YTN; PAM sequence: TTA
atacaagtgtcaacttgatt

SEQ ID NO: 200462 - DNA, 20 bp, Artificial Sequence
  Description of Artificial Sequence: Synthetic oligonucleotide
  Target: LAMA2; (-) strand; PAM type: YTN; PAM sequence: TTG
tgatggttaatacaagtgtc

SEQ ID NO: 200463 - DNA, 20 bp, Artificial Sequence
  Description of Artificial Sequence: Synthetic oligonucleotide
  Target: LAMA2; (-) strand; PAM type: YTN; PAM sequence: CTT
gtgatggttaatacaagtgt

SEQ ID NO: 200464 - DNA, 20 bp, Artificial Sequence
  Description of Artificial Sequence: Synthetic oligonucleotide
  Target: LAMA2; (-) strand; PAM type: YTN; PAM sequence: TTC
ttgtgatggttaatacaagt

SEQ ID NO: 200465 - DNA, 20 bp, Artificial Sequence
  Description of Artificial Sequence: Synthetic oligonucleotide
  Target: LAMA2; (-) strand; PAM type: YTN; PAM sequence: TTA
ttcttgtgatggttaataca

SEQ ID NO: 200466 - DNA, 20 bp, Artificial Sequence
  Description of Artificial Sequence: Synthetic oligonucleotide
  Target: LAMA2; (-) strand; PAM type: YTN; PAM sequence: TTT
attcttgtgatggttaatac

SEQ ID NO: 200467 - DNA, 20 bp, Artificial Sequence
  Description of Artificial Sequence: Synthetic oligonucleotide
  Target: LAMA2; (-) strand; PAM type: YTN; PAM sequence: CTG
ggaatttattcttgtgatgg

SEQ ID NO: 200468 - DNA, 20 bp, Artificial Sequence
  Description of Artificial Sequence: Synthetic oligonucleotide
  Target: LAMA2; (-) strand; PAM type: YTN; PAM sequence: CTG
gcaagagaccactgggaatt

SEQ ID NO: 200469 - DNA, 20 bp, Artificial Sequence
  Description of Artificial Sequence: Synthetic oligonucleotide
  Target: LAMA2; (-) strand; PAM type: YTN; PAM sequence: CTG
acctggcaagagaccactgg

SEQ ID NO: 200470 - DNA, 20 bp, Artificial Sequence
  Description of Artificial Sequence: Synthetic oligonucleotide
  Target: LAMA2; (-) strand; PAM type: YTN; PAM sequence: TTG
ctgacctggcaagagaccac

SEQ ID NO: 200471 - DNA, 20 bp, Artificial Sequence
  Description of Artificial Sequence: Synthetic oligonucleotide
  Target: LAMA2; (-) strand; PAM type: YTN; PAM sequence: CTA
tcccattgctgacctggcaa

SEQ ID NO: 200472 - DNA, 20 bp, Artificial Sequence
  Description of Artificial Sequence: Synthetic oligonucleotide
  Target: LAMA2; (-) strand; PAM type: YTN; PAM sequence: TTA
ctatcccattgctgacctgg

SEQ ID NO: 200473 - DNA, 20 bp, Artificial Sequence
  Description of Artificial Sequence: Synthetic oligonucleotide
  Target: LAMA2; (-) strand; PAM type: YTN; PAM sequence: CTC
gttactatcccattgctgac

SEQ ID NO: 200474 - DNA, 20 bp, Artificial Sequence
  Description of Artificial Sequence: Synthetic oligonucleotide
  Target: LAMA2; (-) strand; PAM type: YTN; PAM sequence: CTA
taaacctcgttactatccca

SEQ ID NO: 200475 - DNA, 20 bp, Artificial Sequence
  Description of Artificial Sequence: Synthetic oligonucleotide
  Target: LAMA2; (-) strand; PAM type: YTN; PAM sequence: CTG
ccaaccctataaacctcgtt

SEQ ID NO: 200476 - DNA, 20 bp, Artificial Sequence
  Description of Artificial Sequence: Synthetic oligonucleotide
  Target: LAMA2; (-) strand; PAM type: YTN; PAM sequence: TTA
ggtatccagatccccctgcc

SEQ ID NO: 200477 - DNA, 20 bp, Artificial Sequence
  Description of Artificial Sequence: Synthetic oligonucleotide
  Target: LAMA2; (-) strand; PAM type: YTN; PAM sequence: TTA
gttaggtatccagatccccc

SEQ ID NO: 200478 - DNA, 20 bp, Artificial Sequence
  Description of Artificial Sequence: Synthetic oligonucleotide
  Target: LAMA2; (-) strand; PAM type: YTN; PAM sequence: CTT
agttaggtatccagatcccc

SEQ ID NO: 200479 - DNA, 20 bp, Artificial Sequence
  Description of Artificial Sequence: Synthetic oligonucleotide
  Target: LAMA2; (-) strand; PAM type: YTN; PAM sequence: CTG
caaaatcttagttaggtatc

SEQ ID NO: 200480 - DNA, 20 bp, Artificial Sequence
  Description of Artificial Sequence: Synthetic oligonucleotide
  Target: LAMA2; (-) strand; PAM type: YTN; PAM sequence: TTG
aggctgcaaaatcttagtta

SEQ ID NO: 200481 - DNA, 20 bp, Artificial Sequence
  Description of Artificial Sequence: Synthetic oligonucleotide
  Target: LAMA2; (-) strand; PAM type: YTN; PAM sequence: CTA
gagtaagtgttgaggctgca

SEQ ID NO: 200482 - DNA, 20 bp, Artificial Sequence
  Description of Artificial Sequence: Synthetic oligonucleotide
  Target: LAMA2; (-) strand; PAM type: YTN; PAM sequence: TTA
caaggctagagtaagtgttg

SEQ ID NO: 200483 - DNA, 20 bp, Artificial Sequence
  Description of Artificial Sequence: Synthetic oligonucleotide
  Target: LAMA2; (-) strand; PAM type: YTN; PAM sequence: TTT
acaaggctagagtaagtgtt

SEQ ID NO: 200484 - DNA, 20 bp, Artificial Sequence
  Description of Artificial Sequence: Synthetic oligonucleotide
  Target: LAMA2; (-) strand; PAM type: YTN; PAM sequence: TTA
agtaccaaataatttacaag

SEQ ID NO: 200485 - DNA, 20 bp, Artificial Sequence
  Description of Artificial Sequence: Synthetic oligonucleotide
  Target: LAMA2; (-) strand; PAM type: YTN; PAM sequence: TTT
aagtaccaaataatttacaa

SEQ ID NO: 200486 - DNA, 20 bp, Artificial Sequence
  Description of Artificial Sequence: Synthetic oligonucleotide
  Target: LAMA2; (-) strand; PAM type: YTN; PAM sequence: TTT
taagtaccaaataatttaca

SEQ ID NO: 200487 - DNA, 20 bp, Artificial Sequence
  Description of Artificial Sequence: Synthetic oligonucleotide
  Target: LAMA2; (-) strand; PAM type: YTN; PAM sequence: CTG
aaattttaagtaccaaataa

SEQ ID NO: 200488 - DNA, 20 bp, Artificial Sequence
  Description of Artificial Sequence: Synthetic oligonucleotide
  Target: LAMA2; (-) strand; PAM type: YTN; PAM sequence: CTC
tgaaattttaagtaccaaat

SEQ ID NO: 200489 - DNA, 20 bp, Artificial Sequence
  Description of Artificial Sequence: Synthetic oligonucleotide
  Target: LAMA2; (-) strand; PAM type: YTN; PAM sequence: CTG
atccccagaatgtctctgaa

SEQ ID NO: 200490 - DNA, 20 bp, Artificial Sequence
  Description of Artificial Sequence: Synthetic oligonucleotide
  Target: LAMA2; (-) strand; PAM type: YTN; PAM sequence: CTG
ctgatccccagaatgtctct

SEQ ID NO: 200491 - DNA, 20 bp, Artificial Sequence
  Description of Artificial Sequence: Synthetic oligonucleotide
  Target: LAMA2; (-) strand; PAM type: YTN; PAM sequence: TTG
agctgctgatccccagaatg

SEQ ID NO: 200492 - DNA, 20 bp, Artificial Sequence
  Description of Artificial Sequence: Synthetic oligonucleotide
  Target: LAMA2; (-) strand; PAM type: YTN; PAM sequence: TTT
gagctgctgatccccagaat

SEQ ID NO: 200493 - DNA, 20 bp, Artificial Sequence
  Description of Artificial Sequence: Synthetic oligonucleotide
  Target: LAMA2; (-) strand; PAM type: YTN; PAM sequence: TTA
tttgagctgctgatccccag

SEQ ID NO: 200494 - DNA, 20 bp, Artificial Sequence
  Description of Artificial Sequence: Synthetic oligonucleotide
  Target: LAMA2; (-) strand; PAM type: YTN; PAM sequence: CTG
ccaaggggaggagcaaacca

SEQ ID NO: 200495 - DNA, 20 bp, Artificial Sequence
  Description of Artificial Sequence: Synthetic oligonucleotide
  Target: LAMA2; (-) strand; PAM type: YTN; PAM sequence: CTG
gggataggatgtgtctgcca

SEQ ID NO: 200496 - DNA, 20 bp, Artificial Sequence
  Description of Artificial Sequence: Synthetic oligonucleotide
  Target: LAMA2; (-) strand; PAM type: YTN; PAM sequence: CTA
gcccagagcagaggaagctg

SEQ ID NO: 200497 - DNA, 20 bp, Artificial Sequence
  Description of Artificial Sequence: Synthetic oligonucleotide
  Target: LAMA2; (-) strand; PAM type: YTN; PAM sequence: TTA
atataggatggaaggaaagt

SEQ ID NO: 200498 - DNA, 20 bp, Artificial Sequence
  Description of Artificial Sequence: Synthetic oligonucleotide
  Target: LAMA2; (-) strand; PAM type: YTN; PAM sequence: TTA
agtcataaatatgtgtatgt

SEQ ID NO: 200499 - DNA, 20 bp, Artificial Sequence
  Description of Artificial Sequence: Synthetic oligonucleotide
  Target: LAMA2; (-) strand; PAM type: YTN; PAM sequence: CTA
aaataagagttaagtcataa

SEQ ID NO: 200500 - DNA, 20 bp, Artificial Sequence
  Description of Artificial Sequence: Synthetic oligonucleotide
  Target: LAMA2; (-) strand; PAM type: YTN; PAM sequence: TTC
taaaataagagttaagtcat

SEQ ID NO: 200501 - DNA, 20 bp, Artificial Sequence
  Description of Artificial Sequence: Synthetic oligonucleotide
  Target: LAMA2; (-) strand; PAM type: YTN; PAM sequence: CTT
ctaaaataagagttaagtca

SEQ ID NO: 200502 - DNA, 20 bp, Artificial Sequence
  Description of Artificial Sequence: Synthetic oligonucleotide
  Target: LAMA2; (-) strand; PAM type: YTN; PAM sequence: CTA
caaatcttctaaaataagag

SEQ ID NO: 200503 - DNA, 20 bp, Artificial Sequence
  Description of Artificial Sequence: Synthetic oligonucleotide
  Target: LAMA2; (-) strand; PAM type: YTN; PAM sequence: TTA
taacctacaaatcttctaaa

SEQ ID NO: 200504 - DNA, 20 bp, Artificial Sequence
  Description of Artificial Sequence: Synthetic oligonucleotide
  Target: LAMA2; (-) strand; PAM type: YTN; PAM sequence: CTA
ttataacctacaaatcttct

SEQ ID NO: 200505 - DNA, 20 bp, Artificial Sequence
  Description of Artificial Sequence: Synthetic oligonucleotide
  Target: LAMA2; (-) strand; PAM type: YTN; PAM sequence: TTA
aatgctattataacctacaa

SEQ ID NO: 200506 - DNA, 20 bp, Artificial Sequence
  Description of Artificial Sequence: Synthetic oligonucleotide
  Target: LAMA2; (-) strand; PAM type: YTN; PAM sequence: CTT
aaatgctattataacctaca

SEQ ID NO: 200507 - DNA, 20 bp, Artificial Sequence
  Description of Artificial Sequence: Synthetic oligonucleotide
  Target: LAMA2; (-) strand; PAM type: YTN; PAM sequence: CTG
accatgaacacacacactta

SEQ ID NO: 200508 - DNA, 20 bp, Artificial Sequence
  Description of Artificial Sequence: Synthetic oligonucleotide
  Target: LAMA2; (-) strand; PAM type: YTN; PAM sequence: TTA
aacctgaccatgaacacaca

SEQ ID NO: 200509 - DNA, 20 bp, Artificial Sequence
  Description of Artificial Sequence: Synthetic oligonucleotide
  Target: LAMA2; (-) strand; PAM type: YTN; PAM sequence: TTG
gttaaacctgaccatgaaca

SEQ ID NO: 200510 - DNA, 20 bp, Artificial Sequence
  Description of Artificial Sequence: Synthetic oligonucleotide
  Target: LAMA2; (-) strand; PAM type: YTN; PAM sequence: TTT
ggttaaacctgaccatgaac

SEQ ID NO: 200511 - DNA, 20 bp, Artificial Sequence
  Description of Artificial Sequence: Synthetic oligonucleotide
  Target: LAMA2; (-) strand; PAM type: YTN; PAM sequence: CTT
tggttaaacctgaccatgaa

SEQ ID NO: 200512 - DNA, 20 bp, Artificial Sequence
  Description of Artificial Sequence: Synthetic oligonucleotide
  Target: LAMA2; (-) strand; PAM type: YTN; PAM sequence: CTA
ggactttggttaaacctgac

SEQ ID NO: 200513 - DNA, 20 bp, Artificial Sequence
  Description of Artificial Sequence: Synthetic oligonucleotide
  Target: LAMA2; (-) strand; PAM type: YTN; PAM sequence: CTC
aggcctaggactttggttaa

SEQ ID NO: 200514 - DNA, 20 bp, Artificial Sequence
  Description of Artificial Sequence: Synthetic oligonucleotide
  Target: LAMA2; (-) strand; PAM type: YTN; PAM sequence: TTG
aaatactcaggcctaggact

SEQ ID NO: 200515 - DNA, 20 bp, Artificial Sequence
  Description of Artificial Sequence: Synthetic oligonucleotide
  Target: LAMA2; (-) strand; PAM type: YTN; PAM sequence: TTC
acattgaaatactcaggcct

SEQ ID NO: 200516 - DNA, 20 bp, Artificial Sequence
  Description of Artificial Sequence: Synthetic oligonucleotide
  Target: LAMA2; (-) strand; PAM type: YTN; PAM sequence: CTT
cacattgaaatactcaggcc

SEQ ID NO: 200517 - DNA, 20 bp, Artificial Sequence
  Description of Artificial Sequence: Synthetic oligonucleotide
  Target: LAMA2; (-) strand; PAM type: YTN; PAM sequence: TTC
ttcacattgaaatactcagg

SEQ ID NO: 200518 - DNA, 20 bp, Artificial Sequence
  Description of Artificial Sequence: Synthetic oligonucleotide
  Target: LAMA2; (-) strand; PAM type: YTN; PAM sequence: TTG
ttcttcacattgaaatactc

SEQ ID NO: 200519 - DNA, 20 bp, Artificial Sequence
  Description of Artificial Sequence: Synthetic oligonucleotide
  Target: LAMA2; (-) strand; PAM type: YTN; PAM sequence: TTT
gttcttcacattgaaatact

SEQ ID NO: 200520 - DNA, 20 bp, Artificial Sequence
  Description of Artificial Sequence: Synthetic oligonucleotide
  Target: LAMA2; (-) strand; PAM type: YTN; PAM sequence: CTG
tttgttcttcacattgaaat

SEQ ID NO: 200521 - DNA, 20 bp, Artificial Sequence
  Description of Artificial Sequence: Synthetic oligonucleotide
  Target: LAMA2; (-) strand; PAM type: YTN; PAM sequence: TTC
tgtttgttcttcacattgaa

SEQ ID NO: 200522 - DNA, 20 bp, Artificial Sequence
  Description of Artificial Sequence: Synthetic oligonucleotide
  Target: LAMA2; (-) strand; PAM type: YTN; PAM sequence: CTA
tcaaaaatagaggtatgaaa

SEQ ID NO: 200523 - DNA, 20 bp, Artificial Sequence
  Description of Artificial Sequence: Synthetic oligonucleotide
  Target: LAMA2; (-) strand; PAM type: YTN; PAM sequence: CTC
agaatcacagactatcaaaa

SEQ ID NO: 200524 - DNA, 20 bp, Artificial Sequence
  Description of Artificial Sequence: Synthetic oligonucleotide
  Target: LAMA2; (-) strand; PAM type: YTN; PAM sequence: CTG
aaagcatagatagggctcag

SEQ ID NO: 200525 - DNA, 20 bp, Artificial Sequence
  Description of Artificial Sequence: Synthetic oligonucleotide
  Target: LAMA2; (-) strand; PAM type: YTN; PAM sequence: TTG
actgaaagcatagatagggc

SEQ ID NO: 200526 - DNA, 20 bp, Artificial Sequence
  Description of Artificial Sequence: Synthetic oligonucleotide
  Target: LAMA2; (-) strand; PAM type: YTN; PAM sequence: TTT
gactgaaagcatagataggg

SEQ ID NO: 200527 - DNA, 20 bp, Artificial Sequence
  Description of Artificial Sequence: Synthetic oligonucleotide
  Target: LAMA2; (-) strand; PAM type: YTN; PAM sequence: TTG
gtaatttgactgaaagcata

SEQ ID NO: 200528 - DNA, 20 bp, Artificial Sequence
  Description of Artificial Sequence: Synthetic oligonucleotide
  Target: LAMA2; (-) strand; PAM type: YTN; PAM sequence: TTC
ataccattggtaatttgact

SEQ ID NO: 200529 - DNA, 20 bp, Artificial Sequence
  Description of Artificial Sequence: Synthetic oligonucleotide
  Target: LAMA2; (-) strand; PAM type: YTN; PAM sequence: TTT
cataccattggtaatttgac

SEQ ID NO: 200530 - DNA, 20 bp, Artificial Sequence
  Description of Artificial Sequence: Synthetic oligonucleotide
  Target: LAMA2; (-) strand; PAM type: YTN; PAM sequence: TTA
aagagtttcataccattggt

SEQ ID NO: 200531 - DNA, 20 bp, Artificial Sequence
  Description of Artificial Sequence: Synthetic oligonucleotide
  Target: LAMA2; (-) strand; PAM type: YTN; PAM sequence: CTA
aacgtgagacacacaaaatt

SEQ ID NO: 200532 - DNA, 20 bp, Artificial Sequence
  Description of Artificial Sequence: Synthetic oligonucleotide
  Target: LAMA2; (-) strand; PAM type: YTN; PAM sequence: CTC
taaacgtgagacacacaaaa

SEQ ID NO: 200533 - DNA, 20 bp, Artificial Sequence
  Description of Artificial Sequence: Synthetic oligonucleotide
  Target: LAMA2; (-) strand; PAM type: YTN; PAM sequence: CTA
ccctctaaacgtgagacaca

SEQ ID NO: 200534 - DNA, 20 bp, Artificial Sequence
  Description of Artificial Sequence: Synthetic oligonucleotide
  Target: LAMA2; (-) strand; PAM type: YTN; PAM sequence: TTA
agctaccctctaaacgtgag

SEQ ID NO: 200535 - DNA, 20 bp, Artificial Sequence
  Description of Artificial Sequence: Synthetic oligonucleotide
  Target: LAMA2; (-) strand; PAM type: YTN; PAM sequence: CTT
aagctaccctctaaacgtga

SEQ ID NO: 200536 - DNA, 20 bp, Artificial Sequence
  Description of Artificial Sequence: Synthetic oligonucleotide
  Target: LAMA2; (-) strand; PAM type: YTN; PAM sequence: CTC
ttaagctaccctctaaacgt

SEQ ID NO: 200537 - DNA, 20 bp, Artificial Sequence
  Description of Artificial Sequence: Synthetic oligonucleotide
  Target: LAMA2; (-) strand; PAM type: YTN; PAM sequence: TTA
aagaacctcttaagctaccc

SEQ ID NO: 200538 - DNA, 20 bp, Artificial Sequence
  Description of Artificial Sequence: Synthetic oligonucleotide
  Target: LAMA2; (-) strand; PAM type: YTN; PAM sequence: CTC
acaatagtcatgcagttaaa

SEQ ID NO: 200539 - DNA, 20 bp, Artificial Sequence
  Description of Artificial Sequence: Synthetic oligonucleotide
  Target: LAMA2; (-) strand; PAM type: YTN; PAM sequence: CTC
ctcacaatagtcatgcagtt

SEQ ID NO: 200540 - DNA, 20 bp, Artificial Sequence
  Description of Artificial Sequence: Synthetic oligonucleotide
  Target: LAMA2; (-) strand; PAM type: YTN; PAM sequence: CTC
ataagtatcctcctcacaat

SEQ ID NO: 200541 - DNA, 20 bp, Artificial Sequence
  Description of Artificial Sequence: Synthetic oligonucleotide
  Target: LAMA2; (-) strand; PAM type: YTN; PAM sequence: TTG
tccccatggaaatgaagaac

SEQ ID NO: 200542 - DNA, 20 bp, Artificial Sequence
  Description of Artificial Sequence: Synthetic oligonucleotide
  Target: LAMA2; (-) strand; PAM type: YTN; PAM sequence: CTT
gtccccatggaaatgaagaa

SEQ ID NO: 200543 - DNA, 20 bp, Artificial Sequence
  Description of Artificial Sequence: Synthetic oligonucleotide
  Target: LAMA2; (-) strand; PAM type: YTN; PAM sequence: TTG
tccttgtccccatggaaatg

SEQ ID NO: 200544 - DNA, 20 bp, Artificial Sequence
  Description of Artificial Sequence: Synthetic oligonucleotide
  Target: LAMA2; (-) strand; PAM type: YTN; PAM sequence: TTC
attgtccttgtccccatgga

SEQ ID NO: 200545 - DNA, 20 bp, Artificial Sequence
  Description of Artificial Sequence: Synthetic oligonucleotide
  Target: LAMA2; (-) strand; PAM type: YTN; PAM sequence: TTT
cattgtccttgtccccatgg

SEQ ID NO: 200546 - DNA, 20 bp, Artificial Sequence
  Description of Artificial Sequence: Synthetic oligonucleotide
  Target: LAMA2; (-) strand; PAM type: YTN; PAM sequence: TTT
tcattgtccttgtccccatg

SEQ ID NO: 200547 - DNA, 20 bp, Artificial Sequence
  Description of Artificial Sequence: Synthetic oligonucleotide
  Target: LAMA2; (-) strand; PAM type: YTN; PAM sequence: CTG
tattttcattgtccttgtcc

SEQ ID NO: 200548 - DNA, 20 bp, Artificial Sequence
  Description of Artificial Sequence: Synthetic oligonucleotide
  Target: LAMA2; (-) strand; PAM type: YTN; PAM sequence: TTA
tactgtattttcattgtcct

SEQ ID NO: 200549 - DNA, 20 bp, Artificial Sequence
  Description of Artificial Sequence: Synthetic oligonucleotide
  Target: LAMA2; (-) strand; PAM type: YTN; PAM sequence: CTG
aatgtattatactgtatttt

SEQ ID NO: 200550 - DNA, 20 bp, Artificial Sequence
  Description of Artificial Sequence: Synthetic oligonucleotide
  Target: LAMA2; (-) strand; PAM type: YTN; PAM sequence: CTC
tgaatgtattatactgtatt

SEQ ID NO: 200551 - DNA, 20 bp, Artificial Sequence
  Description of Artificial Sequence: Synthetic oligonucleotide
  Target: LAMA2; (-) strand; PAM type: YTN; PAM sequence: CTA
ataacactctgaatgtatta

SEQ ID NO: 200552 - DNA, 20 bp, Artificial Sequence
  Description of Artificial Sequence: Synthetic oligonucleotide
  Target: LAMA2; (-) strand; PAM type: YTN; PAM sequence: TTC
taataacactctgaatgtat

SEQ ID NO: 200553 - DNA, 20 bp, Artificial Sequence
  Description of Artificial Sequence: Synthetic oligonucleotide
  Target: LAMA2; (-) strand; PAM type: YTN; PAM sequence: CTT
ctaataacactctgaatgta

SEQ ID NO: 200554 - DNA, 20 bp, Artificial Sequence
  Description of Artificial Sequence: Synthetic oligonucleotide
  Target: LAMA2; (-) strand; PAM type: YTN; PAM sequence: CTA
acttctaataacactctgaa

SEQ ID NO: 200555 - DNA, 20 bp, Artificial Sequence
  Description of Artificial Sequence: Synthetic oligonucleotide
  Target: LAMA2; (-) strand; PAM type: YTN; PAM sequence: CTA
cctaacttctaataacactc

SEQ ID NO: 200556 - DNA, 20 bp, Artificial Sequence
  Description of Artificial Sequence: Synthetic oligonucleotide
  Target: LAMA2; (-) strand; PAM type: YTN; PAM sequence: TTA
aaaggtactacctaacttct

SEQ ID NO: 200557 - DNA, 20 bp, Artificial Sequence
  Description of Artificial Sequence: Synthetic oligonucleotide
  Target: LAMA2; (-) strand; PAM type: YTN; PAM sequence: TTA
acaattaaaaggtactacct

SEQ ID NO: 200558 - DNA, 20 bp, Artificial Sequence
  Description of Artificial Sequence: Synthetic oligonucleotide
  Target: LAMA2; (-) strand; PAM type: YTN; PAM sequence: TTT
aacaattaaaaggtactacc

SEQ ID NO: 200559 - DNA, 20 bp, Artificial Sequence
  Description of Artificial Sequence: Synthetic oligonucleotide
  Target: LAMA2; (-) strand; PAM type: YTN; PAM sequence: TTG
tttaacaattaaaaggtact

SEQ ID NO: 200560 - DNA, 20 bp, Artificial Sequence
  Description of Artificial Sequence: Synthetic oligonucleotide
  Target: LAMA2; (-) strand; PAM type: YTN; PAM sequence: TTA
ttgtttaacaattaaaaggt

SEQ ID NO: 200561 - DNA, 20 bp, Artificial Sequence
  Description of Artificial Sequence: Synthetic oligonucleotide
  Target: LAMA2; (-) strand; PAM type: YTN; PAM sequence: TTT
attgtttaacaattaaaagg

SEQ ID NO: 200562 - DNA, 20 bp, Artificial Sequence
  Description of Artificial Sequence: Synthetic oligonucleotide
  Target: LAMA2; (-) strand; PAM type: YTN; PAM sequence: CTT
tattgtttaacaattaaaag

SEQ ID NO: 200563 - DNA, 20 bp, Artificial Sequence
  Description of Artificial Sequence: Synthetic oligonucleotide
  Target: LAMA2; (-) strand; PAM type: YTN; PAM sequence: TTA
ctttattgtttaacaattaa

SEQ ID NO: 200564 - DNA, 20 bp, Artificial Sequence
  Description of Artificial Sequence: Synthetic oligonucleotide
  Target: LAMA2; (-) strand; PAM type: YTN; PAM sequence: TTA
ttactttattgtttaacaat

SEQ ID NO: 200565 - DNA, 20 bp, Artificial Sequence
  Description of Artificial Sequence: Synthetic oligonucleotide
  Target: LAMA2; (-) strand; PAM type: YTN; PAM sequence: CTA
atgagcaatgttattacttt

SEQ ID NO: 200566 - DNA, 20 bp, Artificial Sequence
  Description of Artificial Sequence: Synthetic oligonucleotide
  Target: LAMA2; (-) strand; PAM type: YTN; PAM sequence: TTC
ataagcacatgcctaatgag

SEQ ID NO: 200567 - DNA, 20 bp, Artificial Sequence
  Description of Artificial Sequence: Synthetic oligonucleotide
  Target: LAMA2; (-) strand; PAM type: YTN; PAM sequence: CTT
cataagcacatgcctaatga

SEQ ID NO: 200568 - DNA, 20 bp, Artificial Sequence
  Description of Artificial Sequence: Synthetic oligonucleotide
  Target: LAMA2; (-) strand; PAM type: YTN; PAM sequence: TTG
tcttcataagcacatgccta

SEQ ID NO: 200569 - DNA, 20 bp, Artificial Sequence
  Description of Artificial Sequence: Synthetic oligonucleotide
  Target: LAMA2; (-) strand; PAM type: YTN; PAM sequence: TTT
gtcttcataagcacatgcct

SEQ ID NO: 200570 - DNA, 20 bp, Artificial Sequence
  Description of Artificial Sequence: Synthetic oligonucleotide
  Target: LAMA2; (-) strand; PAM type: YTN; PAM sequence: TTT
tgtcttcataagcacatgcc

SEQ ID NO: 200571 - DNA, 20 bp, Artificial Sequence
  Description of Artificial Sequence: Synthetic oligonucleotide
  Target: LAMA2; (-) strand; PAM type: YTN; PAM sequence: TTT
ttgtcttcataagcacatgc

SEQ ID NO: 200572 - DNA, 20 bp, Artificial Sequence
  Description of Artificial Sequence: Synthetic oligonucleotide
  Target: LAMA2; (-) strand; PAM type: YTN; PAM sequence: CTT
tttgtcttcataagcacatg

SEQ ID NO: 200573 - DNA, 20 bp, Artificial Sequence
  Description of Artificial Sequence: Synthetic oligonucleotide
  Target: LAMA2; (-) strand; PAM type: YTN; PAM sequence: CTA
aatcagtaaatcaggccttt

SEQ ID NO: 200574 - DNA, 20 bp, Artificial Sequence
  Description of Artificial Sequence: Synthetic oligonucleotide
  Target: LAMA2; (-) strand; PAM type: YTN; PAM sequence: CTA
aatcactaaatcagtaaatc

SEQ ID NO: 200575 - DNA, 20 bp, Artificial Sequence
  Description of Artificial Sequence: Synthetic oligonucleotide
  Target: LAMA2; (-) strand; PAM type: YTN; PAM sequence: TTG
gactaaatcactaaatcagt

SEQ ID NO: 200576 - DNA, 20 bp, Artificial Sequence
  Description of Artificial Sequence: Synthetic oligonucleotide
  Target: LAMA2; (-) strand; PAM type: YTN; PAM sequence: CTT
ggactaaatcactaaatcag

SEQ ID NO: 200577 - DNA, 20 bp, Artificial Sequence
  Description of Artificial Sequence: Synthetic oligonucleotide
  Target: LAMA2; (-) strand; PAM type: YTN; PAM sequence: TTA
gtacccagaggtccacatca

SEQ ID NO: 200578 - DNA, 20 bp, Artificial Sequence
  Description of Artificial Sequence: Synthetic oligonucleotide
  Target: LAMA2; (-) strand; PAM type: YTN; PAM sequence: TTT
agtacccagaggtccacatc

SEQ ID NO: 200579 - DNA, 20 bp, Artificial Sequence
  Description of Artificial Sequence: Synthetic oligonucleotide
  Target: LAMA2; (-) strand; PAM type: YTN; PAM sequence: CTT
tagtacccagaggtccacat

SEQ ID NO: 200580 - DNA, 20 bp, Artificial Sequence
  Description of Artificial Sequence: Synthetic oligonucleotide
  Target: LAMA2; (-) strand; PAM type: YTN; PAM sequence: TTC
tttagtacccagaggtccac

SEQ ID NO: 200581 - DNA, 20 bp, Artificial Sequence
  Description of Artificial Sequence: Synthetic oligonucleotide
  Target: LAMA2; (-) strand; PAM type: YTN; PAM sequence: CTT
ctttagtacccagaggtcca

SEQ ID NO: 200582 - DNA, 20 bp, Artificial Sequence
  Description of Artificial Sequence: Synthetic oligonucleotide
  Target: LAMA2; (-) strand; PAM type: YTN; PAM sequence: TTA
tagacttctttagtacccag

SEQ ID NO: 200583 - DNA, 20 bp, Artificial Sequence
  Description of Artificial Sequence: Synthetic oligonucleotide
  Target: LAMA2; (-) strand; PAM type: YTN; PAM sequence: TTT
atagacttctttagtaccca

SEQ ID NO: 200584 - DNA, 20 bp, Artificial Sequence
  Description of Artificial Sequence: Synthetic oligonucleotide
  Target: LAMA2; (-) strand; PAM type: YTN; PAM sequence: TTG
ggatttatagacttctttag

SEQ ID NO: 200585 - DNA, 20 bp, Artificial Sequence
  Description of Artificial Sequence: Synthetic oligonucleotide
  Target: LAMA2; (-) strand; PAM type: YTN; PAM sequence: TTG
tgattgggatttatagactt

SEQ ID NO: 200586 - DNA, 20 bp, Artificial Sequence
  Description of Artificial Sequence: Synthetic oligonucleotide
  Target: LAMA2; (-) strand; PAM type: YTN; PAM sequence: TTA
atcacagttgtgattgggat

SEQ ID NO: 200587 - DNA, 20 bp, Artificial Sequence
  Description of Artificial Sequence: Synthetic oligonucleotide
  Target: LAMA2; (-) strand; PAM type: YTN; PAM sequence: TTG
taattaatcacagttgtgat

SEQ ID NO: 200588 - DNA, 20 bp, Artificial Sequence
  Description of Artificial Sequence: Synthetic oligonucleotide
  Target: LAMA2; (-) strand; PAM type: YTN; PAM sequence: TTT
gtaattaatcacagttgtga

SEQ ID NO: 200589 - DNA, 20 bp, Artificial Sequence
  Description of Artificial Sequence: Synthetic oligonucleotide
  Target: LAMA2; (-) strand; PAM type: YTN; PAM sequence: CTA
aagaaatacatgcataagat

SEQ ID NO: 200590 - DNA, 20 bp, Artificial Sequence
  Description of Artificial Sequence: Synthetic oligonucleotide
  Target: LAMA2; (-) strand; PAM type: YTN; PAM sequence: TTA
gctaaagaaatacatgcata

SEQ ID NO: 200591 - DNA, 20 bp, Artificial Sequence
  Description of Artificial Sequence: Synthetic oligonucleotide
  Target: LAMA2; (-) strand; PAM type: YTN; PAM sequence: TTT
agctaaagaaatacatgcat

SEQ ID NO: 200592 - DNA, 20 bp, Artificial Sequence
  Description of Artificial Sequence: Synthetic oligonucleotide
  Target: LAMA2; (-) strand; PAM type: YTN; PAM sequence: CTT
tagctaaagaaatacatgca

SEQ ID NO: 200593 - DNA, 20 bp, Artificial Sequence
  Description of Artificial Sequence: Synthetic oligonucleotide
  Target: LAMA2; (-) strand; PAM type: YTN; PAM sequence: CTG
tctttagctaaagaaataca

SEQ ID NO: 200594 - DNA, 20 bp, Artificial Sequence
  Description of Artificial Sequence: Synthetic oligonucleotide
  Target: LAMA2; (-) strand; PAM type: YTN; PAM sequence: CTC
tgtctttagctaaagaaata

SEQ ID NO: 200595 - DNA, 20 bp, Artificial Sequence
  Description of Artificial Sequence: Synthetic oligonucleotide
  Target: LAMA2; (-) strand; PAM type: YTN; PAM sequence: CTA
cctctgtctttagctaaaga

SEQ ID NO: 200596 - DNA, 20 bp, Artificial Sequence
  Description of Artificial Sequence: Synthetic oligonucleotide
  Target: LAMA2; (-) strand; PAM type: YTN; PAM sequence: TTC
tacctctgtctttagctaaa

SEQ ID NO: 200597 - DNA, 20 bp, Artificial Sequence
  Description of Artificial Sequence: Synthetic oligonucleotide
  Target: LAMA2; (-) strand; PAM type: YTN; PAM sequence: TTG
attctacctctgtctttagc

SEQ ID NO: 200598 - DNA, 20 bp, Artificial Sequence
  Description of Artificial Sequence: Synthetic oligonucleotide
  Target: LAMA2; (-) strand; PAM type: YTN; PAM sequence: TTT
gattctacctctgtctttag

SEQ ID NO: 200599 - DNA, 20 bp, Artificial Sequence
  Description of Artificial Sequence: Synthetic oligonucleotide
  Target: LAMA2; (-) strand; PAM type: YTN; PAM sequence: TTA
tttgattctacctctgtctt

SEQ ID NO: 200600 - DNA, 20 bp, Artificial Sequence
  Description of Artificial Sequence: Synthetic oligonucleotide
  Target: LAMA2; (-) strand; PAM type: YTN; PAM sequence: TTT
atttgattctacctctgtct

SEQ ID NO: 200601 - DNA, 20 bp, Artificial Sequence
  Description of Artificial Sequence: Synthetic oligonucleotide
  Target: LAMA2; (-) strand; PAM type: YTN; PAM sequence: TTT
tatttgattctacctctgtc

SEQ ID NO: 200602 - DNA, 20 bp, Artificial Sequence
  Description of Artificial Sequence: Synthetic oligonucleotide
  Target: LAMA2; (-) strand; PAM type: YTN; PAM sequence: TTT
ttatttgattctacctctgt

SEQ ID NO: 200603 - DNA, 20 bp, Artificial Sequence
  Description of Artificial Sequence: Synthetic oligonucleotide
  Target: LAMA2; (-) strand; PAM type: YTN; PAM sequence: TTG
gagtaatttttatttgattc

SEQ ID NO: 200604 - DNA, 20 bp, Artificial Sequence
  Description of Artificial Sequence: Synthetic oligonucleotide
  Target: LAMA2; (-) strand; PAM type: YTN; PAM sequence: CTT
ggagtaatttttatttgatt

SEQ ID NO: 200605 - DNA, 20 bp, Artificial Sequence
  Description of Artificial Sequence: Synthetic oligonucleotide
  Target: LAMA2; (-) strand; PAM type: YTN; PAM sequence: TTC
aaatgaagagaaatagagcc

SEQ ID NO: 200606 - DNA, 20 bp, Artificial Sequence
  Description of Artificial Sequence: Synthetic oligonucleotide
  Target: LAMA2; (-) strand; PAM type: YTN; PAM sequence: TTT
caaatgaagagaaatagagc

SEQ ID NO: 200607 - DNA, 20 bp, Artificial Sequence
  Description of Artificial Sequence: Synthetic oligonucleotide
  Target: LAMA2; (-) strand; PAM type: YTN; PAM sequence: TTT
tcaaatgaagagaaatagag

SEQ ID NO: 200608 - DNA, 20 bp, Artificial Sequence
  Description of Artificial Sequence: Synthetic oligonucleotide
  Target: LAMA2; (-) strand; PAM type: YTN; PAM sequence: CTG
ttttcaaatgaagagaaata

SEQ ID NO: 200609 - DNA, 20 bp, Artificial Sequence
  Description of Artificial Sequence: Synthetic oligonucleotide
  Target: LAMA2; (-) strand; PAM type: YTN; PAM sequence: TTC
tgttttcaaatgaagagaaa

SEQ ID NO: 200610 - DNA, 20 bp, Artificial Sequence
  Description of Artificial Sequence: Synthetic oligonucleotide
  Target: LAMA2; (-) strand; PAM type: YTN; PAM sequence: TTG
agaaaattctgttttcaaat

SEQ ID NO: 200611 - DNA, 20 bp, Artificial Sequence
  Description of Artificial Sequence: Synthetic oligonucleotide
  Target: LAMA2; (-) strand; PAM type: YTN; PAM sequence: TTT
gagaaaattctgttttcaaa

SEQ ID NO: 200612 - DNA, 20 bp, Artificial Sequence
  Description of Artificial Sequence: Synthetic oligonucleotide
  Target: LAMA2; (-) strand; PAM type: YTN; PAM sequence: TTT
tgagaaaattctgttttcaa

SEQ ID NO: 200613 - DNA, 20 bp, Artificial Sequence
  Description of Artificial Sequence: Synthetic oligonucleotide
  Target: LAMA2; (-) strand; PAM type: YTN; PAM sequence: CTT
ttgagaaaattctgttttca

SEQ ID NO: 200614 - DNA, 20 bp, Artificial Sequence
  Description of Artificial Sequence: Synthetic oligonucleotide
  Target: LAMA2; (-) strand; PAM type: YTN; PAM sequence: TTG
ccttttgagaaaattctgtt

SEQ ID NO: 200615 - DNA, 20 bp, Artificial Sequence
  Description of Artificial Sequence: Synthetic oligonucleotide
  Target: LAMA2; (-) strand; PAM type: YTN; PAM sequence: TTT
gccttttgagaaaattctgt

SEQ ID NO: 200616 - DNA, 20 bp, Artificial Sequence
  Description of Artificial Sequence: Synthetic oligonucleotide
  Target: LAMA2; (-) strand; PAM type: YTN; PAM sequence: CTT
tgccttttgagaaaattctg

SEQ ID NO: 200617 - DNA, 20 bp, Artificial Sequence
  Description of Artificial Sequence: Synthetic oligonucleotide
  Target: LAMA2; (-) strand; PAM type: YTN; PAM sequence: TTC
ctttgccttttgagaaaatt

SEQ ID NO: 200618 - DNA, 20 bp, Artificial Sequence
  Description of Artificial Sequence: Synthetic oligonucleotide
  Target: LAMA2; (-) strand; PAM type: YTN; PAM sequence: TTT
cctttgccttttgagaaaat

SEQ ID NO: 200619 - DNA, 20 bp, Artificial Sequence
  Description of Artificial Sequence: Synthetic oligonucleotide
  Target: LAMA2; (-) strand; PAM type: YTN; PAM sequence: TTT
tcctttgccttttgagaaaa

SEQ ID NO: 200620 - DNA, 20 bp, Artificial Sequence
  Description of Artificial Sequence: Synthetic oligonucleotide
  Target: LAMA2; (-) strand; PAM type: YTN; PAM sequence: CTT
ttcctttgccttttgagaaa

SEQ ID NO: 200621 - DNA, 20 bp, Artificial Sequence
  Description of Artificial Sequence: Synthetic oligonucleotide
  Target: LAMA2; (-) strand; PAM type: YTN; PAM sequence: TTA
ataagagatgtggatgacaa

SEQ ID NO: 200622 - DNA, 20 bp, Artificial Sequence
  Description of Artificial Sequence: Synthetic oligonucleotide
  Target: LAMA2; (-) strand; PAM type: YTN; PAM sequence: TTC
attaataagagatgtggatg

SEQ ID NO: 200623 - DNA, 20 bp, Artificial Sequence
  Description of Artificial Sequence: Synthetic oligonucleotide
  Target: LAMA2; (-) strand; PAM type: YTN; PAM sequence: TTT
cattaataagagatgtggat

SEQ ID NO: 200624 - DNA, 20 bp, Artificial Sequence
  Description of Artificial Sequence: Synthetic oligonucleotide
  Target: LAMA2; (-) strand; PAM type: YTN; PAM sequence: CTT
tcattaataagagatgtgga

SEQ ID NO: 200625 - DNA, 20 bp, Artificial Sequence
  Description of Artificial Sequence: Synthetic oligonucleotide
  Target: LAMA2; (-) strand; PAM type: YTN; PAM sequence: TTA
cactttcattaataagagat

SEQ ID NO: 200626 - DNA, 20 bp, Artificial Sequence
  Description of Artificial Sequence: Synthetic oligonucleotide
  Target: LAMA2; (-) strand; PAM type: YTN; PAM sequence: TTG
ttacactttcattaataaga

SEQ ID NO: 200627 - DNA, 20 bp, Artificial Sequence
  Description of Artificial Sequence: Synthetic oligonucleotide
  Target: LAMA2; (-) strand; PAM type: YTN; PAM sequence: TTC
agaaggagaaatgtgagtat

SEQ ID NO: 200628 - DNA, 20 bp, Artificial Sequence
  Description of Artificial Sequence: Synthetic oligonucleotide
  Target: LAMA2; (-) strand; PAM type: YTN; PAM sequence: TTA
ttcagaaggagaaatgtgag

SEQ ID NO: 200629 - DNA, 20 bp, Artificial Sequence
  Description of Artificial Sequence: Synthetic oligonucleotide
  Target: LAMA2; (-) strand; PAM type: YTN; PAM sequence: TTT
attcagaaggagaaatgtga

SEQ ID NO: 200630 - DNA, 20 bp, Artificial Sequence
  Description of Artificial Sequence: Synthetic oligonucleotide
  Target: LAMA2; (-) strand; PAM type: YTN; PAM sequence: TTT
tattcagaaggagaaatgtg

SEQ ID NO: 200631 - DNA, 20 bp, Artificial Sequence
  Description of Artificial Sequence: Synthetic oligonucleotide
  Target: LAMA2; (-) strand; PAM type: YTN; PAM sequence: TTG
ttttattcagaaggagaaat

SEQ ID NO: 200632 - DNA, 20 bp, Artificial Sequence
  Description of Artificial Sequence: Synthetic oligonucleotide
  Target: LAMA2; (-) strand; PAM type: YTN; PAM sequence: TTT
gttttattcagaaggagaaa

SEQ ID NO: 200633 - DNA, 20 bp, Artificial Sequence
  Description of Artificial Sequence: Synthetic oligonucleotide
  Target: LAMA2; (-) strand; PAM type: YTN; PAM sequence: CTC
atcagtagtttgttttattc

SEQ ID NO: 200634 - DNA, 20 bp, Artificial Sequence
  Description of Artificial Sequence: Synthetic oligonucleotide
  Target: LAMA2; (-) strand; PAM type: YTN; PAM sequence: CTC
tcatcagtagtttgttttat

SEQ ID NO: 200635 - DNA, 20 bp, Artificial Sequence
  Description of Artificial Sequence: Synthetic oligonucleotide
  Target: LAMA2; (-) strand; PAM type: YTN; PAM sequence: TTA
tctctcatcagtagtttgtt

SEQ ID NO: 200636 - DNA, 20 bp, Artificial Sequence
  Description of Artificial Sequence: Synthetic oligonucleotide
  Target: LAMA2; (-) strand; PAM type: YTN; PAM sequence: TTT
atctctcatcagtagtttgt

SEQ ID NO: 200637 - DNA, 20 bp, Artificial Sequence
  Description of Artificial Sequence: Synthetic oligonucleotide
  Target: LAMA2; (-) strand; PAM type: YTN; PAM sequence: CTT
tatctctcatcagtagtttg

SEQ ID NO: 200638 - DNA, 20 bp, Artificial Sequence
  Description of Artificial Sequence: Synthetic oligonucleotide
  Target: LAMA2; (-) strand; PAM type: YTN; PAM sequence: TTA
tctttatctctcatcagtag

SEQ ID NO: 200639 - DNA, 20 bp, Artificial Sequence
  Description of Artificial Sequence: Synthetic oligonucleotide
  Target: LAMA2; (-) strand; PAM type: YTN; PAM sequence: CTA
aaaataattatctttatctc

SEQ ID NO: 200640 - DNA, 20 bp, Artificial Sequence
  Description of Artificial Sequence: Synthetic oligonucleotide
  Target: LAMA2; (-) strand; PAM type: YTN; PAM sequence: TTA
aaagacaacagaggtactaa

SEQ ID NO: 200641 - DNA, 20 bp, Artificial Sequence
  Description of Artificial Sequence: Synthetic oligonucleotide
  Target: LAMA2; (-) strand; PAM type: YTN; PAM sequence: TTT
aaaagacaacagaggtacta

SEQ ID NO: 200642 - DNA, 20 bp, Artificial Sequence
  Description of Artificial Sequence: Synthetic oligonucleotide
  Target: LAMA2; (-) strand; PAM type: YTN; PAM sequence: TTC
caaaaaaggaatatttaaaa

SEQ ID NO: 200643 - DNA, 20 bp, Artificial Sequence
  Description of Artificial Sequence: Synthetic oligonucleotide
  Target: LAMA2; (-) strand; PAM type: YTN; PAM sequence: TTT
ccaaaaaaggaatatttaaa

SEQ ID NO: 200644 - DNA, 20 bp, Artificial Sequence
  Description of Artificial Sequence: Synthetic oligonucleotide
  Target: LAMA2; (-) strand; PAM type: YTN; PAM sequence: TTT
tccaaaaaaggaatatttaa

SEQ ID NO: 200645 - DNA, 20 bp, Artificial Sequence
  Description of Artificial Sequence: Synthetic oligonucleotide
  Target: LAMA2; (-) strand; PAM type: YTN; PAM sequence: CTT
ttccaaaaaaggaatattta

SEQ ID NO: 200646 - DNA, 20 bp, Artificial Sequence
  Description of Artificial Sequence: Synthetic oligonucleotide
  Target: LAMA2; (-) strand; PAM type: YTN; PAM sequence: TTG
cttttccaaaaaaggaatat

SEQ ID NO: 200647 - DNA, 20 bp, Artificial Sequence
  Description of Artificial Sequence: Synthetic oligonucleotide
  Target: LAMA2; (-) strand; PAM type: YTN; PAM sequence: TTT
gcttttccaaaaaaggaata

SEQ ID NO: 200648 - DNA, 20 bp, Artificial Sequence
  Description of Artificial Sequence: Synthetic oligonucleotide
  Target: LAMA2; (-) strand; PAM type: YTN; PAM sequence: TTT
tgcttttccaaaaaaggaat

SEQ ID NO: 200649 - DNA, 20 bp, Artificial Sequence
  Description of Artificial Sequence: Synthetic oligonucleotide
  Target: LAMA2; (-) strand; PAM type: YTN; PAM sequence: TTG
ttttgcttttccaaaaaagg

SEQ ID NO: 200650 - DNA, 20 bp, Artificial Sequence
  Description of Artificial Sequence: Synthetic oligonucleotide
  Target: LAMA2; (-) strand; PAM type: YTN; PAM sequence: CTT
gttttgcttttccaaaaaag

SEQ ID NO: 200651 - DNA, 20 bp, Artificial Sequence
  Description of Artificial Sequence: Synthetic oligonucleotide
  Target: LAMA2; (-) strand; PAM type: YTN; PAM sequence: CTC
ccaatataatcatgtcttgt

SEQ ID NO: 200652 - DNA, 20 bp, Artificial Sequence
  Description of Artificial Sequence: Synthetic oligonucleotide
  Target: LAMA2; (-) strand; PAM type: YTN; PAM sequence: TTC
tcccaatataatcatgtctt

SEQ ID NO: 200653 - DNA, 20 bp, Artificial Sequence
  Description of Artificial Sequence: Synthetic oligonucleotide
  Target: LAMA2; (-) strand; PAM type: YTN; PAM sequence: CTT
ctcccaatataatcatgtct

SEQ ID NO: 200654 - DNA, 20 bp, Artificial Sequence
  Description of Artificial Sequence: Synthetic oligonucleotide
  Target: LAMA2; (-) strand; PAM type: YTN; PAM sequence: TTC
ttctcccaatataatcatgt

SEQ ID NO: 200655 - DNA, 20 bp, Artificial Sequence
  Description of Artificial Sequence: Synthetic oligonucleotide
  Target: LAMA2; (-) strand; PAM type: YTN; PAM sequence: TTG
ggtcaccattcttctcccaa

SEQ ID NO: 200656 - DNA, 20 bp, Artificial Sequence
  Description of Artificial Sequence: Synthetic oligonucleotide
  Target: LAMA2; (-) strand; PAM type: YTN; PAM sequence: CTT
gggtcaccattcttctccca

SEQ ID NO: 200657 - DNA, 20 bp, Artificial Sequence
  Description of Artificial Sequence: Synthetic oligonucleotide
  Target: LAMA2; (-) strand; PAM type: YTN; PAM sequence: TTC
ttgggtcaccattcttctcc

SEQ ID NO: 200658 - DNA, 20 bp, Artificial Sequence
  Description of Artificial Sequence: Synthetic oligonucleotide
  Target: LAMA2; (-) strand; PAM type: YTN; PAM sequence: CTA
gttcttgggtcaccattctt

SEQ ID NO: 200659 - DNA, 20 bp, Artificial Sequence
  Description of Artificial Sequence: Synthetic oligonucleotide
  Target: LAMA2; (-) strand; PAM type: YTN; PAM sequence: TTC
agagatacaccagatagtga

SEQ ID NO: 200660 - DNA, 20 bp, Artificial Sequence
  Description of Artificial Sequence: Synthetic oligonucleotide
  Target: LAMA2; (-) strand; PAM type: YTN; PAM sequence: CTT
cagagatacaccagatagtg

SEQ ID NO: 200661 - DNA, 20 bp, Artificial Sequence
  Description of Artificial Sequence: Synthetic oligonucleotide
  Target: LAMA2; (-) strand; PAM type: YTN; PAM sequence: TTG
atcacacttcagagatacac

SEQ ID NO: 200662 - DNA, 20 bp, Artificial Sequence
  Description of Artificial Sequence: Synthetic oligonucleotide
  Target: LAMA2; (-) strand; PAM type: YTN; PAM sequence: TTT
gatcacacttcagagataca

SEQ ID NO: 200663 - DNA, 20 bp, Artificial Sequence
  Description of Artificial Sequence: Synthetic oligonucleotide
  Target: LAMA2; (-) strand; PAM type: YTN; PAM sequence: CTT
tgatcacacttcagagatac

SEQ ID NO: 200664 - DNA, 20 bp, Artificial Sequence
  Description of Artificial Sequence: Synthetic oligonucleotide
  Target: LAMA2; (-) strand; PAM type: YTN; PAM sequence: TTA
cctttgatcacacttcagag

SEQ ID NO: 200665 - DNA, 20 bp, Artificial Sequence
  Description of Artificial Sequence: Synthetic oligonucleotide
  Target: LAMA2; (-) strand; PAM type: YTN; PAM sequence: TTA
tgatcagttacctttgatca

SEQ ID NO: 200666 - DNA, 20 bp, Artificial Sequence
  Description of Artificial Sequence: Synthetic oligonucleotide
  Target: LAMA2; (-) strand; PAM type: YTN; PAM sequence: CTA
gttatgatcagttacctttg

SEQ ID NO: 200667 - DNA, 20 bp, Artificial Sequence
  Description of Artificial Sequence: Synthetic oligonucleotide
  Target: LAMA2; (-) strand; PAM type: YTN; PAM sequence: TTA
tctagttatgatcagttacc

SEQ ID NO: 200668 - DNA, 20 bp, Artificial Sequence
  Description of Artificial Sequence: Synthetic oligonucleotide
  Target: LAMA2; (-) strand; PAM type: YTN; PAM sequence: TTA
acgattatctagttatgatc

SEQ ID NO: 200669 - DNA, 20 bp, Artificial Sequence
  Description of Artificial Sequence: Synthetic oligonucleotide
  Target: LAMA2; (-) strand; PAM type: YTN; PAM sequence: TTT
aacgattatctagttatgat

SEQ ID NO: 200670 - DNA, 20 bp, Artificial Sequence
  Description of Artificial Sequence: Synthetic oligonucleotide
  Target: LAMA2; (-) strand; PAM type: YTN; PAM sequence: CTT
taacgattatctagttatga

SEQ ID NO: 200671 - DNA, 20 bp, Artificial Sequence
  Description of Artificial Sequence: Synthetic oligonucleotide
  Target: LAMA2; (-) strand; PAM type: YTN; PAM sequence: TTA
gtatcaataagggaagaaag

SEQ ID NO: 200672 - DNA, 20 bp, Artificial Sequence
  Description of Artificial Sequence: Synthetic oligonucleotide
  Target: LAMA2; (-) strand; PAM type: YTN; PAM sequence: CTT
agtatcaataagggaagaaa

SEQ ID NO: 200673 - DNA, 20 bp, Artificial Sequence
  Description of Artificial Sequence: Synthetic oligonucleotide
  Target: LAMA2; (-) strand; PAM type: YTN; PAM sequence: TTA
gtatcaaggtcttagtatca

SEQ ID NO: 200674 - DNA, 20 bp, Artificial Sequence
  Description of Artificial Sequence: Synthetic oligonucleotide
  Target: LAMA2; (-) strand; PAM type: YTN; PAM sequence: CTT
agtatcaaggtcttagtatc

SEQ ID NO: 200675 - DNA, 20 bp, Artificial Sequence
  Description of Artificial Sequence: Synthetic oligonucleotide
  Target: LAMA2; (-) strand; PAM type: YTN; PAM sequence: TTG
tgaacaacttagtatcaagg

SEQ ID NO: 200676 - DNA, 20 bp, Artificial Sequence
  Description of Artificial Sequence: Synthetic oligonucleotide
  Target: LAMA2; (-) strand; PAM type: YTN; PAM sequence: CTA
gaatgtgggccagttgtgaa

SEQ ID NO: 200677 - DNA, 20 bp, Artificial Sequence
  Description of Artificial Sequence: Synthetic oligonucleotide
  Target: LAMA2; (-) strand; PAM type: YTN; PAM sequence: TTC
aacctagaatgtgggccagt

SEQ ID NO: 200678 - DNA, 20 bp, Artificial Sequence
  Description of Artificial Sequence: Synthetic oligonucleotide
  Target: LAMA2; (-) strand; PAM type: YTN; PAM sequence: TTT
caacctagaatgtgggccag

SEQ ID NO: 200679 - DNA, 20 bp, Artificial Sequence
  Description of Artificial Sequence: Synthetic oligonucleotide
  Target: LAMA2; (-) strand; PAM type: YTN; PAM sequence: CTC
caacatgcaccatcatttca

SEQ ID NO: 200680 - DNA, 20 bp, Artificial Sequence
  Description of Artificial Sequence: Synthetic oligonucleotide
  Target: LAMA2; (-) strand; PAM type: YTN; PAM sequence: TTG
tctccaacatgcaccatcat

SEQ ID NO: 200681 - DNA, 20 bp, Artificial Sequence
  Description of Artificial Sequence: Synthetic oligonucleotide
  Target: LAMA2; (-) strand; PAM type: YTN; PAM sequence: TTT
gtctccaacatgcaccatca

SEQ ID NO: 200682 - DNA, 20 bp, Artificial Sequence
  Description of Artificial Sequence: Synthetic oligonucleotide
  Target: LAMA2; (-) strand; PAM type: YTN; PAM sequence: TTG
tacatttgtctccaacatgc

SEQ ID NO: 200683 - DNA, 20 bp, Artificial Sequence
  Description of Artificial Sequence: Synthetic oligonucleotide
  Target: LAMA2; (-) strand; PAM type: YTN; PAM sequence: TTT
gtacatttgtctccaacatg

SEQ ID NO: 200684 - DNA, 20 bp, Artificial Sequence
  Description of Artificial Sequence: Synthetic oligonucleotide
  Target: LAMA2; (-) strand; PAM type: YTN; PAM sequence: TTA
tttgtacatttgtctccaac

SEQ ID NO: 200685 - DNA, 20 bp, Artificial Sequence
  Description of Artificial Sequence: Synthetic oligonucleotide
  Target: LAMA2; (-) strand; PAM type: YTN; PAM sequence: TTT
atttgtacatttgtctccaa

SEQ ID NO: 200686 - DNA, 20 bp, Artificial Sequence
  Description of Artificial Sequence: Synthetic oligonucleotide
  Target: LAMA2; (-) strand; PAM type: YTN; PAM sequence: TTC
acagtagtaatataaccata

SEQ ID NO: 200687 - DNA, 20 bp, Artificial Sequence
  Description of Artificial Sequence: Synthetic oligonucleotide
  Target: LAMA2; (-) strand; PAM type: YTN; PAM sequence: TTT
cacagtagtaatataaccat

SEQ ID NO: 200688 - DNA, 20 bp, Artificial Sequence
  Description of Artificial Sequence: Synthetic oligonucleotide
  Target: LAMA2; (-) strand; PAM type: YTN; PAM sequence: TTT
tcacagtagtaatataacca

SEQ ID NO: 200689 - DNA, 20 bp, Artificial Sequence
  Description of Artificial Sequence: Synthetic oligonucleotide
  Target: LAMA2; (-) strand; PAM type: YTN; PAM sequence: CTA
catacattttcacagtagta

SEQ ID NO: 200690 - DNA, 20 bp, Artificial Sequence
  Description of Artificial Sequence: Synthetic oligonucleotide
  Target: LAMA2; (-) strand; PAM type: YTN; PAM sequence: TTC
tacatacattttcacagtag

SEQ ID NO: 200691 - DNA, 20 bp, Artificial Sequence
  Description of Artificial Sequence: Synthetic oligonucleotide
  Target: LAMA2; (-) strand; PAM type: YTN; PAM sequence: TTT
ctacatacattttcacagta

SEQ ID NO: 200692 - DNA, 20 bp, Artificial Sequence
  Description of Artificial Sequence: Synthetic oligonucleotide
  Target: LAMA2; (-) strand; PAM type: YTN; PAM sequence: TTT
tctacatacattttcacagt

SEQ ID NO: 200693 - DNA, 20 bp, Artificial Sequence
  Description of Artificial Sequence: Synthetic oligonucleotide
  Target: LAMA2; (-) strand; PAM type: YTN; PAM sequence: TTA
ccccagcattttctacatac

SEQ ID NO: 200694 - DNA, 20 bp, Artificial Sequence
  Description of Artificial Sequence: Synthetic oligonucleotide
  Target: LAMA2; (-) strand; PAM type: YTN; PAM sequence: TTA
agaaaatagtccatattacc

SEQ ID NO: 200695 - DNA, 20 bp, Artificial Sequence
  Description of Artificial Sequence: Synthetic oligonucleotide
  Target: LAMA2; (-) strand; PAM type: YTN; PAM sequence: TTA
ttaagaaaatagtccatatt

SEQ ID NO: 200696 - DNA, 20 bp, Artificial Sequence
  Description of Artificial Sequence: Synthetic oligonucleotide
  Target: LAMA2; (-) strand; PAM type: YTN; PAM sequence: TTA
gattattaagaaaatagtcc

SEQ ID NO: 200697 - DNA, 20 bp, Artificial Sequence
  Description of Artificial Sequence: Synthetic oligonucleotide
  Target: LAMA2; (-) strand; PAM type: YTN; PAM sequence: CTA
ggtaagaaattagattatta

SEQ ID NO: 200698 - DNA, 20 bp, Artificial Sequence
  Description of Artificial Sequence: Synthetic oligonucleotide
  Target: LAMA2; (-) strand; PAM type: YTN; PAM sequence: CTA
ctaggtaagaaattagatta

SEQ ID NO: 200699 - DNA, 20 bp, Artificial Sequence
  Description of Artificial Sequence: Synthetic oligonucleotide
  Target: LAMA2; (-) strand; PAM type: YTN; PAM sequence: CTG
tctactaggtaagaaattag

SEQ ID NO: 200700 - DNA, 20 bp, Artificial Sequence
  Description of Artificial Sequence: Synthetic oligonucleotide
  Target: LAMA2; (-) strand; PAM type: YTN; PAM sequence: TTG
actgtctactaggtaagaaa

SEQ ID NO: 200701 - DNA, 20 bp, Artificial Sequence
  Description of Artificial Sequence: Synthetic oligonucleotide
  Target: LAMA2; (-) strand; PAM type: YTN; PAM sequence: TTG
gaaatgttgactgtctacta

SEQ ID NO: 200702 - DNA, 20 bp, Artificial Sequence
  Description of Artificial Sequence: Synthetic oligonucleotide
  Target: LAMA2; (-) strand; PAM type: YTN; PAM sequence: TTC
catgattggaaatgttgact

SEQ ID NO: 200703 - DNA, 20 bp, Artificial Sequence
  Description of Artificial Sequence: Synthetic oligonucleotide
  Target: LAMA2; (-) strand; PAM type: YTN; PAM sequence: TTT
ccatgattggaaatgttgac

SEQ ID NO: 200704 - DNA, 20 bp, Artificial Sequence
  Description of Artificial Sequence: Synthetic oligonucleotide
  Target: LAMA2; (-) strand; PAM type: YTN; PAM sequence: TTC
atttccatgattggaaatgt

SEQ ID NO: 200705 - DNA, 20 bp, Artificial Sequence
  Description of Artificial Sequence: Synthetic oligonucleotide
  Target: LAMA2; (-) strand; PAM type: YTN; PAM sequence: CTA
gttcatttccatgattggaa

SEQ ID NO: 200706 - DNA, 20 bp, Artificial Sequence
  Description of Artificial Sequence: Synthetic oligonucleotide
  Target: LAMA2; (-) strand; PAM type: YTN; PAM sequence: TTA
tgtggacactagttcatttc

SEQ ID NO: 200707 - DNA, 20 bp, Artificial Sequence
  Description of Artificial Sequence: Synthetic oligonucleotide
  Target: LAMA2; (-) strand; PAM type: YTN; PAM sequence: TTC
agttatgtggacactagttc

SEQ ID NO: 200708 - DNA, 20 bp, Artificial Sequence
  Description of Artificial Sequence: Synthetic oligonucleotide
  Target: LAMA2; (-) strand; PAM type: YTN; PAM sequence: TTT
cagttatgtggacactagtt

SEQ ID NO: 200709 - DNA, 20 bp, Artificial Sequence
  Description of Artificial Sequence: Synthetic oligonucleotide
  Target: LAMA2; (-) strand; PAM type: YTN; PAM sequence: CTA
aagatagccagatgtgaagg

SEQ ID NO: 200710 - DNA, 20 bp, Artificial Sequence
  Description of Artificial Sequence: Synthetic oligonucleotide
  Target: LAMA2; (-) strand; PAM type: YTN; PAM sequence: TTA
gggcctaaagatagccagat

SEQ ID NO: 200711 - DNA, 20 bp, Artificial Sequence
  Description of Artificial Sequence: Synthetic oligonucleotide
  Target: LAMA2; (-) strand; PAM type: YTN; PAM sequence: TTT
agggcctaaagatagccaga

SEQ ID NO: 200712 - DNA, 20 bp, Artificial Sequence
  Description of Artificial Sequence: Synthetic oligonucleotide
  Target: LAMA2; (-) strand; PAM type: YTN; PAM sequence: TTC
acataatttagggcctaaag

SEQ ID NO: 200713 - DNA, 20 bp, Artificial Sequence
  Description of Artificial Sequence: Synthetic oligonucleotide
  Target: LAMA2; (-) strand; PAM type: YTN; PAM sequence: TTT
cacataatttagggcctaaa

SEQ ID NO: 200714 - DNA, 20 bp, Artificial Sequence
  Description of Artificial Sequence: Synthetic oligonucleotide
  Target: LAMA2; (-) strand; PAM type: YTN; PAM sequence: CTC
agtgaatttcacataattta

SEQ ID NO: 200715 - DNA, 20 bp, Artificial Sequence
  Description of Artificial Sequence: Synthetic oligonucleotide
  Target: LAMA2; (-) strand; PAM type: YTN; PAM sequence: CTG
tggaaaatactcagtgaatt

SEQ ID NO: 200716 - DNA, 20 bp, Artificial Sequence
  Description of Artificial Sequence: Synthetic oligonucleotide
  Target: LAMA2; (-) strand; PAM type: YTN; PAM sequence: CTC
tgtggaaaatactcagtgaa

SEQ ID NO: 200717 - DNA, 20 bp, Artificial Sequence
  Description of Artificial Sequence: Synthetic oligonucleotide
  Target: LAMA2; (-) strand; PAM type: YTN; PAM sequence: TTA
caacagtaaacaactctgtg

SEQ ID NO: 200718 - DNA, 20 bp, Artificial Sequence
  Description of Artificial Sequence: Synthetic oligonucleotide
  Target: LAMA2; (-) strand; PAM type: YTN; PAM sequence: TTT
acaacagtaaacaactctgt

SEQ ID NO: 200719 - DNA, 20 bp, Artificial Sequence
  Description of Artificial Sequence: Synthetic oligonucleotide
  Target: LAMA2; (-) strand; PAM type: YTN; PAM sequence: TTT
tacaacagtaaacaactctg

SEQ ID NO: 200720 - DNA, 20 bp, Artificial Sequence
  Description of Artificial Sequence: Synthetic oligonucleotide
  Target: LAMA2; (-) strand; PAM type: YTN; PAM sequence: TTA
agattttacaacagtaaaca

SEQ ID NO: 200721 - DNA, 20 bp, Artificial Sequence
  Description of Artificial Sequence: Synthetic oligonucleotide
  Target: LAMA2; (-) strand; PAM type: YTN; PAM sequence: TTT
aagattttacaacagtaaac

SEQ ID NO: 200722 - DNA, 20 bp, Artificial Sequence
  Description of Artificial Sequence: Synthetic oligonucleotide
  Target: LAMA2; (-) strand; PAM type: YTN; PAM sequence: TTG
atttaagattttacaacagt

SEQ ID NO: 200723 - DNA, 20 bp, Artificial Sequence
  Description of Artificial Sequence: Synthetic oligonucleotide
  Target: LAMA2; (-) strand; PAM type: YTN; PAM sequence: TTT
gatttaagattttacaacag

SEQ ID NO: 200724 - DNA, 20 bp, Artificial Sequence
  Description of Artificial Sequence: Synthetic oligonucleotide
  Target: LAMA2; (-) strand; PAM type: YTN; PAM sequence: TTT
tgatttaagattttacaaca

SEQ ID NO: 200725 - DNA, 20 bp, Artificial Sequence
  Description of Artificial Sequence: Synthetic oligonucleotide
  Target: LAMA2; (-) strand; PAM type: YTN; PAM sequence: TTG
atgtaacattttgatttaag

SEQ ID NO: 200726 - DNA, 20 bp, Artificial Sequence
  Description of Artificial Sequence: Synthetic oligonucleotide
  Target: LAMA2; (-) strand; PAM type: YTN; PAM sequence: TTT
gatgtaacattttgatttaa

SEQ ID NO: 200727 - DNA, 20 bp, Artificial Sequence
  Description of Artificial Sequence: Synthetic oligonucleotide
  Target: LAMA2; (-) strand; PAM type: YTN; PAM sequence: CTT
tgatgtaacattttgattta

SEQ ID NO: 200728 - DNA, 20 bp, Artificial Sequence
  Description of Artificial Sequence: Synthetic oligonucleotide
  Target: LAMA2; (-) strand; PAM type: YTN; PAM sequence: TTC
ctttgatgtaacattttgat

SEQ ID NO: 200729 - DNA, 20 bp, Artificial Sequence
  Description of Artificial Sequence: Synthetic oligonucleotide
  Target: LAMA2; (-) strand; PAM type: YTN; PAM sequence: CTT
cctttgatgtaacattttga

SEQ ID NO: 200730 - DNA, 20 bp, Artificial Sequence
  Description of Artificial Sequence: Synthetic oligonucleotide
  Target: LAMA2; (-) strand; PAM type: YTN; PAM sequence: CTC
ttcctttgatgtaacatttt

SEQ ID NO: 200731 - DNA, 20 bp, Artificial Sequence
  Description of Artificial Sequence: Synthetic oligonucleotide
  Target: LAMA2; (-) strand; PAM type: YTN; PAM sequence: TTG
atgcaactcttcctttgatg

SEQ ID NO: 200732 - DNA, 20 bp, Artificial Sequence
  Description of Artificial Sequence: Synthetic oligonucleotide
  Target: LAMA2; (-) strand; PAM type: YTN; PAM sequence: TTT
gatgcaactcttcctttgat

SEQ ID NO: 200733 - DNA, 20 bp, Artificial Sequence
  Description of Artificial Sequence: Synthetic oligonucleotide
  Target: LAMA2; (-) strand; PAM type: YTN; PAM sequence: TTT
tgatgcaactcttcctttga

SEQ ID NO: 200734 - DNA, 20 bp, Artificial Sequence
  Description of Artificial Sequence: Synthetic oligonucleotide
  Target: LAMA2; (-) strand; PAM type: YTN; PAM sequence: CTT
ttgatgcaactcttcctttg

SEQ ID NO: 200735 - DNA, 20 bp, Artificial Sequence
  Description of Artificial Sequence: Synthetic oligonucleotide
  Target: LAMA2; (-) strand; PAM type: YTN; PAM sequence: TTC
ttttgatgcaactcttcctt

SEQ ID NO: 200736 - DNA, 20 bp, Artificial Sequence
  Description of Artificial Sequence: Synthetic oligonucleotide
  Target: LAMA2; (-) strand; PAM type: YTN; PAM sequence: CTG
aggttcttttgatgcaactc

SEQ ID NO: 200737 - DNA, 20 bp, Artificial Sequence
  Description of Artificial Sequence: Synthetic oligonucleotide
  Target: LAMA2; (-) strand; PAM type: YTN; PAM sequence: TTG
ctgaggttcttttgatgcaa

SEQ ID NO: 200738 - DNA, 20 bp, Artificial Sequence
  Description of Artificial Sequence: Synthetic oligonucleotide
  Target: LAMA2; (-) strand; PAM type: YTN; PAM sequence: TTT
gctgaggttcttttgatgca

SEQ ID NO: 200739 - DNA, 20 bp, Artificial Sequence
  Description of Artificial Sequence: Synthetic oligonucleotide
  Target: LAMA2; (-) strand; PAM type: YTN; PAM sequence: TTT
tgctgaggttcttttgatgc

SEQ ID NO: 200740 - DNA, 20 bp, Artificial Sequence
  Description of Artificial Sequence: Synthetic oligonucleotide
  Target: LAMA2; (-) strand; PAM type: YTN; PAM sequence: TTG
aggttttgctgaggttcttt

SEQ ID NO: 200741 - DNA, 20 bp, Artificial Sequence
  Description of Artificial Sequence: Synthetic oligonucleotide
  Target: LAMA2; (-) strand; PAM type: YTN; PAM sequence: TTT
gaggttttgctgaggttctt

SEQ ID NO: 200742 - DNA, 20 bp, Artificial Sequence
  Description of Artificial Sequence: Synthetic oligonucleotide
  Target: LAMA2; (-) strand; PAM type: YTN; PAM sequence: TTT
tgaggttttgctgaggttct

SEQ ID NO: 200743 - DNA, 20 bp, Artificial Sequence
  Description of Artificial Sequence: Synthetic oligonucleotide
  Target: LAMA2; (-) strand; PAM type: YTN; PAM sequence: TTG
ttttgaggttttgctgaggt

SEQ ID NO: 200744 - DNA, 20 bp, Artificial Sequence
  Description of Artificial Sequence: Synthetic oligonucleotide
  Target: LAMA2; (-) strand; PAM type: YTN; PAM sequence: TTG
gttgttttgaggttttgctg

SEQ ID NO: 200745 - DNA, 20 bp, Artificial Sequence
  Description of Artificial Sequence: Synthetic oligonucleotide
  Target: LAMA2; (-) strand; PAM type: YTN; PAM sequence: TTT
ggttgttttgaggttttgct

SEQ ID NO: 200746 - DNA, 20 bp, Artificial Sequence
  Description of Artificial Sequence: Synthetic oligonucleotide
  Target: LAMA2; (-) strand; PAM type: YTN; PAM sequence: TTA
aacagacaagtggagtgttt

SEQ ID NO: 200747 - DNA, 20 bp, Artificial Sequence
  Description of Artificial Sequence: Synthetic oligonucleotide
  Target: LAMA2; (-) strand; PAM type: YTN; PAM sequence: TTT
aaacagacaagtggagtgtt

SEQ ID NO: 200748 - DNA, 20 bp, Artificial Sequence
  Description of Artificial Sequence: Synthetic oligonucleotide
  Target: LAMA2; (-) strand; PAM type: YTN; PAM sequence: CTA
ataatttaaacagacaagtg

SEQ ID NO: 200749 - DNA, 20 bp, Artificial Sequence
  Description of Artificial Sequence: Synthetic oligonucleotide
  Target: LAMA2; (-) strand; PAM type: YTN; PAM sequence: TTG
ctaataatttaaacagacaa

SEQ ID NO: 200750 - DNA, 20 bp, Artificial Sequence
  Description of Artificial Sequence: Synthetic oligonucleotide
  Target: LAMA2; (-) strand; PAM type: YTN; PAM sequence: TTT
gctaataatttaaacagaca

SEQ ID NO: 200751 - DNA, 20 bp, Artificial Sequence
  Description of Artificial Sequence: Synthetic oligonucleotide
  Target: LAMA2; (-) strand; PAM type: YTN; PAM sequence: TTT
tgctaataatttaaacagac

SEQ ID NO: 200752 - DNA, 20 bp, Artificial Sequence
  Description of Artificial Sequence: Synthetic oligonucleotide
  Target: LAMA2; (-) strand; PAM type: YTN; PAM sequence: CTT
ttgctaataatttaaacaga

SEQ ID NO: 200753 - DNA, 20 bp, Artificial Sequence
  Description of Artificial Sequence: Synthetic oligonucleotide
  Target: LAMA2; (-) strand; PAM type: YTN; PAM sequence: CTG
cttttgctaataatttaaac

SEQ ID NO: 200754 - DNA, 20 bp, Artificial Sequence
  Description of Artificial Sequence: Synthetic oligonucleotide
  Target: LAMA2; (-) strand; PAM type: YTN; PAM sequence: CTG
ggataacagagctgcttttg

SEQ ID NO: 200755 - DNA, 20 bp, Artificial Sequence
  Description of Artificial Sequence: Synthetic oligonucleotide
  Target: LAMA2; (-) strand; PAM type: YTN; PAM sequence: TTA
gaagctgggataacagagct

SEQ ID NO: 200756 - DNA, 20 bp, Artificial Sequence
  Description of Artificial Sequence: Synthetic oligonucleotide
  Target: LAMA2; (-) strand; PAM type: YTN; PAM sequence: CTT
agaagctgggataacagagc

SEQ ID NO: 200757 - DNA, 20 bp, Artificial Sequence
  Description of Artificial Sequence: Synthetic oligonucleotide
  Target: LAMA2; (-) strand; PAM type: YTN; PAM sequence: TTA
gcttagaagctgggataaca

SEQ ID NO: 200758 - DNA, 20 bp, Artificial Sequence
  Description of Artificial Sequence: Synthetic oligonucleotide
  Target: LAMA2; (-) strand; PAM type: YTN; PAM sequence: CTG
gttagcttagaagctgggat

SEQ ID NO: 200759 - DNA, 20 bp, Artificial Sequence
  Description of Artificial Sequence: Synthetic oligonucleotide
  Target: LAMA2; (-) strand; PAM type: YTN; PAM sequence: TTG
gccataggaaaagcatacat

SEQ ID NO: 200760 - DNA, 20 bp, Artificial Sequence
  Description of Artificial Sequence: Synthetic oligonucleotide
  Target: LAMA2; (-) strand; PAM type: YTN; PAM sequence: TTT
ggccataggaaaagcataca

SEQ ID NO: 200761 - DNA, 20 bp, Artificial Sequence
  Description of Artificial Sequence: Synthetic oligonucleotide
  Target: LAMA2; (-) strand; PAM type: YTN; PAM sequence: TTT
tggccataggaaaagcatac

SEQ ID NO: 200762 - DNA, 20 bp, Artificial Sequence
  Description of Artificial Sequence: Synthetic oligonucleotide
  Target: LAMA2; (-) strand; PAM type: YTN; PAM sequence: TTG
tggacgttttggccatagga

SEQ ID NO: 200763 - DNA, 20 bp, Artificial Sequence
  Description of Artificial Sequence: Synthetic oligonucleotide
  Target: LAMA2; (-) strand; PAM type: YTN; PAM sequence: TTT
gtggacgttttggccatagg

SEQ ID NO: 200764 - DNA, 20 bp, Artificial Sequence
  Description of Artificial Sequence: Synthetic oligonucleotide
  Target: LAMA2; (-) strand; PAM type: YTN; PAM sequence: TTA
gtaatttgtggacgttttgg

SEQ ID NO: 200765 - DNA, 20 bp, Artificial Sequence
  Description of Artificial Sequence: Synthetic oligonucleotide
  Target: LAMA2; (-) strand; PAM type: YTN; PAM sequence: TTA
ttagtaatttgtggacgttt

SEQ ID NO: 200766 - DNA, 20 bp, Artificial Sequence
  Description of Artificial Sequence: Synthetic oligonucleotide
  Target: LAMA2; (-) strand; PAM type: YTN; PAM sequence: TTT
attagtaatttgtggacgtt

SEQ ID NO: 200767 - DNA, 20 bp, Artificial Sequence
  Description of Artificial Sequence: Synthetic oligonucleotide
  Target: LAMA2; (-) strand; PAM type: YTN; PAM sequence: TTG
tcagcatttattagtaattt

SEQ ID NO: 200768 - DNA, 20 bp, Artificial Sequence
  Description of Artificial Sequence: Synthetic oligonucleotide
  Target: LAMA2; (-) strand; PAM type: YTN; PAM sequence: CTT
gtcagcatttattagtaatt

SEQ ID NO: 200769 - DNA, 20 bp, Artificial Sequence
  Description of Artificial Sequence: Synthetic oligonucleotide
  Target: LAMA2; (-) strand; PAM type: YTN; PAM sequence: CTC
cttgtcagcatttattagta

SEQ ID NO: 200770 - DNA, 20 bp, Artificial Sequence
  Description of Artificial Sequence: Synthetic oligonucleotide
  Target: LAMA2; (-) strand; PAM type: YTN; PAM sequence: CTC
tccttgtcagcatttattag

SEQ ID NO: 200771 - DNA, 20 bp, Artificial Sequence
  Description of Artificial Sequence: Synthetic oligonucleotide
  Target: LAMA2; (-) strand; PAM type: YTN; PAM sequence: CTC
tctccttgtcagcatttatt

SEQ ID NO: 200772 - DNA, 20 bp, Artificial Sequence
  Description of Artificial Sequence: Synthetic oligonucleotide
  Target: LAMA2; (-) strand; PAM type: YTN; PAM sequence: TTA
acctctctccttgtcagcat

SEQ ID NO: 200773 - DNA, 20 bp, Artificial Sequence
  Description of Artificial Sequence: Synthetic oligonucleotide
  Target: LAMA2; (-) strand; PAM type: YTN; PAM sequence: TTT
aacctctctccttgtcagca

SEQ ID NO: 200774 - DNA, 20 bp, Artificial Sequence
  Description of Artificial Sequence: Synthetic oligonucleotide
  Target: LAMA2; (-) strand; PAM type: YTN; PAM sequence: TTT
taacctctctccttgtcagc

SEQ ID NO: 200775 - DNA, 20 bp, Artificial Sequence
  Description of Artificial Sequence: Synthetic oligonucleotide
  Target: LAMA2; (-) strand; PAM type: YTN; PAM sequence: CTG
gttttaacctctctccttgt

SEQ ID NO: 200776 - DNA, 20 bp, Artificial Sequence
  Description of Artificial Sequence: Synthetic oligonucleotide
  Target: LAMA2; (-) strand; PAM type: YTN; PAM sequence: TTC
ctggttttaacctctctcct

SEQ ID NO: 200777 - DNA, 20 bp, Artificial Sequence
  Description of Artificial Sequence: Synthetic oligonucleotide
  Target: LAMA2; (-) strand; PAM type: YTN; PAM sequence: CTT
cctggttttaacctctctcc

SEQ ID NO: 200778 - DNA, 20 bp, Artificial Sequence
  Description of Artificial Sequence: Synthetic oligonucleotide
  Target: LAMA2; (-) strand; PAM type: YTN; PAM sequence: CTA
aaaggcatggcttcctggtt

SEQ ID NO: 200779 - DNA, 20 bp, Artificial Sequence
  Description of Artificial Sequence: Synthetic oligonucleotide
  Target: LAMA2; (-) strand; PAM type: YTN; PAM sequence: TTG
tcagctaaaaggcatggctt

SEQ ID NO: 200780 - DNA, 20 bp, Artificial Sequence
  Description of Artificial Sequence: Synthetic oligonucleotide
  Target: LAMA2; (-) strand; PAM type: YTN; PAM sequence: TTT
gtcagctaaaaggcatggct

SEQ ID NO: 200781 - DNA, 20 bp, Artificial Sequence
  Description of Artificial Sequence: Synthetic oligonucleotide
  Target: LAMA2; (-) strand; PAM type: YTN; PAM sequence: TTT
tgtcagctaaaaggcatggc

SEQ ID NO: 200782 - DNA, 20 bp, Artificial Sequence
  Description of Artificial Sequence: Synthetic oligonucleotide
  Target: LAMA2; (-) strand; PAM type: YTN; PAM sequence: TTC
aatgaatgttttgtcagcta

SEQ ID NO: 200783 - DNA, 20 bp, Artificial Sequence
  Description of Artificial Sequence: Synthetic oligonucleotide
  Target: LAMA2; (-) strand; PAM type: YTN; PAM sequence: TTT
caatgaatgttttgtcagct

SEQ ID NO: 200784 - DNA, 20 bp, Artificial Sequence
  Description of Artificial Sequence: Synthetic oligonucleotide
  Target: LAMA2; (-) strand; PAM type: YTN; PAM sequence: TTC
acccagatagcatttcaatg

SEQ ID NO: 200785 - DNA, 20 bp, Artificial Sequence
  Description of Artificial Sequence: Synthetic oligonucleotide
  Target: LAMA2; (-) strand; PAM type: YTN; PAM sequence: CTT
cacccagatagcatttcaat

SEQ ID NO: 200786 - DNA, 20 bp, Artificial Sequence
  Description of Artificial Sequence: Synthetic oligonucleotide
  Target: LAMA2; (-) strand; PAM type: YTN; PAM sequence: CTC
agtgcttcacccagatagca

SEQ ID NO: 200787 - DNA, 20 bp, Artificial Sequence
  Description of Artificial Sequence: Synthetic oligonucleotide
  Target: LAMA2; (-) strand; PAM type: YTN; PAM sequence: TTC
tcagtgcttcacccagatag

SEQ ID NO: 200788 - DNA, 20 bp, Artificial Sequence
  Description of Artificial Sequence: Synthetic oligonucleotide
  Target: LAMA2; (-) strand; PAM type: YTN; PAM sequence: TTT
ctcagtgcttcacccagata

SEQ ID NO: 200789 - DNA, 20 bp, Artificial Sequence
  Description of Artificial Sequence: Synthetic oligonucleotide
  Target: LAMA2; (-) strand; PAM type: YTN; PAM sequence: TTA
atttctcagtgcttcaccca

SEQ ID NO: 200790 - DNA, 20 bp, Artificial Sequence
  Description of Artificial Sequence: Synthetic oligonucleotide
  Target: LAMA2; (-) strand; PAM type: YTN; PAM sequence: TTC
agatgattaatttctcagtg

SEQ ID NO: 200791 - DNA, 20 bp, Artificial Sequence
  Description of Artificial Sequence: Synthetic oligonucleotide
  Target: LAMA2; (-) strand; PAM type: YTN; PAM sequence: CTA
ttcagatgattaatttctca

SEQ ID NO: 200792 - DNA, 20 bp, Artificial Sequence
  Description of Artificial Sequence: Synthetic oligonucleotide
  Target: LAMA2; (-) strand; PAM type: YTN; PAM sequence: TTA
gactattcagatgattaatt

SEQ ID NO: 200793 - DNA, 20 bp, Artificial Sequence
  Description of Artificial Sequence: Synthetic oligonucleotide
  Target: LAMA2; (-) strand; PAM type: YTN; PAM sequence: TTT
agactattcagatgattaat

SEQ ID NO: 200794 - DNA, 20 bp, Artificial Sequence
  Description of Artificial Sequence: Synthetic oligonucleotide
  Target: LAMA2; (-) strand; PAM type: YTN; PAM sequence: CTA
taatttagactattcagatg

SEQ ID NO: 200795 - DNA, 20 bp, Artificial Sequence
  Description of Artificial Sequence: Synthetic oligonucleotide
  Target: LAMA2; (-) strand; PAM type: YTN; PAM sequence: TTC
atgtactataatttagacta

SEQ ID NO: 200796 - DNA, 20 bp, Artificial Sequence
  Description of Artificial Sequence: Synthetic oligonucleotide
  Target: LAMA2; (-) strand; PAM type: YTN; PAM sequence: CTT
catgtactataatttagact

SEQ ID NO: 200797 - DNA, 20 bp, Artificial Sequence
  Description of Artificial Sequence: Synthetic oligonucleotide
  Target: LAMA2; (-) strand; PAM type: YTN; PAM sequence: TTC
ttcatgtactataatttaga

SEQ ID NO: 200798 - DNA, 20 bp, Artificial Sequence
  Description of Artificial Sequence: Synthetic oligonucleotide
  Target: LAMA2; (-) strand; PAM type: YTN; PAM sequence: TTG
cattcttcatgtactataat

SEQ ID NO: 200799 - DNA, 20 bp, Artificial Sequence
  Description of Artificial Sequence: Synthetic oligonucleotide
  Target: LAMA2; (-) strand; PAM type: YTN; PAM sequence: CTA
gcaagttgcattcttcatgt

SEQ ID NO: 200800 - DNA, 20 bp, Artificial Sequence
  Description of Artificial Sequence: Synthetic oligonucleotide
  Target: LAMA2; (-) strand; PAM type: YTN; PAM sequence: CTC
cctagcaagttgcattcttc

SEQ ID NO: 200801 - DNA, 20 bp, Artificial Sequence
  Description of Artificial Sequence: Synthetic oligonucleotide
  Target: LAMA2; (-) strand; PAM type: YTN; PAM sequence: CTG
aaggtatgtctccctagcaa

SEQ ID NO: 200802 - DNA, 20 bp, Artificial Sequence
  Description of Artificial Sequence: Synthetic oligonucleotide
  Target: LAMA2; (-) strand; PAM type: YTN; PAM sequence: CTC
gaataatgctgaaggtatgt

SEQ ID NO: 200803 - DNA, 20 bp, Artificial Sequence
  Description of Artificial Sequence: Synthetic oligonucleotide
  Target: LAMA2; (-) strand; PAM type: YTN; PAM sequence: TTA
acctcgaataatgctgaagg

SEQ ID NO: 200804 - DNA, 20 bp, Artificial Sequence
  Description of Artificial Sequence: Synthetic oligonucleotide
  Target: LAMA2; (-) strand; PAM type: YTN; PAM sequence: TTA
aattaacctcgaataatgct

SEQ ID NO: 200805 - DNA, 20 bp, Artificial Sequence
  Description of Artificial Sequence: Synthetic oligonucleotide
  Target: LAMA2; (-) strand; PAM type: YTN; PAM sequence: TTT
aaattaacctcgaataatgc

SEQ ID NO: 200806 - DNA, 20 bp, Artificial Sequence
  Description of Artificial Sequence: Synthetic oligonucleotide
  Target: LAMA2; (-) strand; PAM type: YTN; PAM sequence: TTG
gtttaaattaacctcgaata

SEQ ID NO: 200807 - DNA, 20 bp, Artificial Sequence
  Description of Artificial Sequence: Synthetic oligonucleotide
  Target: LAMA2; (-) strand; PAM type: YTN; PAM sequence: TTA
catgttggtttaaattaacc

SEQ ID NO: 200808 - DNA, 20 bp, Artificial Sequence
  Description of Artificial Sequence: Synthetic oligonucleotide
  Target: LAMA2; (-) strand; PAM type: YTN; PAM sequence: TTT
acatgttggtttaaattaac

SEQ ID NO: 200809 - DNA, 20 bp, Artificial Sequence
  Description of Artificial Sequence: Synthetic oligonucleotide
  Target: LAMA2; (-) strand; PAM type: YTN; PAM sequence: TTG
ggataccacacatgaagcat

SEQ ID NO: 200810 - DNA, 20 bp, Artificial Sequence
  Description of Artificial Sequence: Synthetic oligonucleotide
  Target: LAMA2; (-) strand; PAM type: YTN; PAM sequence: TTT
gggataccacacatgaagca

SEQ ID NO: 200811 - DNA, 20 bp, Artificial Sequence
  Description of Artificial Sequence: Synthetic oligonucleotide
  Target: LAMA2; (-) strand; PAM type: YTN; PAM sequence: TTT
tgggataccacacatgaagc

SEQ ID NO: 200812 - DNA, 20 bp, Artificial Sequence
  Description of Artificial Sequence: Synthetic oligonucleotide
  Target: LAMA2; (-) strand; PAM type: YTN; PAM sequence: CTT
ttgggataccacacatgaag

SEQ ID NO: 200813 - DNA, 20 bp, Artificial Sequence
  Description of Artificial Sequence: Synthetic oligonucleotide
  Target: LAMA2; (-) strand; PAM type: YTN; PAM sequence: TTC
aaagatcaaaagagaaaaca

SEQ ID NO: 200814 - DNA, 20 bp, Artificial Sequence
  Description of Artificial Sequence: Synthetic oligonucleotide
  Target: LAMA2; (-) strand; PAM type: YTN; PAM sequence: TTC
atgaaaggcgatcagcatat

SEQ ID NO: 200815 - DNA, 20 bp, Artificial Sequence
  Description of Artificial Sequence: Synthetic oligonucleotide
  Target: LAMA2; (-) strand; PAM type: YTN; PAM sequence: CTG
ttcatgaaaggcgatcagca

SEQ ID NO: 200816 - DNA, 20 bp, Artificial Sequence
  Description of Artificial Sequence: Synthetic oligonucleotide
  Target: LAMA2; (-) strand; PAM type: YTN; PAM sequence: TTG
aatgccactgttcatgaaag

SEQ ID NO: 200817 - DNA, 20 bp, Artificial Sequence
  Description of Artificial Sequence: Synthetic oligonucleotide
  Target: LAMA2; (-) strand; PAM type: YTN; PAM sequence: TTC
aaagtgcattgaatgccact

SEQ ID NO: 200818 - DNA, 20 bp, Artificial Sequence
  Description of Artificial Sequence: Synthetic oligonucleotide
  Target: LAMA2; (-) strand; PAM type: YTN; PAM sequence: TTT
caaagtgcattgaatgccac

SEQ ID NO: 200819 - DNA, 20 bp, Artificial Sequence
  Description of Artificial Sequence: Synthetic oligonucleotide
  Target: LAMA2; (-) strand; PAM type: YTN; PAM sequence: TTT
tcaaagtgcattgaatgcca

SEQ ID NO: 200820 - DNA, 20 bp, Artificial Sequence
  Description of Artificial Sequence: Synthetic oligonucleotide
  Target: LAMA2; (-) strand; PAM type: YTN; PAM sequence: TTT
ttcaaagtgcattgaatgcc

SEQ ID NO: 200821 - DNA, 20 bp, Artificial Sequence
  Description of Artificial Sequence: Synthetic oligonucleotide
  Target: LAMA2; (-) strand; PAM type: YTN; PAM sequence: TTT
tttcaaagtgcattgaatgc

SEQ ID NO: 200822 - DNA, 20 bp, Artificial Sequence
  Description of Artificial Sequence: Synthetic oligonucleotide
  Target: LAMA2; (-) strand; PAM type: YTN; PAM sequence: TTT
ttttcaaagtgcattgaatg

SEQ ID NO: 200823 - DNA, 20 bp, Artificial Sequence
  Description of Artificial Sequence: Synthetic oligonucleotide
  Target: LAMA2; (-) strand; PAM type: YTN; PAM sequence: CTG
tgtttttttcaaagtgcatt

SEQ ID NO: 200824 - DNA, 20 bp, Artificial Sequence
  Description of Artificial Sequence: Synthetic oligonucleotide
  Target: LAMA2; (-) strand; PAM type: YTN; PAM sequence: TTC
aaagaaaaagactgtgtttt

SEQ ID NO: 200825 - DNA, 20 bp, Artificial Sequence
  Description of Artificial Sequence: Synthetic oligonucleotide
  Target: LAMA2; (-) strand; PAM type: YTN; PAM sequence: CTT
caaagaaaaagactgtgttt

SEQ ID NO: 200826 - DNA, 20 bp, Artificial Sequence
  Description of Artificial Sequence: Synthetic oligonucleotide
  Target: LAMA2; (-) strand; PAM type: YTN; PAM sequence: TTA
ccttcaaagaaaaagactgt

SEQ ID NO: 200827 - DNA, 20 bp, Artificial Sequence
  Description of Artificial Sequence: Synthetic oligonucleotide
  Target: LAMA2; (-) strand; PAM type: YTN; PAM sequence: CTT
accttcaaagaaaaagactg

SEQ ID NO: 200828 - DNA, 20 bp, Artificial Sequence
  Description of Artificial Sequence: Synthetic oligonucleotide
  Target: LAMA2; (-) strand; PAM type: YTN; PAM sequence: TTA
caacttaccttcaaagaaaa

SEQ ID NO: 200829 - DNA, 20 bp, Artificial Sequence
  Description of Artificial Sequence: Synthetic oligonucleotide
  Target: LAMA2; (-) strand; PAM type: YTN; PAM sequence: CTT
acaacttaccttcaaagaaa

SEQ ID NO: 200830 - DNA, 20 bp, Artificial Sequence
  Description of Artificial Sequence: Synthetic oligonucleotide
  Target: LAMA2; (-) strand; PAM type: YTN; PAM sequence: TTC
ttacaacttaccttcaaaga

SEQ ID NO: 200831 - DNA, 20 bp, Artificial Sequence
  Description of Artificial Sequence: Synthetic oligonucleotide
  Target: LAMA2; (-) strand; PAM type: YTN; PAM sequence: TTT
cttacaacttaccttcaaag

SEQ ID NO: 200832 - DNA, 20 bp, Artificial Sequence
  Description of Artificial Sequence: Synthetic oligonucleotide
  Target: LAMA2; (-) strand; PAM type: YTN; PAM sequence: CTT
tcttacaacttaccttcaaa

SEQ ID NO: 200833 - DNA, 20 bp, Artificial Sequence
  Description of Artificial Sequence: Synthetic oligonucleotide
  Target: LAMA2; (-) strand; PAM type: YTN; PAM sequence: CTC
tttcttacaacttaccttca

SEQ ID NO: 200834 - DNA, 20 bp, Artificial Sequence
  Description of Artificial Sequence: Synthetic oligonucleotide
  Target: LAMA2; (-) strand; PAM type: YTN; PAM sequence: TTC
tctttcttacaacttacctt

SEQ ID NO: 200835 - DNA, 20 bp, Artificial Sequence
  Description of Artificial Sequence: Synthetic oligonucleotide
  Target: LAMA2; (-) strand; PAM type: YTN; PAM sequence: TTT
ctctttcttacaacttacct

SEQ ID NO: 200836 - DNA, 20 bp, Artificial Sequence
  Description of Artificial Sequence: Synthetic oligonucleotide
  Target: LAMA2; (-) strand; PAM type: YTN; PAM sequence: TTA
atgatttctctttcttacaa

SEQ ID NO: 200837 - DNA, 20 bp, Artificial Sequence
  Description of Artificial Sequence: Synthetic oligonucleotide
  Target: LAMA2; (-) strand; PAM type: YTN; PAM sequence: TTT
aatgatttctctttcttaca

SEQ ID NO: 200838 - DNA, 20 bp, Artificial Sequence
  Description of Artificial Sequence: Synthetic oligonucleotide
  Target: LAMA2; (-) strand; PAM type: YTN; PAM sequence: CTT
taatgatttctctttcttac

SEQ ID NO: 200839 - DNA, 20 bp, Artificial Sequence
  Description of Artificial Sequence: Synthetic oligonucleotide
  Target: LAMA2; (-) strand; PAM type: YTN; PAM sequence: CTC
caggctttaatgatttctct

SEQ ID NO: 200840 - DNA, 20 bp, Artificial Sequence
  Description of Artificial Sequence: Synthetic oligonucleotide
  Target: LAMA2; (-) strand; PAM type: YTN; PAM sequence: CTG
cactccaggctttaatgatt

SEQ ID NO: 200841 - DNA, 20 bp, Artificial Sequence
  Description of Artificial Sequence: Synthetic oligonucleotide
  Target: LAMA2; (-) strand; PAM type: YTN; PAM sequence: TTC
tgcactccaggctttaatga

SEQ ID NO: 200842 - DNA, 20 bp, Artificial Sequence
  Description of Artificial Sequence: Synthetic oligonucleotide
  Target: LAMA2; (-) strand; PAM type: YTN; PAM sequence: TTC
agtcgacaacaattctgcac

SEQ ID NO: 200843 - DNA, 20 bp, Artificial Sequence
  Description of Artificial Sequence: Synthetic oligonucleotide
  Target: LAMA2; (-) strand; PAM type: YTN; PAM sequence: TTT
cagtcgacaacaattctgca

SEQ ID NO: 200844 - DNA, 20 bp, Artificial Sequence
  Description of Artificial Sequence: Synthetic oligonucleotide
  Target: LAMA2; (-) strand; PAM type: YTN; PAM sequence: TTG
ataccatttcagtcgacaac

SEQ ID NO: 200845 - DNA, 20 bp, Artificial Sequence
  Description of Artificial Sequence: Synthetic oligonucleotide
  Target: LAMA2; (-) strand; PAM type: YTN; PAM sequence: CTT
gataccatttcagtcgacaa

SEQ ID NO: 200846 - DNA, 20 bp, Artificial Sequence
  Description of Artificial Sequence: Synthetic oligonucleotide
  Target: LAMA2; (-) strand; PAM type: YTN; PAM sequence: CTC
acttgataccatttcagtcg

SEQ ID NO: 200847 - DNA, 20 bp, Artificial Sequence
  Description of Artificial Sequence: Synthetic oligonucleotide
  Target: LAMA2; (-) strand; PAM type: YTN; PAM sequence: TTC
aactcacttgataccatttc

SEQ ID NO: 200848 - DNA, 20 bp, Artificial Sequence
  Description of Artificial Sequence: Synthetic oligonucleotide
  Target: LAMA2; (-) strand; PAM type: YTN; PAM sequence: TTA
aaatatgaggcattcaactc

SEQ ID NO: 200849 - DNA, 20 bp, Artificial Sequence
  Description of Artificial Sequence: Synthetic oligonucleotide
  Target: LAMA2; (-) strand; PAM type: YTN; PAM sequence: TTT
aaaatatgaggcattcaact

SEQ ID NO: 200850 - DNA, 20 bp, Artificial Sequence
  Description of Artificial Sequence: Synthetic oligonucleotide
  Target: LAMA2; (-) strand; PAM type: YTN; PAM sequence: TTT
taaaatatgaggcattcaac

SEQ ID NO: 200851 - DNA, 20 bp, Artificial Sequence
  Description of Artificial Sequence: Synthetic oligonucleotide
  Target: LAMA2; (-) strand; PAM type: YTN; PAM sequence: TTT
ttaaaatatgaggcattcaa

SEQ ID NO: 200852 - DNA, 20 bp, Artificial Sequence
  Description of Artificial Sequence: Synthetic oligonucleotide
  Target: LAMA2; (-) strand; PAM type: YTN; PAM sequence: TTA
gtaataatagagatcatgcc

SEQ ID NO: 200853 - DNA, 20 bp, Artificial Sequence
  Description of Artificial Sequence: Synthetic oligonucleotide
  Target: LAMA2; (-) strand; PAM type: YTN; PAM sequence: TTG
ttagtaataatagagatcat

SEQ ID NO: 200854 - DNA, 20 bp, Artificial Sequence
  Description of Artificial Sequence: Synthetic oligonucleotide
  Target: LAMA2; (-) strand; PAM type: YTN; PAM sequence: TTT
gttagtaataatagagatca

SEQ ID NO: 200855 - DNA, 20 bp, Artificial Sequence
  Description of Artificial Sequence: Synthetic oligonucleotide
  Target: LAMA2; (-) strand; PAM type: YTN; PAM sequence: TTT
tgttagtaataatagagatc

SEQ ID NO: 200856 - DNA, 20 bp, Artificial Sequence
  Description of Artificial Sequence: Synthetic oligonucleotide
  Target: LAMA2; (-) strand; PAM type: YTN; PAM sequence: TTT
ttgttagtaataatagagat

SEQ ID NO: 200857 - DNA, 20 bp, Artificial Sequence
  Description of Artificial Sequence: Synthetic oligonucleotide
  Target: LAMA2; (-) strand; PAM type: YTN; PAM sequence: TTT
tttgttagtaataatagaga

SEQ ID NO: 200858 - DNA, 20 bp, Artificial Sequence
  Description of Artificial Sequence: Synthetic oligonucleotide
  Target: LAMA2; (-) strand; PAM type: YTN; PAM sequence: TTT
ttttgttagtaataatagag

SEQ ID NO: 200859 - DNA, 20 bp, Artificial Sequence
  Description of Artificial Sequence: Synthetic oligonucleotide
  Target: LAMA2; (-) strand; PAM type: YTN; PAM sequence: TTC
ccatgtcagatatcacataa

SEQ ID NO: 200860 - DNA, 20 bp, Artificial Sequence
  Description of Artificial Sequence: Synthetic oligonucleotide
  Target: LAMA2; (-) strand; PAM type: YTN; PAM sequence: TTT
cccatgtcagatatcacata

SEQ ID NO: 200861 - DNA, 20 bp, Artificial Sequence
  Description of Artificial Sequence: Synthetic oligonucleotide
  Target: LAMA2; (-) strand; PAM type: YTN; PAM sequence: CTT
tcccatgtcagatatcacat

SEQ ID NO: 200862 - DNA, 20 bp, Artificial Sequence
  Description of Artificial Sequence: Synthetic oligonucleotide
  Target: LAMA2; (-) strand; PAM type: YTN; PAM sequence: CTC
atcaagcatccctttcccat

SEQ ID NO: 200863 - DNA, 20 bp, Artificial Sequence
  Description of Artificial Sequence: Synthetic oligonucleotide
  Target: LAMA2; (-) strand; PAM type: YTN; PAM sequence: CTA
ctcatcaagcatccctttcc

SEQ ID NO: 200864 - DNA, 20 bp, Artificial Sequence
  Description of Artificial Sequence: Synthetic oligonucleotide
  Target: LAMA2; (-) strand; PAM type: YTN; PAM sequence: TTG
gctactcatcaagcatccct

SEQ ID NO: 200865 - DNA, 20 bp, Artificial Sequence
  Description of Artificial Sequence: Synthetic oligonucleotide
  Target: LAMA2; (-) strand; PAM type: YTN; PAM sequence: TTC
aacatcattggctactcatc

SEQ ID NO: 200866 - DNA, 20 bp, Artificial Sequence
  Description of Artificial Sequence: Synthetic oligonucleotide
  Target: LAMA2; (-) strand; PAM type: YTN; PAM sequence: TTC
ataagaaaaacaagtcagtc

SEQ ID NO: 200867 - DNA, 20 bp, Artificial Sequence
  Description of Artificial Sequence: Synthetic oligonucleotide
  Target: LAMA2; (-) strand; PAM type: YTN; PAM sequence: CTT
cataagaaaaacaagtcagt

SEQ ID NO: 200868 - DNA, 20 bp, Artificial Sequence
  Description of Artificial Sequence: Synthetic oligonucleotide
  Target: LAMA2; (-) strand; PAM type: YTN; PAM sequence: CTG
ccttcataagaaaaacaagt

SEQ ID NO: 200869 - DNA, 20 bp, Artificial Sequence
  Description of Artificial Sequence: Synthetic oligonucleotide
  Target: LAMA2; (-) strand; PAM type: YTN; PAM sequence: CTA
aaatgctgccttcataagaa

SEQ ID NO: 200870 - DNA, 20 bp, Artificial Sequence
  Description of Artificial Sequence: Synthetic oligonucleotide
  Target: LAMA2; (-) strand; PAM type: YTN; PAM sequence: TTA
ctaaaatgctgccttcataa

SEQ ID NO: 200871 - DNA, 20 bp, Artificial Sequence
  Description of Artificial Sequence: Synthetic oligonucleotide
  Target: LAMA2; (-) strand; PAM type: YTN; PAM sequence: TTT
actaaaatgctgccttcata

SEQ ID NO: 200872 - DNA, 20 bp, Artificial Sequence
  Description of Artificial Sequence: Synthetic oligonucleotide
  Target: LAMA2; (-) strand; PAM type: YTN; PAM sequence: TTT
tactaaaatgctgccttcat

SEQ ID NO: 200873 - DNA, 20 bp, Artificial Sequence
  Description of Artificial Sequence: Synthetic oligonucleotide
  Target: LAMA2; (-) strand; PAM type: YTN; PAM sequence: CTA
tcagaaagaaagacaaacac

SEQ ID NO: 200874 - DNA, 20 bp, Artificial Sequence
  Description of Artificial Sequence: Synthetic oligonucleotide
  Target: LAMA2; (-) strand; PAM type: YTN; PAM sequence: TTA
gagcctatcagaaagaaaga

SEQ ID NO: 200875 - DNA, 20 bp, Artificial Sequence
  Description of Artificial Sequence: Synthetic oligonucleotide
  Target: LAMA2; (-) strand; PAM type: YTN; PAM sequence: TTC
aattagagcctatcagaaag

SEQ ID NO: 200876 - DNA, 20 bp, Artificial Sequence
  Description of Artificial Sequence: Synthetic oligonucleotide
  Target: LAMA2; (-) strand; PAM type: YTN; PAM sequence: CTT
caattagagcctatcagaaa

SEQ ID NO: 200877 - DNA, 20 bp, Artificial Sequence
  Description of Artificial Sequence: Synthetic oligonucleotide
  Target: LAMA2; (-) strand; PAM type: YTN; PAM sequence: TTC
aaacttcaattagagcctat

SEQ ID NO: 200878 - DNA, 20 bp, Artificial Sequence
  Description of Artificial Sequence: Synthetic oligonucleotide
  Target: LAMA2; (-) strand; PAM type: YTN; PAM sequence: CTT
caaacttcaattagagccta

SEQ ID NO: 200879 - DNA, 20 bp, Artificial Sequence
  Description of Artificial Sequence: Synthetic oligonucleotide
  Target: LAMA2; (-) strand; PAM type: YTN; PAM sequence: TTG
tgtaatgaaccttcaaactt

SEQ ID NO: 200880 - DNA, 20 bp, Artificial Sequence
  Description of Artificial Sequence: Synthetic oligonucleotide
  Target: LAMA2; (-) strand; PAM type: YTN; PAM sequence: TTC
ccaggcattgtgtaatgaac

SEQ ID NO: 200881 - DNA, 20 bp, Artificial Sequence
  Description of Artificial Sequence: Synthetic oligonucleotide
  Target: LAMA2; (-) strand; PAM type: YTN; PAM sequence: TTG
acaacatattcccaggcatt

SEQ ID NO: 200882 - DNA, 20 bp, Artificial Sequence
  Description of Artificial Sequence: Synthetic oligonucleotide
  Target: LAMA2; (-) strand; PAM type: YTN; PAM sequence: TTT
gacaacatattcccaggcat

SEQ ID NO: 200883 - DNA, 20 bp, Artificial Sequence
  Description of Artificial Sequence: Synthetic oligonucleotide
  Target: LAMA2; (-) strand; PAM type: YTN; PAM sequence: TTG
tatttgacaacatattccca

SEQ ID NO: 200884 - DNA, 20 bp, Artificial Sequence
  Description of Artificial Sequence: Synthetic oligonucleotide
  Target: LAMA2; (-) strand; PAM type: YTN; PAM sequence: CTG
tgggagaggtgaattgtatt

SEQ ID NO: 200885 - DNA, 20 bp, Artificial Sequence
  Description of Artificial Sequence: Synthetic oligonucleotide
  Target: LAMA2; (-) strand; PAM type: YTN; PAM sequence: TTC
actgtgggagaggtgaattg

SEQ ID NO: 200886 - DNA, 20 bp, Artificial Sequence
  Description of Artificial Sequence: Synthetic oligonucleotide
  Target: LAMA2; (-) strand; PAM type: YTN; PAM sequence: CTA
taaaatcatgccaatattca

SEQ ID NO: 200887 - DNA, 20 bp, Artificial Sequence
  Description of Artificial Sequence: Synthetic oligonucleotide
  Target: LAMA2; (-) strand; PAM type: YTN; PAM sequence: CTG
tcctataaaatcatgccaat

SEQ ID NO: 200888 - DNA, 20 bp, Artificial Sequence
  Description of Artificial Sequence: Synthetic oligonucleotide
  Target: LAMA2; (-) strand; PAM type: YTN; PAM sequence: CTA
gagtaccctgtcctataaaa

SEQ ID NO: 200889 - DNA, 20 bp, Artificial Sequence
  Description of Artificial Sequence: Synthetic oligonucleotide
  Target: LAMA2; (-) strand; PAM type: YTN; PAM sequence: CTC
tagagtaccctgtcctataa

SEQ ID NO: 200890 - DNA, 20 bp, Artificial Sequence
  Description of Artificial Sequence: Synthetic oligonucleotide
  Target: LAMA2; (-) strand; PAM type: YTN; PAM sequence: CTG
agctctagagtaccctgtcc

SEQ ID NO: 200891 - DNA, 20 bp, Artificial Sequence
  Description of Artificial Sequence: Synthetic oligonucleotide
  Target: LAMA2; (-) strand; PAM type: YTN; PAM sequence: TTA
tgacagctgagctctagagt

SEQ ID NO: 200892 - DNA, 20 bp, Artificial Sequence
  Description of Artificial Sequence: Synthetic oligonucleotide
  Target: LAMA2; (-) strand; PAM type: YTN; PAM sequence: TTG
gagccaaatattatgacagc

SEQ ID NO: 200893 - DNA, 20 bp, Artificial Sequence
  Description of Artificial Sequence: Synthetic oligonucleotide
  Target: LAMA2; (-) strand; PAM type: YTN; PAM sequence: TTA
tgaatgaaattggagccaaa

SEQ ID NO: 200894 - DNA, 20 bp, Artificial Sequence
  Description of Artificial Sequence: Synthetic oligonucleotide
  Target: LAMA2; (-) strand; PAM type: YTN; PAM sequence: CTG
tccattatgaatgaaattgg

SEQ ID NO: 200895 - DNA, 20 bp, Artificial Sequence
  Description of Artificial Sequence: Synthetic oligonucleotide
  Target: LAMA2; (-) strand; PAM type: YTN; PAM sequence: TTC
tgtccattatgaatgaaatt

SEQ ID NO: 200896 - DNA, 20 bp, Artificial Sequence
  Description of Artificial Sequence: Synthetic oligonucleotide
  Target: LAMA2; (-) strand; PAM type: YTN; PAM sequence: TTG
tagatattctgtccattatg

SEQ ID NO: 200897 - DNA, 20 bp, Artificial Sequence
  Description of Artificial Sequence: Synthetic oligonucleotide
  Target: LAMA2; (-) strand; PAM type: YTN; PAM sequence: TTC
aaaacattgtagatattctg

SEQ ID NO: 200898 - DNA, 20 bp, Artificial Sequence
  Description of Artificial Sequence: Synthetic oligonucleotide
  Target: LAMA2; (-) strand; PAM type: YTN; PAM sequence: TTG
aaagtagggattcaaaacat

SEQ ID NO: 200899 - DNA, 20 bp, Artificial Sequence
  Description of Artificial Sequence: Synthetic oligonucleotide
  Target: LAMA2; (-) strand; PAM type: YTN; PAM sequence: TTT
gaaagtagggattcaaaaca

SEQ ID NO: 200900 - DNA, 20 bp, Artificial Sequence
  Description of Artificial Sequence: Synthetic oligonucleotide
  Target: LAMA2; (-) strand; PAM type: YTN; PAM sequence: CTG
acatttgaaagtagggattc

SEQ ID NO: 200901 - DNA, 20 bp, Artificial Sequence
  Description of Artificial Sequence: Synthetic oligonucleotide
  Target: LAMA2; (-) strand; PAM type: YTN; PAM sequence: TTC
cagtgtgctgacatttgaaa

SEQ ID NO: 200902 - DNA, 20 bp, Artificial Sequence
  Description of Artificial Sequence: Synthetic oligonucleotide
  Target: LAMA2; (-) strand; PAM type: YTN; PAM sequence: TTG
ttccagtgtgctgacatttg

SEQ ID NO: 200903 - DNA, 20 bp, Artificial Sequence
  Description of Artificial Sequence: Synthetic oligonucleotide
  Target: LAMA2; (-) strand; PAM type: YTN; PAM sequence: TTT
gttccagtgtgctgacattt

SEQ ID NO: 200904 - DNA, 20 bp, Artificial Sequence
  Description of Artificial Sequence: Synthetic oligonucleotide
  Target: LAMA2; (-) strand; PAM type: YTN; PAM sequence: TTA
atatttgttccagtgtgctg

SEQ ID NO: 200905 - DNA, 20 bp, Artificial Sequence
  Description of Artificial Sequence: Synthetic oligonucleotide
  Target: LAMA2; (-) strand; PAM type: YTN; PAM sequence: TTT
aatatttgttccagtgtgct

SEQ ID NO: 200906 - DNA, 20 bp, Artificial Sequence
  Description of Artificial Sequence: Synthetic oligonucleotide
  Target: LAMA2; (-) strand; PAM type: YTN; PAM sequence: CTT
taatatttgttccagtgtgc

SEQ ID NO: 200907 - DNA, 20 bp, Artificial Sequence
  Description of Artificial Sequence: Synthetic oligonucleotide
  Target: LAMA2; (-) strand; PAM type: YTN; PAM sequence: TTC
tttaatatttgttccagtgt

SEQ ID NO: 200908 - DNA, 20 bp, Artificial Sequence
  Description of Artificial Sequence: Synthetic oligonucleotide
  Target: LAMA2; (-) strand; PAM type: YTN; PAM sequence: TTC
aaacccattctttaatattt

SEQ ID NO: 200909 - DNA, 20 bp, Artificial Sequence
  Description of Artificial Sequence: Synthetic oligonucleotide
  Target: LAMA2; (-) strand; PAM type: YTN; PAM sequence: TTA
gattcaaacccattctttaa

SEQ ID NO: 200910 - DNA, 20 bp, Artificial Sequence
  Description of Artificial Sequence: Synthetic oligonucleotide
  Target: LAMA2; (-) strand; PAM type: YTN; PAM sequence: CTT
agattcaaacccattcttta

SEQ ID NO: 200911 - DNA, 20 bp, Artificial Sequence
  Description of Artificial Sequence: Synthetic oligonucleotide
  Target: LAMA2; (-) strand; PAM type: YTN; PAM sequence: CTA
cttagattcaaacccattct

SEQ ID NO: 200912 - DNA, 20 bp, Artificial Sequence
  Description of Artificial Sequence: Synthetic oligonucleotide
  Target: LAMA2; (-) strand; PAM type: YTN; PAM sequence: CTC
atctacttagattcaaaccc

SEQ ID NO: 200913 - DNA, 20 bp, Artificial Sequence
  Description of Artificial Sequence: Synthetic oligonucleotide
  Target: LAMA2; (-) strand; PAM type: YTN; PAM sequence: TTC
aaggaaatactcatctactt

SEQ ID NO: 200914 - DNA, 20 bp, Artificial Sequence
  Description of Artificial Sequence: Synthetic oligonucleotide
  Target: LAMA2; (-) strand; PAM type: YTN; PAM sequence: CTT
caaggaaatactcatctact

SEQ ID NO: 200915 - DNA, 20 bp, Artificial Sequence
  Description of Artificial Sequence: Synthetic oligonucleotide
  Target: LAMA2; (-) strand; PAM type: YTN; PAM sequence: TTG
cttcaaggaaatactcatct

SEQ ID NO: 200916 - DNA, 20 bp, Artificial Sequence
  Description of Artificial Sequence: Synthetic oligonucleotide
  Target: LAMA2; (-) strand; PAM type: YTN; PAM sequence: CTA
taacatgttgcttcaaggaa

SEQ ID NO: 200917 - DNA, 20 bp, Artificial Sequence
  Description of Artificial Sequence: Synthetic oligonucleotide
  Target: LAMA2; (-) strand; PAM type: YTN; PAM sequence: TTA
ggctataacatgttgcttca

SEQ ID NO: 200918 - DNA, 20 bp, Artificial Sequence
  Description of Artificial Sequence: Synthetic oligonucleotide
  Target: LAMA2; (-) strand; PAM type: YTN; PAM sequence: TTT
aggctataacatgttgcttc

SEQ ID NO: 200919 - DNA, 20 bp, Artificial Sequence
  Description of Artificial Sequence: Synthetic oligonucleotide
  Target: LAMA2; (-) strand; PAM type: YTN; PAM sequence: TTG
aaggaaacaacatttaggct

SEQ ID NO: 200920 - DNA, 20 bp, Artificial Sequence
  Description of Artificial Sequence: Synthetic oligonucleotide
  Target: LAMA2; (-) strand; PAM type: YTN; PAM sequence: TTA
aacataattgaaggaaacaa

SEQ ID NO: 200921 - DNA, 20 bp, Artificial Sequence
  Description of Artificial Sequence: Synthetic oligonucleotide
  Target: LAMA2; (-) strand; PAM type: YTN; PAM sequence: TTT
aaacataattgaaggaaaca

SEQ ID NO: 200922 - DNA, 20 bp, Artificial Sequence
  Description of Artificial Sequence: Synthetic oligonucleotide
  Target: LAMA2; (-) strand; PAM type: YTN; PAM sequence: TTG
tttaaacataattgaaggaa

SEQ ID NO: 200923 - DNA, 20 bp, Artificial Sequence
  Description of Artificial Sequence: Synthetic oligonucleotide
  Target: LAMA2; (-) strand; PAM type: YTN; PAM sequence: TTA
cattgtttaaacataattga

SEQ ID NO: 200924 - DNA, 20 bp, Artificial Sequence
  Description of Artificial Sequence: Synthetic oligonucleotide
  Target: LAMA2; (-) strand; PAM type: YTN; PAM sequence: TTA
aggttacattgtttaaacat

SEQ ID NO: 200925 - DNA, 20 bp, Artificial Sequence
  Description of Artificial Sequence: Synthetic oligonucleotide
  Target: LAMA2; (-) strand; PAM type: YTN; PAM sequence: TTT
aaggttacattgtttaaaca

SEQ ID NO: 200926 - DNA, 20 bp, Artificial Sequence
  Description of Artificial Sequence: Synthetic oligonucleotide
  Target: LAMA2; (-) strand; PAM type: YTN; PAM sequence: CTG
tgaaacatttaaggttacat

SEQ ID NO: 200927 - DNA, 20 bp, Artificial Sequence
  Description of Artificial Sequence: Synthetic oligonucleotide
  Target: LAMA2; (-) strand; PAM type: YTN; PAM sequence: TTC
aagtgatacatctgtgaaac

SEQ ID NO: 200928 - DNA, 20 bp, Artificial Sequence
  Description of Artificial Sequence: Synthetic oligonucleotide
  Target: LAMA2; (-) strand; PAM type: YTN; PAM sequence: TTT
caagtgatacatctgtgaaa

SEQ ID NO: 200929 - DNA, 20 bp, Artificial Sequence
  Description of Artificial Sequence: Synthetic oligonucleotide
  Target: LAMA2; (-) strand; PAM type: YTN; PAM sequence: TTG
gatttcaagtgatacatctg

SEQ ID NO: 200930 - DNA, 20 bp, Artificial Sequence
  Description of Artificial Sequence: Synthetic oligonucleotide
  Target: LAMA2; (-) strand; PAM type: YTN; PAM sequence: TTT
ggatttcaagtgatacatct

SEQ ID NO: 200931 - DNA, 20 bp, Artificial Sequence
  Description of Artificial Sequence: Synthetic oligonucleotide
  Target: LAMA2; (-) strand; PAM type: YTN; PAM sequence: TTT
tggatttcaagtgatacatc

SEQ ID NO: 200932 - DNA, 20 bp, Artificial Sequence
  Description of Artificial Sequence: Synthetic oligonucleotide
  Target: LAMA2; (-) strand; PAM type: YTN; PAM sequence: TTG
atgagtagtatgtgttttgg

SEQ ID NO: 200933 - DNA, 20 bp, Artificial Sequence
  Description of Artificial Sequence: Synthetic oligonucleotide
  Target: LAMA2; (-) strand; PAM type: YTN; PAM sequence: TTT
gatgagtagtatgtgttttg

SEQ ID NO: 200934 - DNA, 20 bp, Artificial Sequence
  Description of Artificial Sequence: Synthetic oligonucleotide
  Target: LAMA2; (-) strand; PAM type: YTN; PAM sequence: CTT
tgatgagtagtatgtgtttt

SEQ ID NO: 200935 - DNA, 20 bp, Artificial Sequence
  Description of Artificial Sequence: Synthetic oligonucleotide
  Target: LAMA2; (-) strand; PAM type: YTN; PAM sequence: TTA
aataaagatgactttgatga

SEQ ID NO: 200936 - DNA, 20 bp, Artificial Sequence
  Description of Artificial Sequence: Synthetic oligonucleotide
  Target: LAMA2; (-) strand; PAM type: YTN; PAM sequence: CTT
aaataaagatgactttgatg

SEQ ID NO: 200937 - DNA, 20 bp, Artificial Sequence
  Description of Artificial Sequence: Synthetic oligonucleotide
  Target: LAMA2; (-) strand; PAM type: YTN; PAM sequence: CTA
agcttaaataaagatgactt

SEQ ID NO: 200938 - DNA, 20 bp, Artificial Sequence
  Description of Artificial Sequence: Synthetic oligonucleotide
  Target: LAMA2; (-) strand; PAM type: YTN; PAM sequence: TTC
ctaagcttaaataaagatga

SEQ ID NO: 200939 - DNA, 20 bp, Artificial Sequence
  Description of Artificial Sequence: Synthetic oligonucleotide
  Target: LAMA2; (-) strand; PAM type: YTN; PAM sequence: CTT
cctaagcttaaataaagatg

SEQ ID NO: 200940 - DNA, 20 bp, Artificial Sequence
  Description of Artificial Sequence: Synthetic oligonucleotide
  Target: LAMA2; (-) strand; PAM type: YTN; PAM sequence: TTC
ttcctaagcttaaataaaga

SEQ ID NO: 200941 - DNA, 20 bp, Artificial Sequence
  Description of Artificial Sequence: Synthetic oligonucleotide
  Target: LAMA2; (-) strand; PAM type: YTN; PAM sequence: TTT
cttcctaagcttaaataaag

SEQ ID NO: 200942 - DNA, 20 bp, Artificial Sequence
  Description of Artificial Sequence: Synthetic oligonucleotide
  Target: LAMA2; (-) strand; PAM type: YTN; PAM sequence: TTT
tcttcctaagcttaaataaa

SEQ ID NO: 200943 - DNA, 20 bp, Artificial Sequence
  Description of Artificial Sequence: Synthetic oligonucleotide
  Target: LAMA2; (-) strand; PAM type: YTN; PAM sequence: TTT
ttcttcctaagcttaaataa

SEQ ID NO: 200944 - DNA, 20 bp, Artificial Sequence
  Description of Artificial Sequence: Synthetic oligonucleotide
  Target: LAMA2; (-) strand; PAM type: YTN; PAM sequence: CTA
tttttcttcctaagcttaaa

SEQ ID NO: 200945 - DNA, 20 bp, Artificial Sequence
  Description of Artificial Sequence: Synthetic oligonucleotide
  Target: LAMA2; (-) strand; PAM type: YTN; PAM sequence: TTC
tatttttcttcctaagctta

SEQ ID NO: 200946 - DNA, 20 bp, Artificial Sequence
  Description of Artificial Sequence: Synthetic oligonucleotide
  Target: LAMA2; (-) strand; PAM type: YTN; PAM sequence: TTT
ctatttttcttcctaagctt

SEQ ID NO: 200947 - DNA, 20 bp, Artificial Sequence
  Description of Artificial Sequence: Synthetic oligonucleotide
  Target: LAMA2; (-) strand; PAM type: YTN; PAM sequence: TTC
agatttctatttttcttcct

SEQ ID NO: 200948 - DNA, 20 bp, Artificial Sequence
  Description of Artificial Sequence: Synthetic oligonucleotide
  Target: LAMA2; (-) strand; PAM type: YTN; PAM sequence: TTT
cagatttctatttttcttcc

SEQ ID NO: 200949 - DNA, 20 bp, Artificial Sequence
  Description of Artificial Sequence: Synthetic oligonucleotide
  Target: LAMA2; (-) strand; PAM type: YTN; PAM sequence: CTA
agagcaaacatttcagattt

SEQ ID NO: 200950 - DNA, 20 bp, Artificial Sequence
  Description of Artificial Sequence: Synthetic oligonucleotide
  Target: LAMA2; (-) strand; PAM type: YTN; PAM sequence: CTG
ccagatgagaagtgtgtgtg

SEQ ID NO: 200951 - DNA, 20 bp, Artificial Sequence
  Description of Artificial Sequence: Synthetic oligonucleotide
  Target: LAMA2; (-) strand; PAM type: YTN; PAM sequence: TTC
agaaatgtcctgccagatga

SEQ ID NO: 200952 - DNA, 20 bp, Artificial Sequence
  Description of Artificial Sequence: Synthetic oligonucleotide
  Target: LAMA2; (-) strand; PAM type: YTN; PAM sequence: TTC
ccaaataaattcagaaatgt

SEQ ID NO: 200953 - DNA, 20 bp, Artificial Sequence
  Description of Artificial Sequence: Synthetic oligonucleotide
  Target: LAMA2; (-) strand; PAM type: YTN; PAM sequence: TTT
cccaaataaattcagaaatg

SEQ ID NO: 200954 - DNA, 20 bp, Artificial Sequence
  Description of Artificial Sequence: Synthetic oligonucleotide
  Target: LAMA2; (-) strand; PAM type: YTN; PAM sequence: TTC
aatttcccaaataaattcag

SEQ ID NO: 200955 - DNA, 20 bp, Artificial Sequence
  Description of Artificial Sequence: Synthetic oligonucleotide
  Target: LAMA2; (-) strand; PAM type: YTN; PAM sequence: CTG
acatatattcaatttcccaa

SEQ ID NO: 200956 - DNA, 20 bp, Artificial Sequence
  Description of Artificial Sequence: Synthetic oligonucleotide
  Target: LAMA2; (-) strand; PAM type: YTN; PAM sequence: CTA
cctgacatatattcaatttc

SEQ ID NO: 200957 - DNA, 20 bp, Artificial Sequence
  Description of Artificial Sequence: Synthetic oligonucleotide
  Target: LAMA2; (-) strand; PAM type: YTN; PAM sequence: TTA
cccagcaacccaaacctacc

SEQ ID NO: 200958 - DNA, 20 bp, Artificial Sequence
  Description of Artificial Sequence: Synthetic oligonucleotide
  Target: LAMA2; (-) strand; PAM type: YTN; PAM sequence: TTT
acccagcaacccaaacctac

SEQ ID NO: 200959 - DNA, 20 bp, Artificial Sequence
  Description of Artificial Sequence: Synthetic oligonucleotide
  Target: LAMA2; (-) strand; PAM type: YTN; PAM sequence: CTC
atttacccagcaacccaaac

SEQ ID NO: 200960 - DNA, 20 bp, Artificial Sequence
  Description of Artificial Sequence: Synthetic oligonucleotide
  Target: LAMA2; (-) strand; PAM type: YTN; PAM sequence: CTG
aagtacactcatttacccag

SEQ ID NO: 200961 - DNA, 20 bp, Artificial Sequence
  Description of Artificial Sequence: Synthetic oligonucleotide
  Target: LAMA2; (-) strand; PAM type: YTN; PAM sequence: CTG
acactgaagtacactcattt

SEQ ID NO: 200962 - DNA, 20 bp, Artificial Sequence
  Description of Artificial Sequence: Synthetic oligonucleotide
  Target: LAMA2; (-) strand; PAM type: YTN; PAM sequence: TTA
ataaaaacagtcctgacact

SEQ ID NO: 200963 - DNA, 20 bp, Artificial Sequence
  Description of Artificial Sequence: Synthetic oligonucleotide
  Target: LAMA2; (-) strand; PAM type: YTN; PAM sequence: CTG
ttaataaaaacagtcctgac

SEQ ID NO: 200964 - DNA, 20 bp, Artificial Sequence
  Description of Artificial Sequence: Synthetic oligonucleotide
  Target: LAMA2; (-) strand; PAM type: YTN; PAM sequence: TTA
taaaatctgttaataaaaac

SEQ ID NO: 200965 - DNA, 20 bp, Artificial Sequence
  Description of Artificial Sequence: Synthetic oligonucleotide
  Target: LAMA2; (-) strand; PAM type: YTN; PAM sequence: TTT
ataaaatctgttaataaaaa

SEQ ID NO: 200966 - DNA, 20 bp, Artificial Sequence
  Description of Artificial Sequence: Synthetic oligonucleotide
  Target: LAMA2; (-) strand; PAM type: YTN; PAM sequence: CTA
ccaagccagtttataaaatc

SEQ ID NO: 200967 - DNA, 20 bp, Artificial Sequence
  Description of Artificial Sequence: Synthetic oligonucleotide
  Target: LAMA2; (-) strand; PAM type: YTN; PAM sequence: CTG
gaaactaccaagccagttta

SEQ ID NO: 200968 - DNA, 20 bp, Artificial Sequence
  Description of Artificial Sequence: Synthetic oligonucleotide
  Target: LAMA2; (-) strand; PAM type: YTN; PAM sequence: TTG
ccacagaactggaaactacc

SEQ ID NO: 200969 - DNA, 20 bp, Artificial Sequence
  Description of Artificial Sequence: Synthetic oligonucleotide
  Target: LAMA2; (-) strand; PAM type: YTN; PAM sequence: CTT
gccacagaactggaaactac

SEQ ID NO: 200970 - DNA, 20 bp, Artificial Sequence
  Description of Artificial Sequence: Synthetic oligonucleotide
  Target: LAMA2; (-) strand; PAM type: YTN; PAM sequence: TTC
ttgccacagaactggaaact

SEQ ID NO: 200971 - DNA, 20 bp, Artificial Sequence
  Description of Artificial Sequence: Synthetic oligonucleotide
  Target: LAMA2; (-) strand; PAM type: YTN; PAM sequence: TTG
ttcttgccacagaactggaa

SEQ ID NO: 200972 - DNA, 20 bp, Artificial Sequence
  Description of Artificial Sequence: Synthetic oligonucleotide
  Target: LAMA2; (-) strand; PAM type: YTN; PAM sequence: TTA
tgatagattgttcttgccac

SEQ ID NO: 200973 - DNA, 20 bp, Artificial Sequence
  Description of Artificial Sequence: Synthetic oligonucleotide
  Target: LAMA2; (-) strand; PAM type: YTN; PAM sequence: TTA
ttatgatagattgttcttgc

SEQ ID NO: 200974 - DNA, 20 bp, Artificial Sequence
  Description of Artificial Sequence: Synthetic oligonucleotide
  Target: LAMA2; (-) strand; PAM type: YTN; PAM sequence: TTT
attatgatagattgttcttg

SEQ ID NO: 200975 - DNA, 20 bp, Artificial Sequence
  Description of Artificial Sequence: Synthetic oligonucleotide
  Target: LAMA2; (-) strand; PAM type: YTN; PAM sequence: TTA
caggtttattatgatagatt

SEQ ID NO: 200976 - DNA, 20 bp, Artificial Sequence
  Description of Artificial Sequence: Synthetic oligonucleotide
  Target: LAMA2; (-) strand; PAM type: YTN; PAM sequence: TTA
tgttacaggtttattatgat

SEQ ID NO: 200977 - DNA, 20 bp, Artificial Sequence
  Description of Artificial Sequence: Synthetic oligonucleotide
  Target: LAMA2; (-) strand; PAM type: YTN; PAM sequence: TTT
atgttacaggtttattatga

SEQ ID NO: 200978 - DNA, 20 bp, Artificial Sequence
  Description of Artificial Sequence: Synthetic oligonucleotide
  Target: LAMA2; (-) strand; PAM type: YTN; PAM sequence: TTT
tatgttacaggtttattatg

SEQ ID NO: 200979 - DNA, 20 bp, Artificial Sequence
  Description of Artificial Sequence: Synthetic oligonucleotide
  Target: LAMA2; (-) strand; PAM type: YTN; PAM sequence: CTT
ttatgttacaggtttattat

SEQ ID NO: 200980 - DNA, 20 bp, Artificial Sequence
  Description of Artificial Sequence: Synthetic oligonucleotide
  Target: LAMA2; (-) strand; PAM type: YTN; PAM sequence: CTG
tacttttatgttacaggttt

SEQ ID NO: 200981 - DNA, 20 bp, Artificial Sequence
  Description of Artificial Sequence: Synthetic oligonucleotide
  Target: LAMA2; (-) strand; PAM type: YTN; PAM sequence: TTC
tgtacttttatgttacaggt

SEQ ID NO: 200982 - DNA, 20 bp, Artificial Sequence
  Description of Artificial Sequence: Synthetic oligonucleotide
  Target: LAMA2; (-) strand; PAM type: YTN; PAM sequence: TTG
aaacaggaatgtattctgta

SEQ ID NO: 200983 - DNA, 20 bp, Artificial Sequence
  Description of Artificial Sequence: Synthetic oligonucleotide
  Target: LAMA2; (-) strand; PAM type: YTN; PAM sequence: CTT
gaaacaggaatgtattctgt

SEQ ID NO: 200984 - DNA, 20 bp, Artificial Sequence
  Description of Artificial Sequence: Synthetic oligonucleotide
  Target: LAMA2; (-) strand; PAM type: YTN; PAM sequence: CTC
ttgaaacaggaatgtattct

SEQ ID NO: 200985 - DNA, 20 bp, Artificial Sequence
  Description of Artificial Sequence: Synthetic oligonucleotide
  Target: LAMA2; (-) strand; PAM type: YTN; PAM sequence: TTA
cagactcttgaaacaggaat

SEQ ID NO: 200986 - DNA, 20 bp, Artificial Sequence
  Description of Artificial Sequence: Synthetic oligonucleotide
  Target: LAMA2; (-) strand; PAM type: YTN; PAM sequence: CTT
acagactcttgaaacaggaa

SEQ ID NO: 200987 - DNA, 20 bp, Artificial Sequence
  Description of Artificial Sequence: Synthetic oligonucleotide
  Target: LAMA2; (-) strand; PAM type: YTN; PAM sequence: CTC
ttacagactcttgaaacagg

SEQ ID NO: 200988 - DNA, 20 bp, Artificial Sequence
  Description of Artificial Sequence: Synthetic oligonucleotide
  Target: LAMA2; (-) strand; PAM type: YTN; PAM sequence: CTC
ctcttacagactcttgaaac

SEQ ID NO: 200989 - DNA, 20 bp, Artificial Sequence
  Description of Artificial Sequence: Synthetic oligonucleotide
  Target: LAMA2; (-) strand; PAM type: YTN; PAM sequence: TTC
atgaggggactcctcttaca

SEQ ID NO: 200990 - DNA, 20 bp, Artificial Sequence
  Description of Artificial Sequence: Synthetic oligonucleotide
  Target: LAMA2; (-) strand; PAM type: YTN; PAM sequence: CTG
ttcatgaggggactcctctt

SEQ ID NO: 200991 - DNA, 20 bp, Artificial Sequence
  Description of Artificial Sequence: Synthetic oligonucleotide
  Target: LAMA2; (-) strand; PAM type: YTN; PAM sequence: CTC
atataaactgttcatgaggg

SEQ ID NO: 200992 - DNA, 20 bp, Artificial Sequence
  Description of Artificial Sequence: Synthetic oligonucleotide
  Target: LAMA2; (-) strand; PAM type: YTN; PAM sequence: CTC
tcatataaactgttcatgag

SEQ ID NO: 200993 - DNA, 20 bp, Artificial Sequence
  Description of Artificial Sequence: Synthetic oligonucleotide
  Target: LAMA2; (-) strand; PAM type: YTN; PAM sequence: TTA
taatcctctcatataaactg

SEQ ID NO: 200994 - DNA, 20 bp, Artificial Sequence
  Description of Artificial Sequence: Synthetic oligonucleotide
  Target: LAMA2; (-) strand; PAM type: YTN; PAM sequence: TTT
ataatcctctcatataaact

SEQ ID NO: 200995 - DNA, 20 bp, Artificial Sequence
  Description of Artificial Sequence: Synthetic oligonucleotide
  Target: LAMA2; (-) strand; PAM type: YTN; PAM sequence: TTT
tataatcctctcatataaac

SEQ ID NO: 200996 - DNA, 20 bp, Artificial Sequence
  Description of Artificial Sequence: Synthetic oligonucleotide
  Target: LAMA2; (-) strand; PAM type: YTN; PAM sequence: TTC
attttataatcctctcatat

SEQ ID NO: 200997 - DNA, 20 bp, Artificial Sequence
  Description of Artificial Sequence: Synthetic oligonucleotide
  Target: LAMA2; (-) strand; PAM type: YTN; PAM sequence: CTT
cattttataatcctctcata

SEQ ID NO: 200998 - DNA, 20 bp, Artificial Sequence
  Description of Artificial Sequence: Synthetic oligonucleotide
  Target: LAMA2; (-) strand; PAM type: YTN; PAM sequence: CTG
aacttcattttataatcctc

SEQ ID NO: 200999 - DNA, 20 bp, Artificial Sequence
  Description of Artificial Sequence: Synthetic oligonucleotide
  Target: LAMA2; (-) strand; PAM type: YTN; PAM sequence: CTG
ctgaacttcattttataatc

SEQ ID NO: 201000 - DNA, 20 bp, Artificial Sequence
  Description of Artificial Sequence: Synthetic oligonucleotide
  Target: LAMA2; (-) strand; PAM type: YTN; PAM sequence: CTA
ctgctgaacttcattttata

SEQ ID NO: 201001 - DNA, 20 bp, Artificial Sequence
  Description of Artificial Sequence: Synthetic oligonucleotide
  Target: LAMA2; (-) strand; PAM type: YTN; PAM sequence: TTG
tgctactgctgaacttcatt

SEQ ID NO: 201002 - DNA, 20 bp, Artificial Sequence
  Description of Artificial Sequence: Synthetic oligonucleotide
  Target: LAMA2; (-) strand; PAM type: YTN; PAM sequence: CTT
gtgctactgctgaacttcat

SEQ ID NO: 201003 - DNA, 20 bp, Artificial Sequence
  Description of Artificial Sequence: Synthetic oligonucleotide
  Target: LAMA2; (-) strand; PAM type: YTN; PAM sequence: TTG
cttgtgctactgctgaactt

SEQ ID NO: 201004 - DNA, 20 bp, Artificial Sequence
  Description of Artificial Sequence: Synthetic oligonucleotide
  Target: LAMA2; (-) strand; PAM type: YTN; PAM sequence: CTG
cagttgcttgtgctactgct

SEQ ID NO: 201005 - DNA, 20 bp, Artificial Sequence
  Description of Artificial Sequence: Synthetic oligonucleotide
  Target: LAMA2; (-) strand; PAM type: YTN; PAM sequence: TTC
actgcagttgcttgtgctac

SEQ ID NO: 201006 - DNA, 20 bp, Artificial Sequence
  Description of Artificial Sequence: Synthetic oligonucleotide
  Target: LAMA2; (-) strand; PAM type: YTN; PAM sequence: TTA
acaacacaccattcactgca

SEQ ID NO: 201007 - DNA, 20 bp, Artificial Sequence
  Description of Artificial Sequence: Synthetic oligonucleotide
  Target: LAMA2; (-) strand; PAM type: YTN; PAM sequence: CTT
aacaacacaccattcactgc

SEQ ID NO: 201008 - DNA, 20 bp, Artificial Sequence
  Description of Artificial Sequence: Synthetic oligonucleotide
  Target: LAMA2; (-) strand; PAM type: YTN; PAM sequence: TTA
aagaaccttaacaacacacc

SEQ ID NO: 201009 - DNA, 20 bp, Artificial Sequence
  Description of Artificial Sequence: Synthetic oligonucleotide
  Target: LAMA2; (-) strand; PAM type: YTN; PAM sequence: TTT
aaagaaccttaacaacacac

SEQ ID NO: 201010 - DNA, 20 bp, Artificial Sequence
  Description of Artificial Sequence: Synthetic oligonucleotide
  Target: LAMA2; (-) strand; PAM type: YTN; PAM sequence: TTC
atgatttaaagaaccttaac

SEQ ID NO: 201011 - DNA, 20 bp, Artificial Sequence
  Description of Artificial Sequence: Synthetic oligonucleotide
  Target: LAMA2; (-) strand; PAM type: YTN; PAM sequence: TTT
catgatttaaagaaccttaa

SEQ ID NO: 201012 - DNA, 20 bp, Artificial Sequence
  Description of Artificial Sequence: Synthetic oligonucleotide
  Target: LAMA2; (-) strand; PAM type: YTN; PAM sequence: TTT
tcatgatttaaagaacctta

SEQ ID NO: 201013 - DNA, 20 bp, Artificial Sequence
  Description of Artificial Sequence: Synthetic oligonucleotide
  Target: LAMA2; (-) strand; PAM type: YTN; PAM sequence: TTT
ttcatgatttaaagaacctt

SEQ ID NO: 201014 - DNA, 20 bp, Artificial Sequence
  Description of Artificial Sequence: Synthetic oligonucleotide
  Target: LAMA2; (-) strand; PAM type: YTN; PAM sequence: TTT
tttcatgatttaaagaacct

SEQ ID NO: 201015 - DNA, 20 bp, Artificial Sequence
  Description of Artificial Sequence: Synthetic oligonucleotide
  Target: LAMA2; (-) strand; PAM type: YTN; PAM sequence: TTT
ttttcatgatttaaagaacc

SEQ ID NO: 201016 - DNA, 20 bp, Artificial Sequence
  Description of Artificial Sequence: Synthetic oligonucleotide
  Target: LAMA2; (-) strand; PAM type: YTN; PAM sequence: TTG
aaagtatatttttttcatga

SEQ ID NO: 201017 - DNA, 20 bp, Artificial Sequence
  Description of Artificial Sequence: Synthetic oligonucleotide
  Target: LAMA2; (-) strand; PAM type: YTN; PAM sequence: CTT
gaaagtatatttttttcatg

SEQ ID NO: 201018 - DNA, 20 bp, Artificial Sequence
  Description of Artificial Sequence: Synthetic oligonucleotide
  Target: LAMA2; (-) strand; PAM type: YTN; PAM sequence: TTA
ataaatccttgaaagtatat

SEQ ID NO: 201019 - DNA, 20 bp, Artificial Sequence
  Description of Artificial Sequence: Synthetic oligonucleotide
  Target: LAMA2; (-) strand; PAM type: YTN; PAM sequence: TTG
gagtaagattaataaatcct

SEQ ID NO: 201020 - DNA, 20 bp, Artificial Sequence
  Description of Artificial Sequence: Synthetic oligonucleotide
  Target: LAMA2; (-) strand; PAM type: YTN; PAM sequence: TTT
ggagtaagattaataaatcc

SEQ ID NO: 201021 - DNA, 20 bp, Artificial Sequence
  Description of Artificial Sequence: Synthetic oligonucleotide
  Target: LAMA2; (-) strand; PAM type: YTN; PAM sequence: TTA
ccaaaatatatatatttgga

SEQ ID NO: 201022 - DNA, 20 bp, Artificial Sequence
  Description of Artificial Sequence: Synthetic oligonucleotide
  Target: LAMA2; (-) strand; PAM type: YTN; PAM sequence: TTT
accaaaatatatatatttgg

SEQ ID NO: 201023 - DNA, 20 bp, Artificial Sequence
  Description of Artificial Sequence: Synthetic oligonucleotide
  Target: LAMA2; (-) strand; PAM type: YTN; PAM sequence: CTA
tttaccaaaatatatatatt

SEQ ID NO: 201024 - DNA, 20 bp, Artificial Sequence
  Description of Artificial Sequence: Synthetic oligonucleotide
  Target: LAMA2; (-) strand; PAM type: YTN; PAM sequence: TTG
ctatttaccaaaatatatat

SEQ ID NO: 201025 - DNA, 20 bp, Artificial Sequence
  Description of Artificial Sequence: Synthetic oligonucleotide
  Target: LAMA2; (-) strand; PAM type: YTN; PAM sequence: TTC
caattgctatttaccaaaat

SEQ ID NO: 201026 - DNA, 20 bp, Artificial Sequence
  Description of Artificial Sequence: Synthetic oligonucleotide
  Target: LAMA2; (-) strand; PAM type: YTN; PAM sequence: TTT
ccaattgctatttaccaaaa

SEQ ID NO: 201027 - DNA, 20 bp, Artificial Sequence
  Description of Artificial Sequence: Synthetic oligonucleotide
  Target: LAMA2; (-) strand; PAM type: YTN; PAM sequence: CTT
tccaattgctatttaccaaa

SEQ ID NO: 201028 - DNA, 20 bp, Artificial Sequence
  Description of Artificial Sequence: Synthetic oligonucleotide
  Target: LAMA2; (-) strand; PAM type: YTN; PAM sequence: TTC
tttccaattgctatttacca

SEQ ID NO: 201029 - DNA, 20 bp, Artificial Sequence
  Description of Artificial Sequence: Synthetic oligonucleotide
  Target: LAMA2; (-) strand; PAM type: YTN; PAM sequence: CTT
ctttccaattgctatttacc

SEQ ID NO: 201030 - DNA, 20 bp, Artificial Sequence
  Description of Artificial Sequence: Synthetic oligonucleotide
  Target: LAMA2; (-) strand; PAM type: YTN; PAM sequence: CTA
agaaatacaaacccttcttt

SEQ ID NO: 201031 - DNA, 20 bp, Artificial Sequence
  Description of Artificial Sequence: Synthetic oligonucleotide
  Target: LAMA2; (-) strand; PAM type: YTN; PAM sequence: TTC
taagaaatacaaacccttct

SEQ ID NO: 201032 - DNA, 20 bp, Artificial Sequence
  Description of Artificial Sequence: Synthetic oligonucleotide
  Target: LAMA2; (-) strand; PAM type: YTN; PAM sequence: CTT
ctaagaaatacaaacccttc

SEQ ID NO: 201033 - DNA, 20 bp, Artificial Sequence
  Description of Artificial Sequence: Synthetic oligonucleotide
  Target: LAMA2; (-) strand; PAM type: YTN; PAM sequence: CTC
agtgcttctaagaaatacaa

SEQ ID NO: 201034 - DNA, 20 bp, Artificial Sequence
  Description of Artificial Sequence: Synthetic oligonucleotide
  Target: LAMA2; (-) strand; PAM type: YTN; PAM sequence: TTG
gtcagctcagtgcttctaag

SEQ ID NO: 201035 - DNA, 20 bp, Artificial Sequence
  Description of Artificial Sequence: Synthetic oligonucleotide
  Target: LAMA2; (-) strand; PAM type: YTN; PAM sequence: TTC
caatatattggtcagctcag

SEQ ID NO: 201036 - DNA, 20 bp, Artificial Sequence
  Description of Artificial Sequence: Synthetic oligonucleotide
  Target: LAMA2; (-) strand; PAM type: YTN; PAM sequence: TTT
ccaatatattggtcagctca

SEQ ID NO: 201037 - DNA, 20 bp, Artificial Sequence
  Description of Artificial Sequence: Synthetic oligonucleotide
  Target: LAMA2; (-) strand; PAM type: YTN; PAM sequence: TTT
tccaatatattggtcagctc

SEQ ID NO: 201038 - DNA, 20 bp, Artificial Sequence
  Description of Artificial Sequence: Synthetic oligonucleotide
  Target: LAMA2; (-) strand; PAM type: YTN; PAM sequence: TTA
gttttccaatatattggtca

SEQ ID NO: 201039 - DNA, 20 bp, Artificial Sequence
  Description of Artificial Sequence: Synthetic oligonucleotide
  Target: LAMA2; (-) strand; PAM type: YTN; PAM sequence: CTT
agttttccaatatattggtc

SEQ ID NO: 201040 - DNA, 20 bp, Artificial Sequence
  Description of Artificial Sequence: Synthetic oligonucleotide
  Target: LAMA2; (-) strand; PAM type: YTN; PAM sequence: TTA
cttagttttccaatatattg

SEQ ID NO: 201041 - DNA, 20 bp, Artificial Sequence
  Description of Artificial Sequence: Synthetic oligonucleotide
  Target: LAMA2; (-) strand; PAM type: YTN; PAM sequence: TTT
acttagttttccaatatatt

SEQ ID NO: 201042 - DNA, 20 bp, Artificial Sequence
  Description of Artificial Sequence: Synthetic oligonucleotide
  Target: LAMA2; (-) strand; PAM type: YTN; PAM sequence: CTT
tacttagttttccaatatat

SEQ ID NO: 201043 - DNA, 20 bp, Artificial Sequence
  Description of Artificial Sequence: Synthetic oligonucleotide
  Target: LAMA2; (-) strand; PAM type: YTN; PAM sequence: CTG
ctttacttagttttccaata

SEQ ID NO: 201044 - DNA, 20 bp, Artificial Sequence
  Description of Artificial Sequence: Synthetic oligonucleotide
  Target: LAMA2; (-) strand; PAM type: YTN; PAM sequence: CTG
gcctgctttacttagttttc

SEQ ID NO: 201045 - DNA, 20 bp, Artificial Sequence
  Description of Artificial Sequence: Synthetic oligonucleotide
  Target: LAMA2; (-) strand; PAM type: YTN; PAM sequence: CTC
agaatagagatcactggcct

SEQ ID NO: 201046 - DNA, 20 bp, Artificial Sequence
  Description of Artificial Sequence: Synthetic oligonucleotide
  Target: LAMA2; (-) strand; PAM type: YTN; PAM sequence: TTC
actcagaatagagatcactg

SEQ ID NO: 201047 - DNA, 20 bp, Artificial Sequence
  Description of Artificial Sequence: Synthetic oligonucleotide
  Target: LAMA2; (-) strand; PAM type: YTN; PAM sequence: TTT
cactcagaatagagatcact

SEQ ID NO: 201048 - DNA, 20 bp, Artificial Sequence
  Description of Artificial Sequence: Synthetic oligonucleotide
  Target: LAMA2; (-) strand; PAM type: YTN; PAM sequence: TTG
cacccagatgtcaaacagag

SEQ ID NO: 201049 - DNA, 20 bp, Artificial Sequence
  Description of Artificial Sequence: Synthetic oligonucleotide
  Target: LAMA2; (-) strand; PAM type: YTN; PAM sequence: CTG
acatagccatcattgcaccc

SEQ ID NO: 201050 - DNA, 20 bp, Artificial Sequence
  Description of Artificial Sequence: Synthetic oligonucleotide
  Target: LAMA2; (-) strand; PAM type: YTN; PAM sequence: TTG
cacaagagaaaaataaagtg

SEQ ID NO: 201051 - DNA, 20 bp, Artificial Sequence
  Description of Artificial Sequence: Synthetic oligonucleotide
  Target: LAMA2; (-) strand; PAM type: YTN; PAM sequence: CTT
gcacaagagaaaaataaagt

SEQ ID NO: 201052 - DNA, 20 bp, Artificial Sequence
  Description of Artificial Sequence: Synthetic oligonucleotide
  Target: LAMA2; (-) strand; PAM type: YTN; PAM sequence: TTA
tcaaacttgcacaagagaaa

SEQ ID NO: 201053 - DNA, 20 bp, Artificial Sequence
  Description of Artificial Sequence: Synthetic oligonucleotide
  Target: LAMA2; (-) strand; PAM type: YTN; PAM sequence: TTT
atcaaacttgcacaagagaa

SEQ ID NO: 201054 - DNA, 20 bp, Artificial Sequence
  Description of Artificial Sequence: Synthetic oligonucleotide
  Target: LAMA2; (-) strand; PAM type: YTN; PAM sequence: TTT
tatcaaacttgcacaagaga

SEQ ID NO: 201055 - DNA, 20 bp, Artificial Sequence
  Description of Artificial Sequence: Synthetic oligonucleotide
  Target: LAMA2; (-) strand; PAM type: YTN; PAM sequence: TTA
aagagttttatcaaacttgc

SEQ ID NO: 201056 - DNA, 20 bp, Artificial Sequence
  Description of Artificial Sequence: Synthetic oligonucleotide
  Target: LAMA2; (-) strand; PAM type: YTN; PAM sequence: TTT
aaagagttttatcaaacttg

SEQ ID NO: 201057 - DNA, 20 bp, Artificial Sequence
  Description of Artificial Sequence: Synthetic oligonucleotide
  Target: LAMA2; (-) strand; PAM type: YTN; PAM sequence: TTA
gtatttaaagagttttatca

SEQ ID NO: 201058 - DNA, 20 bp, Artificial Sequence
  Description of Artificial Sequence: Synthetic oligonucleotide
  Target: LAMA2; (-) strand; PAM type: YTN; PAM sequence: CTA
aaatacacattagtatttaa

SEQ ID NO: 201059 - DNA, 20 bp, Artificial Sequence
  Description of Artificial Sequence: Synthetic oligonucleotide
  Target: LAMA2; (-) strand; PAM type: YTN; PAM sequence: TTC
taaaatacacattagtattt

SEQ ID NO: 201060 - DNA, 20 bp, Artificial Sequence
  Description of Artificial Sequence: Synthetic oligonucleotide
  Target: LAMA2; (-) strand; PAM type: YTN; PAM sequence: TTT
ctaaaatacacattagtatt

SEQ ID NO: 201061 - DNA, 20 bp, Artificial Sequence
  Description of Artificial Sequence: Synthetic oligonucleotide
  Target: LAMA2; (-) strand; PAM type: YTN; PAM sequence: TTT
tctaaaatacacattagtat

SEQ ID NO: 201062 - DNA, 20 bp, Artificial Sequence
  Description of Artificial Sequence: Synthetic oligonucleotide
  Target: LAMA2; (-) strand; PAM type: YTN; PAM sequence: TTG
tgttttctaaaatacacatt

SEQ ID NO: 201063 - DNA, 20 bp, Artificial Sequence
  Description of Artificial Sequence: Synthetic oligonucleotide
  Target: LAMA2; (-) strand; PAM type: YTN; PAM sequence: TTT
gtgttttctaaaatacacat

SEQ ID NO: 201064 - DNA, 20 bp, Artificial Sequence
  Description of Artificial Sequence: Synthetic oligonucleotide
  Target: LAMA2; (-) strand; PAM type: YTN; PAM sequence: CTG
gaatataacagaatttgtgt

SEQ ID NO: 201065 - DNA, 20 bp, Artificial Sequence
  Description of Artificial Sequence: Synthetic oligonucleotide
  Target: LAMA2; (-) strand; PAM type: YTN; PAM sequence: CTC
ctggaatataacagaatttg

SEQ ID NO: 201066 - DNA, 20 bp, Artificial Sequence
  Description of Artificial Sequence: Synthetic oligonucleotide
  Target: LAMA2; (-) strand; PAM type: YTN; PAM sequence: TTC
ctcctggaatataacagaat

SEQ ID NO: 201067 - DNA, 20 bp, Artificial Sequence
  Description of Artificial Sequence: Synthetic oligonucleotide
  Target: LAMA2; (-) strand; PAM type: YTN; PAM sequence: CTT
cctcctggaatataacagaa

SEQ ID NO: 201068 - DNA, 20 bp, Artificial Sequence
  Description of Artificial Sequence: Synthetic oligonucleotide
  Target: LAMA2; (-) strand; PAM type: YTN; PAM sequence: TTC
cttcctcctggaatataaca

SEQ ID NO: 201069 - DNA, 20 bp, Artificial Sequence
  Description of Artificial Sequence: Synthetic oligonucleotide
  Target: LAMA2; (-) strand; PAM type: YTN; PAM sequence: TTT
ccttcctcctggaatataac

SEQ ID NO: 201070 - DNA, 20 bp, Artificial Sequence
  Description of Artificial Sequence: Synthetic oligonucleotide
  Target: LAMA2; (-) strand; PAM type: YTN; PAM sequence: CTA
aggcaatttccttcctcctg

SEQ ID NO: 201071 - DNA, 20 bp, Artificial Sequence
  Description of Artificial Sequence: Synthetic oligonucleotide
  Target: LAMA2; (-) strand; PAM type: YTN; PAM sequence: TTC
atatcctaaggcaatttcct

SEQ ID NO: 201072 - DNA, 20 bp, Artificial Sequence
  Description of Artificial Sequence: Synthetic oligonucleotide
  Target: LAMA2; (-) strand; PAM type: YTN; PAM sequence: CTG
attcatatcctaaggcaatt

SEQ ID NO: 201073 - DNA, 20 bp, Artificial Sequence
  Description of Artificial Sequence: Synthetic oligonucleotide
  Target: LAMA2; (-) strand; PAM type: YTN; PAM sequence: TTA
tcaaatctgattcatatcct

SEQ ID NO: 201074 - DNA, 20 bp, Artificial Sequence
  Description of Artificial Sequence: Synthetic oligonucleotide
  Target: LAMA2; (-) strand; PAM type: YTN; PAM sequence: TTC
atgttatcaaatctgattca

SEQ ID NO: 201075 - DNA, 20 bp, Artificial Sequence
  Description of Artificial Sequence: Synthetic oligonucleotide
  Target: LAMA2; (-) strand; PAM type: YTN; PAM sequence: TTA
aataagatagttcatgttat

SEQ ID NO: 201076 - DNA, 20 bp, Artificial Sequence
  Description of Artificial Sequence: Synthetic oligonucleotide
  Target: LAMA2; (-) strand; PAM type: YTN; PAM sequence: TTA
gaataattaaataagatagt

SEQ ID NO: 201077 - DNA, 20 bp, Artificial Sequence
  Description of Artificial Sequence: Synthetic oligonucleotide
  Target: LAMA2; (-) strand; PAM type: YTN; PAM sequence: TTT
agaataattaaataagatag

SEQ ID NO: 201078 - DNA, 20 bp, Artificial Sequence
  Description of Artificial Sequence: Synthetic oligonucleotide
  Target: LAMA2; (-) strand; PAM type: YTN; PAM sequence: TTC
aatttagaataattaaataa

SEQ ID NO: 201079 - DNA, 20 bp, Artificial Sequence
  Description of Artificial Sequence: Synthetic oligonucleotide
  Target: LAMA2; (-) strand; PAM type: YTN; PAM sequence: TTT
caatttagaataattaaata

SEQ ID NO: 201080 - DNA, 20 bp, Artificial Sequence
  Description of Artificial Sequence: Synthetic oligonucleotide
  Target: LAMA2; (-) strand; PAM type: YTN; PAM sequence: TTT
tcaatttagaataattaaat

SEQ ID NO: 201081 - DNA, 20 bp, Artificial Sequence
  Description of Artificial Sequence: Synthetic oligonucleotide
  Target: LAMA2; (-) strand; PAM type: YTN; PAM sequence: TTC
atgatgttttcaatttagaa

SEQ ID NO: 201082 - DNA, 20 bp, Artificial Sequence
  Description of Artificial Sequence: Synthetic oligonucleotide
  Target: LAMA2; (-) strand; PAM type: YTN; PAM sequence: TTT
catgatgttttcaatttaga

SEQ ID NO: 201083 - DNA, 20 bp, Artificial Sequence
  Description of Artificial Sequence: Synthetic oligonucleotide
  Target: LAMA2; (-) strand; PAM type: YTN; PAM sequence: CTT
tcatgatgttttcaatttag

SEQ ID NO: 201084 - DNA, 20 bp, Artificial Sequence
  Description of Artificial Sequence: Synthetic oligonucleotide
  Target: LAMA2; (-) strand; PAM type: YTN; PAM sequence: TTA
tctttcatgatgttttcaat

SEQ ID NO: 201085 - DNA, 20 bp, Artificial Sequence
  Description of Artificial Sequence: Synthetic oligonucleotide
  Target: LAMA2; (-) strand; PAM type: YTN; PAM sequence: TTC
aaataagcaagaaacaagag

SEQ ID NO: 201086 - DNA, 20 bp, Artificial Sequence
  Description of Artificial Sequence: Synthetic oligonucleotide
  Target: LAMA2; (-) strand; PAM type: YTN; PAM sequence: CTA
agtagaaagaagaataaaac

SEQ ID NO: 201087 - DNA, 20 bp, Artificial Sequence
  Description of Artificial Sequence: Synthetic oligonucleotide
  Target: LAMA2; (-) strand; PAM type: YTN; PAM sequence: TTA
gcctaagtagaaagaagaat

SEQ ID NO: 201088 - DNA, 20 bp, Artificial Sequence
  Description of Artificial Sequence: Synthetic oligonucleotide
  Target: LAMA2; (-) strand; PAM type: YTN; PAM sequence: CTT
agcctaagtagaaagaagaa

SEQ ID NO: 201089 - DNA, 20 bp, Artificial Sequence
  Description of Artificial Sequence: Synthetic oligonucleotide
  Target: LAMA2; (-) strand; PAM type: YTN; PAM sequence: TTG
agagcttagcctaagtagaa

SEQ ID NO: 201090 - DNA, 20 bp, Artificial Sequence
  Description of Artificial Sequence: Synthetic oligonucleotide
  Target: LAMA2; (-) strand; PAM type: YTN; PAM sequence: TTT
gagagcttagcctaagtaga

SEQ ID NO: 201091 - DNA, 20 bp, Artificial Sequence
  Description of Artificial Sequence: Synthetic oligonucleotide
  Target: LAMA2; (-) strand; PAM type: YTN; PAM sequence: TTT
tgagagcttagcctaagtag

SEQ ID NO: 201092 - DNA, 20 bp, Artificial Sequence
  Description of Artificial Sequence: Synthetic oligonucleotide
  Target: LAMA2; (-) strand; PAM type: YTN; PAM sequence: CTT
ttgagagcttagcctaagta

SEQ ID NO: 201093 - DNA, 20 bp, Artificial Sequence
  Description of Artificial Sequence: Synthetic oligonucleotide
  Target: LAMA2; (-) strand; PAM type: YTN; PAM sequence: TTC
cttttgagagcttagcctaa

SEQ ID NO: 201094 - DNA, 20 bp, Artificial Sequence
  Description of Artificial Sequence: Synthetic oligonucleotide
  Target: LAMA2; (-) strand; PAM type: YTN; PAM sequence: TTT
ccttttgagagcttagccta

SEQ ID NO: 201095 - DNA, 20 bp, Artificial Sequence
  Description of Artificial Sequence: Synthetic oligonucleotide
  Target: LAMA2; (-) strand; PAM type: YTN; PAM sequence: CTT
tccttttgagagcttagcct

SEQ ID NO: 201096 - DNA, 20 bp, Artificial Sequence
  Description of Artificial Sequence: Synthetic oligonucleotide
  Target: LAMA2; (-) strand; PAM type: YTN; PAM sequence: CTC
ctttccttttgagagcttag

SEQ ID NO: 201097 - DNA, 20 bp, Artificial Sequence
  Description of Artificial Sequence: Synthetic oligonucleotide
  Target: LAMA2; (-) strand; PAM type: YTN; PAM sequence: TTA
catctcctttccttttgaga

SEQ ID NO: 201098 - DNA, 20 bp, Artificial Sequence
  Description of Artificial Sequence: Synthetic oligonucleotide
  Target: LAMA2; (-) strand; PAM type: YTN; PAM sequence: TTG
aattacatctcctttccttt

SEQ ID NO: 201099 - DNA, 20 bp, Artificial Sequence
  Description of Artificial Sequence: Synthetic oligonucleotide
  Target: LAMA2; (-) strand; PAM type: YTN; PAM sequence: TTA
catacattgaattacatctc

SEQ ID NO: 201100 - DNA, 20 bp, Artificial Sequence
  Description of Artificial Sequence: Synthetic oligonucleotide
  Target: LAMA2; (-) strand; PAM type: YTN; PAM sequence: CTT
acatacattgaattacatct

SEQ ID NO: 201101 - DNA, 20 bp, Artificial Sequence
  Description of Artificial Sequence: Synthetic oligonucleotide
  Target: LAMA2; (-) strand; PAM type: YTN; PAM sequence: TTA
gaaacttacatacattgaat

SEQ ID NO: 201102 - DNA, 20 bp, Artificial Sequence
  Description of Artificial Sequence: Synthetic oligonucleotide
  Target: LAMA2; (-) strand; PAM type: YTN; PAM sequence: CTT
agaaacttacatacattgaa

SEQ ID NO: 201103 - DNA, 20 bp, Artificial Sequence
  Description of Artificial Sequence: Synthetic oligonucleotide
  Target: LAMA2; (-) strand; PAM type: YTN; PAM sequence: CTA
cacttagaaacttacataca

SEQ ID NO: 201104 - DNA, 20 bp, Artificial Sequence
  Description of Artificial Sequence: Synthetic oligonucleotide
  Target: LAMA2; (-) strand; PAM type: YTN; PAM sequence: TTG
aaaaatacctacacttagaa

SEQ ID NO: 201105 - DNA, 20 bp, Artificial Sequence
  Description of Artificial Sequence: Synthetic oligonucleotide
  Target: LAMA2; (-) strand; PAM type: YTN; PAM sequence: TTG
ttgaaaaatacctacactta

SEQ ID NO: 201106 - DNA, 20 bp, Artificial Sequence
  Description of Artificial Sequence: Synthetic oligonucleotide
  Target: LAMA2; (-) strand; PAM type: YTN; PAM sequence: TTT
gttgaaaaatacctacactt

SEQ ID NO: 201107 - DNA, 20 bp, Artificial Sequence
  Description of Artificial Sequence: Synthetic oligonucleotide
  Target: LAMA2; (-) strand; PAM type: YTN; PAM sequence: TTA
tgtgtttgttgaaaaatacc

SEQ ID NO: 201108 - DNA, 20 bp, Artificial Sequence
  Description of Artificial Sequence: Synthetic oligonucleotide
  Target: LAMA2; (-) strand; PAM type: YTN; PAM sequence: TTT
atgtgtttgttgaaaaatac

SEQ ID NO: 201109 - DNA, 20 bp, Artificial Sequence
  Description of Artificial Sequence: Synthetic oligonucleotide
  Target: LAMA2; (-) strand; PAM type: YTN; PAM sequence: TTG
tttatgtgtttgttgaaaaa

SEQ ID NO: 201110 - DNA, 20 bp, Artificial Sequence
  Description of Artificial Sequence: Synthetic oligonucleotide
  Target: LAMA2; (-) strand; PAM type: YTN; PAM sequence: TTA
tgtgacataagtaataatgt

SEQ ID NO: 201111 - DNA, 20 bp, Artificial Sequence
  Description of Artificial Sequence: Synthetic oligonucleotide
  Target: LAMA2; (-) strand; PAM type: YTN; PAM sequence: TTT
atgtgacataagtaataatg

SEQ ID NO: 201112 - DNA, 20 bp, Artificial Sequence
  Description of Artificial Sequence: Synthetic oligonucleotide
  Target: LAMA2; (-) strand; PAM type: YTN; PAM sequence: TTT
tatgtgacataagtaataat

SEQ ID NO: 201113 - DNA, 20 bp, Artificial Sequence
  Description of Artificial Sequence: Synthetic oligonucleotide
  Target: LAMA2; (-) strand; PAM type: YTN; PAM sequence: TTT
ttatgtgacataagtaataa

SEQ ID NO: 201114 - DNA, 20 bp, Artificial Sequence
  Description of Artificial Sequence: Synthetic oligonucleotide
  Target: LAMA2; (-) strand; PAM type: YTN; PAM sequence: TTA
aacacagtttttatgtgaca

SEQ ID NO: 201115 - DNA, 20 bp, Artificial Sequence
  Description of Artificial Sequence: Synthetic oligonucleotide
  Target: LAMA2; (-) strand; PAM type: YTN; PAM sequence: TTT
aaacacagtttttatgtgac

SEQ ID NO: 201116 - DNA, 20 bp, Artificial Sequence
  Description of Artificial Sequence: Synthetic oligonucleotide
  Target: LAMA2; (-) strand; PAM type: YTN; PAM sequence: CTG
tttaaacacagtttttatgt

SEQ ID NO: 201117 - DNA, 20 bp, Artificial Sequence
  Description of Artificial Sequence: Synthetic oligonucleotide
  Target: LAMA2; (-) strand; PAM type: YTN; PAM sequence: TTA
atctgtttaaacacagtttt

SEQ ID NO: 201118 - DNA, 20 bp, Artificial Sequence
  Description of Artificial Sequence: Synthetic oligonucleotide
  Target: LAMA2; (-) strand; PAM type: YTN; PAM sequence: TTT
aatctgtttaaacacagttt

SEQ ID NO: 201119 - DNA, 20 bp, Artificial Sequence
  Description of Artificial Sequence: Synthetic oligonucleotide
  Target: LAMA2; (-) strand; PAM type: YTN; PAM sequence: TTT
taatctgtttaaacacagtt

SEQ ID NO: 201120 - DNA, 20 bp, Artificial Sequence
  Description of Artificial Sequence: Synthetic oligonucleotide
  Target: LAMA2; (-) strand; PAM type: YTN; PAM sequence: TTT
ttaatctgtttaaacacagt

SEQ ID NO: 201121 - DNA, 20 bp, Artificial Sequence
  Description of Artificial Sequence: Synthetic oligonucleotide
  Target: LAMA2; (-) strand; PAM type: YTN; PAM sequence: CTC
cagaaaatatttttaatctg

SEQ ID NO: 201122 - DNA, 20 bp, Artificial Sequence
  Description of Artificial Sequence: Synthetic oligonucleotide
  Target: LAMA2; (-) strand; PAM type: YTN; PAM sequence: CTC
tccagaaaatatttttaatc

SEQ ID NO: 201123 - DNA, 20 bp, Artificial Sequence
  Description of Artificial Sequence: Synthetic oligonucleotide
  Target: LAMA2; (-) strand; PAM type: YTN; PAM sequence: TTG
taaaataaataaaactctcc

SEQ ID NO: 201124 - DNA, 20 bp, Artificial Sequence
  Description of Artificial Sequence: Synthetic oligonucleotide
  Target: LAMA2; (-) strand; PAM type: YTN; PAM sequence: TTG
taaacattgtaaaataaata

SEQ ID NO: 201125 - DNA, 20 bp, Artificial Sequence
  Description of Artificial Sequence: Synthetic oligonucleotide
  Target: LAMA2; (-) strand; PAM type: YTN; PAM sequence: CTT
gtaaacattgtaaaataaat

SEQ ID NO: 201126 - DNA, 20 bp, Artificial Sequence
  Description of Artificial Sequence: Synthetic oligonucleotide
  Target: LAMA2; (-) strand; PAM type: YTN; PAM sequence: TTC
acttgtaaacattgtaaaat

SEQ ID NO: 201127 - DNA, 20 bp, Artificial Sequence
  Description of Artificial Sequence: Synthetic oligonucleotide
  Target: LAMA2; (-) strand; PAM type: YTN; PAM sequence: TTG
acaattcacttgtaaacatt

SEQ ID NO: 201128 - DNA, 20 bp, Artificial Sequence
  Description of Artificial Sequence: Synthetic oligonucleotide
  Target: LAMA2; (-) strand; PAM type: YTN; PAM sequence: CTT
gacaattcacttgtaaacat

SEQ ID NO: 201129 - DNA, 20 bp, Artificial Sequence
  Description of Artificial Sequence: Synthetic oligonucleotide
  Target: LAMA2; (-) strand; PAM type: YTN; PAM sequence: TTG
ggagacatcttgacaattca

SEQ ID NO: 201130 - DNA, 20 bp, Artificial Sequence
  Description of Artificial Sequence: Synthetic oligonucleotide
  Target: LAMA2; (-) strand; PAM type: YTN; PAM sequence: CTG
gaaaggaaataatattggga

SEQ ID NO: 201131 - DNA, 20 bp, Artificial Sequence
  Description of Artificial Sequence: Synthetic oligonucleotide
  Target: LAMA2; (-) strand; PAM type: YTN; PAM sequence: CTG
tctggaaaggaaataatatt

SEQ ID NO: 201132 - DNA, 20 bp, Artificial Sequence
  Description of Artificial Sequence: Synthetic oligonucleotide
  Target: LAMA2; (-) strand; PAM type: YTN; PAM sequence: TTG
ctgtctggaaaggaaataat

SEQ ID NO: 201133 - DNA, 20 bp, Artificial Sequence
  Description of Artificial Sequence: Synthetic oligonucleotide
  Target: LAMA2; (-) strand; PAM type: YTN; PAM sequence: TTA
aagattgctgtctggaaagg

SEQ ID NO: 201134 - DNA, 20 bp, Artificial Sequence
  Description of Artificial Sequence: Synthetic oligonucleotide
  Target: LAMA2; (-) strand; PAM type: YTN; PAM sequence: TTT
aaagattgctgtctggaaag

SEQ ID NO: 201135 - DNA, 20 bp, Artificial Sequence
  Description of Artificial Sequence: Synthetic oligonucleotide
  Target: LAMA2; (-) strand; PAM type: YTN; PAM sequence: CTC
aagcaggatttaaagattgc

SEQ ID NO: 201136 - DNA, 20 bp, Artificial Sequence
  Description of Artificial Sequence: Synthetic oligonucleotide
  Target: LAMA2; (-) strand; PAM type: YTN; PAM sequence: CTG
gaataaaagatgactcaagc

SEQ ID NO: 201137 - DNA, 20 bp, Artificial Sequence
  Description of Artificial Sequence: Synthetic oligonucleotide
  Target: LAMA2; (-) strand; PAM type: YTN; PAM sequence: CTC
aaaaaaaggaaaactggaat

SEQ ID NO: 201138 - DNA, 20 bp, Artificial Sequence
  Description of Artificial Sequence: Synthetic oligonucleotide
  Target: LAMA2; (-) strand; PAM type: YTN; PAM sequence: TTA
cactcaaaaaaaggaaaact

SEQ ID NO: 201139 - DNA, 20 bp, Artificial Sequence
  Description of Artificial Sequence: Synthetic oligonucleotide
  Target: LAMA2; (-) strand; PAM type: YTN; PAM sequence: TTT
acactcaaaaaaaggaaaac

SEQ ID NO: 201140 - DNA, 20 bp, Artificial Sequence
  Description of Artificial Sequence: Synthetic oligonucleotide
  Target: LAMA2; (-) strand; PAM type: YTN; PAM sequence: CTT
tacactcaaaaaaaggaaaa

SEQ ID NO: 201141 - DNA, 20 bp, Artificial Sequence
  Description of Artificial Sequence: Synthetic oligonucleotide
  Target: LAMA2; (-) strand; PAM type: YTN; PAM sequence: TTG
cctttacactcaaaaaaagg

SEQ ID NO: 201142 - DNA, 20 bp, Artificial Sequence
  Description of Artificial Sequence: Synthetic oligonucleotide
  Target: LAMA2; (-) strand; PAM type: YTN; PAM sequence: TTA
ttgcctttacactcaaaaaa

SEQ ID NO: 201143 - DNA, 20 bp, Artificial Sequence
  Description of Artificial Sequence: Synthetic oligonucleotide
  Target: LAMA2; (-) strand; PAM type: YTN; PAM sequence: TTT
attgcctttacactcaaaaa

SEQ ID NO: 201144 - DNA, 20 bp, Artificial Sequence
  Description of Artificial Sequence: Synthetic oligonucleotide
  Target: LAMA2; (-) strand; PAM type: YTN; PAM sequence: TTA
taatttattgcctttacact

SEQ ID NO: 201145 - DNA, 20 bp, Artificial Sequence
  Description of Artificial Sequence: Synthetic oligonucleotide
  Target: LAMA2; (-) strand; PAM type: YTN; PAM sequence: TTG
ttataatttattgcctttac

SEQ ID NO: 201146 - DNA, 20 bp, Artificial Sequence
  Description of Artificial Sequence: Synthetic oligonucleotide
  Target: LAMA2; (-) strand; PAM type: YTN; PAM sequence: TTA
ttgttataatttattgcctt

SEQ ID NO: 201147 - DNA, 20 bp, Artificial Sequence
  Description of Artificial Sequence: Synthetic oligonucleotide
  Target: LAMA2; (-) strand; PAM type: YTN; PAM sequence: TTT
attgttataatttattgcct

SEQ ID NO: 201148 - DNA, 20 bp, Artificial Sequence
  Description of Artificial Sequence: Synthetic oligonucleotide
  Target: LAMA2; (-) strand; PAM type: YTN; PAM sequence: TTT
tattgttataatttattgcc

SEQ ID NO: 201149 - DNA, 20 bp, Artificial Sequence
  Description of Artificial Sequence: Synthetic oligonucleotide
  Target: LAMA2; (-) strand; PAM type: YTN; PAM sequence: CTT
ttattgttataatttattgc

SEQ ID NO: 201150 - DNA, 20 bp, Artificial Sequence
  Description of Artificial Sequence: Synthetic oligonucleotide
  Target: LAMA2; (-) strand; PAM type: YTN; PAM sequence: CTA
tgggacaaagagtataagtc

SEQ ID NO: 201151 - DNA, 20 bp, Artificial Sequence
  Description of Artificial Sequence: Synthetic oligonucleotide
  Target: LAMA2; (-) strand; PAM type: YTN; PAM sequence: TTC
aacagaaaagagaaactatg

SEQ ID NO: 201152 - DNA, 20 bp, Artificial Sequence
  Description of Artificial Sequence: Synthetic oligonucleotide
  Target: LAMA2; (-) strand; PAM type: YTN; PAM sequence: TTT
caacagaaaagagaaactat

SEQ ID NO: 201153 - DNA, 20 bp, Artificial Sequence
  Description of Artificial Sequence: Synthetic oligonucleotide
  Target: LAMA2; (-) strand; PAM type: YTN; PAM sequence: CTA
tatttcaacagaaaagagaa

SEQ ID NO: 201154 - DNA, 20 bp, Artificial Sequence
  Description of Artificial Sequence: Synthetic oligonucleotide
  Target: LAMA2; (-) strand; PAM type: YTN; PAM sequence: TTC
caaagagcaagctatatttc

SEQ ID NO: 201155 - DNA, 20 bp, Artificial Sequence
  Description of Artificial Sequence: Synthetic oligonucleotide
  Target: LAMA2; (-) strand; PAM type: YTN; PAM sequence: TTA
atattccaaagagcaagcta

SEQ ID NO: 201156 - DNA, 20 bp, Artificial Sequence
  Description of Artificial Sequence: Synthetic oligonucleotide
  Target: LAMA2; (-) strand; PAM type: YTN; PAM sequence: TTA
catgttaatattccaaagag

SEQ ID NO: 201157 - DNA, 20 bp, Artificial Sequence
  Description of Artificial Sequence: Synthetic oligonucleotide
  Target: LAMA2; (-) strand; PAM type: YTN; PAM sequence: TTT
acatgttaatattccaaaga

SEQ ID NO: 201158 - DNA, 20 bp, Artificial Sequence
  Description of Artificial Sequence: Synthetic oligonucleotide
  Target: LAMA2; (-) strand; PAM type: YTN; PAM sequence: CTG
gtttacatgttaatattcca

SEQ ID NO: 201159 - DNA, 20 bp, Artificial Sequence
  Description of Artificial Sequence: Synthetic oligonucleotide
  Target: LAMA2; (-) strand; PAM type: YTN; PAM sequence: CTC
tggtttacatgttaatattc

SEQ ID NO: 201160 - DNA, 20 bp, Artificial Sequence
  Description of Artificial Sequence: Synthetic oligonucleotide
  Target: LAMA2; (-) strand; PAM type: YTN; PAM sequence: TTC
aaaaaaaaaaaaaaaaaaaa

SEQ ID NO: 201161 - DNA, 20 bp, Artificial Sequence
  Description of Artificial Sequence: Synthetic oligonucleotide
  Target: LAMA2; (-) strand; PAM type: YTN; PAM sequence: TTG
ttcaaaaaaaaaaaaaaaaa

SEQ ID NO: 201162 - DNA, 20 bp, Artificial Sequence
  Description of Artificial Sequence: Synthetic oligonucleotide
  Target: LAMA2; (-) strand; PAM type: YTN; PAM sequence: TTA
gaatagtcagattgttcaaa

SEQ ID NO: 201163 - DNA, 20 bp, Artificial Sequence
  Description of Artificial Sequence: Synthetic oligonucleotide
  Target: LAMA2; (-) strand; PAM type: YTN; PAM sequence: TTT
agaatagtcagattgttcaa

SEQ ID NO: 201164 - DNA, 20 bp, Artificial Sequence
  Description of Artificial Sequence: Synthetic oligonucleotide
  Target: LAMA2; (-) strand; PAM type: YTN; PAM sequence: TTT
tagaatagtcagattgttca

SEQ ID NO: 201165 - DNA, 20 bp, Artificial Sequence
  Description of Artificial Sequence: Synthetic oligonucleotide
  Target: LAMA2; (-) strand; PAM type: YTN; PAM sequence: CTA
aaaagtgttttagaatagtc

SEQ ID NO: 201166 - DNA, 20 bp, Artificial Sequence
  Description of Artificial Sequence: Synthetic oligonucleotide
  Target: LAMA2; (-) strand; PAM type: YTN; PAM sequence: TTA
gtgatatcctaaaaagtgtt

SEQ ID NO: 201167 - DNA, 20 bp, Artificial Sequence
  Description of Artificial Sequence: Synthetic oligonucleotide
  Target: LAMA2; (-) strand; PAM type: YTN; PAM sequence: TTG
acaattagtgatatcctaaa

SEQ ID NO: 201168 - DNA, 20 bp, Artificial Sequence
  Description of Artificial Sequence: Synthetic oligonucleotide
  Target: LAMA2; (-) strand; PAM type: YTN; PAM sequence: TTA
ttgacaattagtgatatcct

SEQ ID NO: 201169 - DNA, 20 bp, Artificial Sequence
  Description of Artificial Sequence: Synthetic oligonucleotide
  Target: LAMA2; (-) strand; PAM type: YTN; PAM sequence: CTT
attgacaattagtgatatcc

SEQ ID NO: 201170 - DNA, 20 bp, Artificial Sequence
  Description of Artificial Sequence: Synthetic oligonucleotide
  Target: LAMA2; (-) strand; PAM type: YTN; PAM sequence: TTC
cttattgacaattagtgata

SEQ ID NO: 201171 - DNA, 20 bp, Artificial Sequence
  Description of Artificial Sequence: Synthetic oligonucleotide
  Target: LAMA2; (-) strand; PAM type: YTN; PAM sequence: CTC
aattccttattgacaattag

SEQ ID NO: 201172 - DNA, 20 bp, Artificial Sequence
  Description of Artificial Sequence: Synthetic oligonucleotide
  Target: LAMA2; (-) strand; PAM type: YTN; PAM sequence: CTG
tggatctcaattccttattg

SEQ ID NO: 201173 - DNA, 20 bp, Artificial Sequence
  Description of Artificial Sequence: Synthetic oligonucleotide
  Target: LAMA2; (-) strand; PAM type: YTN; PAM sequence: TTA
tctgtggatctcaattcctt

SEQ ID NO: 201174 - DNA, 20 bp, Artificial Sequence
  Description of Artificial Sequence: Synthetic oligonucleotide
  Target: LAMA2; (-) strand; PAM type: YTN; PAM sequence: TTT
atctgtggatctcaattcct

SEQ ID NO: 201175 - DNA, 20 bp, Artificial Sequence
  Description of Artificial Sequence: Synthetic oligonucleotide
  Target: LAMA2; (-) strand; PAM type: YTN; PAM sequence: CTG
ataagtttatctgtggatct

SEQ ID NO: 201176 - DNA, 20 bp, Artificial Sequence
  Description of Artificial Sequence: Synthetic oligonucleotide
  Target: LAMA2; (-) strand; PAM type: YTN; PAM sequence: TTC
ctgataagtttatctgtgga

SEQ ID NO: 201177 - DNA, 20 bp, Artificial Sequence
  Description of Artificial Sequence: Synthetic oligonucleotide
  Target: LAMA2; (-) strand; PAM type: YTN; PAM sequence: CTG
ttcctgataagtttatctgt

SEQ ID NO: 201178 - DNA, 20 bp, Artificial Sequence
  Description of Artificial Sequence: Synthetic oligonucleotide
  Target: LAMA2; (-) strand; PAM type: YTN; PAM sequence: TTC
tgttcctgataagtttatct

SEQ ID NO: 201179 - DNA, 20 bp, Artificial Sequence
  Description of Artificial Sequence: Synthetic oligonucleotide
  Target: LAMA2; (-) strand; PAM type: YTN; PAM sequence: TTT
ctgttcctgataagtttatc

SEQ ID NO: 201180 - DNA, 20 bp, Artificial Sequence
  Description of Artificial Sequence: Synthetic oligonucleotide
  Target: LAMA2; (-) strand; PAM type: YTN; PAM sequence: TTT
tctgttcctgataagtttat

SEQ ID NO: 201181 - DNA, 20 bp, Artificial Sequence
  Description of Artificial Sequence: Synthetic oligonucleotide
  Target: LAMA2; (-) strand; PAM type: YTN; PAM sequence: TTC
aaaacaattttctgttcctg

SEQ ID NO: 201182 - DNA, 20 bp, Artificial Sequence
  Description of Artificial Sequence: Synthetic oligonucleotide
  Target: LAMA2; (-) strand; PAM type: YTN; PAM sequence: TTA
aaaatgtattcaaaacaatt

SEQ ID NO: 201183 - DNA, 20 bp, Artificial Sequence
  Description of Artificial Sequence: Synthetic oligonucleotide
  Target: LAMA2; (-) strand; PAM type: YTN; PAM sequence: TTA
aatattaaaaatgtattcaa

SEQ ID NO: 201184 - DNA, 20 bp, Artificial Sequence
  Description of Artificial Sequence: Synthetic oligonucleotide
  Target: LAMA2; (-) strand; PAM type: YTN; PAM sequence: TTT
aaatattaaaaatgtattca

SEQ ID NO: 201185 - DNA, 20 bp, Artificial Sequence
  Description of Artificial Sequence: Synthetic oligonucleotide
  Target: LAMA2; (-) strand; PAM type: YTN; PAM sequence: CTA
tttaaatattaaaaatgtat

SEQ ID NO: 201186 - DNA, 20 bp, Artificial Sequence
  Description of Artificial Sequence: Synthetic oligonucleotide
  Target: LAMA2; (-) strand; PAM type: YTN; PAM sequence: CTG
tgactatttaaatattaaaa

SEQ ID NO: 201187 - DNA, 20 bp, Artificial Sequence
  Description of Artificial Sequence: Synthetic oligonucleotide
  Target: LAMA2; (-) strand; PAM type: YTN; PAM sequence: TTG
atctgtgactatttaaatat

SEQ ID NO: 201188 - DNA, 20 bp, Artificial Sequence
  Description of Artificial Sequence: Synthetic oligonucleotide
  Target: LAMA2; (-) strand; PAM type: YTN; PAM sequence: TTT
gatctgtgactatttaaata

SEQ ID NO: 201189 - DNA, 20 bp, Artificial Sequence
  Description of Artificial Sequence: Synthetic oligonucleotide
  Target: LAMA2; (-) strand; PAM type: YTN; PAM sequence: TTT
tgatctgtgactatttaaat

SEQ ID NO: 201190 - DNA, 20 bp, Artificial Sequence
  Description of Artificial Sequence: Synthetic oligonucleotide
  Target: LAMA2; (-) strand; PAM type: YTN; PAM sequence: TTA
gttttgatctgtgactattt

SEQ ID NO: 201191 - DNA, 20 bp, Artificial Sequence
  Description of Artificial Sequence: Synthetic oligonucleotide
  Target: LAMA2; (-) strand; PAM type: YTN; PAM sequence: TTT
agttttgatctgtgactatt

SEQ ID NO: 201192 - DNA, 20 bp, Artificial Sequence
  Description of Artificial Sequence: Synthetic oligonucleotide
  Target: LAMA2; (-) strand; PAM type: YTN; PAM sequence: TTA
aaaaaaaatttagttttgat

SEQ ID NO: 201193 - DNA, 20 bp, Artificial Sequence
  Description of Artificial Sequence: Synthetic oligonucleotide
  Target: LAMA2; (-) strand; PAM type: YTN; PAM sequence: TTT
aaaaaaaaatttagttttga

SEQ ID NO: 201194 - DNA, 20 bp, Artificial Sequence
  Description of Artificial Sequence: Synthetic oligonucleotide
  Target: LAMA2; (-) strand; PAM type: YTN; PAM sequence: CTT
taaaaaaaaatttagttttg

SEQ ID NO: 201195 - DNA, 20 bp, Artificial Sequence
  Description of Artificial Sequence: Synthetic oligonucleotide
  Target: LAMA2; (-) strand; PAM type: YTN; PAM sequence: TTC
aacagaatctttaaaaaaaa

SEQ ID NO: 201196 - DNA, 20 bp, Artificial Sequence
  Description of Artificial Sequence: Synthetic oligonucleotide
  Target: LAMA2; (-) strand; PAM type: YTN; PAM sequence: CTA
ttcaacagaatctttaaaaa

SEQ ID NO: 201197 - DNA, 20 bp, Artificial Sequence
  Description of Artificial Sequence: Synthetic oligonucleotide
  Target: LAMA2; (-) strand; PAM type: YTN; PAM sequence: CTA
cctattcaacagaatcttta

SEQ ID NO: 201198 - DNA, 20 bp, Artificial Sequence
  Description of Artificial Sequence: Synthetic oligonucleotide
  Target: LAMA2; (-) strand; PAM type: YTN; PAM sequence: TTG
aatccaatgtgaagtcctac

SEQ ID NO: 201199 - DNA, 20 bp, Artificial Sequence
  Description of Artificial Sequence: Synthetic oligonucleotide
  Target: LAMA2; (-) strand; PAM type: YTN; PAM sequence: TTA
aataccaggttgaatccaat

SEQ ID NO: 201200 - DNA, 20 bp, Artificial Sequence
  Description of Artificial Sequence: Synthetic oligonucleotide
  Target: LAMA2; (-) strand; PAM type: YTN; PAM sequence: TTT
aaataccaggttgaatccaa

SEQ ID NO: 201201 - DNA, 20 bp, Artificial Sequence
  Description of Artificial Sequence: Synthetic oligonucleotide
  Target: LAMA2; (-) strand; PAM type: YTN; PAM sequence: TTT
taaataccaggttgaatcca

SEQ ID NO: 201202 - DNA, 20 bp, Artificial Sequence
  Description of Artificial Sequence: Synthetic oligonucleotide
  Target: LAMA2; (-) strand; PAM type: YTN; PAM sequence: TTG
cattttaaataccaggttga

SEQ ID NO: 201203 - DNA, 20 bp, Artificial Sequence
  Description of Artificial Sequence: Synthetic oligonucleotide
  Target: LAMA2; (-) strand; PAM type: YTN; PAM sequence: TTT
gcattttaaataccaggttg

SEQ ID NO: 201204 - DNA, 20 bp, Artificial Sequence
  Description of Artificial Sequence: Synthetic oligonucleotide
  Target: LAMA2; (-) strand; PAM type: YTN; PAM sequence: TTA
gcaaaaagagaaatcaaaaa

SEQ ID NO: 201205 - DNA, 20 bp, Artificial Sequence
  Description of Artificial Sequence: Synthetic oligonucleotide
  Target: LAMA2; (-) strand; PAM type: YTN; PAM sequence: CTT
agcaaaaagagaaatcaaaa

SEQ ID NO: 201206 - DNA, 20 bp, Artificial Sequence
  Description of Artificial Sequence: Synthetic oligonucleotide
  Target: LAMA2; (-) strand; PAM type: YTN; PAM sequence: TTA
cttagcaaaaagagaaatca

SEQ ID NO: 201207 - DNA, 20 bp, Artificial Sequence
  Description of Artificial Sequence: Synthetic oligonucleotide
  Target: LAMA2; (-) strand; PAM type: YTN; PAM sequence: TTA
gaatattacttagcaaaaag

SEQ ID NO: 201208 - DNA, 20 bp, Artificial Sequence
  Description of Artificial Sequence: Synthetic oligonucleotide
  Target: LAMA2; (-) strand; PAM type: YTN; PAM sequence: CTT
agaatattacttagcaaaaa

SEQ ID NO: 201209 - DNA, 20 bp, Artificial Sequence
  Description of Artificial Sequence: Synthetic oligonucleotide
  Target: LAMA2; (-) strand; PAM type: YTN; PAM sequence: CTC
ttagaatattacttagcaaa

SEQ ID NO: 201210 - DNA, 20 bp, Artificial Sequence
  Description of Artificial Sequence: Synthetic oligonucleotide
  Target: LAMA2; (-) strand; PAM type: YTN; PAM sequence: CTA
atctcttagaatattactta

SEQ ID NO: 201211 - DNA, 20 bp, Artificial Sequence
  Description of Artificial Sequence: Synthetic oligonucleotide
  Target: LAMA2; (-) strand; PAM type: YTN; PAM sequence: TTA
aaatgtatggctaatctctt

SEQ ID NO: 201212 - DNA, 20 bp, Artificial Sequence
  Description of Artificial Sequence: Synthetic oligonucleotide
  Target: LAMA2; (-) strand; PAM type: YTN; PAM sequence: TTT
aaaatgtatggctaatctct

SEQ ID NO: 201213 - DNA, 20 bp, Artificial Sequence
  Description of Artificial Sequence: Synthetic oligonucleotide
  Target: LAMA2; (-) strand; PAM type: YTN; PAM sequence: TTT
taaaatgtatggctaatctc

SEQ ID NO: 201214 - DNA, 20 bp, Artificial Sequence
  Description of Artificial Sequence: Synthetic oligonucleotide
  Target: LAMA2; (-) strand; PAM type: YTN; PAM sequence: TTA
tacaaacatgaaacacaaaa

SEQ ID NO: 201215 - DNA, 20 bp, Artificial Sequence
  Description of Artificial Sequence: Synthetic oligonucleotide
  Target: LAMA2; (-) strand; PAM type: YTN; PAM sequence: TTT
atacaaacatgaaacacaaa

SEQ ID NO: 201216 - DNA, 20 bp, Artificial Sequence
  Description of Artificial Sequence: Synthetic oligonucleotide
  Target: LAMA2; (-) strand; PAM type: YTN; PAM sequence: CTA
catttatacaaacatgaaac

SEQ ID NO: 201217 - DNA, 20 bp, Artificial Sequence
  Description of Artificial Sequence: Synthetic oligonucleotide
  Target: LAMA2; (-) strand; PAM type: YTN; PAM sequence: CTC
tacatttatacaaacatgaa

SEQ ID NO: 201218 - DNA, 20 bp, Artificial Sequence
  Description of Artificial Sequence: Synthetic oligonucleotide
  Target: LAMA2; (-) strand; PAM type: YTN; PAM sequence: CTA
atctctacatttatacaaac

SEQ ID NO: 201219 - DNA, 20 bp, Artificial Sequence
  Description of Artificial Sequence: Synthetic oligonucleotide
  Target: LAMA2; (-) strand; PAM type: YTN; PAM sequence: TTA
aacaagtgtctaatctctac

SEQ ID NO: 201220 - DNA, 20 bp, Artificial Sequence
  Description of Artificial Sequence: Synthetic oligonucleotide
  Target: LAMA2; (-) strand; PAM type: YTN; PAM sequence: CTT
aaacaagtgtctaatctcta

SEQ ID NO: 201221 - DNA, 20 bp, Artificial Sequence
  Description of Artificial Sequence: Synthetic oligonucleotide
  Target: LAMA2; (-) strand; PAM type: YTN; PAM sequence: TTA
aggatcttaaacaagtgtct

SEQ ID NO: 201222 - DNA, 20 bp, Artificial Sequence
  Description of Artificial Sequence: Synthetic oligonucleotide
  Target: LAMA2; (-) strand; PAM type: YTN; PAM sequence: TTT
aaggatcttaaacaagtgtc

SEQ ID NO: 201223 - DNA, 20 bp, Artificial Sequence
  Description of Artificial Sequence: Synthetic oligonucleotide
  Target: LAMA2; (-) strand; PAM type: YTN; PAM sequence: CTT
taaggatcttaaacaagtgt

SEQ ID NO: 201224 - DNA, 20 bp, Artificial Sequence
  Description of Artificial Sequence: Synthetic oligonucleotide
  Target: LAMA2; (-) strand; PAM type: YTN; PAM sequence: CTC
agatctttaaggatcttaaa

SEQ ID NO: 201225 - DNA, 20 bp, Artificial Sequence
  Description of Artificial Sequence: Synthetic oligonucleotide
  Target: LAMA2; (-) strand; PAM type: YTN; PAM sequence: TTA
cctcagatctttaaggatct

SEQ ID NO: 201226 - DNA, 20 bp, Artificial Sequence
  Description of Artificial Sequence: Synthetic oligonucleotide
  Target: LAMA2; (-) strand; PAM type: YTN; PAM sequence: TTT
acctcagatctttaaggatc

SEQ ID NO: 201227 - DNA, 20 bp, Artificial Sequence
  Description of Artificial Sequence: Synthetic oligonucleotide
  Target: LAMA2; (-) strand; PAM type: YTN; PAM sequence: TTC
ccaaaaataatttacctcag

SEQ ID NO: 201228 - DNA, 20 bp, Artificial Sequence
  Description of Artificial Sequence: Synthetic oligonucleotide
  Target: LAMA2; (-) strand; PAM type: YTN; PAM sequence: TTT
cccaaaaataatttacctca

SEQ ID NO: 201229 - DNA, 20 bp, Artificial Sequence
  Description of Artificial Sequence: Synthetic oligonucleotide
  Target: LAMA2; (-) strand; PAM type: YTN; PAM sequence: TTG
tatttcccaaaaataattta

SEQ ID NO: 201230 - DNA, 20 bp, Artificial Sequence
  Description of Artificial Sequence: Synthetic oligonucleotide
  Target: LAMA2; (-) strand; PAM type: YTN; PAM sequence: TTT
gtatttcccaaaaataattt

SEQ ID NO: 201231 - DNA, 20 bp, Artificial Sequence
  Description of Artificial Sequence: Synthetic oligonucleotide
  Target: LAMA2; (-) strand; PAM type: YTN; PAM sequence: TTA
cagaaagaaatttgtatttc

SEQ ID NO: 201232 - DNA, 20 bp, Artificial Sequence
  Description of Artificial Sequence: Synthetic oligonucleotide
  Target: LAMA2; (-) strand; PAM type: YTN; PAM sequence: TTC
acagaaggtagaaattacag

SEQ ID NO: 201233 - DNA, 20 bp, Artificial Sequence
  Description of Artificial Sequence: Synthetic oligonucleotide
  Target: LAMA2; (-) strand; PAM type: YTN; PAM sequence: TTG
ttcacagaaggtagaaatta

SEQ ID NO: 201234 - DNA, 20 bp, Artificial Sequence
  Description of Artificial Sequence: Synthetic oligonucleotide
  Target: LAMA2; (-) strand; PAM type: YTN; PAM sequence: TTC
aagaagttgttcacagaagg

SEQ ID NO: 201235 - DNA, 20 bp, Artificial Sequence
  Description of Artificial Sequence: Synthetic oligonucleotide
  Target: LAMA2; (-) strand; PAM type: YTN; PAM sequence: CTT
caagaagttgttcacagaag

SEQ ID NO: 201236 - DNA, 20 bp, Artificial Sequence
  Description of Artificial Sequence: Synthetic oligonucleotide
  Target: LAMA2; (-) strand; PAM type: YTN; PAM sequence: CTG
cgtataaaccaagagcaaca

SEQ ID NO: 201237 - DNA, 20 bp, Artificial Sequence
  Description of Artificial Sequence: Synthetic oligonucleotide
  Target: LAMA2; (-) strand; PAM type: YTN; PAM sequence: TTA
agggacctgcgtataaacca

SEQ ID NO: 201238 - DNA, 20 bp, Artificial Sequence
  Description of Artificial Sequence: Synthetic oligonucleotide
  Target: LAMA2; (-) strand; PAM type: YTN; PAM sequence: TTT
aagggacctgcgtataaacc

SEQ ID NO: 201239 - DNA, 20 bp, Artificial Sequence
  Description of Artificial Sequence: Synthetic oligonucleotide
  Target: LAMA2; (-) strand; PAM type: YTN; PAM sequence: TTT
taagggacctgcgtataaac

SEQ ID NO: 201240 - DNA, 20 bp, Artificial Sequence
  Description of Artificial Sequence: Synthetic oligonucleotide
  Target: LAMA2; (-) strand; PAM type: YTN; PAM sequence: TTA
ttttaagggacctgcgtata

SEQ ID NO: 201241 - DNA, 20 bp, Artificial Sequence
  Description of Artificial Sequence: Synthetic oligonucleotide
  Target: LAMA2; (-) strand; PAM type: YTN; PAM sequence: TTG
ttattttaagggacctgcgt

SEQ ID NO: 201242 - DNA, 20 bp, Artificial Sequence
  Description of Artificial Sequence: Synthetic oligonucleotide
  Target: LAMA2; (-) strand; PAM type: YTN; PAM sequence: TTT
gttattttaagggacctgcg

SEQ ID NO: 201243 - DNA, 20 bp, Artificial Sequence
  Description of Artificial Sequence: Synthetic oligonucleotide
  Target: LAMA2; (-) strand; PAM type: YTN; PAM sequence: TTT
tgttattttaagggacctgc

SEQ ID NO: 201244 - DNA, 20 bp, Artificial Sequence
  Description of Artificial Sequence: Synthetic oligonucleotide
  Target: LAMA2; (-) strand; PAM type: YTN; PAM sequence: TTA
ttttgttattttaagggacc

SEQ ID NO: 201245 - DNA, 20 bp, Artificial Sequence
  Description of Artificial Sequence: Synthetic oligonucleotide
  Target: LAMA2; (-) strand; PAM type: YTN; PAM sequence: TTT
attttgttattttaagggac

SEQ ID NO: 201246 - DNA, 20 bp, Artificial Sequence
  Description of Artificial Sequence: Synthetic oligonucleotide
  Target: LAMA2; (-) strand; PAM type: YTN; PAM sequence: TTT
tattttgttattttaaggga

SEQ ID NO: 201247 - DNA, 20 bp, Artificial Sequence
  Description of Artificial Sequence: Synthetic oligonucleotide
  Target: LAMA2; (-) strand; PAM type: YTN; PAM sequence: TTT
ttattttgttattttaaggg

SEQ ID NO: 201248 - DNA, 20 bp, Artificial Sequence
  Description of Artificial Sequence: Synthetic oligonucleotide
  Target: LAMA2; (-) strand; PAM type: YTN; PAM sequence: TTT
tttattttgttattttaagg

SEQ ID NO: 201249 - DNA, 20 bp, Artificial Sequence
  Description of Artificial Sequence: Synthetic oligonucleotide
  Target: LAMA2; (-) strand; PAM type: YTN; PAM sequence: TTA
ttttttattttgttatttta

SEQ ID NO: 201250 - DNA, 20 bp, Artificial Sequence
  Description of Artificial Sequence: Synthetic oligonucleotide
  Target: LAMA2; (-) strand; PAM type: YTN; PAM sequence: CTT
attttttattttgttatttt

SEQ ID NO: 201251 - DNA, 20 bp, Artificial Sequence
  Description of Artificial Sequence: Synthetic oligonucleotide
  Target: LAMA2; (-) strand; PAM type: YTN; PAM sequence: TTC
ttattttttattttgttatt

SEQ ID NO: 201252 - DNA, 20 bp, Artificial Sequence
  Description of Artificial Sequence: Synthetic oligonucleotide
  Target: LAMA2; (-) strand; PAM type: YTN; PAM sequence: TTT
cttattttttattttgttat

SEQ ID NO: 201253 - DNA, 20 bp, Artificial Sequence
  Description of Artificial Sequence: Synthetic oligonucleotide
  Target: LAMA2; (-) strand; PAM type: YTN; PAM sequence: TTG
tttcttattttttattttgt

SEQ ID NO: 201254 - DNA, 20 bp, Artificial Sequence
  Description of Artificial Sequence: Synthetic oligonucleotide
  Target: LAMA2; (-) strand; PAM type: YTN; PAM sequence: TTA
tgtattgtttcttatttttt

SEQ ID NO: 201255 - DNA, 20 bp, Artificial Sequence
  Description of Artificial Sequence: Synthetic oligonucleotide
  Target: LAMA2; (-) strand; PAM type: YTN; PAM sequence: CTT
atgtattgtttcttattttt

SEQ ID NO: 201256 - DNA, 20 bp, Artificial Sequence
  Description of Artificial Sequence: Synthetic oligonucleotide
  Target: LAMA2; (-) strand; PAM type: YTN; PAM sequence: TTG
tccttatgtattgtttctta

SEQ ID NO: 201257 - DNA, 20 bp, Artificial Sequence
  Description of Artificial Sequence: Synthetic oligonucleotide
  Target: LAMA2; (-) strand; PAM type: YTN; PAM sequence: TTT
gtccttatgtattgtttctt

SEQ ID NO: 201258 - DNA, 20 bp, Artificial Sequence
  Description of Artificial Sequence: Synthetic oligonucleotide
  Target: LAMA2; (-) strand; PAM type: YTN; PAM sequence: CTT
tgtccttatgtattgtttct

SEQ ID NO: 201259 - DNA, 20 bp, Artificial Sequence
  Description of Artificial Sequence: Synthetic oligonucleotide
  Target: LAMA2; (-) strand; PAM type: YTN; PAM sequence: TTC
cagtctttgtccttatgtat

SEQ ID NO: 201260 - DNA, 20 bp, Artificial Sequence
  Description of Artificial Sequence: Synthetic oligonucleotide
  Target: LAMA2; (-) strand; PAM type: YTN; PAM sequence: TTT
ccagtctttgtccttatgta

SEQ ID NO: 201261 - DNA, 20 bp, Artificial Sequence
  Description of Artificial Sequence: Synthetic oligonucleotide
  Target: LAMA2; (-) strand; PAM type: YTN; PAM sequence: TTA
tttccagtctttgtccttat

SEQ ID NO: 201262 - DNA, 20 bp, Artificial Sequence
  Description of Artificial Sequence: Synthetic oligonucleotide
  Target: LAMA2; (-) strand; PAM type: YTN; PAM sequence: TTT
atttccagtctttgtcctta

SEQ ID NO: 201263 - DNA, 20 bp, Artificial Sequence
  Description of Artificial Sequence: Synthetic oligonucleotide
  Target: LAMA2; (-) strand; PAM type: YTN; PAM sequence: TTT
tatttccagtctttgtcctt

SEQ ID NO: 201264 - DNA, 20 bp, Artificial Sequence
  Description of Artificial Sequence: Synthetic oligonucleotide
  Target: LAMA2; (-) strand; PAM type: YTN; PAM sequence: CTT
ttatttccagtctttgtcct

SEQ ID NO: 201265 - DNA, 20 bp, Artificial Sequence
  Description of Artificial Sequence: Synthetic oligonucleotide
  Target: LAMA2; (-) strand; PAM type: YTN; PAM sequence: TTC
ttttatttccagtctttgtc

SEQ ID NO: 201266 - DNA, 20 bp, Artificial Sequence
  Description of Artificial Sequence: Synthetic oligonucleotide
  Target: LAMA2; (-) strand; PAM type: YTN; PAM sequence: TTT
cttttatttccagtctttgt

SEQ ID NO: 201267 - DNA, 20 bp, Artificial Sequence
  Description of Artificial Sequence: Synthetic oligonucleotide
  Target: LAMA2; (-) strand; PAM type: YTN; PAM sequence: TTT
tcttttatttccagtctttg

SEQ ID NO: 201268 - DNA, 20 bp, Artificial Sequence
  Description of Artificial Sequence: Synthetic oligonucleotide
  Target: LAMA2; (-) strand; PAM type: YTN; PAM sequence: TTT
ttcttttatttccagtcttt

SEQ ID NO: 201269 - DNA, 20 bp, Artificial Sequence
  Description of Artificial Sequence: Synthetic oligonucleotide
  Target: LAMA2; (-) strand; PAM type: YTN; PAM sequence: TTA
tttttcttttatttccagtc

SEQ ID NO: 201270 - DNA, 20 bp, Artificial Sequence
  Description of Artificial Sequence: Synthetic oligonucleotide
  Target: LAMA2; (-) strand; PAM type: YTN; PAM sequence: TTA
aattatttttcttttatttc

SEQ ID NO: 201271 - DNA, 20 bp, Artificial Sequence
  Description of Artificial Sequence: Synthetic oligonucleotide
  Target: LAMA2; (-) strand; PAM type: YTN; PAM sequence: TTT
aaattatttttcttttattt

SEQ ID NO: 201272 - DNA, 20 bp, Artificial Sequence
  Description of Artificial Sequence: Synthetic oligonucleotide
  Target: LAMA2; (-) strand; PAM type: YTN; PAM sequence: TTG
agtttaaattatttttcttt

SEQ ID NO: 201273 - DNA, 20 bp, Artificial Sequence
  Description of Artificial Sequence: Synthetic oligonucleotide
  Target: LAMA2; (-) strand; PAM type: YTN; PAM sequence: CTT
gagtttaaattatttttctt

SEQ ID NO: 201274 - DNA, 20 bp, Artificial Sequence
  Description of Artificial Sequence: Synthetic oligonucleotide
  Target: LAMA2; (-) strand; PAM type: YTN; PAM sequence: TTA
cccaagaaaatcccttgagt

SEQ ID NO: 201275 - DNA, 20 bp, Artificial Sequence
  Description of Artificial Sequence: Synthetic oligonucleotide
  Target: LAMA2; (-) strand; PAM type: YTN; PAM sequence: CTT
acccaagaaaatcccttgag

SEQ ID NO: 201276 - DNA, 20 bp, Artificial Sequence
  Description of Artificial Sequence: Synthetic oligonucleotide
  Target: LAMA2; (-) strand; PAM type: YTN; PAM sequence: CTG
aggccttacccaagaaaatc

SEQ ID NO: 201277 - DNA, 20 bp, Artificial Sequence
  Description of Artificial Sequence: Synthetic oligonucleotide
  Target: LAMA2; (-) strand; PAM type: YTN; PAM sequence: CTC
tgaggccttacccaagaaaa

SEQ ID NO: 201278 - DNA, 20 bp, Artificial Sequence
  Description of Artificial Sequence: Synthetic oligonucleotide
  Target: LAMA2; (-) strand; PAM type: YTN; PAM sequence: TTC
tctgaggccttacccaagaa

SEQ ID NO: 201279 - DNA, 20 bp, Artificial Sequence
  Description of Artificial Sequence: Synthetic oligonucleotide
  Target: LAMA2; (-) strand; PAM type: YTN; PAM sequence: CTG
gaacattctctgaggcctta

SEQ ID NO: 201280 - DNA, 20 bp, Artificial Sequence
  Description of Artificial Sequence: Synthetic oligonucleotide
  Target: LAMA2; (-) strand; PAM type: YTN; PAM sequence: TTA
agaacagctggaacattctc

SEQ ID NO: 201281 - DNA, 20 bp, Artificial Sequence
  Description of Artificial Sequence: Synthetic oligonucleotide
  Target: LAMA2; (-) strand; PAM type: YTN; PAM sequence: CTT
aagaacagctggaacattct

SEQ ID NO: 201282 - DNA, 20 bp, Artificial Sequence
  Description of Artificial Sequence: Synthetic oligonucleotide
  Target: LAMA2; (-) strand; PAM type: YTN; PAM sequence: TTC
ttaagaacagctggaacatt

SEQ ID NO: 201283 - DNA, 20 bp, Artificial Sequence
  Description of Artificial Sequence: Synthetic oligonucleotide
  Target: LAMA2; (-) strand; PAM type: YTN; PAM sequence: TTT
cttaagaacagctggaacat

SEQ ID NO: 201284 - DNA, 20 bp, Artificial Sequence
  Description of Artificial Sequence: Synthetic oligonucleotide
  Target: LAMA2; (-) strand; PAM type: YTN; PAM sequence: CTT
tcttaagaacagctggaaca

SEQ ID NO: 201285 - DNA, 20 bp, Artificial Sequence
  Description of Artificial Sequence: Synthetic oligonucleotide
  Target: LAMA2; (-) strand; PAM type: YTN; PAM sequence: TTA
tatacaatgtctttcttaag

SEQ ID NO: 201286 - DNA, 20 bp, Artificial Sequence
  Description of Artificial Sequence: Synthetic oligonucleotide
  Target: LAMA2; (-) strand; PAM type: YTN; PAM sequence: TTT
atatacaatgtctttcttaa

SEQ ID NO: 201287 - DNA, 20 bp, Artificial Sequence
  Description of Artificial Sequence: Synthetic oligonucleotide
  Target: LAMA2; (-) strand; PAM type: YTN; PAM sequence: CTT
tatatacaatgtctttctta

SEQ ID NO: 201288 - DNA, 20 bp, Artificial Sequence
  Description of Artificial Sequence: Synthetic oligonucleotide
  Target: LAMA2; (-) strand; PAM type: YTN; PAM sequence: CTA
aatgtggcctttatatacaa

SEQ ID NO: 201289 - DNA, 20 bp, Artificial Sequence
  Description of Artificial Sequence: Synthetic oligonucleotide
  Target: LAMA2; (-) strand; PAM type: YTN; PAM sequence: TTC
agctaaatgtggcctttata

SEQ ID NO: 201290 - DNA, 20 bp, Artificial Sequence
  Description of Artificial Sequence: Synthetic oligonucleotide
  Target: LAMA2; (-) strand; PAM type: YTN; PAM sequence: CTA
ttcagctaaatgtggccttt

SEQ ID NO: 201291 - DNA, 20 bp, Artificial Sequence
  Description of Artificial Sequence: Synthetic oligonucleotide
  Target: LAMA2; (-) strand; PAM type: YTN; PAM sequence: TTC
agtctattcagctaaatgtg

SEQ ID NO: 201292 - DNA, 20 bp, Artificial Sequence
  Description of Artificial Sequence: Synthetic oligonucleotide
  Target: LAMA2; (-) strand; PAM type: YTN; PAM sequence: TTT
cagtctattcagctaaatgt

SEQ ID NO: 201293 - DNA, 20 bp, Artificial Sequence
  Description of Artificial Sequence: Synthetic oligonucleotide
  Target: LAMA2; (-) strand; PAM type: YTN; PAM sequence: TTT
tcagtctattcagctaaatg

SEQ ID NO: 201294 - DNA, 20 bp, Artificial Sequence
  Description of Artificial Sequence: Synthetic oligonucleotide
  Target: LAMA2; (-) strand; PAM type: YTN; PAM sequence: TTT
ttcagtctattcagctaaat

SEQ ID NO: 201295 - DNA, 20 bp, Artificial Sequence
  Description of Artificial Sequence: Synthetic oligonucleotide
  Target: LAMA2; (-) strand; PAM type: YTN; PAM sequence: CTC
aaataataagaatttttcag

SEQ ID NO: 201296 - DNA, 20 bp, Artificial Sequence
  Description of Artificial Sequence: Synthetic oligonucleotide
  Target: LAMA2; (-) strand; PAM type: YTN; PAM sequence: TTC
tcaaataataagaatttttc

SEQ ID NO: 201297 - DNA, 20 bp, Artificial Sequence
  Description of Artificial Sequence: Synthetic oligonucleotide
  Target: LAMA2; (-) strand; PAM type: YTN; PAM sequence: TTT
ctcaaataataagaattttt

SEQ ID NO: 201298 - DNA, 20 bp, Artificial Sequence
  Description of Artificial Sequence: Synthetic oligonucleotide
  Target: LAMA2; (-) strand; PAM type: YTN; PAM sequence: TTG
aatcatttctcaaataataa

SEQ ID NO: 201299 - DNA, 20 bp, Artificial Sequence
  Description of Artificial Sequence: Synthetic oligonucleotide
  Target: LAMA2; (-) strand; PAM type: YTN; PAM sequence: TTG
agacaacaattgaatcattt

SEQ ID NO: 201300 - DNA, 20 bp, Artificial Sequence
  Description of Artificial Sequence: Synthetic oligonucleotide
  Target: LAMA2; (-) strand; PAM type: YTN; PAM sequence: TTA
gcattgagacaacaattgaa

SEQ ID NO: 201301 - DNA, 20 bp, Artificial Sequence
  Description of Artificial Sequence: Synthetic oligonucleotide
  Target: LAMA2; (-) strand; PAM type: YTN; PAM sequence: TTT
agcattgagacaacaattga

SEQ ID NO: 201302 - DNA, 20 bp, Artificial Sequence
  Description of Artificial Sequence: Synthetic oligonucleotide
  Target: LAMA2; (-) strand; PAM type: YTN; PAM sequence: TTA
tgaatatttagcattgagac

SEQ ID NO: 201303 - DNA, 20 bp, Artificial Sequence
  Description of Artificial Sequence: Synthetic oligonucleotide
  Target: LAMA2; (-) strand; PAM type: YTN; PAM sequence: TTT
atgaatatttagcattgaga

SEQ ID NO: 201304 - DNA, 20 bp, Artificial Sequence
  Description of Artificial Sequence: Synthetic oligonucleotide
  Target: LAMA2; (-) strand; PAM type: YTN; PAM sequence: TTT
tatgaatatttagcattgag

SEQ ID NO: 201305 - DNA, 20 bp, Artificial Sequence
  Description of Artificial Sequence: Synthetic oligonucleotide
  Target: LAMA2; (-) strand; PAM type: YTN; PAM sequence: TTT
ttatgaatatttagcattga

SEQ ID NO: 201306 - DNA, 20 bp, Artificial Sequence
  Description of Artificial Sequence: Synthetic oligonucleotide
  Target: LAMA2; (-) strand; PAM type: YTN; PAM sequence: TTA
atgaatggatagtttttatg

SEQ ID NO: 201307 - DNA, 20 bp, Artificial Sequence
  Description of Artificial Sequence: Synthetic oligonucleotide
  Target: LAMA2; (-) strand; PAM type: YTN; PAM sequence: TTA
aaaaggattaatgaatggat

SEQ ID NO: 201308 - DNA, 20 bp, Artificial Sequence
  Description of Artificial Sequence: Synthetic oligonucleotide
  Target: LAMA2; (-) strand; PAM type: YTN; PAM sequence: TTT
aaaaaggattaatgaatgga

SEQ ID NO: 201309 - DNA, 20 bp, Artificial Sequence
  Description of Artificial Sequence: Synthetic oligonucleotide
  Target: LAMA2; (-) strand; PAM type: YTN; PAM sequence: TTC
agtttaaaaaggattaatga

SEQ ID NO: 201310 - DNA, 20 bp, Artificial Sequence
  Description of Artificial Sequence: Synthetic oligonucleotide
  Target: LAMA2; (-) strand; PAM type: YTN; PAM sequence: CTT
cagtttaaaaaggattaatg

SEQ ID NO: 201311 - DNA, 20 bp, Artificial Sequence
  Description of Artificial Sequence: Synthetic oligonucleotide
  Target: LAMA2; (-) strand; PAM type: YTN; PAM sequence: TTA
cttcagtttaaaaaggatta

SEQ ID NO: 201312 - DNA, 20 bp, Artificial Sequence
  Description of Artificial Sequence: Synthetic oligonucleotide
  Target: LAMA2; (-) strand; PAM type: YTN; PAM sequence: CTA
attacttcagtttaaaaagg

SEQ ID NO: 201313 - DNA, 20 bp, Artificial Sequence
  Description of Artificial Sequence: Synthetic oligonucleotide
  Target: LAMA2; (-) strand; PAM type: YTN; PAM sequence: TTC
taattacttcagtttaaaaa

SEQ ID NO: 201314 - DNA, 20 bp, Artificial Sequence
  Description of Artificial Sequence: Synthetic oligonucleotide
  Target: LAMA2; (-) strand; PAM type: YTN; PAM sequence: TTT
ctaattacttcagtttaaaa

SEQ ID NO: 201315 - DNA, 20 bp, Artificial Sequence
  Description of Artificial Sequence: Synthetic oligonucleotide
  Target: LAMA2; (-) strand; PAM type: YTN; PAM sequence: TTT
tctaattacttcagtttaaa

SEQ ID NO: 201316 - DNA, 20 bp, Artificial Sequence
  Description of Artificial Sequence: Synthetic oligonucleotide
  Target: LAMA2; (-) strand; PAM type: YTN; PAM sequence: TTT
ttctaattacttcagtttaa

SEQ ID NO: 201317 - DNA, 20 bp, Artificial Sequence
  Description of Artificial Sequence: Synthetic oligonucleotide
  Target: LAMA2; (-) strand; PAM type: YTN; PAM sequence: CTT
tttctaattacttcagttta

SEQ ID NO: 201318 - DNA, 20 bp, Artificial Sequence
  Description of Artificial Sequence: Synthetic oligonucleotide
  Target: LAMA2; (-) strand; PAM type: YTN; PAM sequence: CTG
ctttttctaattacttcagt

SEQ ID NO: 201319 - DNA, 20 bp, Artificial Sequence
  Description of Artificial Sequence: Synthetic oligonucleotide
  Target: LAMA2; (-) strand; PAM type: YTN; PAM sequence: TTG
acctgctttttctaattact

SEQ ID NO: 201320 - DNA, 20 bp, Artificial Sequence
  Description of Artificial Sequence: Synthetic oligonucleotide
  Target: LAMA2; (-) strand; PAM type: YTN; PAM sequence: TTG
cacattgacctgctttttct

SEQ ID NO: 201321 - DNA, 20 bp, Artificial Sequence
  Description of Artificial Sequence: Synthetic oligonucleotide
  Target: LAMA2; (-) strand; PAM type: YTN; PAM sequence: TTT
gcacattgacctgctttttc

SEQ ID NO: 201322 - DNA, 20 bp, Artificial Sequence
  Description of Artificial Sequence: Synthetic oligonucleotide
  Target: LAMA2; (-) strand; PAM type: YTN; PAM sequence: CTT
tgcacattgacctgcttttt

SEQ ID NO: 201323 - DNA, 20 bp, Artificial Sequence
  Description of Artificial Sequence: Synthetic oligonucleotide
  Target: LAMA2; (-) strand; PAM type: YTN; PAM sequence: TTC
tttgcacattgacctgcttt

SEQ ID NO: 201324 - DNA, 20 bp, Artificial Sequence
  Description of Artificial Sequence: Synthetic oligonucleotide
  Target: LAMA2; (-) strand; PAM type: YTN; PAM sequence: TTT
ctttgcacattgacctgctt

SEQ ID NO: 201325 - DNA, 20 bp, Artificial Sequence
  Description of Artificial Sequence: Synthetic oligonucleotide
  Target: LAMA2; (-) strand; PAM type: YTN; PAM sequence: TTG
atgaagaaaagcccatttct

SEQ ID NO: 201326 - DNA, 20 bp, Artificial Sequence
  Description of Artificial Sequence: Synthetic oligonucleotide
  Target: LAMA2; (-) strand; PAM type: YTN; PAM sequence: TTT
gatgaagaaaagcccatttc

SEQ ID NO: 201327 - DNA, 20 bp, Artificial Sequence
  Description of Artificial Sequence: Synthetic oligonucleotide
  Target: LAMA2; (-) strand; PAM type: YTN; PAM sequence: TTA
accatttgatgaagaaaagc

SEQ ID NO: 201328 - DNA, 20 bp, Artificial Sequence
  Description of Artificial Sequence: Synthetic oligonucleotide
  Target: LAMA2; (-) strand; PAM type: YTN; PAM sequence: TTA
ataaagaattaaccatttga

SEQ ID NO: 201329 - DNA, 20 bp, Artificial Sequence
  Description of Artificial Sequence: Synthetic oligonucleotide
  Target: LAMA2; (-) strand; PAM type: YTN; PAM sequence: TTT
aataaagaattaaccatttg

SEQ ID NO: 201330 - DNA, 20 bp, Artificial Sequence
  Description of Artificial Sequence: Synthetic oligonucleotide
  Target: LAMA2; (-) strand; PAM type: YTN; PAM sequence: TTA
aagaataaccatttaataaa

SEQ ID NO: 201331 - DNA, 20 bp, Artificial Sequence
  Description of Artificial Sequence: Synthetic oligonucleotide
  Target: LAMA2; (-) strand; PAM type: YTN; PAM sequence: TTT
aaagaataaccatttaataa

SEQ ID NO: 201332 - DNA, 20 bp, Artificial Sequence
  Description of Artificial Sequence: Synthetic oligonucleotide
  Target: LAMA2; (-) strand; PAM type: YTN; PAM sequence: TTT
taaagaataaccatttaata

SEQ ID NO: 201333 - DNA, 20 bp, Artificial Sequence
  Description of Artificial Sequence: Synthetic oligonucleotide
  Target: LAMA2; (-) strand; PAM type: YTN; PAM sequence: CTC
attttaaagaataaccattt

SEQ ID NO: 201334 - DNA, 20 bp, Artificial Sequence
  Description of Artificial Sequence: Synthetic oligonucleotide
  Target: LAMA2; (-) strand; PAM type: YTN; PAM sequence: TTG
ctcattttaaagaataacca

SEQ ID NO: 201335 - DNA, 20 bp, Artificial Sequence
  Description of Artificial Sequence: Synthetic oligonucleotide
  Target: LAMA2; (-) strand; PAM type: YTN; PAM sequence: TTT
gctcattttaaagaataacc

SEQ ID NO: 201336 - DNA, 20 bp, Artificial Sequence
  Description of Artificial Sequence: Synthetic oligonucleotide
  Target: LAMA2; (-) strand; PAM type: YTN; PAM sequence: CTT
tgctcattttaaagaataac

SEQ ID NO: 201337 - DNA, 20 bp, Artificial Sequence
  Description of Artificial Sequence: Synthetic oligonucleotide
  Target: LAMA2; (-) strand; PAM type: YTN; PAM sequence: CTC
atctttgctcattttaaaga

SEQ ID NO: 201338 - DNA, 20 bp, Artificial Sequence
  Description of Artificial Sequence: Synthetic oligonucleotide
  Target: LAMA2; (-) strand; PAM type: YTN; PAM sequence: CTG
agctcatctttgctcatttt

SEQ ID NO: 201339 - DNA, 20 bp, Artificial Sequence
  Description of Artificial Sequence: Synthetic oligonucleotide
  Target: LAMA2; (-) strand; PAM type: YTN; PAM sequence: TTG
ctgagctcatctttgctcat

SEQ ID NO: 201340 - DNA, 20 bp, Artificial Sequence
  Description of Artificial Sequence: Synthetic oligonucleotide
  Target: LAMA2; (-) strand; PAM type: YTN; PAM sequence: TTT
gctgagctcatctttgctca

SEQ ID NO: 201341 - DNA, 20 bp, Artificial Sequence
  Description of Artificial Sequence: Synthetic oligonucleotide
  Target: LAMA2; (-) strand; PAM type: YTN; PAM sequence: TTA
tttgctgagctcatctttgc

SEQ ID NO: 201342 - DNA, 20 bp, Artificial Sequence
  Description of Artificial Sequence: Synthetic oligonucleotide
  Target: LAMA2; (-) strand; PAM type: YTN; PAM sequence: CTT
atttgctgagctcatctttg

SEQ ID NO: 201343 - DNA, 20 bp, Artificial Sequence
  Description of Artificial Sequence: Synthetic oligonucleotide
  Target: LAMA2; (-) strand; PAM type: YTN; PAM sequence: TTA
caagtaccttatttgctgag

SEQ ID NO: 201344 - DNA, 20 bp, Artificial Sequence
  Description of Artificial Sequence: Synthetic oligonucleotide
  Target: LAMA2; (-) strand; PAM type: YTN; PAM sequence: TTA
ttacaagtaccttatttgct

SEQ ID NO: 201345 - DNA, 20 bp, Artificial Sequence
  Description of Artificial Sequence: Synthetic oligonucleotide
  Target: LAMA2; (-) strand; PAM type: YTN; PAM sequence: TTC
attattacaagtaccttatt

SEQ ID NO: 201346 - DNA, 20 bp, Artificial Sequence
  Description of Artificial Sequence: Synthetic oligonucleotide
  Target: LAMA2; (-) strand; PAM type: YTN; PAM sequence: TTT
cattattacaagtaccttat

SEQ ID NO: 201347 - DNA, 20 bp, Artificial Sequence
  Description of Artificial Sequence: Synthetic oligonucleotide
  Target: LAMA2; (-) strand; PAM type: YTN; PAM sequence: CTT
tcattattacaagtacctta

SEQ ID NO: 201348 - DNA, 20 bp, Artificial Sequence
  Description of Artificial Sequence: Synthetic oligonucleotide
  Target: LAMA2; (-) strand; PAM type: YTN; PAM sequence: CTG
catatagtactttcattatt

SEQ ID NO: 201349 - DNA, 20 bp, Artificial Sequence
  Description of Artificial Sequence: Synthetic oligonucleotide
  Target: LAMA2; (-) strand; PAM type: YTN; PAM sequence: TTC
ctgcatatagtactttcatt

SEQ ID NO: 201350 - DNA, 20 bp, Artificial Sequence
  Description of Artificial Sequence: Synthetic oligonucleotide
  Target: LAMA2; (-) strand; PAM type: YTN; PAM sequence: TTA
aaaacaaaaagccagtattc

SEQ ID NO: 201351 - DNA, 20 bp, Artificial Sequence
  Description of Artificial Sequence: Synthetic oligonucleotide
  Target: LAMA2; (-) strand; PAM type: YTN; PAM sequence: TTG
cagattaaaaacaaaaagcc

SEQ ID NO: 201352 - DNA, 20 bp, Artificial Sequence
  Description of Artificial Sequence: Synthetic oligonucleotide
  Target: LAMA2; (-) strand; PAM type: YTN; PAM sequence: CTA
attgcagattaaaaacaaaa

SEQ ID NO: 201353 - DNA, 20 bp, Artificial Sequence
  Description of Artificial Sequence: Synthetic oligonucleotide
  Target: LAMA2; (-) strand; PAM type: YTN; PAM sequence: TTA
actaattgcagattaaaaac

SEQ ID NO: 201354 - DNA, 20 bp, Artificial Sequence
  Description of Artificial Sequence: Synthetic oligonucleotide
  Target: LAMA2; (-) strand; PAM type: YTN; PAM sequence: TTA
attaactaattgcagattaa

SEQ ID NO: 201355 - DNA, 20 bp, Artificial Sequence
  Description of Artificial Sequence: Synthetic oligonucleotide
  Target: LAMA2; (-) strand; PAM type: YTN; PAM sequence: TTT
aattaactaattgcagatta

SEQ ID NO: 201356 - DNA, 20 bp, Artificial Sequence
  Description of Artificial Sequence: Synthetic oligonucleotide
  Target: LAMA2; (-) strand; PAM type: YTN; PAM sequence: CTA
caatgaaatttaattaacta

SEQ ID NO: 201357 - DNA, 20 bp, Artificial Sequence
  Description of Artificial Sequence: Synthetic oligonucleotide
  Target: LAMA2; (-) strand; PAM type: YTN; PAM sequence: TTA
tgcaatacatctacaatgaa

SEQ ID NO: 201358 - DNA, 20 bp, Artificial Sequence
  Description of Artificial Sequence: Synthetic oligonucleotide
  Target: LAMA2; (-) strand; PAM type: YTN; PAM sequence: TTT
atgcaatacatctacaatga

SEQ ID NO: 201359 - DNA, 20 bp, Artificial Sequence
  Description of Artificial Sequence: Synthetic oligonucleotide
  Target: LAMA2; (-) strand; PAM type: YTN; PAM sequence: TTT
tatgcaatacatctacaatg

SEQ ID NO: 201360 - DNA, 20 bp, Artificial Sequence
  Description of Artificial Sequence: Synthetic oligonucleotide
  Target: LAMA2; (-) strand; PAM type: YTN; PAM sequence: TTC
aaatgtattttatgcaatac

SEQ ID NO: 201361 - DNA, 20 bp, Artificial Sequence
  Description of Artificial Sequence: Synthetic oligonucleotide
  Target: LAMA2; (-) strand; PAM type: YTN; PAM sequence: TTT
caaatgtattttatgcaata

SEQ ID NO: 201362 - DNA, 20 bp, Artificial Sequence
  Description of Artificial Sequence: Synthetic oligonucleotide
  Target: LAMA2; (-) strand; PAM type: YTN; PAM sequence: CTT
tcaaatgtattttatgcaat

SEQ ID NO: 201363 - DNA, 20 bp, Artificial Sequence
  Description of Artificial Sequence: Synthetic oligonucleotide
  Target: LAMA2; (-) strand; PAM type: YTN; PAM sequence: TTA
tgaggaagaatggtgccttt

SEQ ID NO: 201364 - DNA, 20 bp, Artificial Sequence
  Description of Artificial Sequence: Synthetic oligonucleotide
  Target: LAMA2; (-) strand; PAM type: YTN; PAM sequence: CTG
tattatgaggaagaatggtg

SEQ ID NO: 201365 - DNA, 20 bp, Artificial Sequence
  Description of Artificial Sequence: Synthetic oligonucleotide
  Target: LAMA2; (-) strand; PAM type: YTN; PAM sequence: CTA
gctgtattatgaggaagaat

SEQ ID NO: 201366 - DNA, 20 bp, Artificial Sequence
  Description of Artificial Sequence: Synthetic oligonucleotide
  Target: LAMA2; (-) strand; PAM type: YTN; PAM sequence: TTC
actagctgtattatgaggaa

SEQ ID NO: 201367 - DNA, 20 bp, Artificial Sequence
  Description of Artificial Sequence: Synthetic oligonucleotide
  Target: LAMA2; (-) strand; PAM type: YTN; PAM sequence: CTT
cactagctgtattatgagga

SEQ ID NO: 201368 - DNA, 20 bp, Artificial Sequence
  Description of Artificial Sequence: Synthetic oligonucleotide
  Target: LAMA2; (-) strand; PAM type: YTN; PAM sequence: TTG
gaccttcactagctgtatta

SEQ ID NO: 201369 - DNA, 20 bp, Artificial Sequence
  Description of Artificial Sequence: Synthetic oligonucleotide
  Target: LAMA2; (-) strand; PAM type: YTN; PAM sequence: TTT
ggaccttcactagctgtatt

SEQ ID NO: 201370 - DNA, 20 bp, Artificial Sequence
  Description of Artificial Sequence: Synthetic oligonucleotide
  Target: LAMA2; (-) strand; PAM type: YTN; PAM sequence: CTG
aaatttggaccttcactagc

SEQ ID NO: 201371 - DNA, 20 bp, Artificial Sequence
  Description of Artificial Sequence: Synthetic oligonucleotide
  Target: LAMA2; (-) strand; PAM type: YTN; PAM sequence: TTG
agtcactgaaatttggacct

SEQ ID NO: 201372 - DNA, 20 bp, Artificial Sequence
  Description of Artificial Sequence: Synthetic oligonucleotide
  Target: LAMA2; (-) strand; PAM type: YTN; PAM sequence: CTT
gagtcactgaaatttggacc

SEQ ID NO: 201373 - DNA, 20 bp, Artificial Sequence
  Description of Artificial Sequence: Synthetic oligonucleotide
  Target: LAMA2; (-) strand; PAM type: YTN; PAM sequence: CTA
cacttgagtcactgaaattt

SEQ ID NO: 201374 - DNA, 20 bp, Artificial Sequence
  Description of Artificial Sequence: Synthetic oligonucleotide
  Target: LAMA2; (-) strand; PAM type: YTN; PAM sequence: TTC
ccacctacacttgagtcact

SEQ ID NO: 201375 - DNA, 20 bp, Artificial Sequence
  Description of Artificial Sequence: Synthetic oligonucleotide
  Target: LAMA2; (-) strand; PAM type: YTN; PAM sequence: TTT
cccacctacacttgagtcac

SEQ ID NO: 201376 - DNA, 20 bp, Artificial Sequence
  Description of Artificial Sequence: Synthetic oligonucleotide
  Target: LAMA2; (-) strand; PAM type: YTN; PAM sequence: TTT
tcccacctacacttgagtca

SEQ ID NO: 201377 - DNA, 20 bp, Artificial Sequence
  Description of Artificial Sequence: Synthetic oligonucleotide
  Target: LAMA2; (-) strand; PAM type: YTN; PAM sequence: TTT
ttcccacctacacttgagtc

SEQ ID NO: 201378 - DNA, 20 bp, Artificial Sequence
  Description of Artificial Sequence: Synthetic oligonucleotide
  Target: LAMA2; (-) strand; PAM type: YTN; PAM sequence: CTT
tttcccacctacacttgagt

SEQ ID NO: 201379 - DNA, 20 bp, Artificial Sequence
  Description of Artificial Sequence: Synthetic oligonucleotide
  Target: LAMA2; (-) strand; PAM type: YTN; PAM sequence: TTG
tgaggactttttcccaccta

SEQ ID NO: 201380 - DNA, 20 bp, Artificial Sequence
  Description of Artificial Sequence: Synthetic oligonucleotide
  Target: LAMA2; (-) strand; PAM type: YTN; PAM sequence: TTT
gtgaggactttttcccacct

SEQ ID NO: 201381 - DNA, 20 bp, Artificial Sequence
  Description of Artificial Sequence: Synthetic oligonucleotide
  Target: LAMA2; (-) strand; PAM type: YTN; PAM sequence: TTG
cgtaaagtttgtgaggactt

SEQ ID NO: 201382 - DNA, 20 bp, Artificial Sequence
  Description of Artificial Sequence: Synthetic oligonucleotide
  Target: LAMA2; (-) strand; PAM type: YTN; PAM sequence: TTT
gcgtaaagtttgtgaggact

SEQ ID NO: 201383 - DNA, 20 bp, Artificial Sequence
  Description of Artificial Sequence: Synthetic oligonucleotide
  Target: LAMA2; (-) strand; PAM type: YTN; PAM sequence: CTA
acaatttgcgtaaagtttgt

SEQ ID NO: 201384 - DNA, 20 bp, Artificial Sequence
  Description of Artificial Sequence: Synthetic oligonucleotide
  Target: LAMA2; (-) strand; PAM type: YTN; PAM sequence: TTC
taacaatttgcgtaaagttt

SEQ ID NO: 201385 - DNA, 20 bp, Artificial Sequence
  Description of Artificial Sequence: Synthetic oligonucleotide
  Target: LAMA2; (-) strand; PAM type: YTN; PAM sequence: TTT
ctaacaatttgcgtaaagtt

SEQ ID NO: 201386 - DNA, 20 bp, Artificial Sequence
  Description of Artificial Sequence: Synthetic oligonucleotide
  Target: LAMA2; (-) strand; PAM type: YTN; PAM sequence: TTT
tctaacaatttgcgtaaagt

SEQ ID NO: 201387 - DNA, 20 bp, Artificial Sequence
  Description of Artificial Sequence: Synthetic oligonucleotide
  Target: LAMA2; (-) strand; PAM type: YTN; PAM sequence: CTT
ttctaacaatttgcgtaaag

SEQ ID NO: 201388 - DNA, 20 bp, Artificial Sequence
  Description of Artificial Sequence: Synthetic oligonucleotide
  Target: LAMA2; (-) strand; PAM type: YTN; PAM sequence: TTA
cataagcttttctaacaatt

SEQ ID NO: 201389 - DNA, 20 bp, Artificial Sequence
  Description of Artificial Sequence: Synthetic oligonucleotide
  Target: LAMA2; (-) strand; PAM type: YTN; PAM sequence: TTT
acataagcttttctaacaat

SEQ ID NO: 201390 - DNA, 20 bp, Artificial Sequence
  Description of Artificial Sequence: Synthetic oligonucleotide
  Target: LAMA2; (-) strand; PAM type: YTN; PAM sequence: TTC
atagtagtcatgtttacata

SEQ ID NO: 201391 - DNA, 20 bp, Artificial Sequence
  Description of Artificial Sequence: Synthetic oligonucleotide
  Target: LAMA2; (-) strand; PAM type: YTN; PAM sequence: CTG
tattcatagtagtcatgttt

SEQ ID NO: 201392 - DNA, 20 bp, Artificial Sequence
  Description of Artificial Sequence: Synthetic oligonucleotide
  Target: LAMA2; (-) strand; PAM type: YTN; PAM sequence: CTG
gtctgtattcatagtagtca

SEQ ID NO: 201393 - DNA, 20 bp, Artificial Sequence
  Description of Artificial Sequence: Synthetic oligonucleotide
  Target: LAMA2; (-) strand; PAM type: YTN; PAM sequence: CTG
gggcacatccctggtctgta

SEQ ID NO: 201394 - DNA, 20 bp, Artificial Sequence
  Description of Artificial Sequence: Synthetic oligonucleotide
  Target: LAMA2; (-) strand; PAM type: YTN; PAM sequence: CTC
tggggcacatccctggtctg

SEQ ID NO: 201395 - DNA, 20 bp, Artificial Sequence
  Description of Artificial Sequence: Synthetic oligonucleotide
  Target: LAMA2; (-) strand; PAM type: YTN; PAM sequence: TTG
actctggggcacatccctgg

SEQ ID NO: 201396 - DNA, 20 bp, Artificial Sequence
  Description of Artificial Sequence: Synthetic oligonucleotide
  Target: LAMA2; (-) strand; PAM type: YTN; PAM sequence: CTC
attgactctggggcacatcc

SEQ ID NO: 201397 - DNA, 20 bp, Artificial Sequence
  Description of Artificial Sequence: Synthetic oligonucleotide
  Target: LAMA2; (-) strand; PAM type: YTN; PAM sequence: TTG
aactcattgactctggggca

SEQ ID NO: 201398 - DNA, 20 bp, Artificial Sequence
  Description of Artificial Sequence: Synthetic oligonucleotide
  Target: LAMA2; (-) strand; PAM type: YTN; PAM sequence: TTG
tggcagcaagtgaattgaac

SEQ ID NO: 201399 - DNA, 20 bp, Artificial Sequence
  Description of Artificial Sequence: Synthetic oligonucleotide
  Target: LAMA2; (-) strand; PAM type: YTN; PAM sequence: CTG
aaagcattgtggcagcaagt

SEQ ID NO: 201400 - DNA, 20 bp, Artificial Sequence
  Description of Artificial Sequence: Synthetic oligonucleotide
  Target: LAMA2; (-) strand; PAM type: YTN; PAM sequence: CTA
ggcctgaaagcattgtggca

SEQ ID NO: 201401 - DNA, 20 bp, Artificial Sequence
  Description of Artificial Sequence: Synthetic oligonucleotide
  Target: LAMA2; (-) strand; PAM type: YTN; PAM sequence: CTG
caaagagcctaggcctgaaa

SEQ ID NO: 201402 - DNA, 20 bp, Artificial Sequence
  Description of Artificial Sequence: Synthetic oligonucleotide
  Target: LAMA2; (-) strand; PAM type: YTN; PAM sequence: CTG
tctgcaaagagcctaggcct

SEQ ID NO: 201403 - DNA, 20 bp, Artificial Sequence
  Description of Artificial Sequence: Synthetic oligonucleotide
  Target: LAMA2; (-) strand; PAM type: YTN; PAM sequence: CTC
tgtctgcaaagagcctaggc

SEQ ID NO: 201404 - DNA, 20 bp, Artificial Sequence
  Description of Artificial Sequence: Synthetic oligonucleotide
  Target: LAMA2; (-) strand; PAM type: YTN; PAM sequence: CTC
tctgtctgcaaagagcctag

SEQ ID NO: 201405 - DNA, 20 bp, Artificial Sequence
  Description of Artificial Sequence: Synthetic oligonucleotide
  Target: LAMA2; (-) strand; PAM type: YTN; PAM sequence: CTG
ctctctgtctgcaaagagcc

SEQ ID NO: 201406 - DNA, 20 bp, Artificial Sequence
  Description of Artificial Sequence: Synthetic oligonucleotide
  Target: LAMA2; (-) strand; PAM type: YTN; PAM sequence: CTG
atgctgctctctgtctgcaa

SEQ ID NO: 201407 - DNA, 20 bp, Artificial Sequence
  Description of Artificial Sequence: Synthetic oligonucleotide
  Target: LAMA2; (-) strand; PAM type: YTN; PAM sequence: TTC
cctgatgctgctctctgtct

SEQ ID NO: 201408 - DNA, 20 bp, Artificial Sequence
  Description of Artificial Sequence: Synthetic oligonucleotide
  Target: LAMA2; (-) strand; PAM type: YTN; PAM sequence: CTG
ggcacaggtaataatcattc

SEQ ID NO: 201409 - DNA, 20 bp, Artificial Sequence
  Description of Artificial Sequence: Synthetic oligonucleotide
  Target: LAMA2; (-) strand; PAM type: YTN; PAM sequence: CTG
ctgggcacaggtaataatca

SEQ ID NO: 201410 - DNA, 20 bp, Artificial Sequence
  Description of Artificial Sequence: Synthetic oligonucleotide
  Target: LAMA2; (-) strand; PAM type: YTN; PAM sequence: TTG
aacaaaccctgctgggcaca

SEQ ID NO: 201411 - DNA, 20 bp, Artificial Sequence
  Description of Artificial Sequence: Synthetic oligonucleotide
  Target: LAMA2; (-) strand; PAM type: YTN; PAM sequence: TTA
gcagttgaacaaaccctgct

SEQ ID NO: 201412 - DNA, 20 bp, Artificial Sequence
  Description of Artificial Sequence: Synthetic oligonucleotide
  Target: LAMA2; (-) strand; PAM type: YTN; PAM sequence: TTG
accattagcagttgaacaaa

SEQ ID NO: 201413 - DNA, 20 bp, Artificial Sequence
  Description of Artificial Sequence: Synthetic oligonucleotide
  Target: LAMA2; (-) strand; PAM type: YTN; PAM sequence: CTT
gaccattagcagttgaacaa

SEQ ID NO: 201414 - DNA, 20 bp, Artificial Sequence
  Description of Artificial Sequence: Synthetic oligonucleotide
  Target: LAMA2; (-) strand; PAM type: YTN; PAM sequence: CTA
ccttgaccattagcagttga

SEQ ID NO: 201415 - DNA, 20 bp, Artificial Sequence
  Description of Artificial Sequence: Synthetic oligonucleotide
  Target: LAMA2; (-) strand; PAM type: YTN; PAM sequence: TTG
aatctaccttgaccattagc

SEQ ID NO: 201416 - DNA, 20 bp, Artificial Sequence
  Description of Artificial Sequence: Synthetic oligonucleotide
  Target: LAMA2; (-) strand; PAM type: YTN; PAM sequence: CTT
gaatctaccttgaccattag

SEQ ID NO: 201417 - DNA, 20 bp, Artificial Sequence
  Description of Artificial Sequence: Synthetic oligonucleotide
  Target: LAMA2; (-) strand; PAM type: YTN; PAM sequence: CTG
ggaatgatagagggcttgaa

SEQ ID NO: 201418 - DNA, 20 bp, Artificial Sequence
  Description of Artificial Sequence: Synthetic oligonucleotide
  Target: LAMA2; (-) strand; PAM type: YTN; PAM sequence: CTC
tgggaatgatagagggcttg

SEQ ID NO: 201419 - DNA, 20 bp, Artificial Sequence
  Description of Artificial Sequence: Synthetic oligonucleotide
  Target: LAMA2; (-) strand; PAM type: YTN; PAM sequence: TTG
tatgtctctgggaatgatag

SEQ ID NO: 201420 - DNA, 20 bp, Artificial Sequence
  Description of Artificial Sequence: Synthetic oligonucleotide
  Target: LAMA2; (-) strand; PAM type: YTN; PAM sequence: TTT
gtatgtctctgggaatgata

SEQ ID NO: 201421 - DNA, 20 bp, Artificial Sequence
  Description of Artificial Sequence: Synthetic oligonucleotide
  Target: LAMA2; (-) strand; PAM type: YTN; PAM sequence: TTT
tgtatgtctctgggaatgat

SEQ ID NO: 201422 - DNA, 20 bp, Artificial Sequence
  Description of Artificial Sequence: Synthetic oligonucleotide
  Target: LAMA2; (-) strand; PAM type: YTN; PAM sequence: TTG
attttgtatgtctctgggaa

SEQ ID NO: 201423 - DNA, 20 bp, Artificial Sequence
  Description of Artificial Sequence: Synthetic oligonucleotide
  Target: LAMA2; (-) strand; PAM type: YTN; PAM sequence: TTT
gattttgtatgtctctggga

SEQ ID NO: 201424 - DNA, 20 bp, Artificial Sequence
  Description of Artificial Sequence: Synthetic oligonucleotide
  Target: LAMA2; (-) strand; PAM type: YTN; PAM sequence: TTA
agtcagtatttgattttgta

SEQ ID NO: 201425 - DNA, 20 bp, Artificial Sequence
  Description of Artificial Sequence: Synthetic oligonucleotide
  Target: LAMA2; (-) strand; PAM type: YTN; PAM sequence: TTT
aagtcagtatttgattttgt

SEQ ID NO: 201426 - DNA, 20 bp, Artificial Sequence
  Description of Artificial Sequence: Synthetic oligonucleotide
  Target: LAMA2; (-) strand; PAM type: YTN; PAM sequence: CTT
taagtcagtatttgattttg

SEQ ID NO: 201427 - DNA, 20 bp, Artificial Sequence
  Description of Artificial Sequence: Synthetic oligonucleotide
  Target: LAMA2; (-) strand; PAM type: YTN; PAM sequence: CTC
tttaagtcagtatttgattt

SEQ ID NO: 201428 - DNA, 20 bp, Artificial Sequence
  Description of Artificial Sequence: Synthetic oligonucleotide
  Target: LAMA2; (-) strand; PAM type: YTN; PAM sequence: TTC
tctttaagtcagtatttgat

SEQ ID NO: 201429 - DNA, 20 bp, Artificial Sequence
  Description of Artificial Sequence: Synthetic oligonucleotide
  Target: LAMA2; (-) strand; PAM type: YTN; PAM sequence: TTT
ctctttaagtcagtatttga

SEQ ID NO: 201430 - DNA, 20 bp, Artificial Sequence
  Description of Artificial Sequence: Synthetic oligonucleotide
  Target: LAMA2; (-) strand; PAM type: YTN; PAM sequence: TTA
tatttctctttaagtcagta

SEQ ID NO: 201431 - DNA, 20 bp, Artificial Sequence
  Description of Artificial Sequence: Synthetic oligonucleotide
  Target: LAMA2; (-) strand; PAM type: YTN; PAM sequence: TTT
atatttctctttaagtcagt

SEQ ID NO: 201432 - DNA, 20 bp, Artificial Sequence
  Description of Artificial Sequence: Synthetic oligonucleotide
  Target: LAMA2; (-) strand; PAM type: YTN; PAM sequence: TTC
atttatatttctctttaagt

SEQ ID NO: 201433 - DNA, 20 bp, Artificial Sequence
  Description of Artificial Sequence: Synthetic oligonucleotide
  Target: LAMA2; (-) strand; PAM type: YTN; PAM sequence: TTT
catttatatttctctttaag

SEQ ID NO: 201434 - DNA, 20 bp, Artificial Sequence
  Description of Artificial Sequence: Synthetic oligonucleotide
  Target: LAMA2; (-) strand; PAM type: YTN; PAM sequence: TTA
tttcatttatatttctcttt

SEQ ID NO: 201435 - DNA, 20 bp, Artificial Sequence
  Description of Artificial Sequence: Synthetic oligonucleotide
  Target: LAMA2; (-) strand; PAM type: YTN; PAM sequence: CTT
atttcatttatatttctctt

SEQ ID NO: 201436 - DNA, 20 bp, Artificial Sequence
  Description of Artificial Sequence: Synthetic oligonucleotide
  Target: LAMA2; (-) strand; PAM type: YTN; PAM sequence: TTA
gaacttatttcatttatatt

SEQ ID NO: 201437 - DNA, 20 bp, Artificial Sequence
  Description of Artificial Sequence: Synthetic oligonucleotide
  Target: LAMA2; (-) strand; PAM type: YTN; PAM sequence: TTT
agaacttatttcatttatat

SEQ ID NO: 201438 - DNA, 20 bp, Artificial Sequence
  Description of Artificial Sequence: Synthetic oligonucleotide
  Target: LAMA2; (-) strand; PAM type: YTN; PAM sequence: TTT
tagaacttatttcatttata

SEQ ID NO: 201439 - DNA, 20 bp, Artificial Sequence
  Description of Artificial Sequence: Synthetic oligonucleotide
  Target: LAMA2; (-) strand; PAM type: YTN; PAM sequence: CTT
ttagaacttatttcatttat

SEQ ID NO: 201440 - DNA, 20 bp, Artificial Sequence
  Description of Artificial Sequence: Synthetic oligonucleotide
  Target: LAMA2; (-) strand; PAM type: YTN; PAM sequence: TTC
cttttagaacttatttcatt

SEQ ID NO: 201441 - DNA, 20 bp, Artificial Sequence
  Description of Artificial Sequence: Synthetic oligonucleotide
  Target: LAMA2; (-) strand; PAM type: YTN; PAM sequence: TTT
ccttttagaacttatttcat

SEQ ID NO: 201442 - DNA, 20 bp, Artificial Sequence
  Description of Artificial Sequence: Synthetic oligonucleotide
  Target: LAMA2; (-) strand; PAM type: YTN; PAM sequence: TTT
tccttttagaacttatttca

SEQ ID NO: 201443 - DNA, 20 bp, Artificial Sequence
  Description of Artificial Sequence: Synthetic oligonucleotide
  Target: LAMA2; (-) strand; PAM type: YTN; PAM sequence: CTT
ttccttttagaacttatttc

SEQ ID NO: 201444 - DNA, 20 bp, Artificial Sequence
  Description of Artificial Sequence: Synthetic oligonucleotide
  Target: LAMA2; (-) strand; PAM type: YTN; PAM sequence: TTC
ttttccttttagaacttatt

SEQ ID NO: 201445 - DNA, 20 bp, Artificial Sequence
  Description of Artificial Sequence: Synthetic oligonucleotide
  Target: LAMA2; (-) strand; PAM type: YTN; PAM sequence: TTT
cttttccttttagaacttat

SEQ ID NO: 201446 - DNA, 20 bp, Artificial Sequence
  Description of Artificial Sequence: Synthetic oligonucleotide
  Target: LAMA2; (-) strand; PAM type: YTN; PAM sequence: TTT
tcttttccttttagaactta

SEQ ID NO: 201447 - DNA, 20 bp, Artificial Sequence
  Description of Artificial Sequence: Synthetic oligonucleotide
  Target: LAMA2; (-) strand; PAM type: YTN; PAM sequence: TTG
ttttcttttccttttagaac

SEQ ID NO: 201448 - DNA, 20 bp, Artificial Sequence
  Description of Artificial Sequence: Synthetic oligonucleotide
  Target: LAMA2; (-) strand; PAM type: YTN; PAM sequence: TTT
gttttcttttccttttagaa

SEQ ID NO: 201449 - DNA, 20 bp, Artificial Sequence
  Description of Artificial Sequence: Synthetic oligonucleotide
  Target: LAMA2; (-) strand; PAM type: YTN; PAM sequence: CTT
tgttttcttttccttttaga

SEQ ID NO: 201450 - DNA, 20 bp, Artificial Sequence
  Description of Artificial Sequence: Synthetic oligonucleotide
  Target: LAMA2; (-) strand; PAM type: YTN; PAM sequence: TTC
tttgttttcttttcctttta

SEQ ID NO: 201451 - DNA, 20 bp, Artificial Sequence
  Description of Artificial Sequence: Synthetic oligonucleotide
  Target: LAMA2; (-) strand; PAM type: YTN; PAM sequence: TTT
ctttgttttcttttcctttt

SEQ ID NO: 201452 - DNA, 20 bp, Artificial Sequence
  Description of Artificial Sequence: Synthetic oligonucleotide
  Target: LAMA2; (-) strand; PAM type: YTN; PAM sequence: TTG
taaaagacatttctttgttt

SEQ ID NO: 201453 - DNA, 20 bp, Artificial Sequence
  Description of Artificial Sequence: Synthetic oligonucleotide
  Target: LAMA2; (-) strand; PAM type: YTN; PAM sequence: CTT
gtaaaagacatttctttgtt

SEQ ID NO: 201454 - DNA, 20 bp, Artificial Sequence
  Description of Artificial Sequence: Synthetic oligonucleotide
  Target: LAMA2; (-) strand; PAM type: YTN; PAM sequence: TTA
gtgccttgtaaaagacattt

SEQ ID NO: 201455 - DNA, 20 bp, Artificial Sequence
  Description of Artificial Sequence: Synthetic oligonucleotide
  Target: LAMA2; (-) strand; PAM type: YTN; PAM sequence: TTT
agtgccttgtaaaagacatt

SEQ ID NO: 201456 - DNA, 20 bp, Artificial Sequence
  Description of Artificial Sequence: Synthetic oligonucleotide
  Target: LAMA2; (-) strand; PAM type: YTN; PAM sequence: CTT
tagtgccttgtaaaagacat

SEQ ID NO: 201457 - DNA, 20 bp, Artificial Sequence
  Description of Artificial Sequence: Synthetic oligonucleotide
  Target: LAMA2; (-) strand; PAM type: YTN; PAM sequence: TTC
tttagtgccttgtaaaagac

SEQ ID NO: 201458 - DNA, 20 bp, Artificial Sequence
  Description of Artificial Sequence: Synthetic oligonucleotide
  Target: LAMA2; (-) strand; PAM type: YTN; PAM sequence: TTT
ctttagtgccttgtaaaaga

SEQ ID NO: 201459 - DNA, 20 bp, Artificial Sequence
  Description of Artificial Sequence: Synthetic oligonucleotide
  Target: LAMA2; (-) strand; PAM type: YTN; PAM sequence: CTT
tctttagtgccttgtaaaag

SEQ ID NO: 201460 - DNA, 20 bp, Artificial Sequence
  Description of Artificial Sequence: Synthetic oligonucleotide
  Target: LAMA2; (-) strand; PAM type: YTN; PAM sequence: TTG
tgtctttctttagtgccttg

SEQ ID NO: 201461 - DNA, 20 bp, Artificial Sequence
  Description of Artificial Sequence: Synthetic oligonucleotide
  Target: LAMA2; (-) strand; PAM type: YTN; PAM sequence: CTT
gtgtctttctttagtgcctt

SEQ ID NO: 201462 - DNA, 20 bp, Artificial Sequence
  Description of Artificial Sequence: Synthetic oligonucleotide
  Target: LAMA2; (-) strand; PAM type: YTN; PAM sequence: TTC
ccttgtgtctttctttagtg

SEQ ID NO: 201463 - DNA, 20 bp, Artificial Sequence
  Description of Artificial Sequence: Synthetic oligonucleotide
  Target: LAMA2; (-) strand; PAM type: YTN; PAM sequence: CTA
tatgaatgttcccttgtgtc

SEQ ID NO: 201464 - DNA, 20 bp, Artificial Sequence
  Description of Artificial Sequence: Synthetic oligonucleotide
  Target: LAMA2; (-) strand; PAM type: YTN; PAM sequence: TTA
ataaaataatctatatgaat

SEQ ID NO: 201465 - DNA, 20 bp, Artificial Sequence
  Description of Artificial Sequence: Synthetic oligonucleotide
  Target: LAMA2; (-) strand; PAM type: YTN; PAM sequence: TTT
aataaaataatctatatgaa

SEQ ID NO: 201466 - DNA, 20 bp, Artificial Sequence
  Description of Artificial Sequence: Synthetic oligonucleotide
  Target: LAMA2; (-) strand; PAM type: YTN; PAM sequence: CTC
aataaatatttaataaaata

SEQ ID NO: 201467 - DNA, 20 bp, Artificial Sequence
  Description of Artificial Sequence: Synthetic oligonucleotide
  Target: LAMA2; (-) strand; PAM type: YTN; PAM sequence: TTG
ctcaataaatatttaataaa

SEQ ID NO: 201468 - DNA, 20 bp, Artificial Sequence
  Description of Artificial Sequence: Synthetic oligonucleotide
  Target: LAMA2; (-) strand; PAM type: YTN; PAM sequence: TTT
gctcaataaatatttaataa

SEQ ID NO: 201469 - DNA, 20 bp, Artificial Sequence
  Description of Artificial Sequence: Synthetic oligonucleotide
  Target: LAMA2; (-) strand; PAM type: YTN; PAM sequence: TTT
tgctcaataaatatttaata

SEQ ID NO: 201470 - DNA, 20 bp, Artificial Sequence
  Description of Artificial Sequence: Synthetic oligonucleotide
  Target: LAMA2; (-) strand; PAM type: YTN; PAM sequence: CTG
gcacaaatattttgctcaat

SEQ ID NO: 201471 - DNA, 20 bp, Artificial Sequence
  Description of Artificial Sequence: Synthetic oligonucleotide
  Target: LAMA2; (-) strand; PAM type: YTN; PAM sequence: CTA
acagtgcctggcacaaatat

SEQ ID NO: 201472 - DNA, 20 bp, Artificial Sequence
  Description of Artificial Sequence: Synthetic oligonucleotide
  Target: LAMA2; (-) strand; PAM type: YTN; PAM sequence: CTC
atgaggccaatctaacagtg

SEQ ID NO: 201473 - DNA, 20 bp, Artificial Sequence
  Description of Artificial Sequence: Synthetic oligonucleotide
  Target: LAMA2; (-) strand; PAM type: YTN; PAM sequence: CTG
atgtatagcaagtgggtgcc

SEQ ID NO: 201474 - DNA, 20 bp, Artificial Sequence
  Description of Artificial Sequence: Synthetic oligonucleotide
  Target: LAMA2; (-) strand; PAM type: YTN; PAM sequence: TTC
caagcctgatgtatagcaag

SEQ ID NO: 201475 - DNA, 20 bp, Artificial Sequence
  Description of Artificial Sequence: Synthetic oligonucleotide
  Target: LAMA2; (-) strand; PAM type: YTN; PAM sequence: TTT
ccaagcctgatgtatagcaa

SEQ ID NO: 201476 - DNA, 20 bp, Artificial Sequence
  Description of Artificial Sequence: Synthetic oligonucleotide
  Target: LAMA2; (-) strand; PAM type: YTN; PAM sequence: CTG
gtcaggagtatgtttccaag

SEQ ID NO: 201477 - DNA, 20 bp, Artificial Sequence
  Description of Artificial Sequence: Synthetic oligonucleotide
  Target: LAMA2; (-) strand; PAM type: YTN; PAM sequence: CTA
gcataaatgctggtcaggag

SEQ ID NO: 201478 - DNA, 20 bp, Artificial Sequence
  Description of Artificial Sequence: Synthetic oligonucleotide
  Target: LAMA2; (-) strand; PAM type: YTN; PAM sequence: TTA
gcacagtatgagacataaat

SEQ ID NO: 201479 - DNA, 20 bp, Artificial Sequence
  Description of Artificial Sequence: Synthetic oligonucleotide
  Target: LAMA2; (-) strand; PAM type: YTN; PAM sequence: CTT
agcacagtatgagacataaa

SEQ ID NO: 201480 - DNA, 20 bp, Artificial Sequence
  Description of Artificial Sequence: Synthetic oligonucleotide
  Target: LAMA2; (-) strand; PAM type: YTN; PAM sequence: TTA
gtcacccccttagcacagta

SEQ ID NO: 201481 - DNA, 20 bp, Artificial Sequence
  Description of Artificial Sequence: Synthetic oligonucleotide
  Target: LAMA2; (-) strand; PAM type: YTN; PAM sequence: TTT
agtcacccccttagcacagt

SEQ ID NO: 201482 - DNA, 20 bp, Artificial Sequence
  Description of Artificial Sequence: Synthetic oligonucleotide
  Target: LAMA2; (-) strand; PAM type: YTN; PAM sequence: TTT
tagtcacccccttagcacag

SEQ ID NO: 201483 - DNA, 20 bp, Artificial Sequence
  Description of Artificial Sequence: Synthetic oligonucleotide
  Target: LAMA2; (-) strand; PAM type: YTN; PAM sequence: TTG
gtcaatatagattttagtca

SEQ ID NO: 201484 - DNA, 20 bp, Artificial Sequence
  Description of Artificial Sequence: Synthetic oligonucleotide
  Target: LAMA2; (-) strand; PAM type: YTN; PAM sequence: CTC
atcaagtattggtcaatata

SEQ ID NO: 201485 - DNA, 20 bp, Artificial Sequence
  Description of Artificial Sequence: Synthetic oligonucleotide
  Target: LAMA2; (-) strand; PAM type: YTN; PAM sequence: CTG
tcaaatatactcatcaagta

SEQ ID NO: 201486 - DNA, 20 bp, Artificial Sequence
  Description of Artificial Sequence: Synthetic oligonucleotide
  Target: LAMA2; (-) strand; PAM type: YTN; PAM sequence: TTA
aacatctgtcaaatatactc

SEQ ID NO: 201487 - DNA, 20 bp, Artificial Sequence
  Description of Artificial Sequence: Synthetic oligonucleotide
  Target: LAMA2; (-) strand; PAM type: YTN; PAM sequence: TTT
aaacatctgtcaaatatact

SEQ ID NO: 201488 - DNA, 20 bp, Artificial Sequence
  Description of Artificial Sequence: Synthetic oligonucleotide
  Target: LAMA2; (-) strand; PAM type: YTN; PAM sequence: TTT
taaacatctgtcaaatatac

SEQ ID NO: 201489 - DNA, 20 bp, Artificial Sequence
  Description of Artificial Sequence: Synthetic oligonucleotide
  Target: LAMA2; (-) strand; PAM type: YTN; PAM sequence: CTT
ttaaacatctgtcaaatata

SEQ ID NO: 201490 - DNA, 20 bp, Artificial Sequence
  Description of Artificial Sequence: Synthetic oligonucleotide
  Target: LAMA2; (-) strand; PAM type: YTN; PAM sequence: TTA
acttttaaacatctgtcaaa

SEQ ID NO: 201491 - DNA, 20 bp, Artificial Sequence
  Description of Artificial Sequence: Synthetic oligonucleotide
  Target: LAMA2; (-) strand; PAM type: YTN; PAM sequence: TTG
agcagggttaacttttaaac

SEQ ID NO: 201492 - DNA, 20 bp, Artificial Sequence
  Description of Artificial Sequence: Synthetic oligonucleotide
  Target: LAMA2; (-) strand; PAM type: YTN; PAM sequence: TTT
gagcagggttaacttttaaa

SEQ ID NO: 201493 - DNA, 20 bp, Artificial Sequence
  Description of Artificial Sequence: Synthetic oligonucleotide
  Target: LAMA2; (-) strand; PAM type: YTN; PAM sequence: TTT
tgagcagggttaacttttaa

SEQ ID NO: 201494 - DNA, 20 bp, Artificial Sequence
  Description of Artificial Sequence: Synthetic oligonucleotide
  Target: LAMA2; (-) strand; PAM type: YTN; PAM sequence: TTT
ttgagcagggttaactttta

SEQ ID NO: 201495 - DNA, 20 bp, Artificial Sequence
  Description of Artificial Sequence: Synthetic oligonucleotide
  Target: LAMA2; (-) strand; PAM type: YTN; PAM sequence: TTA
catttttgagcagggttaac

SEQ ID NO: 201496 - DNA, 20 bp, Artificial Sequence
  Description of Artificial Sequence: Synthetic oligonucleotide
  Target: LAMA2; (-) strand; PAM type: YTN; PAM sequence: TTA
gtaaagatcccgttacattt

SEQ ID NO: 201497 - DNA, 20 bp, Artificial Sequence
  Description of Artificial Sequence: Synthetic oligonucleotide
  Target: LAMA2; (-) strand; PAM type: YTN; PAM sequence: CTG
attagtaaagatcccgttac

SEQ ID NO: 201498 - DNA, 20 bp, Artificial Sequence
  Description of Artificial Sequence: Synthetic oligonucleotide
  Target: LAMA2; (-) strand; PAM type: YTN; PAM sequence: CTA
tgatcctgattagtaaagat

SEQ ID NO: 201499 - DNA, 20 bp, Artificial Sequence
  Description of Artificial Sequence: Synthetic oligonucleotide
  Target: LAMA2; (-) strand; PAM type: YTN; PAM sequence: CTA
ggaacccatgcaaacctatg

SEQ ID NO: 201500 - DNA, 20 bp, Artificial Sequence
  Description of Artificial Sequence: Synthetic oligonucleotide
  Target: LAMA2; (-) strand; PAM type: YTN; PAM sequence: CTC
ctaggaacccatgcaaacct

SEQ ID NO: 201501 - DNA, 20 bp, Artificial Sequence
  Description of Artificial Sequence: Synthetic oligonucleotide
  Target: LAMA2; (-) strand; PAM type: YTN; PAM sequence: TTC
ctcctaggaacccatgcaaa

SEQ ID NO: 201502 - DNA, 20 bp, Artificial Sequence
  Description of Artificial Sequence: Synthetic oligonucleotide
  Target: LAMA2; (-) strand; PAM type: YTN; PAM sequence: TTT
cctcctaggaacccatgcaa

SEQ ID NO: 201503 - DNA, 20 bp, Artificial Sequence
  Description of Artificial Sequence: Synthetic oligonucleotide
  Target: LAMA2; (-) strand; PAM type: YTN; PAM sequence: TTT
tcctcctaggaacccatgca

SEQ ID NO: 201504 - DNA, 20 bp, Artificial Sequence
  Description of Artificial Sequence: Synthetic oligonucleotide
  Target: LAMA2; (-) strand; PAM type: YTN; PAM sequence: CTT
ttcctcctaggaacccatgc

SEQ ID NO: 201505 - DNA, 20 bp, Artificial Sequence
  Description of Artificial Sequence: Synthetic oligonucleotide
  Target: LAMA2; (-) strand; PAM type: YTN; PAM sequence: TTC
ttttcctcctaggaacccat

SEQ ID NO: 201506 - DNA, 20 bp, Artificial Sequence
  Description of Artificial Sequence: Synthetic oligonucleotide
  Target: LAMA2; (-) strand; PAM type: YTN; PAM sequence: CTC
attcttttcctcctaggaac

SEQ ID NO: 201507 - DNA, 20 bp, Artificial Sequence
  Description of Artificial Sequence: Synthetic oligonucleotide
  Target: LAMA2; (-) strand; PAM type: YTN; PAM sequence: CTG
gtcccactcattcttttcct

SEQ ID NO: 201508 - DNA, 20 bp, Artificial Sequence
  Description of Artificial Sequence: Synthetic oligonucleotide
  Target: LAMA2; (-) strand; PAM type: YTN; PAM sequence: TTG
gtgtataaactggtcccact

SEQ ID NO: 201509 - DNA, 20 bp, Artificial Sequence
  Description of Artificial Sequence: Synthetic oligonucleotide
  Target: LAMA2; (-) strand; PAM type: YTN; PAM sequence: CTT
ggtgtataaactggtcccac

SEQ ID NO: 201510 - DNA, 20 bp, Artificial Sequence
  Description of Artificial Sequence: Synthetic oligonucleotide
  Target: LAMA2; (-) strand; PAM type: YTN; PAM sequence: TTG
atgcttggtgtataaactgg

SEQ ID NO: 201511 - DNA, 20 bp, Artificial Sequence
  Description of Artificial Sequence: Synthetic oligonucleotide
  Target: LAMA2; (-) strand; PAM type: YTN; PAM sequence: TTT
gatgcttggtgtataaactg

SEQ ID NO: 201512 - DNA, 20 bp, Artificial Sequence
  Description of Artificial Sequence: Synthetic oligonucleotide
  Target: LAMA2; (-) strand; PAM type: YTN; PAM sequence: CTT
tgatgcttggtgtataaact

SEQ ID NO: 201513 - DNA, 20 bp, Artificial Sequence
  Description of Artificial Sequence: Synthetic oligonucleotide
  Target: LAMA2; (-) strand; PAM type: YTN; PAM sequence: CTA
gggtgagaatggagtccttt

SEQ ID NO: 201514 - DNA, 20 bp, Artificial Sequence
  Description of Artificial Sequence: Synthetic oligonucleotide
  Target: LAMA2; (-) strand; PAM type: YTN; PAM sequence: TTC
cctagggtgagaatggagtc

SEQ ID NO: 201515 - DNA, 20 bp, Artificial Sequence
  Description of Artificial Sequence: Synthetic oligonucleotide
  Target: LAMA2; (-) strand; PAM type: YTN; PAM sequence: TTT
ccctagggtgagaatggagt

SEQ ID NO: 201516 - DNA, 20 bp, Artificial Sequence
  Description of Artificial Sequence: Synthetic oligonucleotide
  Target: LAMA2; (-) strand; PAM type: YTN; PAM sequence: CTG
agcagtaaaatccgtgtttc

SEQ ID NO: 201517 - DNA, 20 bp, Artificial Sequence
  Description of Artificial Sequence: Synthetic oligonucleotide
  Target: LAMA2; (-) strand; PAM type: YTN; PAM sequence: TTC
atcatcccctgagcagtaaa

SEQ ID NO: 201518 - DNA, 20 bp, Artificial Sequence
  Description of Artificial Sequence: Synthetic oligonucleotide
  Target: LAMA2; (-) strand; PAM type: YTN; PAM sequence: TTT
catcatcccctgagcagtaa

SEQ ID NO: 201519 - DNA, 20 bp, Artificial Sequence
  Description of Artificial Sequence: Synthetic oligonucleotide
  Target: LAMA2; (-) strand; PAM type: YTN; PAM sequence: TTT
tcatcatcccctgagcagta

SEQ ID NO: 201520 - DNA, 20 bp, Artificial Sequence
  Description of Artificial Sequence: Synthetic oligonucleotide
  Target: LAMA2; (-) strand; PAM type: YTN; PAM sequence: CTG
aggtgtaaaagtcggaatcc

SEQ ID NO: 201521 - DNA, 20 bp, Artificial Sequence
  Description of Artificial Sequence: Synthetic oligonucleotide
  Target: LAMA2; (-) strand; PAM type: YTN; PAM sequence: TTA
atagaaataatctgaggtgt

SEQ ID NO: 201522 - DNA, 20 bp, Artificial Sequence
  Description of Artificial Sequence: Synthetic oligonucleotide
  Target: LAMA2; (-) strand; PAM type: YTN; PAM sequence: CTG
aggtgtaattaatagaaata

SEQ ID NO: 201523 - DNA, 20 bp, Artificial Sequence
  Description of Artificial Sequence: Synthetic oligonucleotide
  Target: LAMA2; (-) strand; PAM type: YTN; PAM sequence: CTG
aggtgtaatagaaataatct

SEQ ID NO: 201524 - DNA, 20 bp, Artificial Sequence
  Description of Artificial Sequence: Synthetic oligonucleotide
  Target: LAMA2; (-) strand; PAM type: YTN; PAM sequence: CTG
agataataatctgaggtgta

SEQ ID NO: 201525 - DNA, 20 bp, Artificial Sequence
  Description of Artificial Sequence: Synthetic oligonucleotide
  Target: LAMA2; (-) strand; PAM type: YTN; PAM sequence: CTG
aggtgtaatagataataatc

SEQ ID NO: 201526 - DNA, 20 bp, Artificial Sequence
  Description of Artificial Sequence: Synthetic oligonucleotide
  Target: LAMA2; (-) strand; PAM type: YTN; PAM sequence: CTG
aataatagaaataatctgag

SEQ ID NO: 201527 - DNA, 20 bp, Artificial Sequence
  Description of Artificial Sequence: Synthetic oligonucleotide
  Target: LAMA2; (-) strand; PAM type: YTN; PAM sequence: CTA
agactgaataatagaaataa

SEQ ID NO: 201528 - DNA, 20 bp, Artificial Sequence
  Description of Artificial Sequence: Synthetic oligonucleotide
  Target: LAMA2; (-) strand; PAM type: YTN; PAM sequence: TTC
ggctaagactgaataataga

SEQ ID NO: 201529 - DNA, 20 bp, Artificial Sequence
  Description of Artificial Sequence: Synthetic oligonucleotide
  Target: LAMA2; (-) strand; PAM type: YTN; PAM sequence: CTT
cggctaagactgaataatag

SEQ ID NO: 201530 - DNA, 20 bp, Artificial Sequence
  Description of Artificial Sequence: Synthetic oligonucleotide
  Target: LAMA2; (-) strand; PAM type: YTN; PAM sequence: CTG
ggaatcttcggctaagactg

SEQ ID NO: 201531 - DNA, 20 bp, Artificial Sequence
  Description of Artificial Sequence: Synthetic oligonucleotide
  Target: LAMA2; (-) strand; PAM type: YTN; PAM sequence: CTG
gggctgggaatcttcggcta

SEQ ID NO: 201532 - DNA, 20 bp, Artificial Sequence
  Description of Artificial Sequence: Synthetic oligonucleotide
  Target: LAMA2; (-) strand; PAM type: YTN; PAM sequence: TTG
agcaacgatggacctggggc

SEQ ID NO: 201533 - DNA, 20 bp, Artificial Sequence
  Description of Artificial Sequence: Synthetic oligonucleotide
  Target: LAMA2; (-) strand; PAM type: YTN; PAM sequence: CTT
gagcaacgatggacctgggg

SEQ ID NO: 201534 - DNA, 20 bp, Artificial Sequence
  Description of Artificial Sequence: Synthetic oligonucleotide
  Target: LAMA2; (-) strand; PAM type: YTN; PAM sequence: TTA
cccttgagcaacgatggacc

SEQ ID NO: 201535 - DNA, 20 bp, Artificial Sequence
  Description of Artificial Sequence: Synthetic oligonucleotide
  Target: LAMA2; (-) strand; PAM type: YTN; PAM sequence: CTT
acccttgagcaacgatggac

SEQ ID NO: 201536 - DNA, 20 bp, Artificial Sequence
  Description of Artificial Sequence: Synthetic oligonucleotide
  Target: LAMA2; (-) strand; PAM type: YTN; PAM sequence: CTG
tgatcttacccttgagcaac

SEQ ID NO: 201537 - DNA, 20 bp, Artificial Sequence
  Description of Artificial Sequence: Synthetic oligonucleotide
  Target: LAMA2; (-) strand; PAM type: YTN; PAM sequence: CTA
ggtctgtgatcttacccttg

SEQ ID NO: 201538 - DNA, 20 bp, Artificial Sequence
  Description of Artificial Sequence: Synthetic oligonucleotide
  Target: LAMA2; (-) strand; PAM type: YTN; PAM sequence: TTG
cacagaagggaaataatgca

SEQ ID NO: 201539 - DNA, 20 bp, Artificial Sequence
  Description of Artificial Sequence: Synthetic oligonucleotide
  Target: LAMA2; (-) strand; PAM type: YTN; PAM sequence: TTT
gcacagaagggaaataatgc

SEQ ID NO: 201540 - DNA, 20 bp, Artificial Sequence
  Description of Artificial Sequence: Synthetic oligonucleotide
  Target: LAMA2; (-) strand; PAM type: YTN; PAM sequence: CTC
acgatttgcacagaagggaa

SEQ ID NO: 201541 - DNA, 20 bp, Artificial Sequence
  Description of Artificial Sequence: Synthetic oligonucleotide
  Target: LAMA2; (-) strand; PAM type: YTN; PAM sequence: TTG
gccctcacgatttgcacaga

SEQ ID NO: 201542 - DNA, 20 bp, Artificial Sequence
  Description of Artificial Sequence: Synthetic oligonucleotide
  Target: LAMA2; (-) strand; PAM type: YTN; PAM sequence: TTA
gagagcaaaattggccctca

SEQ ID NO: 201543 - DNA, 20 bp, Artificial Sequence
  Description of Artificial Sequence: Synthetic oligonucleotide
  Target: LAMA2; (-) strand; PAM type: YTN; PAM sequence: TTT
agagagcaaaattggccctc

SEQ ID NO: 201544 - DNA, 20 bp, Artificial Sequence
  Description of Artificial Sequence: Synthetic oligonucleotide
  Target: LAMA2; (-) strand; PAM type: YTN; PAM sequence: TTT
tagagagcaaaattggccct

SEQ ID NO: 201545 - DNA, 20 bp, Artificial Sequence
  Description of Artificial Sequence: Synthetic oligonucleotide
  Target: LAMA2; (-) strand; PAM type: YTN; PAM sequence: TTT
ttagagagcaaaattggccc

SEQ ID NO: 201546 - DNA, 20 bp, Artificial Sequence
  Description of Artificial Sequence: Synthetic oligonucleotide
  Target: LAMA2; (-) strand; PAM type: YTN; PAM sequence: TTA
atgcaaatttttagagagca

SEQ ID NO: 201547 - DNA, 20 bp, Artificial Sequence
  Description of Artificial Sequence: Synthetic oligonucleotide
  Target: LAMA2; (-) strand; PAM type: YTN; PAM sequence: TTT
aatgcaaatttttagagagc

SEQ ID NO: 201548 - DNA, 20 bp, Artificial Sequence
  Description of Artificial Sequence: Synthetic oligonucleotide
  Target: LAMA2; (-) strand; PAM type: YTN; PAM sequence: CTG
tttaatgcaaatttttagag

SEQ ID NO: 201549 - DNA, 20 bp, Artificial Sequence
  Description of Artificial Sequence: Synthetic oligonucleotide
  Target: LAMA2; (-) strand; PAM type: YTN; PAM sequence: TTG
gtctgtttaatgcaaatttt

SEQ ID NO: 201550 - DNA, 20 bp, Artificial Sequence
  Description of Artificial Sequence: Synthetic oligonucleotide
  Target: LAMA2; (-) strand; PAM type: YTN; PAM sequence: CTA
gtgattggtctgtttaatgc

SEQ ID NO: 201551 - DNA, 20 bp, Artificial Sequence
  Description of Artificial Sequence: Synthetic oligonucleotide
  Target: LAMA2; (-) strand; PAM type: YTN; PAM sequence: CTG
tagaaggaatctagtgattg

SEQ ID NO: 201552 - DNA, 20 bp, Artificial Sequence
  Description of Artificial Sequence: Synthetic oligonucleotide
  Target: LAMA2; (-) strand; PAM type: YTN; PAM sequence: TTG
atctgtagaaggaatctagt

SEQ ID NO: 201553 - DNA, 20 bp, Artificial Sequence
  Description of Artificial Sequence: Synthetic oligonucleotide
  Target: LAMA2; (-) strand; PAM type: YTN; PAM sequence: TTT
gatctgtagaaggaatctag

SEQ ID NO: 201554 - DNA, 20 bp, Artificial Sequence
  Description of Artificial Sequence: Synthetic oligonucleotide
  Target: LAMA2; (-) strand; PAM type: YTN; PAM sequence: TTT
tgatctgtagaaggaatcta

SEQ ID NO: 201555 - DNA, 20 bp, Artificial Sequence
  Description of Artificial Sequence: Synthetic oligonucleotide
  Target: LAMA2; (-) strand; PAM type: YTN; PAM sequence: TTG
aataaatgcattttgatctg

SEQ ID NO: 201556 - DNA, 20 bp, Artificial Sequence
  Description of Artificial Sequence: Synthetic oligonucleotide
  Target: LAMA2; (-) strand; PAM type: YTN; PAM sequence: TTG
attgaataaatgcattttga

SEQ ID NO: 201557 - DNA, 20 bp, Artificial Sequence
  Description of Artificial Sequence: Synthetic oligonucleotide
  Target: LAMA2; (-) strand; PAM type: YTN; PAM sequence: TTT
gattgaataaatgcattttg

SEQ ID NO: 201558 - DNA, 20 bp, Artificial Sequence
  Description of Artificial Sequence: Synthetic oligonucleotide
  Target: LAMA2; (-) strand; PAM type: YTN; PAM sequence: TTG
tttgattgaataaatgcatt

SEQ ID NO: 201559 - DNA, 20 bp, Artificial Sequence
  Description of Artificial Sequence: Synthetic oligonucleotide
  Target: LAMA2; (-) strand; PAM type: YTN; PAM sequence: TTT
gtttgattgaataaatgcat

SEQ ID NO: 201560 - DNA, 20 bp, Artificial Sequence
  Description of Artificial Sequence: Synthetic oligonucleotide
  Target: LAMA2; (-) strand; PAM type: YTN; PAM sequence: TTT
tgtttgattgaataaatgca

SEQ ID NO: 201561 - DNA, 20 bp, Artificial Sequence
  Description of Artificial Sequence: Synthetic oligonucleotide
  Target: LAMA2; (-) strand; PAM type: YTN; PAM sequence: CTT
ttgtttgattgaataaatgc

SEQ ID NO: 201562 - DNA, 20 bp, Artificial Sequence
  Description of Artificial Sequence: Synthetic oligonucleotide
  Target: LAMA2; (-) strand; PAM type: YTN; PAM sequence: TTC
ccttttgtttgattgaataa

SEQ ID NO: 201563 - DNA, 20 bp, Artificial Sequence
  Description of Artificial Sequence: Synthetic oligonucleotide
  Target: LAMA2; (-) strand; PAM type: YTN; PAM sequence: CTC
acatggattcccttttgttt

SEQ ID NO: 201564 - DNA, 20 bp, Artificial Sequence
  Description of Artificial Sequence: Synthetic oligonucleotide
  Target: LAMA2; (-) strand; PAM type: YTN; PAM sequence: TTG
cctcacatggattccctttt

SEQ ID NO: 201565 - DNA, 20 bp, Artificial Sequence
  Description of Artificial Sequence: Synthetic oligonucleotide
  Target: LAMA2; (-) strand; PAM type: YTN; PAM sequence: TTA
gttgcctcacatggattccc

SEQ ID NO: 201566 - DNA, 20 bp, Artificial Sequence
  Description of Artificial Sequence: Synthetic oligonucleotide
  Target: LAMA2; (-) strand; PAM type: YTN; PAM sequence: CTT
agttgcctcacatggattcc

SEQ ID NO: 201567 - DNA, 20 bp, Artificial Sequence
  Description of Artificial Sequence: Synthetic oligonucleotide
  Target: LAMA2; (-) strand; PAM type: YTN; PAM sequence: TTC
cttagttgcctcacatggat

SEQ ID NO: 201568 - DNA, 20 bp, Artificial Sequence
  Description of Artificial Sequence: Synthetic oligonucleotide
  Target: LAMA2; (-) strand; PAM type: YTN; PAM sequence: CTT
ccttagttgcctcacatgga

SEQ ID NO: 201569 - DNA, 20 bp, Artificial Sequence
  Description of Artificial Sequence: Synthetic oligonucleotide
  Target: LAMA2; (-) strand; PAM type: YTN; PAM sequence: CTG
gagggaaagcccttccttag

SEQ ID NO: 201570 - DNA, 20 bp, Artificial Sequence
  Description of Artificial Sequence: Synthetic oligonucleotide
  Target: LAMA2; (-) strand; PAM type: YTN; PAM sequence: CTC
accagactggagggaaagcc

SEQ ID NO: 201571 - DNA, 20 bp, Artificial Sequence
  Description of Artificial Sequence: Synthetic oligonucleotide
  Target: LAMA2; (-) strand; PAM type: YTN; PAM sequence: CTG
ctcaccagactggagggaaa

SEQ ID NO: 201572 - DNA, 20 bp, Artificial Sequence
  Description of Artificial Sequence: Synthetic oligonucleotide
  Target: LAMA2; (-) strand; PAM type: YTN; PAM sequence: CTC
acaaaatagagccagcagag

SEQ ID NO: 201573 - DNA, 20 bp, Artificial Sequence
  Description of Artificial Sequence: Synthetic oligonucleotide
  Target: LAMA2; (-) strand; PAM type: YTN; PAM sequence: TTA
taaagacctcacaaaataga

SEQ ID NO: 201574 - DNA, 20 bp, Artificial Sequence
  Description of Artificial Sequence: Synthetic oligonucleotide
  Target: LAMA2; (-) strand; PAM type: YTN; PAM sequence: TTT
ataaagacctcacaaaatag

SEQ ID NO: 201575 - DNA, 20 bp, Artificial Sequence
  Description of Artificial Sequence: Synthetic oligonucleotide
  Target: LAMA2; (-) strand; PAM type: YTN; PAM sequence: TTG
tggtcatttataaagacctc

SEQ ID NO: 201576 - DNA, 20 bp, Artificial Sequence
  Description of Artificial Sequence: Synthetic oligonucleotide
  Target: LAMA2; (-) strand; PAM type: YTN; PAM sequence: TTA
attgtggtcatttataaaga

SEQ ID NO: 201577 - DNA, 20 bp, Artificial Sequence
  Description of Artificial Sequence: Synthetic oligonucleotide
  Target: LAMA2; (-) strand; PAM type: YTN; PAM sequence: CTT
aattgtggtcatttataaag

SEQ ID NO: 201578 - DNA, 20 bp, Artificial Sequence
  Description of Artificial Sequence: Synthetic oligonucleotide
  Target: LAMA2; (-) strand; PAM type: YTN; PAM sequence: CTA
cagcttaattgtggtcattt

SEQ ID NO: 201579 - DNA, 20 bp, Artificial Sequence
  Description of Artificial Sequence: Synthetic oligonucleotide
  Target: LAMA2; (-) strand; PAM type: YTN; PAM sequence: CTA
gggcatgagtacatctacag

SEQ ID NO: 201580 - DNA, 20 bp, Artificial Sequence
  Description of Artificial Sequence: Synthetic oligonucleotide
  Target: LAMA2; (-) strand; PAM type: YTN; PAM sequence: TTA
catctagggcatgagtacat

SEQ ID NO: 201581 - DNA, 20 bp, Artificial Sequence
  Description of Artificial Sequence: Synthetic oligonucleotide
  Target: LAMA2; (-) strand; PAM type: YTN; PAM sequence: TTC
cccagaacggatggttacat

SEQ ID NO: 201582 - DNA, 20 bp, Artificial Sequence
  Description of Artificial Sequence: Synthetic oligonucleotide
  Target: LAMA2; (-) strand; PAM type: YTN; PAM sequence: TTA
tcaagccatattccccagaa

SEQ ID NO: 201583 - DNA, 20 bp, Artificial Sequence
  Description of Artificial Sequence: Synthetic oligonucleotide
  Target: LAMA2; (-) strand; PAM type: YTN; PAM sequence: TTT
atcaagccatattccccaga

SEQ ID NO: 201584 - DNA, 20 bp, Artificial Sequence
  Description of Artificial Sequence: Synthetic oligonucleotide
  Target: LAMA2; (-) strand; PAM type: YTN; PAM sequence: TTA
gacaccaatgggtttatcaa

SEQ ID NO: 201585 - DNA, 20 bp, Artificial Sequence
  Description of Artificial Sequence: Synthetic oligonucleotide
  Target: LAMA2; (-) strand; PAM type: YTN; PAM sequence: TTG
aataaatgaatgaatgaatg

SEQ ID NO: 201586 - DNA, 20 bp, Artificial Sequence
  Description of Artificial Sequence: Synthetic oligonucleotide
  Target: LAMA2; (-) strand; PAM type: YTN; PAM sequence: TTT
gaataaatgaatgaatgaat

SEQ ID NO: 201587 - DNA, 20 bp, Artificial Sequence
  Description of Artificial Sequence: Synthetic oligonucleotide
  Target: LAMA2; (-) strand; PAM type: YTN; PAM sequence: TTG
tttgaataaatgaatgaatg

SEQ ID NO: 201588 - DNA, 20 bp, Artificial Sequence
  Description of Artificial Sequence: Synthetic oligonucleotide
  Target: LAMA2; (-) strand; PAM type: YTN; PAM sequence: TTT
gtttgaataaatgaatgaat

SEQ ID NO: 201589 - DNA, 20 bp, Artificial Sequence
  Description of Artificial Sequence: Synthetic oligonucleotide
  Target: LAMA2; (-) strand; PAM type: YTN; PAM sequence: CTC
aaaaatatttgtttgaataa

SEQ ID NO: 201590 - DNA, 20 bp, Artificial Sequence
  Description of Artificial Sequence: Synthetic oligonucleotide
  Target: LAMA2; (-) strand; PAM type: YTN; PAM sequence: CTC
ataagagctcaaaaatattt

SEQ ID NO: 201591 - DNA, 20 bp, Artificial Sequence
  Description of Artificial Sequence: Synthetic oligonucleotide
  Target: LAMA2; (-) strand; PAM type: YTN; PAM sequence: CTG
gcacctcataagagctcaaa

SEQ ID NO: 201592 - DNA, 20 bp, Artificial Sequence
  Description of Artificial Sequence: Synthetic oligonucleotide
  Target: LAMA2; (-) strand; PAM type: YTN; PAM sequence: TTA
gaacagtgcctggcacctca

SEQ ID NO: 201593 - DNA, 20 bp, Artificial Sequence
  Description of Artificial Sequence: Synthetic oligonucleotide
  Target: LAMA2; (-) strand; PAM type: YTN; PAM sequence: CTT
agaacagtgcctggcacctc

SEQ ID NO: 201594 - DNA, 20 bp, Artificial Sequence
  Description of Artificial Sequence: Synthetic oligonucleotide
  Target: LAMA2; (-) strand; PAM type: YTN; PAM sequence: TTG
cttagaacagtgcctggcac

SEQ ID NO: 201595 - DNA, 20 bp, Artificial Sequence
  Description of Artificial Sequence: Synthetic oligonucleotide
  Target: LAMA2; (-) strand; PAM type: YTN; PAM sequence: TTC
ccattgcttagaacagtgcc

SEQ ID NO: 201596 - DNA, 20 bp, Artificial Sequence
  Description of Artificial Sequence: Synthetic oligonucleotide
  Target: LAMA2; (-) strand; PAM type: YTN; PAM sequence: TTT
cccattgcttagaacagtgc

SEQ ID NO: 201597 - DNA, 20 bp, Artificial Sequence
  Description of Artificial Sequence: Synthetic oligonucleotide
  Target: LAMA2; (-) strand; PAM type: YTN; PAM sequence: TTT
tcccattgcttagaacagtg

SEQ ID NO: 201598 - DNA, 20 bp, Artificial Sequence
  Description of Artificial Sequence: Synthetic oligonucleotide
  Target: LAMA2; (-) strand; PAM type: YTN; PAM sequence: CTG
ttttcccattgcttagaaca

SEQ ID NO: 201599 - DNA, 20 bp, Artificial Sequence
  Description of Artificial Sequence: Synthetic oligonucleotide
  Target: LAMA2; (-) strand; PAM type: YTN; PAM sequence: CTC
ctgttttcccattgcttaga

SEQ ID NO: 201600 - DNA, 20 bp, Artificial Sequence
  Description of Artificial Sequence: Synthetic oligonucleotide
  Target: LAMA2; (-) strand; PAM type: YTN; PAM sequence: TTA
ctcctgttttcccattgctt

SEQ ID NO: 201601 - DNA, 20 bp, Artificial Sequence
  Description of Artificial Sequence: Synthetic oligonucleotide
  Target: LAMA2; (-) strand; PAM type: YTN; PAM sequence: TTT
actcctgttttcccattgct

SEQ ID NO: 201602 - DNA, 20 bp, Artificial Sequence
  Description of Artificial Sequence: Synthetic oligonucleotide
  Target: LAMA2; (-) strand; PAM type: YTN; PAM sequence: TTG
tttactcctgttttcccatt

SEQ ID NO: 201603 - DNA, 20 bp, Artificial Sequence
  Description of Artificial Sequence: Synthetic oligonucleotide
  Target: LAMA2; (-) strand; PAM type: YTN; PAM sequence: CTT
gtttactcctgttttcccat

SEQ ID NO: 201604 - DNA, 20 bp, Artificial Sequence
  Description of Artificial Sequence: Synthetic oligonucleotide
  Target: LAMA2; (-) strand; PAM type: YTN; PAM sequence: CTA
aaataaaaacatcataagaa

SEQ ID NO: 201605 - DNA, 20 bp, Artificial Sequence
  Description of Artificial Sequence: Synthetic oligonucleotide
  Target: LAMA2; (-) strand; PAM type: YTN; PAM sequence: CTC
taaaataaaaacatcataag

SEQ ID NO: 201606 - DNA, 20 bp, Artificial Sequence
  Description of Artificial Sequence: Synthetic oligonucleotide
  Target: LAMA2; (-) strand; PAM type: YTN; PAM sequence: CTA
tcccctctaaaataaaaaca

SEQ ID NO: 201607 - DNA, 20 bp, Artificial Sequence
  Description of Artificial Sequence: Synthetic oligonucleotide
  Target: LAMA2; (-) strand; PAM type: YTN; PAM sequence: TTC
ctatcccctctaaaataaaa

SEQ ID NO: 201608 - DNA, 20 bp, Artificial Sequence
  Description of Artificial Sequence: Synthetic oligonucleotide
  Target: LAMA2; (-) strand; PAM type: YTN; PAM sequence: CTT
cctatcccctctaaaataaa

SEQ ID NO: 201609 - DNA, 20 bp, Artificial Sequence
  Description of Artificial Sequence: Synthetic oligonucleotide
  Target: LAMA2; (-) strand; PAM type: YTN; PAM sequence: TTC
ttcctatcccctctaaaata

SEQ ID NO: 201610 - DNA, 20 bp, Artificial Sequence
  Description of Artificial Sequence: Synthetic oligonucleotide
  Target: LAMA2; (-) strand; PAM type: YTN; PAM sequence: CTT
cttcctatcccctctaaaat

SEQ ID NO: 201611 - DNA, 20 bp, Artificial Sequence
  Description of Artificial Sequence: Synthetic oligonucleotide
  Target: LAMA2; (-) strand; PAM type: YTN; PAM sequence: CTC
cttcttcctatcccctctaa

SEQ ID NO: 201612 - DNA, 20 bp, Artificial Sequence
  Description of Artificial Sequence: Synthetic oligonucleotide
  Target: LAMA2; (-) strand; PAM type: YTN; PAM sequence: TTC
tccttcttcctatcccctct

SEQ ID NO: 201613 - DNA, 20 bp, Artificial Sequence
  Description of Artificial Sequence: Synthetic oligonucleotide
  Target: LAMA2; (-) strand; PAM type: YTN; PAM sequence: TTT
ctccttcttcctatcccctc

SEQ ID NO: 201614 - DNA, 20 bp, Artificial Sequence
  Description of Artificial Sequence: Synthetic oligonucleotide
  Target: LAMA2; (-) strand; PAM type: YTN; PAM sequence: TTT
tctccttcttcctatcccct

SEQ ID NO: 201615 - DNA, 20 bp, Artificial Sequence
  Description of Artificial Sequence: Synthetic oligonucleotide
  Target: LAMA2; (-) strand; PAM type: YTN; PAM sequence: TTT
ttctccttcttcctatcccc

SEQ ID NO: 201616 - DNA, 20 bp, Artificial Sequence
  Description of Artificial Sequence: Synthetic oligonucleotide
  Target: LAMA2; (-) strand; PAM type: YTN; PAM sequence: CTT
tttctccttcttcctatccc

SEQ ID NO: 201617 - DNA, 20 bp, Artificial Sequence
  Description of Artificial Sequence: Synthetic oligonucleotide
  Target: LAMA2; (-) strand; PAM type: YTN; PAM sequence: TTG
gctttttctccttcttccta

SEQ ID NO: 201618 - DNA, 20 bp, Artificial Sequence
  Description of Artificial Sequence: Synthetic oligonucleotide
  Target: LAMA2; (-) strand; PAM type: YTN; PAM sequence: TTC
attggctttttctccttctt

SEQ ID NO: 201619 - DNA, 20 bp, Artificial Sequence
  Description of Artificial Sequence: Synthetic oligonucleotide
  Target: LAMA2; (-) strand; PAM type: YTN; PAM sequence: TTA
ttcattggctttttctcctt

SEQ ID NO: 201620 - DNA, 20 bp, Artificial Sequence
  Description of Artificial Sequence: Synthetic oligonucleotide
  Target: LAMA2; (-) strand; PAM type: YTN; PAM sequence: CTT
attcattggctttttctcct

SEQ ID NO: 201621 - DNA, 20 bp, Artificial Sequence
  Description of Artificial Sequence: Synthetic oligonucleotide
  Target: LAMA2; (-) strand; PAM type: YTN; PAM sequence: TTC
cttattcattggctttttct

SEQ ID NO: 201622 - DNA, 20 bp, Artificial Sequence
  Description of Artificial Sequence: Synthetic oligonucleotide
  Target: LAMA2; (-) strand; PAM type: YTN; PAM sequence: TTT
ccttattcattggctttttc

SEQ ID NO: 201623 - DNA, 20 bp, Artificial Sequence
  Description of Artificial Sequence: Synthetic oligonucleotide
  Target: LAMA2; (-) strand; PAM type: YTN; PAM sequence: CTT
tccttattcattggcttttt

SEQ ID NO: 201624 - DNA, 20 bp, Artificial Sequence
  Description of Artificial Sequence: Synthetic oligonucleotide
  Target: LAMA2; (-) strand; PAM type: YTN; PAM sequence: TTC
tttccttattcattggcttt

SEQ ID NO: 201625 - DNA, 20 bp, Artificial Sequence
  Description of Artificial Sequence: Synthetic oligonucleotide
  Target: LAMA2; (-) strand; PAM type: YTN; PAM sequence: TTT
ctttccttattcattggctt

SEQ ID NO: 201626 - DNA, 20 bp, Artificial Sequence
  Description of Artificial Sequence: Synthetic oligonucleotide
  Target: LAMA2; (-) strand; PAM type: YTN; PAM sequence: TTA
tttctttccttattcattgg

SEQ ID NO: 201627 - DNA, 20 bp, Artificial Sequence
  Description of Artificial Sequence: Synthetic oligonucleotide
  Target: LAMA2; (-) strand; PAM type: YTN; PAM sequence: TTT
atttctttccttattcattg

SEQ ID NO: 201628 - DNA, 20 bp, Artificial Sequence
  Description of Artificial Sequence: Synthetic oligonucleotide
  Target: LAMA2; (-) strand; PAM type: YTN; PAM sequence: TTG
atttatttctttccttattc

SEQ ID NO: 201629 - DNA, 20 bp, Artificial Sequence
  Description of Artificial Sequence: Synthetic oligonucleotide
  Target: LAMA2; (-) strand; PAM type: YTN; PAM sequence: TTG
ttgatttatttctttcctta

SEQ ID NO: 201630 - DNA, 20 bp, Artificial Sequence
  Description of Artificial Sequence: Synthetic oligonucleotide
  Target: LAMA2; (-) strand; PAM type: YTN; PAM sequence: CTT
gttgatttatttctttcctt

SEQ ID NO: 201631 - DNA, 20 bp, Artificial Sequence
  Description of Artificial Sequence: Synthetic oligonucleotide
  Target: LAMA2; (-) strand; PAM type: YTN; PAM sequence: TTA
tcttgttgatttatttcttt

SEQ ID NO: 201632 - DNA, 20 bp, Artificial Sequence
  Description of Artificial Sequence: Synthetic oligonucleotide
  Target: LAMA2; (-) strand; PAM type: YTN; PAM sequence: TTA
tatgaaattatcttgttgat

SEQ ID NO: 201633 - DNA, 20 bp, Artificial Sequence
  Description of Artificial Sequence: Synthetic oligonucleotide
  Target: LAMA2; (-) strand; PAM type: YTN; PAM sequence: TTA
gcattatatgaaattatctt

SEQ ID NO: 201634 - DNA, 20 bp, Artificial Sequence
  Description of Artificial Sequence: Synthetic oligonucleotide
  Target: LAMA2; (-) strand; PAM type: YTN; PAM sequence: CTT
agcattatatgaaattatct

SEQ ID NO: 201635 - DNA, 20 bp, Artificial Sequence
  Description of Artificial Sequence: Synthetic oligonucleotide
  Target: LAMA2; (-) strand; PAM type: YTN; PAM sequence: TTC
ccatccttagcattatatga

SEQ ID NO: 201636 - DNA, 20 bp, Artificial Sequence
  Description of Artificial Sequence: Synthetic oligonucleotide
  Target: LAMA2; (-) strand; PAM type: YTN; PAM sequence: CTT
cccatccttagcattatatg

SEQ ID NO: 201637 - DNA, 20 bp, Artificial Sequence
  Description of Artificial Sequence: Synthetic oligonucleotide
  Target: LAMA2; (-) strand; PAM type: YTN; PAM sequence: TTC
ttcccatccttagcattata

SEQ ID NO: 201638 - DNA, 20 bp, Artificial Sequence
  Description of Artificial Sequence: Synthetic oligonucleotide
  Target: LAMA2; (-) strand; PAM type: YTN; PAM sequence: TTT
cttcccatccttagcattat

SEQ ID NO: 201639 - DNA, 20 bp, Artificial Sequence
  Description of Artificial Sequence: Synthetic oligonucleotide
  Target: LAMA2; (-) strand; PAM type: YTN; PAM sequence: TTC
atttcttcccatccttagca

SEQ ID NO: 201640 - DNA, 20 bp, Artificial Sequence
  Description of Artificial Sequence: Synthetic oligonucleotide
  Target: LAMA2; (-) strand; PAM type: YTN; PAM sequence: TTT
catttcttcccatccttagc

SEQ ID NO: 201641 - DNA, 20 bp, Artificial Sequence
  Description of Artificial Sequence: Synthetic oligonucleotide
  Target: LAMA2; (-) strand; PAM type: YTN; PAM sequence: TTT
tcatttcttcccatccttag

SEQ ID NO: 201642 - DNA, 20 bp, Artificial Sequence
  Description of Artificial Sequence: Synthetic oligonucleotide
  Target: LAMA2; (-) strand; PAM type: YTN; PAM sequence: CTG
ttttcatttcttcccatcct

SEQ ID NO: 201643 - DNA, 20 bp, Artificial Sequence
  Description of Artificial Sequence: Synthetic oligonucleotide
  Target: LAMA2; (-) strand; PAM type: YTN; PAM sequence: TTC
caacacctgttttcatttct

SEQ ID NO: 201644 - DNA, 20 bp, Artificial Sequence
  Description of Artificial Sequence: Synthetic oligonucleotide
  Target: LAMA2; (-) strand; PAM type: YTN; PAM sequence: CTA
ttccaacacctgttttcatt

SEQ ID NO: 201645 - DNA, 20 bp, Artificial Sequence
  Description of Artificial Sequence: Synthetic oligonucleotide
  Target: LAMA2; (-) strand; PAM type: YTN; PAM sequence: CTC
ccaccccatgatctattcca

SEQ ID NO: 201646 - DNA, 20 bp, Artificial Sequence
  Description of Artificial Sequence: Synthetic oligonucleotide
  Target: LAMA2; (-) strand; PAM type: YTN; PAM sequence: TTA
actcccaccccatgatctat

SEQ ID NO: 201647 - DNA, 20 bp, Artificial Sequence
  Description of Artificial Sequence: Synthetic oligonucleotide
  Target: LAMA2; (-) strand; PAM type: YTN; PAM sequence: TTC
aattaactcccaccccatga

SEQ ID NO: 201648 - DNA, 20 bp, Artificial Sequence
  Description of Artificial Sequence: Synthetic oligonucleotide
  Target: LAMA2; (-) strand; PAM type: YTN; PAM sequence: CTT
caattaactcccaccccatg

SEQ ID NO: 201649 - DNA, 20 bp, Artificial Sequence
  Description of Artificial Sequence: Synthetic oligonucleotide
  Target: LAMA2; (-) strand; PAM type: YTN; PAM sequence: CTA
ccccttcaattaactcccac

SEQ ID NO: 201650 - DNA, 20 bp, Artificial Sequence
  Description of Artificial Sequence: Synthetic oligonucleotide
  Target: LAMA2; (-) strand; PAM type: YTN; PAM sequence: TTG
actaccccttcaattaactc

SEQ ID NO: 201651 - DNA, 20 bp, Artificial Sequence
  Description of Artificial Sequence: Synthetic oligonucleotide
  Target: LAMA2; (-) strand; PAM type: YTN; PAM sequence: CTT
gactaccccttcaattaact

SEQ ID NO: 201652 - DNA, 20 bp, Artificial Sequence
  Description of Artificial Sequence: Synthetic oligonucleotide
  Target: LAMA2; (-) strand; PAM type: YTN; PAM sequence: TTC
ttgactaccccttcaattaa

SEQ ID NO: 201653 - DNA, 20 bp, Artificial Sequence
  Description of Artificial Sequence: Synthetic oligonucleotide
  Target: LAMA2; (-) strand; PAM type: YTN; PAM sequence: TTT
cttgactaccccttcaatta

SEQ ID NO: 201654 - DNA, 20 bp, Artificial Sequence
  Description of Artificial Sequence: Synthetic oligonucleotide
  Target: LAMA2; (-) strand; PAM type: YTN; PAM sequence: CTT
tcttgactaccccttcaatt

SEQ ID NO: 201655 - DNA, 20 bp, Artificial Sequence
  Description of Artificial Sequence: Synthetic oligonucleotide
  Target: LAMA2; (-) strand; PAM type: YTN; PAM sequence: TTA
gcagggcctttcttgactac

SEQ ID NO: 201656 - DNA, 20 bp, Artificial Sequence
  Description of Artificial Sequence: Synthetic oligonucleotide
  Target: LAMA2; (-) strand; PAM type: YTN; PAM sequence: TTT
agcagggcctttcttgacta

SEQ ID NO: 201657 - DNA, 20 bp, Artificial Sequence
  Description of Artificial Sequence: Synthetic oligonucleotide
  Target: LAMA2; (-) strand; PAM type: YTN; PAM sequence: CTT
tagcagggcctttcttgact

SEQ ID NO: 201658 - DNA, 20 bp, Artificial Sequence
  Description of Artificial Sequence: Synthetic oligonucleotide
  Target: LAMA2; (-) strand; PAM type: YTN; PAM sequence: TTC
tttagcagggcctttcttga

SEQ ID NO: 201659 - DNA, 20 bp, Artificial Sequence
  Description of Artificial Sequence: Synthetic oligonucleotide
  Target: LAMA2; (-) strand; PAM type: YTN; PAM sequence: CTT
ctttagcagggcctttcttg

SEQ ID NO: 201660 - DNA, 20 bp, Artificial Sequence
  Description of Artificial Sequence: Synthetic oligonucleotide
  Target: LAMA2; (-) strand; PAM type: YTN; PAM sequence: CTA
accaacccaacacttcttta

SEQ ID NO: 201661 - DNA, 20 bp, Artificial Sequence
  Description of Artificial Sequence: Synthetic oligonucleotide
  Target: LAMA2; (-) strand; PAM type: YTN; PAM sequence: CTC
taaccaacccaacacttctt

SEQ ID NO: 201662 - DNA, 20 bp, Artificial Sequence
  Description of Artificial Sequence: Synthetic oligonucleotide
  Target: LAMA2; (-) strand; PAM type: YTN; PAM sequence: CTG
ggctctaaccaacccaacac

SEQ ID NO: 201663 - DNA, 20 bp, Artificial Sequence
  Description of Artificial Sequence: Synthetic oligonucleotide
  Target: LAMA2; (-) strand; PAM type: YTN; PAM sequence: TTG
ctgggctctaaccaacccaa

SEQ ID NO: 201664 - DNA, 20 bp, Artificial Sequence
  Description of Artificial Sequence: Synthetic oligonucleotide
  Target: LAMA2; (-) strand; PAM type: YTN; PAM sequence: CTT
gctgggctctaaccaaccca

SEQ ID NO: 201665 - DNA, 20 bp, Artificial Sequence
  Description of Artificial Sequence: Synthetic oligonucleotide
  Target: LAMA2; (-) strand; PAM type: YTN; PAM sequence: CTG
aaaagtcccttgctgggctc

SEQ ID NO: 201666 - DNA, 20 bp, Artificial Sequence
  Description of Artificial Sequence: Synthetic oligonucleotide
  Target: LAMA2; (-) strand; PAM type: YTN; PAM sequence: CTC
cagagctgaaaagtcccttg

SEQ ID NO: 201667 - DNA, 20 bp, Artificial Sequence
  Description of Artificial Sequence: Synthetic oligonucleotide
  Target: LAMA2; (-) strand; PAM type: YTN; PAM sequence: CTA
caagcatctccagagctgaa

SEQ ID NO: 201668 - DNA, 20 bp, Artificial Sequence
  Description of Artificial Sequence: Synthetic oligonucleotide
  Target: LAMA2; (-) strand; PAM type: YTN; PAM sequence: CTC
tacaagcatctccagagctg

SEQ ID NO: 201669 - DNA, 20 bp, Artificial Sequence
  Description of Artificial Sequence: Synthetic oligonucleotide
  Target: LAMA2; (-) strand; PAM type: YTN; PAM sequence: TTC
tctacaagcatctccagagc

SEQ ID NO: 201670 - DNA, 20 bp, Artificial Sequence
  Description of Artificial Sequence: Synthetic oligonucleotide
  Target: LAMA2; (-) strand; PAM type: YTN; PAM sequence: TTT
ctctacaagcatctccagag

SEQ ID NO: 201671 - DNA, 20 bp, Artificial Sequence
  Description of Artificial Sequence: Synthetic oligonucleotide
  Target: LAMA2; (-) strand; PAM type: YTN; PAM sequence: CTG
catttctctacaagcatctc

SEQ ID NO: 201672 - DNA, 20 bp, Artificial Sequence
  Description of Artificial Sequence: Synthetic oligonucleotide
  Target: LAMA2; (-) strand; PAM type: YTN; PAM sequence: CTC
tgcatttctctacaagcatc

SEQ ID NO: 201673 - DNA, 20 bp, Artificial Sequence
  Description of Artificial Sequence: Synthetic oligonucleotide
  Target: LAMA2; (-) strand; PAM type: YTN; PAM sequence: TTA
ggacctctgcatttctctac

SEQ ID NO: 201674 - DNA, 20 bp, Artificial Sequence
  Description of Artificial Sequence: Synthetic oligonucleotide
  Target: LAMA2; (-) strand; PAM type: YTN; PAM sequence: TTC
ccatattaggacctctgcat

SEQ ID NO: 201675 - DNA, 20 bp, Artificial Sequence
  Description of Artificial Sequence: Synthetic oligonucleotide
  Target: LAMA2; (-) strand; PAM type: YTN; PAM sequence: TTC
attcccatattaggacctct

SEQ ID NO: 201676 - DNA, 20 bp, Artificial Sequence
  Description of Artificial Sequence: Synthetic oligonucleotide
  Target: LAMA2; (-) strand; PAM type: YTN; PAM sequence: CTA
catgagatgttcattcccat

SEQ ID NO: 201677 - DNA, 20 bp, Artificial Sequence
  Description of Artificial Sequence: Synthetic oligonucleotide
  Target: LAMA2; (-) strand; PAM type: YTN; PAM sequence: CTA
taccctacatgagatgttca

SEQ ID NO: 201678 - DNA, 20 bp, Artificial Sequence
  Description of Artificial Sequence: Synthetic oligonucleotide
  Target: LAMA2; (-) strand; PAM type: YTN; PAM sequence: CTC
aaacatgagaagctataccc

SEQ ID NO: 201679 - DNA, 20 bp, Artificial Sequence
  Description of Artificial Sequence: Synthetic oligonucleotide
  Target: LAMA2; (-) strand; PAM type: YTN; PAM sequence: TTC
ctcaaacatgagaagctata

SEQ ID NO: 201680 - DNA, 20 bp, Artificial Sequence
  Description of Artificial Sequence: Synthetic oligonucleotide
  Target: LAMA2; (-) strand; PAM type: YTN; PAM sequence: CTG
ttcctcaaacatgagaagct

SEQ ID NO: 201681 - DNA, 20 bp, Artificial Sequence
  Description of Artificial Sequence: Synthetic oligonucleotide
  Target: LAMA2; (-) strand; PAM type: YTN; PAM sequence: TTC
tgttcctcaaacatgagaag

SEQ ID NO: 201682 - DNA, 20 bp, Artificial Sequence
  Description of Artificial Sequence: Synthetic oligonucleotide
  Target: LAMA2; (-) strand; PAM type: YTN; PAM sequence: TTT
ctgttcctcaaacatgagaa

SEQ ID NO: 201683 - DNA, 20 bp, Artificial Sequence
  Description of Artificial Sequence: Synthetic oligonucleotide
  Target: LAMA2; (-) strand; PAM type: YTN; PAM sequence: TTG
tttctgttcctcaaacatga

SEQ ID NO: 201684 - DNA, 20 bp, Artificial Sequence
  Description of Artificial Sequence: Synthetic oligonucleotide
  Target: LAMA2; (-) strand; PAM type: YTN; PAM sequence: CTT
gtttctgttcctcaaacatg

SEQ ID NO: 201685 - DNA, 20 bp, Artificial Sequence
  Description of Artificial Sequence: Synthetic oligonucleotide
  Target: LAMA2; (-) strand; PAM type: YTN; PAM sequence: TTA
gggccttgtttctgttcctc

SEQ ID NO: 201686 - DNA, 20 bp, Artificial Sequence
  Description of Artificial Sequence: Synthetic oligonucleotide
  Target: LAMA2; (-) strand; PAM type: YTN; PAM sequence: TTT
agggccttgtttctgttcct

SEQ ID NO: 201687 - DNA, 20 bp, Artificial Sequence
  Description of Artificial Sequence: Synthetic oligonucleotide
  Target: LAMA2; (-) strand; PAM type: YTN; PAM sequence: CTT
tagggccttgtttctgttcc

SEQ ID NO: 201688 - DNA, 20 bp, Artificial Sequence
  Description of Artificial Sequence: Synthetic oligonucleotide
  Target: LAMA2; (-) strand; PAM type: YTN; PAM sequence: TTA
gagcctttagggccttgttt

SEQ ID NO: 201689 - DNA, 20 bp, Artificial Sequence
  Description of Artificial Sequence: Synthetic oligonucleotide
  Target: LAMA2; (-) strand; PAM type: YTN; PAM sequence: CTC
acaatattagagcctttagg

SEQ ID NO: 201690 - DNA, 20 bp, Artificial Sequence
  Description of Artificial Sequence: Synthetic oligonucleotide
  Target: LAMA2; (-) strand; PAM type: YTN; PAM sequence: CTG
gctcacaatattagagcctt

SEQ ID NO: 201691 - DNA, 20 bp, Artificial Sequence
  Description of Artificial Sequence: Synthetic oligonucleotide
  Target: LAMA2; (-) strand; PAM type: YTN; PAM sequence: TTA
tcctggctcacaatattaga

SEQ ID NO: 201692 - DNA, 20 bp, Artificial Sequence
  Description of Artificial Sequence: Synthetic oligonucleotide
  Target: LAMA2; (-) strand; PAM type: YTN; PAM sequence: CTT
atcctggctcacaatattag

SEQ ID NO: 201693 - DNA, 20 bp, Artificial Sequence
  Description of Artificial Sequence: Synthetic oligonucleotide
  Target: LAMA2; (-) strand; PAM type: YTN; PAM sequence: CTG
cccttatcctggctcacaat

SEQ ID NO: 201694 - DNA, 20 bp, Artificial Sequence
  Description of Artificial Sequence: Synthetic oligonucleotide
  Target: LAMA2; (-) strand; PAM type: YTN; PAM sequence: CTG
gctgcccttatcctggctca

SEQ ID NO: 201695 - DNA, 20 bp, Artificial Sequence
  Description of Artificial Sequence: Synthetic oligonucleotide
  Target: LAMA2; (-) strand; PAM type: YTN; PAM sequence: TTA
ccctggctgcccttatcctg

SEQ ID NO: 201696 - DNA, 20 bp, Artificial Sequence
  Description of Artificial Sequence: Synthetic oligonucleotide
  Target: LAMA2; (-) strand; PAM type: YTN; PAM sequence: CTT
accctggctgcccttatcct

SEQ ID NO: 201697 - DNA, 20 bp, Artificial Sequence
  Description of Artificial Sequence: Synthetic oligonucleotide
  Target: LAMA2; (-) strand; PAM type: YTN; PAM sequence: CTG
cccttaccctggctgccctt

SEQ ID NO: 201698 - DNA, 20 bp, Artificial Sequence
  Description of Artificial Sequence: Synthetic oligonucleotide
  Target: LAMA2; (-) strand; PAM type: YTN; PAM sequence: CTC
cagatgtcatctgcccttac

SEQ ID NO: 201699 - DNA, 20 bp, Artificial Sequence
  Description of Artificial Sequence: Synthetic oligonucleotide
  Target: LAMA2; (-) strand; PAM type: YTN; PAM sequence: CTG
tctccagatgtcatctgccc

SEQ ID NO: 201700 - DNA, 20 bp, Artificial Sequence
  Description of Artificial Sequence: Synthetic oligonucleotide
  Target: LAMA2; (-) strand; PAM type: YTN; PAM sequence: CTA
cctgtctccagatgtcatct

SEQ ID NO: 201701 - DNA, 20 bp, Artificial Sequence
  Description of Artificial Sequence: Synthetic oligonucleotide
  Target: LAMA2; (-) strand; PAM type: YTN; PAM sequence: CTG
gcccctacctgtctccagat

SEQ ID NO: 201702 - DNA, 20 bp, Artificial Sequence
  Description of Artificial Sequence: Synthetic oligonucleotide
  Target: LAMA2; (-) strand; PAM type: YTN; PAM sequence: CTA
cctggcccctacctgtctcc

SEQ ID NO: 201703 - DNA, 20 bp, Artificial Sequence
  Description of Artificial Sequence: Synthetic oligonucleotide
  Target: LAMA2; (-) strand; PAM type: YTN; PAM sequence: CTA
cgtacacagtacaaggtcct

SEQ ID NO: 201704 - DNA, 20 bp, Artificial Sequence
  Description of Artificial Sequence: Synthetic oligonucleotide
  Target: LAMA2; (-) strand; PAM type: YTN; PAM sequence: CTA
catgtacaaggtcctacgta

SEQ ID NO: 201705 - DNA, 20 bp, Artificial Sequence
  Description of Artificial Sequence: Synthetic oligonucleotide
  Target: LAMA2; (-) strand; PAM type: YTN; PAM sequence: CTC
ctacatgtacaaggtcctac

SEQ ID NO: 201706 - DNA, 20 bp, Artificial Sequence
  Description of Artificial Sequence: Synthetic oligonucleotide
  Target: LAMA2; (-) strand; PAM type: YTN; PAM sequence: CTG
actcctacatgtacaaggtc

SEQ ID NO: 201707 - DNA, 20 bp, Artificial Sequence
  Description of Artificial Sequence: Synthetic oligonucleotide
  Target: LAMA2; (-) strand; PAM type: YTN; PAM sequence: TTC
aaacgaagcacaaggtccca

SEQ ID NO: 201708 - DNA, 20 bp, Artificial Sequence
  Description of Artificial Sequence: Synthetic oligonucleotide
  Target: LAMA2; (-) strand; PAM type: YTN; PAM sequence: TTA
gaataaaattcaaacgaagc

SEQ ID NO: 201709 - DNA, 20 bp, Artificial Sequence
  Description of Artificial Sequence: Synthetic oligonucleotide
  Target: LAMA2; (-) strand; PAM type: YTN; PAM sequence: TTT
agaataaaattcaaacgaag

SEQ ID NO: 201710 - DNA, 20 bp, Artificial Sequence
  Description of Artificial Sequence: Synthetic oligonucleotide
  Target: LAMA2; (-) strand; PAM type: YTN; PAM sequence: TTC
ccaacatttagaataaaatt

SEQ ID NO: 201711 - DNA, 20 bp, Artificial Sequence
  Description of Artificial Sequence: Synthetic oligonucleotide
  Target: LAMA2; (-) strand; PAM type: YTN; PAM sequence: CTA
atcaattcccaacatttaga

SEQ ID NO: 201712 - DNA, 20 bp, Artificial Sequence
  Description of Artificial Sequence: Synthetic oligonucleotide
  Target: LAMA2; (-) strand; PAM type: YTN; PAM sequence: TTA
aaatcatctaatcaattccc

SEQ ID NO: 201713 - DNA, 20 bp, Artificial Sequence
  Description of Artificial Sequence: Synthetic oligonucleotide
  Target: LAMA2; (-) strand; PAM type: YTN; PAM sequence: TTT
aaaatcatctaatcaattcc

SEQ ID NO: 201714 - DNA, 20 bp, Artificial Sequence
  Description of Artificial Sequence: Synthetic oligonucleotide
  Target: LAMA2; (-) strand; PAM type: YTN; PAM sequence: TTT
taaaatcatctaatcaattc

SEQ ID NO: 201715 - DNA, 20 bp, Artificial Sequence
  Description of Artificial Sequence: Synthetic oligonucleotide
  Target: LAMA2; (-) strand; PAM type: YTN; PAM sequence: TTT
ttaaaatcatctaatcaatt

SEQ ID NO: 201716 - DNA, 20 bp, Artificial Sequence
  Description of Artificial Sequence: Synthetic oligonucleotide
  Target: LAMA2; (-) strand; PAM type: YTN; PAM sequence: TTA
tttttaaaatcatctaatca

SEQ ID NO: 201717 - DNA, 20 bp, Artificial Sequence
  Description of Artificial Sequence: Synthetic oligonucleotide
  Target: LAMA2; (-) strand; PAM type: YTN; PAM sequence: TTA
agaaagtattatttttaaaa

SEQ ID NO: 201718 - DNA, 20 bp, Artificial Sequence
  Description of Artificial Sequence: Synthetic oligonucleotide
  Target: LAMA2; (-) strand; PAM type: YTN; PAM sequence: CTC
agagagtaggcagagtgaca

SEQ ID NO: 201719 - DNA, 20 bp, Artificial Sequence
  Description of Artificial Sequence: Synthetic oligonucleotide
  Target: LAMA2; (-) strand; PAM type: YTN; PAM sequence: TTC
tcagagagtaggcagagtga

SEQ ID NO: 201720 - DNA, 20 bp, Artificial Sequence
  Description of Artificial Sequence: Synthetic oligonucleotide
  Target: LAMA2; (-) strand; PAM type: YTN; PAM sequence: TTT
ctcagagagtaggcagagtg

SEQ ID NO: 201721 - DNA, 20 bp, Artificial Sequence
  Description of Artificial Sequence: Synthetic oligonucleotide
  Target: LAMA2; (-) strand; PAM type: YTN; PAM sequence: CTG
tttctcagagagtaggcaga

SEQ ID NO: 201722 - DNA, 20 bp, Artificial Sequence
  Description of Artificial Sequence: Synthetic oligonucleotide
  Target: LAMA2; (-) strand; PAM type: YTN; PAM sequence: TTA
tgatctgtttctcagagagt

SEQ ID NO: 201723 - DNA, 20 bp, Artificial Sequence
  Description of Artificial Sequence: Synthetic oligonucleotide
  Target: LAMA2; (-) strand; PAM type: YTN; PAM sequence: CTT
atgatctgtttctcagagag

SEQ ID NO: 201724 - DNA, 20 bp, Artificial Sequence
  Description of Artificial Sequence: Synthetic oligonucleotide
  Target: LAMA2; (-) strand; PAM type: YTN; PAM sequence: CTC
cttatgatctgtttctcaga

SEQ ID NO: 201725 - DNA, 20 bp, Artificial Sequence
  Description of Artificial Sequence: Synthetic oligonucleotide
  Target: LAMA2; (-) strand; PAM type: YTN; PAM sequence: TTG
tctccttatgatctgtttct

SEQ ID NO: 201726 - DNA, 20 bp, Artificial Sequence
  Description of Artificial Sequence: Synthetic oligonucleotide
  Target: LAMA2; (-) strand; PAM type: YTN; PAM sequence: CTT
gtctccttatgatctgtttc

SEQ ID NO: 201727 - DNA, 20 bp, Artificial Sequence
  Description of Artificial Sequence: Synthetic oligonucleotide
  Target: LAMA2; (-) strand; PAM type: YTN; PAM sequence: CTC
caacccttgtctccttatga

SEQ ID NO: 201728 - DNA, 20 bp, Artificial Sequence
  Description of Artificial Sequence: Synthetic oligonucleotide
  Target: LAMA2; (-) strand; PAM type: YTN; PAM sequence: TTG
cctccaacccttgtctcctt

SEQ ID NO: 201729 - DNA, 20 bp, Artificial Sequence
  Description of Artificial Sequence: Synthetic oligonucleotide
  Target: LAMA2; (-) strand; PAM type: YTN; PAM sequence: CTT
gcctccaacccttgtctcct

SEQ ID NO: 201730 - DNA, 20 bp, Artificial Sequence
  Description of Artificial Sequence: Synthetic oligonucleotide
  Target: LAMA2; (-) strand; PAM type: YTN; PAM sequence: TTG
cttgcctccaacccttgtct

SEQ ID NO: 201731 - DNA, 20 bp, Artificial Sequence
  Description of Artificial Sequence: Synthetic oligonucleotide
  Target: LAMA2; (-) strand; PAM type: YTN; PAM sequence: CTG
tagaagcattgcttgcctcc

SEQ ID NO: 201732 - DNA, 20 bp, Artificial Sequence
  Description of Artificial Sequence: Synthetic oligonucleotide
  Target: LAMA2; (-) strand; PAM type: YTN; PAM sequence: TTC
tgtagaagcattgcttgcct

SEQ ID NO: 201733 - DNA, 20 bp, Artificial Sequence
  Description of Artificial Sequence: Synthetic oligonucleotide
  Target: LAMA2; (-) strand; PAM type: YTN; PAM sequence: CTT
ctgtagaagcattgcttgcc

SEQ ID NO: 201734 - DNA, 20 bp, Artificial Sequence
  Description of Artificial Sequence: Synthetic oligonucleotide
  Target: LAMA2; (-) strand; PAM type: YTN; PAM sequence: CTA
ccaaagtcttctgtagaagc

SEQ ID NO: 201735 - DNA, 20 bp, Artificial Sequence
  Description of Artificial Sequence: Synthetic oligonucleotide
  Target: LAMA2; (-) strand; PAM type: YTN; PAM sequence: TTA
tagaaaccgaacctaccaaa

SEQ ID NO: 201736 - DNA, 20 bp, Artificial Sequence
  Description of Artificial Sequence: Synthetic oligonucleotide
  Target: LAMA2; (-) strand; PAM type: YTN; PAM sequence: TTG
gaaattatagaaaccgaacc

SEQ ID NO: 201737 - DNA, 20 bp, Artificial Sequence
  Description of Artificial Sequence: Synthetic oligonucleotide
  Target: LAMA2; (-) strand; PAM type: YTN; PAM sequence: CTT
ggaaattatagaaaccgaac

SEQ ID NO: 201738 - DNA, 20 bp, Artificial Sequence
  Description of Artificial Sequence: Synthetic oligonucleotide
  Target: LAMA2; (-) strand; PAM type: YTN; PAM sequence: CTG
cagagcttggaaattataga

SEQ ID NO: 201739 - DNA, 20 bp, Artificial Sequence
  Description of Artificial Sequence: Synthetic oligonucleotide
  Target: LAMA2; (-) strand; PAM type: YTN; PAM sequence: CTC
ctgcagagcttggaaattat

SEQ ID NO: 201740 - DNA, 20 bp, Artificial Sequence
  Description of Artificial Sequence: Synthetic oligonucleotide
  Target: LAMA2; (-) strand; PAM type: YTN; PAM sequence: CTG
tagtggtctcctgcagagct

SEQ ID NO: 201741 - DNA, 20 bp, Artificial Sequence
  Description of Artificial Sequence: Synthetic oligonucleotide
  Target: LAMA2; (-) strand; PAM type: YTN; PAM sequence: CTG
aggaggaagctgtagtggtc

SEQ ID NO: 201742 - DNA, 20 bp, Artificial Sequence
  Description of Artificial Sequence: Synthetic oligonucleotide
  Target: LAMA2; (-) strand; PAM type: YTN; PAM sequence: TTG
ggcccataagtaaataagag

SEQ ID NO: 201743 - DNA, 20 bp, Artificial Sequence
  Description of Artificial Sequence: Synthetic oligonucleotide
  Target: LAMA2; (-) strand; PAM type: YTN; PAM sequence: TTT
gggcccataagtaaataaga

SEQ ID NO: 201744 - DNA, 20 bp, Artificial Sequence
  Description of Artificial Sequence: Synthetic oligonucleotide
  Target: LAMA2; (-) strand; PAM type: YTN; PAM sequence: CTC
aggggtttgggcccataagt

SEQ ID NO: 201745 - DNA, 20 bp, Artificial Sequence
  Description of Artificial Sequence: Synthetic oligonucleotide
  Target: LAMA2; (-) strand; PAM type: YTN; PAM sequence: CTG
ctcaggggtttgggcccata

SEQ ID NO: 201746 - DNA, 20 bp, Artificial Sequence
  Description of Artificial Sequence: Synthetic oligonucleotide
  Target: LAMA2; (-) strand; PAM type: YTN; PAM sequence: TTA
actgctcaggggtttgggcc

SEQ ID NO: 201747 - DNA, 20 bp, Artificial Sequence
  Description of Artificial Sequence: Synthetic oligonucleotide
  Target: LAMA2; (-) strand; PAM type: YTN; PAM sequence: TTT
aactgctcaggggtttgggc

SEQ ID NO: 201748 - DNA, 20 bp, Artificial Sequence
  Description of Artificial Sequence: Synthetic oligonucleotide
  Target: LAMA2; (-) strand; PAM type: YTN; PAM sequence: TTT
taactgctcaggggtttggg

SEQ ID NO: 201749 - DNA, 20 bp, Artificial Sequence
  Description of Artificial Sequence: Synthetic oligonucleotide
  Target: LAMA2; (-) strand; PAM type: YTN; PAM sequence: TTG
atgccagattttaactgctc

SEQ ID NO: 201750 - DNA, 20 bp, Artificial Sequence
  Description of Artificial Sequence: Synthetic oligonucleotide
  Target: LAMA2; (-) strand; PAM type: YTN; PAM sequence: TTA
ttgatgccagattttaactg

SEQ ID NO: 201751 - DNA, 20 bp, Artificial Sequence
  Description of Artificial Sequence: Synthetic oligonucleotide
  Target: LAMA2; (-) strand; PAM type: YTN; PAM sequence: TTG
atagtgttattgatgccaga

SEQ ID NO: 201752 - DNA, 20 bp, Artificial Sequence
  Description of Artificial Sequence: Synthetic oligonucleotide
  Target: LAMA2; (-) strand; PAM type: YTN; PAM sequence: TTA
gccagaattgatagtgttat

SEQ ID NO: 201753 - DNA, 20 bp, Artificial Sequence
  Description of Artificial Sequence: Synthetic oligonucleotide
  Target: LAMA2; (-) strand; PAM type: YTN; PAM sequence: CTG
gccaaggtgttagccagaat

SEQ ID NO: 201754 - DNA, 20 bp, Artificial Sequence
  Description of Artificial Sequence: Synthetic oligonucleotide
  Target: LAMA2; (-) strand; PAM type: YTN; PAM sequence: CTC
actggccaaggtgttagcca

SEQ ID NO: 201755 - DNA, 20 bp, Artificial Sequence
  Description of Artificial Sequence: Synthetic oligonucleotide
  Target: LAMA2; (-) strand; PAM type: YTN; PAM sequence: TTC
tcactggccaaggtgttagc

SEQ ID NO: 201756 - DNA, 20 bp, Artificial Sequence
  Description of Artificial Sequence: Synthetic oligonucleotide
  Target: LAMA2; (-) strand; PAM type: YTN; PAM sequence: CTT
ctcactggccaaggtgttag

SEQ ID NO: 201757 - DNA, 20 bp, Artificial Sequence
  Description of Artificial Sequence: Synthetic oligonucleotide
  Target: LAMA2; (-) strand; PAM type: YTN; PAM sequence: TTA
acccttctcactggccaagg

SEQ ID NO: 201758 - DNA, 20 bp, Artificial Sequence
  Description of Artificial Sequence: Synthetic oligonucleotide
  Target: LAMA2; (-) strand; PAM type: YTN; PAM sequence: TTA
tattaacccttctcactggc

SEQ ID NO: 201759 - DNA, 20 bp, Artificial Sequence
  Description of Artificial Sequence: Synthetic oligonucleotide
  Target: LAMA2; (-) strand; PAM type: YTN; PAM sequence: CTG
ttatattaacccttctcact

SEQ ID NO: 201760 - DNA, 20 bp, Artificial Sequence
  Description of Artificial Sequence: Synthetic oligonucleotide
  Target: LAMA2; (-) strand; PAM type: YTN; PAM sequence: CTC
ctgttatattaacccttctc

SEQ ID NO: 201761 - DNA, 20 bp, Artificial Sequence
  Description of Artificial Sequence: Synthetic oligonucleotide
  Target: LAMA2; (-) strand; PAM type: YTN; PAM sequence: TTC
cctcctgttatattaaccct

SEQ ID NO: 201762 - DNA, 20 bp, Artificial Sequence
  Description of Artificial Sequence: Synthetic oligonucleotide
  Target: LAMA2; (-) strand; PAM type: YTN; PAM sequence: CTT
ccctcctgttatattaaccc

SEQ ID NO: 201763 - DNA, 20 bp, Artificial Sequence
  Description of Artificial Sequence: Synthetic oligonucleotide
  Target: LAMA2; (-) strand; PAM type: YTN; PAM sequence: CTG
tcatcttccctcctgttata

SEQ ID NO: 201764 - DNA, 20 bp, Artificial Sequence
  Description of Artificial Sequence: Synthetic oligonucleotide
  Target: LAMA2; (-) strand; PAM type: YTN; PAM sequence: TTC
cgtctgtcatcttccctcct

SEQ ID NO: 201765 - DNA, 20 bp, Artificial Sequence
  Description of Artificial Sequence: Synthetic oligonucleotide
  Target: LAMA2; (-) strand; PAM type: YTN; PAM sequence: TTT
ccgtctgtcatcttccctcc

SEQ ID NO: 201766 - DNA, 20 bp, Artificial Sequence
  Description of Artificial Sequence: Synthetic oligonucleotide
  Target: LAMA2; (-) strand; PAM type: YTN; PAM sequence: TTT
tccgtctgtcatcttccctc

SEQ ID NO: 201767 - DNA, 20 bp, Artificial Sequence
  Description of Artificial Sequence: Synthetic oligonucleotide
  Target: LAMA2; (-) strand; PAM type: YTN; PAM sequence: CTG
tggagaccaaaaaagaggta

SEQ ID NO: 201768 - DNA, 20 bp, Artificial Sequence
  Description of Artificial Sequence: Synthetic oligonucleotide
  Target: LAMA2; (-) strand; PAM type: YTN; PAM sequence: TTG
tcaacctgtggagaccaaaa

SEQ ID NO: 201769 - DNA, 20 bp, Artificial Sequence
  Description of Artificial Sequence: Synthetic oligonucleotide
  Target: LAMA2; (-) strand; PAM type: YTN; PAM sequence: TTA
ttgtcaacctgtggagacca

SEQ ID NO: 201770 - DNA, 20 bp, Artificial Sequence
  Description of Artificial Sequence: Synthetic oligonucleotide
  Target: LAMA2; (-) strand; PAM type: YTN; PAM sequence: TTA
caacatgttattgtcaacct

SEQ ID NO: 201771 - DNA, 20 bp, Artificial Sequence
  Description of Artificial Sequence: Synthetic oligonucleotide
  Target: LAMA2; (-) strand; PAM type: YTN; PAM sequence: TTA
ttacaacatgttattgtcaa

SEQ ID NO: 201772 - DNA, 20 bp, Artificial Sequence
  Description of Artificial Sequence: Synthetic oligonucleotide
  Target: LAMA2; (-) strand; PAM type: YTN; PAM sequence: TTG
catacatgtgattattacaa

SEQ ID NO: 201773 - DNA, 20 bp, Artificial Sequence
  Description of Artificial Sequence: Synthetic oligonucleotide
  Target: LAMA2; (-) strand; PAM type: YTN; PAM sequence: CTG
gtaaattgcatacatgtgat

SEQ ID NO: 201774 - DNA, 20 bp, Artificial Sequence
  Description of Artificial Sequence: Synthetic oligonucleotide
  Target: LAMA2; (-) strand; PAM type: YTN; PAM sequence: TTC
tggtaaattgcatacatgtg

SEQ ID NO: 201775 - DNA, 20 bp, Artificial Sequence
  Description of Artificial Sequence: Synthetic oligonucleotide
  Target: LAMA2; (-) strand; PAM type: YTN; PAM sequence: CTT
ctggtaaattgcatacatgt

SEQ ID NO: 201776 - DNA, 20 bp, Artificial Sequence
  Description of Artificial Sequence: Synthetic oligonucleotide
  Target: LAMA2; (-) strand; PAM type: YTN; PAM sequence: TTC
aaaacttctggtaaattgca

SEQ ID NO: 201777 - DNA, 20 bp, Artificial Sequence
  Description of Artificial Sequence: Synthetic oligonucleotide
  Target: LAMA2; (-) strand; PAM type: YTN; PAM sequence: TTT
caaaacttctggtaaattgc

SEQ ID NO: 201778 - DNA, 20 bp, Artificial Sequence
  Description of Artificial Sequence: Synthetic oligonucleotide
  Target: LAMA2; (-) strand; PAM type: YTN; PAM sequence: CTA
agatttcaaaacttctggta

SEQ ID NO: 201779 - DNA, 20 bp, Artificial Sequence
  Description of Artificial Sequence: Synthetic oligonucleotide
  Target: LAMA2; (-) strand; PAM type: YTN; PAM sequence: TTA
gtggtaatctaagatttcaa

SEQ ID NO: 201780 - DNA, 20 bp, Artificial Sequence
  Description of Artificial Sequence: Synthetic oligonucleotide
  Target: LAMA2; (-) strand; PAM type: YTN; PAM sequence: TTG
gaatgttagtggtaatctaa

SEQ ID NO: 201781 - DNA, 20 bp, Artificial Sequence
  Description of Artificial Sequence: Synthetic oligonucleotide
  Target: LAMA2; (-) strand; PAM type: YTN; PAM sequence: TTA
gaaattggaatgttagtggt

SEQ ID NO: 201782 - DNA, 20 bp, Artificial Sequence
  Description of Artificial Sequence: Synthetic oligonucleotide
  Target: LAMA2; (-) strand; PAM type: YTN; PAM sequence: TTT
agaaattggaatgttagtgg

SEQ ID NO: 201783 - DNA, 20 bp, Artificial Sequence
  Description of Artificial Sequence: Synthetic oligonucleotide
  Target: LAMA2; (-) strand; PAM type: YTN; PAM sequence: CTT
tagaaattggaatgttagtg

SEQ ID NO: 201784 - DNA, 20 bp, Artificial Sequence
  Description of Artificial Sequence: Synthetic oligonucleotide
  Target: LAMA2; (-) strand; PAM type: YTN; PAM sequence: CTG
tctttagaaattggaatgtt

SEQ ID NO: 201785 - DNA, 20 bp, Artificial Sequence
  Description of Artificial Sequence: Synthetic oligonucleotide
  Target: LAMA2; (-) strand; PAM type: YTN; PAM sequence: TTC
atgtccactgtctttagaaa

SEQ ID NO: 201786 - DNA, 20 bp, Artificial Sequence
  Description of Artificial Sequence: Synthetic oligonucleotide
  Target: LAMA2; (-) strand; PAM type: YTN; PAM sequence: CTG
caggaattcatgtccactgt

SEQ ID NO: 201787 - DNA, 20 bp, Artificial Sequence
  Description of Artificial Sequence: Synthetic oligonucleotide
  Target: LAMA2; (-) strand; PAM type: YTN; PAM sequence: CTC
agagagctgcaggaattcat

SEQ ID NO: 201788 - DNA, 20 bp, Artificial Sequence
  Description of Artificial Sequence: Synthetic oligonucleotide
  Target: LAMA2; (-) strand; PAM type: YTN; PAM sequence: TTC
tcagagagctgcaggaattc

SEQ ID NO: 201789 - DNA, 20 bp, Artificial Sequence
  Description of Artificial Sequence: Synthetic oligonucleotide
  Target: LAMA2; (-) strand; PAM type: YTN; PAM sequence: CTA
ttctcagagagctgcaggaa

SEQ ID NO: 201790 - DNA, 20 bp, Artificial Sequence
  Description of Artificial Sequence: Synthetic oligonucleotide
  Target: LAMA2; (-) strand; PAM type: YTN; PAM sequence: CTA
aaatctattctcagagagct

SEQ ID NO: 201791 - DNA, 20 bp, Artificial Sequence
  Description of Artificial Sequence: Synthetic oligonucleotide
  Target: LAMA2; (-) strand; PAM type: YTN; PAM sequence: TTA
acagctaaaatctattctca

SEQ ID NO: 201792 - DNA, 20 bp, Artificial Sequence
  Description of Artificial Sequence: Synthetic oligonucleotide
  Target: LAMA2; (-) strand; PAM type: YTN; PAM sequence: TTG
taatataatattaacagcta

SEQ ID NO: 201793 - DNA, 20 bp, Artificial Sequence
  Description of Artificial Sequence: Synthetic oligonucleotide
  Target: LAMA2; (-) strand; PAM type: YTN; PAM sequence: CTA
tgtaggaagttgtaatataa

SEQ ID NO: 201794 - DNA, 20 bp, Artificial Sequence
  Description of Artificial Sequence: Synthetic oligonucleotide
  Target: LAMA2; (-) strand; PAM type: YTN; PAM sequence: TTA
caactatgtaggaagttgta

SEQ ID NO: 201795 - DNA, 20 bp, Artificial Sequence
  Description of Artificial Sequence: Synthetic oligonucleotide
  Target: LAMA2; (-) strand; PAM type: YTN; PAM sequence: TTT
acaactatgtaggaagttgt

SEQ ID NO: 201796 - DNA, 20 bp, Artificial Sequence
  Description of Artificial Sequence: Synthetic oligonucleotide
  Target: LAMA2; (-) strand; PAM type: YTN; PAM sequence: TTT
tacaactatgtaggaagttg

SEQ ID NO: 201797 - DNA, 20 bp, Artificial Sequence
  Description of Artificial Sequence: Synthetic oligonucleotide
  Target: LAMA2; (-) strand; PAM type: YTN; PAM sequence: TTT
ttacaactatgtaggaagtt

SEQ ID NO: 201798 - DNA, 20 bp, Artificial Sequence
  Description of Artificial Sequence: Synthetic oligonucleotide
  Target: LAMA2; (-) strand; PAM type: YTN; PAM sequence: CTA
aatttttacaactatgtagg

SEQ ID NO: 201799 - DNA, 20 bp, Artificial Sequence
  Description of Artificial Sequence: Synthetic oligonucleotide
  Target: LAMA2; (-) strand; PAM type: YTN; PAM sequence: TTA
acctaaatttttacaactat

SEQ ID NO: 201800 - DNA, 20 bp, Artificial Sequence
  Description of Artificial Sequence: Synthetic oligonucleotide
  Target: LAMA2; (-) strand; PAM type: YTN; PAM sequence: TTC
acaggaatcattaacctaaa

SEQ ID NO: 201801 - DNA, 20 bp, Artificial Sequence
  Description of Artificial Sequence: Synthetic oligonucleotide
  Target: LAMA2; (-) strand; PAM type: YTN; PAM sequence: TTC
aaaaaaataaaaataaattc

SEQ ID NO: 201802 - DNA, 20 bp, Artificial Sequence
  Description of Artificial Sequence: Synthetic oligonucleotide
  Target: LAMA2; (-) strand; PAM type: YTN; PAM sequence: TTT
caaaaaaataaaaataaatt

SEQ ID NO: 201803 - DNA, 20 bp, Artificial Sequence
  Description of Artificial Sequence: Synthetic oligonucleotide
  Target: LAMA2; (-) strand; PAM type: YTN; PAM sequence: CTG
ggcaacagagtgagacccca

SEQ ID NO: 201804 - DNA, 20 bp, Artificial Sequence
  Description of Artificial Sequence: Synthetic oligonucleotide
  Target: LAMA2; (-) strand; PAM type: YTN; PAM sequence: CTC
cagcctgggcaacagagtga

SEQ ID NO: 201805 - DNA, 20 bp, Artificial Sequence
  Description of Artificial Sequence: Synthetic oligonucleotide
  Target: LAMA2; (-) strand; PAM type: YTN; PAM sequence: CTA
cactccagcctgggcaacag

SEQ ID NO: 201806 - DNA, 20 bp, Artificial Sequence
  Description of Artificial Sequence: Synthetic oligonucleotide
  Target: LAMA2; (-) strand; PAM type: YTN; PAM sequence: CTG
agatcacaccactacactcc

SEQ ID NO: 201807 - DNA, 20 bp, Artificial Sequence
  Description of Artificial Sequence: Synthetic oligonucleotide
  Target: LAMA2; (-) strand; PAM type: YTN; PAM sequence: TTG
caatgagctgagatcacacc

SEQ ID NO: 201808 - DNA, 20 bp, Artificial Sequence
  Description of Artificial Sequence: Synthetic oligonucleotide
  Target: LAMA2; (-) strand; PAM type: YTN; PAM sequence: CTG
ggaggcaaagttgcaatgag

SEQ ID NO: 201809 - DNA, 20 bp, Artificial Sequence
  Description of Artificial Sequence: Synthetic oligonucleotide
  Target: LAMA2; (-) strand; PAM type: YTN; PAM sequence: TTG
agcctgggaggcaaagttgc

SEQ ID NO: 201810 - DNA, 20 bp, Artificial Sequence
  Description of Artificial Sequence: Synthetic oligonucleotide
  Target: LAMA2; (-) strand; PAM type: YTN; PAM sequence: CTT
gagcctgggaggcaaagttg

SEQ ID NO: 201811 - DNA, 20 bp, Artificial Sequence
  Description of Artificial Sequence: Synthetic oligonucleotide
  Target: LAMA2; (-) strand; PAM type: YTN; PAM sequence: CTG
aggcaggaggatcgcttgag

SEQ ID NO: 201812 - DNA, 20 bp, Artificial Sequence
  Description of Artificial Sequence: Synthetic oligonucleotide
  Target: LAMA2; (-) strand; PAM type: YTN; PAM sequence: CTC
gtggctgaggcaggaggatc

SEQ ID NO: 201813 - DNA, 20 bp, Artificial Sequence
  Description of Artificial Sequence: Synthetic oligonucleotide
  Target: LAMA2; (-) strand; PAM type: YTN; PAM sequence: CTC
tcgtggctgaggcaggagga

SEQ ID NO: 201814 - DNA, 20 bp, Artificial Sequence
  Description of Artificial Sequence: Synthetic oligonucleotide
  Target: LAMA2; (-) strand; PAM type: YTN; PAM sequence: CTA
ctctcgtggctgaggcagga

SEQ ID NO: 201815 - DNA, 20 bp, Artificial Sequence
  Description of Artificial Sequence: Synthetic oligonucleotide
  Target: LAMA2; (-) strand; PAM type: YTN; PAM sequence: CTG
taatcccagctactctcgtg

SEQ ID NO: 201816 - DNA, 20 bp, Artificial Sequence
  Description of Artificial Sequence: Synthetic oligonucleotide
  Target: LAMA2; (-) strand; PAM type: YTN; PAM sequence: CTG
ggtgtagtggcgtgaatctg

SEQ ID NO: 201817 - DNA, 20 bp, Artificial Sequence
  Description of Artificial Sequence: Synthetic oligonucleotide
  Target: LAMA2; (-) strand; PAM type: YTN; PAM sequence: TTG
ctgggtgtagtggcgtgaat

SEQ ID NO: 201818 - DNA, 20 bp, Artificial Sequence
  Description of Artificial Sequence: Synthetic oligonucleotide
  Target: LAMA2; (-) strand; PAM type: YTN; PAM sequence: TTT
gctgggtgtagtggcgtgaa

SEQ ID NO: 201819 - DNA, 20 bp, Artificial Sequence
  Description of Artificial Sequence: Synthetic oligonucleotide
  Target: LAMA2; (-) strand; PAM type: YTN; PAM sequence: CTA
aaaatacaaaagtttgctgg

SEQ ID NO: 201820 - DNA, 20 bp, Artificial Sequence
  Description of Artificial Sequence: Synthetic oligonucleotide
  Target: LAMA2; (-) strand; PAM type: YTN; PAM sequence: CTA
ctaaaaatacaaaagtttgc

SEQ ID NO: 201821 - DNA, 20 bp, Artificial Sequence
  Description of Artificial Sequence: Synthetic oligonucleotide
  Target: LAMA2; (-) strand; PAM type: YTN; PAM sequence: CTC
atatctactaaaaatacaaa

SEQ ID NO: 201822 - DNA, 20 bp, Artificial Sequence
  Description of Artificial Sequence: Synthetic oligonucleotide
  Target: LAMA2; (-) strand; PAM type: YTN; PAM sequence: CTG
gacaacatggtgaaacctca

SEQ ID NO: 201823 - DNA, 20 bp, Artificial Sequence
  Description of Artificial Sequence: Synthetic oligonucleotide
  Target: LAMA2; (-) strand; PAM type: YTN; PAM sequence: TTG
agaacagcctggacaacatg

SEQ ID NO: 201824 - DNA, 20 bp, Artificial Sequence
  Description of Artificial Sequence: Synthetic oligonucleotide
  Target: LAMA2; (-) strand; PAM type: YTN; PAM sequence: TTT
gagaacagcctggacaacat

SEQ ID NO: 201825 - DNA, 20 bp, Artificial Sequence
  Description of Artificial Sequence: Synthetic oligonucleotide
  Target: LAMA2; (-) strand; PAM type: YTN; PAM sequence: CTC
aggagtttgagaacagcctg

SEQ ID NO: 201826 - DNA, 20 bp, Artificial Sequence
  Description of Artificial Sequence: Synthetic oligonucleotide
  Target: LAMA2; (-) strand; PAM type: YTN; PAM sequence: TTG
agctcaggagtttgagaaca

SEQ ID NO: 201827 - DNA, 20 bp, Artificial Sequence
  Description of Artificial Sequence: Synthetic oligonucleotide
  Target: LAMA2; (-) strand; PAM type: YTN; PAM sequence: CTT
gagctcaggagtttgagaac

SEQ ID NO: 201828 - DNA, 20 bp, Artificial Sequence
  Description of Artificial Sequence: Synthetic oligonucleotide
  Target: LAMA2; (-) strand; PAM type: YTN; PAM sequence: CTA
ggtgggtggatcacttgagc

SEQ ID NO: 201829 - DNA, 20 bp, Artificial Sequence
  Description of Artificial Sequence: Synthetic oligonucleotide
  Target: LAMA2; (-) strand; PAM type: YTN; PAM sequence: TTG
ggaggtctaggtgggtggat

SEQ ID NO: 201830 - DNA, 20 bp, Artificial Sequence
  Description of Artificial Sequence: Synthetic oligonucleotide
  Target: LAMA2; (-) strand; PAM type: YTN; PAM sequence: TTT
gggaggtctaggtgggtgga

SEQ ID NO: 201831 - DNA, 20 bp, Artificial Sequence
  Description of Artificial Sequence: Synthetic oligonucleotide
  Target: LAMA2; (-) strand; PAM type: YTN; PAM sequence: CTT
tgggaggtctaggtgggtgg

SEQ ID NO: 201832 - DNA, 20 bp, Artificial Sequence
  Description of Artificial Sequence: Synthetic oligonucleotide
  Target: LAMA2; (-) strand; PAM type: YTN; PAM sequence: CTG
tagtcccagcactttgggag

SEQ ID NO: 201833 - DNA, 20 bp, Artificial Sequence
  Description of Artificial Sequence: Synthetic oligonucleotide
  Target: LAMA2; (-) strand; PAM type: YTN; PAM sequence: CTC
atgcctgtagtcccagcact

SEQ ID NO: 201834 - DNA, 20 bp, Artificial Sequence
  Description of Artificial Sequence: Synthetic oligonucleotide
  Target: LAMA2; (-) strand; PAM type: YTN; PAM sequence: TTC
acaggtggctcatgcctgta

SEQ ID NO: 201835 - DNA, 20 bp, Artificial Sequence
  Description of Artificial Sequence: Synthetic oligonucleotide
  Target: LAMA2; (-) strand; PAM type: YTN; PAM sequence: TTA
aattcacaggtggctcatgc

SEQ ID NO: 201836 - DNA, 20 bp, Artificial Sequence
  Description of Artificial Sequence: Synthetic oligonucleotide
  Target: LAMA2; (-) strand; PAM type: YTN; PAM sequence: TTT
aaattcacaggtggctcatg

SEQ ID NO: 201837 - DNA, 20 bp, Artificial Sequence
  Description of Artificial Sequence: Synthetic oligonucleotide
  Target: LAMA2; (-) strand; PAM type: YTN; PAM sequence: CTT
taaattcacaggtggctcat

SEQ ID NO: 201838 - DNA, 20 bp, Artificial Sequence
  Description of Artificial Sequence: Synthetic oligonucleotide
  Target: LAMA2; (-) strand; PAM type: YTN; PAM sequence: TTA
ctttaaattcacaggtggct

SEQ ID NO: 201839 - DNA, 20 bp, Artificial Sequence
  Description of Artificial Sequence: Synthetic oligonucleotide
  Target: LAMA2; (-) strand; PAM type: YTN; PAM sequence: TTT
actttaaattcacaggtggc

SEQ ID NO: 201840 - DNA, 20 bp, Artificial Sequence
  Description of Artificial Sequence: Synthetic oligonucleotide
  Target: LAMA2; (-) strand; PAM type: YTN; PAM sequence: TTA
atttactttaaattcacagg

SEQ ID NO: 201841 - DNA, 20 bp, Artificial Sequence
  Description of Artificial Sequence: Synthetic oligonucleotide
  Target: LAMA2; (-) strand; PAM type: YTN; PAM sequence: CTG
tgtacataatattaatttac

SEQ ID NO: 201842 - DNA, 20 bp, Artificial Sequence
  Description of Artificial Sequence: Synthetic oligonucleotide
  Target: LAMA2; (-) strand; PAM type: YTN; PAM sequence: TTC
tgtgtacataatattaattt

SEQ ID NO: 201843 - DNA, 20 bp, Artificial Sequence
  Description of Artificial Sequence: Synthetic oligonucleotide
  Target: LAMA2; (-) strand; PAM type: YTN; PAM sequence: CTT
ctgtgtacataatattaatt

SEQ ID NO: 201844 - DNA, 20 bp, Artificial Sequence
  Description of Artificial Sequence: Synthetic oligonucleotide
  Target: LAMA2; (-) strand; PAM type: YTN; PAM sequence: TTG
taacttctgtgtacataata

SEQ ID NO: 201845 - DNA, 20 bp, Artificial Sequence
  Description of Artificial Sequence: Synthetic oligonucleotide
  Target: LAMA2; (-) strand; PAM type: YTN; PAM sequence: TTA
ttgtaacttctgtgtacata

SEQ ID NO: 201846 - DNA, 20 bp, Artificial Sequence
  Description of Artificial Sequence: Synthetic oligonucleotide
  Target: LAMA2; (-) strand; PAM type: YTN; PAM sequence: TTT
attgtaacttctgtgtacat

SEQ ID NO: 201847 - DNA, 20 bp, Artificial Sequence
  Description of Artificial Sequence: Synthetic oligonucleotide
  Target: LAMA2; (-) strand; PAM type: YTN; PAM sequence: TTT
tattgtaacttctgtgtaca

SEQ ID NO: 201848 - DNA, 20 bp, Artificial Sequence
  Description of Artificial Sequence: Synthetic oligonucleotide
  Target: LAMA2; (-) strand; PAM type: YTN; PAM sequence: TTT
ttattgtaacttctgtgtac

SEQ ID NO: 201849 - DNA, 20 bp, Artificial Sequence
  Description of Artificial Sequence: Synthetic oligonucleotide
  Target: LAMA2; (-) strand; PAM type: YTN; PAM sequence: TTA
tccaaatagaagcattttta

SEQ ID NO: 201850 - DNA, 20 bp, Artificial Sequence
  Description of Artificial Sequence: Synthetic oligonucleotide
  Target: LAMA2; (-) strand; PAM type: YTN; PAM sequence: TTT
atccaaatagaagcattttt

SEQ ID NO: 201851 - DNA, 20 bp, Artificial Sequence
  Description of Artificial Sequence: Synthetic oligonucleotide
  Target: LAMA2; (-) strand; PAM type: YTN; PAM sequence: TTT
tatccaaatagaagcatttt

SEQ ID NO: 201852 - DNA, 20 bp, Artificial Sequence
  Description of Artificial Sequence: Synthetic oligonucleotide
  Target: LAMA2; (-) strand; PAM type: YTN; PAM sequence: TTG
ttttatccaaatagaagcat

SEQ ID NO: 201853 - DNA, 20 bp, Artificial Sequence
  Description of Artificial Sequence: Synthetic oligonucleotide
  Target: LAMA2; (-) strand; PAM type: YTN; PAM sequence: TTT
gttttatccaaatagaagca

SEQ ID NO: 201854 - DNA, 20 bp, Artificial Sequence
  Description of Artificial Sequence: Synthetic oligonucleotide
  Target: LAMA2; (-) strand; PAM type: YTN; PAM sequence: TTT
tgttttatccaaatagaagc

SEQ ID NO: 201855 - DNA, 20 bp, Artificial Sequence
  Description of Artificial Sequence: Synthetic oligonucleotide
  Target: LAMA2; (-) strand; PAM type: YTN; PAM sequence: TTT
ttgttttatccaaatagaag

SEQ ID NO: 201856 - DNA, 20 bp, Artificial Sequence
  Description of Artificial Sequence: Synthetic oligonucleotide
  Target: LAMA2; (-) strand; PAM type: YTN; PAM sequence: TTT
tttgttttatccaaatagaa

SEQ ID NO: 201857 - DNA, 20 bp, Artificial Sequence
  Description of Artificial Sequence: Synthetic oligonucleotide
  Target: LAMA2; (-) strand; PAM type: YTN; PAM sequence: TTT
ttttgttttatccaaataga

SEQ ID NO: 201858 - DNA, 20 bp, Artificial Sequence
  Description of Artificial Sequence: Synthetic oligonucleotide
  Target: LAMA2; (-) strand; PAM type: YTN; PAM sequence: TTA
atttttttgttttatccaaa

SEQ ID NO: 201859 - DNA, 20 bp, Artificial Sequence
  Description of Artificial Sequence: Synthetic oligonucleotide
  Target: LAMA2; (-) strand; PAM type: YTN; PAM sequence: TTT
aatttttttgttttatccaa

SEQ ID NO: 201860 - DNA, 20 bp, Artificial Sequence
  Description of Artificial Sequence: Synthetic oligonucleotide
  Target: LAMA2; (-) strand; PAM type: YTN; PAM sequence: TTT
taatttttttgttttatcca

SEQ ID NO: 201861 - DNA, 20 bp, Artificial Sequence
  Description of Artificial Sequence: Synthetic oligonucleotide
  Target: LAMA2; (-) strand; PAM type: YTN; PAM sequence: TTA
cagtagttttaatttttttg

SEQ ID NO: 201862 - DNA, 20 bp, Artificial Sequence
  Description of Artificial Sequence: Synthetic oligonucleotide
  Target: LAMA2; (-) strand; PAM type: YTN; PAM sequence: TTT
acagtagttttaattttttt

SEQ ID NO: 201863 - DNA, 20 bp, Artificial Sequence
  Description of Artificial Sequence: Synthetic oligonucleotide
  Target: LAMA2; (-) strand; PAM type: YTN; PAM sequence: TTT
tacagtagttttaatttttt

SEQ ID NO: 201864 - DNA, 20 bp, Artificial Sequence
  Description of Artificial Sequence: Synthetic oligonucleotide
  Target: LAMA2; (-) strand; PAM type: YTN; PAM sequence: CTT
ttacagtagttttaattttt

SEQ ID NO: 201865 - DNA, 20 bp, Artificial Sequence
  Description of Artificial Sequence: Synthetic oligonucleotide
  Target: LAMA2; (-) strand; PAM type: YTN; PAM sequence: TTC
acttttacagtagttttaat

SEQ ID NO: 201866 - DNA, 20 bp, Artificial Sequence
  Description of Artificial Sequence: Synthetic oligonucleotide
  Target: LAMA2; (-) strand; PAM type: YTN; PAM sequence: TTT
cacttttacagtagttttaa

SEQ ID NO: 201867 - DNA, 20 bp, Artificial Sequence
  Description of Artificial Sequence: Synthetic oligonucleotide
  Target: LAMA2; (-) strand; PAM type: YTN; PAM sequence: CTT
tcacttttacagtagtttta

SEQ ID NO: 201868 - DNA, 20 bp, Artificial Sequence
  Description of Artificial Sequence: Synthetic oligonucleotide
  Target: LAMA2; (-) strand; PAM type: YTN; PAM sequence: CTA
aagtatgtagtatctttcac

SEQ ID NO: 201869 - DNA, 20 bp, Artificial Sequence
  Description of Artificial Sequence: Synthetic oligonucleotide
  Target: LAMA2; (-) strand; PAM type: YTN; PAM sequence: TTC
ctaaagtatgtagtatcttt

SEQ ID NO: 201870 - DNA, 20 bp, Artificial Sequence
  Description of Artificial Sequence: Synthetic oligonucleotide
  Target: LAMA2; (-) strand; PAM type: YTN; PAM sequence: TTG
ttcctaaagtatgtagtatc

SEQ ID NO: 201871 - DNA, 20 bp, Artificial Sequence
  Description of Artificial Sequence: Synthetic oligonucleotide
  Target: LAMA2; (-) strand; PAM type: YTN; PAM sequence: TTG
catacaaataccagttgttc

SEQ ID NO: 201872 - DNA, 20 bp, Artificial Sequence
  Description of Artificial Sequence: Synthetic oligonucleotide
  Target: LAMA2; (-) strand; PAM type: YTN; PAM sequence: CTT
gcatacaaataccagttgtt

SEQ ID NO: 201873 - DNA, 20 bp, Artificial Sequence
  Description of Artificial Sequence: Synthetic oligonucleotide
  Target: LAMA2; (-) strand; PAM type: YTN; PAM sequence: TTA
ggcccacttgcatacaaata

SEQ ID NO: 201874 - DNA, 20 bp, Artificial Sequence
  Description of Artificial Sequence: Synthetic oligonucleotide
  Target: LAMA2; (-) strand; PAM type: YTN; PAM sequence: TTT
aggcccacttgcatacaaat

SEQ ID NO: 201875 - DNA, 20 bp, Artificial Sequence
  Description of Artificial Sequence: Synthetic oligonucleotide
  Target: LAMA2; (-) strand; PAM type: YTN; PAM sequence: TTA
gatttaggcccacttgcata

SEQ ID NO: 201876 - DNA, 20 bp, Artificial Sequence
  Description of Artificial Sequence: Synthetic oligonucleotide
  Target: LAMA2; (-) strand; PAM type: YTN; PAM sequence: TTC
acacaacattagatttaggc

SEQ ID NO: 201877 - DNA, 20 bp, Artificial Sequence
  Description of Artificial Sequence: Synthetic oligonucleotide
  Target: LAMA2; (-) strand; PAM type: YTN; PAM sequence: CTT
cacacaacattagatttagg

SEQ ID NO: 201878 - DNA, 20 bp, Artificial Sequence
  Description of Artificial Sequence: Synthetic oligonucleotide
  Target: LAMA2; (-) strand; PAM type: YTN; PAM sequence: TTG
atcttcacacaacattagat

SEQ ID NO: 201879 - DNA, 20 bp, Artificial Sequence
  Description of Artificial Sequence: Synthetic oligonucleotide
  Target: LAMA2; (-) strand; PAM type: YTN; PAM sequence: TTT
gatcttcacacaacattaga

SEQ ID NO: 201880 - DNA, 20 bp, Artificial Sequence
  Description of Artificial Sequence: Synthetic oligonucleotide
  Target: LAMA2; (-) strand; PAM type: YTN; PAM sequence: CTT
tgatcttcacacaacattag

SEQ ID NO: 201881 - DNA, 20 bp, Artificial Sequence
  Description of Artificial Sequence: Synthetic oligonucleotide
  Target: LAMA2; (-) strand; PAM type: YTN; PAM sequence: TTG
gctttgatcttcacacaaca

SEQ ID NO: 201882 - DNA, 20 bp, Artificial Sequence
  Description of Artificial Sequence: Synthetic oligonucleotide
  Target: LAMA2; (-) strand; PAM type: YTN; PAM sequence: CTT
ggctttgatcttcacacaac

SEQ ID NO: 201883 - DNA, 20 bp, Artificial Sequence
  Description of Artificial Sequence: Synthetic oligonucleotide
  Target: LAMA2; (-) strand; PAM type: YTN; PAM sequence: TTG
tacttggctttgatcttcac

SEQ ID NO: 201884 - DNA, 20 bp, Artificial Sequence
  Description of Artificial Sequence: Synthetic oligonucleotide
  Target: LAMA2; (-) strand; PAM type: YTN; PAM sequence: CTA
caattgtacttggctttgat

SEQ ID NO: 201885 - DNA, 20 bp, Artificial Sequence
  Description of Artificial Sequence: Synthetic oligonucleotide
  Target: LAMA2; (-) strand; PAM type: YTN; PAM sequence: CTG
caacatgagctacaattgta

SEQ ID NO: 201886 - DNA, 20 bp, Artificial Sequence
  Description of Artificial Sequence: Synthetic oligonucleotide
  Target: LAMA2; (-) strand; PAM type: YTN; PAM sequence: CTC
gaaataactgcaacatgagc

SEQ ID NO: 201887 - DNA, 20 bp, Artificial Sequence
  Description of Artificial Sequence: Synthetic oligonucleotide
  Target: LAMA2; (-) strand; PAM type: YTN; PAM sequence: TTG
agacctcgaaataactgcaa

SEQ ID NO: 201888 - DNA, 20 bp, Artificial Sequence
  Description of Artificial Sequence: Synthetic oligonucleotide
  Target: LAMA2; (-) strand; PAM type: YTN; PAM sequence: TTT
gagacctcgaaataactgca

SEQ ID NO: 201889 - DNA, 20 bp, Artificial Sequence
  Description of Artificial Sequence: Synthetic oligonucleotide
  Target: LAMA2; (-) strand; PAM type: YTN; PAM sequence: TTT
tgagacctcgaaataactgc

SEQ ID NO: 201890 - DNA, 20 bp, Artificial Sequence
  Description of Artificial Sequence: Synthetic oligonucleotide
  Target: LAMA2; (-) strand; PAM type: YTN; PAM sequence: CTT
ttgagacctcgaaataactg

SEQ ID NO: 201891 - DNA, 20 bp, Artificial Sequence
  Description of Artificial Sequence: Synthetic oligonucleotide
  Target: LAMA2; (-) strand; PAM type: YTN; PAM sequence: TTA
tcccttttgagacctcgaaa

SEQ ID NO: 201892 - DNA, 20 bp, Artificial Sequence
  Description of Artificial Sequence: Synthetic oligonucleotide
  Target: LAMA2; (-) strand; PAM type: YTN; PAM sequence: TTG
ttatcccttttgagacctcg

SEQ ID NO: 201893 - DNA, 20 bp, Artificial Sequence
  Description of Artificial Sequence: Synthetic oligonucleotide
  Target: LAMA2; (-) strand; PAM type: YTN; PAM sequence: TTG
ttgttatcccttttgagacc

SEQ ID NO: 201894 - DNA, 20 bp, Artificial Sequence
  Description of Artificial Sequence: Synthetic oligonucleotide
  Target: LAMA2; (-) strand; PAM type: YTN; PAM sequence: TTT
gttgttatcccttttgagac

SEQ ID NO: 201895 - DNA, 20 bp, Artificial Sequence
  Description of Artificial Sequence: Synthetic oligonucleotide
  Target: LAMA2; (-) strand; PAM type: YTN; PAM sequence: TTT
tgttgttatcccttttgaga

SEQ ID NO: 201896 - DNA, 20 bp, Artificial Sequence
  Description of Artificial Sequence: Synthetic oligonucleotide
  Target: LAMA2; (-) strand; PAM type: YTN; PAM sequence: TTT
ttgttgttatcccttttgag

SEQ ID NO: 201897 - DNA, 20 bp, Artificial Sequence
  Description of Artificial Sequence: Synthetic oligonucleotide
  Target: LAMA2; (-) strand; PAM type: YTN; PAM sequence: TTA
tagatttttgttgttatccc

SEQ ID NO: 201898 - DNA, 20 bp, Artificial Sequence
  Description of Artificial Sequence: Synthetic oligonucleotide
  Target: LAMA2; (-) strand; PAM type: YTN; PAM sequence: CTA
ttatagatttttgttgttat

SEQ ID NO: 201899 - DNA, 20 bp, Artificial Sequence
  Description of Artificial Sequence: Synthetic oligonucleotide
  Target: LAMA2; (-) strand; PAM type: YTN; PAM sequence: TTC
tattatagatttttgttgtt

SEQ ID NO: 201900 - DNA, 20 bp, Artificial Sequence
  Description of Artificial Sequence: Synthetic oligonucleotide
  Target: LAMA2; (-) strand; PAM type: YTN; PAM sequence: TTT
ctattatagatttttgttgt

SEQ ID NO: 201901 - DNA, 20 bp, Artificial Sequence
  Description of Artificial Sequence: Synthetic oligonucleotide
  Target: LAMA2; (-) strand; PAM type: YTN; PAM sequence: TTT
tctattatagatttttgttg

SEQ ID NO: 201902 - DNA, 20 bp, Artificial Sequence
  Description of Artificial Sequence: Synthetic oligonucleotide
  Target: LAMA2; (-) strand; PAM type: YTN; PAM sequence: CTG
ttttctattatagatttttg

SEQ ID NO: 201903 - DNA, 20 bp, Artificial Sequence
  Description of Artificial Sequence: Synthetic oligonucleotide
  Target: LAMA2; (-) strand; PAM type: YTN; PAM sequence: TTC
tgttttctattatagatttt

SEQ ID NO: 201904 - DNA, 20 bp, Artificial Sequence
  Description of Artificial Sequence: Synthetic oligonucleotide
  Target: LAMA2; (-) strand; PAM type: YTN; PAM sequence: TTA
acccagattctgttttctat

SEQ ID NO: 201905 - DNA, 20 bp, Artificial Sequence
  Description of Artificial Sequence: Synthetic oligonucleotide
  Target: LAMA2; (-) strand; PAM type: YTN; PAM sequence: TTT
aacccagattctgttttcta

SEQ ID NO: 201906 - DNA, 20 bp, Artificial Sequence
  Description of Artificial Sequence: Synthetic oligonucleotide
  Target: LAMA2; (-) strand; PAM type: YTN; PAM sequence: TTT
taacccagattctgttttct

SEQ ID NO: 201907 - DNA, 20 bp, Artificial Sequence
  Description of Artificial Sequence: Synthetic oligonucleotide
  Target: LAMA2; (-) strand; PAM type: YTN; PAM sequence: CTG
attttaacccagattctgtt

SEQ ID NO: 201908 - DNA, 20 bp, Artificial Sequence
  Description of Artificial Sequence: Synthetic oligonucleotide
  Target: LAMA2; (-) strand; PAM type: YTN; PAM sequence: TTC
cactgattttaacccagatt

SEQ ID NO: 201909 - DNA, 20 bp, Artificial Sequence
  Description of Artificial Sequence: Synthetic oligonucleotide
  Target: LAMA2; (-) strand; PAM type: YTN; PAM sequence: TTT
ccactgattttaacccagat

SEQ ID NO: 201910 - DNA, 20 bp, Artificial Sequence
  Description of Artificial Sequence: Synthetic oligonucleotide
  Target: LAMA2; (-) strand; PAM type: YTN; PAM sequence: TTA
tttccactgattttaaccca

SEQ ID NO: 201911 - DNA, 20 bp, Artificial Sequence
  Description of Artificial Sequence: Synthetic oligonucleotide
  Target: LAMA2; (-) strand; PAM type: YTN; PAM sequence: CTG
aaataaaaattatttccact

SEQ ID NO: 201912 - DNA, 20 bp, Artificial Sequence
  Description of Artificial Sequence: Synthetic oligonucleotide
  Target: LAMA2; (-) strand; PAM type: YTN; PAM sequence: TTC
tgaaataaaaattatttcca

SEQ ID NO: 201913 - DNA, 20 bp, Artificial Sequence
  Description of Artificial Sequence: Synthetic oligonucleotide
  Target: LAMA2; (-) strand; PAM type: YTN; PAM sequence: TTA
attctgaaataaaaattatt

SEQ ID NO: 201914 - DNA, 20 bp, Artificial Sequence
  Description of Artificial Sequence: Synthetic oligonucleotide
  Target: LAMA2; (-) strand; PAM type: YTN; PAM sequence: TTT
aattctgaaataaaaattat

SEQ ID NO: 201915 - DNA, 20 bp, Artificial Sequence
  Description of Artificial Sequence: Synthetic oligonucleotide
  Target: LAMA2; (-) strand; PAM type: YTN; PAM sequence: TTA
tttaattctgaaataaaaat

SEQ ID NO: 201916 - DNA, 20 bp, Artificial Sequence
  Description of Artificial Sequence: Synthetic oligonucleotide
  Target: LAMA2; (-) strand; PAM type: YTN; PAM sequence: TTT
atttaattctgaaataaaaa

SEQ ID NO: 201917 - DNA, 20 bp, Artificial Sequence
  Description of Artificial Sequence: Synthetic oligonucleotide
  Target: LAMA2; (-) strand; PAM type: YTN; PAM sequence: CTC
aatttatttaattctgaaat

SEQ ID NO: 201918 - DNA, 20 bp, Artificial Sequence
  Description of Artificial Sequence: Synthetic oligonucleotide
  Target: LAMA2; (-) strand; PAM type: YTN; PAM sequence: TTC
actcaatttatttaattctg

SEQ ID NO: 201919 - DNA, 20 bp, Artificial Sequence
  Description of Artificial Sequence: Synthetic oligonucleotide
  Target: LAMA2; (-) strand; PAM type: YTN; PAM sequence: TTT
cactcaatttatttaattct

SEQ ID NO: 201920 - DNA, 20 bp, Artificial Sequence
  Description of Artificial Sequence: Synthetic oligonucleotide
  Target: LAMA2; (-) strand; PAM type: YTN; PAM sequence: TTC
atttcactcaatttatttaa

SEQ ID NO: 201921 - DNA, 20 bp, Artificial Sequence
  Description of Artificial Sequence: Synthetic oligonucleotide
  Target: LAMA2; (-) strand; PAM type: YTN; PAM sequence: CTT
catttcactcaatttattta

SEQ ID NO: 201922 - DNA, 20 bp, Artificial Sequence
  Description of Artificial Sequence: Synthetic oligonucleotide
  Target: LAMA2; (-) strand; PAM type: YTN; PAM sequence: CTC
caagagccagatacttcatt

SEQ ID NO: 201923 - DNA, 20 bp, Artificial Sequence
  Description of Artificial Sequence: Synthetic oligonucleotide
  Target: LAMA2; (-) strand; PAM type: YTN; PAM sequence: TTC
ctccaagagccagatacttc

SEQ ID NO: 201924 - DNA, 20 bp, Artificial Sequence
  Description of Artificial Sequence: Synthetic oligonucleotide
  Target: LAMA2; (-) strand; PAM type: YTN; PAM sequence: TTT
cctccaagagccagatactt

SEQ ID NO: 201925 - DNA, 20 bp, Artificial Sequence
  Description of Artificial Sequence: Synthetic oligonucleotide
  Target: LAMA2; (-) strand; PAM type: YTN; PAM sequence: TTT
tcctccaagagccagatact

SEQ ID NO: 201926 - DNA, 20 bp, Artificial Sequence
  Description of Artificial Sequence: Synthetic oligonucleotide
  Target: LAMA2; (-) strand; PAM type: YTN; PAM sequence: TTA
aagaataagataccatattt

SEQ ID NO: 201927 - DNA, 20 bp, Artificial Sequence
  Description of Artificial Sequence: Synthetic oligonucleotide
  Target: LAMA2; (-) strand; PAM type: YTN; PAM sequence: TTT
aaagaataagataccatatt

SEQ ID NO: 201928 - DNA, 20 bp, Artificial Sequence
  Description of Artificial Sequence: Synthetic oligonucleotide
  Target: LAMA2; (-) strand; PAM type: YTN; PAM sequence: TTA
aagacatttaaagaataaga

SEQ ID NO: 201929 - DNA, 20 bp, Artificial Sequence
  Description of Artificial Sequence: Synthetic oligonucleotide
  Target: LAMA2; (-) strand; PAM type: YTN; PAM sequence: TTT
aaagacatttaaagaataag

SEQ ID NO: 201930 - DNA, 20 bp, Artificial Sequence
  Description of Artificial Sequence: Synthetic oligonucleotide
  Target: LAMA2; (-) strand; PAM type: YTN; PAM sequence: TTA
taaatttaaagacatttaaa

SEQ ID NO: 201931 - DNA, 20 bp, Artificial Sequence
  Description of Artificial Sequence: Synthetic oligonucleotide
  Target: LAMA2; (-) strand; PAM type: YTN; PAM sequence: CTT
ataaatttaaagacatttaa

SEQ ID NO: 201932 - DNA, 20 bp, Artificial Sequence
  Description of Artificial Sequence: Synthetic oligonucleotide
  Target: LAMA2; (-) strand; PAM type: YTN; PAM sequence: TTA
tgacttataaatttaaagac

SEQ ID NO: 201933 - DNA, 20 bp, Artificial Sequence
  Description of Artificial Sequence: Synthetic oligonucleotide
  Target: LAMA2; (-) strand; PAM type: YTN; PAM sequence: CTT
atgacttataaatttaaaga

SEQ ID NO: 201934 - DNA, 20 bp, Artificial Sequence
  Description of Artificial Sequence: Synthetic oligonucleotide
  Target: LAMA2; (-) strand; PAM type: YTN; PAM sequence: TTG
cagcttatgacttataaatt

SEQ ID NO: 201935 - DNA, 20 bp, Artificial Sequence
  Description of Artificial Sequence: Synthetic oligonucleotide
  Target: LAMA2; (-) strand; PAM type: YTN; PAM sequence: CTT
gcagcttatgacttataaat

SEQ ID NO: 201936 - DNA, 20 bp, Artificial Sequence
  Description of Artificial Sequence: Synthetic oligonucleotide
  Target: LAMA2; (-) strand; PAM type: YTN; PAM sequence: CTG
acttgcagcttatgacttat

SEQ ID NO: 201937 - DNA, 20 bp, Artificial Sequence
  Description of Artificial Sequence: Synthetic oligonucleotide
  Target: LAMA2; (-) strand; PAM type: YTN; PAM sequence: CTA
ctgacttgcagcttatgact

SEQ ID NO: 201938 - DNA, 20 bp, Artificial Sequence
  Description of Artificial Sequence: Synthetic oligonucleotide
  Target: LAMA2; (-) strand; PAM type: YTN; PAM sequence: TTC
atcaacataatgatgctact

SEQ ID NO: 201939 - DNA, 20 bp, Artificial Sequence
  Description of Artificial Sequence: Synthetic oligonucleotide
  Target: LAMA2; (-) strand; PAM type: YTN; PAM sequence: CTG
ggtaattcatcaacataatg

SEQ ID NO: 201940 - DNA, 20 bp, Artificial Sequence
  Description of Artificial Sequence: Synthetic oligonucleotide
  Target: LAMA2; (-) strand; PAM type: YTN; PAM sequence: TTA
aactgggtaattcatcaaca

SEQ ID NO: 201941 - DNA, 20 bp, Artificial Sequence
  Description of Artificial Sequence: Synthetic oligonucleotide
  Target: LAMA2; (-) strand; PAM type: YTN; PAM sequence: TTA
taagaattaaactgggtaat

SEQ ID NO: 201942 - DNA, 20 bp, Artificial Sequence
  Description of Artificial Sequence: Synthetic oligonucleotide
  Target: LAMA2; (-) strand; PAM type: YTN; PAM sequence: TTT
ataagaattaaactgggtaa

SEQ ID NO: 201943 - DNA, 20 bp, Artificial Sequence
  Description of Artificial Sequence: Synthetic oligonucleotide
  Target: LAMA2; (-) strand; PAM type: YTN; PAM sequence: TTT
tataagaattaaactgggta

SEQ ID NO: 201944 - DNA, 20 bp, Artificial Sequence
  Description of Artificial Sequence: Synthetic oligonucleotide
  Target: LAMA2; (-) strand; PAM type: YTN; PAM sequence: TTT
ttataagaattaaactgggt

SEQ ID NO: 201945 - DNA, 20 bp, Artificial Sequence
  Description of Artificial Sequence: Synthetic oligonucleotide
  Target: LAMA2; (-) strand; PAM type: YTN; PAM sequence: TTC
aatttttataagaattaaac

SEQ ID NO: 201946 - DNA, 20 bp, Artificial Sequence
  Description of Artificial Sequence: Synthetic oligonucleotide
  Target: LAMA2; (-) strand; PAM type: YTN; PAM sequence: TTT
caatttttataagaattaaa

SEQ ID NO: 201947 - DNA, 20 bp, Artificial Sequence
  Description of Artificial Sequence: Synthetic oligonucleotide
  Target: LAMA2; (-) strand; PAM type: YTN; PAM sequence: TTC
agaagataatttcaattttt

SEQ ID NO: 201948 - DNA, 20 bp, Artificial Sequence
  Description of Artificial Sequence: Synthetic oligonucleotide
  Target: LAMA2; (-) strand; PAM type: YTN; PAM sequence: TTA
gagttcagaagataatttca

SEQ ID NO: 201949 - DNA, 20 bp, Artificial Sequence
  Description of Artificial Sequence: Synthetic oligonucleotide
  Target: LAMA2; (-) strand; PAM type: YTN; PAM sequence: CTT
agagttcagaagataatttc

SEQ ID NO: 201950 - DNA, 20 bp, Artificial Sequence
  Description of Artificial Sequence: Synthetic oligonucleotide
  Target: LAMA2; (-) strand; PAM type: YTN; PAM sequence: CTA
aaatatgacttagagttcag

SEQ ID NO: 201951 - DNA, 20 bp, Artificial Sequence
  Description of Artificial Sequence: Synthetic oligonucleotide
  Target: LAMA2; (-) strand; PAM type: YTN; PAM sequence: CTG
tggctaaaatatgacttaga

SEQ ID NO: 201952 - DNA, 20 bp, Artificial Sequence
  Description of Artificial Sequence: Synthetic oligonucleotide
  Target: LAMA2; (-) strand; PAM type: YTN; PAM sequence: TTA
aacaaaacaaaaaaatacct

SEQ ID NO: 201953 - DNA, 20 bp, Artificial Sequence
  Description of Artificial Sequence: Synthetic oligonucleotide
  Target: LAMA2; (-) strand; PAM type: YTN; PAM sequence: TTG
attaaacaaaacaaaaaaat

SEQ ID NO: 201954 - DNA, 20 bp, Artificial Sequence
  Description of Artificial Sequence: Synthetic oligonucleotide
  Target: LAMA2; (-) strand; PAM type: YTN; PAM sequence: TTA
ttgattaaacaaaacaaaaa

SEQ ID NO: 201955 - DNA, 20 bp, Artificial Sequence
  Description of Artificial Sequence: Synthetic oligonucleotide
  Target: LAMA2; (-) strand; PAM type: YTN; PAM sequence: TTC
aggaattattgattaaacaa

SEQ ID NO: 201956 - DNA, 20 bp, Artificial Sequence
  Description of Artificial Sequence: Synthetic oligonucleotide
  Target: LAMA2; (-) strand; PAM type: YTN; PAM sequence: TTT
caggaattattgattaaaca

SEQ ID NO: 201957 - DNA, 20 bp, Artificial Sequence
  Description of Artificial Sequence: Synthetic oligonucleotide
  Target: LAMA2; (-) strand; PAM type: YTN; PAM sequence: CTT
tcaggaattattgattaaac

SEQ ID NO: 201958 - DNA, 20 bp, Artificial Sequence
  Description of Artificial Sequence: Synthetic oligonucleotide
  Target: LAMA2; (-) strand; PAM type: YTN; PAM sequence: TTC
tttcaggaattattgattaa

SEQ ID NO: 201959 - DNA, 20 bp, Artificial Sequence
  Description of Artificial Sequence: Synthetic oligonucleotide
  Target: LAMA2; (-) strand; PAM type: YTN; PAM sequence: TTC
attctttcaggaattattga

SEQ ID NO: 201960 - DNA, 20 bp, Artificial Sequence
  Description of Artificial Sequence: Synthetic oligonucleotide
  Target: LAMA2; (-) strand; PAM type: YTN; PAM sequence: TTT
cattctttcaggaattattg

SEQ ID NO: 201961 - DNA, 20 bp, Artificial Sequence
  Description of Artificial Sequence: Synthetic oligonucleotide
  Target: LAMA2; (-) strand; PAM type: YTN; PAM sequence: TTG
tcacgtaataaaagtcgaat

SEQ ID NO: 201962 - DNA, 20 bp, Artificial Sequence
  Description of Artificial Sequence: Synthetic oligonucleotide
  Target: LAMA2; (-) strand; PAM type: YTN; PAM sequence: CTT
gtcacgtaataaaagtcgaa

SEQ ID NO: 201963 - DNA, 20 bp, Artificial Sequence
  Description of Artificial Sequence: Synthetic oligonucleotide
  Target: LAMA2; (-) strand; PAM type: YTN; PAM sequence: TTA
aaccttgtcacgtaataaaa

SEQ ID NO: 201964 - DNA, 20 bp, Artificial Sequence
  Description of Artificial Sequence: Synthetic oligonucleotide
  Target: LAMA2; (-) strand; PAM type: YTN; PAM sequence: TTT
aaaccttgtcacgtaataaa

SEQ ID NO: 201965 - DNA, 20 bp, Artificial Sequence
  Description of Artificial Sequence: Synthetic oligonucleotide
  Target: LAMA2; (-) strand; PAM type: YTN; PAM sequence: TTT
taaaccttgtcacgtaataa

SEQ ID NO: 201966 - DNA, 20 bp, Artificial Sequence
  Description of Artificial Sequence: Synthetic oligonucleotide
  Target: LAMA2; (-) strand; PAM type: YTN; PAM sequence: TTT
ttaaaccttgtcacgtaata

SEQ ID NO: 201967 - DNA, 20 bp, Artificial Sequence
  Description of Artificial Sequence: Synthetic oligonucleotide
  Target: LAMA2; (-) strand; PAM type: YTN; PAM sequence: TTT
tttaaaccttgtcacgtaat

SEQ ID NO: 201968 - DNA, 20 bp, Artificial Sequence
  Description of Artificial Sequence: Synthetic oligonucleotide
  Target: LAMA2; (-) strand; PAM type: YTN; PAM sequence: TTT
ttttaaaccttgtcacgtaa

SEQ ID NO: 201969 - DNA, 20 bp, Artificial Sequence
  Description of Artificial Sequence: Synthetic oligonucleotide
  Target: LAMA2; (-) strand; PAM type: YTN; PAM sequence: TTC
aagcaaatttttttaaacct

SEQ ID NO: 201970 - DNA, 20 bp, Artificial Sequence
  Description of Artificial Sequence: Synthetic oligonucleotide
  Target: LAMA2; (-) strand; PAM type: YTN; PAM sequence: TTA
ttcaagcaaatttttttaaa

SEQ ID NO: 201971 - DNA, 20 bp, Artificial Sequence
  Description of Artificial Sequence: Synthetic oligonucleotide
  Target: LAMA2; (-) strand; PAM type: YTN; PAM sequence: TTT
attcaagcaaatttttttaa

SEQ ID NO: 201972 - DNA, 20 bp, Artificial Sequence
  Description of Artificial Sequence: Synthetic oligonucleotide
  Target: LAMA2; (-) strand; PAM type: YTN; PAM sequence: TTT
tattcaagcaaattttttta

SEQ ID NO: 201973 - DNA, 20 bp, Artificial Sequence
  Description of Artificial Sequence: Synthetic oligonucleotide
  Target: LAMA2; (-) strand; PAM type: YTN; PAM sequence: CTC
cataatgttttattcaagca

SEQ ID NO: 201974 - DNA, 20 bp, Artificial Sequence
  Description of Artificial Sequence: Synthetic oligonucleotide
  Target: LAMA2; (-) strand; PAM type: YTN; PAM sequence: TTC
agactccataatgttttatt

SEQ ID NO: 201975 - DNA, 20 bp, Artificial Sequence
  Description of Artificial Sequence: Synthetic oligonucleotide
  Target: LAMA2; (-) strand; PAM type: YTN; PAM sequence: TTG
aattcagactccataatgtt

SEQ ID NO: 201976 - DNA, 20 bp, Artificial Sequence
  Description of Artificial Sequence: Synthetic oligonucleotide
  Target: LAMA2; (-) strand; PAM type: YTN; PAM sequence: TTT
gaattcagactccataatgt

SEQ ID NO: 201977 - DNA, 20 bp, Artificial Sequence
  Description of Artificial Sequence: Synthetic oligonucleotide
  Target: LAMA2; (-) strand; PAM type: YTN; PAM sequence: CTT
tgaattcagactccataatg

SEQ ID NO: 201978 - DNA, 20 bp, Artificial Sequence
  Description of Artificial Sequence: Synthetic oligonucleotide
  Target: LAMA2; (-) strand; PAM type: YTN; PAM sequence: TTA
tgctttgaattcagactcca

SEQ ID NO: 201979 - DNA, 20 bp, Artificial Sequence
  Description of Artificial Sequence: Synthetic oligonucleotide
  Target: LAMA2; (-) strand; PAM type: YTN; PAM sequence: TTT
atgctttgaattcagactcc

SEQ ID NO: 201980 - DNA, 20 bp, Artificial Sequence
  Description of Artificial Sequence: Synthetic oligonucleotide
  Target: LAMA2; (-) strand; PAM type: YTN; PAM sequence: CTT
tatgctttgaattcagactc

SEQ ID NO: 201981 - DNA, 20 bp, Artificial Sequence
  Description of Artificial Sequence: Synthetic oligonucleotide
  Target: LAMA2; (-) strand; PAM type: YTN; PAM sequence: CTG
cctttatgctttgaattcag

SEQ ID NO: 201982 - DNA, 20 bp, Artificial Sequence
  Description of Artificial Sequence: Synthetic oligonucleotide
  Target: LAMA2; (-) strand; PAM type: YTN; PAM sequence: TTC
tgcctttatgctttgaattc

SEQ ID NO: 201983 - DNA, 20 bp, Artificial Sequence
  Description of Artificial Sequence: Synthetic oligonucleotide
  Target: LAMA2; (-) strand; PAM type: YTN; PAM sequence: TTT
ctgcctttatgctttgaatt

SEQ ID NO: 201984 - DNA, 20 bp, Artificial Sequence
  Description of Artificial Sequence: Synthetic oligonucleotide
  Target: LAMA2; (-) strand; PAM type: YTN; PAM sequence: CTT
tctgcctttatgctttgaat

SEQ ID NO: 201985 - DNA, 20 bp, Artificial Sequence
  Description of Artificial Sequence: Synthetic oligonucleotide
  Target: LAMA2; (-) strand; PAM type: YTN; PAM sequence: TTA
ctttctgcctttatgctttg

SEQ ID NO: 201986 - DNA, 20 bp, Artificial Sequence
  Description of Artificial Sequence: Synthetic oligonucleotide
  Target: LAMA2; (-) strand; PAM type: YTN; PAM sequence: TTT
actttctgcctttatgcttt

SEQ ID NO: 201987 - DNA, 20 bp, Artificial Sequence
  Description of Artificial Sequence: Synthetic oligonucleotide
  Target: LAMA2; (-) strand; PAM type: YTN; PAM sequence: CTT
tactttctgcctttatgctt

SEQ ID NO: 201988 - DNA, 20 bp, Artificial Sequence
  Description of Artificial Sequence: Synthetic oligonucleotide
  Target: LAMA2; (-) strand; PAM type: YTN; PAM sequence: TTC
atactttactttctgccttt

SEQ ID NO: 201989 - DNA, 20 bp, Artificial Sequence
  Description of Artificial Sequence: Synthetic oligonucleotide
  Target: LAMA2; (-) strand; PAM type: YTN; PAM sequence: CTT
catactttactttctgcctt

SEQ ID NO: 201990 - DNA, 20 bp, Artificial Sequence
  Description of Artificial Sequence: Synthetic oligonucleotide
  Target: LAMA2; (-) strand; PAM type: YTN; PAM sequence: TTG
aaagatcttcatactttact

SEQ ID NO: 201991 - DNA, 20 bp, Artificial Sequence
  Description of Artificial Sequence: Synthetic oligonucleotide
  Target: LAMA2; (-) strand; PAM type: YTN; PAM sequence: TTT
gaaagatcttcatactttac

SEQ ID NO: 201992 - DNA, 20 bp, Artificial Sequence
  Description of Artificial Sequence: Synthetic oligonucleotide
  Target: LAMA2; (-) strand; PAM type: YTN; PAM sequence: TTA
aaagtgacagacgtttgaaa

SEQ ID NO: 201993 - DNA, 20 bp, Artificial Sequence
  Description of Artificial Sequence: Synthetic oligonucleotide
  Target: LAMA2; (-) strand; PAM type: YTN; PAM sequence: TTA
ttaaaagtgacagacgtttg

SEQ ID NO: 201994 - DNA, 20 bp, Artificial Sequence
  Description of Artificial Sequence: Synthetic oligonucleotide
  Target: LAMA2; (-) strand; PAM type: YTN; PAM sequence: TTC
gtaggtcatataacatagaa

SEQ ID NO: 201995 - DNA, 20 bp, Artificial Sequence
  Description of Artificial Sequence: Synthetic oligonucleotide
  Target: LAMA2; (-) strand; PAM type: YTN; PAM sequence: TTA
acattcgtaggtcatataac

SEQ ID NO: 201996 - DNA, 20 bp, Artificial Sequence
  Description of Artificial Sequence: Synthetic oligonucleotide
  Target: LAMA2; (-) strand; PAM type: YTN; PAM sequence: CTT
aacattcgtaggtcatataa

SEQ ID NO: 201997 - DNA, 20 bp, Artificial Sequence
  Description of Artificial Sequence: Synthetic oligonucleotide
  Target: LAMA2; (-) strand; PAM type: YTN; PAM sequence: CTC
ttaacattcgtaggtcatat

SEQ ID NO: 201998 - DNA, 20 bp, Artificial Sequence
  Description of Artificial Sequence: Synthetic oligonucleotide
  Target: LAMA2; (-) strand; PAM type: YTN; PAM sequence: TTA
cagactcttaacattcgtag

SEQ ID NO: 201999 - DNA, 20 bp, Artificial Sequence
  Description of Artificial Sequence: Synthetic oligonucleotide
  Target: LAMA2; (-) strand; PAM type: YTN; PAM sequence: CTT
acagactcttaacattcgta

SEQ ID NO: 202000 - DNA, 20 bp, Artificial Sequence
  Description of Artificial Sequence: Synthetic oligonucleotide
  Target: LAMA2; (-) strand; PAM type: YTN; PAM sequence: CTC
ttacagactcttaacattcg

SEQ ID NO: 202001 - DNA, 20 bp, Artificial Sequence
  Description of Artificial Sequence: Synthetic oligonucleotide
  Target: LAMA2; (-) strand; PAM type: YTN; PAM sequence: CTG
aagaaactcttacagactct

SEQ ID NO: 202002 - DNA, 20 bp, Artificial Sequence
  Description of Artificial Sequence: Synthetic oligonucleotide
  Target: LAMA2; (-) strand; PAM type: YTN; PAM sequence: TTG
gtaaaatcaaatgcagctga

SEQ ID NO: 202003 - DNA, 20 bp, Artificial Sequence
  Description of Artificial Sequence: Synthetic oligonucleotide
  Target: LAMA2; (-) strand; PAM type: YTN; PAM sequence: CTG
tacccacaaggtgttggtaa

SEQ ID NO: 202004 - DNA, 20 bp, Artificial Sequence
  Description of Artificial Sequence: Synthetic oligonucleotide
  Target: LAMA2; (-) strand; PAM type: YTN; PAM sequence: TTA
actgtacccacaaggtgttg

SEQ ID NO: 202005 - DNA, 20 bp, Artificial Sequence
  Description of Artificial Sequence: Synthetic oligonucleotide
  Target: LAMA2; (-) strand; PAM type: YTN; PAM sequence: CTT
aactgtacccacaaggtgtt

SEQ ID NO: 202006 - DNA, 20 bp, Artificial Sequence
  Description of Artificial Sequence: Synthetic oligonucleotide
  Target: LAMA2; (-) strand; PAM type: YTN; PAM sequence: TTC
ttaactgtacccacaaggtg

SEQ ID NO: 202007 - DNA, 20 bp, Artificial Sequence
  Description of Artificial Sequence: Synthetic oligonucleotide
  Target: LAMA2; (-) strand; PAM type: YTN; PAM sequence: CTT
cttaactgtacccacaaggt

SEQ ID NO: 202008 - DNA, 20 bp, Artificial Sequence
  Description of Artificial Sequence: Synthetic oligonucleotide
  Target: LAMA2; (-) strand; PAM type: YTN; PAM sequence: CTC
aaataagtcatcttcttaac

SEQ ID NO: 202009 - DNA, 20 bp, Artificial Sequence
  Description of Artificial Sequence: Synthetic oligonucleotide
  Target: LAMA2; (-) strand; PAM type: YTN; PAM sequence: TTA
taaagcctcaaataagtcat

SEQ ID NO: 202010 - DNA, 20 bp, Artificial Sequence
  Description of Artificial Sequence: Synthetic oligonucleotide
  Target: LAMA2; (-) strand; PAM type: YTN; PAM sequence: TTC
agttataaagcctcaaataa

SEQ ID NO: 202011 - DNA, 20 bp, Artificial Sequence
  Description of Artificial Sequence: Synthetic oligonucleotide
  Target: LAMA2; (-) strand; PAM type: YTN; PAM sequence: TTT
cagttataaagcctcaaata

SEQ ID NO: 202012 - DNA, 20 bp, Artificial Sequence
  Description of Artificial Sequence: Synthetic oligonucleotide
  Target: LAMA2; (-) strand; PAM type: YTN; PAM sequence: TTG
aaccatatccaatttcagtt

SEQ ID NO: 202013 - DNA, 20 bp, Artificial Sequence
  Description of Artificial Sequence: Synthetic oligonucleotide
  Target: LAMA2; (-) strand; PAM type: YTN; PAM sequence: TTT
gaaccatatccaatttcagt

SEQ ID NO: 202014 - DNA, 20 bp, Artificial Sequence
  Description of Artificial Sequence: Synthetic oligonucleotide
  Target: LAMA2; (-) strand; PAM type: YTN; PAM sequence: TTG
aacgtttgaaccatatccaa

SEQ ID NO: 202015 - DNA, 20 bp, Artificial Sequence
  Description of Artificial Sequence: Synthetic oligonucleotide
  Target: LAMA2; (-) strand; PAM type: YTN; PAM sequence: CTG
ttgaacgtttgaaccatatc

SEQ ID NO: 202016 - DNA, 20 bp, Artificial Sequence
  Description of Artificial Sequence: Synthetic oligonucleotide
  Target: LAMA2; (-) strand; PAM type: YTN; PAM sequence: TTA
tatctgttgaacgtttgaac

SEQ ID NO: 202017 - DNA, 20 bp, Artificial Sequence
  Description of Artificial Sequence: Synthetic oligonucleotide
  Target: LAMA2; (-) strand; PAM type: YTN; PAM sequence: TTT
atatctgttgaacgtttgaa

SEQ ID NO: 202018 - DNA, 20 bp, Artificial Sequence
  Description of Artificial Sequence: Synthetic oligonucleotide
  Target: LAMA2; (-) strand; PAM type: YTN; PAM sequence: TTA
aaatatgtttatatctgttg

SEQ ID NO: 202019 - DNA, 20 bp, Artificial Sequence
  Description of Artificial Sequence: Synthetic oligonucleotide
  Target: LAMA2; (-) strand; PAM type: YTN; PAM sequence: TTA
attaaaatatgtttatatct

SEQ ID NO: 202020 - DNA, 20 bp, Artificial Sequence
  Description of Artificial Sequence: Synthetic oligonucleotide
  Target: LAMA2; (-) strand; PAM type: YTN; PAM sequence: CTT
aattaaaatatgtttatatc

SEQ ID NO: 202021 - DNA, 20 bp, Artificial Sequence
  Description of Artificial Sequence: Synthetic oligonucleotide
  Target: LAMA2; (-) strand; PAM type: YTN; PAM sequence: TTC
ttaattaaaatatgtttata

SEQ ID NO: 202022 - DNA, 20 bp, Artificial Sequence
  Description of Artificial Sequence: Synthetic oligonucleotide
  Target: LAMA2; (-) strand; PAM type: YTN; PAM sequence: TTA
ttcttaattaaaatatgttt

SEQ ID NO: 202023 - DNA, 20 bp, Artificial Sequence
  Description of Artificial Sequence: Synthetic oligonucleotide
  Target: LAMA2; (-) strand; PAM type: YTN; PAM sequence: TTT
attcttaattaaaatatgtt

SEQ ID NO: 202024 - DNA, 20 bp, Artificial Sequence
  Description of Artificial Sequence: Synthetic oligonucleotide
  Target: LAMA2; (-) strand; PAM type: YTN; PAM sequence: TTA
taaaaatatttattcttaat

SEQ ID NO: 202025 - DNA, 20 bp, Artificial Sequence
  Description of Artificial Sequence: Synthetic oligonucleotide
  Target: LAMA2; (-) strand; PAM type: YTN; PAM sequence: CTT
ataaaaatatttattcttaa

SEQ ID NO: 202026 - DNA, 20 bp, Artificial Sequence
  Description of Artificial Sequence: Synthetic oligonucleotide
  Target: LAMA2; (-) strand; PAM type: YTN; PAM sequence: TTC
agcaatcttataaaaatatt

SEQ ID NO: 202027 - DNA, 20 bp, Artificial Sequence
  Description of Artificial Sequence: Synthetic oligonucleotide
  Target: LAMA2; (-) strand; PAM type: YTN; PAM sequence: TTT
cagcaatcttataaaaatat

SEQ ID NO: 202028 - DNA, 20 bp, Artificial Sequence
  Description of Artificial Sequence: Synthetic oligonucleotide
  Target: LAMA2; (-) strand; PAM type: YTN; PAM sequence: TTG
agagaagtcatttcagcaat

SEQ ID NO: 202029 - DNA, 20 bp, Artificial Sequence
  Description of Artificial Sequence: Synthetic oligonucleotide
  Target: LAMA2; (-) strand; PAM type: YTN; PAM sequence: TTT
gagagaagtcatttcagcaa

SEQ ID NO: 202030 - DNA, 20 bp, Artificial Sequence
  Description of Artificial Sequence: Synthetic oligonucleotide
  Target: LAMA2; (-) strand; PAM type: YTN; PAM sequence: TTT
tgagagaagtcatttcagca

SEQ ID NO: 202031 - DNA, 20 bp, Artificial Sequence
  Description of Artificial Sequence: Synthetic oligonucleotide
  Target: LAMA2; (-) strand; PAM type: YTN; PAM sequence: TTT
ttgagagaagtcatttcagc

SEQ ID NO: 202032 - DNA, 20 bp, Artificial Sequence
  Description of Artificial Sequence: Synthetic oligonucleotide
  Target: LAMA2; (-) strand; PAM type: YTN; PAM sequence: TTC
cggcataaatttttgagaga

SEQ ID NO: 202033 - DNA, 20 bp, Artificial Sequence
  Description of Artificial Sequence: Synthetic oligonucleotide
  Target: LAMA2; (-) strand; PAM type: YTN; PAM sequence: TTG
atgttccggcataaattttt

SEQ ID NO: 202034 - DNA, 20 bp, Artificial Sequence
  Description of Artificial Sequence: Synthetic oligonucleotide
  Target: LAMA2; (-) strand; PAM type: YTN; PAM sequence: TTG
ttgatgttccggcataaatt

SEQ ID NO: 202035 - DNA, 20 bp, Artificial Sequence
  Description of Artificial Sequence: Synthetic oligonucleotide
  Target: LAMA2; (-) strand; PAM type: YTN; PAM sequence: TTT
gttgatgttccggcataaat

SEQ ID NO: 202036 - DNA, 20 bp, Artificial Sequence
  Description of Artificial Sequence: Synthetic oligonucleotide
  Target: LAMA2; (-) strand; PAM type: YTN; PAM sequence: TTA
tttgttgatgttccggcata

SEQ ID NO: 202037 - DNA, 20 bp, Artificial Sequence
  Description of Artificial Sequence: Synthetic oligonucleotide
  Target: LAMA2; (-) strand; PAM type: YTN; PAM sequence: TTT
atttgttgatgttccggcat

SEQ ID NO: 202038 - DNA, 20 bp, Artificial Sequence
  Description of Artificial Sequence: Synthetic oligonucleotide
  Target: LAMA2; (-) strand; PAM type: YTN; PAM sequence: TTG
taatgcaaatttatttgttg

SEQ ID NO: 202039 - DNA, 20 bp, Artificial Sequence
  Description of Artificial Sequence: Synthetic oligonucleotide
  Target: LAMA2; (-) strand; PAM type: YTN; PAM sequence: TTT
gtaatgcaaatttatttgtt

SEQ ID NO: 202040 - DNA, 20 bp, Artificial Sequence
  Description of Artificial Sequence: Synthetic oligonucleotide
  Target: LAMA2; (-) strand; PAM type: YTN; PAM sequence: TTT
tgtaatgcaaatttatttgt

SEQ ID NO: 202041 - DNA, 20 bp, Artificial Sequence
  Description of Artificial Sequence: Synthetic oligonucleotide
  Target: LAMA2; (-) strand; PAM type: YTN; PAM sequence: CTA
ttttgtaatgcaaatttatt

SEQ ID NO: 202042 - DNA, 20 bp, Artificial Sequence
  Description of Artificial Sequence: Synthetic oligonucleotide
  Target: LAMA2; (-) strand; PAM type: YTN; PAM sequence: TTC
tattttgtaatgcaaattta

SEQ ID NO: 202043 - DNA, 20 bp, Artificial Sequence
  Description of Artificial Sequence: Synthetic oligonucleotide
  Target: LAMA2; (-) strand; PAM type: YTN; PAM sequence: TTT
ctattttgtaatgcaaattt

SEQ ID NO: 202044 - DNA, 20 bp, Artificial Sequence
  Description of Artificial Sequence: Synthetic oligonucleotide
  Target: LAMA2; (-) strand; PAM type: YTN; PAM sequence: TTT
tctattttgtaatgcaaatt

SEQ ID NO: 202045 - DNA, 20 bp, Artificial Sequence
  Description of Artificial Sequence: Synthetic oligonucleotide
  Target: LAMA2; (-) strand; PAM type: YTN; PAM sequence: TTG
aattttctattttgtaatgc

SEQ ID NO: 202046 - DNA, 20 bp, Artificial Sequence
  Description of Artificial Sequence: Synthetic oligonucleotide
  Target: LAMA2; (-) strand; PAM type: YTN; PAM sequence: TTC
cacaattgaattttctattt

SEQ ID NO: 202047 - DNA, 20 bp, Artificial Sequence
  Description of Artificial Sequence: Synthetic oligonucleotide
  Target: LAMA2; (-) strand; PAM type: YTN; PAM sequence: TTT
ccacaattgaattttctatt

SEQ ID NO: 202048 - DNA, 20 bp, Artificial Sequence
  Description of Artificial Sequence: Synthetic oligonucleotide
  Target: LAMA2; (-) strand; PAM type: YTN; PAM sequence: TTT
tccacaattgaattttctat

SEQ ID NO: 202049 - DNA, 20 bp, Artificial Sequence
  Description of Artificial Sequence: Synthetic oligonucleotide
  Target: LAMA2; (-) strand; PAM type: YTN; PAM sequence: TTA
gaatatgattttccacaatt

SEQ ID NO: 202050 - DNA, 20 bp, Artificial Sequence
  Description of Artificial Sequence: Synthetic oligonucleotide
  Target: LAMA2; (-) strand; PAM type: YTN; PAM sequence: TTC
atcagaataagttagaatat

SEQ ID NO: 202051 - DNA, 20 bp, Artificial Sequence
  Description of Artificial Sequence: Synthetic oligonucleotide
  Target: LAMA2; (-) strand; PAM type: YTN; PAM sequence: CTT
catcagaataagttagaata

SEQ ID NO: 202052 - DNA, 20 bp, Artificial Sequence
  Description of Artificial Sequence: Synthetic oligonucleotide
  Target: LAMA2; (-) strand; PAM type: YTN; PAM sequence: CTA
cttcatcagaataagttaga

SEQ ID NO: 202053 - DNA, 20 bp, Artificial Sequence
  Description of Artificial Sequence: Synthetic oligonucleotide
  Target: LAMA2; (-) strand; PAM type: YTN; PAM sequence: CTG
acaagggaactacttcatca

SEQ ID NO: 202054 - DNA, 20 bp, Artificial Sequence
  Description of Artificial Sequence: Synthetic oligonucleotide
  Target: LAMA2; (-) strand; PAM type: YTN; PAM sequence: TTC
ctgacaagggaactacttca

SEQ ID NO: 202055 - DNA, 20 bp, Artificial Sequence
  Description of Artificial Sequence: Synthetic oligonucleotide
  Target: LAMA2; (-) strand; PAM type: YTN; PAM sequence: CTT
cctgacaagggaactacttc

SEQ ID NO: 202056 - DNA, 20 bp, Artificial Sequence
  Description of Artificial Sequence: Synthetic oligonucleotide
  Target: LAMA2; (-) strand; PAM type: YTN; PAM sequence: TTA
agaaaaagcttcctgacaag

SEQ ID NO: 202057 - DNA, 20 bp, Artificial Sequence
  Description of Artificial Sequence: Synthetic oligonucleotide
  Target: LAMA2; (-) strand; PAM type: YTN; PAM sequence: TTT
aagaaaaagcttcctgacaa

SEQ ID NO: 202058 - DNA, 20 bp, Artificial Sequence
  Description of Artificial Sequence: Synthetic oligonucleotide
  Target: LAMA2; (-) strand; PAM type: YTN; PAM sequence: CTT
taagaaaaagcttcctgaca

SEQ ID NO: 202059 - DNA, 20 bp, Artificial Sequence
  Description of Artificial Sequence: Synthetic oligonucleotide
  Target: LAMA2; (-) strand; PAM type: YTN; PAM sequence: CTA
tcacaaatcataaaacacac

SEQ ID NO: 202060 - DNA, 20 bp, Artificial Sequence
  Description of Artificial Sequence: Synthetic oligonucleotide
  Target: LAMA2; (-) strand; PAM type: YTN; PAM sequence: TTC
tatcacaaatcataaaacac

SEQ ID NO: 202061 - DNA, 20 bp, Artificial Sequence
  Description of Artificial Sequence: Synthetic oligonucleotide
  Target: LAMA2; (-) strand; PAM type: YTN; PAM sequence: TTA
gtgatggtaattctatcaca

SEQ ID NO: 202062 - DNA, 20 bp, Artificial Sequence
  Description of Artificial Sequence: Synthetic oligonucleotide
  Target: LAMA2; (-) strand; PAM type: YTN; PAM sequence: CTT
agtgatggtaattctatcac

SEQ ID NO: 202063 - DNA, 20 bp, Artificial Sequence
  Description of Artificial Sequence: Synthetic oligonucleotide
  Target: LAMA2; (-) strand; PAM type: YTN; PAM sequence: CTA
accaatgggcaatgatcgac

SEQ ID NO: 202064 - DNA, 20 bp, Artificial Sequence
  Description of Artificial Sequence: Synthetic oligonucleotide
  Target: LAMA2; (-) strand; PAM type: YTN; PAM sequence: CTA
aaaggcagtacatgtagact

SEQ ID NO: 202065 - DNA, 20 bp, Artificial Sequence
  Description of Artificial Sequence: Synthetic oligonucleotide
  Target: LAMA2; (-) strand; PAM type: YTN; PAM sequence: CTC
atgtcactaaaaggcagtac

SEQ ID NO: 202066 - DNA, 20 bp, Artificial Sequence
  Description of Artificial Sequence: Synthetic oligonucleotide
  Target: LAMA2; (-) strand; PAM type: YTN; PAM sequence: TTG
aactcatgtcactaaaaggc

SEQ ID NO: 202067 - DNA, 20 bp, Artificial Sequence
  Description of Artificial Sequence: Synthetic oligonucleotide
  Target: LAMA2; (-) strand; PAM type: YTN; PAM sequence: TTA
gaattgaactcatgtcacta

SEQ ID NO: 202068 - DNA, 20 bp, Artificial Sequence
  Description of Artificial Sequence: Synthetic oligonucleotide
  Target: LAMA2; (-) strand; PAM type: YTN; PAM sequence: TTA
attagaattgaactcatgtc

SEQ ID NO: 202069 - DNA, 20 bp, Artificial Sequence
  Description of Artificial Sequence: Synthetic oligonucleotide
  Target: LAMA2; (-) strand; PAM type: YTN; PAM sequence: CTT
aattagaattgaactcatgt

SEQ ID NO: 202070 - DNA, 20 bp, Artificial Sequence
  Description of Artificial Sequence: Synthetic oligonucleotide
  Target: LAMA2; (-) strand; PAM type: YTN; PAM sequence: TTC
ttaattagaattgaactcat

SEQ ID NO: 202071 - DNA, 20 bp, Artificial Sequence
  Description of Artificial Sequence: Synthetic oligonucleotide
  Target: LAMA2; (-) strand; PAM type: YTN; PAM sequence: CTC
attcttaattagaattgaac

SEQ ID NO: 202072 - DNA, 20 bp, Artificial Sequence
  Description of Artificial Sequence: Synthetic oligonucleotide
  Target: LAMA2; (-) strand; PAM type: YTN; PAM sequence: TTC
tcattcttaattagaattga

SEQ ID NO: 202073 - DNA, 20 bp, Artificial Sequence
  Description of Artificial Sequence: Synthetic oligonucleotide
  Target: LAMA2; (-) strand; PAM type: YTN; PAM sequence: CTA
ttctcattcttaattagaat

SEQ ID NO: 202074 - DNA, 20 bp, Artificial Sequence
  Description of Artificial Sequence: Synthetic oligonucleotide
  Target: LAMA2; (-) strand; PAM type: YTN; PAM sequence: TTA
taggctattctcattcttaa

SEQ ID NO: 202075 - DNA, 20 bp, Artificial Sequence
  Description of Artificial Sequence: Synthetic oligonucleotide
  Target: LAMA2; (-) strand; PAM type: YTN; PAM sequence: TTC
atagttataggctattctca

SEQ ID NO: 202076 - DNA, 20 bp, Artificial Sequence
  Description of Artificial Sequence: Synthetic oligonucleotide
  Target: LAMA2; (-) strand; PAM type: YTN; PAM sequence: CTG
tgttcatagttataggctat

SEQ ID NO: 202077 - DNA, 20 bp, Artificial Sequence
  Description of Artificial Sequence: Synthetic oligonucleotide
  Target: LAMA2; (-) strand; PAM type: YTN; PAM sequence: CTA
tctgtgttcatagttatagg

SEQ ID NO: 202078 - DNA, 20 bp, Artificial Sequence
  Description of Artificial Sequence: Synthetic oligonucleotide
  Target: LAMA2; (-) strand; PAM type: YTN; PAM sequence: CTA
gagacacatgtagctatctg

SEQ ID NO: 202079 - DNA, 20 bp, Artificial Sequence
  Description of Artificial Sequence: Synthetic oligonucleotide
  Target: LAMA2; (-) strand; PAM type: YTN; PAM sequence: CTC
actagagacacatgtagcta

SEQ ID NO: 202080 - DNA, 20 bp, Artificial Sequence
  Description of Artificial Sequence: Synthetic oligonucleotide
  Target: LAMA2; (-) strand; PAM type: YTN; PAM sequence: CTC
tcactagagacacatgtagc

SEQ ID NO: 202081 - DNA, 20 bp, Artificial Sequence
  Description of Artificial Sequence: Synthetic oligonucleotide
  Target: LAMA2; (-) strand; PAM type: YTN; PAM sequence: CTA
gtacctctcactagagacac

SEQ ID NO: 202082 - DNA, 20 bp, Artificial Sequence
  Description of Artificial Sequence: Synthetic oligonucleotide
  Target: LAMA2; (-) strand; PAM type: YTN; PAM sequence: TTA
agagaaatgtcaaagaggac

SEQ ID NO: 202083 - DNA, 20 bp, Artificial Sequence
  Description of Artificial Sequence: Synthetic oligonucleotide
  Target: LAMA2; (-) strand; PAM type: YTN; PAM sequence: TTT
aagagaaatgtcaaagagga

SEQ ID NO: 202084 - DNA, 20 bp, Artificial Sequence
  Description of Artificial Sequence: Synthetic oligonucleotide
  Target: LAMA2; (-) strand; PAM type: YTN; PAM sequence: CTT
taagagaaatgtcaaagagg

SEQ ID NO: 202085 - DNA, 20 bp, Artificial Sequence
  Description of Artificial Sequence: Synthetic oligonucleotide
  Target: LAMA2; (-) strand; PAM type: YTN; PAM sequence: TTC
cgctttaagagaaatgtcaa

SEQ ID NO: 202086 - DNA, 20 bp, Artificial Sequence
  Description of Artificial Sequence: Synthetic oligonucleotide
  Target: LAMA2; (-) strand; PAM type: YTN; PAM sequence: CTA
ccccaaataaattccgcttt

SEQ ID NO: 202087 - DNA, 20 bp, Artificial Sequence
  Description of Artificial Sequence: Synthetic oligonucleotide
  Target: LAMA2; (-) strand; PAM type: YTN; PAM sequence: CTA
ccagtaaaaccatcactacc

SEQ ID NO: 202088 - DNA, 20 bp, Artificial Sequence
  Description of Artificial Sequence: Synthetic oligonucleotide
  Target: LAMA2; (-) strand; PAM type: YTN; PAM sequence: CTA
tggctaccagtaaaaccatc

SEQ ID NO: 202089 - DNA, 20 bp, Artificial Sequence
  Description of Artificial Sequence: Synthetic oligonucleotide
  Target: LAMA2; (-) strand; PAM type: YTN; PAM sequence: TTC
ccctatggctaccagtaaaa

SEQ ID NO: 202090 - DNA, 20 bp, Artificial Sequence
  Description of Artificial Sequence: Synthetic oligonucleotide
  Target: LAMA2; (-) strand; PAM type: YTN; PAM sequence: CTT
cccctatggctaccagtaaa

SEQ ID NO: 202091 - DNA, 20 bp, Artificial Sequence
  Description of Artificial Sequence: Synthetic oligonucleotide
  Target: LAMA2; (-) strand; PAM type: YTN; PAM sequence: TTA
tcttcccctatggctaccag

SEQ ID NO: 202092 - DNA, 20 bp, Artificial Sequence
  Description of Artificial Sequence: Synthetic oligonucleotide
  Target: LAMA2; (-) strand; PAM type: YTN; PAM sequence: CTT
atcttcccctatggctacca

SEQ ID NO: 202093 - DNA, 20 bp, Artificial Sequence
  Description of Artificial Sequence: Synthetic oligonucleotide
  Target: LAMA2; (-) strand; PAM type: YTN; PAM sequence: TTC
ttatcttcccctatggctac

SEQ ID NO: 202094 - DNA, 20 bp, Artificial Sequence
  Description of Artificial Sequence: Synthetic oligonucleotide
  Target: LAMA2; (-) strand; PAM type: YTN; PAM sequence: TTT
cttatcttcccctatggcta

SEQ ID NO: 202095 - DNA, 20 bp, Artificial Sequence
  Description of Artificial Sequence: Synthetic oligonucleotide
  Target: LAMA2; (-) strand; PAM type: YTN; PAM sequence: TTT
tcttatcttcccctatggct

SEQ ID NO: 202096 - DNA, 20 bp, Artificial Sequence
  Description of Artificial Sequence: Synthetic oligonucleotide
  Target: LAMA2; (-) strand; PAM type: YTN; PAM sequence: CTT
ttcttatcttcccctatggc

SEQ ID NO: 202097 - DNA, 20 bp, Artificial Sequence
  Description of Artificial Sequence: Synthetic oligonucleotide
  Target: LAMA2; (-) strand; PAM type: YTN; PAM sequence: TTG
gcccccttttcttatcttcc

SEQ ID NO: 202098 - DNA, 20 bp, Artificial Sequence
  Description of Artificial Sequence: Synthetic oligonucleotide
  Target: LAMA2; (-) strand; PAM type: YTN; PAM sequence: CTT
ggcccccttttcttatcttc

SEQ ID NO: 202099 - DNA, 20 bp, Artificial Sequence
  Description of Artificial Sequence: Synthetic oligonucleotide
  Target: LAMA2; (-) strand; PAM type: YTN; PAM sequence: TTC
cacatgccagcagtagaaat

SEQ ID NO: 202100 - DNA, 20 bp, Artificial Sequence
  Description of Artificial Sequence: Synthetic oligonucleotide
  Target: LAMA2; (-) strand; PAM type: YTN; PAM sequence: CTG
gcatggagcaggaaaagagc

SEQ ID NO: 202101 - DNA, 20 bp, Artificial Sequence
  Description of Artificial Sequence: Synthetic oligonucleotide
  Target: LAMA2; (-) strand; PAM type: YTN; PAM sequence: CTA
aatcaagtgagagactggca

SEQ ID NO: 202102 - DNA, 20 bp, Artificial Sequence
  Description of Artificial Sequence: Synthetic oligonucleotide
  Target: LAMA2; (-) strand; PAM type: YTN; PAM sequence: TTC
taaatcaagtgagagactgg

SEQ ID NO: 202103 - DNA, 20 bp, Artificial Sequence
  Description of Artificial Sequence: Synthetic oligonucleotide
  Target: LAMA2; (-) strand; PAM type: YTN; PAM sequence: TTT
ctaaatcaagtgagagactg

SEQ ID NO: 202104 - DNA, 20 bp, Artificial Sequence
  Description of Artificial Sequence: Synthetic oligonucleotide
  Target: LAMA2; (-) strand; PAM type: YTN; PAM sequence: CTT
tctaaatcaagtgagagact

SEQ ID NO: 202105 - DNA, 20 bp, Artificial Sequence
  Description of Artificial Sequence: Synthetic oligonucleotide
  Target: LAMA2; (-) strand; PAM type: YTN; PAM sequence: CTA
aggacgcacaaatctttcta

SEQ ID NO: 202106 - DNA, 20 bp, Artificial Sequence
  Description of Artificial Sequence: Synthetic oligonucleotide
  Target: LAMA2; (-) strand; PAM type: YTN; PAM sequence: TTG
atggtcaaagctaaggacgc

SEQ ID NO: 202107 - DNA, 20 bp, Artificial Sequence
  Description of Artificial Sequence: Synthetic oligonucleotide
  Target: LAMA2; (-) strand; PAM type: YTN; PAM sequence: CTT
gatggtcaaagctaaggacg

SEQ ID NO: 202108 - DNA, 20 bp, Artificial Sequence
  Description of Artificial Sequence: Synthetic oligonucleotide
  Target: LAMA2; (-) strand; PAM type: YTN; PAM sequence: TTC
ttgatggtcaaagctaagga

SEQ ID NO: 202109 - DNA, 20 bp, Artificial Sequence
  Description of Artificial Sequence: Synthetic oligonucleotide
  Target: LAMA2; (-) strand; PAM type: YTN; PAM sequence: CTT
cttgatggtcaaagctaagg

SEQ ID NO: 202110 - DNA, 20 bp, Artificial Sequence
  Description of Artificial Sequence: Synthetic oligonucleotide
  Target: LAMA2; (-) strand; PAM type: YTN; PAM sequence: CTC
ttcttgatggtcaaagctaa

SEQ ID NO: 202111 - DNA, 20 bp, Artificial Sequence
  Description of Artificial Sequence: Synthetic oligonucleotide
  Target: LAMA2; (-) strand; PAM type: YTN; PAM sequence: TTC
aggtaccaggcacaggaagg

SEQ ID NO: 202112 - DNA, 20 bp, Artificial Sequence
  Description of Artificial Sequence: Synthetic oligonucleotide
  Target: LAMA2; (-) strand; PAM type: YTN; PAM sequence: TTT
caggtaccaggcacaggaag

SEQ ID NO: 202113 - DNA, 20 bp, Artificial Sequence
  Description of Artificial Sequence: Synthetic oligonucleotide
  Target: LAMA2; (-) strand; PAM type: YTN; PAM sequence: CTT
tcaggtaccaggcacaggaa

SEQ ID NO: 202114 - DNA, 20 bp, Artificial Sequence
  Description of Artificial Sequence: Synthetic oligonucleotide
  Target: LAMA2; (-) strand; PAM type: YTN; PAM sequence: CTA
ggtctttcaggtaccaggca

SEQ ID NO: 202115 - DNA, 20 bp, Artificial Sequence
  Description of Artificial Sequence: Synthetic oligonucleotide
  Target: LAMA2; (-) strand; PAM type: YTN; PAM sequence: TTC
actaggtctttcaggtacca

SEQ ID NO: 202116 - DNA, 20 bp, Artificial Sequence
  Description of Artificial Sequence: Synthetic oligonucleotide
  Target: LAMA2; (-) strand; PAM type: YTN; PAM sequence: CTT
cactaggtctttcaggtacc

SEQ ID NO: 202117 - DNA, 20 bp, Artificial Sequence
  Description of Artificial Sequence: Synthetic oligonucleotide
  Target: LAMA2; (-) strand; PAM type: YTN; PAM sequence: TTC
agtcttcactaggtctttca

SEQ ID NO: 202118 - DNA, 20 bp, Artificial Sequence
  Description of Artificial Sequence: Synthetic oligonucleotide
  Target: LAMA2; (-) strand; PAM type: YTN; PAM sequence: TTT
cagtcttcactaggtctttc

SEQ ID NO: 202119 - DNA, 20 bp, Artificial Sequence
  Description of Artificial Sequence: Synthetic oligonucleotide
  Target: LAMA2; (-) strand; PAM type: YTN; PAM sequence: CTT
tcagtcttcactaggtcttt

SEQ ID NO: 202120 - DNA, 20 bp, Artificial Sequence
  Description of Artificial Sequence: Synthetic oligonucleotide
  Target: LAMA2; (-) strand; PAM type: YTN; PAM sequence: TTC
tttcagtcttcactaggtct

SEQ ID NO: 202121 - DNA, 20 bp, Artificial Sequence
  Description of Artificial Sequence: Synthetic oligonucleotide
  Target: LAMA2; (-) strand; PAM type: YTN; PAM sequence: TTT
ctttcagtcttcactaggtc

SEQ ID NO: 202122 - DNA, 20 bp, Artificial Sequence
  Description of Artificial Sequence: Synthetic oligonucleotide
  Target: LAMA2; (-) strand; PAM type: YTN; PAM sequence: TTT
tctttcagtcttcactaggt

SEQ ID NO: 202123 - DNA, 20 bp, Artificial Sequence
  Description of Artificial Sequence: Synthetic oligonucleotide
  Target: LAMA2; (-) strand; PAM type: YTN; PAM sequence: CTT
ttctttcagtcttcactagg

SEQ ID NO: 202124 - DNA, 20 bp, Artificial Sequence
  Description of Artificial Sequence: Synthetic oligonucleotide
  Target: LAMA2; (-) strand; PAM type: YTN; PAM sequence: CTA
tgtaagaaaataaaaacttt

SEQ ID NO: 202125 - DNA, 20 bp, Artificial Sequence
  Description of Artificial Sequence: Synthetic oligonucleotide
  Target: LAMA2; (-) strand; PAM type: YTN; PAM sequence: TTC
actatgtaagaaaataaaaa

SEQ ID NO: 202126 - DNA, 20 bp, Artificial Sequence
  Description of Artificial Sequence: Synthetic oligonucleotide
  Target: LAMA2; (-) strand; PAM type: YTN; PAM sequence: TTT
cactatgtaagaaaataaaa

SEQ ID NO: 202127 - DNA, 20 bp, Artificial Sequence
  Description of Artificial Sequence: Synthetic oligonucleotide
  Target: LAMA2; (-) strand; PAM type: YTN; PAM sequence: CTT
tcactatgtaagaaaataaa

SEQ ID NO: 202128 - DNA, 20 bp, Artificial Sequence
  Description of Artificial Sequence: Synthetic oligonucleotide
  Target: LAMA2; (-) strand; PAM type: YTN; PAM sequence: TTC
aaagtgctttcactatgtaa

SEQ ID NO: 202129 - DNA, 20 bp, Artificial Sequence
  Description of Artificial Sequence: Synthetic oligonucleotide
  Target: LAMA2; (-) strand; PAM type: YTN; PAM sequence: CTT
caaagtgctttcactatgta

SEQ ID NO: 202130 - DNA, 20 bp, Artificial Sequence
  Description of Artificial Sequence: Synthetic oligonucleotide
  Target: LAMA2; (-) strand; PAM type: YTN; PAM sequence: TTA
tagatatgtgtaacaaaatg

SEQ ID NO: 202131 - DNA, 20 bp, Artificial Sequence
  Description of Artificial Sequence: Synthetic oligonucleotide
  Target: LAMA2; (-) strand; PAM type: YTN; PAM sequence: TTA
aattatagatatgtgtaaca

SEQ ID NO: 202132 - DNA, 20 bp, Artificial Sequence
  Description of Artificial Sequence: Synthetic oligonucleotide
  Target: LAMA2; (-) strand; PAM type: YTN; PAM sequence: TTA
tcatgttaaattatagatat

SEQ ID NO: 202133 - DNA, 20 bp, Artificial Sequence
  Description of Artificial Sequence: Synthetic oligonucleotide
  Target: LAMA2; (-) strand; PAM type: YTN; PAM sequence: TTG
taaatgatcaatataattat

SEQ ID NO: 202134 - DNA, 20 bp, Artificial Sequence
  Description of Artificial Sequence: Synthetic oligonucleotide
  Target: LAMA2; (-) strand; PAM type: YTN; PAM sequence: CTA
aaataatgtgtagaattgta

SEQ ID NO: 202135 - DNA, 20 bp, Artificial Sequence
  Description of Artificial Sequence: Synthetic oligonucleotide
  Target: LAMA2; (-) strand; PAM type: YTN; PAM sequence: TTG
ctaaaataatgtgtagaatt

SEQ ID NO: 202136 - DNA, 20 bp, Artificial Sequence
  Description of Artificial Sequence: Synthetic oligonucleotide
  Target: LAMA2; (-) strand; PAM type: YTN; PAM sequence: CTT
gctaaaataatgtgtagaat

SEQ ID NO: 202137 - DNA, 20 bp, Artificial Sequence
  Description of Artificial Sequence: Synthetic oligonucleotide
  Target: LAMA2; (-) strand; PAM type: YTN; PAM sequence: TTA
cttgctaaaataatgtgtag

SEQ ID NO: 202138 - DNA, 20 bp, Artificial Sequence
  Description of Artificial Sequence: Synthetic oligonucleotide
  Target: LAMA2; (-) strand; PAM type: YTN; PAM sequence: TTC
attacttgctaaaataatgt

SEQ ID NO: 202139 - DNA, 20 bp, Artificial Sequence
  Description of Artificial Sequence: Synthetic oligonucleotide
  Target: LAMA2; (-) strand; PAM type: YTN; PAM sequence: TTA
agaacgttcattacttgcta

SEQ ID NO: 202140 - DNA, 20 bp, Artificial Sequence
  Description of Artificial Sequence: Synthetic oligonucleotide
  Target: LAMA2; (-) strand; PAM type: YTN; PAM sequence: CTT
aagaacgttcattacttgct

SEQ ID NO: 202141 - DNA, 20 bp, Artificial Sequence
  Description of Artificial Sequence: Synthetic oligonucleotide
  Target: LAMA2; (-) strand; PAM type: YTN; PAM sequence: CTA
ggcacttaagaacgttcatt

SEQ ID NO: 202142 - DNA, 20 bp, Artificial Sequence
  Description of Artificial Sequence: Synthetic oligonucleotide
  Target: LAMA2; (-) strand; PAM type: YTN; PAM sequence: CTA
tgacaacactaggcacttaa

SEQ ID NO: 202143 - DNA, 20 bp, Artificial Sequence
  Description of Artificial Sequence: Synthetic oligonucleotide
  Target: LAMA2; (-) strand; PAM type: YTN; PAM sequence: TTA
tacctatgacaacactaggc

SEQ ID NO: 202144 - DNA, 20 bp, Artificial Sequence
  Description of Artificial Sequence: Synthetic oligonucleotide
  Target: LAMA2; (-) strand; PAM type: YTN; PAM sequence: TTT
atacctatgacaacactagg

SEQ ID NO: 202145 - DNA, 20 bp, Artificial Sequence
  Description of Artificial Sequence: Synthetic oligonucleotide
  Target: LAMA2; (-) strand; PAM type: YTN; PAM sequence: TTG
atttatacctatgacaacac

SEQ ID NO: 202146 - DNA, 20 bp, Artificial Sequence
  Description of Artificial Sequence: Synthetic oligonucleotide
  Target: LAMA2; (-) strand; PAM type: YTN; PAM sequence: CTT
gatttatacctatgacaaca

SEQ ID NO: 202147 - DNA, 20 bp, Artificial Sequence
  Description of Artificial Sequence: Synthetic oligonucleotide
  Target: LAMA2; (-) strand; PAM type: YTN; PAM sequence: CTA
cttgatttatacctatgaca

SEQ ID NO: 202148 - DNA, 20 bp, Artificial Sequence
  Description of Artificial Sequence: Synthetic oligonucleotide
  Target: LAMA2; (-) strand; PAM type: YTN; PAM sequence: TTG
agggcaggtatcctacttga

SEQ ID NO: 202149 - DNA, 20 bp, Artificial Sequence
  Description of Artificial Sequence: Synthetic oligonucleotide
  Target: LAMA2; (-) strand; PAM type: YTN; PAM sequence: CTT
gagggcaggtatcctacttg

SEQ ID NO: 202150 - DNA, 20 bp, Artificial Sequence
  Description of Artificial Sequence: Synthetic oligonucleotide
  Target: LAMA2; (-) strand; PAM type: YTN; PAM sequence: TTC
ttgagggcaggtatcctact

SEQ ID NO: 202151 - DNA, 20 bp, Artificial Sequence
  Description of Artificial Sequence: Synthetic oligonucleotide
  Target: LAMA2; (-) strand; PAM type: YTN; PAM sequence: TTT
cttgagggcaggtatcctac

SEQ ID NO: 202152 - DNA, 20 bp, Artificial Sequence
  Description of Artificial Sequence: Synthetic oligonucleotide
  Target: LAMA2; (-) strand; PAM type: YTN; PAM sequence: CTT
tcttgagggcaggtatccta

SEQ ID NO: 202153 - DNA, 20 bp, Artificial Sequence
  Description of Artificial Sequence: Synthetic oligonucleotide
  Target: LAMA2; (-) strand; PAM type: YTN; PAM sequence: TTA
tacactttcttgagggcagg

SEQ ID NO: 202154 - DNA, 20 bp, Artificial Sequence
  Description of Artificial Sequence: Synthetic oligonucleotide
  Target: LAMA2; (-) strand; PAM type: YTN; PAM sequence: CTA
cgcataaaattatacacttt

SEQ ID NO: 202155 - DNA, 20 bp, Artificial Sequence
  Description of Artificial Sequence: Synthetic oligonucleotide
  Target: LAMA2; (-) strand; PAM type: YTN; PAM sequence: CTC
tacgcataaaattatacact

SEQ ID NO: 202156 - DNA, 20 bp, Artificial Sequence
  Description of Artificial Sequence: Synthetic oligonucleotide
  Target: LAMA2; (-) strand; PAM type: YTN; PAM sequence: TTA
tctctacgcataaaattata

SEQ ID NO: 202157 - DNA, 20 bp, Artificial Sequence
  Description of Artificial Sequence: Synthetic oligonucleotide
  Target: LAMA2; (-) strand; PAM type: YTN; PAM sequence: CTT
atctctacgcataaaattat

SEQ ID NO: 202158 - DNA, 20 bp, Artificial Sequence
  Description of Artificial Sequence: Synthetic oligonucleotide
  Target: LAMA2; (-) strand; PAM type: YTN; PAM sequence: CTC
ttatctctacgcataaaatt

SEQ ID NO: 202159 - DNA, 20 bp, Artificial Sequence
  Description of Artificial Sequence: Synthetic oligonucleotide
  Target: LAMA2; (-) strand; PAM type: YTN; PAM sequence: CTC
atctcttatctctacgcata

SEQ ID NO: 202160 - DNA, 20 bp, Artificial Sequence
  Description of Artificial Sequence: Synthetic oligonucleotide
  Target: LAMA2; (-) strand; PAM type: YTN; PAM sequence: CTG
cgaaagtactcatctcttat

SEQ ID NO: 202161 - DNA, 20 bp, Artificial Sequence
  Description of Artificial Sequence: Synthetic oligonucleotide
  Target: LAMA2; (-) strand; PAM type: YTN; PAM sequence: TTC
tgcgaaagtactcatctctt

SEQ ID NO: 202162 - DNA, 20 bp, Artificial Sequence
  Description of Artificial Sequence: Synthetic oligonucleotide
  Target: LAMA2; (-) strand; PAM type: YTN; PAM sequence: TTT
ctgcgaaagtactcatctct

SEQ ID NO: 202163 - DNA, 20 bp, Artificial Sequence
  Description of Artificial Sequence: Synthetic oligonucleotide
  Target: LAMA2; (-) strand; PAM type: YTN; PAM sequence: TTG
tttctgcgaaagtactcatc

SEQ ID NO: 202164 - DNA, 20 bp, Artificial Sequence
  Description of Artificial Sequence: Synthetic oligonucleotide
  Target: LAMA2; (-) strand; PAM type: YTN; PAM sequence: TTT
gtttctgcgaaagtactcat

SEQ ID NO: 202165 - DNA, 20 bp, Artificial Sequence
  Description of Artificial Sequence: Synthetic oligonucleotide
  Target: LAMA2; (-) strand; PAM type: YTN; PAM sequence: TTC
atttgtttctgcgaaagtac

SEQ ID NO: 202166 - DNA, 20 bp, Artificial Sequence
  Description of Artificial Sequence: Synthetic oligonucleotide
  Target: LAMA2; (-) strand; PAM type: YTN; PAM sequence: TTA
ttcatttgtttctgcgaaag

SEQ ID NO: 202167 - DNA, 20 bp, Artificial Sequence
  Description of Artificial Sequence: Synthetic oligonucleotide
  Target: LAMA2; (-) strand; PAM type: YTN; PAM sequence: TTG
gtatataattattcatttgt

SEQ ID NO: 202168 - DNA, 20 bp, Artificial Sequence
  Description of Artificial Sequence: Synthetic oligonucleotide
  Target: LAMA2; (-) strand; PAM type: YTN; PAM sequence: CTC
catgttggtatataattatt

SEQ ID NO: 202169 - DNA, 20 bp, Artificial Sequence
  Description of Artificial Sequence: Synthetic oligonucleotide
  Target: LAMA2; (-) strand; PAM type: YTN; PAM sequence: TTC
tccatgttggtatataatta

SEQ ID NO: 202170 - DNA, 20 bp, Artificial Sequence
  Description of Artificial Sequence: Synthetic oligonucleotide
  Target: LAMA2; (-) strand; PAM type: YTN; PAM sequence: TTA
agttctccatgttggtatat

SEQ ID NO: 202171 - DNA, 20 bp, Artificial Sequence
  Description of Artificial Sequence: Synthetic oligonucleotide
  Target: LAMA2; (-) strand; PAM type: YTN; PAM sequence: CTT
aagttctccatgttggtata

SEQ ID NO: 202172 - DNA, 20 bp, Artificial Sequence
  Description of Artificial Sequence: Synthetic oligonucleotide
  Target: LAMA2; (-) strand; PAM type: YTN; PAM sequence: CTA
tgagcttaagttctccatgt

SEQ ID NO: 202173 - DNA, 20 bp, Artificial Sequence
  Description of Artificial Sequence: Synthetic oligonucleotide
  Target: LAMA2; (-) strand; PAM type: YTN; PAM sequence: TTC
acctatgagcttaagttctc

SEQ ID NO: 202174 - DNA, 20 bp, Artificial Sequence
  Description of Artificial Sequence: Synthetic oligonucleotide
  Target: LAMA2; (-) strand; PAM type: YTN; PAM sequence: TTC
ccacattcacctatgagctt

SEQ ID NO: 202175 - DNA, 20 bp, Artificial Sequence
  Description of Artificial Sequence: Synthetic oligonucleotide
  Target: LAMA2; (-) strand; PAM type: YTN; PAM sequence: CTC
catattcccacattcaccta

SEQ ID NO: 202176 - DNA, 20 bp, Artificial Sequence
  Description of Artificial Sequence: Synthetic oligonucleotide
  Target: LAMA2; (-) strand; PAM type: YTN; PAM sequence: CTC
ctccatattcccacattcac

SEQ ID NO: 202177 - DNA, 20 bp, Artificial Sequence
  Description of Artificial Sequence: Synthetic oligonucleotide
  Target: LAMA2; (-) strand; PAM type: YTN; PAM sequence: TTC
tcctccatattcccacattc

SEQ ID NO: 202178 - DNA, 20 bp, Artificial Sequence
  Description of Artificial Sequence: Synthetic oligonucleotide
  Target: LAMA2; (-) strand; PAM type: YTN; PAM sequence: TTC
attctcctccatattcccac

SEQ ID NO: 202179 - DNA, 20 bp, Artificial Sequence
  Description of Artificial Sequence: Synthetic oligonucleotide
  Target: LAMA2; (-) strand; PAM type: YTN; PAM sequence: TTT
cattctcctccatattccca

SEQ ID NO: 202180 - DNA, 20 bp, Artificial Sequence
  Description of Artificial Sequence: Synthetic oligonucleotide
  Target: LAMA2; (-) strand; PAM type: YTN; PAM sequence: TTT
tcattctcctccatattccc

SEQ ID NO: 202181 - DNA, 20 bp, Artificial Sequence
  Description of Artificial Sequence: Synthetic oligonucleotide
  Target: LAMA2; (-) strand; PAM type: YTN; PAM sequence: CTG
gcaatgattttcattctcct

SEQ ID NO: 202182 - DNA, 20 bp, Artificial Sequence
  Description of Artificial Sequence: Synthetic oligonucleotide
  Target: LAMA2; (-) strand; PAM type: YTN; PAM sequence: CTC
acctggcaatgattttcatt

SEQ ID NO: 202183 - DNA, 20 bp, Artificial Sequence
  Description of Artificial Sequence: Synthetic oligonucleotide
  Target: LAMA2; (-) strand; PAM type: YTN; PAM sequence: TTG
atcactcacctggcaatgat

SEQ ID NO: 202184 - DNA, 20 bp, Artificial Sequence
  Description of Artificial Sequence: Synthetic oligonucleotide
  Target: LAMA2; (-) strand; PAM type: YTN; PAM sequence: TTT
gatcactcacctggcaatga

SEQ ID NO: 202185 - DNA, 20 bp, Artificial Sequence
  Description of Artificial Sequence: Synthetic oligonucleotide
  Target: LAMA2; (-) strand; PAM type: YTN; PAM sequence: CTT
tgatcactcacctggcaatg

SEQ ID NO: 202186 - DNA, 20 bp, Artificial Sequence
  Description of Artificial Sequence: Synthetic oligonucleotide
  Target: LAMA2; (-) strand; PAM type: YTN; PAM sequence: CTC
tttgatcactcacctggcaa

SEQ ID NO: 202187 - DNA, 20 bp, Artificial Sequence
  Description of Artificial Sequence: Synthetic oligonucleotide
  Target: LAMA2; (-) strand; PAM type: YTN; PAM sequence: CTA
gaatgcactctttgatcact

SEQ ID NO: 202188 - DNA, 20 bp, Artificial Sequence
  Description of Artificial Sequence: Synthetic oligonucleotide
  Target: LAMA2; (-) strand; PAM type: YTN; PAM sequence: TTC
tagaatgcactctttgatca

SEQ ID NO: 202189 - DNA, 20 bp, Artificial Sequence
  Description of Artificial Sequence: Synthetic oligonucleotide
  Target: LAMA2; (-) strand; PAM type: YTN; PAM sequence: TTT
ctagaatgcactctttgatc

SEQ ID NO: 202190 - DNA, 20 bp, Artificial Sequence
  Description of Artificial Sequence: Synthetic oligonucleotide
  Target: LAMA2; (-) strand; PAM type: YTN; PAM sequence: TTT
tctagaatgcactctttgat

SEQ ID NO: 202191 - DNA, 20 bp, Artificial Sequence
  Description of Artificial Sequence: Synthetic oligonucleotide
  Target: LAMA2; (-) strand; PAM type: YTN; PAM sequence: CTT
ttctagaatgcactctttga

SEQ ID NO: 202192 - DNA, 20 bp, Artificial Sequence
  Description of Artificial Sequence: Synthetic oligonucleotide
  Target: LAMA2; (-) strand; PAM type: YTN; PAM sequence: CTG
tacaggtaccaccttttcta

SEQ ID NO: 202193 - DNA, 20 bp, Artificial Sequence
  Description of Artificial Sequence: Synthetic oligonucleotide
  Target: LAMA2; (-) strand; PAM type: YTN; PAM sequence: CTC
caaacccctgtacaggtacc

SEQ ID NO: 202194 - DNA, 20 bp, Artificial Sequence
  Description of Artificial Sequence: Synthetic oligonucleotide
  Target: LAMA2; (-) strand; PAM type: YTN; PAM sequence: TTA
ataccaatgcatcctccaaa

SEQ ID NO: 202195 - DNA, 20 bp, Artificial Sequence
  Description of Artificial Sequence: Synthetic oligonucleotide
  Target: LAMA2; (-) strand; PAM type: YTN; PAM sequence: TTT
aataccaatgcatcctccaa

SEQ ID NO: 202196 - DNA, 20 bp, Artificial Sequence
  Description of Artificial Sequence: Synthetic oligonucleotide
  Target: LAMA2; (-) strand; PAM type: YTN; PAM sequence: TTA
tttaataccaatgcatcctc

SEQ ID NO: 202197 - DNA, 20 bp, Artificial Sequence
  Description of Artificial Sequence: Synthetic oligonucleotide
  Target: LAMA2; (-) strand; PAM type: YTN; PAM sequence: CTT
atttaataccaatgcatcct

SEQ ID NO: 202198 - DNA, 20 bp, Artificial Sequence
  Description of Artificial Sequence: Synthetic oligonucleotide
  Target: LAMA2; (-) strand; PAM type: YTN; PAM sequence: CTC
ttatttaataccaatgcatc

SEQ ID NO: 202199 - DNA, 20 bp, Artificial Sequence
  Description of Artificial Sequence: Synthetic oligonucleotide
  Target: LAMA2; (-) strand; PAM type: YTN; PAM sequence: CTC
tcttatttaataccaatgca

SEQ ID NO: 202200 - DNA, 20 bp, Artificial Sequence
  Description of Artificial Sequence: Synthetic oligonucleotide
  Target: LAMA2; (-) strand; PAM type: YTN; PAM sequence: TTC
tctcttatttaataccaatg

SEQ ID NO: 202201 - DNA, 20 bp, Artificial Sequence
  Description of Artificial Sequence: Synthetic oligonucleotide
  Target: LAMA2; (-) strand; PAM type: YTN; PAM sequence: TTT
ctctcttatttaataccaat

SEQ ID NO: 202202 - DNA, 20 bp, Artificial Sequence
  Description of Artificial Sequence: Synthetic oligonucleotide
  Target: LAMA2; (-) strand; PAM type: YTN; PAM sequence: CTA
atttctctcttatttaatac

SEQ ID NO: 202203 - DNA, 20 bp, Artificial Sequence
  Description of Artificial Sequence: Synthetic oligonucleotide
  Target: LAMA2; (-) strand; PAM type: YTN; PAM sequence: CTC
taatttctctcttatttaat

SEQ ID NO: 202204 - DNA, 20 bp, Artificial Sequence
  Description of Artificial Sequence: Synthetic oligonucleotide
  Target: LAMA2; (-) strand; PAM type: YTN; PAM sequence: TTC
cctctaatttctctcttatt

SEQ ID NO: 202205 - DNA, 20 bp, Artificial Sequence
  Description of Artificial Sequence: Synthetic oligonucleotide
  Target: LAMA2; (-) strand; PAM type: YTN; PAM sequence: CTT
ccctctaatttctctcttat

SEQ ID NO: 202206 - DNA, 20 bp, Artificial Sequence
  Description of Artificial Sequence: Synthetic oligonucleotide
  Target: LAMA2; (-) strand; PAM type: YTN; PAM sequence: CTG
gaagatgtgtcttccctcta

SEQ ID NO: 202207 - DNA, 20 bp, Artificial Sequence
  Description of Artificial Sequence: Synthetic oligonucleotide
  Target: LAMA2; (-) strand; PAM type: YTN; PAM sequence: CTG
cctggaagatgtgtcttccc

SEQ ID NO: 202208 - DNA, 20 bp, Artificial Sequence
  Description of Artificial Sequence: Synthetic oligonucleotide
  Target: LAMA2; (-) strand; PAM type: YTN; PAM sequence: CTC
tgcctggaagatgtgtcttc

SEQ ID NO: 202209 - DNA, 20 bp, Artificial Sequence
  Description of Artificial Sequence: Synthetic oligonucleotide
  Target: LAMA2; (-) strand; PAM type: YTN; PAM sequence: CTA
gacactctgcctggaagatg

SEQ ID NO: 202210 - DNA, 20 bp, Artificial Sequence
  Description of Artificial Sequence: Synthetic oligonucleotide
  Target: LAMA2; (-) strand; PAM type: YTN; PAM sequence: TTC
tagacactctgcctggaaga

SEQ ID NO: 202211 - DNA, 20 bp, Artificial Sequence
  Description of Artificial Sequence: Synthetic oligonucleotide
  Target: LAMA2; (-) strand; PAM type: YTN; PAM sequence: CTT
ctagacactctgcctggaag

SEQ ID NO: 202212 - DNA, 20 bp, Artificial Sequence
  Description of Artificial Sequence: Synthetic oligonucleotide
  Target: LAMA2; (-) strand; PAM type: YTN; PAM sequence: CTG
cttctagacactctgcctgg

SEQ ID NO: 202213 - DNA, 20 bp, Artificial Sequence
  Description of Artificial Sequence: Synthetic oligonucleotide
  Target: LAMA2; (-) strand; PAM type: YTN; PAM sequence: CTC
tgcttctagacactctgcct

SEQ ID NO: 202214 - DNA, 20 bp, Artificial Sequence
  Description of Artificial Sequence: Synthetic oligonucleotide
  Target: LAMA2; (-) strand; PAM type: YTN; PAM sequence: CTG
gctctgcttctagacactct

SEQ ID NO: 202215 - DNA, 20 bp, Artificial Sequence
  Description of Artificial Sequence: Synthetic oligonucleotide
  Target: LAMA2; (-) strand; PAM type: YTN; PAM sequence: CTG
ctggctctgcttctagacac

SEQ ID NO: 202216 - DNA, 20 bp, Artificial Sequence
  Description of Artificial Sequence: Synthetic oligonucleotide
  Target: LAMA2; (-) strand; PAM type: YTN; PAM sequence: CTG
ctgctggctctgcttctaga

SEQ ID NO: 202217 - DNA, 20 bp, Artificial Sequence
  Description of Artificial Sequence: Synthetic oligonucleotide
  Target: LAMA2; (-) strand; PAM type: YTN; PAM sequence: CTA
aaatctgctgctggctctgc

SEQ ID NO: 202218 - DNA, 20 bp, Artificial Sequence
  Description of Artificial Sequence: Synthetic oligonucleotide
  Target: LAMA2; (-) strand; PAM type: YTN; PAM sequence: TTA
cactaaaatctgctgctggc

SEQ ID NO: 202219 - DNA, 20 bp, Artificial Sequence
  Description of Artificial Sequence: Synthetic oligonucleotide
  Target: LAMA2; (-) strand; PAM type: YTN; PAM sequence: CTT
acactaaaatctgctgctgg

SEQ ID NO: 202220 - DNA, 20 bp, Artificial Sequence
  Description of Artificial Sequence: Synthetic oligonucleotide
  Target: LAMA2; (-) strand; PAM type: YTN; PAM sequence: TTG
cttacactaaaatctgctgc

SEQ ID NO: 202221 - DNA, 20 bp, Artificial Sequence
  Description of Artificial Sequence: Synthetic oligonucleotide
  Target: LAMA2; (-) strand; PAM type: YTN; PAM sequence: TTC
aataaattgcttacactaaa

SEQ ID NO: 202222 - DNA, 20 bp, Artificial Sequence
  Description of Artificial Sequence: Synthetic oligonucleotide
  Target: LAMA2; (-) strand; PAM type: YTN; PAM sequence: TTT
caataaattgcttacactaa

SEQ ID NO: 202223 - DNA, 20 bp, Artificial Sequence
  Description of Artificial Sequence: Synthetic oligonucleotide
  Target: LAMA2; (-) strand; PAM type: YTN; PAM sequence: TTT
tcaataaattgcttacacta

SEQ ID NO: 202224 - DNA, 20 bp, Artificial Sequence
  Description of Artificial Sequence: Synthetic oligonucleotide
  Target: LAMA2; (-) strand; PAM type: YTN; PAM sequence: TTT
ttcaataaattgcttacact

SEQ ID NO: 202225 - DNA, 20 bp, Artificial Sequence
  Description of Artificial Sequence: Synthetic oligonucleotide
  Target: LAMA2; (-) strand; PAM type: YTN; PAM sequence: CTT
tttcaataaattgcttacac

SEQ ID NO: 202226 - DNA, 20 bp, Artificial Sequence
  Description of Artificial Sequence: Synthetic oligonucleotide
  Target: LAMA2; (-) strand; PAM type: YTN; PAM sequence: CTG
agaggactttttcaataaat

SEQ ID NO: 202227 - DNA, 20 bp, Artificial Sequence
  Description of Artificial Sequence: Synthetic oligonucleotide
  Target: LAMA2; (-) strand; PAM type: YTN; PAM sequence: TTC
tgagaggactttttcaataa

SEQ ID NO: 202228 - DNA, 20 bp, Artificial Sequence
  Description of Artificial Sequence: Synthetic oligonucleotide
  Target: LAMA2; (-) strand; PAM type: YTN; PAM sequence: CTT
ctgagaggactttttcaata

SEQ ID NO: 202229 - DNA, 20 bp, Artificial Sequence
  Description of Artificial Sequence: Synthetic oligonucleotide
  Target: LAMA2; (-) strand; PAM type: YTN; PAM sequence: CTC
atagatatcttctgagagga

SEQ ID NO: 202230 - DNA, 20 bp, Artificial Sequence
  Description of Artificial Sequence: Synthetic oligonucleotide
  Target: LAMA2; (-) strand; PAM type: YTN; PAM sequence: TTA
ccatctcatagatatcttct

SEQ ID NO: 202231 - DNA, 20 bp, Artificial Sequence
  Description of Artificial Sequence: Synthetic oligonucleotide
  Target: LAMA2; (-) strand; PAM type: YTN; PAM sequence: CTT
accatctcatagatatcttc

SEQ ID NO: 202232 - DNA, 20 bp, Artificial Sequence
  Description of Artificial Sequence: Synthetic oligonucleotide
  Target: LAMA2; (-) strand; PAM type: YTN; PAM sequence: TTC
ttaccatctcatagatatct

SEQ ID NO: 202233 - DNA, 20 bp, Artificial Sequence
  Description of Artificial Sequence: Synthetic oligonucleotide
  Target: LAMA2; (-) strand; PAM type: YTN; PAM sequence: TTT
cttaccatctcatagatatc

SEQ ID NO: 202234 - DNA, 20 bp, Artificial Sequence
  Description of Artificial Sequence: Synthetic oligonucleotide
  Target: LAMA2; (-) strand; PAM type: YTN; PAM sequence: TTT
tcttaccatctcatagatat

SEQ ID NO: 202235 - DNA, 20 bp, Artificial Sequence
  Description of Artificial Sequence: Synthetic oligonucleotide
  Target: LAMA2; (-) strand; PAM type: YTN; PAM sequence: CTT
ttcttaccatctcatagata

SEQ ID NO: 202236 - DNA, 20 bp, Artificial Sequence
  Description of Artificial Sequence: Synthetic oligonucleotide
  Target: LAMA2; (-) strand; PAM type: YTN; PAM sequence: TTC
agcttttcttaccatctcat

SEQ ID NO: 202237 - DNA, 20 bp, Artificial Sequence
  Description of Artificial Sequence: Synthetic oligonucleotide
  Target: LAMA2; (-) strand; PAM type: YTN; PAM sequence: TTT
cagcttttcttaccatctca

SEQ ID NO: 202238 - DNA, 20 bp, Artificial Sequence
  Description of Artificial Sequence: Synthetic oligonucleotide
  Target: LAMA2; (-) strand; PAM type: YTN; PAM sequence: TTT
tcagcttttcttaccatctc

SEQ ID NO: 202239 - DNA, 20 bp, Artificial Sequence
  Description of Artificial Sequence: Synthetic oligonucleotide
  Target: LAMA2; (-) strand; PAM type: YTN; PAM sequence: TTT
ttcagcttttcttaccatct

SEQ ID NO: 202240 - DNA, 20 bp, Artificial Sequence
  Description of Artificial Sequence: Synthetic oligonucleotide
  Target: LAMA2; (-) strand; PAM type: YTN; PAM sequence: CTT
tttcagcttttcttaccatc

SEQ ID NO: 202241 - DNA, 20 bp, Artificial Sequence
  Description of Artificial Sequence: Synthetic oligonucleotide
  Target: LAMA2; (-) strand; PAM type: YTN; PAM sequence: CTA
cctttttcagcttttcttac

SEQ ID NO: 202242 - DNA, 20 bp, Artificial Sequence
  Description of Artificial Sequence: Synthetic oligonucleotide
  Target: LAMA2; (-) strand; PAM type: YTN; PAM sequence: CTC
ccctacctttttcagctttt

SEQ ID NO: 202243 - DNA, 20 bp, Artificial Sequence
  Description of Artificial Sequence: Synthetic oligonucleotide
  Target: LAMA2; (-) strand; PAM type: YTN; PAM sequence: TTC
tcccctacctttttcagctt

SEQ ID NO: 202244 - DNA, 20 bp, Artificial Sequence
  Description of Artificial Sequence: Synthetic oligonucleotide
  Target: LAMA2; (-) strand; PAM type: YTN; PAM sequence: TTT
ctcccctacctttttcagct

SEQ ID NO: 202245 - DNA, 20 bp, Artificial Sequence
  Description of Artificial Sequence: Synthetic oligonucleotide
  Target: LAMA2; (-) strand; PAM type: YTN; PAM sequence: CTT
tctcccctacctttttcagc

SEQ ID NO: 202246 - DNA, 20 bp, Artificial Sequence
  Description of Artificial Sequence: Synthetic oligonucleotide
  Target: LAMA2; (-) strand; PAM type: YTN; PAM sequence: TTG
tccactttctcccctacctt

SEQ ID NO: 202247 - DNA, 20 bp, Artificial Sequence
  Description of Artificial Sequence: Synthetic oligonucleotide
  Target: LAMA2; (-) strand; PAM type: YTN; PAM sequence: TTT
gtccactttctcccctacct

SEQ ID NO: 202248 - DNA, 20 bp, Artificial Sequence
  Description of Artificial Sequence: Synthetic oligonucleotide
  Target: LAMA2; (-) strand; PAM type: YTN; PAM sequence: CTT
tgtccactttctcccctacc

SEQ ID NO: 202249 - DNA, 20 bp, Artificial Sequence
  Description of Artificial Sequence: Synthetic oligonucleotide
  Target: LAMA2; (-) strand; PAM type: YTN; PAM sequence: TTA
gagatcacatctttgtccac

SEQ ID NO: 202250 - DNA, 20 bp, Artificial Sequence
  Description of Artificial Sequence: Synthetic oligonucleotide
  Target: LAMA2; (-) strand; PAM type: YTN; PAM sequence: TTT
agagatcacatctttgtcca

SEQ ID NO: 202251 - DNA, 20 bp, Artificial Sequence
  Description of Artificial Sequence: Synthetic oligonucleotide
  Target: LAMA2; (-) strand; PAM type: YTN; PAM sequence: CTT
tagagatcacatctttgtcc

SEQ ID NO: 202252 - DNA, 20 bp, Artificial Sequence
  Description of Artificial Sequence: Synthetic oligonucleotide
  Target: LAMA2; (-) strand; PAM type: YTN; PAM sequence: CTC
aactttagagatcacatctt

SEQ ID NO: 202253 - DNA, 20 bp, Artificial Sequence
  Description of Artificial Sequence: Synthetic oligonucleotide
  Target: LAMA2; (-) strand; PAM type: YTN; PAM sequence: CTG
aggctcaactttagagatca

SEQ ID NO: 202254 - DNA, 20 bp, Artificial Sequence
  Description of Artificial Sequence: Synthetic oligonucleotide
  Target: LAMA2; (-) strand; PAM type: YTN; PAM sequence: CTC
cagaccatgccatgtatcag

SEQ ID NO: 202255 - DNA, 20 bp, Artificial Sequence
  Description of Artificial Sequence: Synthetic oligonucleotide
  Target: LAMA2; (-) strand; PAM type: YTN; PAM sequence: TTC
cctccagaccatgccatgta

SEQ ID NO: 202256 - DNA, 20 bp, Artificial Sequence
  Description of Artificial Sequence: Synthetic oligonucleotide
  Target: LAMA2; (-) strand; PAM type: YTN; PAM sequence: TTT
ccctccagaccatgccatgt

SEQ ID NO: 202257 - DNA, 20 bp, Artificial Sequence
  Description of Artificial Sequence: Synthetic oligonucleotide
  Target: LAMA2; (-) strand; PAM type: YTN; PAM sequence: TTT
tccctccagaccatgccatg

SEQ ID NO: 202258 - DNA, 20 bp, Artificial Sequence
  Description of Artificial Sequence: Synthetic oligonucleotide
  Target: LAMA2; (-) strand; PAM type: YTN; PAM sequence: CTG
tggtgcaattttccctccag

SEQ ID NO: 202259 - DNA, 20 bp, Artificial Sequence
  Description of Artificial Sequence: Synthetic oligonucleotide
  Target: LAMA2; (-) strand; PAM type: YTN; PAM sequence: TTC
tgtggtgcaattttccctcc

SEQ ID NO: 202260 - DNA, 20 bp, Artificial Sequence
  Description of Artificial Sequence: Synthetic oligonucleotide
  Target: LAMA2; (-) strand; PAM type: YTN; PAM sequence: TTT
ctgtggtgcaattttccctc

SEQ ID NO: 202261 - DNA, 20 bp, Artificial Sequence
  Description of Artificial Sequence: Synthetic oligonucleotide
  Target: LAMA2; (-) strand; PAM type: YTN; PAM sequence: CTT
tctgtggtgcaattttccct

SEQ ID NO: 202262 - DNA, 20 bp, Artificial Sequence
  Description of Artificial Sequence: Synthetic oligonucleotide
  Target: LAMA2; (-) strand; PAM type: YTN; PAM sequence: CTC
tttctgtggtgcaattttcc

SEQ ID NO: 202263 - DNA, 20 bp, Artificial Sequence
  Description of Artificial Sequence: Synthetic oligonucleotide
  Target: LAMA2; (-) strand; PAM type: YTN; PAM sequence: TTA
aggggtacctctttctgtgg

SEQ ID NO: 202264 - DNA, 20 bp, Artificial Sequence
  Description of Artificial Sequence: Synthetic oligonucleotide
  Target: LAMA2; (-) strand; PAM type: YTN; PAM sequence: CTT
aaggggtacctctttctgtg

SEQ ID NO: 202265 - DNA, 20 bp, Artificial Sequence
  Description of Artificial Sequence: Synthetic oligonucleotide
  Target: LAMA2; (-) strand; PAM type: YTN; PAM sequence: TTC
cttaaggggtacctctttct

SEQ ID NO: 202266 - DNA, 20 bp, Artificial Sequence
  Description of Artificial Sequence: Synthetic oligonucleotide
  Target: LAMA2; (-) strand; PAM type: YTN; PAM sequence: CTG
ttccttaaggggtacctctt

SEQ ID NO: 202267 - DNA, 20 bp, Artificial Sequence
  Description of Artificial Sequence: Synthetic oligonucleotide
  Target: LAMA2; (-) strand; PAM type: YTN; PAM sequence: CTG
gcatcctgttccttaagggg

SEQ ID NO: 202268 - DNA, 20 bp, Artificial Sequence
  Description of Artificial Sequence: Synthetic oligonucleotide
  Target: LAMA2; (-) strand; PAM type: YTN; PAM sequence: CTG
acagatatgaggggtaaaat

SEQ ID NO: 202269 - DNA, 20 bp, Artificial Sequence
  Description of Artificial Sequence: Synthetic oligonucleotide
  Target: LAMA2; (-) strand; PAM type: YTN; PAM sequence: TTG
tagccgataactgacagata

SEQ ID NO: 202270 - DNA, 20 bp, Artificial Sequence
  Description of Artificial Sequence: Synthetic oligonucleotide
  Target: LAMA2; (-) strand; PAM type: YTN; PAM sequence: CTT
gtagccgataactgacagat

SEQ ID NO: 202271 - DNA, 20 bp, Artificial Sequence
  Description of Artificial Sequence: Synthetic oligonucleotide
  Target: LAMA2; (-) strand; PAM type: YTN; PAM sequence: TTG
gacttgtagccgataactga

SEQ ID NO: 202272 - DNA, 20 bp, Artificial Sequence
  Description of Artificial Sequence: Synthetic oligonucleotide
  Target: LAMA2; (-) strand; PAM type: YTN; PAM sequence: CTT
ggacttgtagccgataactg

SEQ ID NO: 202273 - DNA, 20 bp, Artificial Sequence
  Description of Artificial Sequence: Synthetic oligonucleotide
  Target: LAMA2; (-) strand; PAM type: YTN; PAM sequence: CTG
ccccttggacttgtagccga

SEQ ID NO: 202274 - DNA, 20 bp, Artificial Sequence
  Description of Artificial Sequence: Synthetic oligonucleotide
  Target: LAMA2; (-) strand; PAM type: YTN; PAM sequence: TTC
cccctgccccttggacttgt

SEQ ID NO: 202275 - DNA, 20 bp, Artificial Sequence
  Description of Artificial Sequence: Synthetic oligonucleotide
  Target: LAMA2; (-) strand; PAM type: YTN; PAM sequence: CTT
ccccctgccccttggacttg

SEQ ID NO: 202276 - DNA, 20 bp, Artificial Sequence
  Description of Artificial Sequence: Synthetic oligonucleotide
  Target: LAMA2; (-) strand; PAM type: YTN; PAM sequence: TTG
cacttccccctgccccttgg

SEQ ID NO: 202277 - DNA, 20 bp, Artificial Sequence
  Description of Artificial Sequence: Synthetic oligonucleotide
  Target: LAMA2; (-) strand; PAM type: YTN; PAM sequence: CTT
gcacttccccctgccccttg

SEQ ID NO: 202278 - DNA, 20 bp, Artificial Sequence
  Description of Artificial Sequence: Synthetic oligonucleotide
  Target: LAMA2; (-) strand; PAM type: YTN; PAM sequence: TTC
cagcaagatacatcacttgc

SEQ ID NO: 202279 - DNA, 20 bp, Artificial Sequence
  Description of Artificial Sequence: Synthetic oligonucleotide
  Target: LAMA2; (-) strand; PAM type: YTN; PAM sequence: CTT
ccagcaagatacatcacttg

SEQ ID NO: 202280 - DNA, 20 bp, Artificial Sequence
  Description of Artificial Sequence: Synthetic oligonucleotide
  Target: LAMA2; (-) strand; PAM type: YTN; PAM sequence: CTG
agacttccagcaagatacat

SEQ ID NO: 202281 - DNA, 20 bp, Artificial Sequence
  Description of Artificial Sequence: Synthetic oligonucleotide
  Target: LAMA2; (-) strand; PAM type: YTN; PAM sequence: CTG
accctgagacttccagcaag

SEQ ID NO: 202282 - DNA, 20 bp, Artificial Sequence
  Description of Artificial Sequence: Synthetic oligonucleotide
  Target: LAMA2; (-) strand; PAM type: YTN; PAM sequence: CTC
ctgaccctgagacttccagc

SEQ ID NO: 202283 - DNA, 20 bp, Artificial Sequence
  Description of Artificial Sequence: Synthetic oligonucleotide
  Target: LAMA2; (-) strand; PAM type: YTN; PAM sequence: TTG
aatgagagcctcctgaccct

SEQ ID NO: 202284 - DNA, 20 bp, Artificial Sequence
  Description of Artificial Sequence: Synthetic oligonucleotide
  Target: LAMA2; (-) strand; PAM type: YTN; PAM sequence: TTT
gaatgagagcctcctgaccc

SEQ ID NO: 202285 - DNA, 20 bp, Artificial Sequence
  Description of Artificial Sequence: Synthetic oligonucleotide
  Target: LAMA2; (-) strand; PAM type: YTN; PAM sequence: CTT
tgaatgagagcctcctgacc

SEQ ID NO: 202286 - DNA, 20 bp, Artificial Sequence
  Description of Artificial Sequence: Synthetic oligonucleotide
  Target: LAMA2; (-) strand; PAM type: YTN; PAM sequence: CTC
tttgaatgagagcctcctga

SEQ ID NO: 202287 - DNA, 20 bp, Artificial Sequence
  Description of Artificial Sequence: Synthetic oligonucleotide
  Target: LAMA2; (-) strand; PAM type: YTN; PAM sequence: CTG
cctctttgaatgagagcctc

SEQ ID NO: 202288 - DNA, 20 bp, Artificial Sequence
  Description of Artificial Sequence: Synthetic oligonucleotide
  Target: LAMA2; (-) strand; PAM type: YTN; PAM sequence: TTC
cagagacctgcctctttgaa

SEQ ID NO: 202289 - DNA, 20 bp, Artificial Sequence
  Description of Artificial Sequence: Synthetic oligonucleotide
  Target: LAMA2; (-) strand; PAM type: YTN; PAM sequence: CTG
catcattccagagacctgcc

SEQ ID NO: 202290 - DNA, 20 bp, Artificial Sequence
  Description of Artificial Sequence: Synthetic oligonucleotide
  Target: LAMA2; (-) strand; PAM type: YTN; PAM sequence: TTG
cagctgcatcattccagaga

SEQ ID NO: 202291 - DNA, 20 bp, Artificial Sequence
  Description of Artificial Sequence: Synthetic oligonucleotide
  Target: LAMA2; (-) strand; PAM type: YTN; PAM sequence: CTT
gcagctgcatcattccagag

SEQ ID NO: 202292 - DNA, 20 bp, Artificial Sequence
  Description of Artificial Sequence: Synthetic oligonucleotide
  Target: LAMA2; (-) strand; PAM type: YTN; PAM sequence: CTA
atggcttgcagctgcatcat

SEQ ID NO: 202293 - DNA, 20 bp, Artificial Sequence
  Description of Artificial Sequence: Synthetic oligonucleotide
  Target: LAMA2; (-) strand; PAM type: YTN; PAM sequence: CTG
ctaatggcttgcagctgcat

SEQ ID NO: 202294 - DNA, 20 bp, Artificial Sequence
  Description of Artificial Sequence: Synthetic oligonucleotide
  Target: LAMA2; (-) strand; PAM type: YTN; PAM sequence: TTG
gctgctaatggcttgcagct

SEQ ID NO: 202295 - DNA, 20 bp, Artificial Sequence
  Description of Artificial Sequence: Synthetic oligonucleotide
  Target: LAMA2; (-) strand; PAM type: YTN; PAM sequence: CTG
aggcaagggttggctgctaa

SEQ ID NO: 202296 - DNA, 20 bp, Artificial Sequence
  Description of Artificial Sequence: Synthetic oligonucleotide
  Target: LAMA2; (-) strand; PAM type: YTN; PAM sequence: CTC
agctgaggcaagggttggct

SEQ ID NO: 202297 - DNA, 20 bp, Artificial Sequence
  Description of Artificial Sequence: Synthetic oligonucleotide
  Target: LAMA2; (-) strand; PAM type: YTN; PAM sequence: CTC
tcagctgaggcaagggttgg

SEQ ID NO: 202298 - DNA, 20 bp, Artificial Sequence
  Description of Artificial Sequence: Synthetic oligonucleotide
  Target: LAMA2; (-) strand; PAM type: YTN; PAM sequence: CTG
gtacccatctctcagctgag

SEQ ID NO: 202299 - DNA, 20 bp, Artificial Sequence
  Description of Artificial Sequence: Synthetic oligonucleotide
  Target: LAMA2; (-) strand; PAM type: YTN; PAM sequence: TTC
atcctggtacccatctctca

SEQ ID NO: 202300 - DNA, 20 bp, Artificial Sequence
  Description of Artificial Sequence: Synthetic oligonucleotide
  Target: LAMA2; (-) strand; PAM type: YTN; PAM sequence: TTT
catcctggtacccatctctc

SEQ ID NO: 202301 - DNA, 20 bp, Artificial Sequence
  Description of Artificial Sequence: Synthetic oligonucleotide
  Target: LAMA2; (-) strand; PAM type: YTN; PAM sequence: CTT
tcatcctggtacccatctct

SEQ ID NO: 202302 - DNA, 20 bp, Artificial Sequence
  Description of Artificial Sequence: Synthetic oligonucleotide
  Target: LAMA2; (-) strand; PAM type: YTN; PAM sequence: TTA
ccaggcctttcatcctggta

SEQ ID NO: 202303 - DNA, 20 bp, Artificial Sequence
  Description of Artificial Sequence: Synthetic oligonucleotide
  Target: LAMA2; (-) strand; PAM type: YTN; PAM sequence: TTT
accaggcctttcatcctggt

SEQ ID NO: 202304 - DNA, 20 bp, Artificial Sequence
  Description of Artificial Sequence: Synthetic oligonucleotide
  Target: LAMA2; (-) strand; PAM type: YTN; PAM sequence: CTT
taccaggcctttcatcctgg

SEQ ID NO: 202305 - DNA, 20 bp, Artificial Sequence
  Description of Artificial Sequence: Synthetic oligonucleotide
  Target: LAMA2; (-) strand; PAM type: YTN; PAM sequence: CTG
gtggcacagccataaccctt

SEQ ID NO: 202306 - DNA, 20 bp, Artificial Sequence
  Description of Artificial Sequence: Synthetic oligonucleotide
  Target: LAMA2; (-) strand; PAM type: YTN; PAM sequence: TTC
cactggtggcacagccataa

SEQ ID NO: 202307 - DNA, 20 bp, Artificial Sequence
  Description of Artificial Sequence: Synthetic oligonucleotide
  Target: LAMA2; (-) strand; PAM type: YTN; PAM sequence: TTC
ccagtgtaggaaattccact

SEQ ID NO: 202308 - DNA, 20 bp, Artificial Sequence
  Description of Artificial Sequence: Synthetic oligonucleotide
  Target: LAMA2; (-) strand; PAM type: YTN; PAM sequence: CTA
gcatgtatattcccagtgta

SEQ ID NO: 202309 - DNA, 20 bp, Artificial Sequence
  Description of Artificial Sequence: Synthetic oligonucleotide
  Target: LAMA2; (-) strand; PAM type: YTN; PAM sequence: CTA
tgcacctagcatgtatattc

SEQ ID NO: 202310 - DNA, 20 bp, Artificial Sequence
  Description of Artificial Sequence: Synthetic oligonucleotide
  Target: LAMA2; (-) strand; PAM type: YTN; PAM sequence: TTC
tatgcacctagcatgtatat

SEQ ID NO: 202311 - DNA, 20 bp, Artificial Sequence
  Description of Artificial Sequence: Synthetic oligonucleotide
  Target: LAMA2; (-) strand; PAM type: YTN; PAM sequence: CTA
acattctatgcacctagcat

SEQ ID NO: 202312 - DNA, 20 bp, Artificial Sequence
  Description of Artificial Sequence: Synthetic oligonucleotide
  Target: LAMA2; (-) strand; PAM type: YTN; PAM sequence: CTC
acacctaacattctatgcac

SEQ ID NO: 202313 - DNA, 20 bp, Artificial Sequence
  Description of Artificial Sequence: Synthetic oligonucleotide
  Target: LAMA2; (-) strand; PAM type: YTN; PAM sequence: CTC
tcacacctaacattctatgc

SEQ ID NO: 202314 - DNA, 20 bp, Artificial Sequence
  Description of Artificial Sequence: Synthetic oligonucleotide
  Target: LAMA2; (-) strand; PAM type: YTN; PAM sequence: CTC
ccctctcacacctaacattc

SEQ ID NO: 202315 - DNA, 20 bp, Artificial Sequence
  Description of Artificial Sequence: Synthetic oligonucleotide
  Target: LAMA2; (-) strand; PAM type: YTN; PAM sequence: CTG
gtctcccctctcacacctaa

SEQ ID NO: 202316 - DNA, 20 bp, Artificial Sequence
  Description of Artificial Sequence: Synthetic oligonucleotide
  Target: LAMA2; (-) strand; PAM type: YTN; PAM sequence: TTC
caacaggctggtctcccctc

SEQ ID NO: 202317 - DNA, 20 bp, Artificial Sequence
  Description of Artificial Sequence: Synthetic oligonucleotide
  Target: LAMA2; (-) strand; PAM type: YTN; PAM sequence: TTT
ccaacaggctggtctcccct

SEQ ID NO: 202318 - DNA, 20 bp, Artificial Sequence
  Description of Artificial Sequence: Synthetic oligonucleotide
  Target: LAMA2; (-) strand; PAM type: YTN; PAM sequence: CTT
tccaacaggctggtctcccc

SEQ ID NO: 202319 - DNA, 20 bp, Artificial Sequence
  Description of Artificial Sequence: Synthetic oligonucleotide
  Target: LAMA2; (-) strand; PAM type: YTN; PAM sequence: TTA
atgaatactttccaacaggc

SEQ ID NO: 202320 - DNA, 20 bp, Artificial Sequence
  Description of Artificial Sequence: Synthetic oligonucleotide
  Target: LAMA2; (-) strand; PAM type: YTN; PAM sequence: TTG
acaaatatgcattaatgaat

SEQ ID NO: 202321 - DNA, 20 bp, Artificial Sequence
  Description of Artificial Sequence: Synthetic oligonucleotide
  Target: LAMA2; (-) strand; PAM type: YTN; PAM sequence: CTT
gacaaatatgcattaatgaa

SEQ ID NO: 202322 - DNA, 20 bp, Artificial Sequence
  Description of Artificial Sequence: Synthetic oligonucleotide
  Target: LAMA2; (-) strand; PAM type: YTN; PAM sequence: TTC
ttgacaaatatgcattaatg

SEQ ID NO: 202323 - DNA, 20 bp, Artificial Sequence
  Description of Artificial Sequence: Synthetic oligonucleotide
  Target: LAMA2; (-) strand; PAM type: YTN; PAM sequence: CTA
gaattcttgacaaatatgca

SEQ ID NO: 202324 - DNA, 20 bp, Artificial Sequence
  Description of Artificial Sequence: Synthetic oligonucleotide
  Target: LAMA2; (-) strand; PAM type: YTN; PAM sequence: TTA
ccagctagaattcttgacaa

SEQ ID NO: 202325 - DNA, 20 bp, Artificial Sequence
  Description of Artificial Sequence: Synthetic oligonucleotide
  Target: LAMA2; (-) strand; PAM type: YTN; PAM sequence: TTA
ataaagtgttaccagctaga

SEQ ID NO: 202326 - DNA, 20 bp, Artificial Sequence
  Description of Artificial Sequence: Synthetic oligonucleotide
  Target: LAMA2; (-) strand; PAM type: YTN; PAM sequence: TTT
aataaagtgttaccagctag

SEQ ID NO: 202327 - DNA, 20 bp, Artificial Sequence
  Description of Artificial Sequence: Synthetic oligonucleotide
  Target: LAMA2; (-) strand; PAM type: YTN; PAM sequence: CTA
atgtttaataaagtgttacc

SEQ ID NO: 202328 - DNA, 20 bp, Artificial Sequence
  Description of Artificial Sequence: Synthetic oligonucleotide
  Target: LAMA2; (-) strand; PAM type: YTN; PAM sequence: TTC
aaagcacataaaatagcaat

SEQ ID NO: 202329 - DNA, 20 bp, Artificial Sequence
  Description of Artificial Sequence: Synthetic oligonucleotide
  Target: LAMA2; (-) strand; PAM type: YTN; PAM sequence: CTT
caaagcacataaaatagcaa

SEQ ID NO: 202330 - DNA, 20 bp, Artificial Sequence
  Description of Artificial Sequence: Synthetic oligonucleotide
  Target: LAMA2; (-) strand; PAM type: YTN; PAM sequence: TTG
cttcaaagcacataaaatag

SEQ ID NO: 202331 - DNA, 20 bp, Artificial Sequence
  Description of Artificial Sequence: Synthetic oligonucleotide
  Target: LAMA2; (-) strand; PAM type: YTN; PAM sequence: TTC
aaacagtgtaattgcttcaa

SEQ ID NO: 202332 - DNA, 20 bp, Artificial Sequence
  Description of Artificial Sequence: Synthetic oligonucleotide
  Target: LAMA2; (-) strand; PAM type: YTN; PAM sequence: TTT
caaacagtgtaattgcttca

SEQ ID NO: 202333 - DNA, 20 bp, Artificial Sequence
  Description of Artificial Sequence: Synthetic oligonucleotide
  Target: LAMA2; (-) strand; PAM type: YTN; PAM sequence: TTT
tcaaacagtgtaattgcttc

SEQ ID NO: 202334 - DNA, 20 bp, Artificial Sequence
  Description of Artificial Sequence: Synthetic oligonucleotide
  Target: LAMA2; (-) strand; PAM type: YTN; PAM sequence: TTT
ttcaaacagtgtaattgctt

SEQ ID NO: 202335 - DNA, 20 bp, Artificial Sequence
  Description of Artificial Sequence: Synthetic oligonucleotide
  Target: LAMA2; (-) strand; PAM type: YTN; PAM sequence: TTA
caaaataaggtttttcaaac

SEQ ID NO: 202336 - DNA, 20 bp, Artificial Sequence
  Description of Artificial Sequence: Synthetic oligonucleotide
  Target: LAMA2; (-) strand; PAM type: YTN; PAM sequence: TTT
acaaaataaggtttttcaaa

SEQ ID NO: 202337 - DNA, 20 bp, Artificial Sequence
  Description of Artificial Sequence: Synthetic oligonucleotide
  Target: LAMA2; (-) strand; PAM type: YTN; PAM sequence: TTT
tacaaaataaggtttttcaa

SEQ ID NO: 202338 - DNA, 20 bp, Artificial Sequence
  Description of Artificial Sequence: Synthetic oligonucleotide
  Target: LAMA2; (-) strand; PAM type: YTN; PAM sequence: TTT
ttacaaaataaggtttttca

SEQ ID NO: 202339 - DNA, 20 bp, Artificial Sequence
  Description of Artificial Sequence: Synthetic oligonucleotide
  Target: LAMA2; (-) strand; PAM type: YTN; PAM sequence: TTT
tttacaaaataaggtttttc

SEQ ID NO: 202340 - DNA, 20 bp, Artificial Sequence
  Description of Artificial Sequence: Synthetic oligonucleotide
  Target: LAMA2; (-) strand; PAM type: YTN; PAM sequence: TTT
ttttacaaaataaggttttt

SEQ ID NO: 202341 - DNA, 20 bp, Artificial Sequence
  Description of Artificial Sequence: Synthetic oligonucleotide
  Target: LAMA2; (-) strand; PAM type: YTN; PAM sequence: TTT
tttttacaaaataaggtttt

SEQ ID NO: 202342 - DNA, 20 bp, Artificial Sequence
  Description of Artificial Sequence: Synthetic oligonucleotide
  Target: LAMA2; (-) strand; PAM type: YTN; PAM sequence: TTT
ttttttacaaaataaggttt

SEQ ID NO: 202343 - DNA, 20 bp, Artificial Sequence
  Description of Artificial Sequence: Synthetic oligonucleotide
  Target: LAMA2; (-) strand; PAM type: YTN; PAM sequence: CTG
tgagacagtgaatagaacag

SEQ ID NO: 202344 - DNA, 20 bp, Artificial Sequence
  Description of Artificial Sequence: Synthetic oligonucleotide
  Target: LAMA2; (-) strand; PAM type: YTN; PAM sequence: CTA
aatctgtgagacagtgaata

SEQ ID NO: 202345 - DNA, 20 bp, Artificial Sequence
  Description of Artificial Sequence: Synthetic oligonucleotide
  Target: LAMA2; (-) strand; PAM type: YTN; PAM sequence: CTG
tcctaaatctgtgagacagt

SEQ ID NO: 202346 - DNA, 20 bp, Artificial Sequence
  Description of Artificial Sequence: Synthetic oligonucleotide
  Target: LAMA2; (-) strand; PAM type: YTN; PAM sequence: TTA
ataaactgtcctaaatctgt

SEQ ID NO: 202347 - DNA, 20 bp, Artificial Sequence
  Description of Artificial Sequence: Synthetic oligonucleotide
  Target: LAMA2; (-) strand; PAM type: YTN; PAM sequence: TTA
attaataaactgtcctaaat

SEQ ID NO: 202348 - DNA, 20 bp, Artificial Sequence
  Description of Artificial Sequence: Synthetic oligonucleotide
  Target: LAMA2; (-) strand; PAM type: YTN; PAM sequence: CTT
aattaataaactgtcctaaa

SEQ ID NO: 202349 - DNA, 20 bp, Artificial Sequence
  Description of Artificial Sequence: Synthetic oligonucleotide
  Target: LAMA2; (-) strand; PAM type: YTN; PAM sequence: TTC
ttaattaataaactgtccta

SEQ ID NO: 202350 - DNA, 20 bp, Artificial Sequence
  Description of Artificial Sequence: Synthetic oligonucleotide
  Target: LAMA2; (-) strand; PAM type: YTN; PAM sequence: CTA
gtgttcttaattaataaact

SEQ ID NO: 202351 - DNA, 20 bp, Artificial Sequence
  Description of Artificial Sequence: Synthetic oligonucleotide
  Target: LAMA2; (-) strand; PAM type: YTN; PAM sequence: TTG
aaatctagtgttcttaatta

SEQ ID NO: 202352 - DNA, 20 bp, Artificial Sequence
  Description of Artificial Sequence: Synthetic oligonucleotide
  Target: LAMA2; (-) strand; PAM type: YTN; PAM sequence: CTT
gaaatctagtgttcttaatt

SEQ ID NO: 202353 - DNA, 20 bp, Artificial Sequence
  Description of Artificial Sequence: Synthetic oligonucleotide
  Target: LAMA2; (-) strand; PAM type: YTN; PAM sequence: TTG
acttgaaatctagtgttctt

SEQ ID NO: 202354 - DNA, 20 bp, Artificial Sequence
  Description of Artificial Sequence: Synthetic oligonucleotide
  Target: LAMA2; (-) strand; PAM type: YTN; PAM sequence: TTT
gacttgaaatctagtgttct

SEQ ID NO: 202355 - DNA, 20 bp, Artificial Sequence
  Description of Artificial Sequence: Synthetic oligonucleotide
  Target: LAMA2; (-) strand; PAM type: YTN; PAM sequence: CTG
tttgacttgaaatctagtgt

SEQ ID NO: 202356 - DNA, 20 bp, Artificial Sequence
  Description of Artificial Sequence: Synthetic oligonucleotide
  Target: LAMA2; (-) strand; PAM type: YTN; PAM sequence: TTA
aggtcaggtctgtttgactt

SEQ ID NO: 202357 - DNA, 20 bp, Artificial Sequence
  Description of Artificial Sequence: Synthetic oligonucleotide
  Target: LAMA2; (-) strand; PAM type: YTN; PAM sequence: TTT
aaggtcaggtctgtttgact

SEQ ID NO: 202358 - DNA, 20 bp, Artificial Sequence
  Description of Artificial Sequence: Synthetic oligonucleotide
  Target: LAMA2; (-) strand; PAM type: YTN; PAM sequence: TTA
tacagcaaagaacaaggtca

SEQ ID NO: 202359 - DNA, 20 bp, Artificial Sequence
  Description of Artificial Sequence: Synthetic oligonucleotide
  Target: LAMA2; (-) strand; PAM type: YTN; PAM sequence: TTT
atacagcaaagaacaaggtc

SEQ ID NO: 202360 - DNA, 20 bp, Artificial Sequence
  Description of Artificial Sequence: Synthetic oligonucleotide
  Target: LAMA2; (-) strand; PAM type: YTN; PAM sequence: CTC
atacaaaaccatttatacag

SEQ ID NO: 202361 - DNA, 20 bp, Artificial Sequence
  Description of Artificial Sequence: Synthetic oligonucleotide
  Target: LAMA2; (-) strand; PAM type: YTN; PAM sequence: TTA
agtaactcatacaaaaccat

SEQ ID NO: 202362 - DNA, 20 bp, Artificial Sequence
  Description of Artificial Sequence: Synthetic oligonucleotide
  Target: LAMA2; (-) strand; PAM type: YTN; PAM sequence: CTC
agtgtggttaagtaactcat

SEQ ID NO: 202363 - DNA, 20 bp, Artificial Sequence
  Description of Artificial Sequence: Synthetic oligonucleotide
  Target: LAMA2; (-) strand; PAM type: YTN; PAM sequence: TTG
aggctcagtgtggttaagta

SEQ ID NO: 202364 - DNA, 20 bp, Artificial Sequence
  Description of Artificial Sequence: Synthetic oligonucleotide
  Target: LAMA2; (-) strand; PAM type: YTN; PAM sequence: TTT
gaggctcagtgtggttaagt

SEQ ID NO: 202365 - DNA, 20 bp, Artificial Sequence
  Description of Artificial Sequence: Synthetic oligonucleotide
  Target: LAMA2; (-) strand; PAM type: YTN; PAM sequence: CTG
atgggaatttgaggctcagt

SEQ ID NO: 202366 - DNA, 20 bp, Artificial Sequence
  Description of Artificial Sequence: Synthetic oligonucleotide
  Target: LAMA2; (-) strand; PAM type: YTN; PAM sequence: TTA
taatccacatataactgatg

SEQ ID NO: 202367 - DNA, 20 bp, Artificial Sequence
  Description of Artificial Sequence: Synthetic oligonucleotide
  Target: LAMA2; (-) strand; PAM type: YTN; PAM sequence: TTC
acaacaagcatgaggcagac

SEQ ID NO: 202368 - DNA, 20 bp, Artificial Sequence
  Description of Artificial Sequence: Synthetic oligonucleotide
  Target: LAMA2; (-) strand; PAM type: YTN; PAM sequence: TTG
aatgttcacaacaagcatga

SEQ ID NO: 202369 - DNA, 20 bp, Artificial Sequence
  Description of Artificial Sequence: Synthetic oligonucleotide
  Target: LAMA2; (-) strand; PAM type: YTN; PAM sequence: TTA
cattgaatgttcacaacaag

SEQ ID NO: 202370 - DNA, 20 bp, Artificial Sequence
  Description of Artificial Sequence: Synthetic oligonucleotide
  Target: LAMA2; (-) strand; PAM type: YTN; PAM sequence: TTC
atatgaatgattacattgaa

SEQ ID NO: 202371 - DNA, 20 bp, Artificial Sequence
  Description of Artificial Sequence: Synthetic oligonucleotide
  Target: LAMA2; (-) strand; PAM type: YTN; PAM sequence: CTT
catatgaatgattacattga

SEQ ID NO: 202372 - DNA, 20 bp, Artificial Sequence
  Description of Artificial Sequence: Synthetic oligonucleotide
  Target: LAMA2; (-) strand; PAM type: YTN; PAM sequence: TTC
ttcatatgaatgattacatt

SEQ ID NO: 202373 - DNA, 20 bp, Artificial Sequence
  Description of Artificial Sequence: Synthetic oligonucleotide
  Target: LAMA2; (-) strand; PAM type: YTN; PAM sequence: CTT
cttcatatgaatgattacat

SEQ ID NO: 202374 - DNA, 20 bp, Artificial Sequence
  Description of Artificial Sequence: Synthetic oligonucleotide
  Target: LAMA2; (-) strand; PAM type: YTN; PAM sequence: TTG
cttcttcatatgaatgatta

SEQ ID NO: 202375 - DNA, 20 bp, Artificial Sequence
  Description of Artificial Sequence: Synthetic oligonucleotide
  Target: LAMA2; (-) strand; PAM type: YTN; PAM sequence: TTC
attgcttcttcatatgaatg

SEQ ID NO: 202376 - DNA, 20 bp, Artificial Sequence
  Description of Artificial Sequence: Synthetic oligonucleotide
  Target: LAMA2; (-) strand; PAM type: YTN; PAM sequence: CTG
tgttcattgcttcttcatat

SEQ ID NO: 202377 - DNA, 20 bp, Artificial Sequence
  Description of Artificial Sequence: Synthetic oligonucleotide
  Target: LAMA2; (-) strand; PAM type: YTN; PAM sequence: TTA
tgtgcaccagaccctgtgtt

SEQ ID NO: 202378 - DNA, 20 bp, Artificial Sequence
  Description of Artificial Sequence: Synthetic oligonucleotide
  Target: LAMA2; (-) strand; PAM type: YTN; PAM sequence: TTT
atgtgcaccagaccctgtgt

SEQ ID NO: 202379 - DNA, 20 bp, Artificial Sequence
  Description of Artificial Sequence: Synthetic oligonucleotide
  Target: LAMA2; (-) strand; PAM type: YTN; PAM sequence: TTG
aacatttatgtgcaccagac

SEQ ID NO: 202380 - DNA, 20 bp, Artificial Sequence
  Description of Artificial Sequence: Synthetic oligonucleotide
  Target: LAMA2; (-) strand; PAM type: YTN; PAM sequence: TTG
ttgaacatttatgtgcacca

SEQ ID NO: 202381 - DNA, 20 bp, Artificial Sequence
  Description of Artificial Sequence: Synthetic oligonucleotide
  Target: LAMA2; (-) strand; PAM type: YTN; PAM sequence: TTT
gttgaacatttatgtgcacc

SEQ ID NO: 202382 - DNA, 20 bp, Artificial Sequence
  Description of Artificial Sequence: Synthetic oligonucleotide
  Target: LAMA2; (-) strand; PAM type: YTN; PAM sequence: CTA
tcatttgttgaacatttatg

SEQ ID NO: 202383 - DNA, 20 bp, Artificial Sequence
  Description of Artificial Sequence: Synthetic oligonucleotide
  Target: LAMA2; (-) strand; PAM type: YTN; PAM sequence: CTC
atccagaaggaagtaatgtc

SEQ ID NO: 202384 - DNA, 20 bp, Artificial Sequence
  Description of Artificial Sequence: Synthetic oligonucleotide
  Target: LAMA2; (-) strand; PAM type: YTN; PAM sequence: TTG
ctcatccagaaggaagtaat

SEQ ID NO: 202385 - DNA, 20 bp, Artificial Sequence
  Description of Artificial Sequence: Synthetic oligonucleotide
  Target: LAMA2; (-) strand; PAM type: YTN; PAM sequence: TTT
gctcatccagaaggaagtaa

SEQ ID NO: 202386 - DNA, 20 bp, Artificial Sequence
  Description of Artificial Sequence: Synthetic oligonucleotide
  Target: LAMA2; (-) strand; PAM type: YTN; PAM sequence: TTT
tgctcatccagaaggaagta

SEQ ID NO: 202387 - DNA, 20 bp, Artificial Sequence
  Description of Artificial Sequence: Synthetic oligonucleotide
  Target: LAMA2; (-) strand; PAM type: YTN; PAM sequence: CTG
aaagcatcaaggttttgctc

SEQ ID NO: 202388 - DNA, 20 bp, Artificial Sequence
  Description of Artificial Sequence: Synthetic oligonucleotide
  Target: LAMA2; (-) strand; PAM type: YTN; PAM sequence: CTA
ctgaaagcatcaaggttttg

SEQ ID NO: 202389 - DNA, 20 bp, Artificial Sequence
  Description of Artificial Sequence: Synthetic oligonucleotide
  Target: LAMA2; (-) strand; PAM type: YTN; PAM sequence: TTC
tactgaaagcatcaaggttt

SEQ ID NO: 202390 - DNA, 20 bp, Artificial Sequence
  Description of Artificial Sequence: Synthetic oligonucleotide
  Target: LAMA2; (-) strand; PAM type: YTN; PAM sequence: CTT
ctactgaaagcatcaaggtt

SEQ ID NO: 202391 - DNA, 20 bp, Artificial Sequence
  Description of Artificial Sequence: Synthetic oligonucleotide
  Target: LAMA2; (-) strand; PAM type: YTN; PAM sequence: TTC
caaataccttctactgaaag

SEQ ID NO: 202392 - DNA, 20 bp, Artificial Sequence
  Description of Artificial Sequence: Synthetic oligonucleotide
  Target: LAMA2; (-) strand; PAM type: YTN; PAM sequence: TTC
aaccatagttccaaatacct

SEQ ID NO: 202393 - DNA, 20 bp, Artificial Sequence
  Description of Artificial Sequence: Synthetic oligonucleotide
  Target: LAMA2; (-) strand; PAM type: YTN; PAM sequence: CTA
gtcccatcaatacccccaga

SEQ ID NO: 202394 - DNA, 20 bp, Artificial Sequence
  Description of Artificial Sequence: Synthetic oligonucleotide
  Target: LAMA2; (-) strand; PAM type: YTN; PAM sequence: CTC
tagtcccatcaataccccca

SEQ ID NO: 202395 - DNA, 20 bp, Artificial Sequence
  Description of Artificial Sequence: Synthetic oligonucleotide
  Target: LAMA2; (-) strand; PAM type: YTN; PAM sequence: CTG
actctagtcccatcaatacc

SEQ ID NO: 202396 - DNA, 20 bp, Artificial Sequence
  Description of Artificial Sequence: Synthetic oligonucleotide
  Target: LAMA2; (-) strand; PAM type: YTN; PAM sequence: CTC
atcctgactctagtcccatc

SEQ ID NO: 202397 - DNA, 20 bp, Artificial Sequence
  Description of Artificial Sequence: Synthetic oligonucleotide
  Target: LAMA2; (-) strand; PAM type: YTN; PAM sequence: TTC
atccacctcatcctgactct

SEQ ID NO: 202398 - DNA, 20 bp, Artificial Sequence
  Description of Artificial Sequence: Synthetic oligonucleotide
  Target: LAMA2; (-) strand; PAM type: YTN; PAM sequence: TTT
catccacctcatcctgactc

SEQ ID NO: 202399 - DNA, 20 bp, Artificial Sequence
  Description of Artificial Sequence: Synthetic oligonucleotide
  Target: LAMA2; (-) strand; PAM type: YTN; PAM sequence: CTG
gcatttcatccacctcatcc

SEQ ID NO: 202400 - DNA, 20 bp, Artificial Sequence
  Description of Artificial Sequence: Synthetic oligonucleotide
  Target: LAMA2; (-) strand; PAM type: YTN; PAM sequence: CTC
aagtcatacagatgaaagta

SEQ ID NO: 202401 - DNA, 20 bp, Artificial Sequence
  Description of Artificial Sequence: Synthetic oligonucleotide
  Target: LAMA2; (-) strand; PAM type: YTN; PAM sequence: CTC
tcaagtcatacagatgaaag

SEQ ID NO: 202402 - DNA, 20 bp, Artificial Sequence
  Description of Artificial Sequence: Synthetic oligonucleotide
  Target: LAMA2; (-) strand; PAM type: YTN; PAM sequence: TTG
atgcatacactctcaagtca

SEQ ID NO: 202403 - DNA, 20 bp, Artificial Sequence
  Description of Artificial Sequence: Synthetic oligonucleotide
  Target: LAMA2; (-) strand; PAM type: YTN; PAM sequence: TTT
gatgcatacactctcaagtc

SEQ ID NO: 202404 - DNA, 20 bp, Artificial Sequence
  Description of Artificial Sequence: Synthetic oligonucleotide
  Target: LAMA2; (-) strand; PAM type: YTN; PAM sequence: CTC
gagggtgcaaaatttgatgc

SEQ ID NO: 202405 - DNA, 20 bp, Artificial Sequence
  Description of Artificial Sequence: Synthetic oligonucleotide
  Target: LAMA2; (-) strand; PAM type: YTN; PAM sequence: TTC
aatgtggaggtgagagaggt

SEQ ID NO: 202406 - DNA, 20 bp, Artificial Sequence
  Description of Artificial Sequence: Synthetic oligonucleotide
  Target: LAMA2; (-) strand; PAM type: YTN; PAM sequence: TTT
caatgtggaggtgagagagg

SEQ ID NO: 202407 - DNA, 20 bp, Artificial Sequence
  Description of Artificial Sequence: Synthetic oligonucleotide
  Target: LAMA2; (-) strand; PAM type: YTN; PAM sequence: TTT
tcaatgtggaggtgagagag

SEQ ID NO: 202408 - DNA, 20 bp, Artificial Sequence
  Description of Artificial Sequence: Synthetic oligonucleotide
  Target: LAMA2; (-) strand; PAM type: YTN; PAM sequence: TTT
ttcaatgtggaggtgagaga

SEQ ID NO: 202409 - DNA, 20 bp, Artificial Sequence
  Description of Artificial Sequence: Synthetic oligonucleotide
  Target: LAMA2; (-) strand; PAM type: YTN; PAM sequence: TTT
tttcaatgtggaggtgagag

SEQ ID NO: 202410 - DNA, 20 bp, Artificial Sequence
  Description of Artificial Sequence: Synthetic oligonucleotide
  Target: LAMA2; (-) strand; PAM type: YTN; PAM sequence: TTT
ttttcaatgtggaggtgaga

SEQ ID NO: 202411 - DNA, 20 bp, Artificial Sequence
  Description of Artificial Sequence: Synthetic oligonucleotide
  Target: LAMA2; (-) strand; PAM type: YTN; PAM sequence: CTG
gcatgtatttttttcaatgt

SEQ ID NO: 202412 - DNA, 20 bp, Artificial Sequence
  Description of Artificial Sequence: Synthetic oligonucleotide
  Target: LAMA2; (-) strand; PAM type: YTN; PAM sequence: TTA
atctggcatgtatttttttc

SEQ ID NO: 202413 - DNA, 20 bp, Artificial Sequence
  Description of Artificial Sequence: Synthetic oligonucleotide
  Target: LAMA2; (-) strand; PAM type: YTN; PAM sequence: TTT
aatctggcatgtattttttt

SEQ ID NO: 202414 - DNA, 20 bp, Artificial Sequence
  Description of Artificial Sequence: Synthetic oligonucleotide
  Target: LAMA2; (-) strand; PAM type: YTN; PAM sequence: TTT
taatctggcatgtatttttt

SEQ ID NO: 202415 - DNA, 20 bp, Artificial Sequence
  Description of Artificial Sequence: Synthetic oligonucleotide
  Target: LAMA2; (-) strand; PAM type: YTN; PAM sequence: TTT
ttaatctggcatgtattttt

SEQ ID NO: 202416 - DNA, 20 bp, Artificial Sequence
  Description of Artificial Sequence: Synthetic oligonucleotide
  Target: LAMA2; (-) strand; PAM type: YTN; PAM sequence: TTT
tttaatctggcatgtatttt

SEQ ID NO: 202417 - DNA, 20 bp, Artificial Sequence
  Description of Artificial Sequence: Synthetic oligonucleotide
  Target: LAMA2; (-) strand; PAM type: YTN; PAM sequence: TTT
ttttaatctggcatgtattt

SEQ ID NO: 202418 - DNA, 20 bp, Artificial Sequence
  Description of Artificial Sequence: Synthetic oligonucleotide
  Target: LAMA2; (-) strand; PAM type: YTN; PAM sequence: TTT
tttttaatctggcatgtatt

SEQ ID NO: 202419 - DNA, 20 bp, Artificial Sequence
  Description of Artificial Sequence: Synthetic oligonucleotide
  Target: LAMA2; (-) strand; PAM type: YTN; PAM sequence: TTC
attttttttaatctggcatg

SEQ ID NO: 202420 - DNA, 20 bp, Artificial Sequence
  Description of Artificial Sequence: Synthetic oligonucleotide
  Target: LAMA2; (-) strand; PAM type: YTN; PAM sequence: TTT
cattttttttaatctggcat

SEQ ID NO: 202421 - DNA, 20 bp, Artificial Sequence
  Description of Artificial Sequence: Synthetic oligonucleotide
  Target: LAMA2; (-) strand; PAM type: YTN; PAM sequence: TTC
caatttcattttttttaatc

SEQ ID NO: 202422 - DNA, 20 bp, Artificial Sequence
  Description of Artificial Sequence: Synthetic oligonucleotide
  Target: LAMA2; (-) strand; PAM type: YTN; PAM sequence: TTT
ccaatttcattttttttaat

SEQ ID NO: 202423 - DNA, 20 bp, Artificial Sequence
  Description of Artificial Sequence: Synthetic oligonucleotide
  Target: LAMA2; (-) strand; PAM type: YTN; PAM sequence: CTT
tccaatttcattttttttaa

SEQ ID NO: 202424 - DNA, 20 bp, Artificial Sequence
  Description of Artificial Sequence: Synthetic oligonucleotide
  Target: LAMA2; (-) strand; PAM type: YTN; PAM sequence: CTA
caaaccatcctttccaattt

SEQ ID NO: 202425 - DNA, 20 bp, Artificial Sequence
  Description of Artificial Sequence: Synthetic oligonucleotide
  Target: LAMA2; (-) strand; PAM type: YTN; PAM sequence: TTC
tacaaaccatcctttccaat

SEQ ID NO: 202426 - DNA, 20 bp, Artificial Sequence
  Description of Artificial Sequence: Synthetic oligonucleotide
  Target: LAMA2; (-) strand; PAM type: YTN; PAM sequence: CTA
acagttctacaaaccatcct

SEQ ID NO: 202427 - DNA, 20 bp, Artificial Sequence
  Description of Artificial Sequence: Synthetic oligonucleotide
  Target: LAMA2; (-) strand; PAM type: YTN; PAM sequence: CTC
taacagttctacaaaccatc

SEQ ID NO: 202428 - DNA, 20 bp, Artificial Sequence
  Description of Artificial Sequence: Synthetic oligonucleotide
  Target: LAMA2; (-) strand; PAM type: YTN; PAM sequence: TTA
tggatgctctaacagttcta

SEQ ID NO: 202429 - DNA, 20 bp, Artificial Sequence
  Description of Artificial Sequence: Synthetic oligonucleotide
  Target: LAMA2; (-) strand; PAM type: YTN; PAM sequence: TTT
atggatgctctaacagttct

SEQ ID NO: 202430 - DNA, 20 bp, Artificial Sequence
  Description of Artificial Sequence: Synthetic oligonucleotide
  Target: LAMA2; (-) strand; PAM type: YTN; PAM sequence: TTT
tatggatgctctaacagttc

SEQ ID NO: 202431 - DNA, 20 bp, Artificial Sequence
  Description of Artificial Sequence: Synthetic oligonucleotide
  Target: LAMA2; (-) strand; PAM type: YTN; PAM sequence: TTG
taatgagttttatggatgct

SEQ ID NO: 202432 - DNA, 20 bp, Artificial Sequence
  Description of Artificial Sequence: Synthetic oligonucleotide
  Target: LAMA2; (-) strand; PAM type: YTN; PAM sequence: TTT
gtaatgagttttatggatgc

SEQ ID NO: 202433 - DNA, 20 bp, Artificial Sequence
  Description of Artificial Sequence: Synthetic oligonucleotide
  Target: LAMA2; (-) strand; PAM type: YTN; PAM sequence: CTT
tgtaatgagttttatggatg

SEQ ID NO: 202434 - DNA, 20 bp, Artificial Sequence
  Description of Artificial Sequence: Synthetic oligonucleotide
  Target: LAMA2; (-) strand; PAM type: YTN; PAM sequence: TTA
ctttgtaatgagttttatgg

SEQ ID NO: 202435 - DNA, 20 bp, Artificial Sequence
  Description of Artificial Sequence: Synthetic oligonucleotide
  Target: LAMA2; (-) strand; PAM type: YTN; PAM sequence: TTT
actttgtaatgagttttatg

SEQ ID NO: 202436 - DNA, 20 bp, Artificial Sequence
  Description of Artificial Sequence: Synthetic oligonucleotide
  Target: LAMA2; (-) strand; PAM type: YTN; PAM sequence: TTT
tactttgtaatgagttttat

SEQ ID NO: 202437 - DNA, 20 bp, Artificial Sequence
  Description of Artificial Sequence: Synthetic oligonucleotide
  Target: LAMA2; (-) strand; PAM type: YTN; PAM sequence: CTA
atatattttactttgtaatg

SEQ ID NO: 202438 - DNA, 20 bp, Artificial Sequence
  Description of Artificial Sequence: Synthetic oligonucleotide
  Target: LAMA2; (-) strand; PAM type: YTN; PAM sequence: TTA
ctaatatattttactttgta

SEQ ID NO: 202439 - DNA, 20 bp, Artificial Sequence
  Description of Artificial Sequence: Synthetic oligonucleotide
  Target: LAMA2; (-) strand; PAM type: YTN; PAM sequence: TTA
ttactaatatattttacttt

SEQ ID NO: 202440 - DNA, 20 bp, Artificial Sequence
  Description of Artificial Sequence: Synthetic oligonucleotide
  Target: LAMA2; (-) strand; PAM type: YTN; PAM sequence: TTT
attactaatatattttactt

SEQ ID NO: 202441 - DNA, 20 bp, Artificial Sequence
  Description of Artificial Sequence: Synthetic oligonucleotide
  Target: LAMA2; (-) strand; PAM type: YTN; PAM sequence: TTT
tattactaatatattttact

SEQ ID NO: 202442 - DNA, 20 bp, Artificial Sequence
  Description of Artificial Sequence: Synthetic oligonucleotide
  Target: LAMA2; (-) strand; PAM type: YTN; PAM sequence: CTA
aaatcattttattactaata

SEQ ID NO: 202443 - DNA, 20 bp, Artificial Sequence
  Description of Artificial Sequence: Synthetic oligonucleotide
  Target: LAMA2; (-) strand; PAM type: YTN; PAM sequence: TTA
ctaaaatcattttattacta

SEQ ID NO: 202444 - DNA, 20 bp, Artificial Sequence
  Description of Artificial Sequence: Synthetic oligonucleotide
  Target: LAMA2; (-) strand; PAM type: YTN; PAM sequence: TTC
ccgaggtattactaaaatca

SEQ ID NO: 202445 - DNA, 20 bp, Artificial Sequence
  Description of Artificial Sequence: Synthetic oligonucleotide
  Target: LAMA2; (-) strand; PAM type: YTN; PAM sequence: TTA
gagtggttcccgaggtatta

SEQ ID NO: 202446 - DNA, 20 bp, Artificial Sequence
  Description of Artificial Sequence: Synthetic oligonucleotide
  Target: LAMA2; (-) strand; PAM type: YTN; PAM sequence: TTG
gaattagagtggttcccgag

SEQ ID NO: 202447 - DNA, 20 bp, Artificial Sequence
  Description of Artificial Sequence: Synthetic oligonucleotide
  Target: LAMA2; (-) strand; PAM type: YTN; PAM sequence: TTT
ggaattagagtggttcccga

SEQ ID NO: 202448 - DNA, 20 bp, Artificial Sequence
  Description of Artificial Sequence: Synthetic oligonucleotide
  Target: LAMA2; (-) strand; PAM type: YTN; PAM sequence: TTA
caagagacagagagatgatt

SEQ ID NO: 202449 - DNA, 20 bp, Artificial Sequence
  Description of Artificial Sequence: Synthetic oligonucleotide
  Target: LAMA2; (-) strand; PAM type: YTN; PAM sequence: TTG
gaaagccattacaagagaca

SEQ ID NO: 202450 - DNA, 20 bp, Artificial Sequence
  Description of Artificial Sequence: Synthetic oligonucleotide
  Target: LAMA2; (-) strand; PAM type: YTN; PAM sequence: TTC
aaagaatattggaaagccat

SEQ ID NO: 202451 - DNA, 20 bp, Artificial Sequence
  Description of Artificial Sequence: Synthetic oligonucleotide
  Target: LAMA2; (-) strand; PAM type: YTN; PAM sequence: TTT
caaagaatattggaaagcca

SEQ ID NO: 202452 - DNA, 20 bp, Artificial Sequence
  Description of Artificial Sequence: Synthetic oligonucleotide
  Target: LAMA2; (-) strand; PAM type: YTN; PAM sequence: TTT
tcaaagaatattggaaagcc

SEQ ID NO: 202453 - DNA, 20 bp, Artificial Sequence
  Description of Artificial Sequence: Synthetic oligonucleotide
  Target: LAMA2; (-) strand; PAM type: YTN; PAM sequence: TTT
ttcaaagaatattggaaagc

SEQ ID NO: 202454 - DNA, 20 bp, Artificial Sequence
  Description of Artificial Sequence: Synthetic oligonucleotide
  Target: LAMA2; (-) strand; PAM type: YTN; PAM sequence: CTC
aatatttttcaaagaatatt

SEQ ID NO: 202455 - DNA, 20 bp, Artificial Sequence
  Description of Artificial Sequence: Synthetic oligonucleotide
  Target: LAMA2; (-) strand; PAM type: YTN; PAM sequence: CTA
aaataacctcaatatttttc

SEQ ID NO: 202456 - DNA, 20 bp, Artificial Sequence
  Description of Artificial Sequence: Synthetic oligonucleotide
  Target: LAMA2; (-) strand; PAM type: YTN; PAM sequence: TTA
aaccaaatcaaagtaccaat

SEQ ID NO: 202457 - DNA, 20 bp, Artificial Sequence
  Description of Artificial Sequence: Synthetic oligonucleotide
  Target: LAMA2; (-) strand; PAM type: YTN; PAM sequence: TTT
aaaccaaatcaaagtaccaa

SEQ ID NO: 202458 - DNA, 20 bp, Artificial Sequence
  Description of Artificial Sequence: Synthetic oligonucleotide
  Target: LAMA2; (-) strand; PAM type: YTN; PAM sequence: CTC
aagaataaaaggatatttaa

SEQ ID NO: 202459 - DNA, 20 bp, Artificial Sequence
  Description of Artificial Sequence: Synthetic oligonucleotide
  Target: LAMA2; (-) strand; PAM type: YTN; PAM sequence: TTG
tatatctcaagaataaaagg

SEQ ID NO: 202460 - DNA, 20 bp, Artificial Sequence
  Description of Artificial Sequence: Synthetic oligonucleotide
  Target: LAMA2; (-) strand; PAM type: YTN; PAM sequence: TTG
aaattgtatatctcaagaat

SEQ ID NO: 202461 - DNA, 20 bp, Artificial Sequence
  Description of Artificial Sequence: Synthetic oligonucleotide
  Target: LAMA2; (-) strand; PAM type: YTN; PAM sequence: TTC
agttgaaattgtatatctca

SEQ ID NO: 202462 - DNA, 20 bp, Artificial Sequence
  Description of Artificial Sequence: Synthetic oligonucleotide
  Target: LAMA2; (-) strand; PAM type: YTN; PAM sequence: TTG
ccattcagttgaaattgtat

SEQ ID NO: 202463 - DNA, 20 bp, Artificial Sequence
  Description of Artificial Sequence: Synthetic oligonucleotide
  Target: LAMA2; (-) strand; PAM type: YTN; PAM sequence: CTG
tcatagttgccattcagttg

SEQ ID NO: 202464 - DNA, 20 bp, Artificial Sequence
  Description of Artificial Sequence: Synthetic oligonucleotide
  Target: LAMA2; (-) strand; PAM type: YTN; PAM sequence: CTC
tgtcatagttgccattcagt

SEQ ID NO: 202465 - DNA, 20 bp, Artificial Sequence
  Description of Artificial Sequence: Synthetic oligonucleotide
  Target: LAMA2; (-) strand; PAM type: YTN; PAM sequence: TTC
aactctgtcatagttgccat

SEQ ID NO: 202466 - DNA, 20 bp, Artificial Sequence
  Description of Artificial Sequence: Synthetic oligonucleotide
  Target: LAMA2; (-) strand; PAM type: YTN; PAM sequence: TTT
caactctgtcatagttgcca

SEQ ID NO: 202467 - DNA, 20 bp, Artificial Sequence
  Description of Artificial Sequence: Synthetic oligonucleotide
  Target: LAMA2; (-) strand; PAM type: YTN; PAM sequence: TTT
tcaactctgtcatagttgcc

SEQ ID NO: 202468 - DNA, 20 bp, Artificial Sequence
  Description of Artificial Sequence: Synthetic oligonucleotide
  Target: LAMA2; (-) strand; PAM type: YTN; PAM sequence: CTG
tacattttcaactctgtcat

SEQ ID NO: 202469 - DNA, 20 bp, Artificial Sequence
  Description of Artificial Sequence: Synthetic oligonucleotide
  Target: LAMA2; (-) strand; PAM type: YTN; PAM sequence: TTC
tgtacattttcaactctgtc

SEQ ID NO: 202470 - DNA, 20 bp, Artificial Sequence
  Description of Artificial Sequence: Synthetic oligonucleotide
  Target: LAMA2; (-) strand; PAM type: YTN; PAM sequence: TTT
ctgtacattttcaactctgt

SEQ ID NO: 202471 - DNA, 20 bp, Artificial Sequence
  Description of Artificial Sequence: Synthetic oligonucleotide
  Target: LAMA2; (-) strand; PAM type: YTN; PAM sequence: TTT
tctgtacattttcaactctg

SEQ ID NO: 202472 - DNA, 20 bp, Artificial Sequence
  Description of Artificial Sequence: Synthetic oligonucleotide
  Target: LAMA2; (-) strand; PAM type: YTN; PAM sequence: TTT
ttctgtacattttcaactct

SEQ ID NO: 202473 - DNA, 20 bp, Artificial Sequence
  Description of Artificial Sequence: Synthetic oligonucleotide
  Target: LAMA2; (-) strand; PAM type: YTN; PAM sequence: TTA
tttttctgtacattttcaac

SEQ ID NO: 202474 - DNA, 20 bp, Artificial Sequence
  Description of Artificial Sequence: Synthetic oligonucleotide
  Target: LAMA2; (-) strand; PAM type: YTN; PAM sequence: TTT
atttttctgtacattttcaa

SEQ ID NO: 202475 - DNA, 20 bp, Artificial Sequence
  Description of Artificial Sequence: Synthetic oligonucleotide
  Target: LAMA2; (-) strand; PAM type: YTN; PAM sequence: CTA
taatttatttttctgtacat

SEQ ID NO: 202476 - DNA, 20 bp, Artificial Sequence
  Description of Artificial Sequence: Synthetic oligonucleotide
  Target: LAMA2; (-) strand; PAM type: YTN; PAM sequence: CTA
atctataatttatttttctg

SEQ ID NO: 202477 - DNA, 20 bp, Artificial Sequence
  Description of Artificial Sequence: Synthetic oligonucleotide
  Target: LAMA2; (-) strand; PAM type: YTN; PAM sequence: TTG
tctaatctataatttatttt

SEQ ID NO: 202478 - DNA, 20 bp, Artificial Sequence
  Description of Artificial Sequence: Synthetic oligonucleotide
  Target: LAMA2; (-) strand; PAM type: YTN; PAM sequence: TTA
atacgttgtctaatctataa

SEQ ID NO: 202479 - DNA, 20 bp, Artificial Sequence
  Description of Artificial Sequence: Synthetic oligonucleotide
  Target: LAMA2; (-) strand; PAM type: YTN; PAM sequence: TTA
aattaatacgttgtctaatc

SEQ ID NO: 202480 - DNA, 20 bp, Artificial Sequence
  Description of Artificial Sequence: Synthetic oligonucleotide
  Target: LAMA2; (-) strand; PAM type: YTN; PAM sequence: TTT
aaattaatacgttgtctaat

SEQ ID NO: 202481 - DNA, 20 bp, Artificial Sequence
  Description of Artificial Sequence: Synthetic oligonucleotide
  Target: LAMA2; (-) strand; PAM type: YTN; PAM sequence: TTT
taaattaatacgttgtctaa

SEQ ID NO: 202482 - DNA, 20 bp, Artificial Sequence
  Description of Artificial Sequence: Synthetic oligonucleotide
  Target: LAMA2; (-) strand; PAM type: YTN; PAM sequence: CTT
ttaaattaatacgttgtcta

SEQ ID NO: 202483 - DNA, 20 bp, Artificial Sequence
  Description of Artificial Sequence: Synthetic oligonucleotide
  Target: LAMA2; (-) strand; PAM type: YTN; PAM sequence: CTG
cttttaaattaatacgttgt

SEQ ID NO: 202484 - DNA, 20 bp, Artificial Sequence
  Description of Artificial Sequence: Synthetic oligonucleotide
  Target: LAMA2; (-) strand; PAM type: YTN; PAM sequence: TTG
caactgcttttaaattaata

SEQ ID NO: 202485 - DNA, 20 bp, Artificial Sequence
  Description of Artificial Sequence: Synthetic oligonucleotide
  Target: LAMA2; (-) strand; PAM type: YTN; PAM sequence: CTT
gcaactgcttttaaattaat

SEQ ID NO: 202486 - DNA, 20 bp, Artificial Sequence
  Description of Artificial Sequence: Synthetic oligonucleotide
  Target: LAMA2; (-) strand; PAM type: YTN; PAM sequence: TTG
cttgcaactgcttttaaatt

SEQ ID NO: 202487 - DNA, 20 bp, Artificial Sequence
  Description of Artificial Sequence: Synthetic oligonucleotide
  Target: LAMA2; (-) strand; PAM type: YTN; PAM sequence: CTT
gcttgcaactgcttttaaat

SEQ ID NO: 202488 - DNA, 20 bp, Artificial Sequence
  Description of Artificial Sequence: Synthetic oligonucleotide
  Target: LAMA2; (-) strand; PAM type: YTN; PAM sequence: TTG
caatatagtaacttgcttgc

SEQ ID NO: 202489 - DNA, 20 bp, Artificial Sequence
  Description of Artificial Sequence: Synthetic oligonucleotide
  Target: LAMA2; (-) strand; PAM type: YTN; PAM sequence: TTC
attgcaatatagtaacttgc

SEQ ID NO: 202490 - DNA, 20 bp, Artificial Sequence
  Description of Artificial Sequence: Synthetic oligonucleotide
  Target: LAMA2; (-) strand; PAM type: YTN; PAM sequence: TTT
cattgcaatatagtaacttg

SEQ ID NO: 202491 - DNA, 20 bp, Artificial Sequence
  Description of Artificial Sequence: Synthetic oligonucleotide
  Target: LAMA2; (-) strand; PAM type: YTN; PAM sequence: TTT
tcattgcaatatagtaactt

SEQ ID NO: 202492 - DNA, 20 bp, Artificial Sequence
  Description of Artificial Sequence: Synthetic oligonucleotide
  Target: LAMA2; (-) strand; PAM type: YTN; PAM sequence: TTT
ttcattgcaatatagtaact

SEQ ID NO: 202493 - DNA, 20 bp, Artificial Sequence
  Description of Artificial Sequence: Synthetic oligonucleotide
  Target: LAMA2; (-) strand; PAM type: YTN; PAM sequence: TTT
tttcattgcaatatagtaac

SEQ ID NO: 202494 - DNA, 20 bp, Artificial Sequence
  Description of Artificial Sequence: Synthetic oligonucleotide
  Target: LAMA2; (-) strand; PAM type: YTN; PAM sequence: TTT
ttttcattgcaatatagtaa

SEQ ID NO: 202495 - DNA, 20 bp, Artificial Sequence
  Description of Artificial Sequence: Synthetic oligonucleotide
  Target: LAMA2; (-) strand; PAM type: YTN; PAM sequence: TTT
tttttcattgcaatatagta

SEQ ID NO: 202496 - DNA, 20 bp, Artificial Sequence
  Description of Artificial Sequence: Synthetic oligonucleotide
  Target: LAMA2; (-) strand; PAM type: YTN; PAM sequence: CTT
ttttttcattgcaatatagt

SEQ ID NO: 202497 - DNA, 20 bp, Artificial Sequence
  Description of Artificial Sequence: Synthetic oligonucleotide
  Target: LAMA2; (-) strand; PAM type: YTN; PAM sequence: TTA
ggaacttttttttcattgca

SEQ ID NO: 202498 - DNA, 20 bp, Artificial Sequence
  Description of Artificial Sequence: Synthetic oligonucleotide
  Target: LAMA2; (-) strand; PAM type: YTN; PAM sequence: TTT
aggaacttttttttcattgc

SEQ ID NO: 202499 - DNA, 20 bp, Artificial Sequence
  Description of Artificial Sequence: Synthetic oligonucleotide
  Target: LAMA2; (-) strand; PAM type: YTN; PAM sequence: TTT
taggaacttttttttcattg

SEQ ID NO: 202500 - DNA, 20 bp, Artificial Sequence
  Description of Artificial Sequence: Synthetic oligonucleotide
  Target: LAMA2; (-) strand; PAM type: YTN; PAM sequence: TTA
ccaattttaggaactttttt

SEQ ID NO: 202501 - DNA, 20 bp, Artificial Sequence
  Description of Artificial Sequence: Synthetic oligonucleotide
  Target: LAMA2; (-) strand; PAM type: YTN; PAM sequence: TTG
aattaccaattttaggaact

SEQ ID NO: 202502 - DNA, 20 bp, Artificial Sequence
  Description of Artificial Sequence: Synthetic oligonucleotide
  Target: LAMA2; (-) strand; PAM type: YTN; PAM sequence: TTA
ggacagcaatagttgaatta

SEQ ID NO: 202503 - DNA, 20 bp, Artificial Sequence
  Description of Artificial Sequence: Synthetic oligonucleotide
  Target: LAMA2; (-) strand; PAM type: YTN; PAM sequence: CTA
ttaggacagcaatagttgaa

SEQ ID NO: 202504 - DNA, 20 bp, Artificial Sequence
  Description of Artificial Sequence: Synthetic oligonucleotide
  Target: LAMA2; (-) strand; PAM type: YTN; PAM sequence: TTC
agctattaggacagcaatag

SEQ ID NO: 202505 - DNA, 20 bp, Artificial Sequence
  Description of Artificial Sequence: Synthetic oligonucleotide
  Target: LAMA2; (-) strand; PAM type: YTN; PAM sequence: CTT
cagctattaggacagcaata

SEQ ID NO: 202506 - DNA, 20 bp, Artificial Sequence
  Description of Artificial Sequence: Synthetic oligonucleotide
  Target: LAMA2; (-) strand; PAM type: YTN; PAM sequence: TTG
ccatacataaaaatgacttc

SEQ ID NO: 202507 - DNA, 20 bp, Artificial Sequence
  Description of Artificial Sequence: Synthetic oligonucleotide
  Target: LAMA2; (-) strand; PAM type: YTN; PAM sequence: TTA
ggattgccatacataaaaat

SEQ ID NO: 202508 - DNA, 20 bp, Artificial Sequence
  Description of Artificial Sequence: Synthetic oligonucleotide
  Target: LAMA2; (-) strand; PAM type: YTN; PAM sequence: TTT
aggattgccatacataaaaa

SEQ ID NO: 202509 - DNA, 20 bp, Artificial Sequence
  Description of Artificial Sequence: Synthetic oligonucleotide
  Target: LAMA2; (-) strand; PAM type: YTN; PAM sequence: TTG
atttaggattgccatacata

SEQ ID NO: 202510 - DNA, 20 bp, Artificial Sequence
  Description of Artificial Sequence: Synthetic oligonucleotide
  Target: LAMA2; (-) strand; PAM type: YTN; PAM sequence: TTT
gatttaggattgccatacat

SEQ ID NO: 202511 - DNA, 20 bp, Artificial Sequence
  Description of Artificial Sequence: Synthetic oligonucleotide
  Target: LAMA2; (-) strand; PAM type: YTN; PAM sequence: CTT
tgatttaggattgccataca

SEQ ID NO: 202512 - DNA, 20 bp, Artificial Sequence
  Description of Artificial Sequence: Synthetic oligonucleotide
  Target: LAMA2; (-) strand; PAM type: YTN; PAM sequence: TTA
tgatggctttgatttaggat

SEQ ID NO: 202513 - DNA, 20 bp, Artificial Sequence
  Description of Artificial Sequence: Synthetic oligonucleotide
  Target: LAMA2; (-) strand; PAM type: YTN; PAM sequence: CTT
atgatggctttgatttagga

SEQ ID NO: 202514 - DNA, 20 bp, Artificial Sequence
  Description of Artificial Sequence: Synthetic oligonucleotide
  Target: LAMA2; (-) strand; PAM type: YTN; PAM sequence: CTG
cagcatcttatgatggcttt

SEQ ID NO: 202515 - DNA, 20 bp, Artificial Sequence
  Description of Artificial Sequence: Synthetic oligonucleotide
  Target: LAMA2; (-) strand; PAM type: YTN; PAM sequence: TTA
agaggtctgcagcatcttat

SEQ ID NO: 202516 - DNA, 20 bp, Artificial Sequence
  Description of Artificial Sequence: Synthetic oligonucleotide
  Target: LAMA2; (-) strand; PAM type: YTN; PAM sequence: CTA
ttaagaggtctgcagcatct

SEQ ID NO: 202517 - DNA, 20 bp, Artificial Sequence
  Description of Artificial Sequence: Synthetic oligonucleotide
  Target: LAMA2; (-) strand; PAM type: YTN; PAM sequence: CTG
gagccaagctattaagaggt

SEQ ID NO: 202518 - DNA, 20 bp, Artificial Sequence
  Description of Artificial Sequence: Synthetic oligonucleotide
  Target: LAMA2; (-) strand; PAM type: YTN; PAM sequence: TTA
tcactggagccaagctatta

SEQ ID NO: 202519 - DNA, 20 bp, Artificial Sequence
  Description of Artificial Sequence: Synthetic oligonucleotide
  Target: LAMA2; (-) strand; PAM type: YTN; PAM sequence: CTC
attatcactggagccaagct

SEQ ID NO: 202520 - DNA, 20 bp, Artificial Sequence
  Description of Artificial Sequence: Synthetic oligonucleotide
  Target: LAMA2; (-) strand; PAM type: YTN; PAM sequence: CTG
ggctcattatcactggagcc

SEQ ID NO: 202521 - DNA, 20 bp, Artificial Sequence
  Description of Artificial Sequence: Synthetic oligonucleotide
  Target: LAMA2; (-) strand; PAM type: YTN; PAM sequence: CTA
atgtcctgggctcattatca

SEQ ID NO: 202522 - DNA, 20 bp, Artificial Sequence
  Description of Artificial Sequence: Synthetic oligonucleotide
  Target: LAMA2; (-) strand; PAM type: YTN; PAM sequence: CTC
taatgtcctgggctcattat

SEQ ID NO: 202523 - DNA, 20 bp, Artificial Sequence
  Description of Artificial Sequence: Synthetic oligonucleotide
  Target: LAMA2; (-) strand; PAM type: YTN; PAM sequence: CTC
aaatgagctctaatgtcctg

SEQ ID NO: 202524 - DNA, 20 bp, Artificial Sequence
  Description of Artificial Sequence: Synthetic oligonucleotide
  Target: LAMA2; (-) strand; PAM type: YTN; PAM sequence: CTC
tcaaatgagctctaatgtcc

SEQ ID NO: 202525 - DNA, 20 bp, Artificial Sequence
  Description of Artificial Sequence: Synthetic oligonucleotide
  Target: LAMA2; (-) strand; PAM type: YTN; PAM sequence: CTG
ctctcaaatgagctctaatg

SEQ ID NO: 202526 - DNA, 20 bp, Artificial Sequence
  Description of Artificial Sequence: Synthetic oligonucleotide
  Target: LAMA2; (-) strand; PAM type: YTN; PAM sequence: TTA
tgaatcctgctctcaaatga

SEQ ID NO: 202527 - DNA, 20 bp, Artificial Sequence
  Description of Artificial Sequence: Synthetic oligonucleotide
  Target: LAMA2; (-) strand; PAM type: YTN; PAM sequence: TTG
cacagtaaaaaaaattatga

SEQ ID NO: 202528 - DNA, 20 bp, Artificial Sequence
  Description of Artificial Sequence: Synthetic oligonucleotide
  Target: LAMA2; (-) strand; PAM type: YTN; PAM sequence: TTG
agacaaagccagaggtagga

SEQ ID NO: 202529 - DNA, 20 bp, Artificial Sequence
  Description of Artificial Sequence: Synthetic oligonucleotide
  Target: LAMA2; (-) strand; PAM type: YTN; PAM sequence: TTT
gagacaaagccagaggtagg

SEQ ID NO: 202530 - DNA, 20 bp, Artificial Sequence
  Description of Artificial Sequence: Synthetic oligonucleotide
  Target: LAMA2; (-) strand; PAM type: YTN; PAM sequence: CTT
tgagacaaagccagaggtag

SEQ ID NO: 202531 - DNA, 20 bp, Artificial Sequence
  Description of Artificial Sequence: Synthetic oligonucleotide
  Target: LAMA2; (-) strand; PAM type: YTN; PAM sequence: CTA
tgtctttgagacaaagccag

SEQ ID NO: 202532 - DNA, 20 bp, Artificial Sequence
  Description of Artificial Sequence: Synthetic oligonucleotide
  Target: LAMA2; (-) strand; PAM type: YTN; PAM sequence: CTC
catgtgtggctatgtctttg

SEQ ID NO: 202533 - DNA, 20 bp, Artificial Sequence
  Description of Artificial Sequence: Synthetic oligonucleotide
  Target: LAMA2; (-) strand; PAM type: YTN; PAM sequence: TTC
tccatgtgtggctatgtctt

SEQ ID NO: 202534 - DNA, 20 bp, Artificial Sequence
  Description of Artificial Sequence: Synthetic oligonucleotide
  Target: LAMA2; (-) strand; PAM type: YTN; PAM sequence: CTT
ctccatgtgtggctatgtct

SEQ ID NO: 202535 - DNA, 20 bp, Artificial Sequence
  Description of Artificial Sequence: Synthetic oligonucleotide
  Target: LAMA2; (-) strand; PAM type: YTN; PAM sequence: TTA
tcagtgtccttctccatgtg

SEQ ID NO: 202536 - DNA, 20 bp, Artificial Sequence
  Description of Artificial Sequence: Synthetic oligonucleotide
  Target: LAMA2; (-) strand; PAM type: YTN; PAM sequence: TTA
ttatcagtgtccttctccat

SEQ ID NO: 202537 - DNA, 20 bp, Artificial Sequence
  Description of Artificial Sequence: Synthetic oligonucleotide
  Target: LAMA2; (-) strand; PAM type: YTN; PAM sequence: CTT
attatcagtgtccttctcca

SEQ ID NO: 202538 - DNA, 20 bp, Artificial Sequence
  Description of Artificial Sequence: Synthetic oligonucleotide
  Target: LAMA2; (-) strand; PAM type: YTN; PAM sequence: CTC
ttattatcagtgtccttctc

SEQ ID NO: 202539 - DNA, 20 bp, Artificial Sequence
  Description of Artificial Sequence: Synthetic oligonucleotide
  Target: LAMA2; (-) strand; PAM type: YTN; PAM sequence: CTC
tcttattatcagtgtccttc

SEQ ID NO: 202540 - DNA, 20 bp, Artificial Sequence
  Description of Artificial Sequence: Synthetic oligonucleotide
  Target: LAMA2; (-) strand; PAM type: YTN; PAM sequence: TTA
taaagaatgtcaaactctct

SEQ ID NO: 202541 - DNA, 20 bp, Artificial Sequence
  Description of Artificial Sequence: Synthetic oligonucleotide
  Target: LAMA2; (-) strand; PAM type: YTN; PAM sequence: CTG
gcaaaagaaaaattataaag

SEQ ID NO: 202542 - DNA, 20 bp, Artificial Sequence
  Description of Artificial Sequence: Synthetic oligonucleotide
  Target: LAMA2; (-) strand; PAM type: YTN; PAM sequence: TTA
taaggatcctggcaaaagaa

SEQ ID NO: 202543 - DNA, 20 bp, Artificial Sequence
  Description of Artificial Sequence: Synthetic oligonucleotide
  Target: LAMA2; (-) strand; PAM type: YTN; PAM sequence: TTC
aaggattataaggatcctgg

SEQ ID NO: 202544 - DNA, 20 bp, Artificial Sequence
  Description of Artificial Sequence: Synthetic oligonucleotide
  Target: LAMA2; (-) strand; PAM type: YTN; PAM sequence: TTG
attcaaggattataaggatc

SEQ ID NO: 202545 - DNA, 20 bp, Artificial Sequence
  Description of Artificial Sequence: Synthetic oligonucleotide
  Target: LAMA2; (-) strand; PAM type: YTN; PAM sequence: TTT
gattcaaggattataaggat

SEQ ID NO: 202546 - DNA, 20 bp, Artificial Sequence
  Description of Artificial Sequence: Synthetic oligonucleotide
  Target: LAMA2; (-) strand; PAM type: YTN; PAM sequence: TTT
tgattcaaggattataagga

SEQ ID NO: 202547 - DNA, 20 bp, Artificial Sequence
  Description of Artificial Sequence: Synthetic oligonucleotide
  Target: LAMA2; (-) strand; PAM type: YTN; PAM sequence: TTC
aatcattttgattcaaggat

SEQ ID NO: 202548 - DNA, 20 bp, Artificial Sequence
  Description of Artificial Sequence: Synthetic oligonucleotide
  Target: LAMA2; (-) strand; PAM type: YTN; PAM sequence: CTT
caatcattttgattcaagga

SEQ ID NO: 202549 - DNA, 20 bp, Artificial Sequence
  Description of Artificial Sequence: Synthetic oligonucleotide
  Target: LAMA2; (-) strand; PAM type: YTN; PAM sequence: CTG
cttcaatcattttgattcaa

SEQ ID NO: 202550 - DNA, 20 bp, Artificial Sequence
  Description of Artificial Sequence: Synthetic oligonucleotide
  Target: LAMA2; (-) strand; PAM type: YTN; PAM sequence: TTA
aaaataactgcttcaatcat

SEQ ID NO: 202551 - DNA, 20 bp, Artificial Sequence
  Description of Artificial Sequence: Synthetic oligonucleotide
  Target: LAMA2; (-) strand; PAM type: YTN; PAM sequence: TTT
aaaaataactgcttcaatca

SEQ ID NO: 202552 - DNA, 20 bp, Artificial Sequence
  Description of Artificial Sequence: Synthetic oligonucleotide
  Target: LAMA2; (-) strand; PAM type: YTN; PAM sequence: TTT
taaaaataactgcttcaatc

SEQ ID NO: 202553 - DNA, 20 bp, Artificial Sequence
  Description of Artificial Sequence: Synthetic oligonucleotide
  Target: LAMA2; (-) strand; PAM type: YTN; PAM sequence: TTT
ttaaaaataactgcttcaat

SEQ ID NO: 202554 - DNA, 20 bp, Artificial Sequence
  Description of Artificial Sequence: Synthetic oligonucleotide
  Target: LAMA2; (-) strand; PAM type: YTN; PAM sequence: CTA
tttttaaaaataactgcttc

SEQ ID NO: 202555 - DNA, 20 bp, Artificial Sequence
  Description of Artificial Sequence: Synthetic oligonucleotide
  Target: LAMA2; (-) strand; PAM type: YTN; PAM sequence: TTC
tatttttaaaaataactgct

SEQ ID NO: 202556 - DNA, 20 bp, Artificial Sequence
  Description of Artificial Sequence: Synthetic oligonucleotide
  Target: LAMA2; (-) strand; PAM type: YTN; PAM sequence: CTT
ctatttttaaaaataactgc

SEQ ID NO: 202557 - DNA, 20 bp, Artificial Sequence
  Description of Artificial Sequence: Synthetic oligonucleotide
  Target: LAMA2; (-) strand; PAM type: YTN; PAM sequence: CTA
gcttctatttttaaaaataa

SEQ ID NO: 202558 - DNA, 20 bp, Artificial Sequence
  Description of Artificial Sequence: Synthetic oligonucleotide
  Target: LAMA2; (-) strand; PAM type: YTN; PAM sequence: TTA
aatctagcttctatttttaa

SEQ ID NO: 202559 - DNA, 20 bp, Artificial Sequence
  Description of Artificial Sequence: Synthetic oligonucleotide
  Target: LAMA2; (-) strand; PAM type: YTN; PAM sequence: TTT
aaatctagcttctattttta

SEQ ID NO: 202560 - DNA, 20 bp, Artificial Sequence
  Description of Artificial Sequence: Synthetic oligonucleotide
  Target: LAMA2; (-) strand; PAM type: YTN; PAM sequence: TTT
taaatctagcttctattttt

SEQ ID NO: 202561 - DNA, 20 bp, Artificial Sequence
  Description of Artificial Sequence: Synthetic oligonucleotide
  Target: LAMA2; (-) strand; PAM type: YTN; PAM sequence: CTA
aacaaaataatgtcaaaaga

SEQ ID NO: 202562 - DNA, 20 bp, Artificial Sequence
  Description of Artificial Sequence: Synthetic oligonucleotide
  Target: LAMA2; (-) strand; PAM type: YTN; PAM sequence: CTC
taaacaaaataatgtcaaaa

SEQ ID NO: 202563 - DNA, 20 bp, Artificial Sequence
  Description of Artificial Sequence: Synthetic oligonucleotide
  Target: LAMA2; (-) strand; PAM type: YTN; PAM sequence: TTA
aaggtgctctaaacaaaata

SEQ ID NO: 202564 - DNA, 20 bp, Artificial Sequence
  Description of Artificial Sequence: Synthetic oligonucleotide
  Target: LAMA2; (-) strand; PAM type: YTN; PAM sequence: TTT
aaaggtgctctaaacaaaat

SEQ ID NO: 202565 - DNA, 20 bp, Artificial Sequence
  Description of Artificial Sequence: Synthetic oligonucleotide
  Target: LAMA2; (-) strand; PAM type: YTN; PAM sequence: TTT
taaaggtgctctaaacaaaa

SEQ ID NO: 202566 - DNA, 20 bp, Artificial Sequence
  Description of Artificial Sequence: Synthetic oligonucleotide
  Target: LAMA2; (-) strand; PAM type: YTN; PAM sequence: TTT
ttaaaggtgctctaaacaaa

SEQ ID NO: 202567 - DNA, 20 bp, Artificial Sequence
  Description of Artificial Sequence: Synthetic oligonucleotide
  Target: LAMA2; (-) strand; PAM type: YTN; PAM sequence: TTA
atcaccagtagagtttttaa

SEQ ID NO: 202568 - DNA, 20 bp, Artificial Sequence
  Description of Artificial Sequence: Synthetic oligonucleotide
  Target: LAMA2; (-) strand; PAM type: YTN; PAM sequence: TTT
aatcaccagtagagttttta

SEQ ID NO: 202569 - DNA, 20 bp, Artificial Sequence
  Description of Artificial Sequence: Synthetic oligonucleotide
  Target: LAMA2; (-) strand; PAM type: YTN; PAM sequence: TTT
taatcaccagtagagttttt

SEQ ID NO: 202570 - DNA, 20 bp, Artificial Sequence
  Description of Artificial Sequence: Synthetic oligonucleotide
  Target: LAMA2; (-) strand; PAM type: YTN; PAM sequence: TTC
aatattttaatcaccagtag

SEQ ID NO: 202571 - DNA, 20 bp, Artificial Sequence
  Description of Artificial Sequence: Synthetic oligonucleotide
  Target: LAMA2; (-) strand; PAM type: YTN; PAM sequence: TTT
caatattttaatcaccagta

SEQ ID NO: 202572 - DNA, 20 bp, Artificial Sequence
  Description of Artificial Sequence: Synthetic oligonucleotide
  Target: LAMA2; (-) strand; PAM type: YTN; PAM sequence: TTA
tagtttcaatattttaatca

SEQ ID NO: 202573 - DNA, 20 bp, Artificial Sequence
  Description of Artificial Sequence: Synthetic oligonucleotide
  Target: LAMA2; (-) strand; PAM type: YTN; PAM sequence: CTG
ttatagtttcaatattttaa

SEQ ID NO: 202574 - DNA, 20 bp, Artificial Sequence
  Description of Artificial Sequence: Synthetic oligonucleotide
  Target: LAMA2; (-) strand; PAM type: YTN; PAM sequence: TTA
aaaatcatgccaaaaatact

SEQ ID NO: 202575 - DNA, 20 bp, Artificial Sequence
  Description of Artificial Sequence: Synthetic oligonucleotide
  Target: LAMA2; (-) strand; PAM type: YTN; PAM sequence: TTT
aaaaatcatgccaaaaatac

SEQ ID NO: 202576 - DNA, 20 bp, Artificial Sequence
  Description of Artificial Sequence: Synthetic oligonucleotide
  Target: LAMA2; (-) strand; PAM type: YTN; PAM sequence: CTG
aaagaagtatttaaaaatca

SEQ ID NO: 202577 - DNA, 20 bp, Artificial Sequence
  Description of Artificial Sequence: Synthetic oligonucleotide
  Target: LAMA2; (-) strand; PAM type: YTN; PAM sequence: TTA
gagaagtatatagctgaaag

SEQ ID NO: 202578 - DNA, 20 bp, Artificial Sequence
  Description of Artificial Sequence: Synthetic oligonucleotide
  Target: LAMA2; (-) strand; PAM type: YTN; PAM sequence: TTA
aatcaaataataagccaata

SEQ ID NO: 202579 - DNA, 20 bp, Artificial Sequence
  Description of Artificial Sequence: Synthetic oligonucleotide
  Target: LAMA2; (-) strand; PAM type: YTN; PAM sequence: CTA
aggacaattaaatcaaataa

SEQ ID NO: 202580 - DNA, 20 bp, Artificial Sequence
  Description of Artificial Sequence: Synthetic oligonucleotide
  Target: LAMA2; (-) strand; PAM type: YTN; PAM sequence: CTG
cctaaggacaattaaatcaa

SEQ ID NO: 202581 - DNA, 20 bp, Artificial Sequence
  Description of Artificial Sequence: Synthetic oligonucleotide
  Target: LAMA2; (-) strand; PAM type: YTN; PAM sequence: TTA
acactgcctaaggacaatta

SEQ ID NO: 202582 - DNA, 20 bp, Artificial Sequence
  Description of Artificial Sequence: Synthetic oligonucleotide
  Target: LAMA2; (-) strand; PAM type: YTN; PAM sequence: CTC
ataattaacactgcctaagg

SEQ ID NO: 202583 - DNA, 20 bp, Artificial Sequence
  Description of Artificial Sequence: Synthetic oligonucleotide
  Target: LAMA2; (-) strand; PAM type: YTN; PAM sequence: CTC
tcataattaacactgcctaa

SEQ ID NO: 202584 - DNA, 20 bp, Artificial Sequence
  Description of Artificial Sequence: Synthetic oligonucleotide
  Target: LAMA2; (-) strand; PAM type: YTN; PAM sequence: CTC
ggcaaactctcataattaac

SEQ ID NO: 202585 - DNA, 20 bp, Artificial Sequence
  Description of Artificial Sequence: Synthetic oligonucleotide
  Target: LAMA2; (-) strand; PAM type: YTN; PAM sequence: TTC
ccaagaagaaactcggcaaa

SEQ ID NO: 202586 - DNA, 20 bp, Artificial Sequence
  Description of Artificial Sequence: Synthetic oligonucleotide
  Target: LAMA2; (-) strand; PAM type: YTN; PAM sequence: CTC
aaattcccaagaagaaactc

SEQ ID NO: 202587 - DNA, 20 bp, Artificial Sequence
  Description of Artificial Sequence: Synthetic oligonucleotide
  Target: LAMA2; (-) strand; PAM type: YTN; PAM sequence: TTC
tcaaattcccaagaagaaac

SEQ ID NO: 202588 - DNA, 20 bp, Artificial Sequence
  Description of Artificial Sequence: Synthetic oligonucleotide
  Target: LAMA2; (-) strand; PAM type: YTN; PAM sequence: TTA
ttctcaaattcccaagaaga

SEQ ID NO: 202589 - DNA, 20 bp, Artificial Sequence
  Description of Artificial Sequence: Synthetic oligonucleotide
  Target: LAMA2; (-) strand; PAM type: YTN; PAM sequence: TTT
attctcaaattcccaagaag

SEQ ID NO: 202590 - DNA, 20 bp, Artificial Sequence
  Description of Artificial Sequence: Synthetic oligonucleotide
  Target: LAMA2; (-) strand; PAM type: YTN; PAM sequence: CTT
tattctcaaattcccaagaa

SEQ ID NO: 202591 - DNA, 20 bp, Artificial Sequence
  Description of Artificial Sequence: Synthetic oligonucleotide
  Target: LAMA2; (-) strand; PAM type: YTN; PAM sequence: TTC
ccgcatcctttattctcaaa

SEQ ID NO: 202592 - DNA, 20 bp, Artificial Sequence
  Description of Artificial Sequence: Synthetic oligonucleotide
  Target: LAMA2; (-) strand; PAM type: YTN; PAM sequence: TTT
cccgcatcctttattctcaa

SEQ ID NO: 202593 - DNA, 20 bp, Artificial Sequence
  Description of Artificial Sequence: Synthetic oligonucleotide
  Target: LAMA2; (-) strand; PAM type: YTN; PAM sequence: CTT
tcccgcatcctttattctca

SEQ ID NO: 202594 - DNA, 20 bp, Artificial Sequence
  Description of Artificial Sequence: Synthetic oligonucleotide
  Target: LAMA2; (-) strand; PAM type: YTN; PAM sequence: CTC
tttcccgcatcctttattct

SEQ ID NO: 202595 - DNA, 20 bp, Artificial Sequence
  Description of Artificial Sequence: Synthetic oligonucleotide
  Target: LAMA2; (-) strand; PAM type: YTN; PAM sequence: CTC
ctctttcccgcatcctttat

SEQ ID NO: 202596 - DNA, 20 bp, Artificial Sequence
  Description of Artificial Sequence: Synthetic oligonucleotide
  Target: LAMA2; (-) strand; PAM type: YTN; PAM sequence: CTC
cacccacctcctctttcccg

SEQ ID NO: 202597 - DNA, 20 bp, Artificial Sequence
  Description of Artificial Sequence: Synthetic oligonucleotide
  Target: LAMA2; (-) strand; PAM type: YTN; PAM sequence: TTA
tatccatcctccacccacct

SEQ ID NO: 202598 - DNA, 20 bp, Artificial Sequence
  Description of Artificial Sequence: Synthetic oligonucleotide
  Target: LAMA2; (-) strand; PAM type: YTN; PAM sequence: TTT
atatccatcctccacccacc

SEQ ID NO: 202599 - DNA, 20 bp, Artificial Sequence
  Description of Artificial Sequence: Synthetic oligonucleotide
  Target: LAMA2; (-) strand; PAM type: YTN; PAM sequence: TTG
aaaaaacagtttatatccat

SEQ ID NO: 202600 - DNA, 20 bp, Artificial Sequence
  Description of Artificial Sequence: Synthetic oligonucleotide
  Target: LAMA2; (-) strand; PAM type: YTN; PAM sequence: TTC
agtacattgaaaaaacagtt

SEQ ID NO: 202601 - DNA, 20 bp, Artificial Sequence
  Description of Artificial Sequence: Synthetic oligonucleotide
  Target: LAMA2; (-) strand; PAM type: YTN; PAM sequence: CTT
cagtacattgaaaaaacagt

SEQ ID NO: 202602 - DNA, 20 bp, Artificial Sequence
  Description of Artificial Sequence: Synthetic oligonucleotide
  Target: LAMA2; (-) strand; PAM type: YTN; PAM sequence: CTG
aaatgccttcagtacattga

SEQ ID NO: 202603 - DNA, 20 bp, Artificial Sequence
  Description of Artificial Sequence: Synthetic oligonucleotide
  Target: LAMA2; (-) strand; PAM type: YTN; PAM sequence: CTG
gtaatctgaaatgccttcag

SEQ ID NO: 202604 - DNA, 20 bp, Artificial Sequence
  Description of Artificial Sequence: Synthetic oligonucleotide
  Target: LAMA2; (-) strand; PAM type: YTN; PAM sequence: TTC
tggtaatctgaaatgccttc

SEQ ID NO: 202605 - DNA, 20 bp, Artificial Sequence
  Description of Artificial Sequence: Synthetic oligonucleotide
  Target: LAMA2; (-) strand; PAM type: YTN; PAM sequence: CTT
ctggtaatctgaaatgcctt

SEQ ID NO: 202606 - DNA, 20 bp, Artificial Sequence
  Description of Artificial Sequence: Synthetic oligonucleotide
  Target: LAMA2; (-) strand; PAM type: YTN; PAM sequence: TTC
ttctggtaatctgaaatgcc

SEQ ID NO: 202607 - DNA, 20 bp, Artificial Sequence
  Description of Artificial Sequence: Synthetic oligonucleotide
  Target: LAMA2; (-) strand; PAM type: YTN; PAM sequence: CTG
tgattcttctggtaatctga

SEQ ID NO: 202608 - DNA, 20 bp, Artificial Sequence
  Description of Artificial Sequence: Synthetic oligonucleotide
  Target: LAMA2; (-) strand; PAM type: YTN; PAM sequence: CTC
tgtgattcttctggtaatct

SEQ ID NO: 202609 - DNA, 20 bp, Artificial Sequence
  Description of Artificial Sequence: Synthetic oligonucleotide
  Target: LAMA2; (-) strand; PAM type: YTN; PAM sequence: TTG
tctctgtgattcttctggta

SEQ ID NO: 202610 - DNA, 20 bp, Artificial Sequence
  Description of Artificial Sequence: Synthetic oligonucleotide
  Target: LAMA2; (-) strand; PAM type: YTN; PAM sequence: CTT
gtctctgtgattcttctggt

SEQ ID NO: 202611 - DNA, 20 bp, Artificial Sequence
  Description of Artificial Sequence: Synthetic oligonucleotide
  Target: LAMA2; (-) strand; PAM type: YTN; PAM sequence: CTA
aatggtcccttgtctctgtg

SEQ ID NO: 202612 - DNA, 20 bp, Artificial Sequence
  Description of Artificial Sequence: Synthetic oligonucleotide
  Target: LAMA2; (-) strand; PAM type: YTN; PAM sequence: CTA
tggctaaatggtcccttgtc

SEQ ID NO: 202613 - DNA, 20 bp, Artificial Sequence
  Description of Artificial Sequence: Synthetic oligonucleotide
  Target: LAMA2; (-) strand; PAM type: YTN; PAM sequence: TTA
accctatggctaaatggtcc

SEQ ID NO: 202614 - DNA, 20 bp, Artificial Sequence
  Description of Artificial Sequence: Synthetic oligonucleotide
  Target: LAMA2; (-) strand; PAM type: YTN; PAM sequence: TTT
aaccctatggctaaatggtc

SEQ ID NO: 202615 - DNA, 20 bp, Artificial Sequence
  Description of Artificial Sequence: Synthetic oligonucleotide
  Target: LAMA2; (-) strand; PAM type: YTN; PAM sequence: TTG
tggggtaggtaaagtgacag

SEQ ID NO: 202616 - DNA, 20 bp, Artificial Sequence
  Description of Artificial Sequence: Synthetic oligonucleotide
  Target: LAMA2; (-) strand; PAM type: YTN; PAM sequence: TTT
gtggggtaggtaaagtgaca

SEQ ID NO: 202617 - DNA, 20 bp, Artificial Sequence
  Description of Artificial Sequence: Synthetic oligonucleotide
  Target: LAMA2; (-) strand; PAM type: YTN; PAM sequence: TTA
tttgtggggtaggtaaagtg

SEQ ID NO: 202618 - DNA, 20 bp, Artificial Sequence
  Description of Artificial Sequence: Synthetic oligonucleotide
  Target: LAMA2; (-) strand; PAM type: YTN; PAM sequence: CTT
atttgtggggtaggtaaagt

SEQ ID NO: 202619 - DNA, 20 bp, Artificial Sequence
  Description of Artificial Sequence: Synthetic oligonucleotide
  Target: LAMA2; (-) strand; PAM type: YTN; PAM sequence: TTA
cttatttgtggggtaggtaa

SEQ ID NO: 202620 - DNA, 20 bp, Artificial Sequence
  Description of Artificial Sequence: Synthetic oligonucleotide
  Target: LAMA2; (-) strand; PAM type: YTN; PAM sequence: TTG
ccatagttacttatttgtgg

SEQ ID NO: 202621 - DNA, 20 bp, Artificial Sequence
  Description of Artificial Sequence: Synthetic oligonucleotide
  Target: LAMA2; (-) strand; PAM type: YTN; PAM sequence: TTC
agtgagttgccatagttact

SEQ ID NO: 202622 - DNA, 20 bp, Artificial Sequence
  Description of Artificial Sequence: Synthetic oligonucleotide
  Target: LAMA2; (-) strand; PAM type: YTN; PAM sequence: TTT
cagtgagttgccatagttac

SEQ ID NO: 202623 - DNA, 20 bp, Artificial Sequence
  Description of Artificial Sequence: Synthetic oligonucleotide
  Target: LAMA2; (-) strand; PAM type: YTN; PAM sequence: CTT
tcagtgagttgccatagtta

SEQ ID NO: 202624 - DNA, 20 bp, Artificial Sequence
  Description of Artificial Sequence: Synthetic oligonucleotide
  Target: LAMA2; (-) strand; PAM type: YTN; PAM sequence: CTA
agcactttcagtgagttgcc

SEQ ID NO: 202625 - DNA, 20 bp, Artificial Sequence
  Description of Artificial Sequence: Synthetic oligonucleotide
  Target: LAMA2; (-) strand; PAM type: YTN; PAM sequence: CTC
ccatggtagctaagcacttt

SEQ ID NO: 202626 - DNA, 20 bp, Artificial Sequence
  Description of Artificial Sequence: Synthetic oligonucleotide
  Target: LAMA2; (-) strand; PAM type: YTN; PAM sequence: CTC
catccactcccatggtagct

SEQ ID NO: 202627 - DNA, 20 bp, Artificial Sequence
  Description of Artificial Sequence: Synthetic oligonucleotide
  Target: LAMA2; (-) strand; PAM type: YTN; PAM sequence: TTG
tccccacaaagcacgaactc

SEQ ID NO: 202628 - DNA, 20 bp, Artificial Sequence
  Description of Artificial Sequence: Synthetic oligonucleotide
  Target: LAMA2; (-) strand; PAM type: YTN; PAM sequence: TTA
tggatgggggcatagaggtc

SEQ ID NO: 202629 - DNA, 20 bp, Artificial Sequence
  Description of Artificial Sequence: Synthetic oligonucleotide
  Target: LAMA2; (-) strand; PAM type: YTN; PAM sequence: CTT
atggatgggggcatagaggt

SEQ ID NO: 202630 - DNA, 20 bp, Artificial Sequence
  Description of Artificial Sequence: Synthetic oligonucleotide
  Target: LAMA2; (-) strand; PAM type: YTN; PAM sequence: TTC
ccagggtcccttatggatgg

SEQ ID NO: 202631 - DNA, 20 bp, Artificial Sequence
  Description of Artificial Sequence: Synthetic oligonucleotide
  Target: LAMA2; (-) strand; PAM type: YTN; PAM sequence: CTA
gaaggcaattcccagggtcc

SEQ ID NO: 202632 - DNA, 20 bp, Artificial Sequence
  Description of Artificial Sequence: Synthetic oligonucleotide
  Target: LAMA2; (-) strand; PAM type: YTN; PAM sequence: CTG
ctagaaggcaattcccaggg

SEQ ID NO: 202633 - DNA, 20 bp, Artificial Sequence
  Description of Artificial Sequence: Synthetic oligonucleotide
  Target: LAMA2; (-) strand; PAM type: YTN; PAM sequence: CTC
tgctagaaggcaattcccag

SEQ ID NO: 202634 - DNA, 20 bp, Artificial Sequence
  Description of Artificial Sequence: Synthetic oligonucleotide
  Target: LAMA2; (-) strand; PAM type: YTN; PAM sequence: CTC
tctgctagaaggcaattccc

SEQ ID NO: 202635 - DNA, 20 bp, Artificial Sequence
  Description of Artificial Sequence: Synthetic oligonucleotide
  Target: LAMA2; (-) strand; PAM type: YTN; PAM sequence: TTG
gcctctctgctagaaggcaa

SEQ ID NO: 202636 - DNA, 20 bp, Artificial Sequence
  Description of Artificial Sequence: Synthetic oligonucleotide
  Target: LAMA2; (-) strand; PAM type: YTN; PAM sequence: TTG
aaatgtgagttggcctctct

SEQ ID NO: 202637 - DNA, 20 bp, Artificial Sequence
  Description of Artificial Sequence: Synthetic oligonucleotide
  Target: LAMA2; (-) strand; PAM type: YTN; PAM sequence: TTT
gaaatgtgagttggcctctc

SEQ ID NO: 202638 - DNA, 20 bp, Artificial Sequence
  Description of Artificial Sequence: Synthetic oligonucleotide
  Target: LAMA2; (-) strand; PAM type: YTN; PAM sequence: TTA
tttgaaatgtgagttggcct

SEQ ID NO: 202639 - DNA, 20 bp, Artificial Sequence
  Description of Artificial Sequence: Synthetic oligonucleotide
  Target: LAMA2; (-) strand; PAM type: YTN; PAM sequence: CTT
atttgaaatgtgagttggcc

SEQ ID NO: 202640 - DNA, 20 bp, Artificial Sequence
  Description of Artificial Sequence: Synthetic oligonucleotide
  Target: LAMA2; (-) strand; PAM type: YTN; PAM sequence: TTG
aggagggaaaaatacttatt

SEQ ID NO: 202641 - DNA, 20 bp, Artificial Sequence
  Description of Artificial Sequence: Synthetic oligonucleotide
  Target: LAMA2; (-) strand; PAM type: YTN; PAM sequence: TTA
gaaaagcagttgaggaggga

SEQ ID NO: 202642 - DNA, 20 bp, Artificial Sequence
  Description of Artificial Sequence: Synthetic oligonucleotide
  Target: LAMA2; (-) strand; PAM type: YTN; PAM sequence: CTT
agaaaagcagttgaggaggg

SEQ ID NO: 202643 - DNA, 20 bp, Artificial Sequence
  Description of Artificial Sequence: Synthetic oligonucleotide
  Target: LAMA2; (-) strand; PAM type: YTN; PAM sequence: TTA
atgtgcaaagcttagaaaag

SEQ ID NO: 202644 - DNA, 20 bp, Artificial Sequence
  Description of Artificial Sequence: Synthetic oligonucleotide
  Target: LAMA2; (-) strand; PAM type: YTN; PAM sequence: CTA
ggtcagtgttaatgtgcaaa

SEQ ID NO: 202645 - DNA, 20 bp, Artificial Sequence
  Description of Artificial Sequence: Synthetic oligonucleotide
  Target: LAMA2; (-) strand; PAM type: YTN; PAM sequence: TTA
aatggtgcactaggtcagtg

SEQ ID NO: 202646 - DNA, 20 bp, Artificial Sequence
  Description of Artificial Sequence: Synthetic oligonucleotide
  Target: LAMA2; (-) strand; PAM type: YTN; PAM sequence: TTT
aaatggtgcactaggtcagt

SEQ ID NO: 202647 - DNA, 20 bp, Artificial Sequence
  Description of Artificial Sequence: Synthetic oligonucleotide
  Target: LAMA2; (-) strand; PAM type: YTN; PAM sequence: TTT
taaatggtgcactaggtcag

SEQ ID NO: 202648 - DNA, 20 bp, Artificial Sequence
  Description of Artificial Sequence: Synthetic oligonucleotide
  Target: LAMA2; (-) strand; PAM type: YTN; PAM sequence: CTT
ttaaatggtgcactaggtca

SEQ ID NO: 202649 - DNA, 20 bp, Artificial Sequence
  Description of Artificial Sequence: Synthetic oligonucleotide
  Target: LAMA2; (-) strand; PAM type: YTN; PAM sequence: TTA
ggacttttaaatggtgcact

SEQ ID NO: 202650 - DNA, 20 bp, Artificial Sequence
  Description of Artificial Sequence: Synthetic oligonucleotide
  Target: LAMA2; (-) strand; PAM type: YTN; PAM sequence: TTT
aggacttttaaatggtgcac

SEQ ID NO: 202651 - DNA, 20 bp, Artificial Sequence
  Description of Artificial Sequence: Synthetic oligonucleotide
  Target: LAMA2; (-) strand; PAM type: YTN; PAM sequence: CTG
tgtgatatatttaggacttt

SEQ ID NO: 202652 - DNA, 20 bp, Artificial Sequence
  Description of Artificial Sequence: Synthetic oligonucleotide
  Target: LAMA2; (-) strand; PAM type: YTN; PAM sequence: CTG
gcgactgtgtgatatattta

SEQ ID NO: 202653 - DNA, 20 bp, Artificial Sequence
  Description of Artificial Sequence: Synthetic oligonucleotide
  Target: LAMA2; (-) strand; PAM type: YTN; PAM sequence: TTG
ggctggcgactgtgtgatat

SEQ ID NO: 202654 - DNA, 20 bp, Artificial Sequence
  Description of Artificial Sequence: Synthetic oligonucleotide
  Target: LAMA2; (-) strand; PAM type: YTN; PAM sequence: TTG
attgggctggcgactgtgtg

SEQ ID NO: 202655 - DNA, 20 bp, Artificial Sequence
  Description of Artificial Sequence: Synthetic oligonucleotide
  Target: LAMA2; (-) strand; PAM type: YTN; PAM sequence: CTT
gattgggctggcgactgtgt

SEQ ID NO: 202656 - DNA, 20 bp, Artificial Sequence
  Description of Artificial Sequence: Synthetic oligonucleotide
  Target: LAMA2; (-) strand; PAM type: YTN; PAM sequence: CTC
accttgattgggctggcgac

SEQ ID NO: 202657 - DNA, 20 bp, Artificial Sequence
  Description of Artificial Sequence: Synthetic oligonucleotide
  Target: LAMA2; (-) strand; PAM type: YTN; PAM sequence: CTG
accactcaccttgattgggc

SEQ ID NO: 202658 - DNA, 20 bp, Artificial Sequence
  Description of Artificial Sequence: Synthetic oligonucleotide
  Target: LAMA2; (-) strand; PAM type: YTN; PAM sequence: CTG
gtgtctgaccactcaccttg

SEQ ID NO: 202659 - DNA, 20 bp, Artificial Sequence
  Description of Artificial Sequence: Synthetic oligonucleotide
  Target: LAMA2; (-) strand; PAM type: YTN; PAM sequence: CTG
tgcacagcatgctggtgtct

SEQ ID NO: 202660 - DNA, 20 bp, Artificial Sequence
  Description of Artificial Sequence: Synthetic oligonucleotide
  Target: LAMA2; (-) strand; PAM type: YTN; PAM sequence: CTA
gcatactgtgcacagcatgc

SEQ ID NO: 202661 - DNA, 20 bp, Artificial Sequence
  Description of Artificial Sequence: Synthetic oligonucleotide
  Target: LAMA2; (-) strand; PAM type: YTN; PAM sequence: CTA
aggccaactagcatactgtg

SEQ ID NO: 202662 - DNA, 20 bp, Artificial Sequence
  Description of Artificial Sequence: Synthetic oligonucleotide
  Target: LAMA2; (-) strand; PAM type: YTN; PAM sequence: CTC
taaggccaactagcatactg

SEQ ID NO: 202663 - DNA, 20 bp, Artificial Sequence
  Description of Artificial Sequence: Synthetic oligonucleotide
  Target: LAMA2; (-) strand; PAM type: YTN; PAM sequence: TTA
ctctaaggccaactagcata

SEQ ID NO: 202664 - DNA, 20 bp, Artificial Sequence
  Description of Artificial Sequence: Synthetic oligonucleotide
  Target: LAMA2; (-) strand; PAM type: YTN; PAM sequence: CTG
tattactctaaggccaacta

SEQ ID NO: 202665 - DNA, 20 bp, Artificial Sequence
  Description of Artificial Sequence: Synthetic oligonucleotide
  Target: LAMA2; (-) strand; PAM type: YTN; PAM sequence: CTG
gacataaatggtgtaccctg

SEQ ID NO: 202666 - DNA, 20 bp, Artificial Sequence
  Description of Artificial Sequence: Synthetic oligonucleotide
  Target: LAMA2; (-) strand; PAM type: YTN; PAM sequence: TTA
actggacataaatggtgtac

SEQ ID NO: 202667 - DNA, 20 bp, Artificial Sequence
  Description of Artificial Sequence: Synthetic oligonucleotide
  Target: LAMA2; (-) strand; PAM type: YTN; PAM sequence: CTG
gttaactggacataaatggt

SEQ ID NO: 202668 - DNA, 20 bp, Artificial Sequence
  Description of Artificial Sequence: Synthetic oligonucleotide
  Target: LAMA2; (-) strand; PAM type: YTN; PAM sequence: CTA
gagggtcacctggttaactg

SEQ ID NO: 202669 - DNA, 20 bp, Artificial Sequence
  Description of Artificial Sequence: Synthetic oligonucleotide
  Target: LAMA2; (-) strand; PAM type: YTN; PAM sequence: TTA
ataaagcaactagagggtca

SEQ ID NO: 202670 - DNA, 20 bp, Artificial Sequence
  Description of Artificial Sequence: Synthetic oligonucleotide
  Target: LAMA2; (-) strand; PAM type: YTN; PAM sequence: CTT
aataaagcaactagagggtc

SEQ ID NO: 202671 - DNA, 20 bp, Artificial Sequence
  Description of Artificial Sequence: Synthetic oligonucleotide
  Target: LAMA2; (-) strand; PAM type: YTN; PAM sequence: CTG
tgcttaataaagcaactaga

SEQ ID NO: 202672 - DNA, 20 bp, Artificial Sequence
  Description of Artificial Sequence: Synthetic oligonucleotide
  Target: LAMA2; (-) strand; PAM type: YTN; PAM sequence: TTG
acagtcaagcctgtgcttaa

SEQ ID NO: 202673 - DNA, 20 bp, Artificial Sequence
  Description of Artificial Sequence: Synthetic oligonucleotide
  Target: LAMA2; (-) strand; PAM type: YTN; PAM sequence: TTT
gacagtcaagcctgtgctta

SEQ ID NO: 202674 - DNA, 20 bp, Artificial Sequence
  Description of Artificial Sequence: Synthetic oligonucleotide
  Target: LAMA2; (-) strand; PAM type: YTN; PAM sequence: CTG
tttgacagtcaagcctgtgc

SEQ ID NO: 202675 - DNA, 20 bp, Artificial Sequence
  Description of Artificial Sequence: Synthetic oligonucleotide
  Target: LAMA2; (-) strand; PAM type: YTN; PAM sequence: TTG
tgacctgtttgacagtcaag

SEQ ID NO: 202676 - DNA, 20 bp, Artificial Sequence
  Description of Artificial Sequence: Synthetic oligonucleotide
  Target: LAMA2; (-) strand; PAM type: YTN; PAM sequence: CTT
gtgacctgtttgacagtcaa

SEQ ID NO: 202677 - DNA, 20 bp, Artificial Sequence
  Description of Artificial Sequence: Synthetic oligonucleotide
  Target: LAMA2; (-) strand; PAM type: YTN; PAM sequence: CTC
cttgtgacctgtttgacagt

SEQ ID NO: 202678 - DNA, 20 bp, Artificial Sequence
  Description of Artificial Sequence: Synthetic oligonucleotide
  Target: LAMA2; (-) strand; PAM type: YTN; PAM sequence: TTG
tcctccttgtgacctgtttg

SEQ ID NO: 202679 - DNA, 20 bp, Artificial Sequence
  Description of Artificial Sequence: Synthetic oligonucleotide
  Target: LAMA2; (-) strand; PAM type: YTN; PAM sequence: TTT
gtcctccttgtgacctgttt

SEQ ID NO: 202680 - DNA, 20 bp, Artificial Sequence
  Description of Artificial Sequence: Synthetic oligonucleotide
  Target: LAMA2; (-) strand; PAM type: YTN; PAM sequence: TTT
tgtcctccttgtgacctgtt

SEQ ID NO: 202681 - DNA, 20 bp, Artificial Sequence
  Description of Artificial Sequence: Synthetic oligonucleotide
  Target: LAMA2; (-) strand; PAM type: YTN; PAM sequence: TTT
ttgtcctccttgtgacctgt

SEQ ID NO: 202682 - DNA, 20 bp, Artificial Sequence
  Description of Artificial Sequence: Synthetic oligonucleotide
  Target: LAMA2; (-) strand; PAM type: YTN; PAM sequence: CTT
tttgtcctccttgtgacctg

SEQ ID NO: 202683 - DNA, 20 bp, Artificial Sequence
  Description of Artificial Sequence: Synthetic oligonucleotide
  Target: LAMA2; (-) strand; PAM type: YTN; PAM sequence: TTC
atacgatgcaaggacacttt

SEQ ID NO: 202684 - DNA, 20 bp, Artificial Sequence
  Description of Artificial Sequence: Synthetic oligonucleotide
  Target: LAMA2; (-) strand; PAM type: YTN; PAM sequence: TTT
catacgatgcaaggacactt

SEQ ID NO: 202685 - DNA, 20 bp, Artificial Sequence
  Description of Artificial Sequence: Synthetic oligonucleotide
  Target: LAMA2; (-) strand; PAM type: YTN; PAM sequence: TTT
tcatacgatgcaaggacact

SEQ ID NO: 202686 - DNA, 20 bp, Artificial Sequence
  Description of Artificial Sequence: Synthetic oligonucleotide
  Target: LAMA2; (-) strand; PAM type: YTN; PAM sequence: CTT
ttcatacgatgcaaggacac

SEQ ID NO: 202687 - DNA, 20 bp, Artificial Sequence
  Description of Artificial Sequence: Synthetic oligonucleotide
  Target: LAMA2; (-) strand; PAM type: YTN; PAM sequence: CTC
ttttcatacgatgcaaggac

SEQ ID NO: 202688 - DNA, 20 bp, Artificial Sequence
  Description of Artificial Sequence: Synthetic oligonucleotide
  Target: LAMA2; (-) strand; PAM type: YTN; PAM sequence: TTC
aagcaactcttttcatacga

SEQ ID NO: 202689 - DNA, 20 bp, Artificial Sequence
  Description of Artificial Sequence: Synthetic oligonucleotide
  Target: LAMA2; (-) strand; PAM type: YTN; PAM sequence: TTT
caagcaactcttttcatacg

SEQ ID NO: 202690 - DNA, 20 bp, Artificial Sequence
  Description of Artificial Sequence: Synthetic oligonucleotide
  Target: LAMA2; (-) strand; PAM type: YTN; PAM sequence: CTG
tgatttcaagcaactctttt

SEQ ID NO: 202691 - DNA, 20 bp, Artificial Sequence
  Description of Artificial Sequence: Synthetic oligonucleotide
  Target: LAMA2; (-) strand; PAM type: YTN; PAM sequence: TTC
tgtgatttcaagcaactctt

SEQ ID NO: 202692 - DNA, 20 bp, Artificial Sequence
  Description of Artificial Sequence: Synthetic oligonucleotide
  Target: LAMA2; (-) strand; PAM type: YTN; PAM sequence: TTA
atagagggtattctgtgatt

SEQ ID NO: 202693 - DNA, 20 bp, Artificial Sequence
  Description of Artificial Sequence: Synthetic oligonucleotide
  Target: LAMA2; (-) strand; PAM type: YTN; PAM sequence: TTA
gcaattaatagagggtattc

SEQ ID NO: 202694 - DNA, 20 bp, Artificial Sequence
  Description of Artificial Sequence: Synthetic oligonucleotide
  Target: LAMA2; (-) strand; PAM type: YTN; PAM sequence: TTT
agcaattaatagagggtatt

SEQ ID NO: 202695 - DNA, 20 bp, Artificial Sequence
  Description of Artificial Sequence: Synthetic oligonucleotide
  Target: LAMA2; (-) strand; PAM type: YTN; PAM sequence: TTT
tagcaattaatagagggtat

SEQ ID NO: 202696 - DNA, 20 bp, Artificial Sequence
  Description of Artificial Sequence: Synthetic oligonucleotide
  Target: LAMA2; (-) strand; PAM type: YTN; PAM sequence: TTG
gattttagcaattaatagag

SEQ ID NO: 202697 - DNA, 20 bp, Artificial Sequence
  Description of Artificial Sequence: Synthetic oligonucleotide
  Target: LAMA2; (-) strand; PAM type: YTN; PAM sequence: TTC
aggtggaaattggattttag

SEQ ID NO: 202698 - DNA, 20 bp, Artificial Sequence
  Description of Artificial Sequence: Synthetic oligonucleotide
  Target: LAMA2; (-) strand; PAM type: YTN; PAM sequence: CTT
caggtggaaattggatttta

SEQ ID NO: 202699 - DNA, 20 bp, Artificial Sequence
  Description of Artificial Sequence: Synthetic oligonucleotide
  Target: LAMA2; (-) strand; PAM type: YTN; PAM sequence: CTC
acgagtcatggaggcatgtc

SEQ ID NO: 202700 - DNA, 20 bp, Artificial Sequence
  Description of Artificial Sequence: Synthetic oligonucleotide
  Target: LAMA2; (-) strand; PAM type: YTN; PAM sequence: TTC
tcacgagtcatggaggcatg

SEQ ID NO: 202701 - DNA, 20 bp, Artificial Sequence
  Description of Artificial Sequence: Synthetic oligonucleotide
  Target: LAMA2; (-) strand; PAM type: YTN; PAM sequence: TTT
ctcacgagtcatggaggcat

SEQ ID NO: 202702 - DNA, 20 bp, Artificial Sequence
  Description of Artificial Sequence: Synthetic oligonucleotide
  Target: LAMA2; (-) strand; PAM type: YTN; PAM sequence: TTT
tctcacgagtcatggaggca

SEQ ID NO: 202703 - DNA, 20 bp, Artificial Sequence
  Description of Artificial Sequence: Synthetic oligonucleotide
  Target: LAMA2; (-) strand; PAM type: YTN; PAM sequence: TTT
ttctcacgagtcatggaggc

SEQ ID NO: 202704 - DNA, 20 bp, Artificial Sequence
  Description of Artificial Sequence: Synthetic oligonucleotide
  Target: LAMA2; (-) strand; PAM type: YTN; PAM sequence: TTG
atttttctcacgagtcatgg

SEQ ID NO: 202705 - DNA, 20 bp, Artificial Sequence
  Description of Artificial Sequence: Synthetic oligonucleotide
  Target: LAMA2; (-) strand; PAM type: YTN; PAM sequence: CTA
aataattgatttttctcacg

SEQ ID NO: 202706 - DNA, 20 bp, Artificial Sequence
  Description of Artificial Sequence: Synthetic oligonucleotide
  Target: LAMA2; (-) strand; PAM type: YTN; PAM sequence: TTA
cctaaataattgatttttct

SEQ ID NO: 202707 - DNA, 20 bp, Artificial Sequence
  Description of Artificial Sequence: Synthetic oligonucleotide
  Target: LAMA2; (-) strand; PAM type: YTN; PAM sequence: TTT
acctaaataattgatttttc

SEQ ID NO: 202708 - DNA, 20 bp, Artificial Sequence
  Description of Artificial Sequence: Synthetic oligonucleotide
  Target: LAMA2; (-) strand; PAM type: YTN; PAM sequence: CTA
tttacctaaataattgattt

SEQ ID NO: 202709 - DNA, 20 bp, Artificial Sequence
  Description of Artificial Sequence: Synthetic oligonucleotide
  Target: LAMA2; (-) strand; PAM type: YTN; PAM sequence: TTG
cagatcctatttacctaaat

SEQ ID NO: 202710 - DNA, 20 bp, Artificial Sequence
  Description of Artificial Sequence: Synthetic oligonucleotide
  Target: LAMA2; (-) strand; PAM type: YTN; PAM sequence: TTG
agttgcagatcctatttacc

SEQ ID NO: 202711 - DNA, 20 bp, Artificial Sequence
  Description of Artificial Sequence: Synthetic oligonucleotide
  Target: LAMA2; (-) strand; PAM type: YTN; PAM sequence: TTT
gagttgcagatcctatttac

SEQ ID NO: 202712 - DNA, 20 bp, Artificial Sequence
  Description of Artificial Sequence: Synthetic oligonucleotide
  Target: LAMA2; (-) strand; PAM type: YTN; PAM sequence: CTG
agtgtttgagttgcagatcc

SEQ ID NO: 202713 - DNA, 20 bp, Artificial Sequence
  Description of Artificial Sequence: Synthetic oligonucleotide
  Target: LAMA2; (-) strand; PAM type: YTN; PAM sequence: CTA
ataggtctgagtgtttgagt

SEQ ID NO: 202714 - DNA, 20 bp, Artificial Sequence
  Description of Artificial Sequence: Synthetic oligonucleotide
  Target: LAMA2; (-) strand; PAM type: YTN; PAM sequence: CTC
taataggtctgagtgtttga

SEQ ID NO: 202715 - DNA, 20 bp, Artificial Sequence
  Description of Artificial Sequence: Synthetic oligonucleotide
  Target: LAMA2; (-) strand; PAM type: YTN; PAM sequence: CTA
gatactctaataggtctgag

SEQ ID NO: 202716 - DNA, 20 bp, Artificial Sequence
  Description of Artificial Sequence: Synthetic oligonucleotide
  Target: LAMA2; (-) strand; PAM type: YTN; PAM sequence: CTG
ctagatactctaataggtct

SEQ ID NO: 202717 - DNA, 20 bp, Artificial Sequence
  Description of Artificial Sequence: Synthetic oligonucleotide
  Target: LAMA2; (-) strand; PAM type: YTN; PAM sequence: CTG
gcatgctgctagatactcta

SEQ ID NO: 202718 - DNA, 20 bp, Artificial Sequence
  Description of Artificial Sequence: Synthetic oligonucleotide
  Target: LAMA2; (-) strand; PAM type: YTN; PAM sequence: CTC
ctggcatgctgctagatact

SEQ ID NO: 202719 - DNA, 20 bp, Artificial Sequence
  Description of Artificial Sequence: Synthetic oligonucleotide
  Target: LAMA2; (-) strand; PAM type: YTN; PAM sequence: CTA
tctcctggcatgctgctaga

SEQ ID NO: 202720 - DNA, 20 bp, Artificial Sequence
  Description of Artificial Sequence: Synthetic oligonucleotide
  Target: LAMA2; (-) strand; PAM type: YTN; PAM sequence: CTC
agtctatctcctggcatgct

SEQ ID NO: 202721 - DNA, 20 bp, Artificial Sequence
  Description of Artificial Sequence: Synthetic oligonucleotide
  Target: LAMA2; (-) strand; PAM type: YTN; PAM sequence: TTG
cagctcagtctatctcctgg

SEQ ID NO: 202722 - DNA, 20 bp, Artificial Sequence
  Description of Artificial Sequence: Synthetic oligonucleotide
  Target: LAMA2; (-) strand; PAM type: YTN; PAM sequence: CTT
gcagctcagtctatctcctg

SEQ ID NO: 202723 - DNA, 20 bp, Artificial Sequence
  Description of Artificial Sequence: Synthetic oligonucleotide
  Target: LAMA2; (-) strand; PAM type: YTN; PAM sequence: TTA
tcttgcagctcagtctatct

SEQ ID NO: 202724 - DNA, 20 bp, Artificial Sequence
  Description of Artificial Sequence: Synthetic oligonucleotide
  Target: LAMA2; (-) strand; PAM type: YTN; PAM sequence: TTT
atcttgcagctcagtctatc

SEQ ID NO: 202725 - DNA, 20 bp, Artificial Sequence
  Description of Artificial Sequence: Synthetic oligonucleotide
  Target: LAMA2; (-) strand; PAM type: YTN; PAM sequence: TTC
catatttatcttgcagctca

SEQ ID NO: 202726 - DNA, 20 bp, Artificial Sequence
  Description of Artificial Sequence: Synthetic oligonucleotide
  Target: LAMA2; (-) strand; PAM type: YTN; PAM sequence: TTC
cacaagatggttccatattt

SEQ ID NO: 202727 - DNA, 20 bp, Artificial Sequence
  Description of Artificial Sequence: Synthetic oligonucleotide
  Target: LAMA2; (-) strand; PAM type: YTN; PAM sequence: TTA
tattccacaagatggttcca

SEQ ID NO: 202728 - DNA, 20 bp, Artificial Sequence
  Description of Artificial Sequence: Synthetic oligonucleotide
  Target: LAMA2; (-) strand; PAM type: YTN; PAM sequence: TTT
atattccacaagatggttcc

SEQ ID NO: 202729 - DNA, 20 bp, Artificial Sequence
  Description of Artificial Sequence: Synthetic oligonucleotide
  Target: LAMA2; (-) strand; PAM type: YTN; PAM sequence: CTG
aaatttatattccacaagat

SEQ ID NO: 202730 - DNA, 20 bp, Artificial Sequence
  Description of Artificial Sequence: Synthetic oligonucleotide
  Target: LAMA2; (-) strand; PAM type: YTN; PAM sequence: TTA
actgaaatttatattccaca

SEQ ID NO: 202731 - DNA, 20 bp, Artificial Sequence
  Description of Artificial Sequence: Synthetic oligonucleotide
  Target: LAMA2; (-) strand; PAM type: YTN; PAM sequence: TTT
aactgaaatttatattccac

SEQ ID NO: 202732 - DNA, 20 bp, Artificial Sequence
  Description of Artificial Sequence: Synthetic oligonucleotide
  Target: LAMA2; (-) strand; PAM type: YTN; PAM sequence: CTT
taactgaaatttatattcca

SEQ ID NO: 202733 - DNA, 20 bp, Artificial Sequence
  Description of Artificial Sequence: Synthetic oligonucleotide
  Target: LAMA2; (-) strand; PAM type: YTN; PAM sequence: TTA
aaacctttaactgaaattta

SEQ ID NO: 202734 - DNA, 20 bp, Artificial Sequence
  Description of Artificial Sequence: Synthetic oligonucleotide
  Target: LAMA2; (-) strand; PAM type: YTN; PAM sequence: CTT
aaaacctttaactgaaattt

SEQ ID NO: 202735 - DNA, 20 bp, Artificial Sequence
  Description of Artificial Sequence: Synthetic oligonucleotide
  Target: LAMA2; (-) strand; PAM type: YTN; PAM sequence: CTC
cttaaaacctttaactgaaa

SEQ ID NO: 202736 - DNA, 20 bp, Artificial Sequence
  Description of Artificial Sequence: Synthetic oligonucleotide
  Target: LAMA2; (-) strand; PAM type: YTN; PAM sequence: TTA
tatactccttaaaaccttta

SEQ ID NO: 202737 - DNA, 20 bp, Artificial Sequence
  Description of Artificial Sequence: Synthetic oligonucleotide
  Target: LAMA2; (-) strand; PAM type: YTN; PAM sequence: TTA
ttatatactccttaaaacct

SEQ ID NO: 202738 - DNA, 20 bp, Artificial Sequence
  Description of Artificial Sequence: Synthetic oligonucleotide
  Target: LAMA2; (-) strand; PAM type: YTN; PAM sequence: CTT
attatatactccttaaaacc

SEQ ID NO: 202739 - DNA, 20 bp, Artificial Sequence
  Description of Artificial Sequence: Synthetic oligonucleotide
  Target: LAMA2; (-) strand; PAM type: YTN; PAM sequence: TTC
cttattatatactccttaaa

SEQ ID NO: 202740 - DNA, 20 bp, Artificial Sequence
  Description of Artificial Sequence: Synthetic oligonucleotide
  Target: LAMA2; (-) strand; PAM type: YTN; PAM sequence: TTT
ccttattatatactccttaa

SEQ ID NO: 202741 - DNA, 20 bp, Artificial Sequence
  Description of Artificial Sequence: Synthetic oligonucleotide
  Target: LAMA2; (-) strand; PAM type: YTN; PAM sequence: CTT
tccttattatatactcctta

SEQ ID NO: 202742 - DNA, 20 bp, Artificial Sequence
  Description of Artificial Sequence: Synthetic oligonucleotide
  Target: LAMA2; (-) strand; PAM type: YTN; PAM sequence: TTA
atataaaacaatgctttcct

SEQ ID NO: 202743 - DNA, 20 bp, Artificial Sequence
  Description of Artificial Sequence: Synthetic oligonucleotide
  Target: LAMA2; (-) strand; PAM type: YTN; PAM sequence: TTT
aatataaaacaatgctttcc

SEQ ID NO: 202744 - DNA, 20 bp, Artificial Sequence
  Description of Artificial Sequence: Synthetic oligonucleotide
  Target: LAMA2; (-) strand; PAM type: YTN; PAM sequence: TTT
taatataaaacaatgctttc

SEQ ID NO: 202745 - DNA, 20 bp, Artificial Sequence
  Description of Artificial Sequence: Synthetic oligonucleotide
  Target: LAMA2; (-) strand; PAM type: YTN; PAM sequence: TTG
aatacattttaatataaaac

SEQ ID NO: 202746 - DNA, 20 bp, Artificial Sequence
  Description of Artificial Sequence: Synthetic oligonucleotide
  Target: LAMA2; (-) strand; PAM type: YTN; PAM sequence: TTC
catcccataatataattgaa

SEQ ID NO: 202747 - DNA, 20 bp, Artificial Sequence
  Description of Artificial Sequence: Synthetic oligonucleotide
  Target: LAMA2; (-) strand; PAM type: YTN; PAM sequence: TTC
agttccatcccataatataa

SEQ ID NO: 202748 - DNA, 20 bp, Artificial Sequence
  Description of Artificial Sequence: Synthetic oligonucleotide
  Target: LAMA2; (-) strand; PAM type: YTN; PAM sequence: TTT
cagttccatcccataatata

SEQ ID NO: 202749 - DNA, 20 bp, Artificial Sequence
  Description of Artificial Sequence: Synthetic oligonucleotide
  Target: LAMA2; (-) strand; PAM type: YTN; PAM sequence: CTT
tcagttccatcccataatat

SEQ ID NO: 202750 - DNA, 20 bp, Artificial Sequence
  Description of Artificial Sequence: Synthetic oligonucleotide
  Target: LAMA2; (-) strand; PAM type: YTN; PAM sequence: CTG
catgtgaactttcagttcca

SEQ ID NO: 202751 - DNA, 20 bp, Artificial Sequence
  Description of Artificial Sequence: Synthetic oligonucleotide
  Target: LAMA2; (-) strand; PAM type: YTN; PAM sequence: CTG
aaaactgcatgtgaactttc

SEQ ID NO: 202752 - DNA, 20 bp, Artificial Sequence
  Description of Artificial Sequence: Synthetic oligonucleotide
  Target: LAMA2; (-) strand; PAM type: YTN; PAM sequence: TTG
ggggacacatctgaaaactg

SEQ ID NO: 202753 - DNA, 20 bp, Artificial Sequence
  Description of Artificial Sequence: Synthetic oligonucleotide
  Target: LAMA2; (-) strand; PAM type: YTN; PAM sequence: TTT
gggggacacatctgaaaact

SEQ ID NO: 202754 - DNA, 20 bp, Artificial Sequence
  Description of Artificial Sequence: Synthetic oligonucleotide
  Target: LAMA2; (-) strand; PAM type: YTN; PAM sequence: CTT
tgggggacacatctgaaaac

SEQ ID NO: 202755 - DNA, 20 bp, Artificial Sequence
  Description of Artificial Sequence: Synthetic oligonucleotide
  Target: LAMA2; (-) strand; PAM type: YTN; PAM sequence: TTA
actttgggggacacatctga

SEQ ID NO: 202756 - DNA, 20 bp, Artificial Sequence
  Description of Artificial Sequence: Synthetic oligonucleotide
  Target: LAMA2; (-) strand; PAM type: YTN; PAM sequence: TTG
gcagaagagtgtgaatgagt

SEQ ID NO: 202757 - DNA, 20 bp, Artificial Sequence
  Description of Artificial Sequence: Synthetic oligonucleotide
  Target: LAMA2; (-) strand; PAM type: YTN; PAM sequence: CTA
ttggcagaagagtgtgaatg

SEQ ID NO: 202758 - DNA, 20 bp, Artificial Sequence
  Description of Artificial Sequence: Synthetic oligonucleotide
  Target: LAMA2; (-) strand; PAM type: YTN; PAM sequence: TTA
atactattggcagaagagtg

SEQ ID NO: 202759 - DNA, 20 bp, Artificial Sequence
  Description of Artificial Sequence: Synthetic oligonucleotide
  Target: LAMA2; (-) strand; PAM type: YTN; PAM sequence: TTC
ccaaagcattaatactattg

SEQ ID NO: 202760 - DNA, 20 bp, Artificial Sequence
  Description of Artificial Sequence: Synthetic oligonucleotide
  Target: LAMA2; (-) strand; PAM type: YTN; PAM sequence: TTT
cccaaagcattaatactatt

SEQ ID NO: 202761 - DNA, 20 bp, Artificial Sequence
  Description of Artificial Sequence: Synthetic oligonucleotide
  Target: LAMA2; (-) strand; PAM type: YTN; PAM sequence: CTC
aaacatttcccaaagcatta

SEQ ID NO: 202762 - DNA, 20 bp, Artificial Sequence
  Description of Artificial Sequence: Synthetic oligonucleotide
  Target: LAMA2; (-) strand; PAM type: YTN; PAM sequence: TTC
tcaaacatttcccaaagcat

SEQ ID NO: 202763 - DNA, 20 bp, Artificial Sequence
  Description of Artificial Sequence: Synthetic oligonucleotide
  Target: LAMA2; (-) strand; PAM type: YTN; PAM sequence: CTT
ctcaaacatttcccaaagca

SEQ ID NO: 202764 - DNA, 20 bp, Artificial Sequence
  Description of Artificial Sequence: Synthetic oligonucleotide
  Target: LAMA2; (-) strand; PAM type: YTN; PAM sequence: CTG
gaacaacacttctcaaacat

SEQ ID NO: 202765 - DNA, 20 bp, Artificial Sequence
  Description of Artificial Sequence: Synthetic oligonucleotide
  Target: LAMA2; (-) strand; PAM type: YTN; PAM sequence: TTC
cactggaacaacacttctca

SEQ ID NO: 202766 - DNA, 20 bp, Artificial Sequence
  Description of Artificial Sequence: Synthetic oligonucleotide
  Target: LAMA2; (-) strand; PAM type: YTN; PAM sequence: TTT
ccactggaacaacacttctc

SEQ ID NO: 202767 - DNA, 20 bp, Artificial Sequence
  Description of Artificial Sequence: Synthetic oligonucleotide
  Target: LAMA2; (-) strand; PAM type: YTN; PAM sequence: CTC
atttccactggaacaacact

SEQ ID NO: 202768 - DNA, 20 bp, Artificial Sequence
  Description of Artificial Sequence: Synthetic oligonucleotide
  Target: LAMA2; (-) strand; PAM type: YTN; PAM sequence: CTG
tatgaaggaataaatgaatg

SEQ ID NO: 202769 - DNA, 20 bp, Artificial Sequence
  Description of Artificial Sequence: Synthetic oligonucleotide
  Target: LAMA2; (-) strand; PAM type: YTN; PAM sequence: CTA
tatactgtatgaaggaataa

SEQ ID NO: 202770 - DNA, 20 bp, Artificial Sequence
  Description of Artificial Sequence: Synthetic oligonucleotide
  Target: LAMA2; (-) strand; PAM type: YTN; PAM sequence: TTG
aaagctatatactgtatgaa

SEQ ID NO: 202771 - DNA, 20 bp, Artificial Sequence
  Description of Artificial Sequence: Synthetic oligonucleotide
  Target: LAMA2; (-) strand; PAM type: YTN; PAM sequence: CTT
gaaagctatatactgtatga

SEQ ID NO: 202772 - DNA, 20 bp, Artificial Sequence
  Description of Artificial Sequence: Synthetic oligonucleotide
  Target: LAMA2; (-) strand; PAM type: YTN; PAM sequence: TTA
ataaaatagtccataaaagt

SEQ ID NO: 202773 - DNA, 20 bp, Artificial Sequence
  Description of Artificial Sequence: Synthetic oligonucleotide
  Target: LAMA2; (-) strand; PAM type: YTN; PAM sequence: TTC
aaagttaataaaatagtcca

SEQ ID NO: 202774 - DNA, 20 bp, Artificial Sequence
  Description of Artificial Sequence: Synthetic oligonucleotide
  Target: LAMA2; (-) strand; PAM type: YTN; PAM sequence: TTG
atattcaaagttaataaaat

SEQ ID NO: 202775 - DNA, 20 bp, Artificial Sequence
  Description of Artificial Sequence: Synthetic oligonucleotide
  Target: LAMA2; (-) strand; PAM type: YTN; PAM sequence: TTT
gatattcaaagttaataaaa

SEQ ID NO: 202776 - DNA, 20 bp, Artificial Sequence
  Description of Artificial Sequence: Synthetic oligonucleotide
  Target: LAMA2; (-) strand; PAM type: YTN; PAM sequence: TTT
tgatattcaaagttaataaa

SEQ ID NO: 202777 - DNA, 20 bp, Artificial Sequence
  Description of Artificial Sequence: Synthetic oligonucleotide
  Target: LAMA2; (-) strand; PAM type: YTN; PAM sequence: TTG
gttttgatattcaaagttaa

SEQ ID NO: 202778 - DNA, 20 bp, Artificial Sequence
  Description of Artificial Sequence: Synthetic oligonucleotide
  Target: LAMA2; (-) strand; PAM type: YTN; PAM sequence: TTA
ttggttttgatattcaaagt

SEQ ID NO: 202779 - DNA, 20 bp, Artificial Sequence
  Description of Artificial Sequence: Synthetic oligonucleotide
  Target: LAMA2; (-) strand; PAM type: YTN; PAM sequence: TTT
attggttttgatattcaaag

SEQ ID NO: 202780 - DNA, 20 bp, Artificial Sequence
  Description of Artificial Sequence: Synthetic oligonucleotide
  Target: LAMA2; (-) strand; PAM type: YTN; PAM sequence: TTT
tattggttttgatattcaaa

SEQ ID NO: 202781 - DNA, 20 bp, Artificial Sequence
  Description of Artificial Sequence: Synthetic oligonucleotide
  Target: LAMA2; (-) strand; PAM type: YTN; PAM sequence: CTA
ttttattggttttgatattc

SEQ ID NO: 202782 - DNA, 20 bp, Artificial Sequence
  Description of Artificial Sequence: Synthetic oligonucleotide
  Target: LAMA2; (-) strand; PAM type: YTN; PAM sequence: TTG
tgtcacaaagcagacacaaa

SEQ ID NO: 202783 - DNA, 20 bp, Artificial Sequence
  Description of Artificial Sequence: Synthetic oligonucleotide
  Target: LAMA2; (-) strand; PAM type: YTN; PAM sequence: TTA
aattgtgtcacaaagcagac

SEQ ID NO: 202784 - DNA, 20 bp, Artificial Sequence
  Description of Artificial Sequence: Synthetic oligonucleotide
  Target: LAMA2; (-) strand; PAM type: YTN; PAM sequence: CTC
attaaattgtgtcacaaagc

SEQ ID NO: 202785 - DNA, 20 bp, Artificial Sequence
  Description of Artificial Sequence: Synthetic oligonucleotide
  Target: LAMA2; (-) strand; PAM type: YTN; PAM sequence: TTA
ctcattaaattgtgtcacaa

SEQ ID NO: 202786 - DNA, 20 bp, Artificial Sequence
  Description of Artificial Sequence: Synthetic oligonucleotide
  Target: LAMA2; (-) strand; PAM type: YTN; PAM sequence: TTG
ttactcattaaattgtgtca

SEQ ID NO: 202787 - DNA, 20 bp, Artificial Sequence
  Description of Artificial Sequence: Synthetic oligonucleotide
  Target: LAMA2; (-) strand; PAM type: YTN; PAM sequence: CTC
aaaaaaaaaaaaaaaattgt

SEQ ID NO: 202788 - DNA, 20 bp, Artificial Sequence
  Description of Artificial Sequence: Synthetic oligonucleotide
  Target: LAMA2; (-) strand; PAM type: YTN; PAM sequence: TTC
tcaaaaaaaaaaaaaaaatt

SEQ ID NO: 202789 - DNA, 20 bp, Artificial Sequence
  Description of Artificial Sequence: Synthetic oligonucleotide
  Target: LAMA2; (-) strand; PAM type: YTN; PAM sequence: CTT
ctcaaaaaaaaaaaaaaaat

SEQ ID NO: 202790 - DNA, 20 bp, Artificial Sequence
  Description of Artificial Sequence: Synthetic oligonucleotide
  Target: LAMA2; (-) strand; PAM type: YTN; PAM sequence: CTC
cttctcaaaaaaaaaaaaaa

SEQ ID NO: 202791 - DNA, 20 bp, Artificial Sequence
  Description of Artificial Sequence: Synthetic oligonucleotide
  Target: LAMA2; (-) strand; PAM type: YTN; PAM sequence: CTG
ggcaacagagtgagactcct

SEQ ID NO: 202792 - DNA, 20 bp, Artificial Sequence
  Description of Artificial Sequence: Synthetic oligonucleotide
  Target: LAMA2; (-) strand; PAM type: YTN; PAM sequence: CTC
cagcctgggcaacagagtga

SEQ ID NO: 202793 - DNA, 20 bp, Artificial Sequence
  Description of Artificial Sequence: Synthetic oligonucleotide
  Target: LAMA2; (-) strand; PAM type: YTN; PAM sequence: CTG
cactccagcctgggcaacag

SEQ ID NO: 202794 - DNA, 20 bp, Artificial Sequence
  Description of Artificial Sequence: Synthetic oligonucleotide
  Target: LAMA2; (-) strand; PAM type: YTN; PAM sequence: TTG
cagtgaaccaagatcgtgcc

SEQ ID NO: 202795 - DNA, 20 bp, Artificial Sequence
  Description of Artificial Sequence: Synthetic oligonucleotide
  Target: LAMA2; (-) strand; PAM type: YTN; PAM sequence: CTT
gcagtgaaccaagatcgtgc

SEQ ID NO: 202796 - DNA, 20 bp, Artificial Sequence
  Description of Artificial Sequence: Synthetic oligonucleotide
  Target: LAMA2; (-) strand; PAM type: YTN; PAM sequence: CTC
cggaggccgaggcaggagaa

SEQ ID NO: 202797 - DNA, 20 bp, Artificial Sequence
  Description of Artificial Sequence: Synthetic oligonucleotide
  Target: LAMA2; (-) strand; PAM type: YTN; PAM sequence: CTA
ctccggaggccgaggcagga

SEQ ID NO: 202798 - DNA, 20 bp, Artificial Sequence
  Description of Artificial Sequence: Synthetic oligonucleotide
  Target: LAMA2; (-) strand; PAM type: YTN; PAM sequence: CTG
tagtcccagctactccggag

SEQ ID NO: 202799 - DNA, 20 bp, Artificial Sequence
  Description of Artificial Sequence: Synthetic oligonucleotide
  Target: LAMA2; (-) strand; PAM type: YTN; PAM sequence: CTG
ggcatggtggtgggcgcctg

SEQ ID NO: 202800 - DNA, 20 bp, Artificial Sequence
  Description of Artificial Sequence: Synthetic oligonucleotide
  Target: LAMA2; (-) strand; PAM type: YTN; PAM sequence: TTA
gctgggcatggtggtgggcg

SEQ ID NO: 202801 - DNA, 20 bp, Artificial Sequence
  Description of Artificial Sequence: Synthetic oligonucleotide
  Target: LAMA2; (-) strand; PAM type: YTN; PAM sequence: CTA
aaaatacaaaaaaattagct

SEQ ID NO: 202802 - DNA, 20 bp, Artificial Sequence
  Description of Artificial Sequence: Synthetic oligonucleotide
  Target: LAMA2; (-) strand; PAM type: YTN; PAM sequence: CTA
ctaaaaatacaaaaaaatta

SEQ ID NO: 202803 - DNA, 20 bp, Artificial Sequence
  Description of Artificial Sequence: Synthetic oligonucleotide
  Target: LAMA2; (-) strand; PAM type: YTN; PAM sequence: CTC
tactaaaaatacaaaaaaat

SEQ ID NO: 202804 - DNA, 20 bp, Artificial Sequence
  Description of Artificial Sequence: Synthetic oligonucleotide
  Target: LAMA2; (-) strand; PAM type: YTN; PAM sequence: CTC
gtctctactaaaaatacaaa

SEQ ID NO: 202805 - DNA, 20 bp, Artificial Sequence
  Description of Artificial Sequence: Synthetic oligonucleotide
  Target: LAMA2; (-) strand; PAM type: YTN; PAM sequence: CTA
acacagtgaaacctcgtctc

SEQ ID NO: 202806 - DNA, 20 bp, Artificial Sequence
  Description of Artificial Sequence: Synthetic oligonucleotide
  Target: LAMA2; (-) strand; PAM type: YTN; PAM sequence: CTG
gctaacacagtgaaacctcg

SEQ ID NO: 202807 - DNA, 20 bp, Artificial Sequence
  Description of Artificial Sequence: Synthetic oligonucleotide
  Target: LAMA2; (-) strand; PAM type: YTN; PAM sequence: TTG
ggaggcagaggcaggcggat

SEQ ID NO: 202808 - DNA, 20 bp, Artificial Sequence
  Description of Artificial Sequence: Synthetic oligonucleotide
  Target: LAMA2; (-) strand; PAM type: YTN; PAM sequence: TTT
gggaggcagaggcaggcgga

SEQ ID NO: 202809 - DNA, 20 bp, Artificial Sequence
  Description of Artificial Sequence: Synthetic oligonucleotide
  Target: LAMA2; (-) strand; PAM type: YTN; PAM sequence: CTT
tgggaggcagaggcaggcgg

SEQ ID NO: 202810 - DNA, 20 bp, Artificial Sequence
  Description of Artificial Sequence: Synthetic oligonucleotide
  Target: LAMA2; (-) strand; PAM type: YTN; PAM sequence: CTG
taatcccagcactttgggag

SEQ ID NO: 202811 - DNA, 20 bp, Artificial Sequence
  Description of Artificial Sequence: Synthetic oligonucleotide
  Target: LAMA2; (-) strand; PAM type: YTN; PAM sequence: CTC
aggcctgtaatcccagcact

SEQ ID NO: 202812 - DNA, 20 bp, Artificial Sequence
  Description of Artificial Sequence: Synthetic oligonucleotide
  Target: LAMA2; (-) strand; PAM type: YTN; PAM sequence: CTC
atggccaggcgcgatggctc

SEQ ID NO: 202813 - DNA, 20 bp, Artificial Sequence
  Description of Artificial Sequence: Synthetic oligonucleotide
  Target: LAMA2; (-) strand; PAM type: YTN; PAM sequence: TTA
ctcatggccaggcgcgatgg

SEQ ID NO: 202814 - DNA, 20 bp, Artificial Sequence
  Description of Artificial Sequence: Synthetic oligonucleotide
  Target: LAMA2; (-) strand; PAM type: YTN; PAM sequence: TTG
ttactcatggccaggcgcga

SEQ ID NO: 202815 - DNA, 20 bp, Artificial Sequence
  Description of Artificial Sequence: Synthetic oligonucleotide
  Target: LAMA2; (-) strand; PAM type: YTN; PAM sequence: TTA
aaaattgttactcatggcca

SEQ ID NO: 202816 - DNA, 20 bp, Artificial Sequence
  Description of Artificial Sequence: Synthetic oligonucleotide
  Target: LAMA2; (-) strand; PAM type: YTN; PAM sequence: TTT
aaaaattgttactcatggcc

SEQ ID NO: 202817 - DNA, 20 bp, Artificial Sequence
  Description of Artificial Sequence: Synthetic oligonucleotide
  Target: LAMA2; (-) strand; PAM type: YTN; PAM sequence: TTT
taaaaattgttactcatggc

SEQ ID NO: 202818 - DNA, 20 bp, Artificial Sequence
  Description of Artificial Sequence: Synthetic oligonucleotide
  Target: LAMA2; (-) strand; PAM type: YTN; PAM sequence: TTA
ttttaaaaattgttactcat

SEQ ID NO: 202819 - DNA, 20 bp, Artificial Sequence
  Description of Artificial Sequence: Synthetic oligonucleotide
  Target: LAMA2; (-) strand; PAM type: YTN; PAM sequence: TTT
attttaaaaattgttactca

SEQ ID NO: 202820 - DNA, 20 bp, Artificial Sequence
  Description of Artificial Sequence: Synthetic oligonucleotide
  Target: LAMA2; (-) strand; PAM type: YTN; PAM sequence: TTT
tattttaaaaattgttactc

SEQ ID NO: 202821 - DNA, 20 bp, Artificial Sequence
  Description of Artificial Sequence: Synthetic oligonucleotide
  Target: LAMA2; (-) strand; PAM type: YTN; PAM sequence: TTT
ttattttaaaaattgttact

SEQ ID NO: 202822 - DNA, 20 bp, Artificial Sequence
  Description of Artificial Sequence: Synthetic oligonucleotide
  Target: LAMA2; (-) strand; PAM type: YTN; PAM sequence: TTA
tttttattttaaaaattgtt

SEQ ID NO: 202823 - DNA, 20 bp, Artificial Sequence
  Description of Artificial Sequence: Synthetic oligonucleotide
  Target: LAMA2; (-) strand; PAM type: YTN; PAM sequence: TTT
atttttattttaaaaattgt

SEQ ID NO: 202824 - DNA, 20 bp, Artificial Sequence
  Description of Artificial Sequence: Synthetic oligonucleotide
  Target: LAMA2; (-) strand; PAM type: YTN; PAM sequence: CTA
tttatttttattttaaaaat

SEQ ID NO: 202825 - DNA, 20 bp, Artificial Sequence
  Description of Artificial Sequence: Synthetic oligonucleotide
  Target: LAMA2; (-) strand; PAM type: YTN; PAM sequence: TTG
ctatttatttttattttaaa

SEQ ID NO: 202826 - DNA, 20 bp, Artificial Sequence
  Description of Artificial Sequence: Synthetic oligonucleotide
  Target: LAMA2; (-) strand; PAM type: YTN; PAM sequence: TTT
gctatttatttttattttaa

SEQ ID NO: 202827 - DNA, 20 bp, Artificial Sequence
  Description of Artificial Sequence: Synthetic oligonucleotide
  Target: LAMA2; (-) strand; PAM type: YTN; PAM sequence: CTC
atcatttgctatttattttt

SEQ ID NO: 202828 - DNA, 20 bp, Artificial Sequence
  Description of Artificial Sequence: Synthetic oligonucleotide
  Target: LAMA2; (-) strand; PAM type: YTN; PAM sequence: TTA
ctcatcatttgctatttatt

SEQ ID NO: 202829 - DNA, 20 bp, Artificial Sequence
  Description of Artificial Sequence: Synthetic oligonucleotide
  Target: LAMA2; (-) strand; PAM type: YTN; PAM sequence: TTT
actcatcatttgctatttat

SEQ ID NO: 202830 - DNA, 20 bp, Artificial Sequence
  Description of Artificial Sequence: Synthetic oligonucleotide
  Target: LAMA2; (-) strand; PAM type: YTN; PAM sequence: CTT
tactcatcatttgctattta

SEQ ID NO: 202831 - DNA, 20 bp, Artificial Sequence
  Description of Artificial Sequence: Synthetic oligonucleotide
  Target: LAMA2; (-) strand; PAM type: YTN; PAM sequence: TTG
tactttactcatcatttgct

SEQ ID NO: 202832 - DNA, 20 bp, Artificial Sequence
  Description of Artificial Sequence: Synthetic oligonucleotide
  Target: LAMA2; (-) strand; PAM type: YTN; PAM sequence: TTG
ttgtactttactcatcattt

SEQ ID NO: 202833 - DNA, 20 bp, Artificial Sequence
  Description of Artificial Sequence: Synthetic oligonucleotide
  Target: LAMA2; (-) strand; PAM type: YTN; PAM sequence: TTA
ttgttgtactttactcatca

SEQ ID NO: 202834 - DNA, 20 bp, Artificial Sequence
  Description of Artificial Sequence: Synthetic oligonucleotide
  Target: LAMA2; (-) strand; PAM type: YTN; PAM sequence: TTT
attgttgtactttactcatc

SEQ ID NO: 202835 - DNA, 20 bp, Artificial Sequence
  Description of Artificial Sequence: Synthetic oligonucleotide
  Target: LAMA2; (-) strand; PAM type: YTN; PAM sequence: TTG
atttattgttgtactttact

SEQ ID NO: 202836 - DNA, 20 bp, Artificial Sequence
  Description of Artificial Sequence: Synthetic oligonucleotide
  Target: LAMA2; (-) strand; PAM type: YTN; PAM sequence: TTT
gatttattgttgtactttac

SEQ ID NO: 202837 - DNA, 20 bp, Artificial Sequence
  Description of Artificial Sequence: Synthetic oligonucleotide
  Target: LAMA2; (-) strand; PAM type: YTN; PAM sequence: TTG
tttgatttattgttgtactt

SEQ ID NO: 202838 - DNA, 20 bp, Artificial Sequence
  Description of Artificial Sequence: Synthetic oligonucleotide
  Target: LAMA2; (-) strand; PAM type: YTN; PAM sequence: TTT
gtttgatttattgttgtact

SEQ ID NO: 202839 - DNA, 20 bp, Artificial Sequence
  Description of Artificial Sequence: Synthetic oligonucleotide
  Target: LAMA2; (-) strand; PAM type: YTN; PAM sequence: TTT
tgtttgatttattgttgtac

SEQ ID NO: 202840 - DNA, 20 bp, Artificial Sequence
  Description of Artificial Sequence: Synthetic oligonucleotide
  Target: LAMA2; (-) strand; PAM type: YTN; PAM sequence: CTA
atagcattttgtttgattta

SEQ ID NO: 202841 - DNA, 20 bp, Artificial Sequence
  Description of Artificial Sequence: Synthetic oligonucleotide
  Target: LAMA2; (-) strand; PAM type: YTN; PAM sequence: CTG
ccatatggtcctaatagcat

SEQ ID NO: 202842 - DNA, 20 bp, Artificial Sequence
  Description of Artificial Sequence: Synthetic oligonucleotide
  Target: LAMA2; (-) strand; PAM type: YTN; PAM sequence: TTC
tgccatatggtcctaatagc

SEQ ID NO: 202843 - DNA, 20 bp, Artificial Sequence
  Description of Artificial Sequence: Synthetic oligonucleotide
  Target: LAMA2; (-) strand; PAM type: YTN; PAM sequence: TTT
ctgccatatggtcctaatag

SEQ ID NO: 202844 - DNA, 20 bp, Artificial Sequence
  Description of Artificial Sequence: Synthetic oligonucleotide
  Target: LAMA2; (-) strand; PAM type: YTN; PAM sequence: TTT
tctgccatatggtcctaata

SEQ ID NO: 202845 - DNA, 20 bp, Artificial Sequence
  Description of Artificial Sequence: Synthetic oligonucleotide
  Target: LAMA2; (-) strand; PAM type: YTN; PAM sequence: TTT
ttctgccatatggtcctaat

SEQ ID NO: 202846 - DNA, 20 bp, Artificial Sequence
  Description of Artificial Sequence: Synthetic oligonucleotide
  Target: LAMA2; (-) strand; PAM type: YTN; PAM sequence: TTG
tttttctgccatatggtcct

SEQ ID NO: 202847 - DNA, 20 bp, Artificial Sequence
  Description of Artificial Sequence: Synthetic oligonucleotide
  Target: LAMA2; (-) strand; PAM type: YTN; PAM sequence: CTG
ttgtttttctgccatatggt

SEQ ID NO: 202848 - DNA, 20 bp, Artificial Sequence
  Description of Artificial Sequence: Synthetic oligonucleotide
  Target: LAMA2; (-) strand; PAM type: YTN; PAM sequence: TTC
tgttgtttttctgccatatg

SEQ ID NO: 202849 - DNA, 20 bp, Artificial Sequence
  Description of Artificial Sequence: Synthetic oligonucleotide
  Target: LAMA2; (-) strand; PAM type: YTN; PAM sequence: CTA
agattctgttgtttttctgc

SEQ ID NO: 202850 - DNA, 20 bp, Artificial Sequence
  Description of Artificial Sequence: Synthetic oligonucleotide
  Target: LAMA2; (-) strand; PAM type: YTN; PAM sequence: TTC
taagattctgttgtttttct

SEQ ID NO: 202851 - DNA, 20 bp, Artificial Sequence
  Description of Artificial Sequence: Synthetic oligonucleotide
  Target: LAMA2; (-) strand; PAM type: YTN; PAM sequence: CTT
ctaagattctgttgtttttc

SEQ ID NO: 202852 - DNA, 20 bp, Artificial Sequence
  Description of Artificial Sequence: Synthetic oligonucleotide
  Target: LAMA2; (-) strand; PAM type: YTN; PAM sequence: CTC
ttctaagattctgttgtttt

SEQ ID NO: 202853 - DNA, 20 bp, Artificial Sequence
  Description of Artificial Sequence: Synthetic oligonucleotide
  Target: LAMA2; (-) strand; PAM type: YTN; PAM sequence: CTA
actcttctaagattctgttg

SEQ ID NO: 202854 - DNA, 20 bp, Artificial Sequence
  Description of Artificial Sequence: Synthetic oligonucleotide
  Target: LAMA2; (-) strand; PAM type: YTN; PAM sequence: TTC
cctaactcttctaagattct

SEQ ID NO: 202855 - DNA, 20 bp, Artificial Sequence
  Description of Artificial Sequence: Synthetic oligonucleotide
  Target: LAMA2; (-) strand; PAM type: YTN; PAM sequence: CTT
ccctaactcttctaagattc

SEQ ID NO: 202856 - DNA, 20 bp, Artificial Sequence
  Description of Artificial Sequence: Synthetic oligonucleotide
  Target: LAMA2; (-) strand; PAM type: YTN; PAM sequence: TTG
ggaagtcttccctaactctt

SEQ ID NO: 202857 - DNA, 20 bp, Artificial Sequence
  Description of Artificial Sequence: Synthetic oligonucleotide
  Target: LAMA2; (-) strand; PAM type: YTN; PAM sequence: TTT
gggaagtcttccctaactct

SEQ ID NO: 202858 - DNA, 20 bp, Artificial Sequence
  Description of Artificial Sequence: Synthetic oligonucleotide
  Target: LAMA2; (-) strand; PAM type: YTN; PAM sequence: CTT
tgggaagtcttccctaactc

SEQ ID NO: 202859 - DNA, 20 bp, Artificial Sequence
  Description of Artificial Sequence: Synthetic oligonucleotide
  Target: LAMA2; (-) strand; PAM type: YTN; PAM sequence: TTC
ctttgggaagtcttccctaa

SEQ ID NO: 202860 - DNA, 20 bp, Artificial Sequence
  Description of Artificial Sequence: Synthetic oligonucleotide
  Target: LAMA2; (-) strand; PAM type: YTN; PAM sequence: CTT
cctttgggaagtcttcccta

SEQ ID NO: 202861 - DNA, 20 bp, Artificial Sequence
  Description of Artificial Sequence: Synthetic oligonucleotide
  Target: LAMA2; (-) strand; PAM type: YTN; PAM sequence: TTG
ccacttcctttgggaagtct

SEQ ID NO: 202862 - DNA, 20 bp, Artificial Sequence
  Description of Artificial Sequence: Synthetic oligonucleotide
  Target: LAMA2; (-) strand; PAM type: YTN; PAM sequence: TTA
attgccacttcctttgggaa

SEQ ID NO: 202863 - DNA, 20 bp, Artificial Sequence
  Description of Artificial Sequence: Synthetic oligonucleotide
  Target: LAMA2; (-) strand; PAM type: YTN; PAM sequence: CTC
aggttaattgccacttcctt

SEQ ID NO: 202864 - DNA, 20 bp, Artificial Sequence
  Description of Artificial Sequence: Synthetic oligonucleotide
  Target: LAMA2; (-) strand; PAM type: YTN; PAM sequence: TTA
aaaatctcaggttaattgcc

SEQ ID NO: 202865 - DNA, 20 bp, Artificial Sequence
  Description of Artificial Sequence: Synthetic oligonucleotide
  Target: LAMA2; (-) strand; PAM type: YTN; PAM sequence: TTT
aaaaatctcaggttaattgc

SEQ ID NO: 202866 - DNA, 20 bp, Artificial Sequence
  Description of Artificial Sequence: Synthetic oligonucleotide
  Target: LAMA2; (-) strand; PAM type: YTN; PAM sequence: CTT
taaaaatctcaggttaattg

SEQ ID NO: 202867 - DNA, 20 bp, Artificial Sequence
  Description of Artificial Sequence: Synthetic oligonucleotide
  Target: LAMA2; (-) strand; PAM type: YTN; PAM sequence: CTC
atctttaaaaatctcaggtt

SEQ ID NO: 202868 - DNA, 20 bp, Artificial Sequence
  Description of Artificial Sequence: Synthetic oligonucleotide
  Target: LAMA2; (-) strand; PAM type: YTN; PAM sequence: CTG
ctcatctttaaaaatctcag

SEQ ID NO: 202869 - DNA, 20 bp, Artificial Sequence
  Description of Artificial Sequence: Synthetic oligonucleotide
  Target: LAMA2; (-) strand; PAM type: YTN; PAM sequence: CTC
ctgctcatctttaaaaatct

SEQ ID NO: 202870 - DNA, 20 bp, Artificial Sequence
  Description of Artificial Sequence: Synthetic oligonucleotide
  Target: LAMA2; (-) strand; PAM type: YTN; PAM sequence: TTC
tcctgctcatctttaaaaat

SEQ ID NO: 202871 - DNA, 20 bp, Artificial Sequence
  Description of Artificial Sequence: Synthetic oligonucleotide
  Target: LAMA2; (-) strand; PAM type: YTN; PAM sequence: CTG
aaattctcctgctcatcttt

SEQ ID NO: 202872 - DNA, 20 bp, Artificial Sequence
  Description of Artificial Sequence: Synthetic oligonucleotide
  Target: LAMA2; (-) strand; PAM type: YTN; PAM sequence: TTG
cctgaaattctcctgctcat

SEQ ID NO: 202873 - DNA, 20 bp, Artificial Sequence
  Description of Artificial Sequence: Synthetic oligonucleotide
  Target: LAMA2; (-) strand; PAM type: YTN; PAM sequence: TTT
gcctgaaattctcctgctca

SEQ ID NO: 202874 - DNA, 20 bp, Artificial Sequence
  Description of Artificial Sequence: Synthetic oligonucleotide
  Target: LAMA2; (-) strand; PAM type: YTN; PAM sequence: TTA
tttgcctgaaattctcctgc

SEQ ID NO: 202875 - DNA, 20 bp, Artificial Sequence
  Description of Artificial Sequence: Synthetic oligonucleotide
  Target: LAMA2; (-) strand; PAM type: YTN; PAM sequence: TTT
atttgcctgaaattctcctg

SEQ ID NO: 202876 - DNA, 20 bp, Artificial Sequence
  Description of Artificial Sequence: Synthetic oligonucleotide
  Target: LAMA2; (-) strand; PAM type: YTN; PAM sequence: TTT
tatttgcctgaaattctcct

SEQ ID NO: 202877 - DNA, 20 bp, Artificial Sequence
  Description of Artificial Sequence: Synthetic oligonucleotide
  Target: LAMA2; (-) strand; PAM type: YTN; PAM sequence: CTG
caagttttatttgcctgaaa

SEQ ID NO: 202878 - DNA, 20 bp, Artificial Sequence
  Description of Artificial Sequence: Synthetic oligonucleotide
  Target: LAMA2; (-) strand; PAM type: YTN; PAM sequence: CTC
ccaaccccactgcaagtttt

SEQ ID NO: 202879 - DNA, 20 bp, Artificial Sequence
  Description of Artificial Sequence: Synthetic oligonucleotide
  Target: LAMA2; (-) strand; PAM type: YTN; PAM sequence: CTA
ctcccaaccccactgcaagt

SEQ ID NO: 202880 - DNA, 20 bp, Artificial Sequence
  Description of Artificial Sequence: Synthetic oligonucleotide
  Target: LAMA2; (-) strand; PAM type: YTN; PAM sequence: CTG
gaatatcatggtccatccac

SEQ ID NO: 202881 - DNA, 20 bp, Artificial Sequence
  Description of Artificial Sequence: Synthetic oligonucleotide
  Target: LAMA2; (-) strand; PAM type: YTN; PAM sequence: TTC
acctggaatatcatggtcca

SEQ ID NO: 202882 - DNA, 20 bp, Artificial Sequence
  Description of Artificial Sequence: Synthetic oligonucleotide
  Target: LAMA2; (-) strand; PAM type: YTN; PAM sequence: TTA
ttcacctggaatatcatggt

SEQ ID NO: 202883 - DNA, 20 bp, Artificial Sequence
  Description of Artificial Sequence: Synthetic oligonucleotide
  Target: LAMA2; (-) strand; PAM type: YTN; PAM sequence: CTC
aattattcacctggaatatc

SEQ ID NO: 202884 - DNA, 20 bp, Artificial Sequence
  Description of Artificial Sequence: Synthetic oligonucleotide
  Target: LAMA2; (-) strand; PAM type: YTN; PAM sequence: CTA
aagtgctcaattattcacct

SEQ ID NO: 202885 - DNA, 20 bp, Artificial Sequence
  Description of Artificial Sequence: Synthetic oligonucleotide
  Target: LAMA2; (-) strand; PAM type: YTN; PAM sequence: CTC
ccaagctaaagtgctcaatt

SEQ ID NO: 202886 - DNA, 20 bp, Artificial Sequence
  Description of Artificial Sequence: Synthetic oligonucleotide
  Target: LAMA2; (-) strand; PAM type: YTN; PAM sequence: CTC
ctcccaagctaaagtgctca

SEQ ID NO: 202887 - DNA, 20 bp, Artificial Sequence
  Description of Artificial Sequence: Synthetic oligonucleotide
  Target: LAMA2; (-) strand; PAM type: YTN; PAM sequence: TTA
gggccctcctcccaagctaa

SEQ ID NO: 202888 - DNA, 20 bp, Artificial Sequence
  Description of Artificial Sequence: Synthetic oligonucleotide
  Target: LAMA2; (-) strand; PAM type: YTN; PAM sequence: TTT
agggccctcctcccaagcta

SEQ ID NO: 202889 - DNA, 20 bp, Artificial Sequence
  Description of Artificial Sequence: Synthetic oligonucleotide
  Target: LAMA2; (-) strand; PAM type: YTN; PAM sequence: CTC
atttagggccctcctcccaa

SEQ ID NO: 202890 - DNA, 20 bp, Artificial Sequence
  Description of Artificial Sequence: Synthetic oligonucleotide
  Target: LAMA2; (-) strand; PAM type: YTN; PAM sequence: TTC
tcatttagggccctcctccc

SEQ ID NO: 202891 - DNA, 20 bp, Artificial Sequence
  Description of Artificial Sequence: Synthetic oligonucleotide
  Target: LAMA2; (-) strand; PAM type: YTN; PAM sequence: TTT
ctcatttagggccctcctcc

SEQ ID NO: 202892 - DNA, 20 bp, Artificial Sequence
  Description of Artificial Sequence: Synthetic oligonucleotide
  Target: LAMA2; (-) strand; PAM type: YTN; PAM sequence: CTT
tctcatttagggccctcctc

SEQ ID NO: 202893 - DNA, 20 bp, Artificial Sequence
  Description of Artificial Sequence: Synthetic oligonucleotide
  Target: LAMA2; (-) strand; PAM type: YTN; PAM sequence: CTG
aaataggtcatatactttct

SEQ ID NO: 202894 - DNA, 20 bp, Artificial Sequence
  Description of Artificial Sequence: Synthetic oligonucleotide
  Target: LAMA2; (-) strand; PAM type: YTN; PAM sequence: TTC
ctgaaataggtcatatactt

SEQ ID NO: 202895 - DNA, 20 bp, Artificial Sequence
  Description of Artificial Sequence: Synthetic oligonucleotide
  Target: LAMA2; (-) strand; PAM type: YTN; PAM sequence: TTC
agttcctgaaataggtcata

SEQ ID NO: 202896 - DNA, 20 bp, Artificial Sequence
  Description of Artificial Sequence: Synthetic oligonucleotide
  Target: LAMA2; (-) strand; PAM type: YTN; PAM sequence: TTT
cagttcctgaaataggtcat

SEQ ID NO: 202897 - DNA, 20 bp, Artificial Sequence
  Description of Artificial Sequence: Synthetic oligonucleotide
  Target: LAMA2; (-) strand; PAM type: YTN; PAM sequence: CTT
tcagttcctgaaataggtca

SEQ ID NO: 202898 - DNA, 20 bp, Artificial Sequence
  Description of Artificial Sequence: Synthetic oligonucleotide
  Target: LAMA2; (-) strand; PAM type: YTN; PAM sequence: TTC
tttcagttcctgaaataggt

SEQ ID NO: 202899 - DNA, 20 bp, Artificial Sequence
  Description of Artificial Sequence: Synthetic oligonucleotide
  Target: LAMA2; (-) strand; PAM type: YTN; PAM sequence: TTT
ctttcagttcctgaaatagg

SEQ ID NO: 202900 - DNA, 20 bp, Artificial Sequence
  Description of Artificial Sequence: Synthetic oligonucleotide
  Target: LAMA2; (-) strand; PAM type: YTN; PAM sequence: TTC
caaatttctttcagttcctg

SEQ ID NO: 202901 - DNA, 20 bp, Artificial Sequence
  Description of Artificial Sequence: Synthetic oligonucleotide
  Target: LAMA2; (-) strand; PAM type: YTN; PAM sequence: TTC
caagcattccaaatttcttt

SEQ ID NO: 202902 - DNA, 20 bp, Artificial Sequence
  Description of Artificial Sequence: Synthetic oligonucleotide
  Target: LAMA2; (-) strand; PAM type: YTN; PAM sequence: TTA
tattccaagcattccaaatt

SEQ ID NO: 202903 - DNA, 20 bp, Artificial Sequence
  Description of Artificial Sequence: Synthetic oligonucleotide
  Target: LAMA2; (-) strand; PAM type: YTN; PAM sequence: TTT
atattccaagcattccaaat

SEQ ID NO: 202904 - DNA, 20 bp, Artificial Sequence
  Description of Artificial Sequence: Synthetic oligonucleotide
  Target: LAMA2; (-) strand; PAM type: YTN; PAM sequence: CTT
tatattccaagcattccaaa

SEQ ID NO: 202905 - DNA, 20 bp, Artificial Sequence
  Description of Artificial Sequence: Synthetic oligonucleotide
  Target: LAMA2; (-) strand; PAM type: YTN; PAM sequence: TTG
ccccacactttatattccaa

SEQ ID NO: 202906 - DNA, 20 bp, Artificial Sequence
  Description of Artificial Sequence: Synthetic oligonucleotide
  Target: LAMA2; (-) strand; PAM type: YTN; PAM sequence: TTT
gccccacactttatattcca

SEQ ID NO: 202907 - DNA, 20 bp, Artificial Sequence
  Description of Artificial Sequence: Synthetic oligonucleotide
  Target: LAMA2; (-) strand; PAM type: YTN; PAM sequence: CTC
catcatttgccccacacttt

SEQ ID NO: 202908 - DNA, 20 bp, Artificial Sequence
  Description of Artificial Sequence: Synthetic oligonucleotide
  Target: LAMA2; (-) strand; PAM type: YTN; PAM sequence: TTG
tcctccatcatttgccccac

SEQ ID NO: 202909 - DNA, 20 bp, Artificial Sequence
  Description of Artificial Sequence: Synthetic oligonucleotide
  Target: LAMA2; (-) strand; PAM type: YTN; PAM sequence: TTT
gtcctccatcatttgcccca

SEQ ID NO: 202910 - DNA, 20 bp, Artificial Sequence
  Description of Artificial Sequence: Synthetic oligonucleotide
  Target: LAMA2; (-) strand; PAM type: YTN; PAM sequence: CTT
tgtcctccatcatttgcccc

SEQ ID NO: 202911 - DNA, 20 bp, Artificial Sequence
  Description of Artificial Sequence: Synthetic oligonucleotide
  Target: LAMA2; (-) strand; PAM type: YTN; PAM sequence: CTC
tttgtcctccatcatttgcc

SEQ ID NO: 202912 - DNA, 20 bp, Artificial Sequence
  Description of Artificial Sequence: Synthetic oligonucleotide
  Target: LAMA2; (-) strand; PAM type: YTN; PAM sequence: CTG
cctctttgtcctccatcatt

SEQ ID NO: 202913 - DNA, 20 bp, Artificial Sequence
  Description of Artificial Sequence: Synthetic oligonucleotide
  Target: LAMA2; (-) strand; PAM type: YTN; PAM sequence: CTG
ctgcctctttgtcctccatc

SEQ ID NO: 202914 - DNA, 20 bp, Artificial Sequence
  Description of Artificial Sequence: Synthetic oligonucleotide
  Target: LAMA2; (-) strand; PAM type: YTN; PAM sequence: TTA
tccctgctgcctctttgtcc

SEQ ID NO: 202915 - DNA, 20 bp, Artificial Sequence
  Description of Artificial Sequence: Synthetic oligonucleotide
  Target: LAMA2; (-) strand; PAM type: YTN; PAM sequence: CTA
tattatccctgctgcctctt

SEQ ID NO: 202916 - DNA, 20 bp, Artificial Sequence
  Description of Artificial Sequence: Synthetic oligonucleotide
  Target: LAMA2; (-) strand; PAM type: YTN; PAM sequence: CTG
ggtggagacacagccaaact

SEQ ID NO: 202917 - DNA, 20 bp, Artificial Sequence
  Description of Artificial Sequence: Synthetic oligonucleotide
  Target: LAMA2; (-) strand; PAM type: YTN; PAM sequence: TTC
aagatgagatctgggtggag

SEQ ID NO: 202918 - DNA, 20 bp, Artificial Sequence
  Description of Artificial Sequence: Synthetic oligonucleotide
  Target: LAMA2; (-) strand; PAM type: YTN; PAM sequence: CTG
caattcaagatgagatctgg

SEQ ID NO: 202919 - DNA, 20 bp, Artificial Sequence
  Description of Artificial Sequence: Synthetic oligonucleotide
  Target: LAMA2; (-) strand; PAM type: YTN; PAM sequence: TTG
tgggaactgcaattcaagat

SEQ ID NO: 202920 - DNA, 20 bp, Artificial Sequence
  Description of Artificial Sequence: Synthetic oligonucleotide
  Target: LAMA2; (-) strand; PAM type: YTN; PAM sequence: TTG
ggaattgtgggaactgcaat

SEQ ID NO: 202921 - DNA, 20 bp, Artificial Sequence
  Description of Artificial Sequence: Synthetic oligonucleotide
  Target: LAMA2; (-) strand; PAM type: YTN; PAM sequence: CTT
gggaattgtgggaactgcaa

SEQ ID NO: 202922 - DNA, 20 bp, Artificial Sequence
  Description of Artificial Sequence: Synthetic oligonucleotide
  Target: LAMA2; (-) strand; PAM type: YTN; PAM sequence: CTC
ccatgacccttgggaattgt

SEQ ID NO: 202923 - DNA, 20 bp, Artificial Sequence
  Description of Artificial Sequence: Synthetic oligonucleotide
  Target: LAMA2; (-) strand; PAM type: YTN; PAM sequence: CTC
caggtccctcccatgaccct

SEQ ID NO: 202924 - DNA, 20 bp, Artificial Sequence
  Description of Artificial Sequence: Synthetic oligonucleotide
  Target: LAMA2; (-) strand; PAM type: YTN; PAM sequence: CTC
cctccaggtccctcccatga

SEQ ID NO: 202925 - DNA, 20 bp, Artificial Sequence
  Description of Artificial Sequence: Synthetic oligonucleotide
  Target: LAMA2; (-) strand; PAM type: YTN; PAM sequence: TTG
cctccctccaggtccctccc

SEQ ID NO: 202926 - DNA, 20 bp, Artificial Sequence
  Description of Artificial Sequence: Synthetic oligonucleotide
  Target: LAMA2; (-) strand; PAM type: YTN; PAM sequence: TTG
aattgcctccctccaggtcc

SEQ ID NO: 202927 - DNA, 20 bp, Artificial Sequence
  Description of Artificial Sequence: Synthetic oligonucleotide
  Target: LAMA2; (-) strand; PAM type: YTN; PAM sequence: CTA
tgattgaattgcctccctcc

SEQ ID NO: 202928 - DNA, 20 bp, Artificial Sequence
  Description of Artificial Sequence: Synthetic oligonucleotide
  Target: LAMA2; (-) strand; PAM type: YTN; PAM sequence: CTG
cccctatgattgaattgcct

SEQ ID NO: 202929 - DNA, 20 bp, Artificial Sequence
  Description of Artificial Sequence: Synthetic oligonucleotide
  Target: LAMA2; (-) strand; PAM type: YTN; PAM sequence: CTA
tcatgagaaaagcatgggaa

SEQ ID NO: 202930 - DNA, 20 bp, Artificial Sequence
  Description of Artificial Sequence: Synthetic oligonucleotide
  Target: LAMA2; (-) strand; PAM type: YTN; PAM sequence: TTC
actatcatgagaaaagcatg

SEQ ID NO: 202931 - DNA, 20 bp, Artificial Sequence
  Description of Artificial Sequence: Synthetic oligonucleotide
  Target: LAMA2; (-) strand; PAM type: YTN; PAM sequence: TTA
ttcactatcatgagaaaagc

SEQ ID NO: 202932 - DNA, 20 bp, Artificial Sequence
  Description of Artificial Sequence: Synthetic oligonucleotide
  Target: LAMA2; (-) strand; PAM type: YTN; PAM sequence: CTT
attcactatcatgagaaaag

SEQ ID NO: 202933 - DNA, 20 bp, Artificial Sequence
  Description of Artificial Sequence: Synthetic oligonucleotide
  Target: LAMA2; (-) strand; PAM type: YTN; PAM sequence: CTC
gtgagacttattcactatca

SEQ ID NO: 202934 - DNA, 20 bp, Artificial Sequence
  Description of Artificial Sequence: Synthetic oligonucleotide
  Target: LAMA2; (-) strand; PAM type: YTN; PAM sequence: TTA
taaaatcatcagatctcgtg

SEQ ID NO: 202935 - DNA, 20 bp, Artificial Sequence
  Description of Artificial Sequence: Synthetic oligonucleotide
  Target: LAMA2; (-) strand; PAM type: YTN; PAM sequence: TTT
ataaaatcatcagatctcgt

SEQ ID NO: 202936 - DNA, 20 bp, Artificial Sequence
  Description of Artificial Sequence: Synthetic oligonucleotide
  Target: LAMA2; (-) strand; PAM type: YTN; PAM sequence: CTT
tataaaatcatcagatctcg

SEQ ID NO: 202937 - DNA, 20 bp, Artificial Sequence
  Description of Artificial Sequence: Synthetic oligonucleotide
  Target: LAMA2; (-) strand; PAM type: YTN; PAM sequence: CTC
ctttataaaatcatcagatc

SEQ ID NO: 202938 - DNA, 20 bp, Artificial Sequence
  Description of Artificial Sequence: Synthetic oligonucleotide
  Target: LAMA2; (-) strand; PAM type: YTN; PAM sequence: CTC
tcctttataaaatcatcaga

SEQ ID NO: 202939 - DNA, 20 bp, Artificial Sequence
  Description of Artificial Sequence: Synthetic oligonucleotide
  Target: LAMA2; (-) strand; PAM type: YTN; PAM sequence: TTA
catggtggcaggcaagaggg

SEQ ID NO: 202940 - DNA, 20 bp, Artificial Sequence
  Description of Artificial Sequence: Synthetic oligonucleotide
  Target: LAMA2; (-) strand; PAM type: YTN; PAM sequence: CTT
acatggtggcaggcaagagg

SEQ ID NO: 202941 - DNA, 20 bp, Artificial Sequence
  Description of Artificial Sequence: Synthetic oligonucleotide
  Target: LAMA2; (-) strand; PAM type: YTN; PAM sequence: TTG
aagagcaaagtcacgtctta

SEQ ID NO: 202942 - DNA, 20 bp, Artificial Sequence
  Description of Artificial Sequence: Synthetic oligonucleotide
  Target: LAMA2; (-) strand; PAM type: YTN; PAM sequence: CTT
gaagagcaaagtcacgtctt

SEQ ID NO: 202943 - DNA, 20 bp, Artificial Sequence
  Description of Artificial Sequence: Synthetic oligonucleotide
  Target: LAMA2; (-) strand; PAM type: YTN; PAM sequence: CTC
acaatcatggcagaaagtac

SEQ ID NO: 202944 - DNA, 20 bp, Artificial Sequence
  Description of Artificial Sequence: Synthetic oligonucleotide
  Target: LAMA2; (-) strand; PAM type: YTN; PAM sequence: CTG
gggaggcctcacaatcatgg

SEQ ID NO: 202945 - DNA, 20 bp, Artificial Sequence
  Description of Artificial Sequence: Synthetic oligonucleotide
  Target: LAMA2; (-) strand; PAM type: YTN; PAM sequence: TTC
cacatggctggggaggcctc

SEQ ID NO: 202946 - DNA, 20 bp, Artificial Sequence
  Description of Artificial Sequence: Synthetic oligonucleotide
  Target: LAMA2; (-) strand; PAM type: YTN; PAM sequence: CTC
acaattccacatggctgggg

SEQ ID NO: 202947 - DNA, 20 bp, Artificial Sequence
  Description of Artificial Sequence: Synthetic oligonucleotide
  Target: LAMA2; (-) strand; PAM type: YTN; PAM sequence: TTG
actcacaattccacatggct

SEQ ID NO: 202948 - DNA, 20 bp, Artificial Sequence
  Description of Artificial Sequence: Synthetic oligonucleotide
  Target: LAMA2; (-) strand; PAM type: YTN; PAM sequence: TTA
attgactcacaattccacat

SEQ ID NO: 202949 - DNA, 20 bp, Artificial Sequence
  Description of Artificial Sequence: Synthetic oligonucleotide
  Target: LAMA2; (-) strand; PAM type: YTN; PAM sequence: TTT
aattgactcacaattccaca

SEQ ID NO: 202950 - DNA, 20 bp, Artificial Sequence
  Description of Artificial Sequence: Synthetic oligonucleotide
  Target: LAMA2; (-) strand; PAM type: YTN; PAM sequence: TTA
taaaggaaagaggtttaatt

SEQ ID NO: 202951 - DNA, 20 bp, Artificial Sequence
  Description of Artificial Sequence: Synthetic oligonucleotide
  Target: LAMA2; (-) strand; PAM type: YTN; PAM sequence: TTT
ataaaggaaagaggtttaat

SEQ ID NO: 202952 - DNA, 20 bp, Artificial Sequence
  Description of Artificial Sequence: Synthetic oligonucleotide
  Target: LAMA2; (-) strand; PAM type: YTN; PAM sequence: CTA
ataaagaaatacccaagaca

SEQ ID NO: 202953 - DNA, 20 bp, Artificial Sequence
  Description of Artificial Sequence: Synthetic oligonucleotide
  Target: LAMA2; (-) strand; PAM type: YTN; PAM sequence: CTG
ctaataaagaaatacccaag

SEQ ID NO: 202954 - DNA, 20 bp, Artificial Sequence
  Description of Artificial Sequence: Synthetic oligonucleotide
  Target: LAMA2; (-) strand; PAM type: YTN; PAM sequence: CTC
atgctgctaataaagaaata

SEQ ID NO: 202955 - DNA, 20 bp, Artificial Sequence
  Description of Artificial Sequence: Synthetic oligonucleotide
  Target: LAMA2; (-) strand; PAM type: YTN; PAM sequence: TTC
tcatgctgctaataaagaaa

SEQ ID NO: 202956 - DNA, 20 bp, Artificial Sequence
  Description of Artificial Sequence: Synthetic oligonucleotide
  Target: LAMA2; (-) strand; PAM type: YTN; PAM sequence: TTA
atccattctcatgctgctaa

SEQ ID NO: 202957 - DNA, 20 bp, Artificial Sequence
  Description of Artificial Sequence: Synthetic oligonucleotide
  Target: LAMA2; (-) strand; PAM type: YTN; PAM sequence: TTG
tattaatccattctcatgct

SEQ ID NO: 202958 - DNA, 20 bp, Artificial Sequence
  Description of Artificial Sequence: Synthetic oligonucleotide
  Target: LAMA2; (-) strand; PAM type: YTN; PAM sequence: CTT
gtattaatccattctcatgc

SEQ ID NO: 202959 - DNA, 20 bp, Artificial Sequence
  Description of Artificial Sequence: Synthetic oligonucleotide
  Target: LAMA2; (-) strand; PAM type: YTN; PAM sequence: CTA
atgccttgtattaatccatt

SEQ ID NO: 202960 - DNA, 20 bp, Artificial Sequence
  Description of Artificial Sequence: Synthetic oligonucleotide
  Target: LAMA2; (-) strand; PAM type: YTN; PAM sequence: CTC
taatgccttgtattaatcca

SEQ ID NO: 202961 - DNA, 20 bp, Artificial Sequence
  Description of Artificial Sequence: Synthetic oligonucleotide
  Target: LAMA2; (-) strand; PAM type: YTN; PAM sequence: TTC
cctctaatgccttgtattaa

SEQ ID NO: 202962 - DNA, 20 bp, Artificial Sequence
  Description of Artificial Sequence: Synthetic oligonucleotide
  Target: LAMA2; (-) strand; PAM type: YTN; PAM sequence: TTT
ccctctaatgccttgtatta

SEQ ID NO: 202963 - DNA, 20 bp, Artificial Sequence
  Description of Artificial Sequence: Synthetic oligonucleotide
  Target: LAMA2; (-) strand; PAM type: YTN; PAM sequence: CTT
tccctctaatgccttgtatt

SEQ ID NO: 202964 - DNA, 20 bp, Artificial Sequence
  Description of Artificial Sequence: Synthetic oligonucleotide
  Target: LAMA2; (-) strand; PAM type: YTN; PAM sequence: CTC
tttccctctaatgccttgta

SEQ ID NO: 202965 - DNA, 20 bp, Artificial Sequence
  Description of Artificial Sequence: Synthetic oligonucleotide
  Target: LAMA2; (-) strand; PAM type: YTN; PAM sequence: CTC
cccactctttccctctaatg

SEQ ID NO: 202966 - DNA, 20 bp, Artificial Sequence
  Description of Artificial Sequence: Synthetic oligonucleotide
  Target: LAMA2; (-) strand; PAM type: YTN; PAM sequence: CTC
tccccactctttccctctaa

SEQ ID NO: 202967 - DNA, 20 bp, Artificial Sequence
  Description of Artificial Sequence: Synthetic oligonucleotide
  Target: LAMA2; (-) strand; PAM type: YTN; PAM sequence: TTA
cctctccccactctttccct

SEQ ID NO: 202968 - DNA, 20 bp, Artificial Sequence
  Description of Artificial Sequence: Synthetic oligonucleotide
  Target: LAMA2; (-) strand; PAM type: YTN; PAM sequence: TTT
acctctccccactctttccc

SEQ ID NO: 202969 - DNA, 20 bp, Artificial Sequence
  Description of Artificial Sequence: Synthetic oligonucleotide
  Target: LAMA2; (-) strand; PAM type: YTN; PAM sequence: CTT
tacctctccccactctttcc

SEQ ID NO: 202970 - DNA, 20 bp, Artificial Sequence
  Description of Artificial Sequence: Synthetic oligonucleotide
  Target: LAMA2; (-) strand; PAM type: YTN; PAM sequence: TTC
aactttacctctccccactc

SEQ ID NO: 202971 - DNA, 20 bp, Artificial Sequence
  Description of Artificial Sequence: Synthetic oligonucleotide
  Target: LAMA2; (-) strand; PAM type: YTN; PAM sequence: TTT
caactttacctctccccact

SEQ ID NO: 202972 - DNA, 20 bp, Artificial Sequence
  Description of Artificial Sequence: Synthetic oligonucleotide
  Target: LAMA2; (-) strand; PAM type: YTN; PAM sequence: CTT
tcaactttacctctccccac

SEQ ID NO: 202973 - DNA, 20 bp, Artificial Sequence
  Description of Artificial Sequence: Synthetic oligonucleotide
  Target: LAMA2; (-) strand; PAM type: YTN; PAM sequence: TTG
tctttcaactttacctctcc

SEQ ID NO: 202974 - DNA, 20 bp, Artificial Sequence
  Description of Artificial Sequence: Synthetic oligonucleotide
  Target: LAMA2; (-) strand; PAM type: YTN; PAM sequence: CTT
gtctttcaactttacctctc

SEQ ID NO: 202975 - DNA, 20 bp, Artificial Sequence
  Description of Artificial Sequence: Synthetic oligonucleotide
  Target: LAMA2; (-) strand; PAM type: YTN; PAM sequence: TTG
cttgtctttcaactttacct

SEQ ID NO: 202976 - DNA, 20 bp, Artificial Sequence
  Description of Artificial Sequence: Synthetic oligonucleotide
  Target: LAMA2; (-) strand; PAM type: YTN; PAM sequence: CTT
gcttgtctttcaactttacc

SEQ ID NO: 202977 - DNA, 20 bp, Artificial Sequence
  Description of Artificial Sequence: Synthetic oligonucleotide
  Target: LAMA2; (-) strand; PAM type: YTN; PAM sequence: TTC
ttgcttgtctttcaacttta

SEQ ID NO: 202978 - DNA, 20 bp, Artificial Sequence
  Description of Artificial Sequence: Synthetic oligonucleotide
  Target: LAMA2; (-) strand; PAM type: YTN; PAM sequence: CTT
cttgcttgtctttcaacttt

SEQ ID NO: 202979 - DNA, 20 bp, Artificial Sequence
  Description of Artificial Sequence: Synthetic oligonucleotide
  Target: LAMA2; (-) strand; PAM type: YTN; PAM sequence: CTG
cttcttgcttgtctttcaac

SEQ ID NO: 202980 - DNA, 20 bp, Artificial Sequence
  Description of Artificial Sequence: Synthetic oligonucleotide
  Target: LAMA2; (-) strand; PAM type: YTN; PAM sequence: TTC
atgatctgcttcttgcttgt

SEQ ID NO: 202981 - DNA, 20 bp, Artificial Sequence
  Description of Artificial Sequence: Synthetic oligonucleotide
  Target: LAMA2; (-) strand; PAM type: YTN; PAM sequence: TTT
catgatctgcttcttgcttg

SEQ ID NO: 202982 - DNA, 20 bp, Artificial Sequence
  Description of Artificial Sequence: Synthetic oligonucleotide
  Target: LAMA2; (-) strand; PAM type: YTN; PAM sequence: CTC
acaaagcgtttcatgatctg

SEQ ID NO: 202983 - DNA, 20 bp, Artificial Sequence
  Description of Artificial Sequence: Synthetic oligonucleotide
  Target: LAMA2; (-) strand; PAM type: YTN; PAM sequence: CTA
acaaggctcacaaagcgttt

SEQ ID NO: 202984 - DNA, 20 bp, Artificial Sequence
  Description of Artificial Sequence: Synthetic oligonucleotide
  Target: LAMA2; (-) strand; PAM type: YTN; PAM sequence: CTC
actaacaaggctcacaaagc

SEQ ID NO: 202985 - DNA, 20 bp, Artificial Sequence
  Description of Artificial Sequence: Synthetic oligonucleotide
  Target: LAMA2; (-) strand; PAM type: YTN; PAM sequence: CTG
aaactcactaacaaggctca

SEQ ID NO: 202986 - DNA, 20 bp, Artificial Sequence
  Description of Artificial Sequence: Synthetic oligonucleotide
  Target: LAMA2; (-) strand; PAM type: YTN; PAM sequence: TTC
cctgaaactcactaacaagg

SEQ ID NO: 202987 - DNA, 20 bp, Artificial Sequence
  Description of Artificial Sequence: Synthetic oligonucleotide
  Target: LAMA2; (-) strand; PAM type: YTN; PAM sequence: TTT
ccctgaaactcactaacaag

SEQ ID NO: 202988 - DNA, 20 bp, Artificial Sequence
  Description of Artificial Sequence: Synthetic oligonucleotide
  Target: LAMA2; (-) strand; PAM type: YTN; PAM sequence: TTA
gagggatttccctgaaactc

SEQ ID NO: 202989 - DNA, 20 bp, Artificial Sequence
  Description of Artificial Sequence: Synthetic oligonucleotide
  Target: LAMA2; (-) strand; PAM type: YTN; PAM sequence: TTG
cagttagagggatttccctg

SEQ ID NO: 202990 - DNA, 20 bp, Artificial Sequence
  Description of Artificial Sequence: Synthetic oligonucleotide
  Target: LAMA2; (-) strand; PAM type: YTN; PAM sequence: TTC
cacattgcagttagagggat

SEQ ID NO: 202991 - DNA, 20 bp, Artificial Sequence
  Description of Artificial Sequence: Synthetic oligonucleotide
  Target: LAMA2; (-) strand; PAM type: YTN; PAM sequence: TTT
ccacattgcagttagaggga

SEQ ID NO: 202992 - DNA, 20 bp, Artificial Sequence
  Description of Artificial Sequence: Synthetic oligonucleotide
  Target: LAMA2; (-) strand; PAM type: YTN; PAM sequence: TTT
tccacattgcagttagaggg

SEQ ID NO: 202993 - DNA, 20 bp, Artificial Sequence
  Description of Artificial Sequence: Synthetic oligonucleotide
  Target: LAMA2; (-) strand; PAM type: YTN; PAM sequence: TTC
attttccacattgcagttag

SEQ ID NO: 202994 - DNA, 20 bp, Artificial Sequence
  Description of Artificial Sequence: Synthetic oligonucleotide
  Target: LAMA2; (-) strand; PAM type: YTN; PAM sequence: TTC
caattcattttccacattgc

SEQ ID NO: 202995 - DNA, 20 bp, Artificial Sequence
  Description of Artificial Sequence: Synthetic oligonucleotide
  Target: LAMA2; (-) strand; PAM type: YTN; PAM sequence: TTT
ccaattcattttccacattg

SEQ ID NO: 202996 - DNA, 20 bp, Artificial Sequence
  Description of Artificial Sequence: Synthetic oligonucleotide
  Target: LAMA2; (-) strand; PAM type: YTN; PAM sequence: TTT
tccaattcattttccacatt

SEQ ID NO: 202997 - DNA, 20 bp, Artificial Sequence
  Description of Artificial Sequence: Synthetic oligonucleotide
  Target: LAMA2; (-) strand; PAM type: YTN; PAM sequence: CTT
ttccaattcattttccacat

SEQ ID NO: 202998 - DNA, 20 bp, Artificial Sequence
  Description of Artificial Sequence: Synthetic oligonucleotide
  Target: LAMA2; (-) strand; PAM type: YTN; PAM sequence: CTG
acttttccaattcattttcc

SEQ ID NO: 202999 - DNA, 20 bp, Artificial Sequence
  Description of Artificial Sequence: Synthetic oligonucleotide
  Target: LAMA2; (-) strand; PAM type: YTN; PAM sequence: TTC
tgacttttccaattcatttt

SEQ ID NO: 203000 - DNA, 20 bp, Artificial Sequence
  Description of Artificial Sequence: Synthetic oligonucleotide
  Target: LAMA2; (-) strand; PAM type: YTN; PAM sequence: CTT
ctgacttttccaattcattt

SEQ ID NO: 203001 - DNA, 20 bp, Artificial Sequence
  Description of Artificial Sequence: Synthetic oligonucleotide
  Target: LAMA2; (-) strand; PAM type: YTN; PAM sequence: CTC
ttctgacttttccaattcat

SEQ ID NO: 203002 - DNA, 20 bp, Artificial Sequence
  Description of Artificial Sequence: Synthetic oligonucleotide
  Target: LAMA2; (-) strand; PAM type: YTN; PAM sequence: TTC
ctcttctgacttttccaatt

SEQ ID NO: 203003 - DNA, 20 bp, Artificial Sequence
  Description of Artificial Sequence: Synthetic oligonucleotide
  Target: LAMA2; (-) strand; PAM type: YTN; PAM sequence: TTT
cctcttctgacttttccaat

SEQ ID NO: 203004 - DNA, 20 bp, Artificial Sequence
  Description of Artificial Sequence: Synthetic oligonucleotide
  Target: LAMA2; (-) strand; PAM type: YTN; PAM sequence: TTT
tcctcttctgacttttccaa

SEQ ID NO: 203005 - DNA, 20 bp, Artificial Sequence
  Description of Artificial Sequence: Synthetic oligonucleotide
  Target: LAMA2; (-) strand; PAM type: YTN; PAM sequence: TTA
atgaattttcctcttctgac

SEQ ID NO: 203006 - DNA, 20 bp, Artificial Sequence
  Description of Artificial Sequence: Synthetic oligonucleotide
  Target: LAMA2; (-) strand; PAM type: YTN; PAM sequence: TTT
aatgaattttcctcttctga

SEQ ID NO: 203007 - DNA, 20 bp, Artificial Sequence
  Description of Artificial Sequence: Synthetic oligonucleotide
  Target: LAMA2; (-) strand; PAM type: YTN; PAM sequence: TTT
taatgaattttcctcttctg

SEQ ID NO: 203008 - DNA, 20 bp, Artificial Sequence
  Description of Artificial Sequence: Synthetic oligonucleotide
  Target: LAMA2; (-) strand; PAM type: YTN; PAM sequence: CTT
ttaatgaattttcctcttct

SEQ ID NO: 203009 - DNA, 20 bp, Artificial Sequence
  Description of Artificial Sequence: Synthetic oligonucleotide
  Target: LAMA2; (-) strand; PAM type: YTN; PAM sequence: TTC
acatccttttaatgaatttt

SEQ ID NO: 203010 - DNA, 20 bp, Artificial Sequence
  Description of Artificial Sequence: Synthetic oligonucleotide
  Target: LAMA2; (-) strand; PAM type: YTN; PAM sequence: CTT
cacatccttttaatgaattt

SEQ ID NO: 203011 - DNA, 20 bp, Artificial Sequence
  Description of Artificial Sequence: Synthetic oligonucleotide
  Target: LAMA2; (-) strand; PAM type: YTN; PAM sequence: TTA
cttcacatccttttaatgaa

SEQ ID NO: 203012 - DNA, 20 bp, Artificial Sequence
  Description of Artificial Sequence: Synthetic oligonucleotide
  Target: LAMA2; (-) strand; PAM type: YTN; PAM sequence: TTA
attacttcacatccttttaa

SEQ ID NO: 203013 - DNA, 20 bp, Artificial Sequence
  Description of Artificial Sequence: Synthetic oligonucleotide
  Target: LAMA2; (-) strand; PAM type: YTN; PAM sequence: TTT
aattacttcacatcctttta

SEQ ID NO: 203014 - DNA, 20 bp, Artificial Sequence
  Description of Artificial Sequence: Synthetic oligonucleotide
  Target: LAMA2; (-) strand; PAM type: YTN; PAM sequence: CTT
taattacttcacatcctttt

SEQ ID NO: 203015 - DNA, 20 bp, Artificial Sequence
  Description of Artificial Sequence: Synthetic oligonucleotide
  Target: LAMA2; (-) strand; PAM type: YTN; PAM sequence: CTA
aatccctttaattacttcac

SEQ ID NO: 203016 - DNA, 20 bp, Artificial Sequence
  Description of Artificial Sequence: Synthetic oligonucleotide
  Target: LAMA2; (-) strand; PAM type: YTN; PAM sequence: TTA
tcctaaatccctttaattac

SEQ ID NO: 203017 - DNA, 20 bp, Artificial Sequence
  Description of Artificial Sequence: Synthetic oligonucleotide
  Target: LAMA2; (-) strand; PAM type: YTN; PAM sequence: TTC
aggccattatcctaaatccc

SEQ ID NO: 203018 - DNA, 20 bp, Artificial Sequence
  Description of Artificial Sequence: Synthetic oligonucleotide
  Target: LAMA2; (-) strand; PAM type: YTN; PAM sequence: TTA
gttcaggccattatcctaaa

SEQ ID NO: 203019 - DNA, 20 bp, Artificial Sequence
  Description of Artificial Sequence: Synthetic oligonucleotide
  Target: LAMA2; (-) strand; PAM type: YTN; PAM sequence: CTT
agttcaggccattatcctaa

SEQ ID NO: 203020 - DNA, 20 bp, Artificial Sequence
  Description of Artificial Sequence: Synthetic oligonucleotide
  Target: LAMA2; (-) strand; PAM type: YTN; PAM sequence: CTG
ccaccatcttagttcaggcc

SEQ ID NO: 203021 - DNA, 20 bp, Artificial Sequence
  Description of Artificial Sequence: Synthetic oligonucleotide
  Target: LAMA2; (-) strand; PAM type: YTN; PAM sequence: TTC
ccactgccaccatcttagtt

SEQ ID NO: 203022 - DNA, 20 bp, Artificial Sequence
  Description of Artificial Sequence: Synthetic oligonucleotide
  Target: LAMA2; (-) strand; PAM type: YTN; PAM sequence: TTC
attcccactgccaccatctt

SEQ ID NO: 203023 - DNA, 20 bp, Artificial Sequence
  Description of Artificial Sequence: Synthetic oligonucleotide
  Target: LAMA2; (-) strand; PAM type: YTN; PAM sequence: TTA
ttcattcccactgccaccat

SEQ ID NO: 203024 - DNA, 20 bp, Artificial Sequence
  Description of Artificial Sequence: Synthetic oligonucleotide
  Target: LAMA2; (-) strand; PAM type: YTN; PAM sequence: TTC
atattattcattcccactgc

SEQ ID NO: 203025 - DNA, 20 bp, Artificial Sequence
  Description of Artificial Sequence: Synthetic oligonucleotide
  Target: LAMA2; (-) strand; PAM type: YTN; PAM sequence: CTG
tcagtccattcatattattc

SEQ ID NO: 203026 - DNA, 20 bp, Artificial Sequence
  Description of Artificial Sequence: Synthetic oligonucleotide
  Target: LAMA2; (-) strand; PAM type: YTN; PAM sequence: CTG
agtcaaaatacaaaaaaaat

SEQ ID NO: 203027 - DNA, 20 bp, Artificial Sequence
  Description of Artificial Sequence: Synthetic oligonucleotide
  Target: LAMA2; (-) strand; PAM type: YTN; PAM sequence: CTG
ctgagtcaaaatacaaaaaa

SEQ ID NO: 203028 - DNA, 20 bp, Artificial Sequence
  Description of Artificial Sequence: Synthetic oligonucleotide
  Target: LAMA2; (-) strand; PAM type: YTN; PAM sequence: CTA
ccaacacctgctgagtcaaa

SEQ ID NO: 203029 - DNA, 20 bp, Artificial Sequence
  Description of Artificial Sequence: Synthetic oligonucleotide
  Target: LAMA2; (-) strand; PAM type: YTN; PAM sequence: CTA
atgctaccaacacctgctga

SEQ ID NO: 203030 - DNA, 20 bp, Artificial Sequence
  Description of Artificial Sequence: Synthetic oligonucleotide
  Target: LAMA2; (-) strand; PAM type: YTN; PAM sequence: CTA
tatctaatgctaccaacacc

SEQ ID NO: 203031 - DNA, 20 bp, Artificial Sequence
  Description of Artificial Sequence: Synthetic oligonucleotide
  Target: LAMA2; (-) strand; PAM type: YTN; PAM sequence: CTC
tatatctaatgctaccaaca

SEQ ID NO: 203032 - DNA, 20 bp, Artificial Sequence
  Description of Artificial Sequence: Synthetic oligonucleotide
  Target: LAMA2; (-) strand; PAM type: YTN; PAM sequence: CTC
tctatatctaatgctaccaa

SEQ ID NO: 203033 - DNA, 20 bp, Artificial Sequence
  Description of Artificial Sequence: Synthetic oligonucleotide
  Target: LAMA2; (-) strand; PAM type: YTN; PAM sequence: CTC
cccactctctatatctaatg

SEQ ID NO: 203034 - DNA, 20 bp, Artificial Sequence
  Description of Artificial Sequence: Synthetic oligonucleotide
  Target: LAMA2; (-) strand; PAM type: YTN; PAM sequence: TTC
ctccccactctctatatcta

SEQ ID NO: 203035 - DNA, 20 bp, Artificial Sequence
  Description of Artificial Sequence: Synthetic oligonucleotide
  Target: LAMA2; (-) strand; PAM type: YTN; PAM sequence: CTT
cctccccactctctatatct

SEQ ID NO: 203036 - DNA, 20 bp, Artificial Sequence
  Description of Artificial Sequence: Synthetic oligonucleotide
  Target: LAMA2; (-) strand; PAM type: YTN; PAM sequence: TTC
ttcctccccactctctatat

SEQ ID NO: 203037 - DNA, 20 bp, Artificial Sequence
  Description of Artificial Sequence: Synthetic oligonucleotide
  Target: LAMA2; (-) strand; PAM type: YTN; PAM sequence: CTT
cttcctccccactctctata

SEQ ID NO: 203038 - DNA, 20 bp, Artificial Sequence
  Description of Artificial Sequence: Synthetic oligonucleotide
  Target: LAMA2; (-) strand; PAM type: YTN; PAM sequence: CTA
gagccttcttcctccccact

SEQ ID NO: 203039 - DNA, 20 bp, Artificial Sequence
  Description of Artificial Sequence: Synthetic oligonucleotide
  Target: LAMA2; (-) strand; PAM type: YTN; PAM sequence: CTG
agcatcatgcctagagcctt

SEQ ID NO: 203040 - DNA, 20 bp, Artificial Sequence
  Description of Artificial Sequence: Synthetic oligonucleotide
  Target: LAMA2; (-) strand; PAM type: YTN; PAM sequence: TTA
accaaatcagcaatctgagc

SEQ ID NO: 203041 - DNA, 20 bp, Artificial Sequence
  Description of Artificial Sequence: Synthetic oligonucleotide
  Target: LAMA2; (-) strand; PAM type: YTN; PAM sequence: TTT
aaccaaatcagcaatctgag

SEQ ID NO: 203042 - DNA, 20 bp, Artificial Sequence
  Description of Artificial Sequence: Synthetic oligonucleotide
  Target: LAMA2; (-) strand; PAM type: YTN; PAM sequence: CTT
taaccaaatcagcaatctga

SEQ ID NO: 203043 - DNA, 20 bp, Artificial Sequence
  Description of Artificial Sequence: Synthetic oligonucleotide
  Target: LAMA2; (-) strand; PAM type: YTN; PAM sequence: TTC
ctttaaccaaatcagcaatc

SEQ ID NO: 203044 - DNA, 20 bp, Artificial Sequence
  Description of Artificial Sequence: Synthetic oligonucleotide
  Target: LAMA2; (-) strand; PAM type: YTN; PAM sequence: CTT
cctttaaccaaatcagcaat

SEQ ID NO: 203045 - DNA, 20 bp, Artificial Sequence
  Description of Artificial Sequence: Synthetic oligonucleotide
  Target: LAMA2; (-) strand; PAM type: YTN; PAM sequence: CTG
cttcctttaaccaaatcagc

SEQ ID NO: 203046 - DNA, 20 bp, Artificial Sequence
  Description of Artificial Sequence: Synthetic oligonucleotide
  Target: LAMA2; (-) strand; PAM type: YTN; PAM sequence: CTC
tgcttcctttaaccaaatca

SEQ ID NO: 203047 - DNA, 20 bp, Artificial Sequence
  Description of Artificial Sequence: Synthetic oligonucleotide
  Target: LAMA2; (-) strand; PAM type: YTN; PAM sequence: TTC
tctgcttcctttaaccaaat

SEQ ID NO: 203048 - DNA, 20 bp, Artificial Sequence
  Description of Artificial Sequence: Synthetic oligonucleotide
  Target: LAMA2; (-) strand; PAM type: YTN; PAM sequence: TTT
ctctgcttcctttaaccaaa

SEQ ID NO: 203049 - DNA, 20 bp, Artificial Sequence
  Description of Artificial Sequence: Synthetic oligonucleotide
  Target: LAMA2; (-) strand; PAM type: YTN; PAM sequence: CTT
tctctgcttcctttaaccaa

SEQ ID NO: 203050 - DNA, 20 bp, Artificial Sequence
  Description of Artificial Sequence: Synthetic oligonucleotide
  Target: LAMA2; (-) strand; PAM type: YTN; PAM sequence: CTC
cagatgtatctttctctgct

SEQ ID NO: 203051 - DNA, 20 bp, Artificial Sequence
  Description of Artificial Sequence: Synthetic oligonucleotide
  Target: LAMA2; (-) strand; PAM type: YTN; PAM sequence: CTC
tccagatgtatctttctctg

SEQ ID NO: 203052 - DNA, 20 bp, Artificial Sequence
  Description of Artificial Sequence: Synthetic oligonucleotide
  Target: LAMA2; (-) strand; PAM type: YTN; PAM sequence: TTC
ctctccagatgtatctttct

SEQ ID NO: 203053 - DNA, 20 bp, Artificial Sequence
  Description of Artificial Sequence: Synthetic oligonucleotide
  Target: LAMA2; (-) strand; PAM type: YTN; PAM sequence: TTT
cctctccagatgtatctttc

SEQ ID NO: 203054 - DNA, 20 bp, Artificial Sequence
  Description of Artificial Sequence: Synthetic oligonucleotide
  Target: LAMA2; (-) strand; PAM type: YTN; PAM sequence: TTG
tttcctctccagatgtatct

SEQ ID NO: 203055 - DNA, 20 bp, Artificial Sequence
  Description of Artificial Sequence: Synthetic oligonucleotide
  Target: LAMA2; (-) strand; PAM type: YTN; PAM sequence: CTT
gtttcctctccagatgtatc

SEQ ID NO: 203056 - DNA, 20 bp, Artificial Sequence
  Description of Artificial Sequence: Synthetic oligonucleotide
  Target: LAMA2; (-) strand; PAM type: YTN; PAM sequence: TTC
ttgtttcctctccagatgta

SEQ ID NO: 203057 - DNA, 20 bp, Artificial Sequence
  Description of Artificial Sequence: Synthetic oligonucleotide
  Target: LAMA2; (-) strand; PAM type: YTN; PAM sequence: CTG
gaaaaaacaaaacaaaaagt

SEQ ID NO: 203058 - DNA, 20 bp, Artificial Sequence
  Description of Artificial Sequence: Synthetic oligonucleotide
  Target: LAMA2; (-) strand; PAM type: YTN; PAM sequence: CTA
tcaggaactggaaaaaacaa

SEQ ID NO: 203059 - DNA, 20 bp, Artificial Sequence
  Description of Artificial Sequence: Synthetic oligonucleotide
  Target: LAMA2; (-) strand; PAM type: YTN; PAM sequence: CTA
tctatcaggaactggaaaaa

SEQ ID NO: 203060 - DNA, 20 bp, Artificial Sequence
  Description of Artificial Sequence: Synthetic oligonucleotide
  Target: LAMA2; (-) strand; PAM type: YTN; PAM sequence: TTG
agcatggctatctatcagga

SEQ ID NO: 203061 - DNA, 20 bp, Artificial Sequence
  Description of Artificial Sequence: Synthetic oligonucleotide
  Target: LAMA2; (-) strand; PAM type: YTN; PAM sequence: CTT
gagcatggctatctatcagg

SEQ ID NO: 203062 - DNA, 20 bp, Artificial Sequence
  Description of Artificial Sequence: Synthetic oligonucleotide
  Target: LAMA2; (-) strand; PAM type: YTN; PAM sequence: CTG
ggacacttgagcatggctat

SEQ ID NO: 203063 - DNA, 20 bp, Artificial Sequence
  Description of Artificial Sequence: Synthetic oligonucleotide
  Target: LAMA2; (-) strand; PAM type: YTN; PAM sequence: CTG
ccactgggacacttgagcat

SEQ ID NO: 203064 - DNA, 20 bp, Artificial Sequence
  Description of Artificial Sequence: Synthetic oligonucleotide
  Target: LAMA2; (-) strand; PAM type: YTN; PAM sequence: CTC
aactgccactgggacacttg

SEQ ID NO: 203065 - DNA, 20 bp, Artificial Sequence
  Description of Artificial Sequence: Synthetic oligonucleotide
  Target: LAMA2; (-) strand; PAM type: YTN; PAM sequence: CTA
aatactcaactgccactggg

SEQ ID NO: 203066 - DNA, 20 bp, Artificial Sequence
  Description of Artificial Sequence: Synthetic oligonucleotide
  Target: LAMA2; (-) strand; PAM type: YTN; PAM sequence: CTC
taaatactcaactgccactg

SEQ ID NO: 203067 - DNA, 20 bp, Artificial Sequence
  Description of Artificial Sequence: Synthetic oligonucleotide
  Target: LAMA2; (-) strand; PAM type: YTN; PAM sequence: TTG
actctaaatactcaactgcc

SEQ ID NO: 203068 - DNA, 20 bp, Artificial Sequence
  Description of Artificial Sequence: Synthetic oligonucleotide
  Target: LAMA2; (-) strand; PAM type: YTN; PAM sequence: TTT
gactctaaatactcaactgc

SEQ ID NO: 203069 - DNA, 20 bp, Artificial Sequence
  Description of Artificial Sequence: Synthetic oligonucleotide
  Target: LAMA2; (-) strand; PAM type: YTN; PAM sequence: CTT
tgactctaaatactcaactg

SEQ ID NO: 203070 - DNA, 20 bp, Artificial Sequence
  Description of Artificial Sequence: Synthetic oligonucleotide
  Target: LAMA2; (-) strand; PAM type: YTN; PAM sequence: CTG
agctttgactctaaatactc

SEQ ID NO: 203071 - DNA, 20 bp, Artificial Sequence
  Description of Artificial Sequence: Synthetic oligonucleotide
  Target: LAMA2; (-) strand; PAM type: YTN; PAM sequence: CTC
ccctgagctttgactctaaa

SEQ ID NO: 203072 - DNA, 20 bp, Artificial Sequence
  Description of Artificial Sequence: Synthetic oligonucleotide
  Target: LAMA2; (-) strand; PAM type: YTN; PAM sequence: TTC
tcccctgagctttgactcta

SEQ ID NO: 203073 - DNA, 20 bp, Artificial Sequence
  Description of Artificial Sequence: Synthetic oligonucleotide
  Target: LAMA2; (-) strand; PAM type: YTN; PAM sequence: CTA
gagttctcccctgagctttg

SEQ ID NO: 203074 - DNA, 20 bp, Artificial Sequence
  Description of Artificial Sequence: Synthetic oligonucleotide
  Target: LAMA2; (-) strand; PAM type: YTN; PAM sequence: TTA
tcaccagctagagttctccc

SEQ ID NO: 203075 - DNA, 20 bp, Artificial Sequence
  Description of Artificial Sequence: Synthetic oligonucleotide
  Target: LAMA2; (-) strand; PAM type: YTN; PAM sequence: TTC
ccaaatcattatcaccagct

SEQ ID NO: 203076 - DNA, 20 bp, Artificial Sequence
  Description of Artificial Sequence: Synthetic oligonucleotide
  Target: LAMA2; (-) strand; PAM type: YTN; PAM sequence: TTA
tgccaaaattcccaaatcat

SEQ ID NO: 203077 - DNA, 20 bp, Artificial Sequence
  Description of Artificial Sequence: Synthetic oligonucleotide
  Target: LAMA2; (-) strand; PAM type: YTN; PAM sequence: TTT
atgccaaaattcccaaatca

SEQ ID NO: 203078 - DNA, 20 bp, Artificial Sequence
  Description of Artificial Sequence: Synthetic oligonucleotide
  Target: LAMA2; (-) strand; PAM type: YTN; PAM sequence: TTT
tatgccaaaattcccaaatc

SEQ ID NO: 203079 - DNA, 20 bp, Artificial Sequence
  Description of Artificial Sequence: Synthetic oligonucleotide
  Target: LAMA2; (-) strand; PAM type: YTN; PAM sequence: TTT
ttatgccaaaattcccaaat

SEQ ID NO: 203080 - DNA, 20 bp, Artificial Sequence
  Description of Artificial Sequence: Synthetic oligonucleotide
  Target: LAMA2; (-) strand; PAM type: YTN; PAM sequence: TTC
aaatgagtatttttatgcca

SEQ ID NO: 203081 - DNA, 20 bp, Artificial Sequence
  Description of Artificial Sequence: Synthetic oligonucleotide
  Target: LAMA2; (-) strand; PAM type: YTN; PAM sequence: CTG
ggttcaaatgagtattttta

SEQ ID NO: 203082 - DNA, 20 bp, Artificial Sequence
  Description of Artificial Sequence: Synthetic oligonucleotide
  Target: LAMA2; (-) strand; PAM type: YTN; PAM sequence: TTC
cctgggttcaaatgagtatt

SEQ ID NO: 203083 - DNA, 20 bp, Artificial Sequence
  Description of Artificial Sequence: Synthetic oligonucleotide
  Target: LAMA2; (-) strand; PAM type: YTN; PAM sequence: TTT
ccctgggttcaaatgagtat

SEQ ID NO: 203084 - DNA, 20 bp, Artificial Sequence
  Description of Artificial Sequence: Synthetic oligonucleotide
  Target: LAMA2; (-) strand; PAM type: YTN; PAM sequence: CTC
ccatttccctgggttcaaat

SEQ ID NO: 203085 - DNA, 20 bp, Artificial Sequence
  Description of Artificial Sequence: Synthetic oligonucleotide
  Target: LAMA2; (-) strand; PAM type: YTN; PAM sequence: TTA
cctcccatttccctgggttc

SEQ ID NO: 203086 - DNA, 20 bp, Artificial Sequence
  Description of Artificial Sequence: Synthetic oligonucleotide
  Target: LAMA2; (-) strand; PAM type: YTN; PAM sequence: CTG
gatgttacctcccatttccc

SEQ ID NO: 203087 - DNA, 20 bp, Artificial Sequence
  Description of Artificial Sequence: Synthetic oligonucleotide
  Target: LAMA2; (-) strand; PAM type: YTN; PAM sequence: TTA
tcctggatgttacctcccat

SEQ ID NO: 203088 - DNA, 20 bp, Artificial Sequence
  Description of Artificial Sequence: Synthetic oligonucleotide
  Target: LAMA2; (-) strand; PAM type: YTN; PAM sequence: CTT
atcctggatgttacctccca

SEQ ID NO: 203089 - DNA, 20 bp, Artificial Sequence
  Description of Artificial Sequence: Synthetic oligonucleotide
  Target: LAMA2; (-) strand; PAM type: YTN; PAM sequence: CTA
caagcttatcctggatgtta

SEQ ID NO: 203090 - DNA, 20 bp, Artificial Sequence
  Description of Artificial Sequence: Synthetic oligonucleotide
  Target: LAMA2; (-) strand; PAM type: YTN; PAM sequence: TTC
tacaagcttatcctggatgt

SEQ ID NO: 203091 - DNA, 20 bp, Artificial Sequence
  Description of Artificial Sequence: Synthetic oligonucleotide
  Target: LAMA2; (-) strand; PAM type: YTN; PAM sequence: CTT
ctacaagcttatcctggatg

SEQ ID NO: 203092 - DNA, 20 bp, Artificial Sequence
  Description of Artificial Sequence: Synthetic oligonucleotide
  Target: LAMA2; (-) strand; PAM type: YTN; PAM sequence: TTC
cttctacaagcttatcctgg

SEQ ID NO: 203093 - DNA, 20 bp, Artificial Sequence
  Description of Artificial Sequence: Synthetic oligonucleotide
  Target: LAMA2; (-) strand; PAM type: YTN; PAM sequence: CTT
ccttctacaagcttatcctg

SEQ ID NO: 203094 - DNA, 20 bp, Artificial Sequence
  Description of Artificial Sequence: Synthetic oligonucleotide
  Target: LAMA2; (-) strand; PAM type: YTN; PAM sequence: CTC
ttccttctacaagcttatcc

SEQ ID NO: 203095 - DNA, 20 bp, Artificial Sequence
  Description of Artificial Sequence: Synthetic oligonucleotide
  Target: LAMA2; (-) strand; PAM type: YTN; PAM sequence: CTA
cacagtctcttccttctaca

SEQ ID NO: 203096 - DNA, 20 bp, Artificial Sequence
  Description of Artificial Sequence: Synthetic oligonucleotide
  Target: LAMA2; (-) strand; PAM type: YTN; PAM sequence: CTA
ctacacagtctcttccttct

SEQ ID NO: 203097 - DNA, 20 bp, Artificial Sequence
  Description of Artificial Sequence: Synthetic oligonucleotide
  Target: LAMA2; (-) strand; PAM type: YTN; PAM sequence: TTC
ctactacacagtctcttcct

SEQ ID NO: 203098 - DNA, 20 bp, Artificial Sequence
  Description of Artificial Sequence: Synthetic oligonucleotide
  Target: LAMA2; (-) strand; PAM type: YTN; PAM sequence: CTG
tgttcctactacacagtctc

SEQ ID NO: 203099 - DNA, 20 bp, Artificial Sequence
  Description of Artificial Sequence: Synthetic oligonucleotide
  Target: LAMA2; (-) strand; PAM type: YTN; PAM sequence: TTC
cctgtgttcctactacacag

SEQ ID NO: 203100 - DNA, 20 bp, Artificial Sequence
  Description of Artificial Sequence: Synthetic oligonucleotide
  Target: LAMA2; (-) strand; PAM type: YTN; PAM sequence: TTT
ccctgtgttcctactacaca

SEQ ID NO: 203101 - DNA, 20 bp, Artificial Sequence
  Description of Artificial Sequence: Synthetic oligonucleotide
  Target: LAMA2; (-) strand; PAM type: YTN; PAM sequence: CTT
tccctgtgttcctactacac

SEQ ID NO: 203102 - DNA, 20 bp, Artificial Sequence
  Description of Artificial Sequence: Synthetic oligonucleotide
  Target: LAMA2; (-) strand; PAM type: YTN; PAM sequence: TTG
atatctttccctgtgttcct

SEQ ID NO: 203103 - DNA, 20 bp, Artificial Sequence
  Description of Artificial Sequence: Synthetic oligonucleotide
  Target: LAMA2; (-) strand; PAM type: YTN; PAM sequence: CTG
gtgttgatatctttccctgt

SEQ ID NO: 203104 - DNA, 20 bp, Artificial Sequence
  Description of Artificial Sequence: Synthetic oligonucleotide
  Target: LAMA2; (-) strand; PAM type: YTN; PAM sequence: CTC
tggtgttgatatctttccct

SEQ ID NO: 203105 - DNA, 20 bp, Artificial Sequence
  Description of Artificial Sequence: Synthetic oligonucleotide
  Target: LAMA2; (-) strand; PAM type: YTN; PAM sequence: CTC
tctggtgttgatatctttcc

SEQ ID NO: 203106 - DNA, 20 bp, Artificial Sequence
  Description of Artificial Sequence: Synthetic oligonucleotide
  Target: LAMA2; (-) strand; PAM type: YTN; PAM sequence: TTC
ctctctggtgttgatatctt

SEQ ID NO: 203107 - DNA, 20 bp, Artificial Sequence
  Description of Artificial Sequence: Synthetic oligonucleotide
  Target: LAMA2; (-) strand; PAM type: YTN; PAM sequence: CTT
cctctctggtgttgatatct

SEQ ID NO: 203108 - DNA, 20 bp, Artificial Sequence
  Description of Artificial Sequence: Synthetic oligonucleotide
  Target: LAMA2; (-) strand; PAM type: YTN; PAM sequence: CTC
ttcctctctggtgttgatat

SEQ ID NO: 203109 - DNA, 20 bp, Artificial Sequence
  Description of Artificial Sequence: Synthetic oligonucleotide
  Target: LAMA2; (-) strand; PAM type: YTN; PAM sequence: CTC
aagcaaagcatctcttcctc

SEQ ID NO: 203110 - DNA, 20 bp, Artificial Sequence
  Description of Artificial Sequence: Synthetic oligonucleotide
  Target: LAMA2; (-) strand; PAM type: YTN; PAM sequence: TTA
aatgtagagtacaccctcaa

SEQ ID NO: 203111 - DNA, 20 bp, Artificial Sequence
  Description of Artificial Sequence: Synthetic oligonucleotide
  Target: LAMA2; (-) strand; PAM type: YTN; PAM sequence: TTT
aaatgtagagtacaccctca

SEQ ID NO: 203112 - DNA, 20 bp, Artificial Sequence
  Description of Artificial Sequence: Synthetic oligonucleotide
  Target: LAMA2; (-) strand; PAM type: YTN; PAM sequence: CTC
aaagagaaaaatttaaatgt

SEQ ID NO: 203113 - DNA, 20 bp, Artificial Sequence
  Description of Artificial Sequence: Synthetic oligonucleotide
  Target: LAMA2; (-) strand; PAM type: YTN; PAM sequence: CTC
tcaaagagaaaaatttaaat

SEQ ID NO: 203114 - DNA, 20 bp, Artificial Sequence
  Description of Artificial Sequence: Synthetic oligonucleotide
  Target: LAMA2; (-) strand; PAM type: YTN; PAM sequence: TTC
tctcaaagagaaaaatttaa

SEQ ID NO: 203115 - DNA, 20 bp, Artificial Sequence
  Description of Artificial Sequence: Synthetic oligonucleotide
  Target: LAMA2; (-) strand; PAM type: YTN; PAM sequence: CTT
ctctcaaagagaaaaattta

SEQ ID NO: 203116 - DNA, 20 bp, Artificial Sequence
  Description of Artificial Sequence: Synthetic oligonucleotide
  Target: LAMA2; (-) strand; PAM type: YTN; PAM sequence: TTC
ttctctcaaagagaaaaatt

SEQ ID NO: 203117 - DNA, 20 bp, Artificial Sequence
  Description of Artificial Sequence: Synthetic oligonucleotide
  Target: LAMA2; (-) strand; PAM type: YTN; PAM sequence: TTG
tcatgattcttctctcaaag

SEQ ID NO: 203118 - DNA, 20 bp, Artificial Sequence
  Description of Artificial Sequence: Synthetic oligonucleotide
  Target: LAMA2; (-) strand; PAM type: YTN; PAM sequence: TTA
ttgtcatgattcttctctca

SEQ ID NO: 203119 - DNA, 20 bp, Artificial Sequence
  Description of Artificial Sequence: Synthetic oligonucleotide
  Target: LAMA2; (-) strand; PAM type: YTN; PAM sequence: CTT
attgtcatgattcttctctc

SEQ ID NO: 203120 - DNA, 20 bp, Artificial Sequence
  Description of Artificial Sequence: Synthetic oligonucleotide
  Target: LAMA2; (-) strand; PAM type: YTN; PAM sequence: TTC
ttattgtcatgattcttctc

SEQ ID NO: 203121 - DNA, 20 bp, Artificial Sequence
  Description of Artificial Sequence: Synthetic oligonucleotide
  Target: LAMA2; (-) strand; PAM type: YTN; PAM sequence: TTT
cttattgtcatgattcttct

SEQ ID NO: 203122 - DNA, 20 bp, Artificial Sequence
  Description of Artificial Sequence: Synthetic oligonucleotide
  Target: LAMA2; (-) strand; PAM type: YTN; PAM sequence: CTG
aaatatggaataaatcaaat

SEQ ID NO: 203123 - DNA, 20 bp, Artificial Sequence
  Description of Artificial Sequence: Synthetic oligonucleotide
  Target: LAMA2; (-) strand; PAM type: YTN; PAM sequence: TTC
aaaacaatctgaaatatgga

SEQ ID NO: 203124 - DNA, 20 bp, Artificial Sequence
  Description of Artificial Sequence: Synthetic oligonucleotide
  Target: LAMA2; (-) strand; PAM type: YTN; PAM sequence: TTT
caaaacaatctgaaatatgg

SEQ ID NO: 203125 - DNA, 20 bp, Artificial Sequence
  Description of Artificial Sequence: Synthetic oligonucleotide
  Target: LAMA2; (-) strand; PAM type: YTN; PAM sequence: CTT
tcaaaacaatctgaaatatg

SEQ ID NO: 203126 - DNA, 20 bp, Artificial Sequence
  Description of Artificial Sequence: Synthetic oligonucleotide
  Target: LAMA2; (-) strand; PAM type: YTN; PAM sequence: TTA
gtgacataccactttcaaaa

SEQ ID NO: 203127 - DNA, 20 bp, Artificial Sequence
  Description of Artificial Sequence: Synthetic oligonucleotide
  Target: LAMA2; (-) strand; PAM type: YTN; PAM sequence: TTC
attagtgacataccactttc

SEQ ID NO: 203128 - DNA, 20 bp, Artificial Sequence
  Description of Artificial Sequence: Synthetic oligonucleotide
  Target: LAMA2; (-) strand; PAM type: YTN; PAM sequence: TTT
cattagtgacataccacttt

SEQ ID NO: 203129 - DNA, 20 bp, Artificial Sequence
  Description of Artificial Sequence: Synthetic oligonucleotide
  Target: LAMA2; (-) strand; PAM type: YTN; PAM sequence: CTT
tcattagtgacataccactt

SEQ ID NO: 203130 - DNA, 20 bp, Artificial Sequence
  Description of Artificial Sequence: Synthetic oligonucleotide
  Target: LAMA2; (-) strand; PAM type: YTN; PAM sequence: CTC
ctttcattagtgacatacca

SEQ ID NO: 203131 - DNA, 20 bp, Artificial Sequence
  Description of Artificial Sequence: Synthetic oligonucleotide
  Target: LAMA2; (-) strand; PAM type: YTN; PAM sequence: TTC
acactcctttcattagtgac

SEQ ID NO: 203132 - DNA, 20 bp, Artificial Sequence
  Description of Artificial Sequence: Synthetic oligonucleotide
  Target: LAMA2; (-) strand; PAM type: YTN; PAM sequence: CTT
cacactcctttcattagtga

SEQ ID NO: 203133 - DNA, 20 bp, Artificial Sequence
  Description of Artificial Sequence: Synthetic oligonucleotide
  Target: LAMA2; (-) strand; PAM type: YTN; PAM sequence: TTC
acttcacactcctttcatta

SEQ ID NO: 203134 - DNA, 20 bp, Artificial Sequence
  Description of Artificial Sequence: Synthetic oligonucleotide
  Target: LAMA2; (-) strand; PAM type: YTN; PAM sequence: CTC
aggaatgtcaacagtattca

SEQ ID NO: 203135 - DNA, 20 bp, Artificial Sequence
  Description of Artificial Sequence: Synthetic oligonucleotide
  Target: LAMA2; (-) strand; PAM type: YTN; PAM sequence: TTC
tcaggaatgtcaacagtatt

SEQ ID NO: 203136 - DNA, 20 bp, Artificial Sequence
  Description of Artificial Sequence: Synthetic oligonucleotide
  Target: LAMA2; (-) strand; PAM type: YTN; PAM sequence: TTT
ctcaggaatgtcaacagtat

SEQ ID NO: 203137 - DNA, 20 bp, Artificial Sequence
  Description of Artificial Sequence: Synthetic oligonucleotide
  Target: LAMA2; (-) strand; PAM type: YTN; PAM sequence: TTA
aggccccccagatacatttc

SEQ ID NO: 203138 - DNA, 20 bp, Artificial Sequence
  Description of Artificial Sequence: Synthetic oligonucleotide
  Target: LAMA2; (-) strand; PAM type: YTN; PAM sequence: TTT
aaggccccccagatacattt

SEQ ID NO: 203139 - DNA, 20 bp, Artificial Sequence
  Description of Artificial Sequence: Synthetic oligonucleotide
  Target: LAMA2; (-) strand; PAM type: YTN; PAM sequence: TTT
taaggccccccagatacatt

SEQ ID NO: 203140 - DNA, 20 bp, Artificial Sequence
  Description of Artificial Sequence: Synthetic oligonucleotide
  Target: LAMA2; (-) strand; PAM type: YTN; PAM sequence: TTA
cagattttaaggccccccag

SEQ ID NO: 203141 - DNA, 20 bp, Artificial Sequence
  Description of Artificial Sequence: Synthetic oligonucleotide
  Target: LAMA2; (-) strand; PAM type: YTN; PAM sequence: TTT
acagattttaaggcccccca

SEQ ID NO: 203142 - DNA, 20 bp, Artificial Sequence
  Description of Artificial Sequence: Synthetic oligonucleotide
  Target: LAMA2; (-) strand; PAM type: YTN; PAM sequence: TTA
tgatatttacagattttaag

SEQ ID NO: 203143 - DNA, 20 bp, Artificial Sequence
  Description of Artificial Sequence: Synthetic oligonucleotide
  Target: LAMA2; (-) strand; PAM type: YTN; PAM sequence: TTT
atgatatttacagattttaa

SEQ ID NO: 203144 - DNA, 20 bp, Artificial Sequence
  Description of Artificial Sequence: Synthetic oligonucleotide
  Target: LAMA2; (-) strand; PAM type: YTN; PAM sequence: TTC
gtatgatatttatgatattt

SEQ ID NO: 203145 - DNA, 20 bp, Artificial Sequence
  Description of Artificial Sequence: Synthetic oligonucleotide
  Target: LAMA2; (-) strand; PAM type: YTN; PAM sequence: TTA
ggattcgtatgatatttatg

SEQ ID NO: 203146 - DNA, 20 bp, Artificial Sequence
  Description of Artificial Sequence: Synthetic oligonucleotide
  Target: LAMA2; (-) strand; PAM type: YTN; PAM sequence: CTT
aggattcgtatgatatttat

SEQ ID NO: 203147 - DNA, 20 bp, Artificial Sequence
  Description of Artificial Sequence: Synthetic oligonucleotide
  Target: LAMA2; (-) strand; PAM type: YTN; PAM sequence: TTC
ttaggattcgtatgatattt

SEQ ID NO: 203148 - DNA, 20 bp, Artificial Sequence
  Description of Artificial Sequence: Synthetic oligonucleotide
  Target: LAMA2; (-) strand; PAM type: YTN; PAM sequence: TTT
cttaggattcgtatgatatt

SEQ ID NO: 203149 - DNA, 20 bp, Artificial Sequence
  Description of Artificial Sequence: Synthetic oligonucleotide
  Target: LAMA2; (-) strand; PAM type: YTN; PAM sequence: TTA
aatcccagaatttcttagga

SEQ ID NO: 203150 - DNA, 20 bp, Artificial Sequence
  Description of Artificial Sequence: Synthetic oligonucleotide
  Target: LAMA2; (-) strand; PAM type: YTN; PAM sequence: CTT
aaatcccagaatttcttagg

SEQ ID NO: 203151 - DNA, 20 bp, Artificial Sequence
  Description of Artificial Sequence: Synthetic oligonucleotide
  Target: LAMA2; (-) strand; PAM type: YTN; PAM sequence: CTC
atccttaaatcccagaattt

SEQ ID NO: 203152 - DNA, 20 bp, Artificial Sequence
  Description of Artificial Sequence: Synthetic oligonucleotide
  Target: LAMA2; (-) strand; PAM type: YTN; PAM sequence: CTC
ccactcatccttaaatccca

SEQ ID NO: 203153 - DNA, 20 bp, Artificial Sequence
  Description of Artificial Sequence: Synthetic oligonucleotide
  Target: LAMA2; (-) strand; PAM type: YTN; PAM sequence: CTA
agtctcccactcatccttaa

SEQ ID NO: 203154 - DNA, 20 bp, Artificial Sequence
  Description of Artificial Sequence: Synthetic oligonucleotide
  Target: LAMA2; (-) strand; PAM type: YTN; PAM sequence: TTA
caacacagaaccaagaacct

SEQ ID NO: 203155 - DNA, 20 bp, Artificial Sequence
  Description of Artificial Sequence: Synthetic oligonucleotide
  Target: LAMA2; (-) strand; PAM type: YTN; PAM sequence: CTT
acaacacagaaccaagaacc

SEQ ID NO: 203156 - DNA, 20 bp, Artificial Sequence
  Description of Artificial Sequence: Synthetic oligonucleotide
  Target: LAMA2; (-) strand; PAM type: YTN; PAM sequence: TTG
gagaatgacttacaacacag

SEQ ID NO: 203157 - DNA, 20 bp, Artificial Sequence
  Description of Artificial Sequence: Synthetic oligonucleotide
  Target: LAMA2; (-) strand; PAM type: YTN; PAM sequence: CTT
ggagaatgacttacaacaca

SEQ ID NO: 203158 - DNA, 20 bp, Artificial Sequence
  Description of Artificial Sequence: Synthetic oligonucleotide
  Target: LAMA2; (-) strand; PAM type: YTN; PAM sequence: CTA
cacttggagaatgacttaca

SEQ ID NO: 203159 - DNA, 20 bp, Artificial Sequence
  Description of Artificial Sequence: Synthetic oligonucleotide
  Target: LAMA2; (-) strand; PAM type: YTN; PAM sequence: CTG
ctacacttggagaatgactt

SEQ ID NO: 203160 - DNA, 20 bp, Artificial Sequence
  Description of Artificial Sequence: Synthetic oligonucleotide
  Target: LAMA2; (-) strand; PAM type: YTN; PAM sequence: CTA
tggtcctgctacacttggag

SEQ ID NO: 203161 - DNA, 20 bp, Artificial Sequence
  Description of Artificial Sequence: Synthetic oligonucleotide
  Target: LAMA2; (-) strand; PAM type: YTN; PAM sequence: TTC
atcagtgctatggtcctgct

SEQ ID NO: 203162 - DNA, 20 bp, Artificial Sequence
  Description of Artificial Sequence: Synthetic oligonucleotide
  Target: LAMA2; (-) strand; PAM type: YTN; PAM sequence: TTT
catcagtgctatggtcctgc

SEQ ID NO: 203163 - DNA, 20 bp, Artificial Sequence
  Description of Artificial Sequence: Synthetic oligonucleotide
  Target: LAMA2; (-) strand; PAM type: YTN; PAM sequence: TTT
tcatcagtgctatggtcctg

SEQ ID NO: 203164 - DNA, 20 bp, Artificial Sequence
  Description of Artificial Sequence: Synthetic oligonucleotide
  Target: LAMA2; (-) strand; PAM type: YTN; PAM sequence: CTG
tataaatcattttcatcagt

SEQ ID NO: 203165 - DNA, 20 bp, Artificial Sequence
  Description of Artificial Sequence: Synthetic oligonucleotide
  Target: LAMA2; (-) strand; PAM type: YTN; PAM sequence: CTA
ctgtataaatcattttcatc

SEQ ID NO: 203166 - DNA, 20 bp, Artificial Sequence
  Description of Artificial Sequence: Synthetic oligonucleotide
  Target: LAMA2; (-) strand; PAM type: YTN; PAM sequence: TTG
gatcataagactactgtata

SEQ ID NO: 203167 - DNA, 20 bp, Artificial Sequence
  Description of Artificial Sequence: Synthetic oligonucleotide
  Target: LAMA2; (-) strand; PAM type: YTN; PAM sequence: TTC
atacatgggcattggatcat

SEQ ID NO: 203168 - DNA, 20 bp, Artificial Sequence
  Description of Artificial Sequence: Synthetic oligonucleotide
  Target: LAMA2; (-) strand; PAM type: YTN; PAM sequence: TTG
ttcatacatgggcattggat

SEQ ID NO: 203169 - DNA, 20 bp, Artificial Sequence
  Description of Artificial Sequence: Synthetic oligonucleotide
  Target: LAMA2; (-) strand; PAM type: YTN; PAM sequence: TTT
gttcatacatgggcattgga

SEQ ID NO: 203170 - DNA, 20 bp, Artificial Sequence
  Description of Artificial Sequence: Synthetic oligonucleotide
  Target: LAMA2; (-) strand; PAM type: YTN; PAM sequence: CTT
tgttcatacatgggcattgg

SEQ ID NO: 203171 - DNA, 20 bp, Artificial Sequence
  Description of Artificial Sequence: Synthetic oligonucleotide
  Target: LAMA2; (-) strand; PAM type: YTN; PAM sequence: TTA
gaagacaggaacagtaacct

SEQ ID NO: 203172 - DNA, 20 bp, Artificial Sequence
  Description of Artificial Sequence: Synthetic oligonucleotide
  Target: LAMA2; (-) strand; PAM type: YTN; PAM sequence: TTT
agaagacaggaacagtaacc

SEQ ID NO: 203173 - DNA, 20 bp, Artificial Sequence
  Description of Artificial Sequence: Synthetic oligonucleotide
  Target: LAMA2; (-) strand; PAM type: YTN; PAM sequence: CTG
ggaaccccaatttagaagac

SEQ ID NO: 203174 - DNA, 20 bp, Artificial Sequence
  Description of Artificial Sequence: Synthetic oligonucleotide
  Target: LAMA2; (-) strand; PAM type: YTN; PAM sequence: TTA
cactgggaaccccaatttag

SEQ ID NO: 203175 - DNA, 20 bp, Artificial Sequence
  Description of Artificial Sequence: Synthetic oligonucleotide
  Target: LAMA2; (-) strand; PAM type: YTN; PAM sequence: CTG
tattacactgggaaccccaa

SEQ ID NO: 203176 - DNA, 20 bp, Artificial Sequence
  Description of Artificial Sequence: Synthetic oligonucleotide
  Target: LAMA2; (-) strand; PAM type: YTN; PAM sequence: TTC
ctgtattacactgggaaccc

SEQ ID NO: 203177 - DNA, 20 bp, Artificial Sequence
  Description of Artificial Sequence: Synthetic oligonucleotide
  Target: LAMA2; (-) strand; PAM type: YTN; PAM sequence: CTT
cctgtattacactgggaacc

SEQ ID NO: 203178 - DNA, 20 bp, Artificial Sequence
  Description of Artificial Sequence: Synthetic oligonucleotide
  Target: LAMA2; (-) strand; PAM type: YTN; PAM sequence: CTA
gcacacagtagtcttcctgt

SEQ ID NO: 203179 - DNA, 20 bp, Artificial Sequence
  Description of Artificial Sequence: Synthetic oligonucleotide
  Target: LAMA2; (-) strand; PAM type: YTN; PAM sequence: TTA
ctagcacacagtagtcttcc

SEQ ID NO: 203180 - DNA, 20 bp, Artificial Sequence
  Description of Artificial Sequence: Synthetic oligonucleotide
  Target: LAMA2; (-) strand; PAM type: YTN; PAM sequence: TTT
actagcacacagtagtcttc

SEQ ID NO: 203181 - DNA, 20 bp, Artificial Sequence
  Description of Artificial Sequence: Synthetic oligonucleotide
  Target: LAMA2; (-) strand; PAM type: YTN; PAM sequence: CTG
tttactagcacacagtagtc

SEQ ID NO: 203182 - DNA, 20 bp, Artificial Sequence
  Description of Artificial Sequence: Synthetic oligonucleotide
  Target: LAMA2; (-) strand; PAM type: YTN; PAM sequence: TTC
tgtttactagcacacagtag

SEQ ID NO: 203183 - DNA, 20 bp, Artificial Sequence
  Description of Artificial Sequence: Synthetic oligonucleotide
  Target: LAMA2; (-) strand; PAM type: YTN; PAM sequence: TTT
ctgtttactagcacacagta

SEQ ID NO: 203184 - DNA, 20 bp, Artificial Sequence
  Description of Artificial Sequence: Synthetic oligonucleotide
  Target: LAMA2; (-) strand; PAM type: YTN; PAM sequence: CTT
tctgtttactagcacacagt

SEQ ID NO: 203185 - DNA, 20 bp, Artificial Sequence
  Description of Artificial Sequence: Synthetic oligonucleotide
  Target: LAMA2; (-) strand; PAM type: YTN; PAM sequence: TTG
tgctttctgtttactagcac

SEQ ID NO: 203186 - DNA, 20 bp, Artificial Sequence
  Description of Artificial Sequence: Synthetic oligonucleotide
  Target: LAMA2; (-) strand; PAM type: YTN; PAM sequence: CTC
agaaagataaaagcagaata

SEQ ID NO: 203187 - DNA, 20 bp, Artificial Sequence
  Description of Artificial Sequence: Synthetic oligonucleotide
  Target: LAMA2; (-) strand; PAM type: YTN; PAM sequence: TTA
atctcagaaagataaaagca

SEQ ID NO: 203188 - DNA, 20 bp, Artificial Sequence
  Description of Artificial Sequence: Synthetic oligonucleotide
  Target: LAMA2; (-) strand; PAM type: YTN; PAM sequence: CTC
ataggaaaaaaggccagata

SEQ ID NO: 203189 - DNA, 20 bp, Artificial Sequence
  Description of Artificial Sequence: Synthetic oligonucleotide
  Target: LAMA2; (-) strand; PAM type: YTN; PAM sequence: TTA
taaccaaaggtactcatagg

SEQ ID NO: 203190 - DNA, 20 bp, Artificial Sequence
  Description of Artificial Sequence: Synthetic oligonucleotide
  Target: LAMA2; (-) strand; PAM type: YTN; PAM sequence: TTT
ataaccaaaggtactcatag

SEQ ID NO: 203191 - DNA, 20 bp, Artificial Sequence
  Description of Artificial Sequence: Synthetic oligonucleotide
  Target: LAMA2; (-) strand; PAM type: YTN; PAM sequence: CTT
tataaccaaaggtactcata

SEQ ID NO: 203192 - DNA, 20 bp, Artificial Sequence
  Description of Artificial Sequence: Synthetic oligonucleotide
  Target: LAMA2; (-) strand; PAM type: YTN; PAM sequence: TTC
tttataaccaaaggtactca

SEQ ID NO: 203193 - DNA, 20 bp, Artificial Sequence
  Description of Artificial Sequence: Synthetic oligonucleotide
  Target: LAMA2; (-) strand; PAM type: YTN; PAM sequence: TTG
ataatgtagcaatgcgaagt

SEQ ID NO: 203194 - DNA, 20 bp, Artificial Sequence
  Description of Artificial Sequence: Synthetic oligonucleotide
  Target: LAMA2; (-) strand; PAM type: YTN; PAM sequence: CTG
aaaattgataatgtagcaat

SEQ ID NO: 203195 - DNA, 20 bp, Artificial Sequence
  Description of Artificial Sequence: Synthetic oligonucleotide
  Target: LAMA2; (-) strand; PAM type: YTN; PAM sequence: TTA
aaaataaaaaagagaggctg

SEQ ID NO: 203196 - DNA, 20 bp, Artificial Sequence
  Description of Artificial Sequence: Synthetic oligonucleotide
  Target: LAMA2; (-) strand; PAM type: YTN; PAM sequence: TTA
agaagaggtggcaaagaaat

SEQ ID NO: 203197 - DNA, 20 bp, Artificial Sequence
  Description of Artificial Sequence: Synthetic oligonucleotide
  Target: LAMA2; (-) strand; PAM type: YTN; PAM sequence: TTA
tgtattaagaagaggtggca

SEQ ID NO: 203198 - DNA, 20 bp, Artificial Sequence
  Description of Artificial Sequence: Synthetic oligonucleotide
  Target: LAMA2; (-) strand; PAM type: YTN; PAM sequence: TTG
aaaaaaaaaaaaaaagaaag

SEQ ID NO: 203199 - DNA, 20 bp, Artificial Sequence
  Description of Artificial Sequence: Synthetic oligonucleotide
  Target: LAMA2; (-) strand; PAM type: YTN; PAM sequence: CTT
gaaaaaaaaaaaaaaagaaa

SEQ ID NO: 203200 - DNA, 20 bp, Artificial Sequence
  Description of Artificial Sequence: Synthetic oligonucleotide
  Target: LAMA2; (-) strand; PAM type: YTN; PAM sequence: CTG
ggcaacacgtcaagaccttg

SEQ ID NO: 203201 - DNA, 20 bp, Artificial Sequence
  Description of Artificial Sequence: Synthetic oligonucleotide
  Target: LAMA2; (-) strand; PAM type: YTN; PAM sequence: CTC
cagcctgggcaacacgtcaa

SEQ ID NO: 203202 - DNA, 20 bp, Artificial Sequence
  Description of Artificial Sequence: Synthetic oligonucleotide
  Target: LAMA2; (-) strand; PAM type: YTN; PAM sequence: CTG
cactccagcctgggcaacac

SEQ ID NO: 203203 - DNA, 20 bp, Artificial Sequence
  Description of Artificial Sequence: Synthetic oligonucleotide
  Target: LAMA2; (-) strand; PAM type: YTN; PAM sequence: CTA
ctgcactccagcctgggcaa

SEQ ID NO: 203204 - DNA, 20 bp, Artificial Sequence
  Description of Artificial Sequence: Synthetic oligonucleotide
  Target: LAMA2; (-) strand; PAM type: YTN; PAM sequence: TTC
actactgcactccagcctgg

SEQ ID NO: 203205 - DNA, 20 bp, Artificial Sequence
  Description of Artificial Sequence: Synthetic oligonucleotide
  Target: LAMA2; (-) strand; PAM type: YTN; PAM sequence: TTT
cactactgcactccagcctg

SEQ ID NO: 203206 - DNA, 20 bp, Artificial Sequence
  Description of Artificial Sequence: Synthetic oligonucleotide
  Target: LAMA2; (-) strand; PAM type: YTN; PAM sequence: CTG
cagtgagccatgatttcact

SEQ ID NO: 203207 - DNA, 20 bp, Artificial Sequence
  Description of Artificial Sequence: Synthetic oligonucleotide
  Target: LAMA2; (-) strand; PAM type: YTN; PAM sequence: TTG
aggctgcagtgagccatgat

SEQ ID NO: 203208 - DNA, 20 bp, Artificial Sequence
  Description of Artificial Sequence: Synthetic oligonucleotide
  Target: LAMA2; (-) strand; PAM type: YTN; PAM sequence: TTG
agcccaggaggttgaggctg

SEQ ID NO: 203209 - DNA, 20 bp, Artificial Sequence
  Description of Artificial Sequence: Synthetic oligonucleotide
  Target: LAMA2; (-) strand; PAM type: YTN; PAM sequence: CTT
gagcccaggaggttgaggct

SEQ ID NO: 203210 - DNA, 20 bp, Artificial Sequence
  Description of Artificial Sequence: Synthetic oligonucleotide
  Target: LAMA2; (-) strand; PAM type: YTN; PAM sequence: TTG
cttgagcccaggaggttgag

SEQ ID NO: 203211 - DNA, 20 bp, Artificial Sequence
  Description of Artificial Sequence: Synthetic oligonucleotide
  Target: LAMA2; (-) strand; PAM type: YTN; PAM sequence: TTG
ggggtgcggaggtggaagga

SEQ ID NO: 203212 - DNA, 20 bp, Artificial Sequence
  Description of Artificial Sequence: Synthetic oligonucleotide
  Target: LAMA2; (-) strand; PAM type: YTN; PAM sequence: CTT
gggggtgcggaggtggaagg

SEQ ID NO: 203213 - DNA, 20 bp, Artificial Sequence
  Description of Artificial Sequence: Synthetic oligonucleotide
  Target: LAMA2; (-) strand; PAM type: YTN; PAM sequence: CTG
cttgggggtgcggaggtgga

SEQ ID NO: 203214 - DNA, 20 bp, Artificial Sequence
  Description of Artificial Sequence: Synthetic oligonucleotide
  Target: LAMA2; (-) strand; PAM type: YTN; PAM sequence: CTG
tagtcccagctgcttggggg

SEQ ID NO: 203215 - DNA, 20 bp, Artificial Sequence
  Description of Artificial Sequence: Synthetic oligonucleotide
  Target: LAMA2; (-) strand; PAM type: YTN; PAM sequence: TTG
cctgtagtcccagctgcttg

SEQ ID NO: 203216 - DNA, 20 bp, Artificial Sequence
  Description of Artificial Sequence: Synthetic oligonucleotide
  Target: LAMA2; (-) strand; PAM type: YTN; PAM sequence: CTT
gcctgtagtcccagctgctt

SEQ ID NO: 203217 - DNA, 20 bp, Artificial Sequence
  Description of Artificial Sequence: Synthetic oligonucleotide
  Target: LAMA2; (-) strand; PAM type: YTN; PAM sequence: TTG
ggcatggtggcccttgcctg

SEQ ID NO: 203218 - DNA, 20 bp, Artificial Sequence
  Description of Artificial Sequence: Synthetic oligonucleotide
  Target: LAMA2; (-) strand; PAM type: YTN; PAM sequence: TTA
gttgggcatggtggcccttg

SEQ ID NO: 203219 - DNA, 20 bp, Artificial Sequence
  Description of Artificial Sequence: Synthetic oligonucleotide
  Target: LAMA2; (-) strand; PAM type: YTN; PAM sequence: CTA
tgaaaaacaaaaataaatta

SEQ ID NO: 203220 - DNA, 20 bp, Artificial Sequence
  Description of Artificial Sequence: Synthetic oligonucleotide
  Target: LAMA2; (-) strand; PAM type: YTN; PAM sequence: CTC
tatgaaaaacaaaaataaat

SEQ ID NO: 203221 - DNA, 20 bp, Artificial Sequence
  Description of Artificial Sequence: Synthetic oligonucleotide
  Target: LAMA2; (-) strand; PAM type: YTN; PAM sequence: CTC
atctctatgaaaaacaaaaa

SEQ ID NO: 203222 - DNA, 20 bp, Artificial Sequence
  Description of Artificial Sequence: Synthetic oligonucleotide
  Target: LAMA2; (-) strand; PAM type: YTN; PAM sequence: CTG
ggcaacatagtgagacctca

SEQ ID NO: 203223 - DNA, 20 bp, Artificial Sequence
  Description of Artificial Sequence: Synthetic oligonucleotide
  Target: LAMA2; (-) strand; PAM type: YTN; PAM sequence: TTG
agagcagcctgggcaacata

SEQ ID NO: 203224 - DNA, 20 bp, Artificial Sequence
  Description of Artificial Sequence: Synthetic oligonucleotide
  Target: LAMA2; (-) strand; PAM type: YTN; PAM sequence: TTT
gagagcagcctgggcaacat

SEQ ID NO: 203225 - DNA, 20 bp, Artificial Sequence
  Description of Artificial Sequence: Synthetic oligonucleotide
  Target: LAMA2; (-) strand; PAM type: YTN; PAM sequence: TTG
gcccaggagtttgagagcag

SEQ ID NO: 203226 - DNA, 20 bp, Artificial Sequence
  Description of Artificial Sequence: Synthetic oligonucleotide
  Target: LAMA2; (-) strand; PAM type: YTN; PAM sequence: CTT
ggcccaggagtttgagagca

SEQ ID NO: 203227 - DNA, 20 bp, Artificial Sequence
  Description of Artificial Sequence: Synthetic oligonucleotide
  Target: LAMA2; (-) strand; PAM type: YTN; PAM sequence: CTG
aggcagaaggatcacttggc

SEQ ID NO: 203228 - DNA, 20 bp, Artificial Sequence
  Description of Artificial Sequence: Synthetic oligonucleotide
  Target: LAMA2; (-) strand; PAM type: YTN; PAM sequence: TTG
aaaggctgaggcagaaggat

SEQ ID NO: 203229 - DNA, 20 bp, Artificial Sequence
  Description of Artificial Sequence: Synthetic oligonucleotide
  Target: LAMA2; (-) strand; PAM type: YTN; PAM sequence: TTT
gaaaggctgaggcagaagga

SEQ ID NO: 203230 - DNA, 20 bp, Artificial Sequence
  Description of Artificial Sequence: Synthetic oligonucleotide
  Target: LAMA2; (-) strand; PAM type: YTN; PAM sequence: CTT
tgaaaggctgaggcagaagg

SEQ ID NO: 203231 - DNA, 20 bp, Artificial Sequence
  Description of Artificial Sequence: Synthetic oligonucleotide
  Target: LAMA2; (-) strand; PAM type: YTN; PAM sequence: CTG
taatcccagcactttgaaag

SEQ ID NO: 203232 - DNA, 20 bp, Artificial Sequence
  Description of Artificial Sequence: Synthetic oligonucleotide
  Target: LAMA2; (-) strand; PAM type: YTN; PAM sequence: CTC
atgtctgtaatcccagcact

SEQ ID NO: 203233 - DNA, 20 bp, Artificial Sequence
  Description of Artificial Sequence: Synthetic oligonucleotide
  Target: LAMA2; (-) strand; PAM type: YTN; PAM sequence: TTG
ggtgaggtggctcatgtctg

SEQ ID NO: 203234 - DNA, 20 bp, Artificial Sequence
  Description of Artificial Sequence: Synthetic oligonucleotide
  Target: LAMA2; (-) strand; PAM type: YTN; PAM sequence: TTT
gggtgaggtggctcatgtct

SEQ ID NO: 203235 - DNA, 20 bp, Artificial Sequence
  Description of Artificial Sequence: Synthetic oligonucleotide
  Target: LAMA2; (-) strand; PAM type: YTN; PAM sequence: CTC
aaaaaaaaagaaaagtttgg

SEQ ID NO: 203236 - DNA, 20 bp, Artificial Sequence
  Description of Artificial Sequence: Synthetic oligonucleotide
  Target: LAMA2; (-) strand; PAM type: YTN; PAM sequence: CTC
tcaaaaaaaaagaaaagttt

SEQ ID NO: 203237 - DNA, 20 bp, Artificial Sequence
  Description of Artificial Sequence: Synthetic oligonucleotide
  Target: LAMA2; (-) strand; PAM type: YTN; PAM sequence: TTA
agaatctctcaaaaaaaaag

SEQ ID NO: 203238 - DNA, 20 bp, Artificial Sequence
  Description of Artificial Sequence: Synthetic oligonucleotide
  Target: LAMA2; (-) strand; PAM type: YTN; PAM sequence: TTT
aagaatctctcaaaaaaaaa

SEQ ID NO: 203239 - DNA, 20 bp, Artificial Sequence
  Description of Artificial Sequence: Synthetic oligonucleotide
  Target: LAMA2; (-) strand; PAM type: YTN; PAM sequence: CTA
gtttaagaatctctcaaaaa

SEQ ID NO: 203240 - DNA, 20 bp, Artificial Sequence
  Description of Artificial Sequence: Synthetic oligonucleotide
  Target: LAMA2; (-) strand; PAM type: YTN; PAM sequence: TTA
tcgtaagtacaatctagttt

SEQ ID NO: 203241 - DNA, 20 bp, Artificial Sequence
  Description of Artificial Sequence: Synthetic oligonucleotide
  Target: LAMA2; (-) strand; PAM type: YTN; PAM sequence: TTT
atcgtaagtacaatctagtt

SEQ ID NO: 203242 - DNA, 20 bp, Artificial Sequence
  Description of Artificial Sequence: Synthetic oligonucleotide
  Target: LAMA2; (-) strand; PAM type: YTN; PAM sequence: TTG
aaggtaatgaatcagtcaac

SEQ ID NO: 203243 - DNA, 20 bp, Artificial Sequence
  Description of Artificial Sequence: Synthetic oligonucleotide
  Target: LAMA2; (-) strand; PAM type: YTN; PAM sequence: CTG
ttgaaggtaatgaatcagtc

SEQ ID NO: 203244 - DNA, 20 bp, Artificial Sequence
  Description of Artificial Sequence: Synthetic oligonucleotide
  Target: LAMA2; (-) strand; PAM type: YTN; PAM sequence: CTG
aaagcactgttgaaggtaat

SEQ ID NO: 203245 - DNA, 20 bp, Artificial Sequence
  Description of Artificial Sequence: Synthetic oligonucleotide
  Target: LAMA2; (-) strand; PAM type: YTN; PAM sequence: CTG
aaccatcagaggctgaaagc

SEQ ID NO: 203246 - DNA, 20 bp, Artificial Sequence
  Description of Artificial Sequence: Synthetic oligonucleotide
  Target: LAMA2; (-) strand; PAM type: YTN; PAM sequence: CTC
tgaaccatcagaggctgaaa

SEQ ID NO: 203247 - DNA, 20 bp, Artificial Sequence
  Description of Artificial Sequence: Synthetic oligonucleotide
  Target: LAMA2; (-) strand; PAM type: YTN; PAM sequence: TTC
tctgaaccatcagaggctga

SEQ ID NO: 203248 - DNA, 20 bp, Artificial Sequence
  Description of Artificial Sequence: Synthetic oligonucleotide
  Target: LAMA2; (-) strand; PAM type: YTN; PAM sequence: TTT
ctctgaaccatcagaggctg

SEQ ID NO: 203249 - DNA, 20 bp, Artificial Sequence
  Description of Artificial Sequence: Synthetic oligonucleotide
  Target: LAMA2; (-) strand; PAM type: YTN; PAM sequence: TTC
aggtgaaatataaagtatac

SEQ ID NO: 203250 - DNA, 20 bp, Artificial Sequence
  Description of Artificial Sequence: Synthetic oligonucleotide
  Target: LAMA2; (-) strand; PAM type: YTN; PAM sequence: CTG
attcaggtgaaatataaagt

SEQ ID NO: 203251 - DNA, 20 bp, Artificial Sequence
  Description of Artificial Sequence: Synthetic oligonucleotide
  Target: LAMA2; (-) strand; PAM type: YTN; PAM sequence: CTC
aaccgaaacctgattcaggt

SEQ ID NO: 203252 - DNA, 20 bp, Artificial Sequence
  Description of Artificial Sequence: Synthetic oligonucleotide
  Target: LAMA2; (-) strand; PAM type: YTN; PAM sequence: TTG
tctcaaccgaaacctgattc

SEQ ID NO: 203253 - DNA, 20 bp, Artificial Sequence
  Description of Artificial Sequence: Synthetic oligonucleotide
  Target: LAMA2; (-) strand; PAM type: YTN; PAM sequence: TTA
ttgtctcaaccgaaacctga

SEQ ID NO: 203254 - DNA, 20 bp, Artificial Sequence
  Description of Artificial Sequence: Synthetic oligonucleotide
  Target: LAMA2; (-) strand; PAM type: YTN; PAM sequence: CTC
agaaaattattgtctcaacc

SEQ ID NO: 203255 - DNA, 20 bp, Artificial Sequence
  Description of Artificial Sequence: Synthetic oligonucleotide
  Target: LAMA2; (-) strand; PAM type: YTN; PAM sequence: TTG
tgaagtggagacatactcag

SEQ ID NO: 203256 - DNA, 20 bp, Artificial Sequence
  Description of Artificial Sequence: Synthetic oligonucleotide
  Target: LAMA2; (-) strand; PAM type: YTN; PAM sequence: TTT
gtgaagtggagacatactca

SEQ ID NO: 203257 - DNA, 20 bp, Artificial Sequence
  Description of Artificial Sequence: Synthetic oligonucleotide
  Target: LAMA2; (-) strand; PAM type: YTN; PAM sequence: TTT
tgtgaagtggagacatactc

SEQ ID NO: 203258 - DNA, 20 bp, Artificial Sequence
  Description of Artificial Sequence: Synthetic oligonucleotide
  Target: LAMA2; (-) strand; PAM type: YTN; PAM sequence: TTA
attttgtgaagtggagacat

SEQ ID NO: 203259 - DNA, 20 bp, Artificial Sequence
  Description of Artificial Sequence: Synthetic oligonucleotide
  Target: LAMA2; (-) strand; PAM type: YTN; PAM sequence: TTG
aaaataaattaattttgtga

SEQ ID NO: 203260 - DNA, 20 bp, Artificial Sequence
  Description of Artificial Sequence: Synthetic oligonucleotide
  Target: LAMA2; (-) strand; PAM type: YTN; PAM sequence: CTA
gagaaaagttgaaaataaat

SEQ ID NO: 203261 - DNA, 20 bp, Artificial Sequence
  Description of Artificial Sequence: Synthetic oligonucleotide
  Target: LAMA2; (-) strand; PAM type: YTN; PAM sequence: TTA
tcaaaacagtggtaaaacta

SEQ ID NO: 203262 - DNA, 20 bp, Artificial Sequence
  Description of Artificial Sequence: Synthetic oligonucleotide
  Target: LAMA2; (-) strand; PAM type: YTN; PAM sequence: TTT
atcaaaacagtggtaaaact

SEQ ID NO: 203263 - DNA, 20 bp, Artificial Sequence
  Description of Artificial Sequence: Synthetic oligonucleotide
  Target: LAMA2; (-) strand; PAM type: YTN; PAM sequence: TTA
tttatcaaaacagtggtaaa

SEQ ID NO: 203264 - DNA, 20 bp, Artificial Sequence
  Description of Artificial Sequence: Synthetic oligonucleotide
  Target: LAMA2; (-) strand; PAM type: YTN; PAM sequence: CTG
taagattatttatcaaaaca

SEQ ID NO: 203265 - DNA, 20 bp, Artificial Sequence
  Description of Artificial Sequence: Synthetic oligonucleotide
  Target: LAMA2; (-) strand; PAM type: YTN; PAM sequence: CTC
cactgtaagattatttatca

SEQ ID NO: 203266 - DNA, 20 bp, Artificial Sequence
  Description of Artificial Sequence: Synthetic oligonucleotide
  Target: LAMA2; (-) strand; PAM type: YTN; PAM sequence: TTC
ctccactgtaagattattta

SEQ ID NO: 203267 - DNA, 20 bp, Artificial Sequence
  Description of Artificial Sequence: Synthetic oligonucleotide
  Target: LAMA2; (-) strand; PAM type: YTN; PAM sequence: CTT
cctccactgtaagattattt

SEQ ID NO: 203268 - DNA, 20 bp, Artificial Sequence
  Description of Artificial Sequence: Synthetic oligonucleotide
  Target: LAMA2; (-) strand; PAM type: YTN; PAM sequence: TTC
aataagtcttcctccactgt

SEQ ID NO: 203269 - DNA, 20 bp, Artificial Sequence
  Description of Artificial Sequence: Synthetic oligonucleotide
  Target: LAMA2; (-) strand; PAM type: YTN; PAM sequence: TTT
caataagtcttcctccactg

SEQ ID NO: 203270 - DNA, 20 bp, Artificial Sequence
  Description of Artificial Sequence: Synthetic oligonucleotide
  Target: LAMA2; (-) strand; PAM type: YTN; PAM sequence: TTG
tttcaataagtcttcctcca

SEQ ID NO: 203271 - DNA, 20 bp, Artificial Sequence
  Description of Artificial Sequence: Synthetic oligonucleotide
  Target: LAMA2; (-) strand; PAM type: YTN; PAM sequence: CTG
aggcaaacaagagaaaaaaa

SEQ ID NO: 203272 - DNA, 20 bp, Artificial Sequence
  Description of Artificial Sequence: Synthetic oligonucleotide
  Target: LAMA2; (-) strand; PAM type: YTN; PAM sequence: CTC
tgaggcaaacaagagaaaaa

SEQ ID NO: 203273 - DNA, 20 bp, Artificial Sequence
  Description of Artificial Sequence: Synthetic oligonucleotide
  Target: LAMA2; (-) strand; PAM type: YTN; PAM sequence: CTA
gggagagaatgaatcaacca

SEQ ID NO: 203274 - DNA, 20 bp, Artificial Sequence
  Description of Artificial Sequence: Synthetic oligonucleotide
  Target: LAMA2; (-) strand; PAM type: YTN; PAM sequence: CTC
caacctagggagagaatgaa

SEQ ID NO: 203275 - DNA, 20 bp, Artificial Sequence
  Description of Artificial Sequence: Synthetic oligonucleotide
  Target: LAMA2; (-) strand; PAM type: YTN; PAM sequence: CTG
caatggctccaacctaggga

SEQ ID NO: 203276 - DNA, 20 bp, Artificial Sequence
  Description of Artificial Sequence: Synthetic oligonucleotide
  Target: LAMA2; (-) strand; PAM type: YTN; PAM sequence: TTC
tgcaatggctccaacctagg

SEQ ID NO: 203277 - DNA, 20 bp, Artificial Sequence
  Description of Artificial Sequence: Synthetic oligonucleotide
  Target: LAMA2; (-) strand; PAM type: YTN; PAM sequence: TTG
attctgcaatggctccaacc

SEQ ID NO: 203278 - DNA, 20 bp, Artificial Sequence
  Description of Artificial Sequence: Synthetic oligonucleotide
  Target: LAMA2; (-) strand; PAM type: YTN; PAM sequence: TTA
aaagtaaaatattgattctg

SEQ ID NO: 203279 - DNA, 20 bp, Artificial Sequence
  Description of Artificial Sequence: Synthetic oligonucleotide
  Target: LAMA2; (-) strand; PAM type: YTN; PAM sequence: TTG
gagtcagttaaaagtaaaat

SEQ ID NO: 203280 - DNA, 20 bp, Artificial Sequence
  Description of Artificial Sequence: Synthetic oligonucleotide
  Target: LAMA2; (-) strand; PAM type: YTN; PAM sequence: TTT
ggagtcagttaaaagtaaaa

SEQ ID NO: 203281 - DNA, 20 bp, Artificial Sequence
  Description of Artificial Sequence: Synthetic oligonucleotide
  Target: LAMA2; (-) strand; PAM type: YTN; PAM sequence: TTT
tggagtcagttaaaagtaaa

SEQ ID NO: 203282 - DNA, 20 bp, Artificial Sequence
  Description of Artificial Sequence: Synthetic oligonucleotide
  Target: LAMA2; (-) strand; PAM type: YTN; PAM sequence: CTA
gaatgtatatattttggagt

SEQ ID NO: 203283 - DNA, 20 bp, Artificial Sequence
  Description of Artificial Sequence: Synthetic oligonucleotide
  Target: LAMA2; (-) strand; PAM type: YTN; PAM sequence: TTA
gctagaatgtatatattttg

SEQ ID NO: 203284 - DNA, 20 bp, Artificial Sequence
  Description of Artificial Sequence: Synthetic oligonucleotide
  Target: LAMA2; (-) strand; PAM type: YTN; PAM sequence: CTT
agctagaatgtatatatttt

SEQ ID NO: 203285 - DNA, 20 bp, Artificial Sequence
  Description of Artificial Sequence: Synthetic oligonucleotide
  Target: LAMA2; (-) strand; PAM type: YTN; PAM sequence: CTG
aaagtacttagctagaatgt

SEQ ID NO: 203286 - DNA, 20 bp, Artificial Sequence
  Description of Artificial Sequence: Synthetic oligonucleotide
  Target: LAMA2; (-) strand; PAM type: YTN; PAM sequence: CTC
atagtgctgaaagtacttag

SEQ ID NO: 203287 - DNA, 20 bp, Artificial Sequence
  Description of Artificial Sequence: Synthetic oligonucleotide
  Target: LAMA2; (-) strand; PAM type: YTN; PAM sequence: TTA
aaagaaggacaactcatagt

SEQ ID NO: 203288 - DNA, 20 bp, Artificial Sequence
  Description of Artificial Sequence: Synthetic oligonucleotide
  Target: LAMA2; (-) strand; PAM type: YTN; PAM sequence: TTT
aaaagaaggacaactcatag

SEQ ID NO: 203289 - DNA, 20 bp, Artificial Sequence
  Description of Artificial Sequence: Synthetic oligonucleotide
  Target: LAMA2; (-) strand; PAM type: YTN; PAM sequence: CTT
taaaagaaggacaactcata

SEQ ID NO: 203290 - DNA, 20 bp, Artificial Sequence
  Description of Artificial Sequence: Synthetic oligonucleotide
  Target: LAMA2; (-) strand; PAM type: YTN; PAM sequence: CTC
tttaaaagaaggacaactca

SEQ ID NO: 203291 - DNA, 20 bp, Artificial Sequence
  Description of Artificial Sequence: Synthetic oligonucleotide
  Target: LAMA2; (-) strand; PAM type: YTN; PAM sequence: TTC
tctttaaaagaaggacaact

SEQ ID NO: 203292 - DNA, 20 bp, Artificial Sequence
  Description of Artificial Sequence: Synthetic oligonucleotide
  Target: LAMA2; (-) strand; PAM type: YTN; PAM sequence: TTT
ctctttaaaagaaggacaac

SEQ ID NO: 203293 - DNA, 20 bp, Artificial Sequence
  Description of Artificial Sequence: Synthetic oligonucleotide
  Target: LAMA2; (-) strand; PAM type: YTN; PAM sequence: TTA
aaaaaatttctctttaaaag

SEQ ID NO: 203294 - DNA, 20 bp, Artificial Sequence
  Description of Artificial Sequence: Synthetic oligonucleotide
  Target: LAMA2; (-) strand; PAM type: YTN; PAM sequence: TTT
aaaaaaatttctctttaaaa

SEQ ID NO: 203295 - DNA, 20 bp, Artificial Sequence
  Description of Artificial Sequence: Synthetic oligonucleotide
  Target: LAMA2; (-) strand; PAM type: YTN; PAM sequence: TTT
taaaaaaatttctctttaaa

SEQ ID NO: 203296 - DNA, 20 bp, Artificial Sequence
  Description of Artificial Sequence: Synthetic oligonucleotide
  Target: LAMA2; (-) strand; PAM type: YTN; PAM sequence: TTA
atgatatcattttaaaaaaa

SEQ ID NO: 203297 - DNA, 20 bp, Artificial Sequence
  Description of Artificial Sequence: Synthetic oligonucleotide
  Target: LAMA2; (-) strand; PAM type: YTN; PAM sequence: TTT
aatgatatcattttaaaaaa

SEQ ID NO: 203298 - DNA, 20 bp, Artificial Sequence
  Description of Artificial Sequence: Synthetic oligonucleotide
  Target: LAMA2; (-) strand; PAM type: YTN; PAM sequence: TTT
taatgatatcattttaaaaa

SEQ ID NO: 203299 - DNA, 20 bp, Artificial Sequence
  Description of Artificial Sequence: Synthetic oligonucleotide
  Target: LAMA2; (-) strand; PAM type: YTN; PAM sequence: TTT
ttaatgatatcattttaaaa

SEQ ID NO: 203300 - DNA, 20 bp, Artificial Sequence
  Description of Artificial Sequence: Synthetic oligonucleotide
  Target: LAMA2; (-) strand; PAM type: YTN; PAM sequence: TTG
tttttaatgatatcatttta

SEQ ID NO: 203301 - DNA, 20 bp, Artificial Sequence
  Description of Artificial Sequence: Synthetic oligonucleotide
  Target: LAMA2; (-) strand; PAM type: YTN; PAM sequence: CTT
gtttttaatgatatcatttt

SEQ ID NO: 203302 - DNA, 20 bp, Artificial Sequence
  Description of Artificial Sequence: Synthetic oligonucleotide
  Target: LAMA2; (-) strand; PAM type: YTN; PAM sequence: TTA
tacaataaatcatggaatgg

SEQ ID NO: 203303 - DNA, 20 bp, Artificial Sequence
  Description of Artificial Sequence: Synthetic oligonucleotide
  Target: LAMA2; (-) strand; PAM type: YTN; PAM sequence: CTT
atacaataaatcatggaatg

SEQ ID NO: 203304 - DNA, 20 bp, Artificial Sequence
  Description of Artificial Sequence: Synthetic oligonucleotide
  Target: LAMA2; (-) strand; PAM type: YTN; PAM sequence: CTC
ttatacaataaatcatggaa

SEQ ID NO: 203305 - DNA, 20 bp, Artificial Sequence
  Description of Artificial Sequence: Synthetic oligonucleotide
  Target: LAMA2; (-) strand; PAM type: YTN; PAM sequence: TTC
tcttatacaataaatcatgg

SEQ ID NO: 203306 - DNA, 20 bp, Artificial Sequence
  Description of Artificial Sequence: Synthetic oligonucleotide
  Target: LAMA2; (-) strand; PAM type: YTN; PAM sequence: CTT
ctcttatacaataaatcatg

SEQ ID NO: 203307 - DNA, 20 bp, Artificial Sequence
  Description of Artificial Sequence: Synthetic oligonucleotide
  Target: LAMA2; (-) strand; PAM type: YTN; PAM sequence: TTA
tcttctcttatacaataaat

SEQ ID NO: 203308 - DNA, 20 bp, Artificial Sequence
  Description of Artificial Sequence: Synthetic oligonucleotide
  Target: LAMA2; (-) strand; PAM type: YTN; PAM sequence: CTT
atcttctcttatacaataaa

SEQ ID NO: 203309 - DNA, 20 bp, Artificial Sequence
  Description of Artificial Sequence: Synthetic oligonucleotide
  Target: LAMA2; (-) strand; PAM type: YTN; PAM sequence: CTC
cgtacttatcttctcttata

SEQ ID NO: 203310 - DNA, 20 bp, Artificial Sequence
  Description of Artificial Sequence: Synthetic oligonucleotide
  Target: LAMA2; (-) strand; PAM type: YTN; PAM sequence: TTA
caactccgtacttatcttct

SEQ ID NO: 203311 - DNA, 20 bp, Artificial Sequence
  Description of Artificial Sequence: Synthetic oligonucleotide
  Target: LAMA2; (-) strand; PAM type: YTN; PAM sequence: TTT
acaactccgtacttatcttc

SEQ ID NO: 203312 - DNA, 20 bp, Artificial Sequence
  Description of Artificial Sequence: Synthetic oligonucleotide
  Target: LAMA2; (-) strand; PAM type: YTN; PAM sequence: TTG
caggtttacaactccgtact

SEQ ID NO: 203313 - DNA, 20 bp, Artificial Sequence
  Description of Artificial Sequence: Synthetic oligonucleotide
  Target: LAMA2; (-) strand; PAM type: YTN; PAM sequence: CTA
ttgcaggtttacaactccgt

SEQ ID NO: 203314 - DNA, 20 bp, Artificial Sequence
  Description of Artificial Sequence: Synthetic oligonucleotide
  Target: LAMA2; (-) strand; PAM type: YTN; PAM sequence: TTC
tattgcaggtttacaactcc

SEQ ID NO: 203315 - DNA, 20 bp, Artificial Sequence
  Description of Artificial Sequence: Synthetic oligonucleotide
  Target: LAMA2; (-) strand; PAM type: YTN; PAM sequence: TTA
ttctattgcaggtttacaac

SEQ ID NO: 203316 - DNA, 20 bp, Artificial Sequence
  Description of Artificial Sequence: Synthetic oligonucleotide
  Target: LAMA2; (-) strand; PAM type: YTN; PAM sequence: CTC
atcagtgaaggtggatatcc

SEQ ID NO: 203317 - DNA, 20 bp, Artificial Sequence
  Description of Artificial Sequence: Synthetic oligonucleotide
  Target: LAMA2; (-) strand; PAM type: YTN; PAM sequence: TTA
aactcatcagtgaaggtgga

SEQ ID NO: 203318 - DNA, 20 bp, Artificial Sequence
  Description of Artificial Sequence: Synthetic oligonucleotide
  Target: LAMA2; (-) strand; PAM type: YTN; PAM sequence: TTA
acaggtaagaatgagtcagt

SEQ ID NO: 203319 - DNA, 20 bp, Artificial Sequence
  Description of Artificial Sequence: Synthetic oligonucleotide
  Target: LAMA2; (-) strand; PAM type: YTN; PAM sequence: TTG
gttaacaggtaagaatgagt

SEQ ID NO: 203320 - DNA, 20 bp, Artificial Sequence
  Description of Artificial Sequence: Synthetic oligonucleotide
  Target: LAMA2; (-) strand; PAM type: YTN; PAM sequence: TTT
ggttaacaggtaagaatgag

SEQ ID NO: 203321 - DNA, 20 bp, Artificial Sequence
  Description of Artificial Sequence: Synthetic oligonucleotide
  Target: LAMA2; (-) strand; PAM type: YTN; PAM sequence: CTC
aaaagcatttggttaacagg

SEQ ID NO: 203322 - DNA, 20 bp, Artificial Sequence
  Description of Artificial Sequence: Synthetic oligonucleotide
  Target: LAMA2; (-) strand; PAM type: YTN; PAM sequence: CTC
tcaaaagcatttggttaaca

SEQ ID NO: 203323 - DNA, 20 bp, Artificial Sequence
  Description of Artificial Sequence: Synthetic oligonucleotide
  Target: LAMA2; (-) strand; PAM type: YTN; PAM sequence: TTG
actctcaaaagcatttggtt

SEQ ID NO: 203324 - DNA, 20 bp, Artificial Sequence
  Description of Artificial Sequence: Synthetic oligonucleotide
  Target: LAMA2; (-) strand; PAM type: YTN; PAM sequence: TTT
gactctcaaaagcatttggt

SEQ ID NO: 203325 - DNA, 20 bp, Artificial Sequence
  Description of Artificial Sequence: Synthetic oligonucleotide
  Target: LAMA2; (-) strand; PAM type: YTN; PAM sequence: CTT
tgactctcaaaagcatttgg

SEQ ID NO: 203326 - DNA, 20 bp, Artificial Sequence
  Description of Artificial Sequence: Synthetic oligonucleotide
  Target: LAMA2; (-) strand; PAM type: YTN; PAM sequence: CTG
cctttgactctcaaaagcat

SEQ ID NO: 203327 - DNA, 20 bp, Artificial Sequence
  Description of Artificial Sequence: Synthetic oligonucleotide
  Target: LAMA2; (-) strand; PAM type: YTN; PAM sequence: CTC
agaccctgcctttgactctc

SEQ ID NO: 203328 - DNA, 20 bp, Artificial Sequence
  Description of Artificial Sequence: Synthetic oligonucleotide
  Target: LAMA2; (-) strand; PAM type: YTN; PAM sequence: CTC
tcagaccctgcctttgactc

SEQ ID NO: 203329 - DNA, 20 bp, Artificial Sequence
  Description of Artificial Sequence: Synthetic oligonucleotide
  Target: LAMA2; (-) strand; PAM type: YTN; PAM sequence: TTC
ctctcagaccctgcctttga

SEQ ID NO: 203330 - DNA, 20 bp, Artificial Sequence
  Description of Artificial Sequence: Synthetic oligonucleotide
  Target: LAMA2; (-) strand; PAM type: YTN; PAM sequence: TTG
ataattcctctcagaccctg

SEQ ID NO: 203331 - DNA, 20 bp, Artificial Sequence
  Description of Artificial Sequence: Synthetic oligonucleotide
  Target: LAMA2; (-) strand; PAM type: YTN; PAM sequence: TTC
attgataattcctctcagac

SEQ ID NO: 203332 - DNA, 20 bp, Artificial Sequence
  Description of Artificial Sequence: Synthetic oligonucleotide
  Target: LAMA2; (-) strand; PAM type: YTN; PAM sequence: TTA
caaatattcattgataattc

SEQ ID NO: 203333 - DNA, 20 bp, Artificial Sequence
  Description of Artificial Sequence: Synthetic oligonucleotide
  Target: LAMA2; (-) strand; PAM type: YTN; PAM sequence: TTC
attacaaatattcattgata

SEQ ID NO: 203334 - DNA, 20 bp, Artificial Sequence
  Description of Artificial Sequence: Synthetic oligonucleotide
  Target: LAMA2; (-) strand; PAM type: YTN; PAM sequence: CTC
aatgattcattacaaatatt

SEQ ID NO: 203335 - DNA, 20 bp, Artificial Sequence
  Description of Artificial Sequence: Synthetic oligonucleotide
  Target: LAMA2; (-) strand; PAM type: YTN; PAM sequence: TTC
acaagcgacctcaatgattc

SEQ ID NO: 203336 - DNA, 20 bp, Artificial Sequence
  Description of Artificial Sequence: Synthetic oligonucleotide
  Target: LAMA2; (-) strand; PAM type: YTN; PAM sequence: CTA
ttcacaagcgacctcaatga

SEQ ID NO: 203337 - DNA, 20 bp, Artificial Sequence
  Description of Artificial Sequence: Synthetic oligonucleotide
  Target: LAMA2; (-) strand; PAM type: YTN; PAM sequence: TTC
aactattcacaagcgacctc

SEQ ID NO: 203338 - DNA, 20 bp, Artificial Sequence
  Description of Artificial Sequence: Synthetic oligonucleotide
  Target: LAMA2; (-) strand; PAM type: YTN; PAM sequence: TTT
caactattcacaagcgacct

SEQ ID NO: 203339 - DNA, 20 bp, Artificial Sequence
  Description of Artificial Sequence: Synthetic oligonucleotide
  Target: LAMA2; (-) strand; PAM type: YTN; PAM sequence: TTG
gaagtttcaactattcacaa

SEQ ID NO: 203340 - DNA, 20 bp, Artificial Sequence
  Description of Artificial Sequence: Synthetic oligonucleotide
  Target: LAMA2; (-) strand; PAM type: YTN; PAM sequence: TTA
atattggaagtttcaactat

SEQ ID NO: 203341 - DNA, 20 bp, Artificial Sequence
  Description of Artificial Sequence: Synthetic oligonucleotide
  Target: LAMA2; (-) strand; PAM type: YTN; PAM sequence: CTT
aatattggaagtttcaacta

SEQ ID NO: 203342 - DNA, 20 bp, Artificial Sequence
  Description of Artificial Sequence: Synthetic oligonucleotide
  Target: LAMA2; (-) strand; PAM type: YTN; PAM sequence: CTA
cacagccttaatattggaag

SEQ ID NO: 203343 - DNA, 20 bp, Artificial Sequence
  Description of Artificial Sequence: Synthetic oligonucleotide
  Target: LAMA2; (-) strand; PAM type: YTN; PAM sequence: TTG
gcctacacagccttaatatt

SEQ ID NO: 203344 - DNA, 20 bp, Artificial Sequence
  Description of Artificial Sequence: Synthetic oligonucleotide
  Target: LAMA2; (-) strand; PAM type: YTN; PAM sequence: CTT
ggcctacacagccttaatat

SEQ ID NO: 203345 - DNA, 20 bp, Artificial Sequence
  Description of Artificial Sequence: Synthetic oligonucleotide
  Target: LAMA2; (-) strand; PAM type: YTN; PAM sequence: TTC
ttggcctacacagccttaat

SEQ ID NO: 203346 - DNA, 20 bp, Artificial Sequence
  Description of Artificial Sequence: Synthetic oligonucleotide
  Target: LAMA2; (-) strand; PAM type: YTN; PAM sequence: CTA
gattcttggcctacacagcc

SEQ ID NO: 203347 - DNA, 20 bp, Artificial Sequence
  Description of Artificial Sequence: Synthetic oligonucleotide
  Target: LAMA2; (-) strand; PAM type: YTN; PAM sequence: CTG
aaaggataactagattcttg

SEQ ID NO: 203348 - DNA, 20 bp, Artificial Sequence
  Description of Artificial Sequence: Synthetic oligonucleotide
  Target: LAMA2; (-) strand; PAM type: YTN; PAM sequence: TTC
tgaaaggataactagattct

SEQ ID NO: 203349 - DNA, 20 bp, Artificial Sequence
  Description of Artificial Sequence: Synthetic oligonucleotide
  Target: LAMA2; (-) strand; PAM type: YTN; PAM sequence: TTT
ctgaaaggataactagattc

SEQ ID NO: 203350 - DNA, 20 bp, Artificial Sequence
  Description of Artificial Sequence: Synthetic oligonucleotide
  Target: LAMA2; (-) strand; PAM type: YTN; PAM sequence: TTA
aggcacagagtaggtggtca

SEQ ID NO: 203351 - DNA, 20 bp, Artificial Sequence
  Description of Artificial Sequence: Synthetic oligonucleotide
  Target: LAMA2; (-) strand; PAM type: YTN; PAM sequence: CTT
aaggcacagagtaggtggtc

SEQ ID NO: 203352 - DNA, 20 bp, Artificial Sequence
  Description of Artificial Sequence: Synthetic oligonucleotide
  Target: LAMA2; (-) strand; PAM type: YTN; PAM sequence: TTG
cttaaggcacagagtaggtg

SEQ ID NO: 203353 - DNA, 20 bp, Artificial Sequence
  Description of Artificial Sequence: Synthetic oligonucleotide
  Target: LAMA2; (-) strand; PAM type: YTN; PAM sequence: TTT
gcttaaggcacagagtaggt

SEQ ID NO: 203354 - DNA, 20 bp, Artificial Sequence
  Description of Artificial Sequence: Synthetic oligonucleotide
  Target: LAMA2; (-) strand; PAM type: YTN; PAM sequence: TTT
tgcttaaggcacagagtagg

SEQ ID NO: 203355 - DNA, 20 bp, Artificial Sequence
  Description of Artificial Sequence: Synthetic oligonucleotide
  Target: LAMA2; (-) strand; PAM type: YTN; PAM sequence: CTT
ttgcttaaggcacagagtag

SEQ ID NO: 203356 - DNA, 20 bp, Artificial Sequence
  Description of Artificial Sequence: Synthetic oligonucleotide
  Target: LAMA2; (-) strand; PAM type: YTN; PAM sequence: CTC
aaaaaaaaaaaaaaaaaaga

SEQ ID NO: 203357 - DNA, 20 bp, Artificial Sequence
  Description of Artificial Sequence: Synthetic oligonucleotide
  Target: LAMA2; (-) strand; PAM type: YTN; PAM sequence: CTC
tcaaaaaaaaaaaaaaaaaa

SEQ ID NO: 203358 - DNA, 20 bp, Artificial Sequence
  Description of Artificial Sequence: Synthetic oligonucleotide
  Target: LAMA2; (-) strand; PAM type: YTN; PAM sequence: TTG
cagtgagccgagaccacacc

SEQ ID NO: 203359 - DNA, 20 bp, Artificial Sequence
  Description of Artificial Sequence: Synthetic oligonucleotide
  Target: LAMA2; (-) strand; PAM type: YTN; PAM sequence: TTG
aacccgggaggcgaatgttg

SEQ ID NO: 203360 - DNA, 20 bp, Artificial Sequence
  Description of Artificial Sequence: Synthetic oligonucleotide
  Target: LAMA2; (-) strand; PAM type: YTN; PAM sequence: CTT
gaacccgggaggcgaatgtt

SEQ ID NO: 203361 - DNA, 20 bp, Artificial Sequence
  Description of Artificial Sequence: Synthetic oligonucleotide
  Target: LAMA2; (-) strand; PAM type: YTN; PAM sequence: CTG
aggcaagtgaatcgcttgaa

SEQ ID NO: 203362 - DNA, 20 bp, Artificial Sequence
  Description of Artificial Sequence: Synthetic oligonucleotide
  Target: LAMA2; (-) strand; PAM type: YTN; PAM sequence: CTC
aggaggctgaggcaagtgaa

SEQ ID NO: 203363 - DNA, 20 bp, Artificial Sequence
  Description of Artificial Sequence: Synthetic oligonucleotide
  Target: LAMA2; (-) strand; PAM type: YTN; PAM sequence: CTA
ctcaggaggctgaggcaagt

SEQ ID NO: 203364 - DNA, 20 bp, Artificial Sequence
  Description of Artificial Sequence: Synthetic oligonucleotide
  Target: LAMA2; (-) strand; PAM type: YTN; PAM sequence: CTG
taatcccagctactcaggag

SEQ ID NO: 203365 - DNA, 20 bp, Artificial Sequence
  Description of Artificial Sequence: Synthetic oligonucleotide
  Target: LAMA2; (-) strand; PAM type: YTN; PAM sequence: TTG
gtggcaggcgcctgtaatcc

SEQ ID NO: 203366 - DNA, 20 bp, Artificial Sequence
  Description of Artificial Sequence: Synthetic oligonucleotide
  Target: LAMA2; (-) strand; PAM type: YTN; PAM sequence: CTT
ggtggcaggcgcctgtaatc

SEQ ID NO: 203367 - DNA, 20 bp, Artificial Sequence
  Description of Artificial Sequence: Synthetic oligonucleotide
  Target: LAMA2; (-) strand; PAM type: YTN; PAM sequence: TTA
gcccagcttggtggcaggcg

SEQ ID NO: 203368 - DNA, 20 bp, Artificial Sequence
  Description of Artificial Sequence: Synthetic oligonucleotide
  Target: LAMA2; (-) strand; PAM type: YTN; PAM sequence: CTA
aaaatacaaaaattagccca

SEQ ID NO: 203369 - DNA, 20 bp, Artificial Sequence
  Description of Artificial Sequence: Synthetic oligonucleotide
  Target: LAMA2; (-) strand; PAM type: YTN; PAM sequence: CTA
ctaaaaatacaaaaattagc

SEQ ID NO: 203370 - DNA, 20 bp, Artificial Sequence
  Description of Artificial Sequence: Synthetic oligonucleotide
  Target: LAMA2; (-) strand; PAM type: YTN; PAM sequence: CTC
tactaaaaatacaaaaatta

SEQ ID NO: 203371 - DNA, 20 bp, Artificial Sequence
  Description of Artificial Sequence: Synthetic oligonucleotide
  Target: LAMA2; (-) strand; PAM type: YTN; PAM sequence: TTG
tctctactaaaaatacaaaa

SEQ ID NO: 203372 - DNA, 20 bp, Artificial Sequence
  Description of Artificial Sequence: Synthetic oligonucleotide
  Target: LAMA2; (-) strand; PAM type: YTN; PAM sequence: CTT
gtctctactaaaaatacaaa

SEQ ID NO: 203373 - DNA, 20 bp, Artificial Sequence
  Description of Artificial Sequence: Synthetic oligonucleotide
  Target: LAMA2; (-) strand; PAM type: YTN; PAM sequence: CTG
gccaacatggtgaaaccttg

SEQ ID NO: 203374 - DNA, 20 bp, Artificial Sequence
  Description of Artificial Sequence: Synthetic oligonucleotide
  Target: LAMA2; (-) strand; PAM type: YTN; PAM sequence: TTC
aagaccagtctggccaacat

SEQ ID NO: 203375 - DNA, 20 bp, Artificial Sequence
  Description of Artificial Sequence: Synthetic oligonucleotide
  Target: LAMA2; (-) strand; PAM type: YTN; PAM sequence: CTC
aggcatgcagatcatgaggt

SEQ ID NO: 203376 - DNA, 20 bp, Artificial Sequence
  Description of Artificial Sequence: Synthetic oligonucleotide
  Target: LAMA2; (-) strand; PAM type: YTN; PAM sequence: TTG
ggaggctcaggcatgcagat

SEQ ID NO: 203377 - DNA, 20 bp, Artificial Sequence
  Description of Artificial Sequence: Synthetic oligonucleotide
  Target: LAMA2; (-) strand; PAM type: YTN; PAM sequence: TTT
gggaggctcaggcatgcaga

SEQ ID NO: 203378 - DNA, 20 bp, Artificial Sequence
  Description of Artificial Sequence: Synthetic oligonucleotide
  Target: LAMA2; (-) strand; PAM type: YTN; PAM sequence: CTT
tgggaggctcaggcatgcag

SEQ ID NO: 203379 - DNA, 20 bp, Artificial Sequence
  Description of Artificial Sequence: Synthetic oligonucleotide
  Target: LAMA2; (-) strand; PAM type: YTN; PAM sequence: TTG
taatcccagcactttgggag

SEQ ID NO: 203380 - DNA, 20 bp, Artificial Sequence
  Description of Artificial Sequence: Synthetic oligonucleotide
  Target: LAMA2; (-) strand; PAM type: YTN; PAM sequence: CTT
gtaatcccagcactttggga

SEQ ID NO: 203381 - DNA, 20 bp, Artificial Sequence
  Description of Artificial Sequence: Synthetic oligonucleotide
  Target: LAMA2; (-) strand; PAM type: YTN; PAM sequence: CTC
acgcttgtaatcccagcact

SEQ ID NO: 203382 - DNA, 20 bp, Artificial Sequence
  Description of Artificial Sequence: Synthetic oligonucleotide
  Target: LAMA2; (-) strand; PAM type: YTN; PAM sequence: CTG
accgggcatggtggctcacg

SEQ ID NO: 203383 - DNA, 20 bp, Artificial Sequence
  Description of Artificial Sequence: Synthetic oligonucleotide
  Target: LAMA2; (-) strand; PAM type: YTN; PAM sequence: TTA
gagaagggcaggtactgacc

SEQ ID NO: 203384 - DNA, 20 bp, Artificial Sequence
  Description of Artificial Sequence: Synthetic oligonucleotide
  Target: LAMA2; (-) strand; PAM type: YTN; PAM sequence: TTT
agagaagggcaggtactgac

SEQ ID NO: 203385 - DNA, 20 bp, Artificial Sequence
  Description of Artificial Sequence: Synthetic oligonucleotide
  Target: LAMA2; (-) strand; PAM type: YTN; PAM sequence: CTT
tagagaagggcaggtactga

SEQ ID NO: 203386 - DNA, 20 bp, Artificial Sequence
  Description of Artificial Sequence: Synthetic oligonucleotide
  Target: LAMA2; (-) strand; PAM type: YTN; PAM sequence: CTG
caagcaagtgcctttagaga

SEQ ID NO: 203387 - DNA, 20 bp, Artificial Sequence
  Description of Artificial Sequence: Synthetic oligonucleotide
  Target: LAMA2; (-) strand; PAM type: YTN; PAM sequence: CTC
caaagactgcaagcaagtgc

SEQ ID NO: 203388 - DNA, 20 bp, Artificial Sequence
  Description of Artificial Sequence: Synthetic oligonucleotide
  Target: LAMA2; (-) strand; PAM type: YTN; PAM sequence: CTC
ctccaaagactgcaagcaag

SEQ ID NO: 203389 - DNA, 20 bp, Artificial Sequence
  Description of Artificial Sequence: Synthetic oligonucleotide
  Target: LAMA2; (-) strand; PAM type: YTN; PAM sequence: TTA
tctcctccaaagactgcaag

SEQ ID NO: 203390 - DNA, 20 bp, Artificial Sequence
  Description of Artificial Sequence: Synthetic oligonucleotide
  Target: LAMA2; (-) strand; PAM type: YTN; PAM sequence: CTT
atctcctccaaagactgcaa

SEQ ID NO: 203391 - DNA, 20 bp, Artificial Sequence
  Description of Artificial Sequence: Synthetic oligonucleotide
  Target: LAMA2; (-) strand; PAM type: YTN; PAM sequence: TTG
atcaaagcttatctcctcca

SEQ ID NO: 203392 - DNA, 20 bp, Artificial Sequence
  Description of Artificial Sequence: Synthetic oligonucleotide
  Target: LAMA2; (-) strand; PAM type: YTN; PAM sequence: TTG
atgagttgatcaaagcttat

SEQ ID NO: 203393 - DNA, 20 bp, Artificial Sequence
  Description of Artificial Sequence: Synthetic oligonucleotide
  Target: LAMA2; (-) strand; PAM type: YTN; PAM sequence: TTA
ggttgatgagttgatcaaag

SEQ ID NO: 203394 - DNA, 20 bp, Artificial Sequence
  Description of Artificial Sequence: Synthetic oligonucleotide
  Target: LAMA2; (-) strand; PAM type: YTN; PAM sequence: TTG
ccattaggttgatgagttga

SEQ ID NO: 203395 - DNA, 20 bp, Artificial Sequence
  Description of Artificial Sequence: Synthetic oligonucleotide
  Target: LAMA2; (-) strand; PAM type: YTN; PAM sequence: CTT
gccattaggttgatgagttg

SEQ ID NO: 203396 - DNA, 20 bp, Artificial Sequence
  Description of Artificial Sequence: Synthetic oligonucleotide
  Target: LAMA2; (-) strand; PAM type: YTN; PAM sequence: CTC
aagtcaaatgatacttgcca

SEQ ID NO: 203397 - DNA, 20 bp, Artificial Sequence
  Description of Artificial Sequence: Synthetic oligonucleotide
  Target: LAMA2; (-) strand; PAM type: YTN; PAM sequence: TTC
tcaagtcaaatgatacttgc

SEQ ID NO: 203398 - DNA, 20 bp, Artificial Sequence
  Description of Artificial Sequence: Synthetic oligonucleotide
  Target: LAMA2; (-) strand; PAM type: YTN; PAM sequence: TTT
ctcaagtcaaatgatacttg

SEQ ID NO: 203399 - DNA, 20 bp, Artificial Sequence
  Description of Artificial Sequence: Synthetic oligonucleotide
  Target: LAMA2; (-) strand; PAM type: YTN; PAM sequence: TTT
tctcaagtcaaatgatactt

SEQ ID NO: 203400 - DNA, 20 bp, Artificial Sequence
  Description of Artificial Sequence: Synthetic oligonucleotide
  Target: LAMA2; (-) strand; PAM type: YTN; PAM sequence: CTT
ttctcaagtcaaatgatact

SEQ ID NO: 203401 - DNA, 20 bp, Artificial Sequence
  Description of Artificial Sequence: Synthetic oligonucleotide
  Target: LAMA2; (-) strand; PAM type: YTN; PAM sequence: TTA
tcttttctcaagtcaaatga

SEQ ID NO: 203402 - DNA, 20 bp, Artificial Sequence
  Description of Artificial Sequence: Synthetic oligonucleotide
  Target: LAMA2; (-) strand; PAM type: YTN; PAM sequence: CTT
atcttttctcaagtcaaatg

SEQ ID NO: 203403 - DNA, 20 bp, Artificial Sequence
  Description of Artificial Sequence: Synthetic oligonucleotide
  Target: LAMA2; (-) strand; PAM type: YTN; PAM sequence: TTC
ttatcttttctcaagtcaaa

SEQ ID NO: 203404 - DNA, 20 bp, Artificial Sequence
  Description of Artificial Sequence: Synthetic oligonucleotide
  Target: LAMA2; (-) strand; PAM type: YTN; PAM sequence: TTT
cttatcttttctcaagtcaa

SEQ ID NO: 203405 - DNA, 20 bp, Artificial Sequence
  Description of Artificial Sequence: Synthetic oligonucleotide
  Target: LAMA2; (-) strand; PAM type: YTN; PAM sequence: CTG
tttcttatcttttctcaagt

SEQ ID NO: 203406 - DNA, 20 bp, Artificial Sequence
  Description of Artificial Sequence: Synthetic oligonucleotide
  Target: LAMA2; (-) strand; PAM type: YTN; PAM sequence: TTG
agaaccctgtttcttatctt

SEQ ID NO: 203407 - DNA, 20 bp, Artificial Sequence
  Description of Artificial Sequence: Synthetic oligonucleotide
  Target: LAMA2; (-) strand; PAM type: YTN; PAM sequence: CTA
ttgagaaccctgtttcttat

SEQ ID NO: 203408 - DNA, 20 bp, Artificial Sequence
  Description of Artificial Sequence: Synthetic oligonucleotide
  Target: LAMA2; (-) strand; PAM type: YTN; PAM sequence: TTG
tagatcacactattgagaac

SEQ ID NO: 203409 - DNA, 20 bp, Artificial Sequence
  Description of Artificial Sequence: Synthetic oligonucleotide
  Target: LAMA2; (-) strand; PAM type: YTN; PAM sequence: CTT
gtagatcacactattgagaa

SEQ ID NO: 203410 - DNA, 20 bp, Artificial Sequence
  Description of Artificial Sequence: Synthetic oligonucleotide
  Target: LAMA2; (-) strand; PAM type: YTN; PAM sequence: CTA
tcttgtagatcacactattg

SEQ ID NO: 203411 - DNA, 20 bp, Artificial Sequence
  Description of Artificial Sequence: Synthetic oligonucleotide
  Target: LAMA2; (-) strand; PAM type: YTN; PAM sequence: CTG
tctatcttgtagatcacact

SEQ ID NO: 203412 - DNA, 20 bp, Artificial Sequence
  Description of Artificial Sequence: Synthetic oligonucleotide
  Target: LAMA2; (-) strand; PAM type: YTN; PAM sequence: CTG
ctgtctatcttgtagatcac

SEQ ID NO: 203413 - DNA, 20 bp, Artificial Sequence
  Description of Artificial Sequence: Synthetic oligonucleotide
  Target: LAMA2; (-) strand; PAM type: YTN; PAM sequence: CTG
actgctgtctatcttgtaga

SEQ ID NO: 203414 - DNA, 20 bp, Artificial Sequence
  Description of Artificial Sequence: Synthetic oligonucleotide
  Target: LAMA2; (-) strand; PAM type: YTN; PAM sequence: CTA
ctgactgctgtctatcttgt

SEQ ID NO: 203415 - DNA, 20 bp, Artificial Sequence
  Description of Artificial Sequence: Synthetic oligonucleotide
  Target: LAMA2; (-) strand; PAM type: YTN; PAM sequence: CTC
agagaagcaagcgtctactg

SEQ ID NO: 203416 - DNA, 20 bp, Artificial Sequence
  Description of Artificial Sequence: Synthetic oligonucleotide
  Target: LAMA2; (-) strand; PAM type: YTN; PAM sequence: TTC
ctcagagaagcaagcgtcta

SEQ ID NO: 203417 - DNA, 20 bp, Artificial Sequence
  Description of Artificial Sequence: Synthetic oligonucleotide
  Target: LAMA2; (-) strand; PAM type: YTN; PAM sequence: CTT
cctcagagaagcaagcgtct

SEQ ID NO: 203418 - DNA, 20 bp, Artificial Sequence
  Description of Artificial Sequence: Synthetic oligonucleotide
  Target: LAMA2; (-) strand; PAM type: YTN; PAM sequence: TTC
caagagtcacttcctcagag

SEQ ID NO: 203419 - DNA, 20 bp, Artificial Sequence
  Description of Artificial Sequence: Synthetic oligonucleotide
  Target: LAMA2; (-) strand; PAM type: YTN; PAM sequence: CTT
ccaagagtcacttcctcaga

SEQ ID NO: 203420 - DNA, 20 bp, Artificial Sequence
  Description of Artificial Sequence: Synthetic oligonucleotide
  Target: LAMA2; (-) strand; PAM type: YTN; PAM sequence: TTC
ttccaagagtcacttcctca

SEQ ID NO: 203421 - DNA, 20 bp, Artificial Sequence
  Description of Artificial Sequence: Synthetic oligonucleotide
  Target: LAMA2; (-) strand; PAM type: YTN; PAM sequence: CTA
attcttccaagagtcacttc

SEQ ID NO: 203422 - DNA, 20 bp, Artificial Sequence
  Description of Artificial Sequence: Synthetic oligonucleotide
  Target: LAMA2; (-) strand; PAM type: YTN; PAM sequence: TTA
ctaattcttccaagagtcac

SEQ ID NO: 203423 - DNA, 20 bp, Artificial Sequence
  Description of Artificial Sequence: Synthetic oligonucleotide
  Target: LAMA2; (-) strand; PAM type: YTN; PAM sequence: CTT
actaattcttccaagagtca

SEQ ID NO: 203424 - DNA, 20 bp, Artificial Sequence
  Description of Artificial Sequence: Synthetic oligonucleotide
  Target: LAMA2; (-) strand; PAM type: YTN; PAM sequence: CTC
ttactaattcttccaagagt

SEQ ID NO: 203425 - DNA, 20 bp, Artificial Sequence
  Description of Artificial Sequence: Synthetic oligonucleotide
  Target: LAMA2; (-) strand; PAM type: YTN; PAM sequence: CTA
gctcttactaattcttccaa

SEQ ID NO: 203426 - DNA, 20 bp, Artificial Sequence
  Description of Artificial Sequence: Synthetic oligonucleotide
  Target: LAMA2; (-) strand; PAM type: YTN; PAM sequence: TTG
cccacctagctcttactaat

SEQ ID NO: 203427 - DNA, 20 bp, Artificial Sequence
  Description of Artificial Sequence: Synthetic oligonucleotide
  Target: LAMA2; (-) strand; PAM type: YTN; PAM sequence: TTT
gcccacctagctcttactaa

SEQ ID NO: 203428 - DNA, 20 bp, Artificial Sequence
  Description of Artificial Sequence: Synthetic oligonucleotide
  Target: LAMA2; (-) strand; PAM type: YTN; PAM sequence: TTA
cccgaatttgcccacctagc

SEQ ID NO: 203429 - DNA, 20 bp, Artificial Sequence
  Description of Artificial Sequence: Synthetic oligonucleotide
  Target: LAMA2; (-) strand; PAM type: YTN; PAM sequence: CTT
acccgaatttgcccacctag

SEQ ID NO: 203430 - DNA, 20 bp, Artificial Sequence
  Description of Artificial Sequence: Synthetic oligonucleotide
  Target: LAMA2; (-) strand; PAM type: YTN; PAM sequence: CTG
tcttacccgaatttgcccac

SEQ ID NO: 203431 - DNA, 20 bp, Artificial Sequence
  Description of Artificial Sequence: Synthetic oligonucleotide
  Target: LAMA2; (-) strand; PAM type: YTN; PAM sequence: TTC
tgtcttacccgaatttgccc

SEQ ID NO: 203432 - DNA, 20 bp, Artificial Sequence
  Description of Artificial Sequence: Synthetic oligonucleotide
  Target: LAMA2; (-) strand; PAM type: YTN; PAM sequence: CTT
ctgtcttacccgaatttgcc

SEQ ID NO: 203433 - DNA, 20 bp, Artificial Sequence
  Description of Artificial Sequence: Synthetic oligonucleotide
  Target: LAMA2; (-) strand; PAM type: YTN; PAM sequence: CTC
aaccttctgtcttacccgaa

SEQ ID NO: 203434 - DNA, 20 bp, Artificial Sequence
  Description of Artificial Sequence: Synthetic oligonucleotide
  Target: LAMA2; (-) strand; PAM type: YTN; PAM sequence: TTC
tcaaccttctgtcttacccg

SEQ ID NO: 203435 - DNA, 20 bp, Artificial Sequence
  Description of Artificial Sequence: Synthetic oligonucleotide
  Target: LAMA2; (-) strand; PAM type: YTN; PAM sequence: TTT
ctcaaccttctgtcttaccc

SEQ ID NO: 203436 - DNA, 20 bp, Artificial Sequence
  Description of Artificial Sequence: Synthetic oligonucleotide
  Target: LAMA2; (-) strand; PAM type: YTN; PAM sequence: CTT
tctcaaccttctgtcttacc

SEQ ID NO: 203437 - DNA, 20 bp, Artificial Sequence
  Description of Artificial Sequence: Synthetic oligonucleotide
  Target: LAMA2; (-) strand; PAM type: YTN; PAM sequence: CTG
aaaacatctttctcaacctt

SEQ ID NO: 203438 - DNA, 20 bp, Artificial Sequence
  Description of Artificial Sequence: Synthetic oligonucleotide
  Target: LAMA2; (-) strand; PAM type: YTN; PAM sequence: CTC
tgaaaacatctttctcaacc

SEQ ID NO: 203439 - DNA, 20 bp, Artificial Sequence
  Description of Artificial Sequence: Synthetic oligonucleotide
  Target: LAMA2; (-) strand; PAM type: YTN; PAM sequence: TTC
tctgaaaacatctttctcaa

SEQ ID NO: 203440 - DNA, 20 bp, Artificial Sequence
  Description of Artificial Sequence: Synthetic oligonucleotide
  Target: LAMA2; (-) strand; PAM type: YTN; PAM sequence: CTT
ctctgaaaacatctttctca

SEQ ID NO: 203441 - DNA, 20 bp, Artificial Sequence
  Description of Artificial Sequence: Synthetic oligonucleotide
  Target: LAMA2; (-) strand; PAM type: YTN; PAM sequence: CTG
tggagccttctctgaaaaca

SEQ ID NO: 203442 - DNA, 20 bp, Artificial Sequence
  Description of Artificial Sequence: Synthetic oligonucleotide
  Target: LAMA2; (-) strand; PAM type: YTN; PAM sequence: TTC
ctgtggagccttctctgaaa

SEQ ID NO: 203443 - DNA, 20 bp, Artificial Sequence
  Description of Artificial Sequence: Synthetic oligonucleotide
  Target: LAMA2; (-) strand; PAM type: YTN; PAM sequence: CTA
tgttcctgtggagccttctc

SEQ ID NO: 203444 - DNA, 20 bp, Artificial Sequence
  Description of Artificial Sequence: Synthetic oligonucleotide
  Target: LAMA2; (-) strand; PAM type: YTN; PAM sequence: CTC
cataatacagcaggagagga

SEQ ID NO: 203445 - DNA, 20 bp, Artificial Sequence
  Description of Artificial Sequence: Synthetic oligonucleotide
  Target: LAMA2; (-) strand; PAM type: YTN; PAM sequence: CTC
tccataatacagcaggagag

SEQ ID NO: 203446 - DNA, 20 bp, Artificial Sequence
  Description of Artificial Sequence: Synthetic oligonucleotide
  Target: LAMA2; (-) strand; PAM type: YTN; PAM sequence: TTC
tctccataatacagcaggag

SEQ ID NO: 203447 - DNA, 20 bp, Artificial Sequence
  Description of Artificial Sequence: Synthetic oligonucleotide
  Target: LAMA2; (-) strand; PAM type: YTN; PAM sequence: CTC
catgttctctccataataca

SEQ ID NO: 203448 - DNA, 20 bp, Artificial Sequence
  Description of Artificial Sequence: Synthetic oligonucleotide
  Target: LAMA2; (-) strand; PAM type: YTN; PAM sequence: CTG
aaggctccatgttctctcca

SEQ ID NO: 203449 - DNA, 20 bp, Artificial Sequence
  Description of Artificial Sequence: Synthetic oligonucleotide
  Target: LAMA2; (-) strand; PAM type: YTN; PAM sequence: CTC
tgaaggctccatgttctctc

SEQ ID NO: 203450 - DNA, 20 bp, Artificial Sequence
  Description of Artificial Sequence: Synthetic oligonucleotide
  Target: LAMA2; (-) strand; PAM type: YTN; PAM sequence: TTA
tatctctgaaggctccatgt

SEQ ID NO: 203451 - DNA, 20 bp, Artificial Sequence
  Description of Artificial Sequence: Synthetic oligonucleotide
  Target: LAMA2; (-) strand; PAM type: YTN; PAM sequence: TTT
atatctctgaaggctccatg

SEQ ID NO: 203452 - DNA, 20 bp, Artificial Sequence
  Description of Artificial Sequence: Synthetic oligonucleotide
  Target: LAMA2; (-) strand; PAM type: YTN; PAM sequence: TTT
tatatctctgaaggctccat

SEQ ID NO: 203453 - DNA, 20 bp, Artificial Sequence
  Description of Artificial Sequence: Synthetic oligonucleotide
  Target: LAMA2; (-) strand; PAM type: YTN; PAM sequence: TTT
ttatatctctgaaggctcca

SEQ ID NO: 203454 - DNA, 20 bp, Artificial Sequence
  Description of Artificial Sequence: Synthetic oligonucleotide
  Target: LAMA2; (-) strand; PAM type: YTN; PAM sequence: TTC
cagccacaatgacattttta

SEQ ID NO: 203455 - DNA, 20 bp, Artificial Sequence
  Description of Artificial Sequence: Synthetic oligonucleotide
  Target: LAMA2; (-) strand; PAM type: YTN; PAM sequence: TTG
cattccagccacaatgacat

SEQ ID NO: 203456 - DNA, 20 bp, Artificial Sequence
  Description of Artificial Sequence: Synthetic oligonucleotide
  Target: LAMA2; (-) strand; PAM type: YTN; PAM sequence: TTT
gcattccagccacaatgaca

SEQ ID NO: 203457 - DNA, 20 bp, Artificial Sequence
  Description of Artificial Sequence: Synthetic oligonucleotide
  Target: LAMA2; (-) strand; PAM type: YTN; PAM sequence: CTT
tgcattccagccacaatgac

SEQ ID NO: 203458 - DNA, 20 bp, Artificial Sequence
  Description of Artificial Sequence: Synthetic oligonucleotide
  Target: LAMA2; (-) strand; PAM type: YTN; PAM sequence: TTC
atctttgcattccagccaca

SEQ ID NO: 203459 - DNA, 20 bp, Artificial Sequence
  Description of Artificial Sequence: Synthetic oligonucleotide
  Target: LAMA2; (-) strand; PAM type: YTN; PAM sequence: CTT
catctttgcattccagccac

SEQ ID NO: 203460 - DNA, 20 bp, Artificial Sequence
  Description of Artificial Sequence: Synthetic oligonucleotide
  Target: LAMA2; (-) strand; PAM type: YTN; PAM sequence: TTC
ccttcatctttgcattccag

SEQ ID NO: 203461 - DNA, 20 bp, Artificial Sequence
  Description of Artificial Sequence: Synthetic oligonucleotide
  Target: LAMA2; (-) strand; PAM type: YTN; PAM sequence: TTT
cccttcatctttgcattcca

SEQ ID NO: 203462 - DNA, 20 bp, Artificial Sequence
  Description of Artificial Sequence: Synthetic oligonucleotide
  Target: LAMA2; (-) strand; PAM type: YTN; PAM sequence: CTT
tcccttcatctttgcattcc

SEQ ID NO: 203463 - DNA, 20 bp, Artificial Sequence
  Description of Artificial Sequence: Synthetic oligonucleotide
  Target: LAMA2; (-) strand; PAM type: YTN; PAM sequence: CTC
tttcccttcatctttgcatt

SEQ ID NO: 203464 - DNA, 20 bp, Artificial Sequence
  Description of Artificial Sequence: Synthetic oligonucleotide
  Target: LAMA2; (-) strand; PAM type: YTN; PAM sequence: TTC
aaactctttcccttcatctt

SEQ ID NO: 203465 - DNA, 20 bp, Artificial Sequence
  Description of Artificial Sequence: Synthetic oligonucleotide
  Target: LAMA2; (-) strand; PAM type: YTN; PAM sequence: CTC
aattcaaactctttcccttc

SEQ ID NO: 203466 - DNA, 20 bp, Artificial Sequence
  Description of Artificial Sequence: Synthetic oligonucleotide
  Target: LAMA2; (-) strand; PAM type: YTN; PAM sequence: TTC
ctcaattcaaactctttccc

SEQ ID NO: 203467 - DNA, 20 bp, Artificial Sequence
  Description of Artificial Sequence: Synthetic oligonucleotide
  Target: LAMA2; (-) strand; PAM type: YTN; PAM sequence: CTT
cctcaattcaaactctttcc

SEQ ID NO: 203468 - DNA, 20 bp, Artificial Sequence
  Description of Artificial Sequence: Synthetic oligonucleotide
  Target: LAMA2; (-) strand; PAM type: YTN; PAM sequence: CTG
atcccttcctcaattcaaac

SEQ ID NO: 203469 - DNA, 20 bp, Artificial Sequence
  Description of Artificial Sequence: Synthetic oligonucleotide
  Target: LAMA2; (-) strand; PAM type: YTN; PAM sequence: CTC
tgatcccttcctcaattcaa

SEQ ID NO: 203470 - DNA, 20 bp, Artificial Sequence
  Description of Artificial Sequence: Synthetic oligonucleotide
  Target: LAMA2; (-) strand; PAM type: YTN; PAM sequence: TTG
catgctctgatcccttcctc

SEQ ID NO: 203471 - DNA, 20 bp, Artificial Sequence
  Description of Artificial Sequence: Synthetic oligonucleotide
  Target: LAMA2; (-) strand; PAM type: YTN; PAM sequence: CTT
gcatgctctgatcccttcct

SEQ ID NO: 203472 - DNA, 20 bp, Artificial Sequence
  Description of Artificial Sequence: Synthetic oligonucleotide
  Target: LAMA2; (-) strand; PAM type: YTN; PAM sequence: TTA
aatccttgcatgctctgatc

SEQ ID NO: 203473 - DNA, 20 bp, Artificial Sequence
  Description of Artificial Sequence: Synthetic oligonucleotide
  Target: LAMA2; (-) strand; PAM type: YTN; PAM sequence: TTT
aaatccttgcatgctctgat

SEQ ID NO: 203474 - DNA, 20 bp, Artificial Sequence
  Description of Artificial Sequence: Synthetic oligonucleotide
  Target: LAMA2; (-) strand; PAM type: YTN; PAM sequence: CTT
taaatccttgcatgctctga

SEQ ID NO: 203475 - DNA, 20 bp, Artificial Sequence
  Description of Artificial Sequence: Synthetic oligonucleotide
  Target: LAMA2; (-) strand; PAM type: YTN; PAM sequence: TTA
aagtaatctttaaatccttg

SEQ ID NO: 203476 - DNA, 20 bp, Artificial Sequence
  Description of Artificial Sequence: Synthetic oligonucleotide
  Target: LAMA2; (-) strand; PAM type: YTN; PAM sequence: CTT
aaagtaatctttaaatcctt

SEQ ID NO: 203477 - DNA, 20 bp, Artificial Sequence
  Description of Artificial Sequence: Synthetic oligonucleotide
  Target: LAMA2; (-) strand; PAM type: YTN; PAM sequence: TTC
ttaaagtaatctttaaatcc

SEQ ID NO: 203478 - DNA, 20 bp, Artificial Sequence
  Description of Artificial Sequence: Synthetic oligonucleotide
  Target: LAMA2; (-) strand; PAM type: YTN; PAM sequence: TTA
atgagtataatgcaccaaat

SEQ ID NO: 203479 - DNA, 20 bp, Artificial Sequence
  Description of Artificial Sequence: Synthetic oligonucleotide
  Target: LAMA2; (-) strand; PAM type: YTN; PAM sequence: TTT
aatgagtataatgcaccaaa

SEQ ID NO: 203480 - DNA, 20 bp, Artificial Sequence
  Description of Artificial Sequence: Synthetic oligonucleotide
  Target: LAMA2; (-) strand; PAM type: YTN; PAM sequence: TTG
acccaagtggcaaacatcat

SEQ ID NO: 203481 - DNA, 20 bp, Artificial Sequence
  Description of Artificial Sequence: Synthetic oligonucleotide
  Target: LAMA2; (-) strand; PAM type: YTN; PAM sequence: TTG
ttgacccaagtggcaaacat

SEQ ID NO: 203482 - DNA, 20 bp, Artificial Sequence
  Description of Artificial Sequence: Synthetic oligonucleotide
  Target: LAMA2; (-) strand; PAM type: YTN; PAM sequence: TTT
gttgacccaagtggcaaaca

SEQ ID NO: 203483 - DNA, 20 bp, Artificial Sequence
  Description of Artificial Sequence: Synthetic oligonucleotide
  Target: LAMA2; (-) strand; PAM type: YTN; PAM sequence: TTA
cagaatgtttgttgacccaa

SEQ ID NO: 203484 - DNA, 20 bp, Artificial Sequence
  Description of Artificial Sequence: Synthetic oligonucleotide
  Target: LAMA2; (-) strand; PAM type: YTN; PAM sequence: TTT
acagaatgtttgttgaccca

SEQ ID NO: 203485 - DNA, 20 bp, Artificial Sequence
  Description of Artificial Sequence: Synthetic oligonucleotide
  Target: LAMA2; (-) strand; PAM type: YTN; PAM sequence: CTT
tacagaatgtttgttgaccc

SEQ ID NO: 203486 - DNA, 20 bp, Artificial Sequence
  Description of Artificial Sequence: Synthetic oligonucleotide
  Target: LAMA2; (-) strand; PAM type: YTN; PAM sequence: CTA
agcctttacagaatgtttgt

SEQ ID NO: 203487 - DNA, 20 bp, Artificial Sequence
  Description of Artificial Sequence: Synthetic oligonucleotide
  Target: LAMA2; (-) strand; PAM type: YTN; PAM sequence: CTA
tctaagcctttacagaatgt

SEQ ID NO: 203488 - DNA, 20 bp, Artificial Sequence
  Description of Artificial Sequence: Synthetic oligonucleotide
  Target: LAMA2; (-) strand; PAM type: YTN; PAM sequence: TTA
ctatctaagcctttacagaa

SEQ ID NO: 203489 - DNA, 20 bp, Artificial Sequence
  Description of Artificial Sequence: Synthetic oligonucleotide
  Target: LAMA2; (-) strand; PAM type: YTN; PAM sequence: CTT
actatctaagcctttacaga

SEQ ID NO: 203490 - DNA, 20 bp, Artificial Sequence
  Description of Artificial Sequence: Synthetic oligonucleotide
  Target: LAMA2; (-) strand; PAM type: YTN; PAM sequence: TTA
taatacttactatctaagcc

SEQ ID NO: 203491 - DNA, 20 bp, Artificial Sequence
  Description of Artificial Sequence: Synthetic oligonucleotide
  Target: LAMA2; (-) strand; PAM type: YTN; PAM sequence: TTT
ataatacttactatctaagc

SEQ ID NO: 203492 - DNA, 20 bp, Artificial Sequence
  Description of Artificial Sequence: Synthetic oligonucleotide
  Target: LAMA2; (-) strand; PAM type: YTN; PAM sequence: CTG
caatatttataatacttact

SEQ ID NO: 203493 - DNA, 20 bp, Artificial Sequence
  Description of Artificial Sequence: Synthetic oligonucleotide
  Target: LAMA2; (-) strand; PAM type: YTN; PAM sequence: TTG
caacagagaccatatcacct

SEQ ID NO: 203494 - DNA, 20 bp, Artificial Sequence
  Description of Artificial Sequence: Synthetic oligonucleotide
  Target: LAMA2; (-) strand; PAM type: YTN; PAM sequence: TTG
agtaattgcaacagagacca

SEQ ID NO: 203495 - DNA, 20 bp, Artificial Sequence
  Description of Artificial Sequence: Synthetic oligonucleotide
  Target: LAMA2; (-) strand; PAM type: YTN; PAM sequence: TTA
caacagcagagttgagtaat

SEQ ID NO: 203496 - DNA, 20 bp, Artificial Sequence
  Description of Artificial Sequence: Synthetic oligonucleotide
  Target: LAMA2; (-) strand; PAM type: YTN; PAM sequence: CTT
acaacagcagagttgagtaa

SEQ ID NO: 203497 - DNA, 20 bp, Artificial Sequence
  Description of Artificial Sequence: Synthetic oligonucleotide
  Target: LAMA2; (-) strand; PAM type: YTN; PAM sequence: CTC
ccttacaacagcagagttga

SEQ ID NO: 203498 - DNA, 20 bp, Artificial Sequence
  Description of Artificial Sequence: Synthetic oligonucleotide
  Target: LAMA2; (-) strand; PAM type: YTN; PAM sequence: TTC
tcccttacaacagcagagtt

SEQ ID NO: 203499 - DNA, 20 bp, Artificial Sequence
  Description of Artificial Sequence: Synthetic oligonucleotide
  Target: LAMA2; (-) strand; PAM type: YTN; PAM sequence: CTT
ctcccttacaacagcagagt

SEQ ID NO: 203500 - DNA, 20 bp, Artificial Sequence
  Description of Artificial Sequence: Synthetic oligonucleotide
  Target: LAMA2; (-) strand; PAM type: YTN; PAM sequence: CTG
cttctcccttacaacagcag

SEQ ID NO: 203501 - DNA, 20 bp, Artificial Sequence
  Description of Artificial Sequence: Synthetic oligonucleotide
  Target: LAMA2; (-) strand; PAM type: YTN; PAM sequence: TTA
tatctgcttctcccttacaa

SEQ ID NO: 203502 - DNA, 20 bp, Artificial Sequence
  Description of Artificial Sequence: Synthetic oligonucleotide
  Target: LAMA2; (-) strand; PAM type: YTN; PAM sequence: TTT
atatctgcttctcccttaca

SEQ ID NO: 203503 - DNA, 20 bp, Artificial Sequence
  Description of Artificial Sequence: Synthetic oligonucleotide
  Target: LAMA2; (-) strand; PAM type: YTN; PAM sequence: TTG
tttatatctgcttctccctt

SEQ ID NO: 203504 - DNA, 20 bp, Artificial Sequence
  Description of Artificial Sequence: Synthetic oligonucleotide
  Target: LAMA2; (-) strand; PAM type: YTN; PAM sequence: CTC
acacatacatattgtttata

SEQ ID NO: 203505 - DNA, 20 bp, Artificial Sequence
  Description of Artificial Sequence: Synthetic oligonucleotide
  Target: LAMA2; (-) strand; PAM type: YTN; PAM sequence: CTA
ctcacacatacatattgttt

SEQ ID NO: 203506 - DNA, 20 bp, Artificial Sequence
  Description of Artificial Sequence: Synthetic oligonucleotide
  Target: LAMA2; (-) strand; PAM type: YTN; PAM sequence: TTA
tggaaacatctactcacaca

SEQ ID NO: 203507 - DNA, 20 bp, Artificial Sequence
  Description of Artificial Sequence: Synthetic oligonucleotide
  Target: LAMA2; (-) strand; PAM type: YTN; PAM sequence: TTT
atggaaacatctactcacac

SEQ ID NO: 203508 - DNA, 20 bp, Artificial Sequence
  Description of Artificial Sequence: Synthetic oligonucleotide
  Target: LAMA2; (-) strand; PAM type: YTN; PAM sequence: CTT
tatggaaacatctactcaca

SEQ ID NO: 203509 - DNA, 20 bp, Artificial Sequence
  Description of Artificial Sequence: Synthetic oligonucleotide
  Target: LAMA2; (-) strand; PAM type: YTN; PAM sequence: CTG
taaataaagctttatggaaa

SEQ ID NO: 203510 - DNA, 20 bp, Artificial Sequence
  Description of Artificial Sequence: Synthetic oligonucleotide
  Target: LAMA2; (-) strand; PAM type: YTN; PAM sequence: TTC
tgtaaataaagctttatgga

SEQ ID NO: 203511 - DNA, 20 bp, Artificial Sequence
  Description of Artificial Sequence: Synthetic oligonucleotide
  Target: LAMA2; (-) strand; PAM type: YTN; PAM sequence: TTT
ctgtaaataaagctttatgg

SEQ ID NO: 203512 - DNA, 20 bp, Artificial Sequence
  Description of Artificial Sequence: Synthetic oligonucleotide
  Target: LAMA2; (-) strand; PAM type: YTN; PAM sequence: TTG
tttctgtaaataaagcttta

SEQ ID NO: 203513 - DNA, 20 bp, Artificial Sequence
  Description of Artificial Sequence: Synthetic oligonucleotide
  Target: LAMA2; (-) strand; PAM type: YTN; PAM sequence: CTT
gtttctgtaaataaagcttt

SEQ ID NO: 203514 - DNA, 20 bp, Artificial Sequence
  Description of Artificial Sequence: Synthetic oligonucleotide
  Target: LAMA2; (-) strand; PAM type: YTN; PAM sequence: CTG
tcatggcttgtttctgtaaa

SEQ ID NO: 203515 - DNA, 20 bp, Artificial Sequence
  Description of Artificial Sequence: Synthetic oligonucleotide
  Target: LAMA2; (-) strand; PAM type: YTN; PAM sequence: CTG
atcaggagatatgccagata

SEQ ID NO: 203516 - DNA, 20 bp, Artificial Sequence
  Description of Artificial Sequence: Synthetic oligonucleotide
  Target: LAMA2; (-) strand; PAM type: YTN; PAM sequence: TTA
tctgatcaggagatatgcca

SEQ ID NO: 203517 - DNA, 20 bp, Artificial Sequence
  Description of Artificial Sequence: Synthetic oligonucleotide
  Target: LAMA2; (-) strand; PAM type: YTN; PAM sequence: TTT
atctgatcaggagatatgcc

SEQ ID NO: 203518 - DNA, 20 bp, Artificial Sequence
  Description of Artificial Sequence: Synthetic oligonucleotide
  Target: LAMA2; (-) strand; PAM type: YTN; PAM sequence: TTG
ggaaataaggcagcaacatg

SEQ ID NO: 203519 - DNA, 20 bp, Artificial Sequence
  Description of Artificial Sequence: Synthetic oligonucleotide
  Target: LAMA2; (-) strand; PAM type: YTN; PAM sequence: TTC
aaacggagacattgggaaat

SEQ ID NO: 203520 - DNA, 20 bp, Artificial Sequence
  Description of Artificial Sequence: Synthetic oligonucleotide
  Target: LAMA2; (-) strand; PAM type: YTN; PAM sequence: CTA
gttcaaacggagacattggg

SEQ ID NO: 203521 - DNA, 20 bp, Artificial Sequence
  Description of Artificial Sequence: Synthetic oligonucleotide
  Target: LAMA2; (-) strand; PAM type: YTN; PAM sequence: CTG
cactagttcaaacggagaca

SEQ ID NO: 203522 - DNA, 20 bp, Artificial Sequence
  Description of Artificial Sequence: Synthetic oligonucleotide
  Target: LAMA2; (-) strand; PAM type: YTN; PAM sequence: CTC
caaaatatccctgcactagt

SEQ ID NO: 203523 - DNA, 20 bp, Artificial Sequence
  Description of Artificial Sequence: Synthetic oligonucleotide
  Target: LAMA2; (-) strand; PAM type: YTN; PAM sequence: CTA
aagtctccaaaatatccctg

SEQ ID NO: 203524 - DNA, 20 bp, Artificial Sequence
  Description of Artificial Sequence: Synthetic oligonucleotide
  Target: LAMA2; (-) strand; PAM type: YTN; PAM sequence: TTG
ctaaagtctccaaaatatcc

SEQ ID NO: 203525 - DNA, 20 bp, Artificial Sequence
  Description of Artificial Sequence: Synthetic oligonucleotide
  Target: LAMA2; (-) strand; PAM type: YTN; PAM sequence: CTA
ggcattgctaaagtctccaa

SEQ ID NO: 203526 - DNA, 20 bp, Artificial Sequence
  Description of Artificial Sequence: Synthetic oligonucleotide
  Target: LAMA2; (-) strand; PAM type: YTN; PAM sequence: CTG
actaggcattgctaaagtct

SEQ ID NO: 203527 - DNA, 20 bp, Artificial Sequence
  Description of Artificial Sequence: Synthetic oligonucleotide
  Target: LAMA2; (-) strand; PAM type: YTN; PAM sequence: TTG
ctgactaggcattgctaaag

SEQ ID NO: 203528 - DNA, 20 bp, Artificial Sequence
  Description of Artificial Sequence: Synthetic oligonucleotide
  Target: LAMA2; (-) strand; PAM type: YTN; PAM sequence: CTT
gctgactaggcattgctaaa

SEQ ID NO: 203529 - DNA, 20 bp, Artificial Sequence
  Description of Artificial Sequence: Synthetic oligonucleotide
  Target: LAMA2; (-) strand; PAM type: YTN; PAM sequence: CTG
atgcttgctgactaggcatt

SEQ ID NO: 203530 - DNA, 20 bp, Artificial Sequence
  Description of Artificial Sequence: Synthetic oligonucleotide
  Target: LAMA2; (-) strand; PAM type: YTN; PAM sequence: CTA
aagtacactgatgcttgctg

SEQ ID NO: 203531 - DNA, 20 bp, Artificial Sequence
  Description of Artificial Sequence: Synthetic oligonucleotide
  Target: LAMA2; (-) strand; PAM type: YTN; PAM sequence: TTC
aatgtctaaagtacactgat

SEQ ID NO: 203532 - DNA, 20 bp, Artificial Sequence
  Description of Artificial Sequence: Synthetic oligonucleotide
  Target: LAMA2; (-) strand; PAM type: YTN; PAM sequence: TTT
caatgtctaaagtacactga

SEQ ID NO: 203533 - DNA, 20 bp, Artificial Sequence
  Description of Artificial Sequence: Synthetic oligonucleotide
  Target: LAMA2; (-) strand; PAM type: YTN; PAM sequence: TTT
tcaatgtctaaagtacactg

SEQ ID NO: 203534 - DNA, 20 bp, Artificial Sequence
  Description of Artificial Sequence: Synthetic oligonucleotide
  Target: LAMA2; (-) strand; PAM type: YTN; PAM sequence: CTA
acccgattttcaatgtctaa

SEQ ID NO: 203535 - DNA, 20 bp, Artificial Sequence
  Description of Artificial Sequence: Synthetic oligonucleotide
  Target: LAMA2; (-) strand; PAM type: YTN; PAM sequence: TTC
ctaacccgattttcaatgtc

SEQ ID NO: 203536 - DNA, 20 bp, Artificial Sequence
  Description of Artificial Sequence: Synthetic oligonucleotide
  Target: LAMA2; (-) strand; PAM type: YTN; PAM sequence: TTT
cctaacccgattttcaatgt

SEQ ID NO: 203537 - DNA, 20 bp, Artificial Sequence
  Description of Artificial Sequence: Synthetic oligonucleotide
  Target: LAMA2; (-) strand; PAM type: YTN; PAM sequence: TTT
tcctaacccgattttcaatg

SEQ ID NO: 203538 - DNA, 20 bp, Artificial Sequence
  Description of Artificial Sequence: Synthetic oligonucleotide
  Target: LAMA2; (-) strand; PAM type: YTN; PAM sequence: TTT
ttcctaacccgattttcaat

SEQ ID NO: 203539 - DNA, 20 bp, Artificial Sequence
  Description of Artificial Sequence: Synthetic oligonucleotide
  Target: LAMA2; (-) strand; PAM type: YTN; PAM sequence: TTT
tttcctaacccgattttcaa

SEQ ID NO: 203540 - DNA, 20 bp, Artificial Sequence
  Description of Artificial Sequence: Synthetic oligonucleotide
  Target: LAMA2; (-) strand; PAM type: YTN; PAM sequence: TTT
ttttcctaacccgattttca

SEQ ID NO: 203541 - DNA, 20 bp, Artificial Sequence
  Description of Artificial Sequence: Synthetic oligonucleotide
  Target: LAMA2; (-) strand; PAM type: YTN; PAM sequence: TTT
tttttcctaacccgattttc

SEQ ID NO: 203542 - DNA, 20 bp, Artificial Sequence
  Description of Artificial Sequence: Synthetic oligonucleotide
  Target: LAMA2; (-) strand; PAM type: YTN; PAM sequence: TTT
ttttttcctaacccgatttt

SEQ ID NO: 203543 - DNA, 20 bp, Artificial Sequence
  Description of Artificial Sequence: Synthetic oligonucleotide
  Target: LAMA2; (-) strand; PAM type: YTN; PAM sequence: TTT
tttttttcctaacccgattt

SEQ ID NO: 203544 - DNA, 20 bp, Artificial Sequence
  Description of Artificial Sequence: Synthetic oligonucleotide
  Target: LAMA2; (-) strand; PAM type: YTN; PAM sequence: TTC
aaaggaaaatcaaagcagtc

SEQ ID NO: 203545 - DNA, 20 bp, Artificial Sequence
  Description of Artificial Sequence: Synthetic oligonucleotide
  Target: LAMA2; (-) strand; PAM type: YTN; PAM sequence: CTT
caaaggaaaatcaaagcagt

SEQ ID NO: 203546 - DNA, 20 bp, Artificial Sequence
  Description of Artificial Sequence: Synthetic oligonucleotide
  Target: LAMA2; (-) strand; PAM type: YTN; PAM sequence: TTA
cttcaaaggaaaatcaaagc

SEQ ID NO: 203547 - DNA, 20 bp, Artificial Sequence
  Description of Artificial Sequence: Synthetic oligonucleotide
  Target: LAMA2; (-) strand; PAM type: YTN; PAM sequence: TTG
tgacattacttcaaaggaaa

SEQ ID NO: 203548 - DNA, 20 bp, Artificial Sequence
  Description of Artificial Sequence: Synthetic oligonucleotide
  Target: LAMA2; (-) strand; PAM type: YTN; PAM sequence: CTT
gtgacattacttcaaaggaa

SEQ ID NO: 203549 - DNA, 20 bp, Artificial Sequence
  Description of Artificial Sequence: Synthetic oligonucleotide
  Target: LAMA2; (-) strand; PAM type: YTN; PAM sequence: TTC
ttgtgacattacttcaaagg

SEQ ID NO: 203550 - DNA, 20 bp, Artificial Sequence
  Description of Artificial Sequence: Synthetic oligonucleotide
  Target: LAMA2; (-) strand; PAM type: YTN; PAM sequence: CTT
cttgtgacattacttcaaag

SEQ ID NO: 203551 - DNA, 20 bp, Artificial Sequence
  Description of Artificial Sequence: Synthetic oligonucleotide
  Target: LAMA2; (-) strand; PAM type: YTN; PAM sequence: TTC
ttcttgtgacattacttcaa

SEQ ID NO: 203552 - DNA, 20 bp, Artificial Sequence
  Description of Artificial Sequence: Synthetic oligonucleotide
  Target: LAMA2; (-) strand; PAM type: YTN; PAM sequence: TTT
cttcttgtgacattacttca

SEQ ID NO: 203553 - DNA, 20 bp, Artificial Sequence
  Description of Artificial Sequence: Synthetic oligonucleotide
  Target: LAMA2; (-) strand; PAM type: YTN; PAM sequence: TTT
tcttcttgtgacattacttc

SEQ ID NO: 203554 - DNA, 20 bp, Artificial Sequence
  Description of Artificial Sequence: Synthetic oligonucleotide
  Target: LAMA2; (-) strand; PAM type: YTN; PAM sequence: CTG
ttttcttcttgtgacattac

SEQ ID NO: 203555 - DNA, 20 bp, Artificial Sequence
  Description of Artificial Sequence: Synthetic oligonucleotide
  Target: LAMA2; (-) strand; PAM type: YTN; PAM sequence: TTG
ctgttttcttcttgtgacat

SEQ ID NO: 203556 - DNA, 20 bp, Artificial Sequence
  Description of Artificial Sequence: Synthetic oligonucleotide
  Target: LAMA2; (-) strand; PAM type: YTN; PAM sequence: CTT
gctgttttcttcttgtgaca

SEQ ID NO: 203557 - DNA, 20 bp, Artificial Sequence
  Description of Artificial Sequence: Synthetic oligonucleotide
  Target: LAMA2; (-) strand; PAM type: YTN; PAM sequence: TTG
gcaaatgaaccagcttgctg

SEQ ID NO: 203558 - DNA, 20 bp, Artificial Sequence
  Description of Artificial Sequence: Synthetic oligonucleotide
  Target: LAMA2; (-) strand; PAM type: YTN; PAM sequence: CTT
ggcaaatgaaccagcttgct

SEQ ID NO: 203559 - DNA, 20 bp, Artificial Sequence
  Description of Artificial Sequence: Synthetic oligonucleotide
  Target: LAMA2; (-) strand; PAM type: YTN; PAM sequence: TTC
cttggcaaatgaaccagctt

SEQ ID NO: 203560 - DNA, 20 bp, Artificial Sequence
  Description of Artificial Sequence: Synthetic oligonucleotide
  Target: LAMA2; (-) strand; PAM type: YTN; PAM sequence: CTT
ccttggcaaatgaaccagct

SEQ ID NO: 203561 - DNA, 20 bp, Artificial Sequence
  Description of Artificial Sequence: Synthetic oligonucleotide
  Target: LAMA2; (-) strand; PAM type: YTN; PAM sequence: TTC
cttccttggcaaatgaacca

SEQ ID NO: 203562 - DNA, 20 bp, Artificial Sequence
  Description of Artificial Sequence: Synthetic oligonucleotide
  Target: LAMA2; (-) strand; PAM type: YTN; PAM sequence: CTT
ccttccttggcaaatgaacc

SEQ ID NO: 203563 - DNA, 20 bp, Artificial Sequence
  Description of Artificial Sequence: Synthetic oligonucleotide
  Target: LAMA2; (-) strand; PAM type: YTN; PAM sequence: CTC
ttccttccttggcaaatgaa

SEQ ID NO: 203564 - DNA, 20 bp, Artificial Sequence
  Description of Artificial Sequence: Synthetic oligonucleotide
  Target: LAMA2; (-) strand; PAM type: YTN; PAM sequence: TTC
atgctcttccttccttggca

SEQ ID NO: 203565 - DNA, 20 bp, Artificial Sequence
  Description of Artificial Sequence: Synthetic oligonucleotide
  Target: LAMA2; (-) strand; PAM type: YTN; PAM sequence: TTT
catgctcttccttccttggc

SEQ ID NO: 203566 - DNA, 20 bp, Artificial Sequence
  Description of Artificial Sequence: Synthetic oligonucleotide
  Target: LAMA2; (-) strand; PAM type: YTN; PAM sequence: CTT
tcatgctcttccttccttgg

SEQ ID NO: 203567 - DNA, 20 bp, Artificial Sequence
  Description of Artificial Sequence: Synthetic oligonucleotide
  Target: LAMA2; (-) strand; PAM type: YTN; PAM sequence: TTG
tctttcatgctcttccttcc

SEQ ID NO: 203568 - DNA, 20 bp, Artificial Sequence
  Description of Artificial Sequence: Synthetic oligonucleotide
  Target: LAMA2; (-) strand; PAM type: YTN; PAM sequence: TTT
gtctttcatgctcttccttc

SEQ ID NO: 203569 - DNA, 20 bp, Artificial Sequence
  Description of Artificial Sequence: Synthetic oligonucleotide
  Target: LAMA2; (-) strand; PAM type: YTN; PAM sequence: TTT
tgtctttcatgctcttcctt

SEQ ID NO: 203570 - DNA, 20 bp, Artificial Sequence
  Description of Artificial Sequence: Synthetic oligonucleotide
  Target: LAMA2; (-) strand; PAM type: YTN; PAM sequence: TTC
attttgtctttcatgctctt

SEQ ID NO: 203571 - DNA, 20 bp, Artificial Sequence
  Description of Artificial Sequence: Synthetic oligonucleotide
  Target: LAMA2; (-) strand; PAM type: YTN; PAM sequence: TTT
cattttgtctttcatgctct

SEQ ID NO: 203572 - DNA, 20 bp, Artificial Sequence
  Description of Artificial Sequence: Synthetic oligonucleotide
  Target: LAMA2; (-) strand; PAM type: YTN; PAM sequence: CTG
gcatttcattttgtctttca

SEQ ID NO: 203573 - DNA, 20 bp, Artificial Sequence
  Description of Artificial Sequence: Synthetic oligonucleotide
  Target: LAMA2; (-) strand; PAM type: YTN; PAM sequence: TTA
ctggcatttcattttgtctt

SEQ ID NO: 203574 - DNA, 20 bp, Artificial Sequence
  Description of Artificial Sequence: Synthetic oligonucleotide
  Target: LAMA2; (-) strand; PAM type: YTN; PAM sequence: CTA
gttactggcatttcattttg

SEQ ID NO: 203575 - DNA, 20 bp, Artificial Sequence
  Description of Artificial Sequence: Synthetic oligonucleotide
  Target: LAMA2; (-) strand; PAM type: YTN; PAM sequence: CTA
gtacctagttactggcattt

SEQ ID NO: 203576 - DNA, 20 bp, Artificial Sequence
  Description of Artificial Sequence: Synthetic oligonucleotide
  Target: LAMA2; (-) strand; PAM type: YTN; PAM sequence: CTC
tagtacctagttactggcat

SEQ ID NO: 203577 - DNA, 20 bp, Artificial Sequence
  Description of Artificial Sequence: Synthetic oligonucleotide
  Target: LAMA2; (-) strand; PAM type: YTN; PAM sequence: TTC
ctctagtacctagttactgg

SEQ ID NO: 203578 - DNA, 20 bp, Artificial Sequence
  Description of Artificial Sequence: Synthetic oligonucleotide
  Target: LAMA2; (-) strand; PAM type: YTN; PAM sequence: TTT
cctctagtacctagttactg

SEQ ID NO: 203579 - DNA, 20 bp, Artificial Sequence
  Description of Artificial Sequence: Synthetic oligonucleotide
  Target: LAMA2; (-) strand; PAM type: YTN; PAM sequence: CTT
tcctctagtacctagttact

SEQ ID NO: 203580 - DNA, 20 bp, Artificial Sequence
  Description of Artificial Sequence: Synthetic oligonucleotide
  Target: LAMA2; (-) strand; PAM type: YTN; PAM sequence: CTC
ctttcctctagtacctagtt

SEQ ID NO: 203581 - DNA, 20 bp, Artificial Sequence
  Description of Artificial Sequence: Synthetic oligonucleotide
  Target: LAMA2; (-) strand; PAM type: YTN; PAM sequence: TTA
gcactcctttcctctagtac

SEQ ID NO: 203582 - DNA, 20 bp, Artificial Sequence
  Description of Artificial Sequence: Synthetic oligonucleotide
  Target: LAMA2; (-) strand; PAM type: YTN; PAM sequence: CTT
agcactcctttcctctagta

SEQ ID NO: 203583 - DNA, 20 bp, Artificial Sequence
  Description of Artificial Sequence: Synthetic oligonucleotide
  Target: LAMA2; (-) strand; PAM type: YTN; PAM sequence: TTC
ttagcactcctttcctctag

SEQ ID NO: 203584 - DNA, 20 bp, Artificial Sequence
  Description of Artificial Sequence: Synthetic oligonucleotide
  Target: LAMA2; (-) strand; PAM type: YTN; PAM sequence: TTT
cttagcactcctttcctcta

SEQ ID NO: 203585 - DNA, 20 bp, Artificial Sequence
  Description of Artificial Sequence: Synthetic oligonucleotide
  Target: LAMA2; (-) strand; PAM type: YTN; PAM sequence: TTT
tcttagcactcctttcctct

SEQ ID NO: 203586 - DNA, 20 bp, Artificial Sequence
  Description of Artificial Sequence: Synthetic oligonucleotide
  Target: LAMA2; (-) strand; PAM type: YTN; PAM sequence: TTG
aacattttcttagcactcct

SEQ ID NO: 203587 - DNA, 20 bp, Artificial Sequence
  Description of Artificial Sequence: Synthetic oligonucleotide
  Target: LAMA2; (-) strand; PAM type: YTN; PAM sequence: TTT
gaacattttcttagcactcc

SEQ ID NO: 203588 - DNA, 20 bp, Artificial Sequence
  Description of Artificial Sequence: Synthetic oligonucleotide
  Target: LAMA2; (-) strand; PAM type: YTN; PAM sequence: TTT
tgaacattttcttagcactc

SEQ ID NO: 203589 - DNA, 20 bp, Artificial Sequence
  Description of Artificial Sequence: Synthetic oligonucleotide
  Target: LAMA2; (-) strand; PAM type: YTN; PAM sequence: CTT
ttgaacattttcttagcact

SEQ ID NO: 203590 - DNA, 20 bp, Artificial Sequence
  Description of Artificial Sequence: Synthetic oligonucleotide
  Target: LAMA2; (-) strand; PAM type: YTN; PAM sequence: TTC
aagatcccttttgaacattt

SEQ ID NO: 203591 - DNA, 20 bp, Artificial Sequence
  Description of Artificial Sequence: Synthetic oligonucleotide
  Target: LAMA2; (-) strand; PAM type: YTN; PAM sequence: TTT
caagatcccttttgaacatt

SEQ ID NO: 203592 - DNA, 20 bp, Artificial Sequence
  Description of Artificial Sequence: Synthetic oligonucleotide
  Target: LAMA2; (-) strand; PAM type: YTN; PAM sequence: TTT
tcaagatcccttttgaacat

SEQ ID NO: 203593 - DNA, 20 bp, Artificial Sequence
  Description of Artificial Sequence: Synthetic oligonucleotide
  Target: LAMA2; (-) strand; PAM type: YTN; PAM sequence: CTT
ttcaagatcccttttgaaca

SEQ ID NO: 203594 - DNA, 20 bp, Artificial Sequence
  Description of Artificial Sequence: Synthetic oligonucleotide
  Target: LAMA2; (-) strand; PAM type: YTN; PAM sequence: TTG
cttttcaagatcccttttga

SEQ ID NO: 203595 - DNA, 20 bp, Artificial Sequence
  Description of Artificial Sequence: Synthetic oligonucleotide
  Target: LAMA2; (-) strand; PAM type: YTN; PAM sequence: TTT
gcttttcaagatcccttttg

SEQ ID NO: 203596 - DNA, 20 bp, Artificial Sequence
  Description of Artificial Sequence: Synthetic oligonucleotide
  Target: LAMA2; (-) strand; PAM type: YTN; PAM sequence: CTT
tgcttttcaagatccctttt

SEQ ID NO: 203597 - DNA, 20 bp, Artificial Sequence
  Description of Artificial Sequence: Synthetic oligonucleotide
  Target: LAMA2; (-) strand; PAM type: YTN; PAM sequence: CTA
ccaagtgatctttgcttttc

SEQ ID NO: 203598 - DNA, 20 bp, Artificial Sequence
  Description of Artificial Sequence: Synthetic oligonucleotide
  Target: LAMA2; (-) strand; PAM type: YTN; PAM sequence: TTC
atctaccaagtgatctttgc

SEQ ID NO: 203599 - DNA, 20 bp, Artificial Sequence
  Description of Artificial Sequence: Synthetic oligonucleotide
  Target: LAMA2; (-) strand; PAM type: YTN; PAM sequence: TTG
aacaagttcatctaccaagt

SEQ ID NO: 203600 - DNA, 20 bp, Artificial Sequence
  Description of Artificial Sequence: Synthetic oligonucleotide
  Target: LAMA2; (-) strand; PAM type: YTN; PAM sequence: TTT
gaacaagttcatctaccaag

SEQ ID NO: 203601 - DNA, 20 bp, Artificial Sequence
  Description of Artificial Sequence: Synthetic oligonucleotide
  Target: LAMA2; (-) strand; PAM type: YTN; PAM sequence: CTT
tgaacaagttcatctaccaa

SEQ ID NO: 203602 - DNA, 20 bp, Artificial Sequence
  Description of Artificial Sequence: Synthetic oligonucleotide
  Target: LAMA2; (-) strand; PAM type: YTN; PAM sequence: TTA
gcgaacactttgaacaagtt

SEQ ID NO: 203603 - DNA, 20 bp, Artificial Sequence
  Description of Artificial Sequence: Synthetic oligonucleotide
  Target: LAMA2; (-) strand; PAM type: YTN; PAM sequence: TTG
caagaggtgagttagcgaac

SEQ ID NO: 203604 - DNA, 20 bp, Artificial Sequence
  Description of Artificial Sequence: Synthetic oligonucleotide
  Target: LAMA2; (-) strand; PAM type: YTN; PAM sequence: CTT
gcaagaggtgagttagcgaa

SEQ ID NO: 203605 - DNA, 20 bp, Artificial Sequence
  Description of Artificial Sequence: Synthetic oligonucleotide
  Target: LAMA2; (-) strand; PAM type: YTN; PAM sequence: TTC
ttgcaagaggtgagttagcg

SEQ ID NO: 203606 - DNA, 20 bp, Artificial Sequence
  Description of Artificial Sequence: Synthetic oligonucleotide
  Target: LAMA2; (-) strand; PAM type: YTN; PAM sequence: TTG
ttcttgcaagaggtgagtta

SEQ ID NO: 203607 - DNA, 20 bp, Artificial Sequence
  Description of Artificial Sequence: Synthetic oligonucleotide
  Target: LAMA2; (-) strand; PAM type: YTN; PAM sequence: TTT
gttcttgcaagaggtgagtt

SEQ ID NO: 203608 - DNA, 20 bp, Artificial Sequence
  Description of Artificial Sequence: Synthetic oligonucleotide
  Target: LAMA2; (-) strand; PAM type: YTN; PAM sequence: TTG
caagatagtttgttcttgca

SEQ ID NO: 203609 - DNA, 20 bp, Artificial Sequence
  Description of Artificial Sequence: Synthetic oligonucleotide
  Target: LAMA2; (-) strand; PAM type: YTN; PAM sequence: CTT
gcaagatagtttgttcttgc

SEQ ID NO: 203610 - DNA, 20 bp, Artificial Sequence
  Description of Artificial Sequence: Synthetic oligonucleotide
  Target: LAMA2; (-) strand; PAM type: YTN; PAM sequence: TTG
cagtagagccttgcaagata

SEQ ID NO: 203611 - DNA, 20 bp, Artificial Sequence
  Description of Artificial Sequence: Synthetic oligonucleotide
  Target: LAMA2; (-) strand; PAM type: YTN; PAM sequence: CTG
tgtatcagacatgttgcagt

SEQ ID NO: 203612 - DNA, 20 bp, Artificial Sequence
  Description of Artificial Sequence: Synthetic oligonucleotide
  Target: LAMA2; (-) strand; PAM type: YTN; PAM sequence: CTG
caggtgctgtgtatcagaca

SEQ ID NO: 203613 - DNA, 20 bp, Artificial Sequence
  Description of Artificial Sequence: Synthetic oligonucleotide
  Target: LAMA2; (-) strand; PAM type: YTN; PAM sequence: TTG
actgcaggtgctgtgtatca

SEQ ID NO: 203614 - DNA, 20 bp, Artificial Sequence
  Description of Artificial Sequence: Synthetic oligonucleotide
  Target: LAMA2; (-) strand; PAM type: YTN; PAM sequence: CTG
ttgactgcaggtgctgtgta

SEQ ID NO: 203615 - DNA, 20 bp, Artificial Sequence
  Description of Artificial Sequence: Synthetic oligonucleotide
  Target: LAMA2; (-) strand; PAM type: YTN; PAM sequence: CTA
cagagtctgttgactgcagg

SEQ ID NO: 203616 - DNA, 20 bp, Artificial Sequence
  Description of Artificial Sequence: Synthetic oligonucleotide
  Target: LAMA2; (-) strand; PAM type: YTN; PAM sequence: TTG
caactacagagtctgttgac

SEQ ID NO: 203617 - DNA, 20 bp, Artificial Sequence
  Description of Artificial Sequence: Synthetic oligonucleotide
  Target: LAMA2; (-) strand; PAM type: YTN; PAM sequence: TTT
gcaactacagagtctgttga

SEQ ID NO: 203618 - DNA, 20 bp, Artificial Sequence
  Description of Artificial Sequence: Synthetic oligonucleotide
  Target: LAMA2; (-) strand; PAM type: YTN; PAM sequence: CTT
tgcaactacagagtctgttg

SEQ ID NO: 203619 - DNA, 20 bp, Artificial Sequence
  Description of Artificial Sequence: Synthetic oligonucleotide
  Target: LAMA2; (-) strand; PAM type: YTN; PAM sequence: CTC
aatactttgcaactacagag

SEQ ID NO: 203620 - DNA, 20 bp, Artificial Sequence
  Description of Artificial Sequence: Synthetic oligonucleotide
  Target: LAMA2; (-) strand; PAM type: YTN; PAM sequence: TTG
agcacaaaactcaatacttt

SEQ ID NO: 203621 - DNA, 20 bp, Artificial Sequence
  Description of Artificial Sequence: Synthetic oligonucleotide
  Target: LAMA2; (-) strand; PAM type: YTN; PAM sequence: CTT
gagcacaaaactcaatactt

SEQ ID NO: 203622 - DNA, 20 bp, Artificial Sequence
  Description of Artificial Sequence: Synthetic oligonucleotide
  Target: LAMA2; (-) strand; PAM type: YTN; PAM sequence: CTA
tagcttgagcacaaaactca

SEQ ID NO: 203623 - DNA, 20 bp, Artificial Sequence
  Description of Artificial Sequence: Synthetic oligonucleotide
  Target: LAMA2; (-) strand; PAM type: YTN; PAM sequence: TTC
tatagcttgagcacaaaact

SEQ ID NO: 203624 - DNA, 20 bp, Artificial Sequence
  Description of Artificial Sequence: Synthetic oligonucleotide
  Target: LAMA2; (-) strand; PAM type: YTN; PAM sequence: CTT
ctatagcttgagcacaaaac

SEQ ID NO: 203625 - DNA, 20 bp, Artificial Sequence
  Description of Artificial Sequence: Synthetic oligonucleotide
  Target: LAMA2; (-) strand; PAM type: YTN; PAM sequence: TTA
acttctatagcttgagcaca

SEQ ID NO: 203626 - DNA, 20 bp, Artificial Sequence
  Description of Artificial Sequence: Synthetic oligonucleotide
  Target: LAMA2; (-) strand; PAM type: YTN; PAM sequence: TTA
tgacagtccattaacttcta

SEQ ID NO: 203627 - DNA, 20 bp, Artificial Sequence
  Description of Artificial Sequence: Synthetic oligonucleotide
  Target: LAMA2; (-) strand; PAM type: YTN; PAM sequence: CTG
aacaatgttatgacagtcca

SEQ ID NO: 203628 - DNA, 20 bp, Artificial Sequence
  Description of Artificial Sequence: Synthetic oligonucleotide
  Target: LAMA2; (-) strand; PAM type: YTN; PAM sequence: TTC
atctgaacaatgttatgaca

SEQ ID NO: 203629 - DNA, 20 bp, Artificial Sequence
  Description of Artificial Sequence: Synthetic oligonucleotide
  Target: LAMA2; (-) strand; PAM type: YTN; PAM sequence: TTT
catctgaacaatgttatgac

SEQ ID NO: 203630 - DNA, 20 bp, Artificial Sequence
  Description of Artificial Sequence: Synthetic oligonucleotide
  Target: LAMA2; (-) strand; PAM type: YTN; PAM sequence: CTG
ggtttcatctgaacaatgtt

SEQ ID NO: 203631 - DNA, 20 bp, Artificial Sequence
  Description of Artificial Sequence: Synthetic oligonucleotide
  Target: LAMA2; (-) strand; PAM type: YTN; PAM sequence: TTG
ctgggtttcatctgaacaat

SEQ ID NO: 203632 - DNA, 20 bp, Artificial Sequence
  Description of Artificial Sequence: Synthetic oligonucleotide
  Target: LAMA2; (-) strand; PAM type: YTN; PAM sequence: TTT
gctgggtttcatctgaacaa

SEQ ID NO: 203633 - DNA, 20 bp, Artificial Sequence
  Description of Artificial Sequence: Synthetic oligonucleotide
  Target: LAMA2; (-) strand; PAM type: YTN; PAM sequence: CTT
tgctgggtttcatctgaaca

SEQ ID NO: 203634 - DNA, 20 bp, Artificial Sequence
  Description of Artificial Sequence: Synthetic oligonucleotide
  Target: LAMA2; (-) strand; PAM type: YTN; PAM sequence: TTA
agctttgctgggtttcatct

SEQ ID NO: 203635 - DNA, 20 bp, Artificial Sequence
  Description of Artificial Sequence: Synthetic oligonucleotide
  Target: LAMA2; (-) strand; PAM type: YTN; PAM sequence: CTG
ttaagctttgctgggtttca

SEQ ID NO: 203636 - DNA, 20 bp, Artificial Sequence
  Description of Artificial Sequence: Synthetic oligonucleotide
  Target: LAMA2; (-) strand; PAM type: YTN; PAM sequence: TTA
gtctgttaagctttgctggg

SEQ ID NO: 203637 - DNA, 20 bp, Artificial Sequence
  Description of Artificial Sequence: Synthetic oligonucleotide
  Target: LAMA2; (-) strand; PAM type: YTN; PAM sequence: CTT
agtctgttaagctttgctgg

SEQ ID NO: 203638 - DNA, 20 bp, Artificial Sequence
  Description of Artificial Sequence: Synthetic oligonucleotide
  Target: LAMA2; (-) strand; PAM type: YTN; PAM sequence: TTA
aaaggggaggcaaaatccac

SEQ ID NO: 203639 - DNA, 20 bp, Artificial Sequence
  Description of Artificial Sequence: Synthetic oligonucleotide
  Target: LAMA2; (-) strand; PAM type: YTN; PAM sequence: CTG
gattaaaaggggaggcaaaa

SEQ ID NO: 203640 - DNA, 20 bp, Artificial Sequence
  Description of Artificial Sequence: Synthetic oligonucleotide
  Target: LAMA2; (-) strand; PAM type: YTN; PAM sequence: TTA
gcactggattaaaaggggag

SEQ ID NO: 203641 - DNA, 20 bp, Artificial Sequence
  Description of Artificial Sequence: Synthetic oligonucleotide
  Target: LAMA2; (-) strand; PAM type: YTN; PAM sequence: CTC
aaagaaattagcactggatt

SEQ ID NO: 203642 - DNA, 20 bp, Artificial Sequence
  Description of Artificial Sequence: Synthetic oligonucleotide
  Target: LAMA2; (-) strand; PAM type: YTN; PAM sequence: TTA
ctcaaagaaattagcactgg

SEQ ID NO: 203643 - DNA, 20 bp, Artificial Sequence
  Description of Artificial Sequence: Synthetic oligonucleotide
  Target: LAMA2; (-) strand; PAM type: YTN; PAM sequence: CTG
agattactcaaagaaattag

SEQ ID NO: 203644 - DNA, 20 bp, Artificial Sequence
  Description of Artificial Sequence: Synthetic oligonucleotide
  Target: LAMA2; (-) strand; PAM type: YTN; PAM sequence: TTC
tgagattactcaaagaaatt

SEQ ID NO: 203645 - DNA, 20 bp, Artificial Sequence
  Description of Artificial Sequence: Synthetic oligonucleotide
  Target: LAMA2; (-) strand; PAM type: YTN; PAM sequence: TTT
ctgagattactcaaagaaat

SEQ ID NO: 203646 - DNA, 20 bp, Artificial Sequence
  Description of Artificial Sequence: Synthetic oligonucleotide
  Target: LAMA2; (-) strand; PAM type: YTN; PAM sequence: TTT
tctgagattactcaaagaaa

SEQ ID NO: 203647 - DNA, 20 bp, Artificial Sequence
  Description of Artificial Sequence: Synthetic oligonucleotide
  Target: LAMA2; (-) strand; PAM type: YTN; PAM sequence: TTA
gcataaaaaagttttctgag

SEQ ID NO: 203648 - DNA, 20 bp, Artificial Sequence
  Description of Artificial Sequence: Synthetic oligonucleotide
  Target: LAMA2; (-) strand; PAM type: YTN; PAM sequence: TTT
agcataaaaaagttttctga

SEQ ID NO: 203649 - DNA, 20 bp, Artificial Sequence
  Description of Artificial Sequence: Synthetic oligonucleotide
  Target: LAMA2; (-) strand; PAM type: YTN; PAM sequence: CTT
tagcataaaaaagttttctg

SEQ ID NO: 203650 - DNA, 20 bp, Artificial Sequence
  Description of Artificial Sequence: Synthetic oligonucleotide
  Target: LAMA2; (-) strand; PAM type: YTN; PAM sequence: TTA
taaatgaatcactttagcat

SEQ ID NO: 203651 - DNA, 20 bp, Artificial Sequence
  Description of Artificial Sequence: Synthetic oligonucleotide
  Target: LAMA2; (-) strand; PAM type: YTN; PAM sequence: TTT
ataaatgaatcactttagca

SEQ ID NO: 203652 - DNA, 20 bp, Artificial Sequence
  Description of Artificial Sequence: Synthetic oligonucleotide
  Target: LAMA2; (-) strand; PAM type: YTN; PAM sequence: CTT
tataaatgaatcactttagc

SEQ ID NO: 203653 - DNA, 20 bp, Artificial Sequence
  Description of Artificial Sequence: Synthetic oligonucleotide
  Target: LAMA2; (-) strand; PAM type: YTN; PAM sequence: TTG
acaagaactttataaatgaa

SEQ ID NO: 203654 - DNA, 20 bp, Artificial Sequence
  Description of Artificial Sequence: Synthetic oligonucleotide
  Target: LAMA2; (-) strand; PAM type: YTN; PAM sequence: TTT
gacaagaactttataaatga

SEQ ID NO: 203655 - DNA, 20 bp, Artificial Sequence
  Description of Artificial Sequence: Synthetic oligonucleotide
  Target: LAMA2; (-) strand; PAM type: YTN; PAM sequence: TTT
tgacaagaactttataaatg

SEQ ID NO: 203656 - DNA, 20 bp, Artificial Sequence
  Description of Artificial Sequence: Synthetic oligonucleotide
  Target: LAMA2; (-) strand; PAM type: YTN; PAM sequence: TTG
ttttgacaagaactttataa

SEQ ID NO: 203657 - DNA, 20 bp, Artificial Sequence
  Description of Artificial Sequence: Synthetic oligonucleotide
  Target: LAMA2; (-) strand; PAM type: YTN; PAM sequence: CTG
gttgttttgacaagaacttt

SEQ ID NO: 203658 - DNA, 20 bp, Artificial Sequence
  Description of Artificial Sequence: Synthetic oligonucleotide
  Target: LAMA2; (-) strand; PAM type: YTN; PAM sequence: TTA
aatacactggttgttttgac

SEQ ID NO: 203659 - DNA, 20 bp, Artificial Sequence
  Description of Artificial Sequence: Synthetic oligonucleotide
  Target: LAMA2; (-) strand; PAM type: YTN; PAM sequence: TTT
aaatacactggttgttttga

SEQ ID NO: 203660 - DNA, 20 bp, Artificial Sequence
  Description of Artificial Sequence: Synthetic oligonucleotide
  Target: LAMA2; (-) strand; PAM type: YTN; PAM sequence: TTT
taaatacactggttgttttg

SEQ ID NO: 203661 - DNA, 20 bp, Artificial Sequence
  Description of Artificial Sequence: Synthetic oligonucleotide
  Target: LAMA2; (-) strand; PAM type: YTN; PAM sequence: TTC
caaaatattttaaatacact

SEQ ID NO: 203662 - DNA, 20 bp, Artificial Sequence
  Description of Artificial Sequence: Synthetic oligonucleotide
  Target: LAMA2; (-) strand; PAM type: YTN; PAM sequence: TTA
taattccaaaatattttaaa

SEQ ID NO: 203663 - DNA, 20 bp, Artificial Sequence
  Description of Artificial Sequence: Synthetic oligonucleotide
  Target: LAMA2; (-) strand; PAM type: YTN; PAM sequence: CTG
tattataattccaaaatatt

SEQ ID NO: 203664 - DNA, 20 bp, Artificial Sequence
  Description of Artificial Sequence: Synthetic oligonucleotide
  Target: LAMA2; (-) strand; PAM type: YTN; PAM sequence: TTG
tgtcctgtattataattcca

SEQ ID NO: 203665 - DNA, 20 bp, Artificial Sequence
  Description of Artificial Sequence: Synthetic oligonucleotide
  Target: LAMA2; (-) strand; PAM type: YTN; PAM sequence: TTT
gtgtcctgtattataattcc

SEQ ID NO: 203666 - DNA, 20 bp, Artificial Sequence
  Description of Artificial Sequence: Synthetic oligonucleotide
  Target: LAMA2; (-) strand; PAM type: YTN; PAM sequence: TTC
atttgtgtcctgtattataa

SEQ ID NO: 203667 - DNA, 20 bp, Artificial Sequence
  Description of Artificial Sequence: Synthetic oligonucleotide
  Target: LAMA2; (-) strand; PAM type: YTN; PAM sequence: TTT
catttgtgtcctgtattata

SEQ ID NO: 203668 - DNA, 20 bp, Artificial Sequence
  Description of Artificial Sequence: Synthetic oligonucleotide
  Target: LAMA2; (-) strand; PAM type: YTN; PAM sequence: CTT
tcatttgtgtcctgtattat

SEQ ID NO: 203669 - DNA, 20 bp, Artificial Sequence
  Description of Artificial Sequence: Synthetic oligonucleotide
  Target: LAMA2; (-) strand; PAM type: YTN; PAM sequence: TTC
tttcatttgtgtcctgtatt

SEQ ID NO: 203670 - DNA, 20 bp, Artificial Sequence
  Description of Artificial Sequence: Synthetic oligonucleotide
  Target: LAMA2; (-) strand; PAM type: YTN; PAM sequence: CTT
ctttcatttgtgtcctgtat

SEQ ID NO: 203671 - DNA, 20 bp, Artificial Sequence
  Description of Artificial Sequence: Synthetic oligonucleotide
  Target: LAMA2; (-) strand; PAM type: YTN; PAM sequence: CTA
gtataaatatcttctttcat

SEQ ID NO: 203672 - DNA, 20 bp, Artificial Sequence
  Description of Artificial Sequence: Synthetic oligonucleotide
  Target: LAMA2; (-) strand; PAM type: YTN; PAM sequence: CTG
cctagtataaatatcttctt

SEQ ID NO: 203673 - DNA, 20 bp, Artificial Sequence
  Description of Artificial Sequence: Synthetic oligonucleotide
  Target: LAMA2; (-) strand; PAM type: YTN; PAM sequence: CTA
gcccatctgcctagtataaa

SEQ ID NO: 203674 - DNA, 20 bp, Artificial Sequence
  Description of Artificial Sequence: Synthetic oligonucleotide
  Target: LAMA2; (-) strand; PAM type: YTN; PAM sequence: TTG
cagcataacctagcccatct

SEQ ID NO: 203675 - DNA, 20 bp, Artificial Sequence
  Description of Artificial Sequence: Synthetic oligonucleotide
  Target: LAMA2; (-) strand; PAM type: YTN; PAM sequence: TTA
ttgcagcataacctagccca

SEQ ID NO: 203676 - DNA, 20 bp, Artificial Sequence
  Description of Artificial Sequence: Synthetic oligonucleotide
  Target: LAMA2; (-) strand; PAM type: YTN; PAM sequence: TTC
attattgcagcataacctag

SEQ ID NO: 203677 - DNA, 20 bp, Artificial Sequence
  Description of Artificial Sequence: Synthetic oligonucleotide
  Target: LAMA2; (-) strand; PAM type: YTN; PAM sequence: TTG
ttcattattgcagcataacc

SEQ ID NO: 203678 - DNA, 20 bp, Artificial Sequence
  Description of Artificial Sequence: Synthetic oligonucleotide
  Target: LAMA2; (-) strand; PAM type: YTN; PAM sequence: TTG
gggttgttcattattgcagc

SEQ ID NO: 203679 - DNA, 20 bp, Artificial Sequence
  Description of Artificial Sequence: Synthetic oligonucleotide
  Target: LAMA2; (-) strand; PAM type: YTN; PAM sequence: TTT
ggggttgttcattattgcag

SEQ ID NO: 203680 - DNA, 20 bp, Artificial Sequence
  Description of Artificial Sequence: Synthetic oligonucleotide
  Target: LAMA2; (-) strand; PAM type: YTN; PAM sequence: TTT
tggggttgttcattattgca

SEQ ID NO: 203681 - DNA, 20 bp, Artificial Sequence
  Description of Artificial Sequence: Synthetic oligonucleotide
  Target: LAMA2; (-) strand; PAM type: YTN; PAM sequence: CTA
agattttggggttgttcatt

SEQ ID NO: 203682 - DNA, 20 bp, Artificial Sequence
  Description of Artificial Sequence: Synthetic oligonucleotide
  Target: LAMA2; (-) strand; PAM type: YTN; PAM sequence: TTG
caaccactaagattttgggg

SEQ ID NO: 203683 - DNA, 20 bp, Artificial Sequence
  Description of Artificial Sequence: Synthetic oligonucleotide
  Target: LAMA2; (-) strand; PAM type: YTN; PAM sequence: TTT
gcaaccactaagattttggg

SEQ ID NO: 203684 - DNA, 20 bp, Artificial Sequence
  Description of Artificial Sequence: Synthetic oligonucleotide
  Target: LAMA2; (-) strand; PAM type: YTN; PAM sequence: TTG
tttgcaaccactaagatttt

SEQ ID NO: 203685 - DNA, 20 bp, Artificial Sequence
  Description of Artificial Sequence: Synthetic oligonucleotide
  Target: LAMA2; (-) strand; PAM type: YTN; PAM sequence: TTG
ttgtttgcaaccactaagat

SEQ ID NO: 203686 - DNA, 20 bp, Artificial Sequence
  Description of Artificial Sequence: Synthetic oligonucleotide
  Target: LAMA2; (-) strand; PAM type: YTN; PAM sequence: TTT
gttgtttgcaaccactaaga

SEQ ID NO: 203687 - DNA, 20 bp, Artificial Sequence
  Description of Artificial Sequence: Synthetic oligonucleotide
  Target: LAMA2; (-) strand; PAM type: YTN; PAM sequence: TTG
tgagtgggagaaaaaagttt

SEQ ID NO: 203688 - DNA, 20 bp, Artificial Sequence
  Description of Artificial Sequence: Synthetic oligonucleotide
  Target: LAMA2; (-) strand; PAM type: YTN; PAM sequence: CTG
tattgtgagtgggagaaaaa

SEQ ID NO: 203689 - DNA, 20 bp, Artificial Sequence
  Description of Artificial Sequence: Synthetic oligonucleotide
  Target: LAMA2; (-) strand; PAM type: YTN; PAM sequence: CTA
tgatgaacctgtattgtgag

SEQ ID NO: 203690 - DNA, 20 bp, Artificial Sequence
  Description of Artificial Sequence: Synthetic oligonucleotide
  Target: LAMA2; (-) strand; PAM type: YTN; PAM sequence: CTG
actatgatgaacctgtattg

SEQ ID NO: 203691 - DNA, 20 bp, Artificial Sequence
  Description of Artificial Sequence: Synthetic oligonucleotide
  Target: LAMA2; (-) strand; PAM type: YTN; PAM sequence: CTG
ctgactatgatgaacctgta

SEQ ID NO: 203692 - DNA, 20 bp, Artificial Sequence
  Description of Artificial Sequence: Synthetic oligonucleotide
  Target: LAMA2; (-) strand; PAM type: YTN; PAM sequence: CTG
gagccccctgctgactatga

SEQ ID NO: 203693 - DNA, 20 bp, Artificial Sequence
  Description of Artificial Sequence: Synthetic oligonucleotide
  Target: LAMA2; (-) strand; PAM type: YTN; PAM sequence: TTC
ctggagccccctgctgacta

SEQ ID NO: 203694 - DNA, 20 bp, Artificial Sequence
  Description of Artificial Sequence: Synthetic oligonucleotide
  Target: LAMA2; (-) strand; PAM type: YTN; PAM sequence: TTA
tgattcctggagccccctgc

SEQ ID NO: 203695 - DNA, 20 bp, Artificial Sequence
  Description of Artificial Sequence: Synthetic oligonucleotide
  Target: LAMA2; (-) strand; PAM type: YTN; PAM sequence: CTA
tatcagcaattatgattcct

SEQ ID NO: 203696 - DNA, 20 bp, Artificial Sequence
  Description of Artificial Sequence: Synthetic oligonucleotide
  Target: LAMA2; (-) strand; PAM type: YTN; PAM sequence: CTG
tcaggtggctatatcagcaa

SEQ ID NO: 203697 - DNA, 20 bp, Artificial Sequence
  Description of Artificial Sequence: Synthetic oligonucleotide
  Target: LAMA2; (-) strand; PAM type: YTN; PAM sequence: CTG
atctgtcaggtggctatatc

SEQ ID NO: 203698 - DNA, 20 bp, Artificial Sequence
  Description of Artificial Sequence: Synthetic oligonucleotide
  Target: LAMA2; (-) strand; PAM type: YTN; PAM sequence: TTA
ctgatctgtcaggtggctat

SEQ ID NO: 203699 - DNA, 20 bp, Artificial Sequence
  Description of Artificial Sequence: Synthetic oligonucleotide
  Target: LAMA2; (-) strand; PAM type: YTN; PAM sequence: CTG
aggttactgatctgtcaggt

SEQ ID NO: 203700 - DNA, 20 bp, Artificial Sequence
  Description of Artificial Sequence: Synthetic oligonucleotide
  Target: LAMA2; (-) strand; PAM type: YTN; PAM sequence: CTA
cactgaggttactgatctgt

SEQ ID NO: 203701 - DNA, 20 bp, Artificial Sequence
  Description of Artificial Sequence: Synthetic oligonucleotide
  Target: LAMA2; (-) strand; PAM type: YTN; PAM sequence: CTC
atggccaccagctacactga

SEQ ID NO: 203702 - DNA, 20 bp, Artificial Sequence
  Description of Artificial Sequence: Synthetic oligonucleotide
  Target: LAMA2; (-) strand; PAM type: YTN; PAM sequence: TTC
tcatggccaccagctacact

SEQ ID NO: 203703 - DNA, 20 bp, Artificial Sequence
  Description of Artificial Sequence: Synthetic oligonucleotide
  Target: LAMA2; (-) strand; PAM type: YTN; PAM sequence: TTT
ctcatggccaccagctacac

SEQ ID NO: 203704 - DNA, 20 bp, Artificial Sequence
  Description of Artificial Sequence: Synthetic oligonucleotide
  Target: LAMA2; (-) strand; PAM type: YTN; PAM sequence: TTT
tctcatggccaccagctaca

SEQ ID NO: 203705 - DNA, 20 bp, Artificial Sequence
  Description of Artificial Sequence: Synthetic oligonucleotide
  Target: LAMA2; (-) strand; PAM type: YTN; PAM sequence: CTT
ttctcatggccaccagctac

SEQ ID NO: 203706 - DNA, 20 bp, Artificial Sequence
  Description of Artificial Sequence: Synthetic oligonucleotide
  Target: LAMA2; (-) strand; PAM type: YTN; PAM sequence: TTA
tcgccttttctcatggccac

SEQ ID NO: 203707 - DNA, 20 bp, Artificial Sequence
  Description of Artificial Sequence: Synthetic oligonucleotide
  Target: LAMA2; (-) strand; PAM type: YTN; PAM sequence: TTG
atatgaaagatgattatcgc

SEQ ID NO: 203708 - DNA, 20 bp, Artificial Sequence
  Description of Artificial Sequence: Synthetic oligonucleotide
  Target: LAMA2; (-) strand; PAM type: YTN; PAM sequence: TTT
gatatgaaagatgattatcg

SEQ ID NO: 203709 - DNA, 20 bp, Artificial Sequence
  Description of Artificial Sequence: Synthetic oligonucleotide
  Target: LAMA2; (-) strand; PAM type: YTN; PAM sequence: CTA
atatttgatatgaaagatga

SEQ ID NO: 203710 - DNA, 20 bp, Artificial Sequence
  Description of Artificial Sequence: Synthetic oligonucleotide
  Target: LAMA2; (-) strand; PAM type: YTN; PAM sequence: TTC
taatatttgatatgaaagat

SEQ ID NO: 203711 - DNA, 20 bp, Artificial Sequence
  Description of Artificial Sequence: Synthetic oligonucleotide
  Target: LAMA2; (-) strand; PAM type: YTN; PAM sequence: TTG
ttctaatatttgatatgaaa

SEQ ID NO: 203712 - DNA, 20 bp, Artificial Sequence
  Description of Artificial Sequence: Synthetic oligonucleotide
  Target: LAMA2; (-) strand; PAM type: YTN; PAM sequence: TTG
cattgttctaatatttgata

SEQ ID NO: 203713 - DNA, 20 bp, Artificial Sequence
  Description of Artificial Sequence: Synthetic oligonucleotide
  Target: LAMA2; (-) strand; PAM type: YTN; PAM sequence: CTT
gcattgttctaatatttgat

SEQ ID NO: 203714 - DNA, 20 bp, Artificial Sequence
  Description of Artificial Sequence: Synthetic oligonucleotide
  Target: LAMA2; (-) strand; PAM type: YTN; PAM sequence: CTC
ttgcattgttctaatatttg

SEQ ID NO: 203715 - DNA, 20 bp, Artificial Sequence
  Description of Artificial Sequence: Synthetic oligonucleotide
  Target: LAMA2; (-) strand; PAM type: YTN; PAM sequence: TTC
tcttgcattgttctaatatt

SEQ ID NO: 203716 - DNA, 20 bp, Artificial Sequence
  Description of Artificial Sequence: Synthetic oligonucleotide
  Target: LAMA2; (-) strand; PAM type: YTN; PAM sequence: TTT
ctcttgcattgttctaatat

SEQ ID NO: 203717 - DNA, 20 bp, Artificial Sequence
  Description of Artificial Sequence: Synthetic oligonucleotide
  Target: LAMA2; (-) strand; PAM type: YTN; PAM sequence: TTG
atatagagagtaaaatcacc

SEQ ID NO: 203718 - DNA, 20 bp, Artificial Sequence
  Description of Artificial Sequence: Synthetic oligonucleotide
  Target: LAMA2; (-) strand; PAM type: YTN; PAM sequence: TTA
gtgtgtgtgatattgatata

SEQ ID NO: 203719 - DNA, 20 bp, Artificial Sequence
  Description of Artificial Sequence: Synthetic oligonucleotide
  Target: LAMA2; (-) strand; PAM type: YTN; PAM sequence: CTA
aaatgcacaccaagtgttag

SEQ ID NO: 203720 - DNA, 20 bp, Artificial Sequence
  Description of Artificial Sequence: Synthetic oligonucleotide
  Target: LAMA2; (-) strand; PAM type: YTN; PAM sequence: TTC
taaaatgcacaccaagtgtt

SEQ ID NO: 203721 - DNA, 20 bp, Artificial Sequence
  Description of Artificial Sequence: Synthetic oligonucleotide
  Target: LAMA2; (-) strand; PAM type: YTN; PAM sequence: CTG
ggaaccagcaagatattcta

SEQ ID NO: 203722 - DNA, 20 bp, Artificial Sequence
  Description of Artificial Sequence: Synthetic oligonucleotide
  Target: LAMA2; (-) strand; PAM type: YTN; PAM sequence: TTA
ctgggaaccagcaagatatt

SEQ ID NO: 203723 - DNA, 20 bp, Artificial Sequence
  Description of Artificial Sequence: Synthetic oligonucleotide
  Target: LAMA2; (-) strand; PAM type: YTN; PAM sequence: TTT
actgggaaccagcaagatat

SEQ ID NO: 203724 - DNA, 20 bp, Artificial Sequence
  Description of Artificial Sequence: Synthetic oligonucleotide
  Target: LAMA2; (-) strand; PAM type: YTN; PAM sequence: TTG
acatatttactgggaaccag

SEQ ID NO: 203725 - DNA, 20 bp, Artificial Sequence
  Description of Artificial Sequence: Synthetic oligonucleotide
  Target: LAMA2; (-) strand; PAM type: YTN; PAM sequence: TTC
aagcggtatatagtgcaaaa

SEQ ID NO: 203726 - DNA, 20 bp, Artificial Sequence
  Description of Artificial Sequence: Synthetic oligonucleotide
  Target: LAMA2; (-) strand; PAM type: YTN; PAM sequence: TTT
caagcggtatatagtgcaaa

SEQ ID NO: 203727 - DNA, 20 bp, Artificial Sequence
  Description of Artificial Sequence: Synthetic oligonucleotide
  Target: LAMA2; (-) strand; PAM type: YTN; PAM sequence: TTG
acatttcaagcggtatatag

SEQ ID NO: 203728 - DNA, 20 bp, Artificial Sequence
  Description of Artificial Sequence: Synthetic oligonucleotide
  Target: LAMA2; (-) strand; PAM type: YTN; PAM sequence: TTG
tgcagtattgacatttcaag

SEQ ID NO: 203729 - DNA, 20 bp, Artificial Sequence
  Description of Artificial Sequence: Synthetic oligonucleotide
  Target: LAMA2; (-) strand; PAM type: YTN; PAM sequence: TTT
gtgcagtattgacatttcaa

SEQ ID NO: 203730 - DNA, 20 bp, Artificial Sequence
  Description of Artificial Sequence: Synthetic oligonucleotide
  Target: LAMA2; (-) strand; PAM type: YTN; PAM sequence: CTA
cgcgtatttgtgcagtattg

SEQ ID NO: 203731 - DNA, 20 bp, Artificial Sequence
  Description of Artificial Sequence: Synthetic oligonucleotide
  Target: LAMA2; (-) strand; PAM type: YTN; PAM sequence: CTG
tcagcagactacgcgtattt

SEQ ID NO: 203732 - DNA, 20 bp, Artificial Sequence
  Description of Artificial Sequence: Synthetic oligonucleotide
  Target: LAMA2; (-) strand; PAM type: YTN; PAM sequence: TTA
ctgtcagcagactacgcgta

SEQ ID NO: 203733 - DNA, 20 bp, Artificial Sequence
  Description of Artificial Sequence: Synthetic oligonucleotide
  Target: LAMA2; (-) strand; PAM type: YTN; PAM sequence: CTG
gcaggttactgtcagcagac

SEQ ID NO: 203734 - DNA, 20 bp, Artificial Sequence
  Description of Artificial Sequence: Synthetic oligonucleotide
  Target: LAMA2; (-) strand; PAM type: YTN; PAM sequence: CTA
gaacctggcaggttactgtc

SEQ ID NO: 203735 - DNA, 20 bp, Artificial Sequence
  Description of Artificial Sequence: Synthetic oligonucleotide
  Target: LAMA2; (-) strand; PAM type: YTN; PAM sequence: CTA
acagtaatcaatatggaagt

SEQ ID NO: 203736 - DNA, 20 bp, Artificial Sequence
  Description of Artificial Sequence: Synthetic oligonucleotide
  Target: LAMA2; (-) strand; PAM type: YTN; PAM sequence: TTG
ctaacagtaatcaatatgga

SEQ ID NO: 203737 - DNA, 20 bp, Artificial Sequence
  Description of Artificial Sequence: Synthetic oligonucleotide
  Target: LAMA2; (-) strand; PAM type: YTN; PAM sequence: TTT
gctaacagtaatcaatatgg

SEQ ID NO: 203738 - DNA, 20 bp, Artificial Sequence
  Description of Artificial Sequence: Synthetic oligonucleotide
  Target: LAMA2; (-) strand; PAM type: YTN; PAM sequence: TTT
tgctaacagtaatcaatatg

SEQ ID NO: 203739 - DNA, 20 bp, Artificial Sequence
  Description of Artificial Sequence: Synthetic oligonucleotide
  Target: LAMA2; (-) strand; PAM type: YTN; PAM sequence: CTA
cacattttgctaacagtaat

SEQ ID NO: 203740 - DNA, 20 bp, Artificial Sequence
  Description of Artificial Sequence: Synthetic oligonucleotide
  Target: LAMA2; (-) strand; PAM type: YTN; PAM sequence: TTC
acctacacattttgctaaca

SEQ ID NO: 203741 - DNA, 20 bp, Artificial Sequence
  Description of Artificial Sequence: Synthetic oligonucleotide
  Target: LAMA2; (-) strand; PAM type: YTN; PAM sequence: TTT
cacctacacattttgctaac

SEQ ID NO: 203742 - DNA, 20 bp, Artificial Sequence
  Description of Artificial Sequence: Synthetic oligonucleotide
  Target: LAMA2; (-) strand; PAM type: YTN; PAM sequence: CTA
caaaaatttcacctacacat

SEQ ID NO: 203743 - DNA, 20 bp, Artificial Sequence
  Description of Artificial Sequence: Synthetic oligonucleotide
  Target: LAMA2; (-) strand; PAM type: YTN; PAM sequence: CTG
tgaatggtcacgtgcgtacc

SEQ ID NO: 203744 - DNA, 20 bp, Artificial Sequence
  Description of Artificial Sequence: Synthetic oligonucleotide
  Target: LAMA2; (-) strand; PAM type: YTN; PAM sequence: TTC
tgtgaatggtcacgtgcgta

SEQ ID NO: 203745 - DNA, 20 bp, Artificial Sequence
  Description of Artificial Sequence: Synthetic oligonucleotide
  Target: LAMA2; (-) strand; PAM type: YTN; PAM sequence: CTT
ctgtgaatggtcacgtgcgt

SEQ ID NO: 203746 - DNA, 20 bp, Artificial Sequence
  Description of Artificial Sequence: Synthetic oligonucleotide
  Target: LAMA2; (-) strand; PAM type: YTN; PAM sequence: TTG
ccttctgtgaatggtcacgt

SEQ ID NO: 203747 - DNA, 20 bp, Artificial Sequence
  Description of Artificial Sequence: Synthetic oligonucleotide
  Target: LAMA2; (-) strand; PAM type: YTN; PAM sequence: CTT
gccttctgtgaatggtcacg

SEQ ID NO: 203748 - DNA, 20 bp, Artificial Sequence
  Description of Artificial Sequence: Synthetic oligonucleotide
  Target: LAMA2; (-) strand; PAM type: YTN; PAM sequence: CTC
ttgccttctgtgaatggtca

SEQ ID NO: 203749 - DNA, 20 bp, Artificial Sequence
  Description of Artificial Sequence: Synthetic oligonucleotide
  Target: LAMA2; (-) strand; PAM type: YTN; PAM sequence: TTC
caaagagaacctcttgcctt

SEQ ID NO: 203750 - DNA, 20 bp, Artificial Sequence
  Description of Artificial Sequence: Synthetic oligonucleotide
  Target: LAMA2; (-) strand; PAM type: YTN; PAM sequence: TTA
aattccaaagagaacctctt

SEQ ID NO: 203751 - DNA, 20 bp, Artificial Sequence
  Description of Artificial Sequence: Synthetic oligonucleotide
  Target: LAMA2; (-) strand; PAM type: YTN; PAM sequence: TTC
acacagaaaattaaattcca

SEQ ID NO: 203752 - DNA, 20 bp, Artificial Sequence
  Description of Artificial Sequence: Synthetic oligonucleotide
  Target: LAMA2; (-) strand; PAM type: YTN; PAM sequence: TTT
cacacagaaaattaaattcc

SEQ ID NO: 203753 - DNA, 20 bp, Artificial Sequence
  Description of Artificial Sequence: Synthetic oligonucleotide
  Target: LAMA2; (-) strand; PAM type: YTN; PAM sequence: TTT
tcacacagaaaattaaattc

SEQ ID NO: 203754 - DNA, 20 bp, Artificial Sequence
  Description of Artificial Sequence: Synthetic oligonucleotide
  Target: LAMA2; (-) strand; PAM type: YTN; PAM sequence: TTT
ttcacacagaaaattaaatt

SEQ ID NO: 203755 - DNA, 20 bp, Artificial Sequence
  Description of Artificial Sequence: Synthetic oligonucleotide
  Target: LAMA2; (-) strand; PAM type: YTN; PAM sequence: TTA
tttttcacacagaaaattaa

SEQ ID NO: 203756 - DNA, 20 bp, Artificial Sequence
  Description of Artificial Sequence: Synthetic oligonucleotide
  Target: LAMA2; (-) strand; PAM type: YTN; PAM sequence: TTT
atttttcacacagaaaatta

SEQ ID NO: 203757 - DNA, 20 bp, Artificial Sequence
  Description of Artificial Sequence: Synthetic oligonucleotide
  Target: LAMA2; (-) strand; PAM type: YTN; PAM sequence: TTC
cacacacacaaaaaagtgat

SEQ ID NO: 203758 - DNA, 20 bp, Artificial Sequence
  Description of Artificial Sequence: Synthetic oligonucleotide
  Target: LAMA2; (-) strand; PAM type: YTN; PAM sequence: TTC
catgagaaatgttccacaca

SEQ ID NO: 203759 - DNA, 20 bp, Artificial Sequence
  Description of Artificial Sequence: Synthetic oligonucleotide
  Target: LAMA2; (-) strand; PAM type: YTN; PAM sequence: TTA
ttccatgagaaatgttccac

SEQ ID NO: 203760 - DNA, 20 bp, Artificial Sequence
  Description of Artificial Sequence: Synthetic oligonucleotide
  Target: LAMA2; (-) strand; PAM type: YTN; PAM sequence: CTA
atatgacccattattccatg

SEQ ID NO: 203761 - DNA, 20 bp, Artificial Sequence
  Description of Artificial Sequence: Synthetic oligonucleotide
  Target: LAMA2; (-) strand; PAM type: YTN; PAM sequence: TTA
acctaatatgacccattatt

SEQ ID NO: 203762 - DNA, 20 bp, Artificial Sequence
  Description of Artificial Sequence: Synthetic oligonucleotide
  Target: LAMA2; (-) strand; PAM type: YTN; PAM sequence: CTT
aacctaatatgacccattat

SEQ ID NO: 203763 - DNA, 20 bp, Artificial Sequence
  Description of Artificial Sequence: Synthetic oligonucleotide
  Target: LAMA2; (-) strand; PAM type: YTN; PAM sequence: CTA
aacttaacctaatatgaccc

SEQ ID NO: 203764 - DNA, 20 bp, Artificial Sequence
  Description of Artificial Sequence: Synthetic oligonucleotide
  Target: LAMA2; (-) strand; PAM type: YTN; PAM sequence: TTC
ctaaacttaacctaatatga

SEQ ID NO: 203765 - DNA, 20 bp, Artificial Sequence
  Description of Artificial Sequence: Synthetic oligonucleotide
  Target: LAMA2; (-) strand; PAM type: YTN; PAM sequence: TTT
cctaaacttaacctaatatg

SEQ ID NO: 203766 - DNA, 20 bp, Artificial Sequence
  Description of Artificial Sequence: Synthetic oligonucleotide
  Target: LAMA2; (-) strand; PAM type: YTN; PAM sequence: CTC
aataaacatcagtttcctaa

SEQ ID NO: 203767 - DNA, 20 bp, Artificial Sequence
  Description of Artificial Sequence: Synthetic oligonucleotide
  Target: LAMA2; (-) strand; PAM type: YTN; PAM sequence: TTA
gcagatatgtgcacagctca

SEQ ID NO: 203768 - DNA, 20 bp, Artificial Sequence
  Description of Artificial Sequence: Synthetic oligonucleotide
  Target: LAMA2; (-) strand; PAM type: YTN; PAM sequence: TTT
agcagatatgtgcacagctc

SEQ ID NO: 203769 - DNA, 20 bp, Artificial Sequence
  Description of Artificial Sequence: Synthetic oligonucleotide
  Target: LAMA2; (-) strand; PAM type: YTN; PAM sequence: CTT
tagcagatatgtgcacagct

SEQ ID NO: 203770 - DNA, 20 bp, Artificial Sequence
  Description of Artificial Sequence: Synthetic oligonucleotide
  Target: LAMA2; (-) strand; PAM type: YTN; PAM sequence: TTC
ctttagcagatatgtgcaca

SEQ ID NO: 203771 - DNA, 20 bp, Artificial Sequence
  Description of Artificial Sequence: Synthetic oligonucleotide
  Target: LAMA2; (-) strand; PAM type: YTN; PAM sequence: TTA
tagatgtgaaattcctttag

SEQ ID NO: 203772 - DNA, 20 bp, Artificial Sequence
  Description of Artificial Sequence: Synthetic oligonucleotide
  Target: LAMA2; (-) strand; PAM type: YTN; PAM sequence: TTT
atagatgtgaaattccttta

SEQ ID NO: 203773 - DNA, 20 bp, Artificial Sequence
  Description of Artificial Sequence: Synthetic oligonucleotide
  Target: LAMA2; (-) strand; PAM type: YTN; PAM sequence: TTA
tttatagatgtgaaattcct

SEQ ID NO: 203774 - DNA, 20 bp, Artificial Sequence
  Description of Artificial Sequence: Synthetic oligonucleotide
  Target: LAMA2; (-) strand; PAM type: YTN; PAM sequence: TTT
atttatagatgtgaaattcc

SEQ ID NO: 203775 - DNA, 20 bp, Artificial Sequence
  Description of Artificial Sequence: Synthetic oligonucleotide
  Target: LAMA2; (-) strand; PAM type: YTN; PAM sequence: TTA
tttatttatagatgtgaaat

SEQ ID NO: 203776 - DNA, 20 bp, Artificial Sequence
  Description of Artificial Sequence: Synthetic oligonucleotide
  Target: LAMA2; (-) strand; PAM type: YTN; PAM sequence: CTT
atttatttatagatgtgaaa

SEQ ID NO: 203777 - DNA, 20 bp, Artificial Sequence
  Description of Artificial Sequence: Synthetic oligonucleotide
  Target: LAMA2; (-) strand; PAM type: YTN; PAM sequence: CTG
acaccatggaaaaataagct

SEQ ID NO: 203778 - DNA, 20 bp, Artificial Sequence
  Description of Artificial Sequence: Synthetic oligonucleotide
  Target: LAMA2; (-) strand; PAM type: YTN; PAM sequence: CTC
tgacaccatggaaaaataag

SEQ ID NO: 203779 - DNA, 20 bp, Artificial Sequence
  Description of Artificial Sequence: Synthetic oligonucleotide
  Target: LAMA2; (-) strand; PAM type: YTN; PAM sequence: CTC
tctgacaccatggaaaaata

SEQ ID NO: 203780 - DNA, 20 bp, Artificial Sequence
  Description of Artificial Sequence: Synthetic oligonucleotide
  Target: LAMA2; (-) strand; PAM type: YTN; PAM sequence: TTA
tctctctgacaccatggaaa

SEQ ID NO: 203781 - DNA, 20 bp, Artificial Sequence
  Description of Artificial Sequence: Synthetic oligonucleotide
  Target: LAMA2; (-) strand; PAM type: YTN; PAM sequence: CTC
attatctctctgacaccatg

SEQ ID NO: 203782 - DNA, 20 bp, Artificial Sequence
  Description of Artificial Sequence: Synthetic oligonucleotide
  Target: LAMA2; (-) strand; PAM type: YTN; PAM sequence: TTA
tatgaaagtctcattatctc

SEQ ID NO: 203783 - DNA, 20 bp, Artificial Sequence
  Description of Artificial Sequence: Synthetic oligonucleotide
  Target: LAMA2; (-) strand; PAM type: YTN; PAM sequence: TTT
atatgaaagtctcattatct

SEQ ID NO: 203784 - DNA, 20 bp, Artificial Sequence
  Description of Artificial Sequence: Synthetic oligonucleotide
  Target: LAMA2; (-) strand; PAM type: YTN; PAM sequence: TTT
tatatgaaagtctcattatc

SEQ ID NO: 203785 - DNA, 20 bp, Artificial Sequence
  Description of Artificial Sequence: Synthetic oligonucleotide
  Target: LAMA2; (-) strand; PAM type: YTN; PAM sequence: CTG
gcaaaaatagttttatatga

SEQ ID NO: 203786 - DNA, 20 bp, Artificial Sequence
  Description of Artificial Sequence: Synthetic oligonucleotide
  Target: LAMA2; (-) strand; PAM type: YTN; PAM sequence: TTC
agctggcaaaaatagtttta

SEQ ID NO: 203787 - DNA, 20 bp, Artificial Sequence
  Description of Artificial Sequence: Synthetic oligonucleotide
  Target: LAMA2; (-) strand; PAM type: YTN; PAM sequence: TTT
cagctggcaaaaatagtttt

SEQ ID NO: 203788 - DNA, 20 bp, Artificial Sequence
  Description of Artificial Sequence: Synthetic oligonucleotide
  Target: LAMA2; (-) strand; PAM type: YTN; PAM sequence: TTA
gaataacaatcatgatattt

SEQ ID NO: 203789 - DNA, 20 bp, Artificial Sequence
  Description of Artificial Sequence: Synthetic oligonucleotide
  Target: LAMA2; (-) strand; PAM type: YTN; PAM sequence: TTG
tggaggaaatattagaataa

SEQ ID NO: 203790 - DNA, 20 bp, Artificial Sequence
  Description of Artificial Sequence: Synthetic oligonucleotide
  Target: LAMA2; (-) strand; PAM type: YTN; PAM sequence: TTT
gtggaggaaatattagaata

SEQ ID NO: 203791 - DNA, 20 bp, Artificial Sequence
  Description of Artificial Sequence: Synthetic oligonucleotide
  Target: LAMA2; (-) strand; PAM type: YTN; PAM sequence: CTT
tgtggaggaaatattagaat

SEQ ID NO: 203792 - DNA, 20 bp, Artificial Sequence
  Description of Artificial Sequence: Synthetic oligonucleotide
  Target: LAMA2; (-) strand; PAM type: YTN; PAM sequence: CTA
agtctttgtggaggaaatat

SEQ ID NO: 203793 - DNA, 20 bp, Artificial Sequence
  Description of Artificial Sequence: Synthetic oligonucleotide
  Target: LAMA2; (-) strand; PAM type: YTN; PAM sequence: TTC
actaagtctttgtggaggaa

SEQ ID NO: 203794 - DNA, 20 bp, Artificial Sequence
  Description of Artificial Sequence: Synthetic oligonucleotide
  Target: LAMA2; (-) strand; PAM type: YTN; PAM sequence: CTA
aaatggacatgcagttcact

SEQ ID NO: 203795 - DNA, 20 bp, Artificial Sequence
  Description of Artificial Sequence: Synthetic oligonucleotide
  Target: LAMA2; (-) strand; PAM type: YTN; PAM sequence: TTC
taaaatggacatgcagttca

SEQ ID NO: 203796 - DNA, 20 bp, Artificial Sequence
  Description of Artificial Sequence: Synthetic oligonucleotide
  Target: LAMA2; (-) strand; PAM type: YTN; PAM sequence: TTT
ctaaaatggacatgcagttc

SEQ ID NO: 203797 - DNA, 20 bp, Artificial Sequence
  Description of Artificial Sequence: Synthetic oligonucleotide
  Target: LAMA2; (-) strand; PAM type: YTN; PAM sequence: CTT
tctaaaatggacatgcagtt

SEQ ID NO: 203798 - DNA, 20 bp, Artificial Sequence
  Description of Artificial Sequence: Synthetic oligonucleotide
  Target: LAMA2; (-) strand; PAM type: YTN; PAM sequence: CTA
ctttctaaaatggacatgca

SEQ ID NO: 203799 - DNA, 20 bp, Artificial Sequence
  Description of Artificial Sequence: Synthetic oligonucleotide
  Target: LAMA2; (-) strand; PAM type: YTN; PAM sequence: CTC
ctactttctaaaatggacat

SEQ ID NO: 203800 - DNA, 20 bp, Artificial Sequence
  Description of Artificial Sequence: Synthetic oligonucleotide
  Target: LAMA2; (-) strand; PAM type: YTN; PAM sequence: CTA
ctcctactttctaaaatgga

SEQ ID NO: 203801 - DNA, 20 bp, Artificial Sequence
  Description of Artificial Sequence: Synthetic oligonucleotide
  Target: LAMA2; (-) strand; PAM type: YTN; PAM sequence: TTA
aaatatctactcctactttc

SEQ ID NO: 203802 - DNA, 20 bp, Artificial Sequence
  Description of Artificial Sequence: Synthetic oligonucleotide
  Target: LAMA2; (-) strand; PAM type: YTN; PAM sequence: CTC
aagaagcaagaaaaaattaa

SEQ ID NO: 203803 - DNA, 20 bp, Artificial Sequence
  Description of Artificial Sequence: Synthetic oligonucleotide
  Target: LAMA2; (-) strand; PAM type: YTN; PAM sequence: TTC
tcaagaagcaagaaaaaatt

SEQ ID NO: 203804 - DNA, 20 bp, Artificial Sequence
  Description of Artificial Sequence: Synthetic oligonucleotide
  Target: LAMA2; (-) strand; PAM type: YTN; PAM sequence: TTG
atagtagttctcaagaagca

SEQ ID NO: 203805 - DNA, 20 bp, Artificial Sequence
  Description of Artificial Sequence: Synthetic oligonucleotide
  Target: LAMA2; (-) strand; PAM type: YTN; PAM sequence: TTG
ttgatagtagttctcaagaa

SEQ ID NO: 203806 - DNA, 20 bp, Artificial Sequence
  Description of Artificial Sequence: Synthetic oligonucleotide
  Target: LAMA2; (-) strand; PAM type: YTN; PAM sequence: TTA
ttgttgatagtagttctcaa

SEQ ID NO: 203807 - DNA, 20 bp, Artificial Sequence
  Description of Artificial Sequence: Synthetic oligonucleotide
  Target: LAMA2; (-) strand; PAM type: YTN; PAM sequence: TTT
attgttgatagtagttctca

SEQ ID NO: 203808 - DNA, 20 bp, Artificial Sequence
  Description of Artificial Sequence: Synthetic oligonucleotide
  Target: LAMA2; (-) strand; PAM type: YTN; PAM sequence: TTT
tattgttgatagtagttctc

SEQ ID NO: 203809 - DNA, 20 bp, Artificial Sequence
  Description of Artificial Sequence: Synthetic oligonucleotide
  Target: LAMA2; (-) strand; PAM type: YTN; PAM sequence: TTT
ttattgttgatagtagttct

SEQ ID NO: 203810 - DNA, 20 bp, Artificial Sequence
  Description of Artificial Sequence: Synthetic oligonucleotide
  Target: LAMA2; (-) strand; PAM type: YTN; PAM sequence: TTT
tttattgttgatagtagttc

SEQ ID NO: 203811 - DNA, 20 bp, Artificial Sequence
  Description of Artificial Sequence: Synthetic oligonucleotide
  Target: LAMA2; (-) strand; PAM type: YTN; PAM sequence: TTT
ttttattgttgatagtagtt

SEQ ID NO: 203812 - DNA, 20 bp, Artificial Sequence
  Description of Artificial Sequence: Synthetic oligonucleotide
  Target: LAMA2; (-) strand; PAM type: YTN; PAM sequence: CTT
tttttattgttgatagtagt

SEQ ID NO: 203813 - DNA, 20 bp, Artificial Sequence
  Description of Artificial Sequence: Synthetic oligonucleotide
  Target: LAMA2; (-) strand; PAM type: YTN; PAM sequence: TTA
aaatcaaagctttttttatt

SEQ ID NO: 203814 - DNA, 20 bp, Artificial Sequence
  Description of Artificial Sequence: Synthetic oligonucleotide
  Target: LAMA2; (-) strand; PAM type: YTN; PAM sequence: TTA
agatatacacgttaaaatca

SEQ ID NO: 203815 - DNA, 20 bp, Artificial Sequence
  Description of Artificial Sequence: Synthetic oligonucleotide
  Target: LAMA2; (-) strand; PAM type: YTN; PAM sequence: CTT
aagatatacacgttaaaatc

SEQ ID NO: 203816 - DNA, 20 bp, Artificial Sequence
  Description of Artificial Sequence: Synthetic oligonucleotide
  Target: LAMA2; (-) strand; PAM type: YTN; PAM sequence: TTG
atcaaaagaaatcttaagat

SEQ ID NO: 203817 - DNA, 20 bp, Artificial Sequence
  Description of Artificial Sequence: Synthetic oligonucleotide
  Target: LAMA2; (-) strand; PAM type: YTN; PAM sequence: TTA
gtattgatcaaaagaaatct

SEQ ID NO: 203818 - DNA, 20 bp, Artificial Sequence
  Description of Artificial Sequence: Synthetic oligonucleotide
  Target: LAMA2; (-) strand; PAM type: YTN; PAM sequence: TTC
attagtattgatcaaaagaa

SEQ ID NO: 203819 - DNA, 20 bp, Artificial Sequence
  Description of Artificial Sequence: Synthetic oligonucleotide
  Target: LAMA2; (-) strand; PAM type: YTN; PAM sequence: TTT
cattagtattgatcaaaaga

SEQ ID NO: 203820 - DNA, 20 bp, Artificial Sequence
  Description of Artificial Sequence: Synthetic oligonucleotide
  Target: LAMA2; (-) strand; PAM type: YTN; PAM sequence: TTT
tcattagtattgatcaaaag

SEQ ID NO: 203821 - DNA, 20 bp, Artificial Sequence
  Description of Artificial Sequence: Synthetic oligonucleotide
  Target: LAMA2; (-) strand; PAM type: YTN; PAM sequence: TTA
ttttcattagtattgatcaa

SEQ ID NO: 203822 - DNA, 20 bp, Artificial Sequence
  Description of Artificial Sequence: Synthetic oligonucleotide
  Target: LAMA2; (-) strand; PAM type: YTN; PAM sequence: TTT
attttcattagtattgatca

SEQ ID NO: 203823 - DNA, 20 bp, Artificial Sequence
  Description of Artificial Sequence: Synthetic oligonucleotide
  Target: LAMA2; (-) strand; PAM type: YTN; PAM sequence: TTC
aggtttattttcattagtat

SEQ ID NO: 203824 - DNA, 20 bp, Artificial Sequence
  Description of Artificial Sequence: Synthetic oligonucleotide
  Target: LAMA2; (-) strand; PAM type: YTN; PAM sequence: TTT
caggtttattttcattagta

SEQ ID NO: 203825 - DNA, 20 bp, Artificial Sequence
  Description of Artificial Sequence: Synthetic oligonucleotide
  Target: LAMA2; (-) strand; PAM type: YTN; PAM sequence: TTC
gcgtttcaggtttattttca

SEQ ID NO: 203826 - DNA, 20 bp, Artificial Sequence
  Description of Artificial Sequence: Synthetic oligonucleotide
  Target: LAMA2; (-) strand; PAM type: YTN; PAM sequence: TTG
tccaatgattcgcgtttcag

SEQ ID NO: 203827 - DNA, 20 bp, Artificial Sequence
  Description of Artificial Sequence: Synthetic oligonucleotide
  Target: LAMA2; (-) strand; PAM type: YTN; PAM sequence: TTT
gtccaatgattcgcgtttca

SEQ ID NO: 203828 - DNA, 20 bp, Artificial Sequence
  Description of Artificial Sequence: Synthetic oligonucleotide
  Target: LAMA2; (-) strand; PAM type: YTN; PAM sequence: CTC
acatttgtccaatgattcgc

SEQ ID NO: 203829 - DNA, 20 bp, Artificial Sequence
  Description of Artificial Sequence: Synthetic oligonucleotide
  Target: LAMA2; (-) strand; PAM type: YTN; PAM sequence: TTA
aaggaaaaatctcacatttg

SEQ ID NO: 203830 - DNA, 20 bp, Artificial Sequence
  Description of Artificial Sequence: Synthetic oligonucleotide
  Target: LAMA2; (-) strand; PAM type: YTN; PAM sequence: TTA
atgtataaattaaaggaaaa

SEQ ID NO: 203831 - DNA, 20 bp, Artificial Sequence
  Description of Artificial Sequence: Synthetic oligonucleotide
  Target: LAMA2; (-) strand; PAM type: YTN; PAM sequence: TTA
catcaattaatgtataaatt

SEQ ID NO: 203832 - DNA, 20 bp, Artificial Sequence
  Description of Artificial Sequence: Synthetic oligonucleotide
  Target: LAMA2; (-) strand; PAM type: YTN; PAM sequence: CTT
acatcaattaatgtataaat

SEQ ID NO: 203833 - DNA, 20 bp, Artificial Sequence
  Description of Artificial Sequence: Synthetic oligonucleotide
  Target: LAMA2; (-) strand; PAM type: YTN; PAM sequence: CTA
tcttacatcaattaatgtat

SEQ ID NO: 203834 - DNA, 20 bp, Artificial Sequence
  Description of Artificial Sequence: Synthetic oligonucleotide
  Target: LAMA2; (-) strand; PAM type: YTN; PAM sequence: CTA
aatactatcttacatcaatt

SEQ ID NO: 203835 - DNA, 20 bp, Artificial Sequence
  Description of Artificial Sequence: Synthetic oligonucleotide
  Target: LAMA2; (-) strand; PAM type: YTN; PAM sequence: TTC
taaatactatcttacatcaa

SEQ ID NO: 203836 - DNA, 20 bp, Artificial Sequence
  Description of Artificial Sequence: Synthetic oligonucleotide
  Target: LAMA2; (-) strand; PAM type: YTN; PAM sequence: TTT
ctaaatactatcttacatca

SEQ ID NO: 203837 - DNA, 20 bp, Artificial Sequence
  Description of Artificial Sequence: Synthetic oligonucleotide
  Target: LAMA2; (-) strand; PAM type: YTN; PAM sequence: CTT
tctaaatactatcttacatc

SEQ ID NO: 203838 - DNA, 20 bp, Artificial Sequence
  Description of Artificial Sequence: Synthetic oligonucleotide
  Target: LAMA2; (-) strand; PAM type: YTN; PAM sequence: TTG
aaactttctaaatactatct

SEQ ID NO: 203839 - DNA, 20 bp, Artificial Sequence
  Description of Artificial Sequence: Synthetic oligonucleotide
  Target: LAMA2; (-) strand; PAM type: YTN; PAM sequence: CTG
gaaaggattgaaactttcta

SEQ ID NO: 203840 - DNA, 20 bp, Artificial Sequence
  Description of Artificial Sequence: Synthetic oligonucleotide
  Target: LAMA2; (-) strand; PAM type: YTN; PAM sequence: TTG
taactggaaaggattgaaac

SEQ ID NO: 203841 - DNA, 20 bp, Artificial Sequence
  Description of Artificial Sequence: Synthetic oligonucleotide
  Target: LAMA2; (-) strand; PAM type: YTN; PAM sequence: TTA
caattgtaactggaaaggat

SEQ ID NO: 203842 - DNA, 20 bp, Artificial Sequence
  Description of Artificial Sequence: Synthetic oligonucleotide
  Target: LAMA2; (-) strand; PAM type: YTN; PAM sequence: TTG
aggtaagtgacaattacaat

SEQ ID NO: 203843 - DNA, 20 bp, Artificial Sequence
  Description of Artificial Sequence: Synthetic oligonucleotide
  Target: LAMA2; (-) strand; PAM type: YTN; PAM sequence: TTT
gaggtaagtgacaattacaa

SEQ ID NO: 203844 - DNA, 20 bp, Artificial Sequence
  Description of Artificial Sequence: Synthetic oligonucleotide
  Target: LAMA2; (-) strand; PAM type: YTN; PAM sequence: TTA
gtttgaggtaagtgacaatt

SEQ ID NO: 203845 - DNA, 20 bp, Artificial Sequence
  Description of Artificial Sequence: Synthetic oligonucleotide
  Target: LAMA2; (-) strand; PAM type: YTN; PAM sequence: TTT
agtttgaggtaagtgacaat

SEQ ID NO: 203846 - DNA, 20 bp, Artificial Sequence
  Description of Artificial Sequence: Synthetic oligonucleotide
  Target: LAMA2; (-) strand; PAM type: YTN; PAM sequence: TTG
tttagtttgaggtaagtgac

SEQ ID NO: 203847 - DNA, 20 bp, Artificial Sequence
  Description of Artificial Sequence: Synthetic oligonucleotide
  Target: LAMA2; (-) strand; PAM type: YTN; PAM sequence: TTT
gtttagtttgaggtaagtga

SEQ ID NO: 203848 - DNA, 20 bp, Artificial Sequence
  Description of Artificial Sequence: Synthetic oligonucleotide
  Target: LAMA2; (-) strand; PAM type: YTN; PAM sequence: TTC
accaagtagaaaaatatggg

SEQ ID NO: 203849 - DNA, 20 bp, Artificial Sequence
  Description of Artificial Sequence: Synthetic oligonucleotide
  Target: LAMA2; (-) strand; PAM type: YTN; PAM sequence: CTT
caccaagtagaaaaatatgg

SEQ ID NO: 203850 - DNA, 20 bp, Artificial Sequence
  Description of Artificial Sequence: Synthetic oligonucleotide
  Target: LAMA2; (-) strand; PAM type: YTN; PAM sequence: TTA
gaatgtccttcaccaagtag

SEQ ID NO: 203851 - DNA, 20 bp, Artificial Sequence
  Description of Artificial Sequence: Synthetic oligonucleotide
  Target: LAMA2; (-) strand; PAM type: YTN; PAM sequence: CTA
gatgattagaatgtccttca

SEQ ID NO: 203852 - DNA, 20 bp, Artificial Sequence
  Description of Artificial Sequence: Synthetic oligonucleotide
  Target: LAMA2; (-) strand; PAM type: YTN; PAM sequence: TTA
ggcatctagatgattagaat

SEQ ID NO: 203853 - DNA, 20 bp, Artificial Sequence
  Description of Artificial Sequence: Synthetic oligonucleotide
  Target: LAMA2; (-) strand; PAM type: YTN; PAM sequence: CTT
aggcatctagatgattagaa

SEQ ID NO: 203854 - DNA, 20 bp, Artificial Sequence
  Description of Artificial Sequence: Synthetic oligonucleotide
  Target: LAMA2; (-) strand; PAM type: YTN; PAM sequence: CTG
acttaggcatctagatgatt

SEQ ID NO: 203855 - DNA, 20 bp, Artificial Sequence
  Description of Artificial Sequence: Synthetic oligonucleotide
  Target: LAMA2; (-) strand; PAM type: YTN; PAM sequence: TTC
tgacttaggcatctagatga

SEQ ID NO: 203856 - DNA, 20 bp, Artificial Sequence
  Description of Artificial Sequence: Synthetic oligonucleotide
  Target: LAMA2; (-) strand; PAM type: YTN; PAM sequence: TTT
ctgacttaggcatctagatg

SEQ ID NO: 203857 - DNA, 20 bp, Artificial Sequence
  Description of Artificial Sequence: Synthetic oligonucleotide
  Target: LAMA2; (-) strand; PAM type: YTN; PAM sequence: CTA
ggtttctgacttaggcatct

SEQ ID NO: 203858 - DNA, 20 bp, Artificial Sequence
  Description of Artificial Sequence: Synthetic oligonucleotide
  Target: LAMA2; (-) strand; PAM type: YTN; PAM sequence: CTG
tgaggaacagaaagaatgaa

SEQ ID NO: 203859 - DNA, 20 bp, Artificial Sequence
  Description of Artificial Sequence: Synthetic oligonucleotide
  Target: LAMA2; (-) strand; PAM type: YTN; PAM sequence: TTA
agtgtgactgtgaggaacag

SEQ ID NO: 203860 - DNA, 20 bp, Artificial Sequence
  Description of Artificial Sequence: Synthetic oligonucleotide
  Target: LAMA2; (-) strand; PAM type: YTN; PAM sequence: TTA
attaagtgtgactgtgagga

SEQ ID NO: 203861 - DNA, 20 bp, Artificial Sequence
  Description of Artificial Sequence: Synthetic oligonucleotide
  Target: LAMA2; (-) strand; PAM type: YTN; PAM sequence: TTC
aattaattaagtgtgactgt

SEQ ID NO: 203862 - DNA, 20 bp, Artificial Sequence
  Description of Artificial Sequence: Synthetic oligonucleotide
  Target: LAMA2; (-) strand; PAM type: YTN; PAM sequence: TTA
gggagagaagcagtagggca

SEQ ID NO: 203863 - DNA, 20 bp, Artificial Sequence
  Description of Artificial Sequence: Synthetic oligonucleotide
  Target: LAMA2; (-) strand; PAM type: YTN; PAM sequence: CTG
agttagggagagaagcagta

SEQ ID NO: 203864 - DNA, 20 bp, Artificial Sequence
  Description of Artificial Sequence: Synthetic oligonucleotide
  Target: LAMA2; (-) strand; PAM type: YTN; PAM sequence: TTA
tctgagttagggagagaagc

SEQ ID NO: 203865 - DNA, 20 bp, Artificial Sequence
  Description of Artificial Sequence: Synthetic oligonucleotide
  Target: LAMA2; (-) strand; PAM type: YTN; PAM sequence: TTA
aaataggatagtcgagaaat

SEQ ID NO: 203866 - DNA, 20 bp, Artificial Sequence
  Description of Artificial Sequence: Synthetic oligonucleotide
  Target: LAMA2; (-) strand; PAM type: YTN; PAM sequence: CTT
aaaataggatagtcgagaaa

SEQ ID NO: 203867 - DNA, 20 bp, Artificial Sequence
  Description of Artificial Sequence: Synthetic oligonucleotide
  Target: LAMA2; (-) strand; PAM type: YTN; PAM sequence: CTG
atcttaaaataggatagtcg

SEQ ID NO: 203868 - DNA, 20 bp, Artificial Sequence
  Description of Artificial Sequence: Synthetic oligonucleotide
  Target: LAMA2; (-) strand; PAM type: YTN; PAM sequence: TTG
caaggagacaaaatagcctg

SEQ ID NO: 203869 - DNA, 20 bp, Artificial Sequence
  Description of Artificial Sequence: Synthetic oligonucleotide
  Target: LAMA2; (-) strand; PAM type: YTN; PAM sequence: TTA
tagagagatcattgcaagga

SEQ ID NO: 203870 - DNA, 20 bp, Artificial Sequence
  Description of Artificial Sequence: Synthetic oligonucleotide
  Target: LAMA2; (-) strand; PAM type: YTN; PAM sequence: CTA
ggttatagagagatcattgc

SEQ ID NO: 203871 - DNA, 20 bp, Artificial Sequence
  Description of Artificial Sequence: Synthetic oligonucleotide
  Target: LAMA2; (-) strand; PAM type: YTN; PAM sequence: TTA
ctaggttatagagagatcat

SEQ ID NO: 203872 - DNA, 20 bp, Artificial Sequence
  Description of Artificial Sequence: Synthetic oligonucleotide
  Target: LAMA2; (-) strand; PAM type: YTN; PAM sequence: TTG
atattactaggttatagaga

SEQ ID NO: 203873 - DNA, 20 bp, Artificial Sequence
  Description of Artificial Sequence: Synthetic oligonucleotide
  Target: LAMA2; (-) strand; PAM type: YTN; PAM sequence: CTT
gatattactaggttatagag

SEQ ID NO: 203874 - DNA, 20 bp, Artificial Sequence
  Description of Artificial Sequence: Synthetic oligonucleotide
  Target: LAMA2; (-) strand; PAM type: YTN; PAM sequence: TTA
gggcttgatattactaggtt

SEQ ID NO: 203875 - DNA, 20 bp, Artificial Sequence
  Description of Artificial Sequence: Synthetic oligonucleotide
  Target: LAMA2; (-) strand; PAM type: YTN; PAM sequence: TTC
attagggcttgatattacta

SEQ ID NO: 203876 - DNA, 20 bp, Artificial Sequence
  Description of Artificial Sequence: Synthetic oligonucleotide
  Target: LAMA2; (-) strand; PAM type: YTN; PAM sequence: TTT
cattagggcttgatattact

SEQ ID NO: 203877 - DNA, 20 bp, Artificial Sequence
  Description of Artificial Sequence: Synthetic oligonucleotide
  Target: LAMA2; (-) strand; PAM type: YTN; PAM sequence: TTT
tcattagggcttgatattac

SEQ ID NO: 203878 - DNA, 20 bp, Artificial Sequence
  Description of Artificial Sequence: Synthetic oligonucleotide
  Target: LAMA2; (-) strand; PAM type: YTN; PAM sequence: CTT
ttcattagggcttgatatta

SEQ ID NO: 203879 - DNA, 20 bp, Artificial Sequence
  Description of Artificial Sequence: Synthetic oligonucleotide
  Target: LAMA2; (-) strand; PAM type: YTN; PAM sequence: CTG
ggtgacagaagccgaccaaa

SEQ ID NO: 203880 - DNA, 20 bp, Artificial Sequence
  Description of Artificial Sequence: Synthetic oligonucleotide
  Target: LAMA2; (-) strand; PAM type: YTN; PAM sequence: TTA
tcctgggtgacagaagccga

SEQ ID NO: 203881 - DNA, 20 bp, Artificial Sequence
  Description of Artificial Sequence: Synthetic oligonucleotide
  Target: LAMA2; (-) strand; PAM type: YTN; PAM sequence: TTT
atcctgggtgacagaagccg

SEQ ID NO: 203882 - DNA, 20 bp, Artificial Sequence
  Description of Artificial Sequence: Synthetic oligonucleotide
  Target: LAMA2; (-) strand; PAM type: YTN; PAM sequence: TTC
acgtttatcctgggtgacag

SEQ ID NO: 203883 - DNA, 20 bp, Artificial Sequence
  Description of Artificial Sequence: Synthetic oligonucleotide
  Target: LAMA2; (-) strand; PAM type: YTN; PAM sequence: TTT
cacgtttatcctgggtgaca

SEQ ID NO: 203884 - DNA, 20 bp, Artificial Sequence
  Description of Artificial Sequence: Synthetic oligonucleotide
  Target: LAMA2; (-) strand; PAM type: YTN; PAM sequence: CTC
aggagtttcacgtttatcct

SEQ ID NO: 203885 - DNA, 20 bp, Artificial Sequence
  Description of Artificial Sequence: Synthetic oligonucleotide
  Target: LAMA2; (-) strand; PAM type: YTN; PAM sequence: CTC
tcaggagtttcacgtttatc

SEQ ID NO: 203886 - DNA, 20 bp, Artificial Sequence
  Description of Artificial Sequence: Synthetic oligonucleotide
  Target: LAMA2; (-) strand; PAM type: YTN; PAM sequence: CTG
aaaggaagtagatccaactc

SEQ ID NO: 203887 - DNA, 20 bp, Artificial Sequence
  Description of Artificial Sequence: Synthetic oligonucleotide
  Target: LAMA2; (-) strand; PAM type: YTN; PAM sequence: CTA
gaagtgcaggcaagggtgag

SEQ ID NO: 203888 - DNA, 20 bp, Artificial Sequence
  Description of Artificial Sequence: Synthetic oligonucleotide
  Target: LAMA2; (-) strand; PAM type: YTN; PAM sequence: TTG
agagtggaggctagaagtgc

SEQ ID NO: 203889 - DNA, 20 bp, Artificial Sequence
  Description of Artificial Sequence: Synthetic oligonucleotide
  Target: LAMA2; (-) strand; PAM type: YTN; PAM sequence: TTT
gagagtggaggctagaagtg

SEQ ID NO: 203890 - DNA, 20 bp, Artificial Sequence
  Description of Artificial Sequence: Synthetic oligonucleotide
  Target: LAMA2; (-) strand; PAM type: YTN; PAM sequence: TTT
tgagagtggaggctagaagt

SEQ ID NO: 203891 - DNA, 20 bp, Artificial Sequence
  Description of Artificial Sequence: Synthetic oligonucleotide
  Target: LAMA2; (-) strand; PAM type: YTN; PAM sequence: TTC
aaatgatgtgtgaaagagtt

SEQ ID NO: 203892 - DNA, 20 bp, Artificial Sequence
  Description of Artificial Sequence: Synthetic oligonucleotide
  Target: LAMA2; (-) strand; PAM type: YTN; PAM sequence: CTC
aggttcaaatgatgtgtgaa

SEQ ID NO: 203893 - DNA, 20 bp, Artificial Sequence
  Description of Artificial Sequence: Synthetic oligonucleotide
  Target: LAMA2; (-) strand; PAM type: YTN; PAM sequence: TTA
atgtctcaggttcaaatgat

SEQ ID NO: 203894 - DNA, 20 bp, Artificial Sequence
  Description of Artificial Sequence: Synthetic oligonucleotide
  Target: LAMA2; (-) strand; PAM type: YTN; PAM sequence: TTT
aatgtctcaggttcaaatga

SEQ ID NO: 203895 - DNA, 20 bp, Artificial Sequence
  Description of Artificial Sequence: Synthetic oligonucleotide
  Target: LAMA2; (-) strand; PAM type: YTN; PAM sequence: TTT
taatgtctcaggttcaaatg

SEQ ID NO: 203896 - DNA, 20 bp, Artificial Sequence
  Description of Artificial Sequence: Synthetic oligonucleotide
  Target: LAMA2; (-) strand; PAM type: YTN; PAM sequence: TTT
ttaatgtctcaggttcaaat

SEQ ID NO: 203897 - DNA, 20 bp, Artificial Sequence
  Description of Artificial Sequence: Synthetic oligonucleotide
  Target: LAMA2; (-) strand; PAM type: YTN; PAM sequence: CTG
gaaggcatttttaatgtctc

SEQ ID NO: 203898 - DNA, 20 bp, Artificial Sequence
  Description of Artificial Sequence: Synthetic oligonucleotide
  Target: LAMA2; (-) strand; PAM type: YTN; PAM sequence: CTG
caccaagccctggaaggcat

SEQ ID NO: 203899 - DNA, 20 bp, Artificial Sequence
  Description of Artificial Sequence: Synthetic oligonucleotide
  Target: LAMA2; (-) strand; PAM type: YTN; PAM sequence: TTA
caggtgtgtgccactgcacc

SEQ ID NO: 203900 - DNA, 20 bp, Artificial Sequence
  Description of Artificial Sequence: Synthetic oligonucleotide
  Target: LAMA2; (-) strand; PAM type: YTN; PAM sequence: CTG
ggattacaggtgtgtgccac

SEQ ID NO: 203901 - DNA, 20 bp, Artificial Sequence
  Description of Artificial Sequence: Synthetic oligonucleotide
  Target: LAMA2; (-) strand; PAM type: YTN; PAM sequence: CTC
ccaaagtgctgggattacag

SEQ ID NO: 203902 - DNA, 20 bp, Artificial Sequence
  Description of Artificial Sequence: Synthetic oligonucleotide
  Target: LAMA2; (-) strand; PAM type: YTN; PAM sequence: TTG
gcctcccaaagtgctgggat

SEQ ID NO: 203903 - DNA, 20 bp, Artificial Sequence
  Description of Artificial Sequence: Synthetic oligonucleotide
  Target: LAMA2; (-) strand; PAM type: YTN; PAM sequence: CTT
ggcctcccaaagtgctggga

SEQ ID NO: 203904 - DNA, 20 bp, Artificial Sequence
  Description of Artificial Sequence: Synthetic oligonucleotide
  Target: LAMA2; (-) strand; PAM type: YTN; PAM sequence: CTG
gccttggcctcccaaagtgc

SEQ ID NO: 203905 - DNA, 20 bp, Artificial Sequence
  Description of Artificial Sequence: Synthetic oligonucleotide
  Target: LAMA2; (-) strand; PAM type: YTN; PAM sequence: CTG
ctggccttggcctcccaaag

SEQ ID NO: 203906 - DNA, 20 bp, Artificial Sequence
  Description of Artificial Sequence: Synthetic oligonucleotide
  Target: LAMA2; (-) strand; PAM type: YTN; PAM sequence: CTC
aagtgatctgctggccttgg

SEQ ID NO: 203907 - DNA, 20 bp, Artificial Sequence
  Description of Artificial Sequence: Synthetic oligonucleotide
  Target: LAMA2; (-) strand; PAM type: YTN; PAM sequence: CTG
agctcaagtgatctgctggc

SEQ ID NO: 203908 - DNA, 20 bp, Artificial Sequence
  Description of Artificial Sequence: Synthetic oligonucleotide
  Target: LAMA2; (-) strand; PAM type: YTN; PAM sequence: CTC
ctgagctcaagtgatctgct

SEQ ID NO: 203909 - DNA, 20 bp, Artificial Sequence
  Description of Artificial Sequence: Synthetic oligonucleotide
  Target: LAMA2; (-) strand; PAM type: YTN; PAM sequence: CTC
gaactcctgagctcaagtga

SEQ ID NO: 203910 - DNA, 20 bp, Artificial Sequence
  Description of Artificial Sequence: Synthetic oligonucleotide
  Target: LAMA2; (-) strand; PAM type: YTN; PAM sequence: CTG
gtctcgaactcctgagctca

SEQ ID NO: 203911 - DNA, 20 bp, Artificial Sequence
  Description of Artificial Sequence: Synthetic oligonucleotide
  Target: LAMA2; (-) strand; PAM type: YTN; PAM sequence: TTG
cccaggctggtctcgaactc

SEQ ID NO: 203912 - DNA, 20 bp, Artificial Sequence
  Description of Artificial Sequence: Synthetic oligonucleotide
  Target: LAMA2; (-) strand; PAM type: YTN; PAM sequence: TTC
gcatattgcccaggctggtc

SEQ ID NO: 203913 - DNA, 20 bp, Artificial Sequence
  Description of Artificial Sequence: Synthetic oligonucleotide
  Target: LAMA2; (-) strand; PAM type: YTN; PAM sequence: TTT
cgcatattgcccaggctggt

SEQ ID NO: 203914 - DNA, 20 bp, Artificial Sequence
  Description of Artificial Sequence: Synthetic oligonucleotide
  Target: LAMA2; (-) strand; PAM type: YTN; PAM sequence: TTG
gtagagatggggtttcgcat

SEQ ID NO: 203915 - DNA, 20 bp, Artificial Sequence
  Description of Artificial Sequence: Synthetic oligonucleotide
  Target: LAMA2; (-) strand; PAM type: YTN; PAM sequence: TTT
ggtagagatggggtttcgca

SEQ ID NO: 203916 - DNA, 20 bp, Artificial Sequence
  Description of Artificial Sequence: Synthetic oligonucleotide
  Target: LAMA2; (-) strand; PAM type: YTN; PAM sequence: TTT
tggtagagatggggtttcgc

SEQ ID NO: 203917 - DNA, 20 bp, Artificial Sequence
  Description of Artificial Sequence: Synthetic oligonucleotide
  Target: LAMA2; (-) strand; PAM type: YTN; PAM sequence: TTT
ttggtagagatggggtttcg

SEQ ID NO: 203918 - DNA, 20 bp, Artificial Sequence
  Description of Artificial Sequence: Synthetic oligonucleotide
  Target: LAMA2; (-) strand; PAM type: YTN; PAM sequence: TTT
tttggtagagatggggtttc

SEQ ID NO: 203919 - DNA, 20 bp, Artificial Sequence
  Description of Artificial Sequence: Synthetic oligonucleotide
  Target: LAMA2; (-) strand; PAM type: YTN; PAM sequence: TTT
ttttggtagagatggggttt

SEQ ID NO: 203920 - DNA, 20 bp, Artificial Sequence
  Description of Artificial Sequence: Synthetic oligonucleotide
  Target: LAMA2; (-) strand; PAM type: YTN; PAM sequence: TTT
tttttggtagagatggggtt

SEQ ID NO: 203921 - DNA, 20 bp, Artificial Sequence
  Description of Artificial Sequence: Synthetic oligonucleotide
  Target: LAMA2; (-) strand; PAM type: YTN; PAM sequence: TTT
ttttttggtagagatggggt

SEQ ID NO: 203922 - DNA, 20 bp, Artificial Sequence
  Description of Artificial Sequence: Synthetic oligonucleotide
  Target: LAMA2; (-) strand; PAM type: YTN; PAM sequence: TTT
tttttttggtagagatgggg

SEQ ID NO: 203923 - DNA, 20 bp, Artificial Sequence
  Description of Artificial Sequence: Synthetic oligonucleotide
  Target: LAMA2; (-) strand; PAM type: YTN; PAM sequence: TTT
ttttttttggtagagatggg

SEQ ID NO: 203924 - DNA, 20 bp, Artificial Sequence
  Description of Artificial Sequence: Synthetic oligonucleotide
  Target: LAMA2; (-) strand; PAM type: YTN; PAM sequence: TTT
tttttttttggtagagatgg

SEQ ID NO: 203925 - DNA, 20 bp, Artificial Sequence
  Description of Artificial Sequence: Synthetic oligonucleotide
  Target: LAMA2; (-) strand; PAM type: YTN; PAM sequence: TTT
ttttttttttggtagagatg

SEQ ID NO: 203926 - DNA, 20 bp, Artificial Sequence
  Description of Artificial Sequence: Synthetic oligonucleotide
  Target: LAMA2; (-) strand; PAM type: YTN; PAM sequence: TTT
tttttttttttggtagagat

SEQ ID NO: 203927 - DNA, 20 bp, Artificial Sequence
  Description of Artificial Sequence: Synthetic oligonucleotide
  Target: LAMA2; (-) strand; PAM type: YTN; PAM sequence: TTT
ttttttttttttggtagaga

SEQ ID NO: 203928 - DNA, 20 bp, Artificial Sequence
  Description of Artificial Sequence: Synthetic oligonucleotide
  Target: LAMA2; (-) strand; PAM type: YTN; PAM sequence: TTT
tttttttttttttggtagag

SEQ ID NO: 203929 - DNA, 20 bp, Artificial Sequence
  Description of Artificial Sequence: Synthetic oligonucleotide
  Target: LAMA2; (-) strand; PAM type: YTN; PAM sequence: TTT
ttttttttttttttggtaga

SEQ ID NO: 203930 - DNA, 20 bp, Artificial Sequence
  Description of Artificial Sequence: Synthetic oligonucleotide
  Target: LAMA2; (-) strand; PAM type: YTN; PAM sequence: TTT
tttttttttttttttggtag

SEQ ID NO: 203931 - DNA, 20 bp, Artificial Sequence
  Description of Artificial Sequence: Synthetic oligonucleotide
  Target: LAMA2; (-) strand; PAM type: YTN; PAM sequence: TTT
ttttttttttttttttggta

SEQ ID NO: 203932 - DNA, 20 bp, Artificial Sequence
  Description of Artificial Sequence: Synthetic oligonucleotide
  Target: LAMA2; (-) strand; PAM type: YTN; PAM sequence: TTT
tttttttttttttttttggt

SEQ ID NO: 203933 - DNA, 20 bp, Artificial Sequence
  Description of Artificial Sequence: Synthetic oligonucleotide
  Target: LAMA2; (-) strand; PAM type: YTN; PAM sequence: TTT
ttttttttttttttttttgg

SEQ ID NO: 203934 - DNA, 20 bp, Artificial Sequence
  Description of Artificial Sequence: Synthetic oligonucleotide
  Target: LAMA2; (-) strand; PAM type: YTN; PAM sequence: TTT
tttttttttttttttttttg

SEQ ID NO: 203935 - DNA, 20 bp, Artificial Sequence
  Description of Artificial Sequence: Synthetic oligonucleotide
  Target: LAMA2; (-) strand; PAM type: YTN; PAM sequence: TTT
tttttttttttttttttttt

SEQ ID NO: 203936 - DNA, 20 bp, Artificial Sequence
  Description of Artificial Sequence: Synthetic oligonucleotide
  Target: LAMA2; (-) strand; PAM type: YTN; PAM sequence: CTC
aaccaccaagcccagcaatt

SEQ ID NO: 203937 - DNA, 20 bp, Artificial Sequence
  Description of Artificial Sequence: Synthetic oligonucleotide
  Target: LAMA2; (-) strand; PAM type: YTN; PAM sequence: CTG
ggacgacaggctcaaccacc

SEQ ID NO: 203938 - DNA, 20 bp, Artificial Sequence
  Description of Artificial Sequence: Synthetic oligonucleotide
  Target: LAMA2; (-) strand; PAM type: YTN; PAM sequence: CTG
agtagctgggacgacaggct

SEQ ID NO: 203939 - DNA, 20 bp, Artificial Sequence
  Description of Artificial Sequence: Synthetic oligonucleotide
  Target: LAMA2; (-) strand; PAM type: YTN; PAM sequence: CTC
ctgagtagctgggacgacag

SEQ ID NO: 203940 - DNA, 20 bp, Artificial Sequence
  Description of Artificial Sequence: Synthetic oligonucleotide
  Target: LAMA2; (-) strand; PAM type: YTN; PAM sequence: CTC
agcctcctgagtagctggga

SEQ ID NO: 203941 - DNA, 20 bp, Artificial Sequence
  Description of Artificial Sequence: Synthetic oligonucleotide
  Target: LAMA2; (-) strand; PAM type: YTN; PAM sequence: CTC
ccacctcagcctcctgagta

SEQ ID NO: 203942 - DNA, 20 bp, Artificial Sequence
  Description of Artificial Sequence: Synthetic oligonucleotide
  Target: LAMA2; (-) strand; PAM type: YTN; PAM sequence: CTC
aagggatcctcccacctcag

SEQ ID NO: 203943 - DNA, 20 bp, Artificial Sequence
  Description of Artificial Sequence: Synthetic oligonucleotide
  Target: LAMA2; (-) strand; PAM type: YTN; PAM sequence: CTG
aactcaagggatcctcccac

SEQ ID NO: 203944 - DNA, 20 bp, Artificial Sequence
  Description of Artificial Sequence: Synthetic oligonucleotide
  Target: LAMA2; (-) strand; PAM type: YTN; PAM sequence: TTC
tgaactcaagggatcctccc

SEQ ID NO: 203945 - DNA, 20 bp, Artificial Sequence
  Description of Artificial Sequence: Synthetic oligonucleotide
  Target: LAMA2; (-) strand; PAM type: YTN; PAM sequence: CTT
ctgaactcaagggatcctcc

SEQ ID NO: 203946 - DNA, 20 bp, Artificial Sequence
  Description of Artificial Sequence: Synthetic oligonucleotide
  Target: LAMA2; (-) strand; PAM type: YTN; PAM sequence: TTG
aacttctgaactcaagggat

SEQ ID NO: 203947 - DNA, 20 bp, Artificial Sequence
  Description of Artificial Sequence: Synthetic oligonucleotide
  Target: LAMA2; (-) strand; PAM type: YTN; PAM sequence: CTT
gaacttctgaactcaaggga

SEQ ID NO: 203948 - DNA, 20 bp, Artificial Sequence
  Description of Artificial Sequence: Synthetic oligonucleotide
  Target: LAMA2; (-) strand; PAM type: YTN; PAM sequence: CTG
cagccttgaacttctgaact

SEQ ID NO: 203949 - DNA, 20 bp, Artificial Sequence
  Description of Artificial Sequence: Synthetic oligonucleotide
  Target: LAMA2; (-) strand; PAM type: YTN; PAM sequence: CTC
actgcagccttgaacttctg

SEQ ID NO: 203950 - DNA, 20 bp, Artificial Sequence
  Description of Artificial Sequence: Synthetic oligonucleotide
  Target: LAMA2; (-) strand; PAM type: YTN; PAM sequence: CTG
ctcactgcagccttgaactt

SEQ ID NO: 203951 - DNA, 20 bp, Artificial Sequence
  Description of Artificial Sequence: Synthetic oligonucleotide
  Target: LAMA2; (-) strand; PAM type: YTN; PAM sequence: CTC
tgctcactgcagccttgaac

SEQ ID NO: 203952 - DNA, 20 bp, Artificial Sequence
  Description of Artificial Sequence: Synthetic oligonucleotide
  Target: LAMA2; (-) strand; PAM type: YTN; PAM sequence: CTC
aatctctgctcactgcagcc

SEQ ID NO: 203953 - DNA, 20 bp, Artificial Sequence
  Description of Artificial Sequence: Synthetic oligonucleotide
  Target: LAMA2; (-) strand; PAM type: YTN; PAM sequence: CTG
gagtgcagtggctcaatctc

SEQ ID NO: 203954 - DNA, 20 bp, Artificial Sequence
  Description of Artificial Sequence: Synthetic oligonucleotide
  Target: LAMA2; (-) strand; PAM type: YTN; PAM sequence: CTA
tgctggagtgcagtggctca

SEQ ID NO: 203955 - DNA, 20 bp, Artificial Sequence
  Description of Artificial Sequence: Synthetic oligonucleotide
  Target: LAMA2; (-) strand; PAM type: YTN; PAM sequence: CTG
tcacctatgctggagtgcag

SEQ ID NO: 203956 - DNA, 20 bp, Artificial Sequence
  Description of Artificial Sequence: Synthetic oligonucleotide
  Target: LAMA2; (-) strand; PAM type: YTN; PAM sequence: CTC
tgtcacctatgctggagtgc

SEQ ID NO: 203957 - DNA, 20 bp, Artificial Sequence
  Description of Artificial Sequence: Synthetic oligonucleotide
  Target: LAMA2; (-) strand; PAM type: YTN; PAM sequence: CTG
gctctgtcacctatgctgga

SEQ ID NO: 203958 - DNA, 20 bp, Artificial Sequence
  Description of Artificial Sequence: Synthetic oligonucleotide
  Target: LAMA2; (-) strand; PAM type: YTN; PAM sequence: CTC
tggctctgtcacctatgctg

SEQ ID NO: 203959 - DNA, 20 bp, Artificial Sequence
  Description of Artificial Sequence: Synthetic oligonucleotide
  Target: LAMA2; (-) strand; PAM type: YTN; PAM sequence: TTG
agacaggctctggctctgtc

SEQ ID NO: 203960 - DNA, 20 bp, Artificial Sequence
  Description of Artificial Sequence: Synthetic oligonucleotide
  Target: LAMA2; (-) strand; PAM type: YTN; PAM sequence: TTT
gagacaggctctggctctgt

SEQ ID NO: 203961 - DNA, 20 bp, Artificial Sequence
  Description of Artificial Sequence: Synthetic oligonucleotide
  Target: LAMA2; (-) strand; PAM type: YTN; PAM sequence: TTT
tgagacaggctctggctctg

SEQ ID NO: 203962 - DNA, 20 bp, Artificial Sequence
  Description of Artificial Sequence: Synthetic oligonucleotide
  Target: LAMA2; (-) strand; PAM type: YTN; PAM sequence: TTT
ttgagacaggctctggctct

SEQ ID NO: 203963 - DNA, 20 bp, Artificial Sequence
  Description of Artificial Sequence: Synthetic oligonucleotide
  Target: LAMA2; (-) strand; PAM type: YTN; PAM sequence: CTT
tttgagacaggctctggctc

SEQ ID NO: 203964 - DNA, 20 bp, Artificial Sequence
  Description of Artificial Sequence: Synthetic oligonucleotide
  Target: LAMA2; (-) strand; PAM type: YTN; PAM sequence: TTC
tttttgagacaggctctggc

SEQ ID NO: 203965 - DNA, 20 bp, Artificial Sequence
  Description of Artificial Sequence: Synthetic oligonucleotide
  Target: LAMA2; (-) strand; PAM type: YTN; PAM sequence: TTT
ctttttgagacaggctctgg

SEQ ID NO: 203966 - DNA, 20 bp, Artificial Sequence
  Description of Artificial Sequence: Synthetic oligonucleotide
  Target: LAMA2; (-) strand; PAM type: YTN; PAM sequence: TTT
tctttttgagacaggctctg

SEQ ID NO: 203967 - DNA, 20 bp, Artificial Sequence
  Description of Artificial Sequence: Synthetic oligonucleotide
  Target: LAMA2; (-) strand; PAM type: YTN; PAM sequence: TTA
ttttctttttgagacaggct

SEQ ID NO: 203968 - DNA, 20 bp, Artificial Sequence
  Description of Artificial Sequence: Synthetic oligonucleotide
  Target: LAMA2; (-) strand; PAM type: YTN; PAM sequence: TTA
ttattttctttttgagacag

SEQ ID NO: 203969 - DNA, 20 bp, Artificial Sequence
  Description of Artificial Sequence: Synthetic oligonucleotide
  Target: LAMA2; (-) strand; PAM type: YTN; PAM sequence: TTA
ttattattttctttttgaga

SEQ ID NO: 203970 - DNA, 20 bp, Artificial Sequence
  Description of Artificial Sequence: Synthetic oligonucleotide
  Target: LAMA2; (-) strand; PAM type: YTN; PAM sequence: TTA
ttattattattttctttttg

SEQ ID NO: 203971 - DNA, 20 bp, Artificial Sequence
  Description of Artificial Sequence: Synthetic oligonucleotide
  Target: LAMA2; (-) strand; PAM type: YTN; PAM sequence: CTG
gaaggcagtattattattat

SEQ ID NO: 203972 - DNA, 20 bp, Artificial Sequence
  Description of Artificial Sequence: Synthetic oligonucleotide
  Target: LAMA2; (-) strand; PAM type: YTN; PAM sequence: TTG
gaggaactggaaggcagtat

SEQ ID NO: 203973 - DNA, 20 bp, Artificial Sequence
  Description of Artificial Sequence: Synthetic oligonucleotide
  Target: LAMA2; (-) strand; PAM type: YTN; PAM sequence: TTT
ggaggaactggaaggcagta

SEQ ID NO: 203974 - DNA, 20 bp, Artificial Sequence
  Description of Artificial Sequence: Synthetic oligonucleotide
  Target: LAMA2; (-) strand; PAM type: YTN; PAM sequence: TTT
tggaggaactggaaggcagt

SEQ ID NO: 203975 - DNA, 20 bp, Artificial Sequence
  Description of Artificial Sequence: Synthetic oligonucleotide
  Target: LAMA2; (-) strand; PAM type: YTN; PAM sequence: TTA
ttttggaggaactggaaggc

SEQ ID NO: 203976 - DNA, 20 bp, Artificial Sequence
  Description of Artificial Sequence: Synthetic oligonucleotide
  Target: LAMA2; (-) strand; PAM type: YTN; PAM sequence: TTA
ccaaggaaagacatgttatt

SEQ ID NO: 203977 - DNA, 20 bp, Artificial Sequence
  Description of Artificial Sequence: Synthetic oligonucleotide
  Target: LAMA2; (-) strand; PAM type: YTN; PAM sequence: TTT
accaaggaaagacatgttat

SEQ ID NO: 203978 - DNA, 20 bp, Artificial Sequence
  Description of Artificial Sequence: Synthetic oligonucleotide
  Target: LAMA2; (-) strand; PAM type: YTN; PAM sequence: CTG
aaagcagtaagaagagtatt

SEQ ID NO: 203979 - DNA, 20 bp, Artificial Sequence
  Description of Artificial Sequence: Synthetic oligonucleotide
  Target: LAMA2; (-) strand; PAM type: YTN; PAM sequence: CTG
ctgaaagcagtaagaagagt

SEQ ID NO: 203980 - DNA, 20 bp, Artificial Sequence
  Description of Artificial Sequence: Synthetic oligonucleotide
  Target: LAMA2; (-) strand; PAM type: YTN; PAM sequence: TTG
aatgtctgctgaaagcagta

SEQ ID NO: 203981 - DNA, 20 bp, Artificial Sequence
  Description of Artificial Sequence: Synthetic oligonucleotide
  Target: LAMA2; (-) strand; PAM type: YTN; PAM sequence: CTG
tgggttgaatgtctgctgaa

SEQ ID NO: 203982 - DNA, 20 bp, Artificial Sequence
  Description of Artificial Sequence: Synthetic oligonucleotide
  Target: LAMA2; (-) strand; PAM type: YTN; PAM sequence: CTG
ggacctgtgggttgaatgtc

SEQ ID NO: 203983 - DNA, 20 bp, Artificial Sequence
  Description of Artificial Sequence: Synthetic oligonucleotide
  Target: LAMA2; (-) strand; PAM type: YTN; PAM sequence: TTA
agagatgagaatgagtcaac

SEQ ID NO: 203984 - DNA, 20 bp, Artificial Sequence
  Description of Artificial Sequence: Synthetic oligonucleotide
  Target: LAMA2; (-) strand; PAM type: YTN; PAM sequence: CTA
gcaattaagagatgagaatg

SEQ ID NO: 203985 - DNA, 20 bp, Artificial Sequence
  Description of Artificial Sequence: Synthetic oligonucleotide
  Target: LAMA2; (-) strand; PAM type: YTN; PAM sequence: CTG
gctagcaattaagagatgag

SEQ ID NO: 203986 - DNA, 20 bp, Artificial Sequence
  Description of Artificial Sequence: Synthetic oligonucleotide
  Target: LAMA2; (-) strand; PAM type: YTN; PAM sequence: TTC
ccaaaggcctggctagcaat

SEQ ID NO: 203987 - DNA, 20 bp, Artificial Sequence
  Description of Artificial Sequence: Synthetic oligonucleotide
  Target: LAMA2; (-) strand; PAM type: YTN; PAM sequence: CTT
cccaaaggcctggctagcaa

SEQ ID NO: 203988 - DNA, 20 bp, Artificial Sequence
  Description of Artificial Sequence: Synthetic oligonucleotide
  Target: LAMA2; (-) strand; PAM type: YTN; PAM sequence: CTA
gagaacggcttcccaaaggc

SEQ ID NO: 203989 - DNA, 20 bp, Artificial Sequence
  Description of Artificial Sequence: Synthetic oligonucleotide
  Target: LAMA2; (-) strand; PAM type: YTN; PAM sequence: CTG
agtaggaactagagaacggc

SEQ ID NO: 203990 - DNA, 20 bp, Artificial Sequence
  Description of Artificial Sequence: Synthetic oligonucleotide
  Target: LAMA2; (-) strand; PAM type: YTN; PAM sequence: CTA
actgagtaggaactagagaa

SEQ ID NO: 203991 - DNA, 20 bp, Artificial Sequence
  Description of Artificial Sequence: Synthetic oligonucleotide
  Target: LAMA2; (-) strand; PAM type: YTN; PAM sequence: TTG
ggtgcctaactgagtaggaa

SEQ ID NO: 203992 - DNA, 20 bp, Artificial Sequence
  Description of Artificial Sequence: Synthetic oligonucleotide
  Target: LAMA2; (-) strand; PAM type: YTN; PAM sequence: CTA
tgagagcagagaggttgggt

SEQ ID NO: 203993 - DNA, 20 bp, Artificial Sequence
  Description of Artificial Sequence: Synthetic oligonucleotide
  Target: LAMA2; (-) strand; PAM type: YTN; PAM sequence: CTA
tgtgctatgagagcagagag

SEQ ID NO: 203994 - DNA, 20 bp, Artificial Sequence
  Description of Artificial Sequence: Synthetic oligonucleotide
  Target: LAMA2; (-) strand; PAM type: YTN; PAM sequence: TTA
gagggacagcctatgtgcta

SEQ ID NO: 203995 - DNA, 20 bp, Artificial Sequence
  Description of Artificial Sequence: Synthetic oligonucleotide
  Target: LAMA2; (-) strand; PAM type: YTN; PAM sequence: CTA
tgttagagggacagcctatg

SEQ ID NO: 203996 - DNA, 20 bp, Artificial Sequence
  Description of Artificial Sequence: Synthetic oligonucleotide
  Target: LAMA2; (-) strand; PAM type: YTN; PAM sequence: CTC
atgctatgttagagggacag

SEQ ID NO: 203997 - DNA, 20 bp, Artificial Sequence
  Description of Artificial Sequence: Synthetic oligonucleotide
  Target: LAMA2; (-) strand; PAM type: YTN; PAM sequence: TTG
gaaagcgtgtgactcatgct

SEQ ID NO: 203998 - DNA, 20 bp, Artificial Sequence
  Description of Artificial Sequence: Synthetic oligonucleotide
  Target: LAMA2; (-) strand; PAM type: YTN; PAM sequence: TTT
ggaaagcgtgtgactcatgc

SEQ ID NO: 203999 - DNA, 20 bp, Artificial Sequence
  Description of Artificial Sequence: Synthetic oligonucleotide
  Target: LAMA2; (-) strand; PAM type: YTN; PAM sequence: CTC
aaggagcaatgcagtaaaga

SEQ ID NO: 204000 - DNA, 20 bp, Artificial Sequence
  Description of Artificial Sequence: Synthetic oligonucleotide
  Target: LAMA2; (-) strand; PAM type: YTN; PAM sequence: CTA
cctcaaggagcaatgcagta

SEQ ID NO: 204001 - DNA, 20 bp, Artificial Sequence
  Description of Artificial Sequence: Synthetic oligonucleotide
  Target: LAMA2; (-) strand; PAM type: YTN; PAM sequence: TTG
ctacctcaaggagcaatgca

SEQ ID NO: 204002 - DNA, 20 bp, Artificial Sequence
  Description of Artificial Sequence: Synthetic oligonucleotide
  Target: LAMA2; (-) strand; PAM type: YTN; PAM sequence: CTT
gctacctcaaggagcaatgc

SEQ ID NO: 204003 - DNA, 20 bp, Artificial Sequence
  Description of Artificial Sequence: Synthetic oligonucleotide
  Target: LAMA2; (-) strand; PAM type: YTN; PAM sequence: CTA
ataaagaagacatccttgct

SEQ ID NO: 204004 - DNA, 20 bp, Artificial Sequence
  Description of Artificial Sequence: Synthetic oligonucleotide
  Target: LAMA2; (-) strand; PAM type: YTN; PAM sequence: CTC
agtataaaaaagctaataaa

SEQ ID NO: 204005 - DNA, 20 bp, Artificial Sequence
  Description of Artificial Sequence: Synthetic oligonucleotide
  Target: LAMA2; (-) strand; PAM type: YTN; PAM sequence: TTC
tcagtataaaaaagctaata

SEQ ID NO: 204006 - DNA, 20 bp, Artificial Sequence
  Description of Artificial Sequence: Synthetic oligonucleotide
  Target: LAMA2; (-) strand; PAM type: YTN; PAM sequence: TTT
ctcagtataaaaaagctaat

SEQ ID NO: 204007 - DNA, 20 bp, Artificial Sequence
  Description of Artificial Sequence: Synthetic oligonucleotide
  Target: LAMA2; (-) strand; PAM type: YTN; PAM sequence: TTT
tctcagtataaaaaagctaa

SEQ ID NO: 204008 - DNA, 20 bp, Artificial Sequence
  Description of Artificial Sequence: Synthetic oligonucleotide
  Target: LAMA2; (-) strand; PAM type: YTN; PAM sequence: TTA
aaattttctcagtataaaaa

SEQ ID NO: 204009 - DNA, 20 bp, Artificial Sequence
  Description of Artificial Sequence: Synthetic oligonucleotide
  Target: LAMA2; (-) strand; PAM type: YTN; PAM sequence: TTT
aaaattttctcagtataaaa

SEQ ID NO: 204010 - DNA, 20 bp, Artificial Sequence
  Description of Artificial Sequence: Synthetic oligonucleotide
  Target: LAMA2; (-) strand; PAM type: YTN; PAM sequence: TTT
taaaattttctcagtataaa

SEQ ID NO: 204011 - DNA, 20 bp, Artificial Sequence
  Description of Artificial Sequence: Synthetic oligonucleotide
  Target: LAMA2; (-) strand; PAM type: YTN; PAM sequence: CTG
tattttaaaattttctcagt

SEQ ID NO: 204012 - DNA, 20 bp, Artificial Sequence
  Description of Artificial Sequence: Synthetic oligonucleotide
  Target: LAMA2; (-) strand; PAM type: YTN; PAM sequence: TTC
ctgtattttaaaattttctc

SEQ ID NO: 204013 - DNA, 20 bp, Artificial Sequence
  Description of Artificial Sequence: Synthetic oligonucleotide
  Target: LAMA2; (-) strand; PAM type: YTN; PAM sequence: TTT
cctgtattttaaaattttct

SEQ ID NO: 204014 - DNA, 20 bp, Artificial Sequence
  Description of Artificial Sequence: Synthetic oligonucleotide
  Target: LAMA2; (-) strand; PAM type: YTN; PAM sequence: TTT
tcctgtattttaaaattttc

SEQ ID NO: 204015 - DNA, 20 bp, Artificial Sequence
  Description of Artificial Sequence: Synthetic oligonucleotide
  Target: LAMA2; (-) strand; PAM type: YTN; PAM sequence: CTT
ttcctgtattttaaaatttt

SEQ ID NO: 204016 - DNA, 20 bp, Artificial Sequence
  Description of Artificial Sequence: Synthetic oligonucleotide
  Target: LAMA2; (-) strand; PAM type: YTN; PAM sequence: TTC
ttttcctgtattttaaaatt

SEQ ID NO: 204017 - DNA, 20 bp, Artificial Sequence
  Description of Artificial Sequence: Synthetic oligonucleotide
  Target: LAMA2; (-) strand; PAM type: YTN; PAM sequence: TTT
cttttcctgtattttaaaat

SEQ ID NO: 204018 - DNA, 20 bp, Artificial Sequence
  Description of Artificial Sequence: Synthetic oligonucleotide
  Target: LAMA2; (-) strand; PAM type: YTN; PAM sequence: TTA
tcatgtttcttttcctgtat

SEQ ID NO: 204019 - DNA, 20 bp, Artificial Sequence
  Description of Artificial Sequence: Synthetic oligonucleotide
  Target: LAMA2; (-) strand; PAM type: YTN; PAM sequence: TTT
atcatgtttcttttcctgta

SEQ ID NO: 204020 - DNA, 20 bp, Artificial Sequence
  Description of Artificial Sequence: Synthetic oligonucleotide
  Target: LAMA2; (-) strand; PAM type: YTN; PAM sequence: TTT
tatcatgtttcttttcctgt

SEQ ID NO: 204021 - DNA, 20 bp, Artificial Sequence
  Description of Artificial Sequence: Synthetic oligonucleotide
  Target: LAMA2; (-) strand; PAM type: YTN; PAM sequence: TTA
ggaatgtgggtatatatttt

SEQ ID NO: 204022 - DNA, 20 bp, Artificial Sequence
  Description of Artificial Sequence: Synthetic oligonucleotide
  Target: LAMA2; (-) strand; PAM type: YTN; PAM sequence: CTA
tgagttaggaatgtgggtat

SEQ ID NO: 204023 - DNA, 20 bp, Artificial Sequence
  Description of Artificial Sequence: Synthetic oligonucleotide
  Target: LAMA2; (-) strand; PAM type: YTN; PAM sequence: TTC
tatgagttaggaatgtgggt

SEQ ID NO: 204024 - DNA, 20 bp, Artificial Sequence
  Description of Artificial Sequence: Synthetic oligonucleotide
  Target: LAMA2; (-) strand; PAM type: YTN; PAM sequence: TTT
ctatgagttaggaatgtggg

SEQ ID NO: 204025 - DNA, 20 bp, Artificial Sequence
  Description of Artificial Sequence: Synthetic oligonucleotide
  Target: LAMA2; (-) strand; PAM type: YTN; PAM sequence: TTA
tttctatgagttaggaatgt

SEQ ID NO: 204026 - DNA, 20 bp, Artificial Sequence
  Description of Artificial Sequence: Synthetic oligonucleotide
  Target: LAMA2; (-) strand; PAM type: YTN; PAM sequence: CTA
gtaagaaaagaaaacatgac

SEQ ID NO: 204027 - DNA, 20 bp, Artificial Sequence
  Description of Artificial Sequence: Synthetic oligonucleotide
  Target: LAMA2; (-) strand; PAM type: YTN; PAM sequence: CTC
tagtaagaaaagaaaacatg

SEQ ID NO: 204028 - DNA, 20 bp, Artificial Sequence
  Description of Artificial Sequence: Synthetic oligonucleotide
  Target: LAMA2; (-) strand; PAM type: YTN; PAM sequence: TTC
tctagtaagaaaagaaaaca

SEQ ID NO: 204029 - DNA, 20 bp, Artificial Sequence
  Description of Artificial Sequence: Synthetic oligonucleotide
  Target: LAMA2; (-) strand; PAM type: YTN; PAM sequence: TTT
ctctagtaagaaaagaaaac

SEQ ID NO: 204030 - DNA, 20 bp, Artificial Sequence
  Description of Artificial Sequence: Synthetic oligonucleotide
  Target: LAMA2; (-) strand; PAM type: YTN; PAM sequence: CTT
tctctagtaagaaaagaaaa

SEQ ID NO: 204031 - DNA, 20 bp, Artificial Sequence
  Description of Artificial Sequence: Synthetic oligonucleotide
  Target: LAMA2; (-) strand; PAM type: YTN; PAM sequence: TTC
tttctctagtaagaaaagaa

SEQ ID NO: 204032 - DNA, 20 bp, Artificial Sequence
  Description of Artificial Sequence: Synthetic oligonucleotide
  Target: LAMA2; (-) strand; PAM type: YTN; PAM sequence: TTT
ctttctctagtaagaaaaga

SEQ ID NO: 204033 - DNA, 20 bp, Artificial Sequence
  Description of Artificial Sequence: Synthetic oligonucleotide
  Target: LAMA2; (-) strand; PAM type: YTN; PAM sequence: TTT
tctttctctagtaagaaaag

SEQ ID NO: 204034 - DNA, 20 bp, Artificial Sequence
  Description of Artificial Sequence: Synthetic oligonucleotide
  Target: LAMA2; (-) strand; PAM type: YTN; PAM sequence: CTC
attttctttctctagtaaga

SEQ ID NO: 204035 - DNA, 20 bp, Artificial Sequence
  Description of Artificial Sequence: Synthetic oligonucleotide
  Target: LAMA2; (-) strand; PAM type: YTN; PAM sequence: TTA
tctcattttctttctctagt

SEQ ID NO: 204036 - DNA, 20 bp, Artificial Sequence
  Description of Artificial Sequence: Synthetic oligonucleotide
  Target: LAMA2; (-) strand; PAM type: YTN; PAM sequence: TTT
atctcattttctttctctag

SEQ ID NO: 204037 - DNA, 20 bp, Artificial Sequence
  Description of Artificial Sequence: Synthetic oligonucleotide
  Target: LAMA2; (-) strand; PAM type: YTN; PAM sequence: TTT
tatctcattttctttctcta

SEQ ID NO: 204038 - DNA, 20 bp, Artificial Sequence
  Description of Artificial Sequence: Synthetic oligonucleotide
  Target: LAMA2; (-) strand; PAM type: YTN; PAM sequence: TTA
gttttatctcattttctttc

SEQ ID NO: 204039 - DNA, 20 bp, Artificial Sequence
  Description of Artificial Sequence: Synthetic oligonucleotide
  Target: LAMA2; (-) strand; PAM type: YTN; PAM sequence: CTA
agacaggcagaaaagtagga

SEQ ID NO: 204040 - DNA, 20 bp, Artificial Sequence
  Description of Artificial Sequence: Synthetic oligonucleotide
  Target: LAMA2; (-) strand; PAM type: YTN; PAM sequence: CTC
taagacaggcagaaaagtag

SEQ ID NO: 204041 - DNA, 20 bp, Artificial Sequence
  Description of Artificial Sequence: Synthetic oligonucleotide
  Target: LAMA2; (-) strand; PAM type: YTN; PAM sequence: TTG
cctctaagacaggcagaaaa

SEQ ID NO: 204042 - DNA, 20 bp, Artificial Sequence
  Description of Artificial Sequence: Synthetic oligonucleotide
  Target: LAMA2; (-) strand; PAM type: YTN; PAM sequence: TTT
gcctctaagacaggcagaaa

SEQ ID NO: 204043 - DNA, 20 bp, Artificial Sequence
  Description of Artificial Sequence: Synthetic oligonucleotide
  Target: LAMA2; (-) strand; PAM type: YTN; PAM sequence: TTG
gtgtttgcctctaagacagg

SEQ ID NO: 204044 - DNA, 20 bp, Artificial Sequence
  Description of Artificial Sequence: Synthetic oligonucleotide
  Target: LAMA2; (-) strand; PAM type: YTN; PAM sequence: CTG
tgttggtgtttgcctctaag

SEQ ID NO: 204045 - DNA, 20 bp, Artificial Sequence
  Description of Artificial Sequence: Synthetic oligonucleotide
  Target: LAMA2; (-) strand; PAM type: YTN; PAM sequence: TTG
acaacaaacctgtgttggtg

SEQ ID NO: 204046 - DNA, 20 bp, Artificial Sequence
  Description of Artificial Sequence: Synthetic oligonucleotide
  Target: LAMA2; (-) strand; PAM type: YTN; PAM sequence: TTA
atgggaaggaaattgacaac

SEQ ID NO: 204047 - DNA, 20 bp, Artificial Sequence
  Description of Artificial Sequence: Synthetic oligonucleotide
  Target: LAMA2; (-) strand; PAM type: YTN; PAM sequence: TTT
aatgggaaggaaattgacaa

SEQ ID NO: 204048 - DNA, 20 bp, Artificial Sequence
  Description of Artificial Sequence: Synthetic oligonucleotide
  Target: LAMA2; (-) strand; PAM type: YTN; PAM sequence: TTT
taatgggaaggaaattgaca

SEQ ID NO: 204049 - DNA, 20 bp, Artificial Sequence
  Description of Artificial Sequence: Synthetic oligonucleotide
  Target: LAMA2; (-) strand; PAM type: YTN; PAM sequence: TTT
ttaatgggaaggaaattgac

SEQ ID NO: 204050 - DNA, 20 bp, Artificial Sequence
  Description of Artificial Sequence: Synthetic oligonucleotide
  Target: LAMA2; (-) strand; PAM type: YTN; PAM sequence: CTA
tagatacacagtaggtatgt

SEQ ID NO: 204051 - DNA, 20 bp, Artificial Sequence
  Description of Artificial Sequence: Synthetic oligonucleotide
  Target: LAMA2; (-) strand; PAM type: YTN; PAM sequence: TTG
gctatagatacacagtaggt

SEQ ID NO: 204052 - DNA, 20 bp, Artificial Sequence
  Description of Artificial Sequence: Synthetic oligonucleotide
  Target: LAMA2; (-) strand; PAM type: YTN; PAM sequence: CTG
ttggctatagatacacagta

SEQ ID NO: 204053 - DNA, 20 bp, Artificial Sequence
  Description of Artificial Sequence: Synthetic oligonucleotide
  Target: LAMA2; (-) strand; PAM type: YTN; PAM sequence: TTG
gaaaaacgcaaacaccacat

SEQ ID NO: 204054 - DNA, 20 bp, Artificial Sequence
  Description of Artificial Sequence: Synthetic oligonucleotide
  Target: LAMA2; (-) strand; PAM type: YTN; PAM sequence: CTA
aaattggaaaaacgcaaaca

SEQ ID NO: 204055 - DNA, 20 bp, Artificial Sequence
  Description of Artificial Sequence: Synthetic oligonucleotide
  Target: LAMA2; (-) strand; PAM type: YTN; PAM sequence: TTC
taaaattggaaaaacgcaaa

SEQ ID NO: 204056 - DNA, 20 bp, Artificial Sequence
  Description of Artificial Sequence: Synthetic oligonucleotide
  Target: LAMA2; (-) strand; PAM type: YTN; PAM sequence: TTT
ctaaaattggaaaaacgcaa

SEQ ID NO: 204057 - DNA, 20 bp, Artificial Sequence
  Description of Artificial Sequence: Synthetic oligonucleotide
  Target: LAMA2; (-) strand; PAM type: YTN; PAM sequence: TTA
agaaaggtaggaaaccattt

SEQ ID NO: 204058 - DNA, 20 bp, Artificial Sequence
  Description of Artificial Sequence: Synthetic oligonucleotide
  Target: LAMA2; (-) strand; PAM type: YTN; PAM sequence: TTG
tcagaagtcgtaggttaaga

SEQ ID NO: 204059 - DNA, 20 bp, Artificial Sequence
  Description of Artificial Sequence: Synthetic oligonucleotide
  Target: LAMA2; (-) strand; PAM type: YTN; PAM sequence: TTG
aaataaaattgtcagaagtc

SEQ ID NO: 204060 - DNA, 20 bp, Artificial Sequence
  Description of Artificial Sequence: Synthetic oligonucleotide
  Target: LAMA2; (-) strand; PAM type: YTN; PAM sequence: TTT
gaaataaaattgtcagaagt

SEQ ID NO: 204061 - DNA, 20 bp, Artificial Sequence
  Description of Artificial Sequence: Synthetic oligonucleotide
  Target: LAMA2; (-) strand; PAM type: YTN; PAM sequence: TTT
tgaaataaaattgtcagaag

SEQ ID NO: 204062 - DNA, 20 bp, Artificial Sequence
  Description of Artificial Sequence: Synthetic oligonucleotide
  Target: LAMA2; (-) strand; PAM type: YTN; PAM sequence: TTG
gcataattttgaaataaaat

SEQ ID NO: 204063 - DNA, 20 bp, Artificial Sequence
  Description of Artificial Sequence: Synthetic oligonucleotide
  Target: LAMA2; (-) strand; PAM type: YTN; PAM sequence: CTA
tacatattggcataattttg

SEQ ID NO: 204064 - DNA, 20 bp, Artificial Sequence
  Description of Artificial Sequence: Synthetic oligonucleotide
  Target: LAMA2; (-) strand; PAM type: YTN; PAM sequence: TTG
agatctatacatattggcat

SEQ ID NO: 204065 - DNA, 20 bp, Artificial Sequence
  Description of Artificial Sequence: Synthetic oligonucleotide
  Target: LAMA2; (-) strand; PAM type: YTN; PAM sequence: TTT
gagatctatacatattggca

SEQ ID NO: 204066 - DNA, 20 bp, Artificial Sequence
  Description of Artificial Sequence: Synthetic oligonucleotide
  Target: LAMA2; (-) strand; PAM type: YTN; PAM sequence: TTT
tgagatctatacatattggc

SEQ ID NO: 204067 - DNA, 20 bp, Artificial Sequence
  Description of Artificial Sequence: Synthetic oligonucleotide
  Target: LAMA2; (-) strand; PAM type: YTN; PAM sequence: TTT
ttgagatctatacatattgg

SEQ ID NO: 204068 - DNA, 20 bp, Artificial Sequence
  Description of Artificial Sequence: Synthetic oligonucleotide
  Target: LAMA2; (-) strand; PAM type: YTN; PAM sequence: TTA
tgtttttgagatctatacat

SEQ ID NO: 204069 - DNA, 20 bp, Artificial Sequence
  Description of Artificial Sequence: Synthetic oligonucleotide
  Target: LAMA2; (-) strand; PAM type: YTN; PAM sequence: CTC
aatgttatgtttttgagatc

SEQ ID NO: 204070 - DNA, 20 bp, Artificial Sequence
  Description of Artificial Sequence: Synthetic oligonucleotide
  Target: LAMA2; (-) strand; PAM type: YTN; PAM sequence: TTC
actcaatgttatgtttttga

SEQ ID NO: 204071 - DNA, 20 bp, Artificial Sequence
  Description of Artificial Sequence: Synthetic oligonucleotide
  Target: LAMA2; (-) strand; PAM type: YTN; PAM sequence: TTG
gcatattcactcaatgttat

SEQ ID NO: 204072 - DNA, 20 bp, Artificial Sequence
  Description of Artificial Sequence: Synthetic oligonucleotide
  Target: LAMA2; (-) strand; PAM type: YTN; PAM sequence: CTA
ttggcatattcactcaatgt

SEQ ID NO: 204073 - DNA, 20 bp, Artificial Sequence
  Description of Artificial Sequence: Synthetic oligonucleotide
  Target: LAMA2; (-) strand; PAM type: YTN; PAM sequence: CTA
cctattggcatattcactca

SEQ ID NO: 204074 - DNA, 20 bp, Artificial Sequence
  Description of Artificial Sequence: Synthetic oligonucleotide
  Target: LAMA2; (-) strand; PAM type: YTN; PAM sequence: TTC
tacctattggcatattcact

SEQ ID NO: 204075 - DNA, 20 bp, Artificial Sequence
  Description of Artificial Sequence: Synthetic oligonucleotide
  Target: LAMA2; (-) strand; PAM type: YTN; PAM sequence: TTA
catgacattctacctattgg

SEQ ID NO: 204076 - DNA, 20 bp, Artificial Sequence
  Description of Artificial Sequence: Synthetic oligonucleotide
  Target: LAMA2; (-) strand; PAM type: YTN; PAM sequence: TTT
acatgacattctacctattg

SEQ ID NO: 204077 - DNA, 20 bp, Artificial Sequence
  Description of Artificial Sequence: Synthetic oligonucleotide
  Target: LAMA2; (-) strand; PAM type: YTN; PAM sequence: CTT
tacatgacattctacctatt

SEQ ID NO: 204078 - DNA, 20 bp, Artificial Sequence
  Description of Artificial Sequence: Synthetic oligonucleotide
  Target: LAMA2; (-) strand; PAM type: YTN; PAM sequence: TTA
aactttacatgacattctac

SEQ ID NO: 204079 - DNA, 20 bp, Artificial Sequence
  Description of Artificial Sequence: Synthetic oligonucleotide
  Target: LAMA2; (-) strand; PAM type: YTN; PAM sequence: TTG
acaaaaattaaactttacat

SEQ ID NO: 204080 - DNA, 20 bp, Artificial Sequence
  Description of Artificial Sequence: Synthetic oligonucleotide
  Target: LAMA2; (-) strand; PAM type: YTN; PAM sequence: CTC
ataaaattgacaaaaattaa

SEQ ID NO: 204081 - DNA, 20 bp, Artificial Sequence
  Description of Artificial Sequence: Synthetic oligonucleotide
  Target: LAMA2; (-) strand; PAM type: YTN; PAM sequence: TTC
actcataaaattgacaaaaa

SEQ ID NO: 204082 - DNA, 20 bp, Artificial Sequence
  Description of Artificial Sequence: Synthetic oligonucleotide
  Target: LAMA2; (-) strand; PAM type: YTN; PAM sequence: TTT
cactcataaaattgacaaaa

SEQ ID NO: 204083 - DNA, 20 bp, Artificial Sequence
  Description of Artificial Sequence: Synthetic oligonucleotide
  Target: LAMA2; (-) strand; PAM type: YTN; PAM sequence: TTT
tcactcataaaattgacaaa

SEQ ID NO: 204084 - DNA, 20 bp, Artificial Sequence
  Description of Artificial Sequence: Synthetic oligonucleotide
  Target: LAMA2; (-) strand; PAM type: YTN; PAM sequence: CTG
gtaaaaaaaggtaaataaaa

SEQ ID NO: 204085 - DNA, 20 bp, Artificial Sequence
  Description of Artificial Sequence: Synthetic oligonucleotide
  Target: LAMA2; (-) strand; PAM type: YTN; PAM sequence: CTG
gaaaaaaactggtaaaaaaa

SEQ ID NO: 204086 - DNA, 20 bp, Artificial Sequence
  Description of Artificial Sequence: Synthetic oligonucleotide
  Target: LAMA2; (-) strand; PAM type: YTN; PAM sequence: TTA
aagtataataaaataaaata

SEQ ID NO: 204087 - DNA, 20 bp, Artificial Sequence
  Description of Artificial Sequence: Synthetic oligonucleotide
  Target: LAMA2; (-) strand; PAM type: YTN; PAM sequence: CTT
aaagtataataaaataaaat

SEQ ID NO: 204088 - DNA, 20 bp, Artificial Sequence
  Description of Artificial Sequence: Synthetic oligonucleotide
  Target: LAMA2; (-) strand; PAM type: YTN; PAM sequence: CTA
aaacttaaagtataataaaa

SEQ ID NO: 204089 - DNA, 20 bp, Artificial Sequence
  Description of Artificial Sequence: Synthetic oligonucleotide
  Target: LAMA2; (-) strand; PAM type: YTN; PAM sequence: TTG
tgcacatgtaccctaaaact

SEQ ID NO: 204090 - DNA, 20 bp, Artificial Sequence
  Description of Artificial Sequence: Synthetic oligonucleotide
  Target: LAMA2; (-) strand; PAM type: YTN; PAM sequence: CTG
cacattgtgcacatgtaccc

SEQ ID NO: 204091 - DNA, 20 bp, Artificial Sequence
  Description of Artificial Sequence: Synthetic oligonucleotide
  Target: LAMA2; (-) strand; PAM type: YTN; PAM sequence: CTA
acctgcacattgtgcacatg

SEQ ID NO: 204092 - DNA, 20 bp, Artificial Sequence
  Description of Artificial Sequence: Synthetic oligonucleotide
  Target: LAMA2; (-) strand; PAM type: YTN; PAM sequence: TTA
atgggtgcagcacaccagca

SEQ ID NO: 204093 - DNA, 20 bp, Artificial Sequence
  Description of Artificial Sequence: Synthetic oligonucleotide
  Target: LAMA2; (-) strand; PAM type: YTN; PAM sequence: CTA
aatgacgagttaatgggtgc

SEQ ID NO: 204094 - DNA, 20 bp, Artificial Sequence
  Description of Artificial Sequence: Synthetic oligonucleotide
  Target: LAMA2; (-) strand; PAM type: YTN; PAM sequence: CTA
atgctaaatgacgagttaat

SEQ ID NO: 204095 - DNA, 20 bp, Artificial Sequence
  Description of Artificial Sequence: Synthetic oligonucleotide
  Target: LAMA2; (-) strand; PAM type: YTN; PAM sequence: TTA
ggagatatacctaatgctaa

SEQ ID NO: 204096 - DNA, 20 bp, Artificial Sequence
  Description of Artificial Sequence: Synthetic oligonucleotide
  Target: LAMA2; (-) strand; PAM type: YTN; PAM sequence: TTG
tggggtggggtggggggagg

SEQ ID NO: 204097 - DNA, 20 bp, Artificial Sequence
  Description of Artificial Sequence: Synthetic oligonucleotide
  Target: LAMA2; (-) strand; PAM type: YTN; PAM sequence: CTG
ttgtggggtggggtgggggg

SEQ ID NO: 204098 - DNA, 20 bp, Artificial Sequence
  Description of Artificial Sequence: Synthetic oligonucleotide
  Target: LAMA2; (-) strand; PAM type: YTN; PAM sequence: CTG
gggactgttgtggggtgggg

SEQ ID NO: 204099 - DNA, 20 bp, Artificial Sequence
  Description of Artificial Sequence: Synthetic oligonucleotide
  Target: LAMA2; (-) strand; PAM type: YTN; PAM sequence: CTC
tggggactgttgtggggtgg

SEQ ID NO: 204100 - DNA, 20 bp, Artificial Sequence
  Description of Artificial Sequence: Synthetic oligonucleotide
  Target: LAMA2; (-) strand; PAM type: YTN; PAM sequence: TTG
aacaatgagaacacatggac

SEQ ID NO: 204101 - DNA, 20 bp, Artificial Sequence
  Description of Artificial Sequence: Synthetic oligonucleotide
  Target: LAMA2; (-) strand; PAM type: YTN; PAM sequence: CTC
ataggtgggaattgaacaat

SEQ ID NO: 204102 - DNA, 20 bp, Artificial Sequence
  Description of Artificial Sequence: Synthetic oligonucleotide
  Target: LAMA2; (-) strand; PAM type: YTN; PAM sequence: CTC
actcataggtgggaattgaa

SEQ ID NO: 204103 - DNA, 20 bp, Artificial Sequence
  Description of Artificial Sequence: Synthetic oligonucleotide
  Target: LAMA2; (-) strand; PAM type: YTN; PAM sequence: TTC
tcactcataggtgggaattg

SEQ ID NO: 204104 - DNA, 20 bp, Artificial Sequence
  Description of Artificial Sequence: Synthetic oligonucleotide
  Target: LAMA2; (-) strand; PAM type: YTN; PAM sequence: CTA
tcacaaggacaaaaaaccaa

SEQ ID NO: 204105 - DNA, 20 bp, Artificial Sequence
  Description of Artificial Sequence: Synthetic oligonucleotide
  Target: LAMA2; (-) strand; PAM type: YTN; PAM sequence: CTC
agtaaactatcacaaggaca

SEQ ID NO: 204106 - DNA, 20 bp, Artificial Sequence
  Description of Artificial Sequence: Synthetic oligonucleotide
  Target: LAMA2; (-) strand; PAM type: YTN; PAM sequence: TTC
tcagtaaactatcacaagga

SEQ ID NO: 204107 - DNA, 20 bp, Artificial Sequence
  Description of Artificial Sequence: Synthetic oligonucleotide
  Target: LAMA2; (-) strand; PAM type: YTN; PAM sequence: CTG
gaaatcatcattctcagtaa

SEQ ID NO: 204108 - DNA, 20 bp, Artificial Sequence
  Description of Artificial Sequence: Synthetic oligonucleotide
  Target: LAMA2; (-) strand; PAM type: YTN; PAM sequence: TTG
tagggacatggacgatactg

SEQ ID NO: 204109 - DNA, 20 bp, Artificial Sequence
  Description of Artificial Sequence: Synthetic oligonucleotide
  Target: LAMA2; (-) strand; PAM type: YTN; PAM sequence: TTT
gtagggacatggacgatact

SEQ ID NO: 204110 - DNA, 20 bp, Artificial Sequence
  Description of Artificial Sequence: Synthetic oligonucleotide
  Target: LAMA2; (-) strand; PAM type: YTN; PAM sequence: CTT
tgtagggacatggacgatac

SEQ ID NO: 204111 - DNA, 20 bp, Artificial Sequence
  Description of Artificial Sequence: Synthetic oligonucleotide
  Target: LAMA2; (-) strand; PAM type: YTN; PAM sequence: CTG
tcctttgtagggacatggac

SEQ ID NO: 204112 - DNA, 20 bp, Artificial Sequence
  Description of Artificial Sequence: Synthetic oligonucleotide
  Target: LAMA2; (-) strand; PAM type: YTN; PAM sequence: TTC
ctgtcctttgtagggacatg

SEQ ID NO: 204113 - DNA, 20 bp, Artificial Sequence
  Description of Artificial Sequence: Synthetic oligonucleotide
  Target: LAMA2; (-) strand; PAM type: YTN; PAM sequence: CTA
tgcagccataaaaaaatgat

SEQ ID NO: 204114 - DNA, 20 bp, Artificial Sequence
  Description of Artificial Sequence: Synthetic oligonucleotide
  Target: LAMA2; (-) strand; PAM type: YTN; PAM sequence: TTA
agaaaatgtggcacatatac

SEQ ID NO: 204115 - DNA, 20 bp, Artificial Sequence
  Description of Artificial Sequence: Synthetic oligonucleotide
  Target: LAMA2; (-) strand; PAM type: YTN; PAM sequence: CTG
gattaagaaaatgtggcaca

SEQ ID NO: 204116 - DNA, 20 bp, Artificial Sequence
  Description of Artificial Sequence: Synthetic oligonucleotide
  Target: LAMA2; (-) strand; PAM type: YTN; PAM sequence: TTG
gaaccaacccaaatgtacaa

SEQ ID NO: 204117 - DNA, 20 bp, Artificial Sequence
  Description of Artificial Sequence: Synthetic oligonucleotide
  Target: LAMA2; (-) strand; PAM type: YTN; PAM sequence: CTT
ggaaccaacccaaatgtaca

SEQ ID NO: 204118 - DNA, 20 bp, Artificial Sequence
  Description of Artificial Sequence: Synthetic oligonucleotide
  Target: LAMA2; (-) strand; PAM type: YTN; PAM sequence: TTC
acaatagcaaagacttggaa

SEQ ID NO: 204119 - DNA, 20 bp, Artificial Sequence
  Description of Artificial Sequence: Synthetic oligonucleotide
  Target: LAMA2; (-) strand; PAM type: YTN; PAM sequence: CTA
ttcacaatagcaaagacttg

SEQ ID NO: 204120 - DNA, 20 bp, Artificial Sequence
  Description of Artificial Sequence: Synthetic oligonucleotide
  Target: LAMA2; (-) strand; PAM type: YTN; PAM sequence: TTG
cggcactattcacaatagca

SEQ ID NO: 204121 - DNA, 20 bp, Artificial Sequence
  Description of Artificial Sequence: Synthetic oligonucleotide
  Target: LAMA2; (-) strand; PAM type: YTN; PAM sequence: TTA
ttgcggcactattcacaata

SEQ ID NO: 204122 - DNA, 20 bp, Artificial Sequence
  Description of Artificial Sequence: Synthetic oligonucleotide
  Target: LAMA2; (-) strand; PAM type: YTN; PAM sequence: TTT
attgcggcactattcacaat

SEQ ID NO: 204123 - DNA, 20 bp, Artificial Sequence
  Description of Artificial Sequence: Synthetic oligonucleotide
  Target: LAMA2; (-) strand; PAM type: YTN; PAM sequence: CTA
taaagacacatgcacacgta

SEQ ID NO: 204124 - DNA, 20 bp, Artificial Sequence
  Description of Artificial Sequence: Synthetic oligonucleotide
  Target: LAMA2; (-) strand; PAM type: YTN; PAM sequence: CTG
ctataaagacacatgcacac

SEQ ID NO: 204125 - DNA, 20 bp, Artificial Sequence
  Description of Artificial Sequence: Synthetic oligonucleotide
  Target: LAMA2; (-) strand; PAM type: YTN; PAM sequence: CTA
taaatcatgctgctataaag

SEQ ID NO: 204126 - DNA, 20 bp, Artificial Sequence
  Description of Artificial Sequence: Synthetic oligonucleotide
  Target: LAMA2; (-) strand; PAM type: YTN; PAM sequence: CTG
ggtatgtacccaaaggacta

SEQ ID NO: 204127 - DNA, 20 bp, Artificial Sequence
  Description of Artificial Sequence: Synthetic oligonucleotide
  Target: LAMA2; (-) strand; PAM type: YTN; PAM sequence: TTA
ctgggtatgtacccaaagga

SEQ ID NO: 204128 - DNA, 20 bp, Artificial Sequence
  Description of Artificial Sequence: Synthetic oligonucleotide
  Target: LAMA2; (-) strand; PAM type: YTN; PAM sequence: TTG
acccagccatcccattactg

SEQ ID NO: 204129 - DNA, 20 bp, Artificial Sequence
  Description of Artificial Sequence: Synthetic oligonucleotide
  Target: LAMA2; (-) strand; PAM type: YTN; PAM sequence: TTT
gacccagccatcccattact

SEQ ID NO: 204130 - DNA, 20 bp, Artificial Sequence
  Description of Artificial Sequence: Synthetic oligonucleotide
  Target: LAMA2; (-) strand; PAM type: YTN; PAM sequence: CTT
tgacccagccatcccattac

SEQ ID NO: 204131 - DNA, 20 bp, Artificial Sequence
  Description of Artificial Sequence: Synthetic oligonucleotide
  Target: LAMA2; (-) strand; PAM type: YTN; PAM sequence: CTA
gaaataccctttgacccagc

SEQ ID NO: 204132 - DNA, 20 bp, Artificial Sequence
  Description of Artificial Sequence: Synthetic oligonucleotide
  Target: LAMA2; (-) strand; PAM type: YTN; PAM sequence: CTA
gaactagaaataccctttga

SEQ ID NO: 204133 - DNA, 20 bp, Artificial Sequence
  Description of Artificial Sequence: Synthetic oligonucleotide
  Target: LAMA2; (-) strand; PAM type: YTN; PAM sequence: CTC
agggatctagaactagaaat

SEQ ID NO: 204134 - DNA, 20 bp, Artificial Sequence
  Description of Artificial Sequence: Synthetic oligonucleotide
  Target: LAMA2; (-) strand; PAM type: YTN; PAM sequence: TTC
ctcagggatctagaactaga

SEQ ID NO: 204135 - DNA, 20 bp, Artificial Sequence
  Description of Artificial Sequence: Synthetic oligonucleotide
  Target: LAMA2; (-) strand; PAM type: YTN; PAM sequence: TTG
tggaagtcagtgtggcgatt

SEQ ID NO: 204136 - DNA, 20 bp, Artificial Sequence
  Description of Artificial Sequence: Synthetic oligonucleotide
  Target: LAMA2; (-) strand; PAM type: YTN; PAM sequence: TTC
aaccattgtggaagtcagtg

SEQ ID NO: 204137 - DNA, 20 bp, Artificial Sequence
  Description of Artificial Sequence: Synthetic oligonucleotide
  Target: LAMA2; (-) strand; PAM type: YTN; PAM sequence: CTA
gttcaaccattgtggaagtc

SEQ ID NO: 204138 - DNA, 20 bp, Artificial Sequence
  Description of Artificial Sequence: Synthetic oligonucleotide
  Target: LAMA2; (-) strand; PAM type: YTN; PAM sequence: CTG
taaactagttcaaccattgt

SEQ ID NO: 204139 - DNA, 20 bp, Artificial Sequence
  Description of Artificial Sequence: Synthetic oligonucleotide
  Target: LAMA2; (-) strand; PAM type: YTN; PAM sequence: TTG
gtgggactgtaaactagttc

SEQ ID NO: 204140 - DNA, 20 bp, Artificial Sequence
  Description of Artificial Sequence: Synthetic oligonucleotide
  Target: LAMA2; (-) strand; PAM type: YTN; PAM sequence: CTG
ttggtgggactgtaaactag

SEQ ID NO: 204141 - DNA, 20 bp, Artificial Sequence
  Description of Artificial Sequence: Synthetic oligonucleotide
  Target: LAMA2; (-) strand; PAM type: YTN; PAM sequence: TTA
cactgttggtgggactgtaa

SEQ ID NO: 204142 - DNA, 20 bp, Artificial Sequence
  Description of Artificial Sequence: Synthetic oligonucleotide
  Target: LAMA2; (-) strand; PAM type: YTN; PAM sequence: TTT
acactgttggtgggactgta

SEQ ID NO: 204143 - DNA, 20 bp, Artificial Sequence
  Description of Artificial Sequence: Synthetic oligonucleotide
  Target: LAMA2; (-) strand; PAM type: YTN; PAM sequence: TTT
tacactgttggtgggactgt

SEQ ID NO: 204144 - DNA, 20 bp, Artificial Sequence
  Description of Artificial Sequence: Synthetic oligonucleotide
  Target: LAMA2; (-) strand; PAM type: YTN; PAM sequence: CTT
ttacactgttggtgggactg

SEQ ID NO: 204145 - DNA, 20 bp, Artificial Sequence
  Description of Artificial Sequence: Synthetic oligonucleotide
  Target: LAMA2; (-) strand; PAM type: YTN; PAM sequence: CTG
gagaggatatggagaaatag

SEQ ID NO: 204146 - DNA, 20 bp, Artificial Sequence
  Description of Artificial Sequence: Synthetic oligonucleotide
  Target: LAMA2; (-) strand; PAM type: YTN; PAM sequence: TTA
aaaagtcaggaaacaacagg

SEQ ID NO: 204147 - DNA, 20 bp, Artificial Sequence
  Description of Artificial Sequence: Synthetic oligonucleotide
  Target: LAMA2; (-) strand; PAM type: YTN; PAM sequence: TTA
gaatggcaatcattaaaaag

SEQ ID NO: 204148 - DNA, 20 bp, Artificial Sequence
  Description of Artificial Sequence: Synthetic oligonucleotide
  Target: LAMA2; (-) strand; PAM type: YTN; PAM sequence: CTC
acaccagttagaatggcaat

SEQ ID NO: 204149 - DNA, 20 bp, Artificial Sequence
  Description of Artificial Sequence: Synthetic oligonucleotide
  Target: LAMA2; (-) strand; PAM type: YTN; PAM sequence: CTG
gccatcagagaaatgcaaac

SEQ ID NO: 204150 - DNA, 20 bp, Artificial Sequence
  Description of Artificial Sequence: Synthetic oligonucleotide
  Target: LAMA2; (-) strand; PAM type: YTN; PAM sequence: CTC
accatcactggccatcagag

SEQ ID NO: 204151 - DNA, 20 bp, Artificial Sequence
  Description of Artificial Sequence: Synthetic oligonucleotide
  Target: LAMA2; (-) strand; PAM type: YTN; PAM sequence: TTA
tgcagccaaaaaacacatga

SEQ ID NO: 204152 - DNA, 20 bp, Artificial Sequence
  Description of Artificial Sequence: Synthetic oligonucleotide
  Target: LAMA2; (-) strand; PAM type: YTN; PAM sequence: TTT
atgcagccaaaaaacacatg

SEQ ID NO: 204153 - DNA, 20 bp, Artificial Sequence
  Description of Artificial Sequence: Synthetic oligonucleotide
  Target: LAMA2; (-) strand; PAM type: YTN; PAM sequence: TTC
atcaaagaagacatttatgc

SEQ ID NO: 204154 - DNA, 20 bp, Artificial Sequence
  Description of Artificial Sequence: Synthetic oligonucleotide
  Target: LAMA2; (-) strand; PAM type: YTN; PAM sequence: TTA
ttcatcaaagaagacattta

SEQ ID NO: 204155 - DNA, 20 bp, Artificial Sequence
  Description of Artificial Sequence: Synthetic oligonucleotide
  Target: LAMA2; (-) strand; PAM type: YTN; PAM sequence: CTC
attattcatcaaagaagaca

SEQ ID NO: 204156 - DNA, 20 bp, Artificial Sequence
  Description of Artificial Sequence: Synthetic oligonucleotide
  Target: LAMA2; (-) strand; PAM type: YTN; PAM sequence: TTA
aatctcattattcatcaaag

SEQ ID NO: 204157 - DNA, 20 bp, Artificial Sequence
  Description of Artificial Sequence: Synthetic oligonucleotide
  Target: LAMA2; (-) strand; PAM type: YTN; PAM sequence: TTG
ggaacatgtgaatggtcaat

SEQ ID NO: 204158 - DNA, 20 bp, Artificial Sequence
  Description of Artificial Sequence: Synthetic oligonucleotide
  Target: LAMA2; (-) strand; PAM type: YTN; PAM sequence: TTC
agagttgggaacatgtgaat

SEQ ID NO: 204159 - DNA, 20 bp, Artificial Sequence
  Description of Artificial Sequence: Synthetic oligonucleotide
  Target: LAMA2; (-) strand; PAM type: YTN; PAM sequence: CTA
gaaattcagagttgggaaca

SEQ ID NO: 204160 - DNA, 20 bp, Artificial Sequence
  Description of Artificial Sequence: Synthetic oligonucleotide
  Target: LAMA2; (-) strand; PAM type: YTN; PAM sequence: TTA
ctagaaattcagagttggga

SEQ ID NO: 204161 - DNA, 20 bp, Artificial Sequence
  Description of Artificial Sequence: Synthetic oligonucleotide
  Target: LAMA2; (-) strand; PAM type: YTN; PAM sequence: TTT
actagaaattcagagttggg

SEQ ID NO: 204162 - DNA, 20 bp, Artificial Sequence
  Description of Artificial Sequence: Synthetic oligonucleotide
  Target: LAMA2; (-) strand; PAM type: YTN; PAM sequence: CTG
gaaaaacatgaatttactag

SEQ ID NO: 204163 - DNA, 20 bp, Artificial Sequence
  Description of Artificial Sequence: Synthetic oligonucleotide
  Target: LAMA2; (-) strand; PAM type: YTN; PAM sequence: CTC
tggaaaaacatgaatttact

SEQ ID NO: 204164 - DNA, 20 bp, Artificial Sequence
  Description of Artificial Sequence: Synthetic oligonucleotide
  Target: LAMA2; (-) strand; PAM type: YTN; PAM sequence: TTC
tctggaaaaacatgaattta

SEQ ID NO: 204165 - DNA, 20 bp, Artificial Sequence
  Description of Artificial Sequence: Synthetic oligonucleotide
  Target: LAMA2; (-) strand; PAM type: YTN; PAM sequence: TTC
attctctggaaaaacatgaa

SEQ ID NO: 204166 - DNA, 20 bp, Artificial Sequence
  Description of Artificial Sequence: Synthetic oligonucleotide
  Target: LAMA2; (-) strand; PAM type: YTN; PAM sequence: TTT
cattctctggaaaaacatga

SEQ ID NO: 204167 - DNA, 20 bp, Artificial Sequence
  Description of Artificial Sequence: Synthetic oligonucleotide
  Target: LAMA2; (-) strand; PAM type: YTN; PAM sequence: CTT
tcattctctggaaaaacatg

SEQ ID NO: 204168 - DNA, 20 bp, Artificial Sequence
  Description of Artificial Sequence: Synthetic oligonucleotide
  Target: LAMA2; (-) strand; PAM type: YTN; PAM sequence: CTC
tttcattctctggaaaaaca

SEQ ID NO: 204169 - DNA, 20 bp, Artificial Sequence
  Description of Artificial Sequence: Synthetic oligonucleotide
  Target: LAMA2; (-) strand; PAM type: YTN; PAM sequence: TTC
actctttcattctctggaaa

SEQ ID NO: 204170 - DNA, 20 bp, Artificial Sequence
  Description of Artificial Sequence: Synthetic oligonucleotide
  Target: LAMA2; (-) strand; PAM type: YTN; PAM sequence: CTC
aagacagtggccattcactc

SEQ ID NO: 204171 - DNA, 20 bp, Artificial Sequence
  Description of Artificial Sequence: Synthetic oligonucleotide
  Target: LAMA2; (-) strand; PAM type: YTN; PAM sequence: TTC
ctcaagacagtggccattca

SEQ ID NO: 204172 - DNA, 20 bp, Artificial Sequence
  Description of Artificial Sequence: Synthetic oligonucleotide
  Target: LAMA2; (-) strand; PAM type: YTN; PAM sequence: TTT
cctcaagacagtggccattc

SEQ ID NO: 204173 - DNA, 20 bp, Artificial Sequence
  Description of Artificial Sequence: Synthetic oligonucleotide
  Target: LAMA2; (-) strand; PAM type: YTN; PAM sequence: CTC
ccatttcctcaagacagtgg

SEQ ID NO: 204174 - DNA, 20 bp, Artificial Sequence
  Description of Artificial Sequence: Synthetic oligonucleotide
  Target: LAMA2; (-) strand; PAM type: YTN; PAM sequence: CTA
gaatactcccatttcctcaa

SEQ ID NO: 204175 - DNA, 20 bp, Artificial Sequence
  Description of Artificial Sequence: Synthetic oligonucleotide
  Target: LAMA2; (-) strand; PAM type: YTN; PAM sequence: CTA
tgcatctagaatactcccat

SEQ ID NO: 204176 - DNA, 20 bp, Artificial Sequence
  Description of Artificial Sequence: Synthetic oligonucleotide
  Target: LAMA2; (-) strand; PAM type: YTN; PAM sequence: CTG
actatgcatctagaatactc

SEQ ID NO: 204177 - DNA, 20 bp, Artificial Sequence
  Description of Artificial Sequence: Synthetic oligonucleotide
  Target: LAMA2; (-) strand; PAM type: YTN; PAM sequence: CTG
cctgactatgcatctagaat

SEQ ID NO: 204178 - DNA, 20 bp, Artificial Sequence
  Description of Artificial Sequence: Synthetic oligonucleotide
  Target: LAMA2; (-) strand; PAM type: YTN; PAM sequence: CTA
atcacactgcctgactatgc

SEQ ID NO: 204179 - DNA, 20 bp, Artificial Sequence
  Description of Artificial Sequence: Synthetic oligonucleotide
  Target: LAMA2; (-) strand; PAM type: YTN; PAM sequence: CTA
tactaatcacactgcctgac

SEQ ID NO: 204180 - DNA, 20 bp, Artificial Sequence
  Description of Artificial Sequence: Synthetic oligonucleotide
  Target: LAMA2; (-) strand; PAM type: YTN; PAM sequence: TTG
cactatactaatcacactgc

SEQ ID NO: 204181 - DNA, 20 bp, Artificial Sequence
  Description of Artificial Sequence: Synthetic oligonucleotide
  Target: LAMA2; (-) strand; PAM type: YTN; PAM sequence: CTT
gcactatactaatcacactg

SEQ ID NO: 204182 - DNA, 20 bp, Artificial Sequence
  Description of Artificial Sequence: Synthetic oligonucleotide
  Target: LAMA2; (-) strand; PAM type: YTN; PAM sequence: TTC
ttgcactatactaatcacac

SEQ ID NO: 204183 - DNA, 20 bp, Artificial Sequence
  Description of Artificial Sequence: Synthetic oligonucleotide
  Target: LAMA2; (-) strand; PAM type: YTN; PAM sequence: CTA
ccattcttgcactatactaa

SEQ ID NO: 204184 - DNA, 20 bp, Artificial Sequence
  Description of Artificial Sequence: Synthetic oligonucleotide
  Target: LAMA2; (-) strand; PAM type: YTN; PAM sequence: TTC
ctaccattcttgcactatac

SEQ ID NO: 204185 - DNA, 20 bp, Artificial Sequence
  Description of Artificial Sequence: Synthetic oligonucleotide
  Target: LAMA2; (-) strand; PAM type: YTN; PAM sequence: TTT
cctaccattcttgcactata

SEQ ID NO: 204186 - DNA, 20 bp, Artificial Sequence
  Description of Artificial Sequence: Synthetic oligonucleotide
  Target: LAMA2; (-) strand; PAM type: YTN; PAM sequence: CTT
tcctaccattcttgcactat

SEQ ID NO: 204187 - DNA, 20 bp, Artificial Sequence
  Description of Artificial Sequence: Synthetic oligonucleotide
  Target: LAMA2; (-) strand; PAM type: YTN; PAM sequence: CTC
catcctttcctaccattctt

SEQ ID NO: 204188 - DNA, 20 bp, Artificial Sequence
  Description of Artificial Sequence: Synthetic oligonucleotide
  Target: LAMA2; (-) strand; PAM type: YTN; PAM sequence: CTC
tccatcctttcctaccattc

SEQ ID NO: 204189 - DNA, 20 bp, Artificial Sequence
  Description of Artificial Sequence: Synthetic oligonucleotide
  Target: LAMA2; (-) strand; PAM type: YTN; PAM sequence: TTG
tcctctccatcctttcctac

SEQ ID NO: 204190 - DNA, 20 bp, Artificial Sequence
  Description of Artificial Sequence: Synthetic oligonucleotide
  Target: LAMA2; (-) strand; PAM type: YTN; PAM sequence: TTC
ccattgtcctctccatcctt

SEQ ID NO: 204191 - DNA, 20 bp, Artificial Sequence
  Description of Artificial Sequence: Synthetic oligonucleotide
  Target: LAMA2; (-) strand; PAM type: YTN; PAM sequence: TTT
cccattgtcctctccatcct

SEQ ID NO: 204192 - DNA, 20 bp, Artificial Sequence
  Description of Artificial Sequence: Synthetic oligonucleotide
  Target: LAMA2; (-) strand; PAM type: YTN; PAM sequence: TTT
tcccattgtcctctccatcc

SEQ ID NO: 204193 - DNA, 20 bp, Artificial Sequence
  Description of Artificial Sequence: Synthetic oligonucleotide
  Target: LAMA2; (-) strand; PAM type: YTN; PAM sequence: TTA
gcaaggtgttttcccattgt

SEQ ID NO: 204194 - DNA, 20 bp, Artificial Sequence
  Description of Artificial Sequence: Synthetic oligonucleotide
  Target: LAMA2; (-) strand; PAM type: YTN; PAM sequence: TTT
agcaaggtgttttcccattg

SEQ ID NO: 204195 - DNA, 20 bp, Artificial Sequence
  Description of Artificial Sequence: Synthetic oligonucleotide
  Target: LAMA2; (-) strand; PAM type: YTN; PAM sequence: TTT
tagcaaggtgttttcccatt

SEQ ID NO: 204196 - DNA, 20 bp, Artificial Sequence
  Description of Artificial Sequence: Synthetic oligonucleotide
  Target: LAMA2; (-) strand; PAM type: YTN; PAM sequence: TTT
ttagcaaggtgttttcccat

SEQ ID NO: 204197 - DNA, 20 bp, Artificial Sequence
  Description of Artificial Sequence: Synthetic oligonucleotide
  Target: LAMA2; (-) strand; PAM type: YTN; PAM sequence: CTT
tttagcaaggtgttttccca

SEQ ID NO: 204198 - DNA, 20 bp, Artificial Sequence
  Description of Artificial Sequence: Synthetic oligonucleotide
  Target: LAMA2; (-) strand; PAM type: YTN; PAM sequence: CTA
gaagacaaaatccaaacttt

SEQ ID NO: 204199 - DNA, 20 bp, Artificial Sequence
  Description of Artificial Sequence: Synthetic oligonucleotide
  Target: LAMA2; (-) strand; PAM type: YTN; PAM sequence: CTA
tcactagaagacaaaatcca

SEQ ID NO: 204200 - DNA, 20 bp, Artificial Sequence
  Description of Artificial Sequence: Synthetic oligonucleotide
  Target: LAMA2; (-) strand; PAM type: YTN; PAM sequence: TTC
tatcactagaagacaaaatc

SEQ ID NO: 204201 - DNA, 20 bp, Artificial Sequence
  Description of Artificial Sequence: Synthetic oligonucleotide
  Target: LAMA2; (-) strand; PAM type: YTN; PAM sequence: TTT
ctatcactagaagacaaaat

SEQ ID NO: 204202 - DNA, 20 bp, Artificial Sequence
  Description of Artificial Sequence: Synthetic oligonucleotide
  Target: LAMA2; (-) strand; PAM type: YTN; PAM sequence: TTA
cccatgtcagggaccatcag

SEQ ID NO: 204203 - DNA, 20 bp, Artificial Sequence
  Description of Artificial Sequence: Synthetic oligonucleotide
  Target: LAMA2; (-) strand; PAM type: YTN; PAM sequence: CTG
ttacccatgtcagggaccat

SEQ ID NO: 204204 - DNA, 20 bp, Artificial Sequence
  Description of Artificial Sequence: Synthetic oligonucleotide
  Target: LAMA2; (-) strand; PAM type: YTN; PAM sequence: CTA
aagcagctgttacccatgtc

SEQ ID NO: 204205 - DNA, 20 bp, Artificial Sequence
  Description of Artificial Sequence: Synthetic oligonucleotide
  Target: LAMA2; (-) strand; PAM type: YTN; PAM sequence: CTC
taaagcagctgttacccatg

SEQ ID NO: 204206 - DNA, 20 bp, Artificial Sequence
  Description of Artificial Sequence: Synthetic oligonucleotide
  Target: LAMA2; (-) strand; PAM type: YTN; PAM sequence: TTC
agctctaaagcagctgttac

SEQ ID NO: 204207 - DNA, 20 bp, Artificial Sequence
  Description of Artificial Sequence: Synthetic oligonucleotide
  Target: LAMA2; (-) strand; PAM type: YTN; PAM sequence: TTG
aaattcagctctaaagcagc

SEQ ID NO: 204208 - DNA, 20 bp, Artificial Sequence
  Description of Artificial Sequence: Synthetic oligonucleotide
  Target: LAMA2; (-) strand; PAM type: YTN; PAM sequence: CTT
gaaattcagctctaaagcag

SEQ ID NO: 204209 - DNA, 20 bp, Artificial Sequence
  Description of Artificial Sequence: Synthetic oligonucleotide
  Target: LAMA2; (-) strand; PAM type: YTN; PAM sequence: TTC
ttgaaattcagctctaaagc

SEQ ID NO: 204210 - DNA, 20 bp, Artificial Sequence
  Description of Artificial Sequence: Synthetic oligonucleotide
  Target: LAMA2; (-) strand; PAM type: YTN; PAM sequence: CTG
attcttgaaattcagctcta

SEQ ID NO: 204211 - DNA, 20 bp, Artificial Sequence
  Description of Artificial Sequence: Synthetic oligonucleotide
  Target: LAMA2; (-) strand; PAM type: YTN; PAM sequence: TTC
acaagctgattcttgaaatt

SEQ ID NO: 204212 - DNA, 20 bp, Artificial Sequence
  Description of Artificial Sequence: Synthetic oligonucleotide
  Target: LAMA2; (-) strand; PAM type: YTN; PAM sequence: TTG
ttcacaagctgattcttgaa

SEQ ID NO: 204213 - DNA, 20 bp, Artificial Sequence
  Description of Artificial Sequence: Synthetic oligonucleotide
  Target: LAMA2; (-) strand; PAM type: YTN; PAM sequence: CTC
caaagcattgttcacaagct

SEQ ID NO: 204214 - DNA, 20 bp, Artificial Sequence
  Description of Artificial Sequence: Synthetic oligonucleotide
  Target: LAMA2; (-) strand; PAM type: YTN; PAM sequence: TTA
atctccaaagcattgttcac

SEQ ID NO: 204215 - DNA, 20 bp, Artificial Sequence
  Description of Artificial Sequence: Synthetic oligonucleotide
  Target: LAMA2; (-) strand; PAM type: YTN; PAM sequence: CTT
aatctccaaagcattgttca

SEQ ID NO: 204216 - DNA, 20 bp, Artificial Sequence
  Description of Artificial Sequence: Synthetic oligonucleotide
  Target: LAMA2; (-) strand; PAM type: YTN; PAM sequence: CTG
tcttaatctccaaagcattg

SEQ ID NO: 204217 - DNA, 20 bp, Artificial Sequence
  Description of Artificial Sequence: Synthetic oligonucleotide
  Target: LAMA2; (-) strand; PAM type: YTN; PAM sequence: CTA
ctgtcttaatctccaaagca

SEQ ID NO: 204218 - DNA, 20 bp, Artificial Sequence
  Description of Artificial Sequence: Synthetic oligonucleotide
  Target: LAMA2; (-) strand; PAM type: YTN; PAM sequence: TTC
ctactgtcttaatctccaaa

SEQ ID NO: 204219 - DNA, 20 bp, Artificial Sequence
  Description of Artificial Sequence: Synthetic oligonucleotide
  Target: LAMA2; (-) strand; PAM type: YTN; PAM sequence: CTT
cctactgtcttaatctccaa

SEQ ID NO: 204220 - DNA, 20 bp, Artificial Sequence
  Description of Artificial Sequence: Synthetic oligonucleotide
  Target: LAMA2; (-) strand; PAM type: YTN; PAM sequence: CTC
cttcctactgtcttaatctc

SEQ ID NO: 204221 - DNA, 20 bp, Artificial Sequence
  Description of Artificial Sequence: Synthetic oligonucleotide
  Target: LAMA2; (-) strand; PAM type: YTN; PAM sequence: TTC
tccttcctactgtcttaatc

SEQ ID NO: 204222 - DNA, 20 bp, Artificial Sequence
  Description of Artificial Sequence: Synthetic oligonucleotide
  Target: LAMA2; (-) strand; PAM type: YTN; PAM sequence: CTT
ctccttcctactgtcttaat

SEQ ID NO: 204223 - DNA, 20 bp, Artificial Sequence
  Description of Artificial Sequence: Synthetic oligonucleotide
  Target: LAMA2; (-) strand; PAM type: YTN; PAM sequence: TTC
aaatcttctccttcctactg

SEQ ID NO: 204224 - DNA, 20 bp, Artificial Sequence
  Description of Artificial Sequence: Synthetic oligonucleotide
  Target: LAMA2; (-) strand; PAM type: YTN; PAM sequence: CTT
caaatcttctccttcctact

SEQ ID NO: 204225 - DNA, 20 bp, Artificial Sequence
  Description of Artificial Sequence: Synthetic oligonucleotide
  Target: LAMA2; (-) strand; PAM type: YTN; PAM sequence: CTG
cttcaaatcttctccttcct

SEQ ID NO: 204226 - DNA, 20 bp, Artificial Sequence
  Description of Artificial Sequence: Synthetic oligonucleotide
  Target: LAMA2; (-) strand; PAM type: YTN; PAM sequence: TTA
ctgcttcaaatcttctcctt

SEQ ID NO: 204227 - DNA, 20 bp, Artificial Sequence
  Description of Artificial Sequence: Synthetic oligonucleotide
  Target: LAMA2; (-) strand; PAM type: YTN; PAM sequence: TTT
actgcttcaaatcttctcct

SEQ ID NO: 204228 - DNA, 20 bp, Artificial Sequence
  Description of Artificial Sequence: Synthetic oligonucleotide
  Target: LAMA2; (-) strand; PAM type: YTN; PAM sequence: CTT
tactgcttcaaatcttctcc

SEQ ID NO: 204229 - DNA, 20 bp, Artificial Sequence
  Description of Artificial Sequence: Synthetic oligonucleotide
  Target: LAMA2; (-) strand; PAM type: YTN; PAM sequence: CTA
aatcactttactgcttcaaa

SEQ ID NO: 204230 - DNA, 20 bp, Artificial Sequence
  Description of Artificial Sequence: Synthetic oligonucleotide
  Target: LAMA2; (-) strand; PAM type: YTN; PAM sequence: TTC
taaatcactttactgcttca

SEQ ID NO: 204231 - DNA, 20 bp, Artificial Sequence
  Description of Artificial Sequence: Synthetic oligonucleotide
  Target: LAMA2; (-) strand; PAM type: YTN; PAM sequence: TTT
ctaaatcactttactgcttc

SEQ ID NO: 204232 - DNA, 20 bp, Artificial Sequence
  Description of Artificial Sequence: Synthetic oligonucleotide
  Target: LAMA2; (-) strand; PAM type: YTN; PAM sequence: TTT
tctaaatcactttactgctt

SEQ ID NO: 204233 - DNA, 20 bp, Artificial Sequence
  Description of Artificial Sequence: Synthetic oligonucleotide
  Target: LAMA2; (-) strand; PAM type: YTN; PAM sequence: TTG
aaatagttttctaaatcact

SEQ ID NO: 204234 - DNA, 20 bp, Artificial Sequence
  Description of Artificial Sequence: Synthetic oligonucleotide
  Target: LAMA2; (-) strand; PAM type: YTN; PAM sequence: CTG
gtccattgaaatagttttct

SEQ ID NO: 204235 - DNA, 20 bp, Artificial Sequence
  Description of Artificial Sequence: Synthetic oligonucleotide
  Target: LAMA2; (-) strand; PAM type: YTN; PAM sequence: TTG
tctggtccattgaaatagtt

SEQ ID NO: 204236 - DNA, 20 bp, Artificial Sequence
  Description of Artificial Sequence: Synthetic oligonucleotide
  Target: LAMA2; (-) strand; PAM type: YTN; PAM sequence: CTT
gtctggtccattgaaatagt

SEQ ID NO: 204237 - DNA, 20 bp, Artificial Sequence
  Description of Artificial Sequence: Synthetic oligonucleotide
  Target: LAMA2; (-) strand; PAM type: YTN; PAM sequence: TTC
ttgtctggtccattgaaata

SEQ ID NO: 204238 - DNA, 20 bp, Artificial Sequence
  Description of Artificial Sequence: Synthetic oligonucleotide
  Target: LAMA2; (-) strand; PAM type: YTN; PAM sequence: TTT
cttgtctggtccattgaaat

SEQ ID NO: 204239 - DNA, 20 bp, Artificial Sequence
  Description of Artificial Sequence: Synthetic oligonucleotide
  Target: LAMA2; (-) strand; PAM type: YTN; PAM sequence: TTA
ccatttcttgtctggtccat

SEQ ID NO: 204240 - DNA, 20 bp, Artificial Sequence
  Description of Artificial Sequence: Synthetic oligonucleotide
  Target: LAMA2; (-) strand; PAM type: YTN; PAM sequence: TTC
aggccattaccatttcttgt

SEQ ID NO: 204241 - DNA, 20 bp, Artificial Sequence
  Description of Artificial Sequence: Synthetic oligonucleotide
  Target: LAMA2; (-) strand; PAM type: YTN; PAM sequence: TTT
caggccattaccatttcttg

SEQ ID NO: 204242 - DNA, 20 bp, Artificial Sequence
  Description of Artificial Sequence: Synthetic oligonucleotide
  Target: LAMA2; (-) strand; PAM type: YTN; PAM sequence: CTC
atttcaggccattaccattt

SEQ ID NO: 204243 - DNA, 20 bp, Artificial Sequence
  Description of Artificial Sequence: Synthetic oligonucleotide
  Target: LAMA2; (-) strand; PAM type: YTN; PAM sequence: CTC
cactcatttcaggccattac

SEQ ID NO: 204244 - DNA, 20 bp, Artificial Sequence
  Description of Artificial Sequence: Synthetic oligonucleotide
  Target: LAMA2; (-) strand; PAM type: YTN; PAM sequence: CTC
cctccactcatttcaggcca

SEQ ID NO: 204245 - DNA, 20 bp, Artificial Sequence
  Description of Artificial Sequence: Synthetic oligonucleotide
  Target: LAMA2; (-) strand; PAM type: YTN; PAM sequence: TTC
cactccctccactcatttca

SEQ ID NO: 204246 - DNA, 20 bp, Artificial Sequence
  Description of Artificial Sequence: Synthetic oligonucleotide
  Target: LAMA2; (-) strand; PAM type: YTN; PAM sequence: TTT
ccactccctccactcatttc

SEQ ID NO: 204247 - DNA, 20 bp, Artificial Sequence
  Description of Artificial Sequence: Synthetic oligonucleotide
  Target: LAMA2; (-) strand; PAM type: YTN; PAM sequence: TTC
atttccactccctccactca

SEQ ID NO: 204248 - DNA, 20 bp, Artificial Sequence
  Description of Artificial Sequence: Synthetic oligonucleotide
  Target: LAMA2; (-) strand; PAM type: YTN; PAM sequence: CTT
catttccactccctccactc

SEQ ID NO: 204249 - DNA, 20 bp, Artificial Sequence
  Description of Artificial Sequence: Synthetic oligonucleotide
  Target: LAMA2; (-) strand; PAM type: YTN; PAM sequence: CTG
cagccatgtgacttcatttc

SEQ ID NO: 204250 - DNA, 20 bp, Artificial Sequence
  Description of Artificial Sequence: Synthetic oligonucleotide
  Target: LAMA2; (-) strand; PAM type: YTN; PAM sequence: CTC
caataaatggcaactgcagc

SEQ ID NO: 204251 - DNA, 20 bp, Artificial Sequence
  Description of Artificial Sequence: Synthetic oligonucleotide
  Target: LAMA2; (-) strand; PAM type: YTN; PAM sequence: TTC
tccaataaatggcaactgca

SEQ ID NO: 204252 - DNA, 20 bp, Artificial Sequence
  Description of Artificial Sequence: Synthetic oligonucleotide
  Target: LAMA2; (-) strand; PAM type: YTN; PAM sequence: TTT
ctccaataaatggcaactgc

SEQ ID NO: 204253 - DNA, 20 bp, Artificial Sequence
  Description of Artificial Sequence: Synthetic oligonucleotide
  Target: LAMA2; (-) strand; PAM type: YTN; PAM sequence: TTC
agtttctccaataaatggca

SEQ ID NO: 204254 - DNA, 20 bp, Artificial Sequence
  Description of Artificial Sequence: Synthetic oligonucleotide
  Target: LAMA2; (-) strand; PAM type: YTN; PAM sequence: CTG
aaattcagtttctccaataa

SEQ ID NO: 204255 - DNA, 20 bp, Artificial Sequence
  Description of Artificial Sequence: Synthetic oligonucleotide
  Target: LAMA2; (-) strand; PAM type: YTN; PAM sequence: CTG
atccaaatccctgaaattca

SEQ ID NO: 204256 - DNA, 20 bp, Artificial Sequence
  Description of Artificial Sequence: Synthetic oligonucleotide
  Target: LAMA2; (-) strand; PAM type: YTN; PAM sequence: TTG
acctgatccaaatccctgaa

SEQ ID NO: 204257 - DNA, 20 bp, Artificial Sequence
  Description of Artificial Sequence: Synthetic oligonucleotide
  Target: LAMA2; (-) strand; PAM type: YTN; PAM sequence: CTT
gacctgatccaaatccctga

SEQ ID NO: 204258 - DNA, 20 bp, Artificial Sequence
  Description of Artificial Sequence: Synthetic oligonucleotide
  Target: LAMA2; (-) strand; PAM type: YTN; PAM sequence: TTA
tgtgcataacataccttgac

SEQ ID NO: 204259 - DNA, 20 bp, Artificial Sequence
  Description of Artificial Sequence: Synthetic oligonucleotide
  Target: LAMA2; (-) strand; PAM type: YTN; PAM sequence: TTT
atgtgcataacataccttga

SEQ ID NO: 204260 - DNA, 20 bp, Artificial Sequence
  Description of Artificial Sequence: Synthetic oligonucleotide
  Target: LAMA2; (-) strand; PAM type: YTN; PAM sequence: TTG
gtttatgtgcataacatacc

SEQ ID NO: 204261 - DNA, 20 bp, Artificial Sequence
  Description of Artificial Sequence: Synthetic oligonucleotide
  Target: LAMA2; (-) strand; PAM type: YTN; PAM sequence: TTT
ggtttatgtgcataacatac

SEQ ID NO: 204262 - DNA, 20 bp, Artificial Sequence
  Description of Artificial Sequence: Synthetic oligonucleotide
  Target: LAMA2; (-) strand; PAM type: YTN; PAM sequence: TTA
atatttggtttatgtgcata

SEQ ID NO: 204263 - DNA, 20 bp, Artificial Sequence
  Description of Artificial Sequence: Synthetic oligonucleotide
  Target: LAMA2; (-) strand; PAM type: YTN; PAM sequence: CTA
aataaatatcattaatattt

SEQ ID NO: 204264 - DNA, 20 bp, Artificial Sequence
  Description of Artificial Sequence: Synthetic oligonucleotide
  Target: LAMA2; (-) strand; PAM type: YTN; PAM sequence: CTG
gtgcacactaaataaatatc

SEQ ID NO: 204265 - DNA, 20 bp, Artificial Sequence
  Description of Artificial Sequence: Synthetic oligonucleotide
  Target: LAMA2; (-) strand; PAM type: YTN; PAM sequence: TTA
gcgaaggaaaaaacaaatat

SEQ ID NO: 204266 - DNA, 20 bp, Artificial Sequence
  Description of Artificial Sequence: Synthetic oligonucleotide
  Target: LAMA2; (-) strand; PAM type: YTN; PAM sequence: TTT
agcgaaggaaaaaacaaata

SEQ ID NO: 204267 - DNA, 20 bp, Artificial Sequence
  Description of Artificial Sequence: Synthetic oligonucleotide
  Target: LAMA2; (-) strand; PAM type: YTN; PAM sequence: TTC
agtttagcgaaggaaaaaac

SEQ ID NO: 204268 - DNA, 20 bp, Artificial Sequence
  Description of Artificial Sequence: Synthetic oligonucleotide
  Target: LAMA2; (-) strand; PAM type: YTN; PAM sequence: CTT
cagtttagcgaaggaaaaaa

SEQ ID NO: 204269 - DNA, 20 bp, Artificial Sequence
  Description of Artificial Sequence: Synthetic oligonucleotide
  Target: LAMA2; (-) strand; PAM type: YTN; PAM sequence: TTA
atcttcagtttagcgaagga

SEQ ID NO: 204270 - DNA, 20 bp, Artificial Sequence
  Description of Artificial Sequence: Synthetic oligonucleotide
  Target: LAMA2; (-) strand; PAM type: YTN; PAM sequence: CTT
aatcttcagtttagcgaagg

SEQ ID NO: 204271 - DNA, 20 bp, Artificial Sequence
  Description of Artificial Sequence: Synthetic oligonucleotide
  Target: LAMA2; (-) strand; PAM type: YTN; PAM sequence: TTG
ccttaatcttcagtttagcg

SEQ ID NO: 204272 - DNA, 20 bp, Artificial Sequence
  Description of Artificial Sequence: Synthetic oligonucleotide
  Target: LAMA2; (-) strand; PAM type: YTN; PAM sequence: CTG
attgccttaatcttcagttt

SEQ ID NO: 204273 - DNA, 20 bp, Artificial Sequence
  Description of Artificial Sequence: Synthetic oligonucleotide
  Target: LAMA2; (-) strand; PAM type: YTN; PAM sequence: TTC
tgattgccttaatcttcagt

SEQ ID NO: 204274 - DNA, 20 bp, Artificial Sequence
  Description of Artificial Sequence: Synthetic oligonucleotide
  Target: LAMA2; (-) strand; PAM type: YTN; PAM sequence: CTA
ggttctgattgccttaatct

SEQ ID NO: 204275 - DNA, 20 bp, Artificial Sequence
  Description of Artificial Sequence: Synthetic oligonucleotide
  Target: LAMA2; (-) strand; PAM type: YTN; PAM sequence: TTA
ctaggttctgattgccttaa

SEQ ID NO: 204276 - DNA, 20 bp, Artificial Sequence
  Description of Artificial Sequence: Synthetic oligonucleotide
  Target: LAMA2; (-) strand; PAM type: YTN; PAM sequence: TTT
actaggttctgattgcctta

SEQ ID NO: 204277 - DNA, 20 bp, Artificial Sequence
  Description of Artificial Sequence: Synthetic oligonucleotide
  Target: LAMA2; (-) strand; PAM type: YTN; PAM sequence: TTC
agcaatgtttactaggttct

SEQ ID NO: 204278 - DNA, 20 bp, Artificial Sequence
  Description of Artificial Sequence: Synthetic oligonucleotide
  Target: LAMA2; (-) strand; PAM type: YTN; PAM sequence: CTG
ggggatacaatggtgaattc

SEQ ID NO: 204279 - DNA, 20 bp, Artificial Sequence
  Description of Artificial Sequence: Synthetic oligonucleotide
  Target: LAMA2; (-) strand; PAM type: YTN; PAM sequence: TTA
gcactgggggatacaatggt

SEQ ID NO: 204280 - DNA, 20 bp, Artificial Sequence
  Description of Artificial Sequence: Synthetic oligonucleotide
  Target: LAMA2; (-) strand; PAM type: YTN; PAM sequence: TTG
tgtattagcactgggggata

SEQ ID NO: 204281 - DNA, 20 bp, Artificial Sequence
  Description of Artificial Sequence: Synthetic oligonucleotide
  Target: LAMA2; (-) strand; PAM type: YTN; PAM sequence: TTT
gtgtattagcactgggggat

SEQ ID NO: 204282 - DNA, 20 bp, Artificial Sequence
  Description of Artificial Sequence: Synthetic oligonucleotide
  Target: LAMA2; (-) strand; PAM type: YTN; PAM sequence: TTT
tgtgtattagcactggggga

SEQ ID NO: 204283 - DNA, 20 bp, Artificial Sequence
  Description of Artificial Sequence: Synthetic oligonucleotide
  Target: LAMA2; (-) strand; PAM type: YTN; PAM sequence: TTT
ttgtgtattagcactggggg

SEQ ID NO: 204284 - DNA, 20 bp, Artificial Sequence
  Description of Artificial Sequence: Synthetic oligonucleotide
  Target: LAMA2; (-) strand; PAM type: YTN; PAM sequence: CTT
tttgtgtattagcactgggg

SEQ ID NO: 204285 - DNA, 20 bp, Artificial Sequence
  Description of Artificial Sequence: Synthetic oligonucleotide
  Target: LAMA2; (-) strand; PAM type: YTN; PAM sequence: TTG
tatactttttgtgtattagc

SEQ ID NO: 204286 - DNA, 20 bp, Artificial Sequence
  Description of Artificial Sequence: Synthetic oligonucleotide
  Target: LAMA2; (-) strand; PAM type: YTN; PAM sequence: TTC
attgtatactttttgtgtat

SEQ ID NO: 204287 - DNA, 20 bp, Artificial Sequence
  Description of Artificial Sequence: Synthetic oligonucleotide
  Target: LAMA2; (-) strand; PAM type: YTN; PAM sequence: CTG
cgaaaggtaggtagtagaat

SEQ ID NO: 204288 - DNA, 20 bp, Artificial Sequence
  Description of Artificial Sequence: Synthetic oligonucleotide
  Target: LAMA2; (-) strand; PAM type: YTN; PAM sequence: TTG
caaggatagccacactgcga

SEQ ID NO: 204289 - DNA, 20 bp, Artificial Sequence
  Description of Artificial Sequence: Synthetic oligonucleotide
  Target: LAMA2; (-) strand; PAM type: YTN; PAM sequence: TTT
gcaaggatagccacactgcg

SEQ ID NO: 204290 - DNA, 20 bp, Artificial Sequence
  Description of Artificial Sequence: Synthetic oligonucleotide
  Target: LAMA2; (-) strand; PAM type: YTN; PAM sequence: CTG
aaaggaagggaaagggtgaa

SEQ ID NO: 204291 - DNA, 20 bp, Artificial Sequence
  Description of Artificial Sequence: Synthetic oligonucleotide
  Target: LAMA2; (-) strand; PAM type: YTN; PAM sequence: CTA
tggagcatggggaaacaaga

SEQ ID NO: 204292 - DNA, 20 bp, Artificial Sequence
  Description of Artificial Sequence: Synthetic oligonucleotide
  Target: LAMA2; (-) strand; PAM type: YTN; PAM sequence: CTA
aatgatctatggagcatggg

SEQ ID NO: 204293 - DNA, 20 bp, Artificial Sequence
  Description of Artificial Sequence: Synthetic oligonucleotide
  Target: LAMA2; (-) strand; PAM type: YTN; PAM sequence: TTG
cagaaaacaaaataacacaa

SEQ ID NO: 204294 - DNA, 20 bp, Artificial Sequence
  Description of Artificial Sequence: Synthetic oligonucleotide
  Target: LAMA2; (-) strand; PAM type: YTN; PAM sequence: TTA
taccagcatcattgcagaaa

SEQ ID NO: 204295 - DNA, 20 bp, Artificial Sequence
  Description of Artificial Sequence: Synthetic oligonucleotide
  Target: LAMA2; (-) strand; PAM type: YTN; PAM sequence: CTG
aattataccagcatcattgc

SEQ ID NO: 204296 - DNA, 20 bp, Artificial Sequence
  Description of Artificial Sequence: Synthetic oligonucleotide
  Target: LAMA2; (-) strand; PAM type: YTN; PAM sequence: TTC
tgaattataccagcatcatt

SEQ ID NO: 204297 - DNA, 20 bp, Artificial Sequence
  Description of Artificial Sequence: Synthetic oligonucleotide
  Target: LAMA2; (-) strand; PAM type: YTN; PAM sequence: CTA
gtagttctgaattataccag

SEQ ID NO: 204298 - DNA, 20 bp, Artificial Sequence
  Description of Artificial Sequence: Synthetic oligonucleotide
  Target: LAMA2; (-) strand; PAM type: YTN; PAM sequence: TTG
ctagtagttctgaattatac

SEQ ID NO: 204299 - DNA, 20 bp, Artificial Sequence
  Description of Artificial Sequence: Synthetic oligonucleotide
  Target: LAMA2; (-) strand; PAM type: YTN; PAM sequence: TTT
gctagtagttctgaattata

SEQ ID NO: 204300 - DNA, 20 bp, Artificial Sequence
  Description of Artificial Sequence: Synthetic oligonucleotide
  Target: LAMA2; (-) strand; PAM type: YTN; PAM sequence: TTT
tgctagtagttctgaattat

SEQ ID NO: 204301 - DNA, 20 bp, Artificial Sequence
  Description of Artificial Sequence: Synthetic oligonucleotide
  Target: LAMA2; (-) strand; PAM type: YTN; PAM sequence: CTA
gagatgagattttgctagta

SEQ ID NO: 204302 - DNA, 20 bp, Artificial Sequence
  Description of Artificial Sequence: Synthetic oligonucleotide
  Target: LAMA2; (-) strand; PAM type: YTN; PAM sequence: TTA
taagcaggaaaatatcacat

SEQ ID NO: 204303 - DNA, 20 bp, Artificial Sequence
  Description of Artificial Sequence: Synthetic oligonucleotide
  Target: LAMA2; (-) strand; PAM type: YTN; PAM sequence: TTT
ataagcaggaaaatatcaca

SEQ ID NO: 204304 - DNA, 20 bp, Artificial Sequence
  Description of Artificial Sequence: Synthetic oligonucleotide
  Target: LAMA2; (-) strand; PAM type: YTN; PAM sequence: CTA
tagcacagcaagaatatggg

SEQ ID NO: 204305 - DNA, 20 bp, Artificial Sequence
  Description of Artificial Sequence: Synthetic oligonucleotide
  Target: LAMA2; (-) strand; PAM type: YTN; PAM sequence: TTG
actatagcacagcaagaata

SEQ ID NO: 204306 - DNA, 20 bp, Artificial Sequence
  Description of Artificial Sequence: Synthetic oligonucleotide
  Target: LAMA2; (-) strand; PAM type: YTN; PAM sequence: TTA
cacatattgactatagcaca

SEQ ID NO: 204307 - DNA, 20 bp, Artificial Sequence
  Description of Artificial Sequence: Synthetic oligonucleotide
  Target: LAMA2; (-) strand; PAM type: YTN; PAM sequence: CTC
agaagagttacacatattga

SEQ ID NO: 204308 - DNA, 20 bp, Artificial Sequence
  Description of Artificial Sequence: Synthetic oligonucleotide
  Target: LAMA2; (-) strand; PAM type: YTN; PAM sequence: CTG
caatgaatgaggaggcctca

SEQ ID NO: 204309 - DNA, 20 bp, Artificial Sequence
  Description of Artificial Sequence: Synthetic oligonucleotide
  Target: LAMA2; (-) strand; PAM type: YTN; PAM sequence: TTG
caaacatctgcaatgaatga

SEQ ID NO: 204310 - DNA, 20 bp, Artificial Sequence
  Description of Artificial Sequence: Synthetic oligonucleotide
  Target: LAMA2; (-) strand; PAM type: YTN; PAM sequence: TTT
gcaaacatctgcaatgaatg

SEQ ID NO: 204311 - DNA, 20 bp, Artificial Sequence
  Description of Artificial Sequence: Synthetic oligonucleotide
  Target: LAMA2; (-) strand; PAM type: YTN; PAM sequence: TTA
agaagagaggtaagtttgca

SEQ ID NO: 204312 - DNA, 20 bp, Artificial Sequence
  Description of Artificial Sequence: Synthetic oligonucleotide
  Target: LAMA2; (-) strand; PAM type: YTN; PAM sequence: CTT
aagaagagaggtaagtttgc

SEQ ID NO: 204313 - DNA, 20 bp, Artificial Sequence
  Description of Artificial Sequence: Synthetic oligonucleotide
  Target: LAMA2; (-) strand; PAM type: YTN; PAM sequence: TTA
agtacatacgaatgggccct

SEQ ID NO: 204314 - DNA, 20 bp, Artificial Sequence
  Description of Artificial Sequence: Synthetic oligonucleotide
  Target: LAMA2; (-) strand; PAM type: YTN; PAM sequence: TTT
aagtacatacgaatgggccc

SEQ ID NO: 204315 - DNA, 20 bp, Artificial Sequence
  Description of Artificial Sequence: Synthetic oligonucleotide
  Target: LAMA2; (-) strand; PAM type: YTN; PAM sequence: CTA
tttaagtacatacgaatggg

SEQ ID NO: 204316 - DNA, 20 bp, Artificial Sequence
  Description of Artificial Sequence: Synthetic oligonucleotide
  Target: LAMA2; (-) strand; PAM type: YTN; PAM sequence: TTC
ctatttaagtacatacgaat

SEQ ID NO: 204317 - DNA, 20 bp, Artificial Sequence
  Description of Artificial Sequence: Synthetic oligonucleotide
  Target: LAMA2; (-) strand; PAM type: YTN; PAM sequence: CTT
cctatttaagtacatacgaa

SEQ ID NO: 204318 - DNA, 20 bp, Artificial Sequence
  Description of Artificial Sequence: Synthetic oligonucleotide
  Target: LAMA2; (-) strand; PAM type: YTN; PAM sequence: CTG
atgatcttcctatttaagta

SEQ ID NO: 204319 - DNA, 20 bp, Artificial Sequence
  Description of Artificial Sequence: Synthetic oligonucleotide
  Target: LAMA2; (-) strand; PAM type: YTN; PAM sequence: CTC
tgatgatcttcctatttaag

SEQ ID NO: 204320 - DNA, 20 bp, Artificial Sequence
  Description of Artificial Sequence: Synthetic oligonucleotide
  Target: LAMA2; (-) strand; PAM type: YTN; PAM sequence: TTG
tctctgatgatcttcctatt

SEQ ID NO: 204321 - DNA, 20 bp, Artificial Sequence
  Description of Artificial Sequence: Synthetic oligonucleotide
  Target: LAMA2; (-) strand; PAM type: YTN; PAM sequence: CTT
gtctctgatgatcttcctat

SEQ ID NO: 204322 - DNA, 20 bp, Artificial Sequence
  Description of Artificial Sequence: Synthetic oligonucleotide
  Target: LAMA2; (-) strand; PAM type: YTN; PAM sequence: TTC
acatgtggatacttgtctct

SEQ ID NO: 204323 - DNA, 20 bp, Artificial Sequence
  Description of Artificial Sequence: Synthetic oligonucleotide
  Target: LAMA2; (-) strand; PAM type: YTN; PAM sequence: CTA
agggagttcacatgtggata

SEQ ID NO: 204324 - DNA, 20 bp, Artificial Sequence
  Description of Artificial Sequence: Synthetic oligonucleotide
  Target: LAMA2; (-) strand; PAM type: YTN; PAM sequence: TTA
gagaaaagaacagtagctaa

SEQ ID NO: 204325 - DNA, 20 bp, Artificial Sequence
  Description of Artificial Sequence: Synthetic oligonucleotide
  Target: LAMA2; (-) strand; PAM type: YTN; PAM sequence: TTT
agagaaaagaacagtagcta

SEQ ID NO: 204326 - DNA, 20 bp, Artificial Sequence
  Description of Artificial Sequence: Synthetic oligonucleotide
  Target: LAMA2; (-) strand; PAM type: YTN; PAM sequence: TTG
aacagagaaaaagagaaatt

SEQ ID NO: 204327 - DNA, 20 bp, Artificial Sequence
  Description of Artificial Sequence: Synthetic oligonucleotide
  Target: LAMA2; (-) strand; PAM type: YTN; PAM sequence: TTT
gaacagagaaaaagagaaat

SEQ ID NO: 204328 - DNA, 20 bp, Artificial Sequence
  Description of Artificial Sequence: Synthetic oligonucleotide
  Target: LAMA2; (-) strand; PAM type: YTN; PAM sequence: TTT
tgaacagagaaaaagagaaa

SEQ ID NO: 204329 - DNA, 20 bp, Artificial Sequence
  Description of Artificial Sequence: Synthetic oligonucleotide
  Target: LAMA2; (-) strand; PAM type: YTN; PAM sequence: TTT
ttgaacagagaaaaagagaa

SEQ ID NO: 204330 - DNA, 20 bp, Artificial Sequence
  Description of Artificial Sequence: Synthetic oligonucleotide
  Target: LAMA2; (-) strand; PAM type: YTN; PAM sequence: TTT
tttgaacagagaaaaagaga

SEQ ID NO: 204331 - DNA, 20 bp, Artificial Sequence
  Description of Artificial Sequence: Synthetic oligonucleotide
  Target: LAMA2; (-) strand; PAM type: YTN; PAM sequence: TTG
gaaattttttgaacagagaa

SEQ ID NO: 204332 - DNA, 20 bp, Artificial Sequence
  Description of Artificial Sequence: Synthetic oligonucleotide
  Target: LAMA2; (-) strand; PAM type: YTN; PAM sequence: TTG
aaagttggaaattttttgaa

SEQ ID NO: 204333 - DNA, 20 bp, Artificial Sequence
  Description of Artificial Sequence: Synthetic oligonucleotide
  Target: LAMA2; (-) strand; PAM type: YTN; PAM sequence: TTC
cagaagtgtccacaaagttg

SEQ ID NO: 204334 - DNA, 20 bp, Artificial Sequence
  Description of Artificial Sequence: Synthetic oligonucleotide
  Target: LAMA2; (-) strand; PAM type: YTN; PAM sequence: TTT
ccagaagtgtccacaaagtt

SEQ ID NO: 204335 - DNA, 20 bp, Artificial Sequence
  Description of Artificial Sequence: Synthetic oligonucleotide
  Target: LAMA2; (-) strand; PAM type: YTN; PAM sequence: TTT
tccagaagtgtccacaaagt

SEQ ID NO: 204336 - DNA, 20 bp, Artificial Sequence
  Description of Artificial Sequence: Synthetic oligonucleotide
  Target: LAMA2; (-) strand; PAM type: YTN; PAM sequence: TTT
ttccagaagtgtccacaaag

SEQ ID NO: 204337 - DNA, 20 bp, Artificial Sequence
  Description of Artificial Sequence: Synthetic oligonucleotide
  Target: LAMA2; (-) strand; PAM type: YTN; PAM sequence: TTT
tttccagaagtgtccacaaa

SEQ ID NO: 204338 - DNA, 20 bp, Artificial Sequence
  Description of Artificial Sequence: Synthetic oligonucleotide
  Target: LAMA2; (-) strand; PAM type: YTN; PAM sequence: TTT
ttttccagaagtgtccacaa

SEQ ID NO: 204339 - DNA, 20 bp, Artificial Sequence
  Description of Artificial Sequence: Synthetic oligonucleotide
  Target: LAMA2; (-) strand; PAM type: YTN; PAM sequence: CTT
tttttccagaagtgtccaca

SEQ ID NO: 204340 - DNA, 20 bp, Artificial Sequence
  Description of Artificial Sequence: Synthetic oligonucleotide
  Target: LAMA2; (-) strand; PAM type: YTN; PAM sequence: TTC
tttttttccagaagtgtcca

SEQ ID NO: 204341 - DNA, 20 bp, Artificial Sequence
  Description of Artificial Sequence: Synthetic oligonucleotide
  Target: LAMA2; (-) strand; PAM type: YTN; PAM sequence: TTT
ctttttttccagaagtgtcc

SEQ ID NO: 204342 - DNA, 20 bp, Artificial Sequence
  Description of Artificial Sequence: Synthetic oligonucleotide
  Target: LAMA2; (-) strand; PAM type: YTN; PAM sequence: CTT
tctttttttccagaagtgtc

SEQ ID NO: 204343 - DNA, 20 bp, Artificial Sequence
  Description of Artificial Sequence: Synthetic oligonucleotide
  Target: LAMA2; (-) strand; PAM type: YTN; PAM sequence: TTG
gtaagacacgactttctttt

SEQ ID NO: 204344 - DNA, 20 bp, Artificial Sequence
  Description of Artificial Sequence: Synthetic oligonucleotide
  Target: LAMA2; (-) strand; PAM type: YTN; PAM sequence: CTG
caaaattggtaagacacgac

SEQ ID NO: 204345 - DNA, 20 bp, Artificial Sequence
  Description of Artificial Sequence: Synthetic oligonucleotide
  Target: LAMA2; (-) strand; PAM type: YTN; PAM sequence: TTC
tgcaaaattggtaagacacg

SEQ ID NO: 204346 - DNA, 20 bp, Artificial Sequence
  Description of Artificial Sequence: Synthetic oligonucleotide
  Target: LAMA2; (-) strand; PAM type: YTN; PAM sequence: TTC
aattctgcaaaattggtaag

SEQ ID NO: 204347 - DNA, 20 bp, Artificial Sequence
  Description of Artificial Sequence: Synthetic oligonucleotide
  Target: LAMA2; (-) strand; PAM type: YTN; PAM sequence: TTG
taattcaattctgcaaaatt

SEQ ID NO: 204348 - DNA, 20 bp, Artificial Sequence
  Description of Artificial Sequence: Synthetic oligonucleotide
  Target: LAMA2; (-) strand; PAM type: YTN; PAM sequence: CTT
gtaattcaattctgcaaaat

SEQ ID NO: 204349 - DNA, 20 bp, Artificial Sequence
  Description of Artificial Sequence: Synthetic oligonucleotide
  Target: LAMA2; (-) strand; PAM type: YTN; PAM sequence: TTA
gtatgagaaacttgtaattc

SEQ ID NO: 204350 - DNA, 20 bp, Artificial Sequence
  Description of Artificial Sequence: Synthetic oligonucleotide
  Target: LAMA2; (-) strand; PAM type: YTN; PAM sequence: CTT
agtatgagaaacttgtaatt

SEQ ID NO: 204351 - DNA, 20 bp, Artificial Sequence
  Description of Artificial Sequence: Synthetic oligonucleotide
  Target: LAMA2; (-) strand; PAM type: YTN; PAM sequence: TTC
catagaaaaatgtcttagta

SEQ ID NO: 204352 - DNA, 20 bp, Artificial Sequence
  Description of Artificial Sequence: Synthetic oligonucleotide
  Target: LAMA2; (-) strand; PAM type: YTN; PAM sequence: CTT
ccatagaaaaatgtcttagt

SEQ ID NO: 204353 - DNA, 20 bp, Artificial Sequence
  Description of Artificial Sequence: Synthetic oligonucleotide
  Target: LAMA2; (-) strand; PAM type: YTN; PAM sequence: TTC
ttccatagaaaaatgtctta

SEQ ID NO: 204354 - DNA, 20 bp, Artificial Sequence
  Description of Artificial Sequence: Synthetic oligonucleotide
  Target: LAMA2; (-) strand; PAM type: YTN; PAM sequence: TTT
cttccatagaaaaatgtctt

SEQ ID NO: 204355 - DNA, 20 bp, Artificial Sequence
  Description of Artificial Sequence: Synthetic oligonucleotide
  Target: LAMA2; (-) strand; PAM type: YTN; PAM sequence: TTG
tttcttccatagaaaaatgt

SEQ ID NO: 204356 - DNA, 20 bp, Artificial Sequence
  Description of Artificial Sequence: Synthetic oligonucleotide
  Target: LAMA2; (-) strand; PAM type: YTN; PAM sequence: CTT
gtttcttccatagaaaaatg

SEQ ID NO: 204357 - DNA, 20 bp, Artificial Sequence
  Description of Artificial Sequence: Synthetic oligonucleotide
  Target: LAMA2; (-) strand; PAM type: YTN; PAM sequence: CTA
caaaagaaccttgtttcttc

SEQ ID NO: 204358 - DNA, 20 bp, Artificial Sequence
  Description of Artificial Sequence: Synthetic oligonucleotide
  Target: LAMA2; (-) strand; PAM type: YTN; PAM sequence: CTC
tacaaaagaaccttgtttct

SEQ ID NO: 204359 - DNA, 20 bp, Artificial Sequence
  Description of Artificial Sequence: Synthetic oligonucleotide
  Target: LAMA2; (-) strand; PAM type: YTN; PAM sequence: CTC
atctctacaaaagaaccttg

SEQ ID NO: 204360 - DNA, 20 bp, Artificial Sequence
  Description of Artificial Sequence: Synthetic oligonucleotide
  Target: LAMA2; (-) strand; PAM type: YTN; PAM sequence: TTC
tcatctctacaaaagaacct

SEQ ID NO: 204361 - DNA, 20 bp, Artificial Sequence
  Description of Artificial Sequence: Synthetic oligonucleotide
  Target: LAMA2; (-) strand; PAM type: YTN; PAM sequence: TTA
aattctcatctctacaaaag

SEQ ID NO: 204362 - DNA, 20 bp, Artificial Sequence
  Description of Artificial Sequence: Synthetic oligonucleotide
  Target: LAMA2; (-) strand; PAM type: YTN; PAM sequence: TTT
aaattctcatctctacaaaa

SEQ ID NO: 204363 - DNA, 20 bp, Artificial Sequence
  Description of Artificial Sequence: Synthetic oligonucleotide
  Target: LAMA2; (-) strand; PAM type: YTN; PAM sequence: TTG
caaaaaaaaaaaaaaatcat

SEQ ID NO: 204364 - DNA, 20 bp, Artificial Sequence
  Description of Artificial Sequence: Synthetic oligonucleotide
  Target: LAMA2; (-) strand; PAM type: YTN; PAM sequence: TTC
ccattgcaaaaaaaaaaaaa

SEQ ID NO: 204365 - DNA, 20 bp, Artificial Sequence
  Description of Artificial Sequence: Synthetic oligonucleotide
  Target: LAMA2; (-) strand; PAM type: YTN; PAM sequence: CTT
cccattgcaaaaaaaaaaaa

SEQ ID NO: 204366 - DNA, 20 bp, Artificial Sequence
  Description of Artificial Sequence: Synthetic oligonucleotide
  Target: LAMA2; (-) strand; PAM type: YTN; PAM sequence: CTC
ttcccattgcaaaaaaaaaa

SEQ ID NO: 204367 - DNA, 20 bp, Artificial Sequence
  Description of Artificial Sequence: Synthetic oligonucleotide
  Target: LAMA2; (-) strand; PAM type: YTN; PAM sequence: CTC
tcttcccattgcaaaaaaaa

SEQ ID NO: 204368 - DNA, 20 bp, Artificial Sequence
  Description of Artificial Sequence: Synthetic oligonucleotide
  Target: LAMA2; (-) strand; PAM type: YTN; PAM sequence: CTA
gtgagaaatctctcttccca

SEQ ID NO: 204369 - DNA, 20 bp, Artificial Sequence
  Description of Artificial Sequence: Synthetic oligonucleotide
  Target: LAMA2; (-) strand; PAM type: YTN; PAM sequence: CTA
taaagtcagatgaaaaccag

SEQ ID NO: 204370 - DNA, 20 bp, Artificial Sequence
  Description of Artificial Sequence: Synthetic oligonucleotide
  Target: LAMA2; (-) strand; PAM type: YTN; PAM sequence: TTA
aactataaagtcagatgaaa

SEQ ID NO: 204371 - DNA, 20 bp, Artificial Sequence
  Description of Artificial Sequence: Synthetic oligonucleotide
  Target: LAMA2; (-) strand; PAM type: YTN; PAM sequence: TTT
aaactataaagtcagatgaa

SEQ ID NO: 204372 - DNA, 20 bp, Artificial Sequence
  Description of Artificial Sequence: Synthetic oligonucleotide
  Target: LAMA2; (-) strand; PAM type: YTN; PAM sequence: TTT
taaactataaagtcagatga

SEQ ID NO: 204373 - DNA, 20 bp, Artificial Sequence
  Description of Artificial Sequence: Synthetic oligonucleotide
  Target: LAMA2; (-) strand; PAM type: YTN; PAM sequence: CTA
tcaattttaaactataaagt

SEQ ID NO: 204374 - DNA, 20 bp, Artificial Sequence
  Description of Artificial Sequence: Synthetic oligonucleotide
  Target: LAMA2; (-) strand; PAM type: YTN; PAM sequence: TTG
ccatcaaaatggctatcaat

SEQ ID NO: 204375 - DNA, 20 bp, Artificial Sequence
  Description of Artificial Sequence: Synthetic oligonucleotide
  Target: LAMA2; (-) strand; PAM type: YTN; PAM sequence: CTA
aaccatgtgtgttgccatca

SEQ ID NO: 204376 - DNA, 20 bp, Artificial Sequence
  Description of Artificial Sequence: Synthetic oligonucleotide
  Target: LAMA2; (-) strand; PAM type: YTN; PAM sequence: TTA
actaaaccatgtgtgttgcc

SEQ ID NO: 204377 - DNA, 20 bp, Artificial Sequence
  Description of Artificial Sequence: Synthetic oligonucleotide
  Target: LAMA2; (-) strand; PAM type: YTN; PAM sequence: TTT
aactaaaccatgtgtgttgc

SEQ ID NO: 204378 - DNA, 20 bp, Artificial Sequence
  Description of Artificial Sequence: Synthetic oligonucleotide
  Target: LAMA2; (-) strand; PAM type: YTN; PAM sequence: CTG
aggacggagtaaaatttaac

SEQ ID NO: 204379 - DNA, 20 bp, Artificial Sequence
  Description of Artificial Sequence: Synthetic oligonucleotide
  Target: LAMA2; (-) strand; PAM type: YTN; PAM sequence: CTC
aggaaaactgaggacggagt

SEQ ID NO: 204380 - DNA, 20 bp, Artificial Sequence
  Description of Artificial Sequence: Synthetic oligonucleotide
  Target: LAMA2; (-) strand; PAM type: YTN; PAM sequence: CTC
cctcaggaaaactgaggacg

SEQ ID NO: 204381 - DNA, 20 bp, Artificial Sequence
  Description of Artificial Sequence: Synthetic oligonucleotide
  Target: LAMA2; (-) strand; PAM type: YTN; PAM sequence: CTG
acactccctcaggaaaactg

SEQ ID NO: 204382 - DNA, 20 bp, Artificial Sequence
  Description of Artificial Sequence: Synthetic oligonucleotide
  Target: LAMA2; (-) strand; PAM type: YTN; PAM sequence: TTG
taaagaaaacacagtagctg

SEQ ID NO: 204383 - DNA, 20 bp, Artificial Sequence
  Description of Artificial Sequence: Synthetic oligonucleotide
  Target: LAMA2; (-) strand; PAM type: YTN; PAM sequence: TTT
gtaaagaaaacacagtagct

SEQ ID NO: 204384 - DNA, 20 bp, Artificial Sequence
  Description of Artificial Sequence: Synthetic oligonucleotide
  Target: LAMA2; (-) strand; PAM type: YTN; PAM sequence: TTT
tgtaaagaaaacacagtagc

SEQ ID NO: 204385 - DNA, 20 bp, Artificial Sequence
  Description of Artificial Sequence: Synthetic oligonucleotide
  Target: LAMA2; (-) strand; PAM type: YTN; PAM sequence: TTG
ttttgtaaagaaaacacagt

SEQ ID NO: 204386 - DNA, 20 bp, Artificial Sequence
  Description of Artificial Sequence: Synthetic oligonucleotide
  Target: LAMA2; (-) strand; PAM type: YTN; PAM sequence: TTA
tgttgttttgtaaagaaaac

SEQ ID NO: 204387 - DNA, 20 bp, Artificial Sequence
  Description of Artificial Sequence: Synthetic oligonucleotide
  Target: LAMA2; (-) strand; PAM type: YTN; PAM sequence: TTT
atgttgttttgtaaagaaaa

SEQ ID NO: 204388 - DNA, 20 bp, Artificial Sequence
  Description of Artificial Sequence: Synthetic oligonucleotide
  Target: LAMA2; (-) strand; PAM type: YTN; PAM sequence: TTC
ccagggtggatacatggaat

SEQ ID NO: 204389 - DNA, 20 bp, Artificial Sequence
  Description of Artificial Sequence: Synthetic oligonucleotide
  Target: LAMA2; (-) strand; PAM type: YTN; PAM sequence: TTC
aacgcagtgaagtgattccc

SEQ ID NO: 204390 - DNA, 20 bp, Artificial Sequence
  Description of Artificial Sequence: Synthetic oligonucleotide
  Target: LAMA2; (-) strand; PAM type: YTN; PAM sequence: CTA
tccagattcaacgcagtgaa

SEQ ID NO: 204391 - DNA, 20 bp, Artificial Sequence
  Description of Artificial Sequence: Synthetic oligonucleotide
  Target: LAMA2; (-) strand; PAM type: YTN; PAM sequence: TTC
ctatccagattcaacgcagt

SEQ ID NO: 204392 - DNA, 20 bp, Artificial Sequence
  Description of Artificial Sequence: Synthetic oligonucleotide
  Target: LAMA2; (-) strand; PAM type: YTN; PAM sequence: TTT
cctatccagattcaacgcag

SEQ ID NO: 204393 - DNA, 20 bp, Artificial Sequence
  Description of Artificial Sequence: Synthetic oligonucleotide
  Target: LAMA2; (-) strand; PAM type: YTN; PAM sequence: TTA
tttcctatccagattcaacg

SEQ ID NO: 204394 - DNA, 20 bp, Artificial Sequence
  Description of Artificial Sequence: Synthetic oligonucleotide
  Target: LAMA2; (-) strand; PAM type: YTN; PAM sequence: TTT
atttcctatccagattcaac

SEQ ID NO: 204395 - DNA, 20 bp, Artificial Sequence
  Description of Artificial Sequence: Synthetic oligonucleotide
  Target: LAMA2; (-) strand; PAM type: YTN; PAM sequence: CTT
tatttcctatccagattcaa

SEQ ID NO: 204396 - DNA, 20 bp, Artificial Sequence
  Description of Artificial Sequence: Synthetic oligonucleotide
  Target: LAMA2; (-) strand; PAM type: YTN; PAM sequence: TTC
atgaatctttatttcctatc

SEQ ID NO: 204397 - DNA, 20 bp, Artificial Sequence
  Description of Artificial Sequence: Synthetic oligonucleotide
  Target: LAMA2; (-) strand; PAM type: YTN; PAM sequence: TTG
tgaaatattcatgaatcttt

SEQ ID NO: 204398 - DNA, 20 bp, Artificial Sequence
  Description of Artificial Sequence: Synthetic oligonucleotide
  Target: LAMA2; (-) strand; PAM type: YTN; PAM sequence: CTA
gtaaattgtgaaatattcat

SEQ ID NO: 204399 - DNA, 20 bp, Artificial Sequence
  Description of Artificial Sequence: Synthetic oligonucleotide
  Target: LAMA2; (-) strand; PAM type: YTN; PAM sequence: TTC
ctagtaaattgtgaaatatt

SEQ ID NO: 204400 - DNA, 20 bp, Artificial Sequence
  Description of Artificial Sequence: Synthetic oligonucleotide
  Target: LAMA2; (-) strand; PAM type: YTN; PAM sequence: TTA
gtagaaaatccacacggaag

SEQ ID NO: 204401 - DNA, 20 bp, Artificial Sequence
  Description of Artificial Sequence: Synthetic oligonucleotide
  Target: LAMA2; (-) strand; PAM type: YTN; PAM sequence: CTA
attagtagaaaatccacacg

SEQ ID NO: 204402 - DNA, 20 bp, Artificial Sequence
  Description of Artificial Sequence: Synthetic oligonucleotide
  Target: LAMA2; (-) strand; PAM type: YTN; PAM sequence: TTA
gacataccaagtaactaatt

SEQ ID NO: 204403 - DNA, 20 bp, Artificial Sequence
  Description of Artificial Sequence: Synthetic oligonucleotide
  Target: LAMA2; (-) strand; PAM type: YTN; PAM sequence: CTT
agacataccaagtaactaat

SEQ ID NO: 204404 - DNA, 20 bp, Artificial Sequence
  Description of Artificial Sequence: Synthetic oligonucleotide
  Target: LAMA2; (-) strand; PAM type: YTN; PAM sequence: TTG
tataataaaaataacgtatc

SEQ ID NO: 204405 - DNA, 20 bp, Artificial Sequence
  Description of Artificial Sequence: Synthetic oligonucleotide
  Target: LAMA2; (-) strand; PAM type: YTN; PAM sequence: TTT
gtataataaaaataacgtat

SEQ ID NO: 204406 - DNA, 20 bp, Artificial Sequence
  Description of Artificial Sequence: Synthetic oligonucleotide
  Target: LAMA2; (-) strand; PAM type: YTN; PAM sequence: CTT
tgtataataaaaataacgta

SEQ ID NO: 204407 - DNA, 20 bp, Artificial Sequence
  Description of Artificial Sequence: Synthetic oligonucleotide
  Target: LAMA2; (-) strand; PAM type: YTN; PAM sequence: TTA
tatcaaaggaataaaaagtg

SEQ ID NO: 204408 - DNA, 20 bp, Artificial Sequence
  Description of Artificial Sequence: Synthetic oligonucleotide
  Target: LAMA2; (-) strand; PAM type: YTN; PAM sequence: TTT
atatcaaaggaataaaaagt

SEQ ID NO: 204409 - DNA, 20 bp, Artificial Sequence
  Description of Artificial Sequence: Synthetic oligonucleotide
  Target: LAMA2; (-) strand; PAM type: YTN; PAM sequence: TTA
tgatttatatcaaaggaata

SEQ ID NO: 204410 - DNA, 20 bp, Artificial Sequence
  Description of Artificial Sequence: Synthetic oligonucleotide
  Target: LAMA2; (-) strand; PAM type: YTN; PAM sequence: CTG
tattatgatttatatcaaag

SEQ ID NO: 204411 - DNA, 20 bp, Artificial Sequence
  Description of Artificial Sequence: Synthetic oligonucleotide
  Target: LAMA2; (-) strand; PAM type: YTN; PAM sequence: TTA
tcagacactgtattatgatt

SEQ ID NO: 204412 - DNA, 20 bp, Artificial Sequence
  Description of Artificial Sequence: Synthetic oligonucleotide
  Target: LAMA2; (-) strand; PAM type: YTN; PAM sequence: CTT
atcagacactgtattatgat

SEQ ID NO: 204413 - DNA, 20 bp, Artificial Sequence
  Description of Artificial Sequence: Synthetic oligonucleotide
  Target: LAMA2; (-) strand; PAM type: YTN; PAM sequence: CTG
tacttatcagacactgtatt

SEQ ID NO: 204414 - DNA, 20 bp, Artificial Sequence
  Description of Artificial Sequence: Synthetic oligonucleotide
  Target: LAMA2; (-) strand; PAM type: YTN; PAM sequence: TTA
aaaagctgtacttatcagac

SEQ ID NO: 204415 - DNA, 20 bp, Artificial Sequence
  Description of Artificial Sequence: Synthetic oligonucleotide
  Target: LAMA2; (-) strand; PAM type: YTN; PAM sequence: TTT
aaaaagctgtacttatcaga

SEQ ID NO: 204416 - DNA, 20 bp, Artificial Sequence
  Description of Artificial Sequence: Synthetic oligonucleotide
  Target: LAMA2; (-) strand; PAM type: YTN; PAM sequence: TTT
taaaaagctgtacttatcag

SEQ ID NO: 204417 - DNA, 20 bp, Artificial Sequence
  Description of Artificial Sequence: Synthetic oligonucleotide
  Target: LAMA2; (-) strand; PAM type: YTN; PAM sequence: TTT
ttaaaaagctgtacttatca

SEQ ID NO: 204418 - DNA, 20 bp, Artificial Sequence
  Description of Artificial Sequence: Synthetic oligonucleotide
  Target: LAMA2; (-) strand; PAM type: YTN; PAM sequence: CTA
tgaaaagagtttttaaaaag

SEQ ID NO: 204419 - DNA, 20 bp, Artificial Sequence
  Description of Artificial Sequence: Synthetic oligonucleotide
  Target: LAMA2; (-) strand; PAM type: YTN; PAM sequence: CTA
aaaagaataagacagtctat

SEQ ID NO: 204420 - DNA, 20 bp, Artificial Sequence
  Description of Artificial Sequence: Synthetic oligonucleotide
  Target: LAMA2; (-) strand; PAM type: YTN; PAM sequence: TTC
aggaccatgcacatcatggg

SEQ ID NO: 204421 - DNA, 20 bp, Artificial Sequence
  Description of Artificial Sequence: Synthetic oligonucleotide
  Target: LAMA2; (-) strand; PAM type: YTN; PAM sequence: TTC
cacattcaggaccatgcaca

SEQ ID NO: 204422 - DNA, 20 bp, Artificial Sequence
  Description of Artificial Sequence: Synthetic oligonucleotide
  Target: LAMA2; (-) strand; PAM type: YTN; PAM sequence: TTC
agagagacccattccacatt

SEQ ID NO: 204423 - DNA, 20 bp, Artificial Sequence
  Description of Artificial Sequence: Synthetic oligonucleotide
  Target: LAMA2; (-) strand; PAM type: YTN; PAM sequence: CTT
cagagagacccattccacat

SEQ ID NO: 204424 - DNA, 20 bp, Artificial Sequence
  Description of Artificial Sequence: Synthetic oligonucleotide
  Target: LAMA2; (-) strand; PAM type: YTN; PAM sequence: TTC
ttcagagagacccattccac

SEQ ID NO: 204425 - DNA, 20 bp, Artificial Sequence
  Description of Artificial Sequence: Synthetic oligonucleotide
  Target: LAMA2; (-) strand; PAM type: YTN; PAM sequence: TTT
cttcagagagacccattcca

SEQ ID NO: 204426 - DNA, 20 bp, Artificial Sequence
  Description of Artificial Sequence: Synthetic oligonucleotide
  Target: LAMA2; (-) strand; PAM type: YTN; PAM sequence: TTT
tcttcagagagacccattcc

SEQ ID NO: 204427 - DNA, 20 bp, Artificial Sequence
  Description of Artificial Sequence: Synthetic oligonucleotide
  Target: LAMA2; (-) strand; PAM type: YTN; PAM sequence: CTT
ttcttcagagagacccattc

SEQ ID NO: 204428 - DNA, 20 bp, Artificial Sequence
  Description of Artificial Sequence: Synthetic oligonucleotide
  Target: LAMA2; (-) strand; PAM type: YTN; PAM sequence: CTG
acccacttttcttcagagag

SEQ ID NO: 204429 - DNA, 20 bp, Artificial Sequence
  Description of Artificial Sequence: Synthetic oligonucleotide
  Target: LAMA2; (-) strand; PAM type: YTN; PAM sequence: TTC
caatatgcacaagcaaccat

SEQ ID NO: 204430 - DNA, 20 bp, Artificial Sequence
  Description of Artificial Sequence: Synthetic oligonucleotide
  Target: LAMA2; (-) strand; PAM type: YTN; PAM sequence: TTT
ccaatatgcacaagcaacca

SEQ ID NO: 204431 - DNA, 20 bp, Artificial Sequence
  Description of Artificial Sequence: Synthetic oligonucleotide
  Target: LAMA2; (-) strand; PAM type: YTN; PAM sequence: CTT
tccaatatgcacaagcaacc

SEQ ID NO: 204432 - DNA, 20 bp, Artificial Sequence
  Description of Artificial Sequence: Synthetic oligonucleotide
  Target: LAMA2; (-) strand; PAM type: YTN; PAM sequence: TTC
tttccaatatgcacaagcaa

SEQ ID NO: 204433 - DNA, 20 bp, Artificial Sequence
  Description of Artificial Sequence: Synthetic oligonucleotide
  Target: LAMA2; (-) strand; PAM type: YTN; PAM sequence: TTT
ctttccaatatgcacaagca

SEQ ID NO: 204434 - DNA, 20 bp, Artificial Sequence
  Description of Artificial Sequence: Synthetic oligonucleotide
  Target: LAMA2; (-) strand; PAM type: YTN; PAM sequence: CTA
tcagtttctttccaatatgc

SEQ ID NO: 204435 - DNA, 20 bp, Artificial Sequence
  Description of Artificial Sequence: Synthetic oligonucleotide
  Target: LAMA2; (-) strand; PAM type: YTN; PAM sequence: TTC
aaaagagaccaggaagctat

SEQ ID NO: 204436 - DNA, 20 bp, Artificial Sequence
  Description of Artificial Sequence: Synthetic oligonucleotide
  Target: LAMA2; (-) strand; PAM type: YTN; PAM sequence: CTT
caaaagagaccaggaagcta

SEQ ID NO: 204437 - DNA, 20 bp, Artificial Sequence
  Description of Artificial Sequence: Synthetic oligonucleotide
  Target: LAMA2; (-) strand; PAM type: YTN; PAM sequence: TTA
caacagcacccttcaaaaga

SEQ ID NO: 204438 - DNA, 20 bp, Artificial Sequence
  Description of Artificial Sequence: Synthetic oligonucleotide
  Target: LAMA2; (-) strand; PAM type: YTN; PAM sequence: TTT
acaacagcacccttcaaaag

SEQ ID NO: 204439 - DNA, 20 bp, Artificial Sequence
  Description of Artificial Sequence: Synthetic oligonucleotide
  Target: LAMA2; (-) strand; PAM type: YTN; PAM sequence: TTT
tacaacagcacccttcaaaa

SEQ ID NO: 204440 - DNA, 20 bp, Artificial Sequence
  Description of Artificial Sequence: Synthetic oligonucleotide
  Target: LAMA2; (-) strand; PAM type: YTN; PAM sequence: CTG
tattttacaacagcaccctt

SEQ ID NO: 204441 - DNA, 20 bp, Artificial Sequence
  Description of Artificial Sequence: Synthetic oligonucleotide
  Target: LAMA2; (-) strand; PAM type: YTN; PAM sequence: CTA
atctgtattttacaacagca

SEQ ID NO: 204442 - DNA, 20 bp, Artificial Sequence
  Description of Artificial Sequence: Synthetic oligonucleotide
  Target: LAMA2; (-) strand; PAM type: YTN; PAM sequence: TTG
actaatctgtattttacaac

SEQ ID NO: 204443 - DNA, 20 bp, Artificial Sequence
  Description of Artificial Sequence: Synthetic oligonucleotide
  Target: LAMA2; (-) strand; PAM type: YTN; PAM sequence: CTT
gactaatctgtattttacaa

SEQ ID NO: 204444 - DNA, 20 bp, Artificial Sequence
  Description of Artificial Sequence: Synthetic oligonucleotide
  Target: LAMA2; (-) strand; PAM type: YTN; PAM sequence: CTG
taaaccttgactaatctgta

SEQ ID NO: 204445 - DNA, 20 bp, Artificial Sequence
  Description of Artificial Sequence: Synthetic oligonucleotide
  Target: LAMA2; (-) strand; PAM type: YTN; PAM sequence: CTA
gtaacagcactgtaaacctt

SEQ ID NO: 204446 - DNA, 20 bp, Artificial Sequence
  Description of Artificial Sequence: Synthetic oligonucleotide
  Target: LAMA2; (-) strand; PAM type: YTN; PAM sequence: TTC
aggctagtaacagcactgta

SEQ ID NO: 204447 - DNA, 20 bp, Artificial Sequence
  Description of Artificial Sequence: Synthetic oligonucleotide
  Target: LAMA2; (-) strand; PAM type: YTN; PAM sequence: TTG
aagtgttcaggctagtaaca

SEQ ID NO: 204448 - DNA, 20 bp, Artificial Sequence
  Description of Artificial Sequence: Synthetic oligonucleotide
  Target: LAMA2; (-) strand; PAM type: YTN; PAM sequence: TTT
gaagtgttcaggctagtaac

SEQ ID NO: 204449 - DNA, 20 bp, Artificial Sequence
  Description of Artificial Sequence: Synthetic oligonucleotide
  Target: LAMA2; (-) strand; PAM type: YTN; PAM sequence: CTG
catggtggtttgaagtgttc

SEQ ID NO: 204450 - DNA, 20 bp, Artificial Sequence
  Description of Artificial Sequence: Synthetic oligonucleotide
  Target: LAMA2; (-) strand; PAM type: YTN; PAM sequence: TTA
aactgcatggtggtttgaag

SEQ ID NO: 204451 - DNA, 20 bp, Artificial Sequence
  Description of Artificial Sequence: Synthetic oligonucleotide
  Target: LAMA2; (-) strand; PAM type: YTN; PAM sequence: TTT
aaactgcatggtggtttgaa

SEQ ID NO: 204452 - DNA, 20 bp, Artificial Sequence
  Description of Artificial Sequence: Synthetic oligonucleotide
  Target: LAMA2; (-) strand; PAM type: YTN; PAM sequence: TTT
taaactgcatggtggtttga

SEQ ID NO: 204453 - DNA, 20 bp, Artificial Sequence
  Description of Artificial Sequence: Synthetic oligonucleotide
  Target: LAMA2; (-) strand; PAM type: YTN; PAM sequence: CTG
aatagttttaaactgcatgg

SEQ ID NO: 204454 - DNA, 20 bp, Artificial Sequence
  Description of Artificial Sequence: Synthetic oligonucleotide
  Target: LAMA2; (-) strand; PAM type: YTN; PAM sequence: TTG
ccataagcactgaatagttt

SEQ ID NO: 204455 - DNA, 20 bp, Artificial Sequence
  Description of Artificial Sequence: Synthetic oligonucleotide
  Target: LAMA2; (-) strand; PAM type: YTN; PAM sequence: TTT
gccataagcactgaatagtt

SEQ ID NO: 204456 - DNA, 20 bp, Artificial Sequence
  Description of Artificial Sequence: Synthetic oligonucleotide
  Target: LAMA2; (-) strand; PAM type: YTN; PAM sequence: TTT
tgccataagcactgaatagt

SEQ ID NO: 204457 - DNA, 20 bp, Artificial Sequence
  Description of Artificial Sequence: Synthetic oligonucleotide
  Target: LAMA2; (-) strand; PAM type: YTN; PAM sequence: CTG
aattttgccataagcactga

SEQ ID NO: 204458 - DNA, 20 bp, Artificial Sequence
  Description of Artificial Sequence: Synthetic oligonucleotide
  Target: LAMA2; (-) strand; PAM type: YTN; PAM sequence: CTG
ccccaacatcaaaagacctg

SEQ ID NO: 204459 - DNA, 20 bp, Artificial Sequence
  Description of Artificial Sequence: Synthetic oligonucleotide
  Target: LAMA2; (-) strand; PAM type: YTN; PAM sequence: CTC
ctgccccaacatcaaaagac

SEQ ID NO: 204460 - DNA, 20 bp, Artificial Sequence
  Description of Artificial Sequence: Synthetic oligonucleotide
  Target: LAMA2; (-) strand; PAM type: YTN; PAM sequence: CTA
ctcctgccccaacatcaaaa

SEQ ID NO: 204461 - DNA, 20 bp, Artificial Sequence
  Description of Artificial Sequence: Synthetic oligonucleotide
  Target: LAMA2; (-) strand; PAM type: YTN; PAM sequence: TTC
caataaaatgtctactcctg

SEQ ID NO: 204462 - DNA, 20 bp, Artificial Sequence
  Description of Artificial Sequence: Synthetic oligonucleotide
  Target: LAMA2; (-) strand; PAM type: YTN; PAM sequence: TTA
cattccaataaaatgtctac

SEQ ID NO: 204463 - DNA, 20 bp, Artificial Sequence
  Description of Artificial Sequence: Synthetic oligonucleotide
  Target: LAMA2; (-) strand; PAM type: YTN; PAM sequence: CTT
acattccaataaaatgtcta

SEQ ID NO: 204464 - DNA, 20 bp, Artificial Sequence
  Description of Artificial Sequence: Synthetic oligonucleotide
  Target: LAMA2; (-) strand; PAM type: YTN; PAM sequence: TTG
ccttacattccaataaaatg

SEQ ID NO: 204465 - DNA, 20 bp, Artificial Sequence
  Description of Artificial Sequence: Synthetic oligonucleotide
  Target: LAMA2; (-) strand; PAM type: YTN; PAM sequence: TTT
gccttacattccaataaaat

SEQ ID NO: 204466 - DNA, 20 bp, Artificial Sequence
  Description of Artificial Sequence: Synthetic oligonucleotide
  Target: LAMA2; (-) strand; PAM type: YTN; PAM sequence: TTT
tgccttacattccaataaaa

SEQ ID NO: 204467 - DNA, 20 bp, Artificial Sequence
  Description of Artificial Sequence: Synthetic oligonucleotide
  Target: LAMA2; (-) strand; PAM type: YTN; PAM sequence: TTT
ttgccttacattccaataaa

SEQ ID NO: 204468 - DNA, 20 bp, Artificial Sequence
  Description of Artificial Sequence: Synthetic oligonucleotide
  Target: LAMA2; (-) strand; PAM type: YTN; PAM sequence: CTA
tttttgccttacattccaat

SEQ ID NO: 204469 - DNA, 20 bp, Artificial Sequence
  Description of Artificial Sequence: Synthetic oligonucleotide
  Target: LAMA2; (-) strand; PAM type: YTN; PAM sequence: CTC
tatttttgccttacattcca

SEQ ID NO: 204470 - DNA, 20 bp, Artificial Sequence
  Description of Artificial Sequence: Synthetic oligonucleotide
  Target: LAMA2; (-) strand; PAM type: YTN; PAM sequence: TTC
atctctatttttgccttaca

SEQ ID NO: 204471 - DNA, 20 bp, Artificial Sequence
  Description of Artificial Sequence: Synthetic oligonucleotide
  Target: LAMA2; (-) strand; PAM type: YTN; PAM sequence: TTT
catctctatttttgccttac

SEQ ID NO: 204472 - DNA, 20 bp, Artificial Sequence
  Description of Artificial Sequence: Synthetic oligonucleotide
  Target: LAMA2; (-) strand; PAM type: YTN; PAM sequence: TTT
tcatctctatttttgcctta

SEQ ID NO: 204473 - DNA, 20 bp, Artificial Sequence
  Description of Artificial Sequence: Synthetic oligonucleotide
  Target: LAMA2; (-) strand; PAM type: YTN; PAM sequence: TTC
aatgttttcatctctatttt

SEQ ID NO: 204474 - DNA, 20 bp, Artificial Sequence
  Description of Artificial Sequence: Synthetic oligonucleotide
  Target: LAMA2; (-) strand; PAM type: YTN; PAM sequence: TTA
aggtaagtcaatccccccac

SEQ ID NO: 204475 - DNA, 20 bp, Artificial Sequence
  Description of Artificial Sequence: Synthetic oligonucleotide
  Target: LAMA2; (-) strand; PAM type: YTN; PAM sequence: TTA
ttaaggtaagtcaatccccc

SEQ ID NO: 204476 - DNA, 20 bp, Artificial Sequence
  Description of Artificial Sequence: Synthetic oligonucleotide
  Target: LAMA2; (-) strand; PAM type: YTN; PAM sequence: TTA
ttattaaggtaagtcaatcc

SEQ ID NO: 204477 - DNA, 20 bp, Artificial Sequence
  Description of Artificial Sequence: Synthetic oligonucleotide
  Target: LAMA2; (-) strand; PAM type: YTN; PAM sequence: TTA
aaggtataaaaaattattat

SEQ ID NO: 204478 - DNA, 20 bp, Artificial Sequence
  Description of Artificial Sequence: Synthetic oligonucleotide
  Target: LAMA2; (-) strand; PAM type: YTN; PAM sequence: TTT
aaaggtataaaaaattatta

SEQ ID NO: 204479 - DNA, 20 bp, Artificial Sequence
  Description of Artificial Sequence: Synthetic oligonucleotide
  Target: LAMA2; (-) strand; PAM type: YTN; PAM sequence: CTG
gatttaaaggtataaaaaat

SEQ ID NO: 204480 - DNA, 20 bp, Artificial Sequence
  Description of Artificial Sequence: Synthetic oligonucleotide
  Target: LAMA2; (-) strand; PAM type: YTN; PAM sequence: TTC
tggatttaaaggtataaaaa

SEQ ID NO: 204481 - DNA, 20 bp, Artificial Sequence
  Description of Artificial Sequence: Synthetic oligonucleotide
  Target: LAMA2; (-) strand; PAM type: YTN; PAM sequence: TTT
ctggatttaaaggtataaaa

SEQ ID NO: 204482 - DNA, 20 bp, Artificial Sequence
  Description of Artificial Sequence: Synthetic oligonucleotide
  Target: LAMA2; (-) strand; PAM type: YTN; PAM sequence: TTG
acatttctggatttaaaggt

SEQ ID NO: 204483 - DNA, 20 bp, Artificial Sequence
  Description of Artificial Sequence: Synthetic oligonucleotide
  Target: LAMA2; (-) strand; PAM type: YTN; PAM sequence: CTT
gacatttctggatttaaagg

SEQ ID NO: 204484 - DNA, 20 bp, Artificial Sequence
  Description of Artificial Sequence: Synthetic oligonucleotide
  Target: LAMA2; (-) strand; PAM type: YTN; PAM sequence: TTC
ttgacatttctggatttaaa

SEQ ID NO: 204485 - DNA, 20 bp, Artificial Sequence
  Description of Artificial Sequence: Synthetic oligonucleotide
  Target: LAMA2; (-) strand; PAM type: YTN; PAM sequence: TTT
cttgacatttctggatttaa

SEQ ID NO: 204486 - DNA, 20 bp, Artificial Sequence
  Description of Artificial Sequence: Synthetic oligonucleotide
  Target: LAMA2; (-) strand; PAM type: YTN; PAM sequence: TTT
tcttgacatttctggattta

SEQ ID NO: 204487 - DNA, 20 bp, Artificial Sequence
  Description of Artificial Sequence: Synthetic oligonucleotide
  Target: LAMA2; (-) strand; PAM type: YTN; PAM sequence: TTG
tgtgtcattttcttgacatt

SEQ ID NO: 204488 - DNA, 20 bp, Artificial Sequence
  Description of Artificial Sequence: Synthetic oligonucleotide
  Target: LAMA2; (-) strand; PAM type: YTN; PAM sequence: CTT
gtgtgtcattttcttgacat

SEQ ID NO: 204489 - DNA, 20 bp, Artificial Sequence
  Description of Artificial Sequence: Synthetic oligonucleotide
  Target: LAMA2; (-) strand; PAM type: YTN; PAM sequence: TTC
ttgtgtgtcattttcttgac

SEQ ID NO: 204490 - DNA, 20 bp, Artificial Sequence
  Description of Artificial Sequence: Synthetic oligonucleotide
  Target: LAMA2; (-) strand; PAM type: YTN; PAM sequence: TTG
ttcttgtgtgtcattttctt

SEQ ID NO: 204491 - DNA, 20 bp, Artificial Sequence
  Description of Artificial Sequence: Synthetic oligonucleotide
  Target: LAMA2; (-) strand; PAM type: YTN; PAM sequence: TTT
gttcttgtgtgtcattttct

SEQ ID NO: 204492 - DNA, 20 bp, Artificial Sequence
  Description of Artificial Sequence: Synthetic oligonucleotide
  Target: LAMA2; (-) strand; PAM type: YTN; PAM sequence: TTT
tgttcttgtgtgtcattttc

SEQ ID NO: 204493 - DNA, 20 bp, Artificial Sequence
  Description of Artificial Sequence: Synthetic oligonucleotide
  Target: LAMA2; (-) strand; PAM type: YTN; PAM sequence: TTG
ttttgttcttgtgtgtcatt

SEQ ID NO: 204494 - DNA, 20 bp, Artificial Sequence
  Description of Artificial Sequence: Synthetic oligonucleotide
  Target: LAMA2; (-) strand; PAM type: YTN; PAM sequence: TTT
gttttgttcttgtgtgtcat

SEQ ID NO: 204495 - DNA, 20 bp, Artificial Sequence
  Description of Artificial Sequence: Synthetic oligonucleotide
  Target: LAMA2; (-) strand; PAM type: YTN; PAM sequence: TTT
tgttttgttcttgtgtgtca

SEQ ID NO: 204496 - DNA, 20 bp, Artificial Sequence
  Description of Artificial Sequence: Synthetic oligonucleotide
  Target: LAMA2; (-) strand; PAM type: YTN; PAM sequence: CTT
ttgttttgttcttgtgtgtc

SEQ ID NO: 204497 - DNA, 20 bp, Artificial Sequence
  Description of Artificial Sequence: Synthetic oligonucleotide
  Target: LAMA2; (-) strand; PAM type: YTN; PAM sequence: TTC
ttttgttttgttcttgtgtg

SEQ ID NO: 204498 - DNA, 20 bp, Artificial Sequence
  Description of Artificial Sequence: Synthetic oligonucleotide
  Target: LAMA2; (-) strand; PAM type: YTN; PAM sequence: TTT
cttttgttttgttcttgtgt

SEQ ID NO: 204499 - DNA, 20 bp, Artificial Sequence
  Description of Artificial Sequence: Synthetic oligonucleotide
  Target: LAMA2; (-) strand; PAM type: YTN; PAM sequence: TTT
tcttttgttttgttcttgtg

SEQ ID NO: 204500 - DNA, 20 bp, Artificial Sequence
  Description of Artificial Sequence: Synthetic oligonucleotide
  Target: LAMA2; (-) strand; PAM type: YTN; PAM sequence: TTT
ttcttttgttttgttcttgt

SEQ ID NO: 204501 - DNA, 20 bp, Artificial Sequence
  Description of Artificial Sequence: Synthetic oligonucleotide
  Target: LAMA2; (-) strand; PAM type: YTN; PAM sequence: CTG
aatttttcttttgttttgtt

SEQ ID NO: 204502 - DNA, 20 bp, Artificial Sequence
  Description of Artificial Sequence: Synthetic oligonucleotide
  Target: LAMA2; (-) strand; PAM type: YTN; PAM sequence: CTA
aactgaatttttcttttgtt

SEQ ID NO: 204503 - DNA, 20 bp, Artificial Sequence
  Description of Artificial Sequence: Synthetic oligonucleotide
  Target: LAMA2; (-) strand; PAM type: YTN; PAM sequence: CTC
taaactgaatttttcttttg

SEQ ID NO: 204504 - DNA, 20 bp, Artificial Sequence
  Description of Artificial Sequence: Synthetic oligonucleotide
  Target: LAMA2; (-) strand; PAM type: YTN; PAM sequence: TTA
agcaggctctaaactgaatt

SEQ ID NO: 204505 - DNA, 20 bp, Artificial Sequence
  Description of Artificial Sequence: Synthetic oligonucleotide
  Target: LAMA2; (-) strand; PAM type: YTN; PAM sequence: TTT
aagcaggctctaaactgaat

SEQ ID NO: 204506 - DNA, 20 bp, Artificial Sequence
  Description of Artificial Sequence: Synthetic oligonucleotide
  Target: LAMA2; (-) strand; PAM type: YTN; PAM sequence: TTT
taagcaggctctaaactgaa

SEQ ID NO: 204507 - DNA, 20 bp, Artificial Sequence
  Description of Artificial Sequence: Synthetic oligonucleotide
  Target: LAMA2; (-) strand; PAM type: YTN; PAM sequence: TTT
ttaagcaggctctaaactga

SEQ ID NO: 204508 - DNA, 20 bp, Artificial Sequence
  Description of Artificial Sequence: Synthetic oligonucleotide
  Target: LAMA2; (-) strand; PAM type: YTN; PAM sequence: TTG
gaagatcaatgtcagatttt

SEQ ID NO: 204509 - DNA, 20 bp, Artificial Sequence
  Description of Artificial Sequence: Synthetic oligonucleotide
  Target: LAMA2; (-) strand; PAM type: YTN; PAM sequence: TTA
aggcattggaagatcaatgt

SEQ ID NO: 204510 - DNA, 20 bp, Artificial Sequence
  Description of Artificial Sequence: Synthetic oligonucleotide
  Target: LAMA2; (-) strand; PAM type: YTN; PAM sequence: TTT
aaggcattggaagatcaatg

SEQ ID NO: 204511 - DNA, 20 bp, Artificial Sequence
  Description of Artificial Sequence: Synthetic oligonucleotide
  Target: LAMA2; (-) strand; PAM type: YTN; PAM sequence: TTT
taaggcattggaagatcaat

SEQ ID NO: 204512 - DNA, 20 bp, Artificial Sequence
  Description of Artificial Sequence: Synthetic oligonucleotide
  Target: LAMA2; (-) strand; PAM type: YTN; PAM sequence: TTT
ttaaggcattggaagatcaa

SEQ ID NO: 204513 - DNA, 20 bp, Artificial Sequence
  Description of Artificial Sequence: Synthetic oligonucleotide
  Target: LAMA2; (-) strand; PAM type: YTN; PAM sequence: TTC
ataataaaaacatttttaag

SEQ ID NO: 204514 - DNA, 20 bp, Artificial Sequence
  Description of Artificial Sequence: Synthetic oligonucleotide
  Target: LAMA2; (-) strand; PAM type: YTN; PAM sequence: TTT
cataataaaaacatttttaa

SEQ ID NO: 204515 - DNA, 20 bp, Artificial Sequence
  Description of Artificial Sequence: Synthetic oligonucleotide
  Target: LAMA2; (-) strand; PAM type: YTN; PAM sequence: TTT
tcataataaaaacattttta

SEQ ID NO: 204516 - DNA, 20 bp, Artificial Sequence
  Description of Artificial Sequence: Synthetic oligonucleotide
  Target: LAMA2; (-) strand; PAM type: YTN; PAM sequence: TTT
ttcataataaaaacattttt

SEQ ID NO: 204517 - DNA, 20 bp, Artificial Sequence
  Description of Artificial Sequence: Synthetic oligonucleotide
  Target: LAMA2; (-) strand; PAM type: YTN; PAM sequence: TTT
tttcataataaaaacatttt

SEQ ID NO: 204518 - DNA, 20 bp, Artificial Sequence
  Description of Artificial Sequence: Synthetic oligonucleotide
  Target: LAMA2; (-) strand; PAM type: YTN; PAM sequence: TTC
aaattttttcataataaaaa

SEQ ID NO: 204519 - DNA, 20 bp, Artificial Sequence
  Description of Artificial Sequence: Synthetic oligonucleotide
  Target: LAMA2; (-) strand; PAM type: YTN; PAM sequence: TTA
tatgttcaaattttttcata

SEQ ID NO: 204520 - DNA, 20 bp, Artificial Sequence
  Description of Artificial Sequence: Synthetic oligonucleotide
  Target: LAMA2; (-) strand; PAM type: YTN; PAM sequence: TTT
atatgttcaaattttttcat

SEQ ID NO: 204521 - DNA, 20 bp, Artificial Sequence
  Description of Artificial Sequence: Synthetic oligonucleotide
  Target: LAMA2; (-) strand; PAM type: YTN; PAM sequence: TTT
tatatgttcaaattttttca

SEQ ID NO: 204522 - DNA, 20 bp, Artificial Sequence
  Description of Artificial Sequence: Synthetic oligonucleotide
  Target: LAMA2; (-) strand; PAM type: YTN; PAM sequence: TTT
ttatatgttcaaattttttc

SEQ ID NO: 204523 - DNA, 20 bp, Artificial Sequence
  Description of Artificial Sequence: Synthetic oligonucleotide
  Target: LAMA2; (-) strand; PAM type: YTN; PAM sequence: TTT
tttatatgttcaaatttttt

SEQ ID NO: 204524 - DNA, 20 bp, Artificial Sequence
  Description of Artificial Sequence: Synthetic oligonucleotide
  Target: LAMA2; (-) strand; PAM type: YTN; PAM sequence: TTC
cattttttatatgttcaaat

SEQ ID NO: 204525 - DNA, 20 bp, Artificial Sequence
  Description of Artificial Sequence: Synthetic oligonucleotide
  Target: LAMA2; (-) strand; PAM type: YTN; PAM sequence: CTT
ccattttttatatgttcaaa

SEQ ID NO: 204526 - DNA, 20 bp, Artificial Sequence
  Description of Artificial Sequence: Synthetic oligonucleotide
  Target: LAMA2; (-) strand; PAM type: YTN; PAM sequence: TTA
taccatatcttccatttttt

SEQ ID NO: 204527 - DNA, 20 bp, Artificial Sequence
  Description of Artificial Sequence: Synthetic oligonucleotide
  Target: LAMA2; (-) strand; PAM type: YTN; PAM sequence: CTT
ataccatatcttccattttt

SEQ ID NO: 204528 - DNA, 20 bp, Artificial Sequence
  Description of Artificial Sequence: Synthetic oligonucleotide
  Target: LAMA2; (-) strand; PAM type: YTN; PAM sequence: TTC
cttataccatatcttccatt

SEQ ID NO: 204529 - DNA, 20 bp, Artificial Sequence
  Description of Artificial Sequence: Synthetic oligonucleotide
  Target: LAMA2; (-) strand; PAM type: YTN; PAM sequence: TTG
agggttccttataccatatc

SEQ ID NO: 204530 - DNA, 20 bp, Artificial Sequence
  Description of Artificial Sequence: Synthetic oligonucleotide
  Target: LAMA2; (-) strand; PAM type: YTN; PAM sequence: CTT
gagggttccttataccatat

SEQ ID NO: 204531 - DNA, 20 bp, Artificial Sequence
  Description of Artificial Sequence: Synthetic oligonucleotide
  Target: LAMA2; (-) strand; PAM type: YTN; PAM sequence: TTG
aagcaagtaatgtgtacttg

SEQ ID NO: 204532 - DNA, 20 bp, Artificial Sequence
  Description of Artificial Sequence: Synthetic oligonucleotide
  Target: LAMA2; (-) strand; PAM type: YTN; PAM sequence: TTA
ttgaagcaagtaatgtgtac

SEQ ID NO: 204533 - DNA, 20 bp, Artificial Sequence
  Description of Artificial Sequence: Synthetic oligonucleotide
  Target: LAMA2; (-) strand; PAM type: YTN; PAM sequence: TTG
atgggtgataattattgaag

SEQ ID NO: 204534 - DNA, 20 bp, Artificial Sequence
  Description of Artificial Sequence: Synthetic oligonucleotide
  Target: LAMA2; (-) strand; PAM type: YTN; PAM sequence: TTA
gttgatgggtgataattatt

SEQ ID NO: 204535 - DNA, 20 bp, Artificial Sequence
  Description of Artificial Sequence: Synthetic oligonucleotide
  Target: LAMA2; (-) strand; PAM type: YTN; PAM sequence: TTA
cagatgaaaaaaaaaattag

SEQ ID NO: 204536 - DNA, 20 bp, Artificial Sequence
  Description of Artificial Sequence: Synthetic oligonucleotide
  Target: LAMA2; (-) strand; PAM type: YTN; PAM sequence: TTG
gtagggttacagatgaaaaa

SEQ ID NO: 204537 - DNA, 20 bp, Artificial Sequence
  Description of Artificial Sequence: Synthetic oligonucleotide
  Target: LAMA2; (-) strand; PAM type: YTN; PAM sequence: TTC
cagtgggaaaggagaacagt

SEQ ID NO: 204538 - DNA, 20 bp, Artificial Sequence
  Description of Artificial Sequence: Synthetic oligonucleotide
  Target: LAMA2; (-) strand; PAM type: YTN; PAM sequence: TTC
aaaatattccagtgggaaag

SEQ ID NO: 204539 - DNA, 20 bp, Artificial Sequence
  Description of Artificial Sequence: Synthetic oligonucleotide
  Target: LAMA2; (-) strand; PAM type: YTN; PAM sequence: CTT
caaaatattccagtgggaaa

SEQ ID NO: 204540 - DNA, 20 bp, Artificial Sequence
  Description of Artificial Sequence: Synthetic oligonucleotide
  Target: LAMA2; (-) strand; PAM type: YTN; PAM sequence: TTG
cttcaaaatattccagtggg

SEQ ID NO: 204541 - DNA, 20 bp, Artificial Sequence
  Description of Artificial Sequence: Synthetic oligonucleotide
  Target: LAMA2; (-) strand; PAM type: YTN; PAM sequence: TTT
gcttcaaaatattccagtgg

SEQ ID NO: 204542 - DNA, 20 bp, Artificial Sequence
  Description of Artificial Sequence: Synthetic oligonucleotide
  Target: LAMA2; (-) strand; PAM type: YTN; PAM sequence: TTA
tatgatatgatgatttgctt

SEQ ID NO: 204543 - DNA, 20 bp, Artificial Sequence
  Description of Artificial Sequence: Synthetic oligonucleotide
  Target: LAMA2; (-) strand; PAM type: YTN; PAM sequence: TTA
cagattatatgatatgatga

SEQ ID NO: 204544 - DNA, 20 bp, Artificial Sequence
  Description of Artificial Sequence: Synthetic oligonucleotide
  Target: LAMA2; (-) strand; PAM type: YTN; PAM sequence: TTG
cagattacagattatatgat

SEQ ID NO: 204545 - DNA, 20 bp, Artificial Sequence
  Description of Artificial Sequence: Synthetic oligonucleotide
  Target: LAMA2; (-) strand; PAM type: YTN; PAM sequence: TTT
gcagattacagattatatga

SEQ ID NO: 204546 - DNA, 20 bp, Artificial Sequence
  Description of Artificial Sequence: Synthetic oligonucleotide
  Target: LAMA2; (-) strand; PAM type: YTN; PAM sequence: TTA
aatatttgcagattacagat

SEQ ID NO: 204547 - DNA, 20 bp, Artificial Sequence
  Description of Artificial Sequence: Synthetic oligonucleotide
  Target: LAMA2; (-) strand; PAM type: YTN; PAM sequence: CTT
aaatatttgcagattacaga

SEQ ID NO: 204548 - DNA, 20 bp, Artificial Sequence
  Description of Artificial Sequence: Synthetic oligonucleotide
  Target: LAMA2; (-) strand; PAM type: YTN; PAM sequence: TTA
gatatgcatacttaaatatt

SEQ ID NO: 204549 - DNA, 20 bp, Artificial Sequence
  Description of Artificial Sequence: Synthetic oligonucleotide
  Target: LAMA2; (-) strand; PAM type: YTN; PAM sequence: TTT
agatatgcatacttaaatat

SEQ ID NO: 204550 - DNA, 20 bp, Artificial Sequence
  Description of Artificial Sequence: Synthetic oligonucleotide
  Target: LAMA2; (-) strand; PAM type: YTN; PAM sequence: TTT
tagatatgcatacttaaata

SEQ ID NO: 204551 - DNA, 20 bp, Artificial Sequence
  Description of Artificial Sequence: Synthetic oligonucleotide
  Target: LAMA2; (-) strand; PAM type: YTN; PAM sequence: CTT
ttagatatgcatacttaaat

SEQ ID NO: 204552 - DNA, 20 bp, Artificial Sequence
  Description of Artificial Sequence: Synthetic oligonucleotide
  Target: LAMA2; (-) strand; PAM type: YTN; PAM sequence: CTA
acttttagatatgcatactt

SEQ ID NO: 204553 - DNA, 20 bp, Artificial Sequence
  Description of Artificial Sequence: Synthetic oligonucleotide
  Target: LAMA2; (-) strand; PAM type: YTN; PAM sequence: TTC
taacttttagatatgcatac

SEQ ID NO: 204554 - DNA, 20 bp, Artificial Sequence
  Description of Artificial Sequence: Synthetic oligonucleotide
  Target: LAMA2; (-) strand; PAM type: YTN; PAM sequence: TTA
aaaagaattctaacttttag

SEQ ID NO: 204555 - DNA, 20 bp, Artificial Sequence
  Description of Artificial Sequence: Synthetic oligonucleotide
  Target: LAMA2; (-) strand; PAM type: YTN; PAM sequence: TTT
aaaaagaattctaactttta

SEQ ID NO: 204556 - DNA, 20 bp, Artificial Sequence
  Description of Artificial Sequence: Synthetic oligonucleotide
  Target: LAMA2; (-) strand; PAM type: YTN; PAM sequence: TTT
taaaaagaattctaactttt

SEQ ID NO: 204557 - DNA, 20 bp, Artificial Sequence
  Description of Artificial Sequence: Synthetic oligonucleotide
  Target: LAMA2; (-) strand; PAM type: YTN; PAM sequence: TTA
tgattttaaaaagaattcta

SEQ ID NO: 204558 - DNA, 20 bp, Artificial Sequence
  Description of Artificial Sequence: Synthetic oligonucleotide
  Target: LAMA2; (-) strand; PAM type: YTN; PAM sequence: CTG
agattatgattttaaaaaga

SEQ ID NO: 204559 - DNA, 20 bp, Artificial Sequence
  Description of Artificial Sequence: Synthetic oligonucleotide
  Target: LAMA2; (-) strand; PAM type: YTN; PAM sequence: TTA
tactgagattatgattttaa

SEQ ID NO: 204560 - DNA, 20 bp, Artificial Sequence
  Description of Artificial Sequence: Synthetic oligonucleotide
  Target: LAMA2; (-) strand; PAM type: YTN; PAM sequence: TTA
gtgtgtcattatactgagat

SEQ ID NO: 204561 - DNA, 20 bp, Artificial Sequence
  Description of Artificial Sequence: Synthetic oligonucleotide
  Target: LAMA2; (-) strand; PAM type: YTN; PAM sequence: TTT
agtgtgtcattatactgaga

SEQ ID NO: 204562 - DNA, 20 bp, Artificial Sequence
  Description of Artificial Sequence: Synthetic oligonucleotide
  Target: LAMA2; (-) strand; PAM type: YTN; PAM sequence: TTT
tagtgtgtcattatactgag

SEQ ID NO: 204563 - DNA, 20 bp, Artificial Sequence
  Description of Artificial Sequence: Synthetic oligonucleotide
  Target: LAMA2; (-) strand; PAM type: YTN; PAM sequence: TTT
ttagtgtgtcattatactga

SEQ ID NO: 204564 - DNA, 20 bp, Artificial Sequence
  Description of Artificial Sequence: Synthetic oligonucleotide
  Target: LAMA2; (-) strand; PAM type: YTN; PAM sequence: TTT
tttagtgtgtcattatactg

SEQ ID NO: 204565 - DNA, 20 bp, Artificial Sequence
  Description of Artificial Sequence: Synthetic oligonucleotide
  Target: LAMA2; (-) strand; PAM type: YTN; PAM sequence: TTC
attttttagtgtgtcattat

SEQ ID NO: 204566 - DNA, 20 bp, Artificial Sequence
  Description of Artificial Sequence: Synthetic oligonucleotide
  Target: LAMA2; (-) strand; PAM type: YTN; PAM sequence: TTG
ttcattttttagtgtgtcat

SEQ ID NO: 204567 - DNA, 20 bp, Artificial Sequence
  Description of Artificial Sequence: Synthetic oligonucleotide
  Target: LAMA2; (-) strand; PAM type: YTN; PAM sequence: TTA
ttgttcattttttagtgtgt

SEQ ID NO: 204568 - DNA, 20 bp, Artificial Sequence
  Description of Artificial Sequence: Synthetic oligonucleotide
  Target: LAMA2; (-) strand; PAM type: YTN; PAM sequence: TTG
atgggatgaaataattattg

SEQ ID NO: 204569 - DNA, 20 bp, Artificial Sequence
  Description of Artificial Sequence: Synthetic oligonucleotide
  Target: LAMA2; (-) strand; PAM type: YTN; PAM sequence: TTT
gatgggatgaaataattatt

SEQ ID NO: 204570 - DNA, 20 bp, Artificial Sequence
  Description of Artificial Sequence: Synthetic oligonucleotide
  Target: LAMA2; (-) strand; PAM type: YTN; PAM sequence: TTG
tcaatatttgatgggatgaa

SEQ ID NO: 204571 - DNA, 20 bp, Artificial Sequence
  Description of Artificial Sequence: Synthetic oligonucleotide
  Target: LAMA2; (-) strand; PAM type: YTN; PAM sequence: CTT
gtcaatatttgatgggatga

SEQ ID NO: 204572 - DNA, 20 bp, Artificial Sequence
  Description of Artificial Sequence: Synthetic oligonucleotide
  Target: LAMA2; (-) strand; PAM type: YTN; PAM sequence: CTA
gccaatatatagtaaaagaa

SEQ ID NO: 204573 - DNA, 20 bp, Artificial Sequence
  Description of Artificial Sequence: Synthetic oligonucleotide
  Target: LAMA2; (-) strand; PAM type: YTN; PAM sequence: TTC
tagccaatatatagtaaaag

SEQ ID NO: 204574 - DNA, 20 bp, Artificial Sequence
  Description of Artificial Sequence: Synthetic oligonucleotide
  Target: LAMA2; (-) strand; PAM type: YTN; PAM sequence: TTA
cataaaattctagccaatat

SEQ ID NO: 204575 - DNA, 20 bp, Artificial Sequence
  Description of Artificial Sequence: Synthetic oligonucleotide
  Target: LAMA2; (-) strand; PAM type: YTN; PAM sequence: TTT
acataaaattctagccaata

SEQ ID NO: 204576 - DNA, 20 bp, Artificial Sequence
  Description of Artificial Sequence: Synthetic oligonucleotide
  Target: LAMA2; (-) strand; PAM type: YTN; PAM sequence: CTT
tacataaaattctagccaat

SEQ ID NO: 204577 - DNA, 20 bp, Artificial Sequence
  Description of Artificial Sequence: Synthetic oligonucleotide
  Target: LAMA2; (-) strand; PAM type: YTN; PAM sequence: TTC
tttacataaaattctagcca

SEQ ID NO: 204578 - DNA, 20 bp, Artificial Sequence
  Description of Artificial Sequence: Synthetic oligonucleotide
  Target: LAMA2; (-) strand; PAM type: YTN; PAM sequence: TTT
ctttacataaaattctagcc

SEQ ID NO: 204579 - DNA, 20 bp, Artificial Sequence
  Description of Artificial Sequence: Synthetic oligonucleotide
  Target: LAMA2; (-) strand; PAM type: YTN; PAM sequence: TTT
tctttacataaaattctagc

SEQ ID NO: 204580 - DNA, 20 bp, Artificial Sequence
  Description of Artificial Sequence: Synthetic oligonucleotide
  Target: LAMA2; (-) strand; PAM type: YTN; PAM sequence: CTT
ttctttacataaaattctag

SEQ ID NO: 204581 - DNA, 20 bp, Artificial Sequence
  Description of Artificial Sequence: Synthetic oligonucleotide
  Target: LAMA2; (-) strand; PAM type: YTN; PAM sequence: CTG
taggtaaataagagtcaatg

SEQ ID NO: 204582 - DNA, 20 bp, Artificial Sequence
  Description of Artificial Sequence: Synthetic oligonucleotide
  Target: LAMA2; (-) strand; PAM type: YTN; PAM sequence: CTA
cctgtaggtaaataagagtc

SEQ ID NO: 204583 - DNA, 20 bp, Artificial Sequence
  Description of Artificial Sequence: Synthetic oligonucleotide
  Target: LAMA2; (-) strand; PAM type: YTN; PAM sequence: TTC
tacctgtaggtaaataagag

SEQ ID NO: 204584 - DNA, 20 bp, Artificial Sequence
  Description of Artificial Sequence: Synthetic oligonucleotide
  Target: LAMA2; (-) strand; PAM type: YTN; PAM sequence: TTG
aattctacctgtaggtaaat

SEQ ID NO: 204585 - DNA, 20 bp, Artificial Sequence
  Description of Artificial Sequence: Synthetic oligonucleotide
  Target: LAMA2; (-) strand; PAM type: YTN; PAM sequence: TTT
gaattctacctgtaggtaaa

SEQ ID NO: 204586 - DNA, 20 bp, Artificial Sequence
  Description of Artificial Sequence: Synthetic oligonucleotide
  Target: LAMA2; (-) strand; PAM type: YTN; PAM sequence: CTG
tttgaattctacctgtaggt

SEQ ID NO: 204587 - DNA, 20 bp, Artificial Sequence
  Description of Artificial Sequence: Synthetic oligonucleotide
  Target: LAMA2; (-) strand; PAM type: YTN; PAM sequence: TTC
ctgtttgaattctacctgta

SEQ ID NO: 204588 - DNA, 20 bp, Artificial Sequence
  Description of Artificial Sequence: Synthetic oligonucleotide
  Target: LAMA2; (-) strand; PAM type: YTN; PAM sequence: TTT
cctgtttgaattctacctgt

SEQ ID NO: 204589 - DNA, 20 bp, Artificial Sequence
  Description of Artificial Sequence: Synthetic oligonucleotide
  Target: LAMA2; (-) strand; PAM type: YTN; PAM sequence: CTT
tcctgtttgaattctacctg

SEQ ID NO: 204590 - DNA, 20 bp, Artificial Sequence
  Description of Artificial Sequence: Synthetic oligonucleotide
  Target: LAMA2; (-) strand; PAM type: YTN; PAM sequence: CTG
ctttcctgtttgaattctac

SEQ ID NO: 204591 - DNA, 20 bp, Artificial Sequence
  Description of Artificial Sequence: Synthetic oligonucleotide
  Target: LAMA2; (-) strand; PAM type: YTN; PAM sequence: TTG
atctgctttcctgtttgaat

SEQ ID NO: 204592 - DNA, 20 bp, Artificial Sequence
  Description of Artificial Sequence: Synthetic oligonucleotide
  Target: LAMA2; (-) strand; PAM type: YTN; PAM sequence: TTT
gatctgctttcctgtttgaa

SEQ ID NO: 204593 - DNA, 20 bp, Artificial Sequence
  Description of Artificial Sequence: Synthetic oligonucleotide
  Target: LAMA2; (-) strand; PAM type: YTN; PAM sequence: CTG
ggaaataaaaagaaagaatc

SEQ ID NO: 204594 - DNA, 20 bp, Artificial Sequence
  Description of Artificial Sequence: Synthetic oligonucleotide
  Target: LAMA2; (-) strand; PAM type: YTN; PAM sequence: CTA
aaaactgggaaataaaaaga

SEQ ID NO: 204595 - DNA, 20 bp, Artificial Sequence
  Description of Artificial Sequence: Synthetic oligonucleotide
  Target: LAMA2; (-) strand; PAM type: YTN; PAM sequence: TTC
taaaaactgggaaataaaaa

SEQ ID NO: 204596 - DNA, 20 bp, Artificial Sequence
  Description of Artificial Sequence: Synthetic oligonucleotide
  Target: LAMA2; (-) strand; PAM type: YTN; PAM sequence: TTT
ctaaaaactgggaaataaaa

SEQ ID NO: 204597 - DNA, 20 bp, Artificial Sequence
  Description of Artificial Sequence: Synthetic oligonucleotide
  Target: LAMA2; (-) strand; PAM type: YTN; PAM sequence: TTT
tctaaaaactgggaaataaa

SEQ ID NO: 204598 - DNA, 20 bp, Artificial Sequence
  Description of Artificial Sequence: Synthetic oligonucleotide
  Target: LAMA2; (-) strand; PAM type: YTN; PAM sequence: TTT
ttctaaaaactgggaaataa

SEQ ID NO: 204599 - DNA, 20 bp, Artificial Sequence
  Description of Artificial Sequence: Synthetic oligonucleotide
  Target: LAMA2; (-) strand; PAM type: YTN; PAM sequence: TTT
tttctaaaaactgggaaata

SEQ ID NO: 204600 - DNA, 20 bp, Artificial Sequence
  Description of Artificial Sequence: Synthetic oligonucleotide
  Target: LAMA2; (-) strand; PAM type: YTN; PAM sequence: CTC
attttttctaaaaactggga

SEQ ID NO: 204601 - DNA, 20 bp, Artificial Sequence
  Description of Artificial Sequence: Synthetic oligonucleotide
  Target: LAMA2; (-) strand; PAM type: YTN; PAM sequence: CTA
gtaaaccaactcattttttc

SEQ ID NO: 204602 - DNA, 20 bp, Artificial Sequence
  Description of Artificial Sequence: Synthetic oligonucleotide
  Target: LAMA2; (-) strand; PAM type: YTN; PAM sequence: TTA
aaggatactagtaaaccaac

SEQ ID NO: 204603 - DNA, 20 bp, Artificial Sequence
  Description of Artificial Sequence: Synthetic oligonucleotide
  Target: LAMA2; (-) strand; PAM type: YTN; PAM sequence: TTA
tcattaaaggatactagtaa

SEQ ID NO: 204604 - DNA, 20 bp, Artificial Sequence
  Description of Artificial Sequence: Synthetic oligonucleotide
  Target: LAMA2; (-) strand; PAM type: YTN; PAM sequence: CTG
gttatcattaaaggatacta

SEQ ID NO: 204605 - DNA, 20 bp, Artificial Sequence
  Description of Artificial Sequence: Synthetic oligonucleotide
  Target: LAMA2; (-) strand; PAM type: YTN; PAM sequence: TTC
atagagatacaaaaagcaaa

SEQ ID NO: 204606 - DNA, 20 bp, Artificial Sequence
  Description of Artificial Sequence: Synthetic oligonucleotide
  Target: LAMA2; (-) strand; PAM type: YTN; PAM sequence: CTA
tgagttcatagagatacaaa

SEQ ID NO: 204607 - DNA, 20 bp, Artificial Sequence
  Description of Artificial Sequence: Synthetic oligonucleotide
  Target: LAMA2; (-) strand; PAM type: YTN; PAM sequence: TTA
aaatctatgagttcatagag

SEQ ID NO: 204608 - DNA, 20 bp, Artificial Sequence
  Description of Artificial Sequence: Synthetic oligonucleotide
  Target: LAMA2; (-) strand; PAM type: YTN; PAM sequence: TTT
aaaatctatgagttcataga

SEQ ID NO: 204609 - DNA, 20 bp, Artificial Sequence
  Description of Artificial Sequence: Synthetic oligonucleotide
  Target: LAMA2; (-) strand; PAM type: YTN; PAM sequence: CTG
caatgaatcgaaacatatca

SEQ ID NO: 204610 - DNA, 20 bp, Artificial Sequence
  Description of Artificial Sequence: Synthetic oligonucleotide
  Target: LAMA2; (-) strand; PAM type: YTN; PAM sequence: TTG
aaaagaatcataactgcaat

SEQ ID NO: 204611 - DNA, 20 bp, Artificial Sequence
  Description of Artificial Sequence: Synthetic oligonucleotide
  Target: LAMA2; (-) strand; PAM type: YTN; PAM sequence: TTA
ttgaaaagaatcataactgc

SEQ ID NO: 204612 - DNA, 20 bp, Artificial Sequence
  Description of Artificial Sequence: Synthetic oligonucleotide
  Target: LAMA2; (-) strand; PAM type: YTN; PAM sequence: TTG
attattgaaaagaatcataa

SEQ ID NO: 204613 - DNA, 20 bp, Artificial Sequence
  Description of Artificial Sequence: Synthetic oligonucleotide
  Target: LAMA2; (-) strand; PAM type: YTN; PAM sequence: TTT
gattattgaaaagaatcata

SEQ ID NO: 204614 - DNA, 20 bp, Artificial Sequence
  Description of Artificial Sequence: Synthetic oligonucleotide
  Target: LAMA2; (-) strand; PAM type: YTN; PAM sequence: TTA
ccaaccaaagatgagacaat

SEQ ID NO: 204615 - DNA, 20 bp, Artificial Sequence
  Description of Artificial Sequence: Synthetic oligonucleotide
  Target: LAMA2; (-) strand; PAM type: YTN; PAM sequence: CTT
accaaccaaagatgagacaa

SEQ ID NO: 204616 - DNA, 20 bp, Artificial Sequence
  Description of Artificial Sequence: Synthetic oligonucleotide
  Target: LAMA2; (-) strand; PAM type: YTN; PAM sequence: CTC
ttaccaaccaaagatgagac

SEQ ID NO: 204617 - DNA, 20 bp, Artificial Sequence
  Description of Artificial Sequence: Synthetic oligonucleotide
  Target: LAMA2; (-) strand; PAM type: YTN; PAM sequence: TTG
aagacactcttaccaaccaa

SEQ ID NO: 204618 - DNA, 20 bp, Artificial Sequence
  Description of Artificial Sequence: Synthetic oligonucleotide
  Target: LAMA2; (-) strand; PAM type: YTN; PAM sequence: CTA
gaaagccaagttgaagacac

SEQ ID NO: 204619 - DNA, 20 bp, Artificial Sequence
  Description of Artificial Sequence: Synthetic oligonucleotide
  Target: LAMA2; (-) strand; PAM type: YTN; PAM sequence: TTA
aaggactagaaagccaagtt

SEQ ID NO: 204620 - DNA, 20 bp, Artificial Sequence
  Description of Artificial Sequence: Synthetic oligonucleotide
  Target: LAMA2; (-) strand; PAM type: YTN; PAM sequence: TTT
aaaggactagaaagccaagt

SEQ ID NO: 204621 - DNA, 20 bp, Artificial Sequence
  Description of Artificial Sequence: Synthetic oligonucleotide
  Target: LAMA2; (-) strand; PAM type: YTN; PAM sequence: CTG
agtttaaaggactagaaagc

SEQ ID NO: 204622 - DNA, 20 bp, Artificial Sequence
  Description of Artificial Sequence: Synthetic oligonucleotide
  Target: LAMA2; (-) strand; PAM type: YTN; PAM sequence: TTA
aggaaaactgagtttaaagg

SEQ ID NO: 204623 - DNA, 20 bp, Artificial Sequence
  Description of Artificial Sequence: Synthetic oligonucleotide
  Target: LAMA2; (-) strand; PAM type: YTN; PAM sequence: CTG
aaaagcatgagaatcattaa

SEQ ID NO: 204624 - DNA, 20 bp, Artificial Sequence
  Description of Artificial Sequence: Synthetic oligonucleotide
  Target: LAMA2; (-) strand; PAM type: YTN; PAM sequence: TTA
acactgaaaagcatgagaat

SEQ ID NO: 204625 - DNA, 20 bp, Artificial Sequence
  Description of Artificial Sequence: Synthetic oligonucleotide
  Target: LAMA2; (-) strand; PAM type: YTN; PAM sequence: CTT
aacactgaaaagcatgagaa

SEQ ID NO: 204626 - DNA, 20 bp, Artificial Sequence
  Description of Artificial Sequence: Synthetic oligonucleotide
  Target: LAMA2; (-) strand; PAM type: YTN; PAM sequence: CTA
ccacatcttaacactgaaaa

SEQ ID NO: 204627 - DNA, 20 bp, Artificial Sequence
  Description of Artificial Sequence: Synthetic oligonucleotide
  Target: LAMA2; (-) strand; PAM type: YTN; PAM sequence: CTA
aaaccaggacaggaaatatg

SEQ ID NO: 204628 - DNA, 20 bp, Artificial Sequence
  Description of Artificial Sequence: Synthetic oligonucleotide
  Target: LAMA2; (-) strand; PAM type: YTN; PAM sequence: TTC
taaaaccaggacaggaaata

SEQ ID NO: 204629 - DNA, 20 bp, Artificial Sequence
  Description of Artificial Sequence: Synthetic oligonucleotide
  Target: LAMA2; (-) strand; PAM type: YTN; PAM sequence: TTT
ctaaaaccaggacaggaaat

SEQ ID NO: 204630 - DNA, 20 bp, Artificial Sequence
  Description of Artificial Sequence: Synthetic oligonucleotide
  Target: LAMA2; (-) strand; PAM type: YTN; PAM sequence: CTG
tttctaaaaccaggacagga

SEQ ID NO: 204631 - DNA, 20 bp, Artificial Sequence
  Description of Artificial Sequence: Synthetic oligonucleotide
  Target: LAMA2; (-) strand; PAM type: YTN; PAM sequence: CTC
caagaaatgactgtttctaa

SEQ ID NO: 204632 - DNA, 20 bp, Artificial Sequence
  Description of Artificial Sequence: Synthetic oligonucleotide
  Target: LAMA2; (-) strand; PAM type: YTN; PAM sequence: CTC
ctccaagaaatgactgtttc

SEQ ID NO: 204633 - DNA, 20 bp, Artificial Sequence
  Description of Artificial Sequence: Synthetic oligonucleotide
  Target: LAMA2; (-) strand; PAM type: YTN; PAM sequence: CTA
taaggaaccagggctcctcc

SEQ ID NO: 204634 - DNA, 20 bp, Artificial Sequence
  Description of Artificial Sequence: Synthetic oligonucleotide
  Target: LAMA2; (-) strand; PAM type: YTN; PAM sequence: TTC
actataaggaaccagggctc

SEQ ID NO: 204635 - DNA, 20 bp, Artificial Sequence
  Description of Artificial Sequence: Synthetic oligonucleotide
  Target: LAMA2; (-) strand; PAM type: YTN; PAM sequence: TTT
cactataaggaaccagggct

SEQ ID NO: 204636 - DNA, 20 bp, Artificial Sequence
  Description of Artificial Sequence: Synthetic oligonucleotide
  Target: LAMA2; (-) strand; PAM type: YTN; PAM sequence: TTT
tcactataaggaaccagggc

SEQ ID NO: 204637 - DNA, 20 bp, Artificial Sequence
  Description of Artificial Sequence: Synthetic oligonucleotide
  Target: LAMA2; (-) strand; PAM type: YTN; PAM sequence: TTT
ttcactataaggaaccaggg

SEQ ID NO: 204638 - DNA, 20 bp, Artificial Sequence
  Description of Artificial Sequence: Synthetic oligonucleotide
  Target: LAMA2; (-) strand; PAM type: YTN; PAM sequence: CTT
tttcactataaggaaccagg

SEQ ID NO: 204639 - DNA, 20 bp, Artificial Sequence
  Description of Artificial Sequence: Synthetic oligonucleotide
  Target: LAMA2; (-) strand; PAM type: YTN; PAM sequence: TTG
aaataccctttttcactata

SEQ ID NO: 204640 - DNA, 20 bp, Artificial Sequence
  Description of Artificial Sequence: Synthetic oligonucleotide
  Target: LAMA2; (-) strand; PAM type: YTN; PAM sequence: CTT
gaaataccctttttcactat

SEQ ID NO: 204641 - DNA, 20 bp, Artificial Sequence
  Description of Artificial Sequence: Synthetic oligonucleotide
  Target: LAMA2; (-) strand; PAM type: YTN; PAM sequence: CTG
tggtcttgaaataccctttt

SEQ ID NO: 204642 - DNA, 20 bp, Artificial Sequence
  Description of Artificial Sequence: Synthetic oligonucleotide
  Target: LAMA2; (-) strand; PAM type: YTN; PAM sequence: CTA
ccgacctgtggtcttgaaat

SEQ ID NO: 204643 - DNA, 20 bp, Artificial Sequence
  Description of Artificial Sequence: Synthetic oligonucleotide
  Target: LAMA2; (-) strand; PAM type: YTN; PAM sequence: TTA
acagtgaacagccctaccga

SEQ ID NO: 204644 - DNA, 20 bp, Artificial Sequence
  Description of Artificial Sequence: Synthetic oligonucleotide
  Target: LAMA2; (-) strand; PAM type: YTN; PAM sequence: CTA
catattaacagtgaacagcc

SEQ ID NO: 204645 - DNA, 20 bp, Artificial Sequence
  Description of Artificial Sequence: Synthetic oligonucleotide
  Target: LAMA2; (-) strand; PAM type: YTN; PAM sequence: CTA
gaaacaacctacatattaac

SEQ ID NO: 204646 - DNA, 20 bp, Artificial Sequence
  Description of Artificial Sequence: Synthetic oligonucleotide
  Target: LAMA2; (-) strand; PAM type: YTN; PAM sequence: CTG
aaaagacctagaaacaacct

SEQ ID NO: 204647 - DNA, 20 bp, Artificial Sequence
  Description of Artificial Sequence: Synthetic oligonucleotide
  Target: LAMA2; (-) strand; PAM type: YTN; PAM sequence: CTG
atccactgaaaagacctaga

SEQ ID NO: 204648 - DNA, 20 bp, Artificial Sequence
  Description of Artificial Sequence: Synthetic oligonucleotide
  Target: LAMA2; (-) strand; PAM type: YTN; PAM sequence: TTC
ccacctgatccactgaaaag

SEQ ID NO: 204649 - DNA, 20 bp, Artificial Sequence
  Description of Artificial Sequence: Synthetic oligonucleotide
  Target: LAMA2; (-) strand; PAM type: YTN; PAM sequence: TTT
cccacctgatccactgaaaa

SEQ ID NO: 204650 - DNA, 20 bp, Artificial Sequence
  Description of Artificial Sequence: Synthetic oligonucleotide
  Target: LAMA2; (-) strand; PAM type: YTN; PAM sequence: TTG
aaatatatatttcccacctg

SEQ ID NO: 204651 - DNA, 20 bp, Artificial Sequence
  Description of Artificial Sequence: Synthetic oligonucleotide
  Target: LAMA2; (-) strand; PAM type: YTN; PAM sequence: TTT
gaaatatatatttcccacct

SEQ ID NO: 204652 - DNA, 20 bp, Artificial Sequence
  Description of Artificial Sequence: Synthetic oligonucleotide
  Target: LAMA2; (-) strand; PAM type: YTN; PAM sequence: CTA
tttgaaatatatatttccca

SEQ ID NO: 204653 - DNA, 20 bp, Artificial Sequence
  Description of Artificial Sequence: Synthetic oligonucleotide
  Target: LAMA2; (-) strand; PAM type: YTN; PAM sequence: CTC
tatttgaaatatatatttcc

SEQ ID NO: 204654 - DNA, 20 bp, Artificial Sequence
  Description of Artificial Sequence: Synthetic oligonucleotide
  Target: LAMA2; (-) strand; PAM type: YTN; PAM sequence: TTC
tctatttgaaatatatattt

SEQ ID NO: 204655 - DNA, 20 bp, Artificial Sequence
  Description of Artificial Sequence: Synthetic oligonucleotide
  Target: LAMA2; (-) strand; PAM type: YTN; PAM sequence: TTT
ctctatttgaaatatatatt

SEQ ID NO: 204656 - DNA, 20 bp, Artificial Sequence
  Description of Artificial Sequence: Synthetic oligonucleotide
  Target: LAMA2; (-) strand; PAM type: YTN; PAM sequence: TTT
tctctatttgaaatatatat

SEQ ID NO: 204657 - DNA, 20 bp, Artificial Sequence
  Description of Artificial Sequence: Synthetic oligonucleotide
  Target: LAMA2; (-) strand; PAM type: YTN; PAM sequence: CTA
taatgtattttctctatttg

SEQ ID NO: 204658 - DNA, 20 bp, Artificial Sequence
  Description of Artificial Sequence: Synthetic oligonucleotide
  Target: LAMA2; (-) strand; PAM type: YTN; PAM sequence: CTA
aatgggcatgtcagaataaa

SEQ ID NO: 204659 - DNA, 20 bp, Artificial Sequence
  Description of Artificial Sequence: Synthetic oligonucleotide
  Target: LAMA2; (-) strand; PAM type: YTN; PAM sequence: TTC
ctaaatgggcatgtcagaat

SEQ ID NO: 204660 - DNA, 20 bp, Artificial Sequence
  Description of Artificial Sequence: Synthetic oligonucleotide
  Target: LAMA2; (-) strand; PAM type: YTN; PAM sequence: CTC
atattcctaaatgggcatgt

SEQ ID NO: 204661 - DNA, 20 bp, Artificial Sequence
  Description of Artificial Sequence: Synthetic oligonucleotide
  Target: LAMA2; (-) strand; PAM type: YTN; PAM sequence: CTA
taagcctcatattcctaaat

SEQ ID NO: 204662 - DNA, 20 bp, Artificial Sequence
  Description of Artificial Sequence: Synthetic oligonucleotide
  Target: LAMA2; (-) strand; PAM type: YTN; PAM sequence: TTA
actataagcctcatattcct

SEQ ID NO: 204663 - DNA, 20 bp, Artificial Sequence
  Description of Artificial Sequence: Synthetic oligonucleotide
  Target: LAMA2; (-) strand; PAM type: YTN; PAM sequence: TTT
aactataagcctcatattcc

SEQ ID NO: 204664 - DNA, 20 bp, Artificial Sequence
  Description of Artificial Sequence: Synthetic oligonucleotide
  Target: LAMA2; (-) strand; PAM type: YTN; PAM sequence: TTA
atgaatttaactataagcct

SEQ ID NO: 204665 - DNA, 20 bp, Artificial Sequence
  Description of Artificial Sequence: Synthetic oligonucleotide
  Target: LAMA2; (-) strand; PAM type: YTN; PAM sequence: TTC
agtggatgagaaaaaagata

SEQ ID NO: 204666 - DNA, 20 bp, Artificial Sequence
  Description of Artificial Sequence: Synthetic oligonucleotide
  Target: LAMA2; (-) strand; PAM type: YTN; PAM sequence: TTT
cagtggatgagaaaaaagat

SEQ ID NO: 204667 - DNA, 20 bp, Artificial Sequence
  Description of Artificial Sequence: Synthetic oligonucleotide
  Target: LAMA2; (-) strand; PAM type: YTN; PAM sequence: CTT
tcagtggatgagaaaaaaga

SEQ ID NO: 204668 - DNA, 20 bp, Artificial Sequence
  Description of Artificial Sequence: Synthetic oligonucleotide
  Target: LAMA2; (-) strand; PAM type: YTN; PAM sequence: TTA
ggaatcaaaactttcagtgg

SEQ ID NO: 204669 - DNA, 20 bp, Artificial Sequence
  Description of Artificial Sequence: Synthetic oligonucleotide
  Target: LAMA2; (-) strand; PAM type: YTN; PAM sequence: TTA
ttaggaatcaaaactttcag

SEQ ID NO: 204670 - DNA, 20 bp, Artificial Sequence
  Description of Artificial Sequence: Synthetic oligonucleotide
  Target: LAMA2; (-) strand; PAM type: YTN; PAM sequence: CTA
tgatagagcaaataagttat

SEQ ID NO: 204671 - DNA, 20 bp, Artificial Sequence
  Description of Artificial Sequence: Synthetic oligonucleotide
  Target: LAMA2; (-) strand; PAM type: YTN; PAM sequence: TTA
tgaaatgatatatagagagc

SEQ ID NO: 204672 - DNA, 20 bp, Artificial Sequence
  Description of Artificial Sequence: Synthetic oligonucleotide
  Target: LAMA2; (-) strand; PAM type: YTN; PAM sequence: TTA
ttatgaaatgatatatagag

SEQ ID NO: 204673 - DNA, 20 bp, Artificial Sequence
  Description of Artificial Sequence: Synthetic oligonucleotide
  Target: LAMA2; (-) strand; PAM type: YTN; PAM sequence: TTA
ttattatgaaatgatatata

SEQ ID NO: 204674 - DNA, 20 bp, Artificial Sequence
  Description of Artificial Sequence: Synthetic oligonucleotide
  Target: LAMA2; (-) strand; PAM type: YTN; PAM sequence: CTA
ttattattatgaaatgatat

SEQ ID NO: 204675 - DNA, 20 bp, Artificial Sequence
  Description of Artificial Sequence: Synthetic oligonucleotide
  Target: LAMA2; (-) strand; PAM type: YTN; PAM sequence: TTC
tattattattatgaaatgat

SEQ ID NO: 204676 - DNA, 20 bp, Artificial Sequence
  Description of Artificial Sequence: Synthetic oligonucleotide
  Target: LAMA2; (-) strand; PAM type: YTN; PAM sequence: TTT
ctattattattatgaaatga

SEQ ID NO: 204677 - DNA, 20 bp, Artificial Sequence
  Description of Artificial Sequence: Synthetic oligonucleotide
  Target: LAMA2; (-) strand; PAM type: YTN; PAM sequence: TTG
tatatgataatatttctatt

SEQ ID NO: 204678 - DNA, 20 bp, Artificial Sequence
  Description of Artificial Sequence: Synthetic oligonucleotide
  Target: LAMA2; (-) strand; PAM type: YTN; PAM sequence: CTA
tgttgtatatgataatattt

SEQ ID NO: 204679 - DNA, 20 bp, Artificial Sequence
  Description of Artificial Sequence: Synthetic oligonucleotide
  Target: LAMA2; (-) strand; PAM type: YTN; PAM sequence: TTC
agccactatgttgtatatga

SEQ ID NO: 204680 - DNA, 20 bp, Artificial Sequence
  Description of Artificial Sequence: Synthetic oligonucleotide
  Target: LAMA2; (-) strand; PAM type: YTN; PAM sequence: TTT
cagccactatgttgtatatg

SEQ ID NO: 204681 - DNA, 20 bp, Artificial Sequence
  Description of Artificial Sequence: Synthetic oligonucleotide
  Target: LAMA2; (-) strand; PAM type: YTN; PAM sequence: TTC
aaagtcatttcagccactat

SEQ ID NO: 204682 - DNA, 20 bp, Artificial Sequence
  Description of Artificial Sequence: Synthetic oligonucleotide
  Target: LAMA2; (-) strand; PAM type: YTN; PAM sequence: TTT
caaagtcatttcagccacta

SEQ ID NO: 204683 - DNA, 20 bp, Artificial Sequence
  Description of Artificial Sequence: Synthetic oligonucleotide
  Target: LAMA2; (-) strand; PAM type: YTN; PAM sequence: CTT
tcaaagtcatttcagccact

SEQ ID NO: 204684 - DNA, 20 bp, Artificial Sequence
  Description of Artificial Sequence: Synthetic oligonucleotide
  Target: LAMA2; (-) strand; PAM type: YTN; PAM sequence: CTA
agaaatctttcaaagtcatt

SEQ ID NO: 204685 - DNA, 20 bp, Artificial Sequence
  Description of Artificial Sequence: Synthetic oligonucleotide
  Target: LAMA2; (-) strand; PAM type: YTN; PAM sequence: TTA
taaatataaaatcgtggcta

SEQ ID NO: 204686 - DNA, 20 bp, Artificial Sequence
  Description of Artificial Sequence: Synthetic oligonucleotide
  Target: LAMA2; (-) strand; PAM type: YTN; PAM sequence: TTT
ataaatataaaatcgtggct

SEQ ID NO: 204687 - DNA, 20 bp, Artificial Sequence
  Description of Artificial Sequence: Synthetic oligonucleotide
  Target: LAMA2; (-) strand; PAM type: YTN; PAM sequence: CTT
tataaatataaaatcgtggc

SEQ ID NO: 204688 - DNA, 20 bp, Artificial Sequence
  Description of Artificial Sequence: Synthetic oligonucleotide
  Target: LAMA2; (-) strand; PAM type: YTN; PAM sequence: CTA
gtgggatgctttataaatat

SEQ ID NO: 204689 - DNA, 20 bp, Artificial Sequence
  Description of Artificial Sequence: Synthetic oligonucleotide
  Target: LAMA2; (-) strand; PAM type: YTN; PAM sequence: TTG
tagatgcctagtgggatgct

SEQ ID NO: 204690 - DNA, 20 bp, Artificial Sequence
  Description of Artificial Sequence: Synthetic oligonucleotide
  Target: LAMA2; (-) strand; PAM type: YTN; PAM sequence: TTG
attgtagatgcctagtggga

SEQ ID NO: 204691 - DNA, 20 bp, Artificial Sequence
  Description of Artificial Sequence: Synthetic oligonucleotide
  Target: LAMA2; (-) strand; PAM type: YTN; PAM sequence: TTT
gattgtagatgcctagtggg

SEQ ID NO: 204692 - DNA, 20 bp, Artificial Sequence
  Description of Artificial Sequence: Synthetic oligonucleotide
  Target: LAMA2; (-) strand; PAM type: YTN; PAM sequence: TTA
aaaaaaggtaatttgattgt

SEQ ID NO: 204693 - DNA, 20 bp, Artificial Sequence
  Description of Artificial Sequence: Synthetic oligonucleotide
  Target: LAMA2; (-) strand; PAM type: YTN; PAM sequence: TTT
aaaaaaaggtaatttgattg

SEQ ID NO: 204694 - DNA, 20 bp, Artificial Sequence
  Description of Artificial Sequence: Synthetic oligonucleotide
  Target: LAMA2; (-) strand; PAM type: YTN; PAM sequence: TTT
taaaaaaaggtaatttgatt

SEQ ID NO: 204695 - DNA, 20 bp, Artificial Sequence
  Description of Artificial Sequence: Synthetic oligonucleotide
  Target: LAMA2; (-) strand; PAM type: YTN; PAM sequence: TTT
ttaaaaaaaggtaatttgat

SEQ ID NO: 204696 - DNA, 20 bp, Artificial Sequence
  Description of Artificial Sequence: Synthetic oligonucleotide
  Target: LAMA2; (-) strand; PAM type: YTN; PAM sequence: TTT
tttaaaaaaaggtaatttga

SEQ ID NO: 204697 - DNA, 20 bp, Artificial Sequence
  Description of Artificial Sequence: Synthetic oligonucleotide
  Target: LAMA2; (-) strand; PAM type: YTN; PAM sequence: TTT
ttttaaaaaaaggtaatttg

SEQ ID NO: 204698 - DNA, 20 bp, Artificial Sequence
  Description of Artificial Sequence: Synthetic oligonucleotide
  Target: LAMA2; (-) strand; PAM type: YTN; PAM sequence: TTT
tttttaaaaaaaggtaattt

SEQ ID NO: 204699 - DNA, 20 bp, Artificial Sequence
  Description of Artificial Sequence: Synthetic oligonucleotide
  Target: LAMA2; (-) strand; PAM type: YTN; PAM sequence: TTT
ttttttaaaaaaaggtaatt

SEQ ID NO: 204700 - DNA, 20 bp, Artificial Sequence
  Description of Artificial Sequence: Synthetic oligonucleotide
  Target: LAMA2; (-) strand; PAM type: YTN; PAM sequence: TTC
aagtgatttttttttaaaaa

SEQ ID NO: 204701 - DNA, 20 bp, Artificial Sequence
  Description of Artificial Sequence: Synthetic oligonucleotide
  Target: LAMA2; (-) strand; PAM type: YTN; PAM sequence: TTT
caagtgatttttttttaaaa

SEQ ID NO: 204702 - DNA, 20 bp, Artificial Sequence
  Description of Artificial Sequence: Synthetic oligonucleotide
  Target: LAMA2; (-) strand; PAM type: YTN; PAM sequence: TTT
tcaagtgatttttttttaaa

SEQ ID NO: 204703 - DNA, 20 bp, Artificial Sequence
  Description of Artificial Sequence: Synthetic oligonucleotide
  Target: LAMA2; (-) strand; PAM type: YTN; PAM sequence: TTT
ttcaagtgatttttttttaa

SEQ ID NO: 204704 - DNA, 20 bp, Artificial Sequence
  Description of Artificial Sequence: Synthetic oligonucleotide
  Target: LAMA2; (-) strand; PAM type: YTN; PAM sequence: TTT
tttcaagtgattttttttta

SEQ ID NO: 204705 - DNA, 20 bp, Artificial Sequence
  Description of Artificial Sequence: Synthetic oligonucleotide
  Target: LAMA2; (-) strand; PAM type: YTN; PAM sequence: TTA
accataaaataattttttca

SEQ ID NO: 204706 - DNA, 20 bp, Artificial Sequence
  Description of Artificial Sequence: Synthetic oligonucleotide
  Target: LAMA2; (-) strand; PAM type: YTN; PAM sequence: CTT
aaccataaaataattttttc

SEQ ID NO: 204707 - DNA, 20 bp, Artificial Sequence
  Description of Artificial Sequence: Synthetic oligonucleotide
  Target: LAMA2; (-) strand; PAM type: YTN; PAM sequence: TTG
gtggcttaaccataaaataa

SEQ ID NO: 204708 - DNA, 20 bp, Artificial Sequence
  Description of Artificial Sequence: Synthetic oligonucleotide
  Target: LAMA2; (-) strand; PAM type: YTN; PAM sequence: TTT
ggtggcttaaccataaaata

SEQ ID NO: 204709 - DNA, 20 bp, Artificial Sequence
  Description of Artificial Sequence: Synthetic oligonucleotide
  Target: LAMA2; (-) strand; PAM type: YTN; PAM sequence: TTG
tttggtggcttaaccataaa

SEQ ID NO: 204710 - DNA, 20 bp, Artificial Sequence
  Description of Artificial Sequence: Synthetic oligonucleotide
  Target: LAMA2; (-) strand; PAM type: YTN; PAM sequence: TTC
aggcaaaaagtcaaatgaag

SEQ ID NO: 204711 - DNA, 20 bp, Artificial Sequence
  Description of Artificial Sequence: Synthetic oligonucleotide
  Target: LAMA2; (-) strand; PAM type: YTN; PAM sequence: TTT
caggcaaaaagtcaaatgaa

SEQ ID NO: 204712 - DNA, 20 bp, Artificial Sequence
  Description of Artificial Sequence: Synthetic oligonucleotide
  Target: LAMA2; (-) strand; PAM type: YTN; PAM sequence: CTT
tcaggcaaaaagtcaaatga

SEQ ID NO: 204713 - DNA, 20 bp, Artificial Sequence
  Description of Artificial Sequence: Synthetic oligonucleotide
  Target: LAMA2; (-) strand; PAM type: YTN; PAM sequence: TTA
aaatactttcaggcaaaaag

SEQ ID NO: 204714 - DNA, 20 bp, Artificial Sequence
  Description of Artificial Sequence: Synthetic oligonucleotide
  Target: LAMA2; (-) strand; PAM type: YTN; PAM sequence: TTT
aaaatactttcaggcaaaaa

SEQ ID NO: 204715 - DNA, 20 bp, Artificial Sequence
  Description of Artificial Sequence: Synthetic oligonucleotide
  Target: LAMA2; (-) strand; PAM type: YTN; PAM sequence: TTA
taaaacaaatatttaaaata

SEQ ID NO: 204716 - DNA, 20 bp, Artificial Sequence
  Description of Artificial Sequence: Synthetic oligonucleotide
  Target: LAMA2; (-) strand; PAM type: YTN; PAM sequence: TTA
catcattataaaacaaatat

SEQ ID NO: 204717 - DNA, 20 bp, Artificial Sequence
  Description of Artificial Sequence: Synthetic oligonucleotide
  Target: LAMA2; (-) strand; PAM type: YTN; PAM sequence: TTT
acatcattataaaacaaata

SEQ ID NO: 204718 - DNA, 20 bp, Artificial Sequence
  Description of Artificial Sequence: Synthetic oligonucleotide
  Target: LAMA2; (-) strand; PAM type: YTN; PAM sequence: TTT
tacatcattataaaacaaat

SEQ ID NO: 204719 - DNA, 20 bp, Artificial Sequence
  Description of Artificial Sequence: Synthetic oligonucleotide
  Target: LAMA2; (-) strand; PAM type: YTN; PAM sequence: TTT
ttacatcattataaaacaaa

SEQ ID NO: 204720 - DNA, 20 bp, Artificial Sequence
  Description of Artificial Sequence: Synthetic oligonucleotide
  Target: LAMA2; (-) strand; PAM type: YTN; PAM sequence: CTA
tgtaaaagtttttacatcat

SEQ ID NO: 204721 - DNA, 20 bp, Artificial Sequence
  Description of Artificial Sequence: Synthetic oligonucleotide
  Target: LAMA2; (-) strand; PAM type: YTN; PAM sequence: TTG
aaactatgtaaaagttttta

SEQ ID NO: 204722 - DNA, 20 bp, Artificial Sequence
  Description of Artificial Sequence: Synthetic oligonucleotide
  Target: LAMA2; (-) strand; PAM type: YTN; PAM sequence: CTT
gaaactatgtaaaagttttt

SEQ ID NO: 204723 - DNA, 20 bp, Artificial Sequence
  Description of Artificial Sequence: Synthetic oligonucleotide
  Target: LAMA2; (-) strand; PAM type: YTN; PAM sequence: TTG
accttgaaactatgtaaaag

SEQ ID NO: 204724 - DNA, 20 bp, Artificial Sequence
  Description of Artificial Sequence: Synthetic oligonucleotide
  Target: LAMA2; (-) strand; PAM type: YTN; PAM sequence: TTT
gaccttgaaactatgtaaaa

SEQ ID NO: 204725 - DNA, 20 bp, Artificial Sequence
  Description of Artificial Sequence: Synthetic oligonucleotide
  Target: LAMA2; (-) strand; PAM type: YTN; PAM sequence: TTG
caaatttgaccttgaaacta

SEQ ID NO: 204726 - DNA, 20 bp, Artificial Sequence
  Description of Artificial Sequence: Synthetic oligonucleotide
  Target: LAMA2; (-) strand; PAM type: YTN; PAM sequence: TTT
gcaaatttgaccttgaaact

SEQ ID NO: 204727 - DNA, 20 bp, Artificial Sequence
  Description of Artificial Sequence: Synthetic oligonucleotide
  Target: LAMA2; (-) strand; PAM type: YTN; PAM sequence: TTT
tgcaaatttgaccttgaaac

SEQ ID NO: 204728 - DNA, 20 bp, Artificial Sequence
  Description of Artificial Sequence: Synthetic oligonucleotide
  Target: LAMA2; (-) strand; PAM type: YTN; PAM sequence: TTA
ttttgcaaatttgaccttga

SEQ ID NO: 204729 - DNA, 20 bp, Artificial Sequence
  Description of Artificial Sequence: Synthetic oligonucleotide
  Target: LAMA2; (-) strand; PAM type: YTN; PAM sequence: CTT
attttgcaaatttgaccttg

SEQ ID NO: 204730 - DNA, 20 bp, Artificial Sequence
  Description of Artificial Sequence: Synthetic oligonucleotide
  Target: LAMA2; (-) strand; PAM type: YTN; PAM sequence: CTG
aatataacttattttgcaaa

SEQ ID NO: 204731 - DNA, 20 bp, Artificial Sequence
  Description of Artificial Sequence: Synthetic oligonucleotide
  Target: LAMA2; (-) strand; PAM type: YTN; PAM sequence: CTC
tgaatataacttattttgca

SEQ ID NO: 204732 - DNA, 20 bp, Artificial Sequence
  Description of Artificial Sequence: Synthetic oligonucleotide
  Target: LAMA2; (-) strand; PAM type: YTN; PAM sequence: CTA
gtctctgaatataacttatt

SEQ ID NO: 204733 - DNA, 20 bp, Artificial Sequence
  Description of Artificial Sequence: Synthetic oligonucleotide
  Target: LAMA2; (-) strand; PAM type: YTN; PAM sequence: CTA
gagagtctagtctctgaata

SEQ ID NO: 204734 - DNA, 20 bp, Artificial Sequence
  Description of Artificial Sequence: Synthetic oligonucleotide
  Target: LAMA2; (-) strand; PAM type: YTN; PAM sequence: TTA
gtgaggaagaaaacaggatg

SEQ ID NO: 204735 - DNA, 20 bp, Artificial Sequence
  Description of Artificial Sequence: Synthetic oligonucleotide
  Target: LAMA2; (-) strand; PAM type: YTN; PAM sequence: TTA
cacattagtgaggaagaaaa

SEQ ID NO: 204736 - DNA, 20 bp, Artificial Sequence
  Description of Artificial Sequence: Synthetic oligonucleotide
  Target: LAMA2; (-) strand; PAM type: YTN; PAM sequence: CTA
aataaaatggttacacatta

SEQ ID NO: 204737 - DNA, 20 bp, Artificial Sequence
  Description of Artificial Sequence: Synthetic oligonucleotide
  Target: LAMA2; (-) strand; PAM type: YTN; PAM sequence: CTA
acaaatggaaagataaccct

SEQ ID NO: 204738 - DNA, 20 bp, Artificial Sequence
  Description of Artificial Sequence: Synthetic oligonucleotide
  Target: LAMA2; (-) strand; PAM type: YTN; PAM sequence: TTC
taacaaatggaaagataacc

SEQ ID NO: 204739 - DNA, 20 bp, Artificial Sequence
  Description of Artificial Sequence: Synthetic oligonucleotide
  Target: LAMA2; (-) strand; PAM type: YTN; PAM sequence: TTT
ctaacaaatggaaagataac

SEQ ID NO: 204740 - DNA, 20 bp, Artificial Sequence
  Description of Artificial Sequence: Synthetic oligonucleotide
  Target: LAMA2; (-) strand; PAM type: YTN; PAM sequence: TTA
tatatataatatttctaaca

SEQ ID NO: 204741 - DNA, 20 bp, Artificial Sequence
  Description of Artificial Sequence: Synthetic oligonucleotide
  Target: LAMA2; (-) strand; PAM type: YTN; PAM sequence: TTT
atatatataatatttctaac

SEQ ID NO: 204742 - DNA, 20 bp, Artificial Sequence
  Description of Artificial Sequence: Synthetic oligonucleotide
  Target: LAMA2; (-) strand; PAM type: YTN; PAM sequence: CTA
tttatatatataatatttct

SEQ ID NO: 204743 - DNA, 20 bp, Artificial Sequence
  Description of Artificial Sequence: Synthetic oligonucleotide
  Target: LAMA2; (-) strand; PAM type: YTN; PAM sequence: TTA
aacaaactatttatatatat

SEQ ID NO: 204744 - DNA, 20 bp, Artificial Sequence
  Description of Artificial Sequence: Synthetic oligonucleotide
  Target: LAMA2; (-) strand; PAM type: YTN; PAM sequence: TTT
aaacaaactatttatatata

SEQ ID NO: 204745 - DNA, 20 bp, Artificial Sequence
  Description of Artificial Sequence: Synthetic oligonucleotide
  Target: LAMA2; (-) strand; PAM type: YTN; PAM sequence: CTG
tttaaacaaactatttatat

SEQ ID NO: 204746 - DNA, 20 bp, Artificial Sequence
  Description of Artificial Sequence: Synthetic oligonucleotide
  Target: LAMA2; (-) strand; PAM type: YTN; PAM sequence: TTA
agcggactgtttaaacaaac

SEQ ID NO: 204747 - DNA, 20 bp, Artificial Sequence
  Description of Artificial Sequence: Synthetic oligonucleotide
  Target: LAMA2; (-) strand; PAM type: YTN; PAM sequence: CTT
aagcggactgtttaaacaaa

SEQ ID NO: 204748 - DNA, 20 bp, Artificial Sequence
  Description of Artificial Sequence: Synthetic oligonucleotide
  Target: LAMA2; (-) strand; PAM type: YTN; PAM sequence: TTC
ttaagcggactgtttaaaca

SEQ ID NO: 204749 - DNA, 20 bp, Artificial Sequence
  Description of Artificial Sequence: Synthetic oligonucleotide
  Target: LAMA2; (-) strand; PAM type: YTN; PAM sequence: CTA
gaaaaatattcttaagcgga

SEQ ID NO: 204750 - DNA, 20 bp, Artificial Sequence
  Description of Artificial Sequence: Synthetic oligonucleotide
  Target: LAMA2; (-) strand; PAM type: YTN; PAM sequence: TTG
tagcagcaaaagactagaaa

SEQ ID NO: 204751 - DNA, 20 bp, Artificial Sequence
  Description of Artificial Sequence: Synthetic oligonucleotide
  Target: LAMA2; (-) strand; PAM type: YTN; PAM sequence: TTT
gtagcagcaaaagactagaa

SEQ ID NO: 204752 - DNA, 20 bp, Artificial Sequence
  Description of Artificial Sequence: Synthetic oligonucleotide
  Target: LAMA2; (-) strand; PAM type: YTN; PAM sequence: TTA
tttgtagcagcaaaagacta

SEQ ID NO: 204753 - DNA, 20 bp, Artificial Sequence
  Description of Artificial Sequence: Synthetic oligonucleotide
  Target: LAMA2; (-) strand; PAM type: YTN; PAM sequence: TTG
caagattatttgtagcagca

SEQ ID NO: 204754 - DNA, 20 bp, Artificial Sequence
  Description of Artificial Sequence: Synthetic oligonucleotide
  Target: LAMA2; (-) strand; PAM type: YTN; PAM sequence: CTG
attgcaagattatttgtagc

SEQ ID NO: 204755 - DNA, 20 bp, Artificial Sequence
  Description of Artificial Sequence: Synthetic oligonucleotide
  Target: LAMA2; (-) strand; PAM type: YTN; PAM sequence: CTA
aagatgcaatgacaaaaagc

SEQ ID NO: 204756 - DNA, 20 bp, Artificial Sequence
  Description of Artificial Sequence: Synthetic oligonucleotide
  Target: LAMA2; (-) strand; PAM type: YTN; PAM sequence: CTA
tcctaaagatgcaatgacaa

SEQ ID NO: 204757 - DNA, 20 bp, Artificial Sequence
  Description of Artificial Sequence: Synthetic oligonucleotide
  Target: LAMA2; (-) strand; PAM type: YTN; PAM sequence: CTC
aaaaaaaaaaaaaaaacaaa

SEQ ID NO: 204758 - DNA, 20 bp, Artificial Sequence
  Description of Artificial Sequence: Synthetic oligonucleotide
  Target: LAMA2; (-) strand; PAM type: YTN; PAM sequence: CTG
cctcaaaaaaaaaaaaaaaa

SEQ ID NO: 204759 - DNA, 20 bp, Artificial Sequence
  Description of Artificial Sequence: Synthetic oligonucleotide
  Target: LAMA2; (-) strand; PAM type: YTN; PAM sequence: CTC
tgcctcaaaaaaaaaaaaaa

SEQ ID NO: 204760 - DNA, 20 bp, Artificial Sequence
  Description of Artificial Sequence: Synthetic oligonucleotide
  Target: LAMA2; (-) strand; PAM type: YTN; PAM sequence: CTG
ggtgacagagagagactctg

SEQ ID NO: 204761 - DNA, 20 bp, Artificial Sequence
  Description of Artificial Sequence: Synthetic oligonucleotide
  Target: LAMA2; (-) strand; PAM type: YTN; PAM sequence: CTC
cagcctgggtgacagagaga

SEQ ID NO: 204762 - DNA, 20 bp, Artificial Sequence
  Description of Artificial Sequence: Synthetic oligonucleotide
  Target: LAMA2; (-) strand; PAM type: YTN; PAM sequence: CTG
cactccagcctgggtgacag

SEQ ID NO: 204763 - DNA, 20 bp, Artificial Sequence
  Description of Artificial Sequence: Synthetic oligonucleotide
  Target: LAMA2; (-) strand; PAM type: YTN; PAM sequence: CTG
ccactgcactccagcctggg

SEQ ID NO: 204764 - DNA, 20 bp, Artificial Sequence
  Description of Artificial Sequence: Synthetic oligonucleotide
  Target: LAMA2; (-) strand; PAM type: YTN; PAM sequence: CTG
agatcctgccactgcactcc

SEQ ID NO: 204765 - DNA, 20 bp, Artificial Sequence
  Description of Artificial Sequence: Synthetic oligonucleotide
  Target: LAMA2; (-) strand; PAM type: YTN; PAM sequence: TTA
cagtgagctgagatcctgcc

SEQ ID NO: 204766 - DNA, 20 bp, Artificial Sequence
  Description of Artificial Sequence: Synthetic oligonucleotide
  Target: LAMA2; (-) strand; PAM type: YTN; PAM sequence: TTT
acagtgagctgagatcctgc

SEQ ID NO: 204767 - DNA, 20 bp, Artificial Sequence
  Description of Artificial Sequence: Synthetic oligonucleotide
  Target: LAMA2; (-) strand; PAM type: YTN; PAM sequence: CTG
ggaagcaagagtttacagtg

SEQ ID NO: 204768 - DNA, 20 bp, Artificial Sequence
  Description of Artificial Sequence: Synthetic oligonucleotide
  Target: LAMA2; (-) strand; PAM type: YTN; PAM sequence: TTG
aacctgggaagcaagagttt

SEQ ID NO: 204769 - DNA, 20 bp, Artificial Sequence
  Description of Artificial Sequence: Synthetic oligonucleotide
  Target: LAMA2; (-) strand; PAM type: YTN; PAM sequence: CTT
gaacctgggaagcaagagtt

SEQ ID NO: 204770 - DNA, 20 bp, Artificial Sequence
  Description of Artificial Sequence: Synthetic oligonucleotide
  Target: LAMA2; (-) strand; PAM type: YTN; PAM sequence: CTC
acttgaacctgggaagcaag

SEQ ID NO: 204771 - DNA, 20 bp, Artificial Sequence
  Description of Artificial Sequence: Synthetic oligonucleotide
  Target: LAMA2; (-) strand; PAM type: YTN; PAM sequence: CTG
aagcagaagactcacttgaa

SEQ ID NO: 204772 - DNA, 20 bp, Artificial Sequence
  Description of Artificial Sequence: Synthetic oligonucleotide
  Target: LAMA2; (-) strand; PAM type: YTN; PAM sequence: CTA
gggaggctgaagcagaagac

SEQ ID NO: 204773 - DNA, 20 bp, Artificial Sequence
  Description of Artificial Sequence: Synthetic oligonucleotide
  Target: LAMA2; (-) strand; PAM type: YTN; PAM sequence: CTA
ctagggaggctgaagcagaa

SEQ ID NO: 204774 - DNA, 20 bp, Artificial Sequence
  Description of Artificial Sequence: Synthetic oligonucleotide
  Target: LAMA2; (-) strand; PAM type: YTN; PAM sequence: TTA
gctactagggaggctgaagc

SEQ ID NO: 204775 - DNA, 20 bp, Artificial Sequence
  Description of Artificial Sequence: Synthetic oligonucleotide
  Target: LAMA2; (-) strand; PAM type: YTN; PAM sequence: CTT
agctactagggaggctgaag

SEQ ID NO: 204776 - DNA, 20 bp, Artificial Sequence
  Description of Artificial Sequence: Synthetic oligonucleotide
  Target: LAMA2; (-) strand; PAM type: YTN; PAM sequence: CTG
tagtcttagctactagggag

SEQ ID NO: 204777 - DNA, 20 bp, Artificial Sequence
  Description of Artificial Sequence: Synthetic oligonucleotide
  Target: LAMA2; (-) strand; PAM type: YTN; PAM sequence: CTA
ccaaaaatgcgaaaaaaaga

SEQ ID NO: 204778 - DNA, 20 bp, Artificial Sequence
  Description of Artificial Sequence: Synthetic oligonucleotide
  Target: LAMA2; (-) strand; PAM type: YTN; PAM sequence: CTC
taccaaaaatgcgaaaaaaa

SEQ ID NO: 204779 - DNA, 20 bp, Artificial Sequence
  Description of Artificial Sequence: Synthetic oligonucleotide
  Target: LAMA2; (-) strand; PAM type: YTN; PAM sequence: CTC
gccaaaatggtgaaacccgt

SEQ ID NO: 204780 - DNA, 20 bp, Artificial Sequence
  Description of Artificial Sequence: Synthetic oligonucleotide
  Target: LAMA2; (-) strand; PAM type: YTN; PAM sequence: TTG
agaccagcctcgccaaaatg

SEQ ID NO: 204781 - DNA, 20 bp, Artificial Sequence
  Description of Artificial Sequence: Synthetic oligonucleotide
  Target: LAMA2; (-) strand; PAM type: YTN; PAM sequence: TTT
gagaccagcctcgccaaaat

SEQ ID NO: 204782 - DNA, 20 bp, Artificial Sequence
  Description of Artificial Sequence: Synthetic oligonucleotide
  Target: LAMA2; (-) strand; PAM type: YTN; PAM sequence: CTT
tgagaccagcctcgccaaaa

SEQ ID NO: 204783 - DNA, 20 bp, Artificial Sequence
  Description of Artificial Sequence: Synthetic oligonucleotide
  Target: LAMA2; (-) strand; PAM type: YTN; PAM sequence: TTG
gatcccaaggtcaggacttt

SEQ ID NO: 204784 - DNA, 20 bp, Artificial Sequence
  Description of Artificial Sequence: Synthetic oligonucleotide
  Target: LAMA2; (-) strand; PAM type: YTN; PAM sequence: TTG
ggaggccgaggcggttggat

SEQ ID NO: 204785 - DNA, 20 bp, Artificial Sequence
  Description of Artificial Sequence: Synthetic oligonucleotide
  Target: LAMA2; (-) strand; PAM type: YTN; PAM sequence: TTT
gggaggccgaggcggttgga

SEQ ID NO: 204786 - DNA, 20 bp, Artificial Sequence
  Description of Artificial Sequence: Synthetic oligonucleotide
  Target: LAMA2; (-) strand; PAM type: YTN; PAM sequence: CTG
taatcccagcagtttgggag

SEQ ID NO: 204787 - DNA, 20 bp, Artificial Sequence
  Description of Artificial Sequence: Synthetic oligonucleotide
  Target: LAMA2; (-) strand; PAM type: YTN; PAM sequence: CTC
acaactgtaatcccagcagt

SEQ ID NO: 204788 - DNA, 20 bp, Artificial Sequence
  Description of Artificial Sequence: Synthetic oligonucleotide
  Target: LAMA2; (-) strand; PAM type: YTN; PAM sequence: CTG
gcagggcacggtagctcaca

SEQ ID NO: 204789 - DNA, 20 bp, Artificial Sequence
  Description of Artificial Sequence: Synthetic oligonucleotide
  Target: LAMA2; (-) strand; PAM type: YTN; PAM sequence: CTA
tcctggcagggcacggtagc

SEQ ID NO: 204790 - DNA, 20 bp, Artificial Sequence
  Description of Artificial Sequence: Synthetic oligonucleotide
  Target: LAMA2; (-) strand; PAM type: YTN; PAM sequence: TTA
gaaatctatcctggcagggc

SEQ ID NO: 204791 - DNA, 20 bp, Artificial Sequence
  Description of Artificial Sequence: Synthetic oligonucleotide
  Target: LAMA2; (-) strand; PAM type: YTN; PAM sequence: TTT
agaaatctatcctggcaggg

SEQ ID NO: 204792 - DNA, 20 bp, Artificial Sequence
  Description of Artificial Sequence: Synthetic oligonucleotide
  Target: LAMA2; (-) strand; PAM type: YTN; PAM sequence: TTT
tagaaatctatcctggcagg

SEQ ID NO: 204793 - DNA, 20 bp, Artificial Sequence
  Description of Artificial Sequence: Synthetic oligonucleotide
  Target: LAMA2; (-) strand; PAM type: YTN; PAM sequence: CTT
ttagaaatctatcctggcag

SEQ ID NO: 204794 - DNA, 20 bp, Artificial Sequence
  Description of Artificial Sequence: Synthetic oligonucleotide
  Target: LAMA2; (-) strand; PAM type: YTN; PAM sequence: CTG
agtaatcacacttttagaaa

SEQ ID NO: 204795 - DNA, 20 bp, Artificial Sequence
  Description of Artificial Sequence: Synthetic oligonucleotide
  Target: LAMA2; (-) strand; PAM type: YTN; PAM sequence: TTG
actgagtaatcacactttta

SEQ ID NO: 204796 - DNA, 20 bp, Artificial Sequence
  Description of Artificial Sequence: Synthetic oligonucleotide
  Target: LAMA2; (-) strand; PAM type: YTN; PAM sequence: TTT
gactgagtaatcacactttt

SEQ ID NO: 204797 - DNA, 20 bp, Artificial Sequence
  Description of Artificial Sequence: Synthetic oligonucleotide
  Target: LAMA2; (-) strand; PAM type: YTN; PAM sequence: TTT
tgactgagtaatcacacttt

SEQ ID NO: 204798 - DNA, 20 bp, Artificial Sequence
  Description of Artificial Sequence: Synthetic oligonucleotide
  Target: LAMA2; (-) strand; PAM type: YTN; PAM sequence: CTT
ttgactgagtaatcacactt

SEQ ID NO: 204799 - DNA, 20 bp, Artificial Sequence
  Description of Artificial Sequence: Synthetic oligonucleotide
  Target: LAMA2; (-) strand; PAM type: YTN; PAM sequence: TTA
ccttttgactgagtaatcac

SEQ ID NO: 204800 - DNA, 20 bp, Artificial Sequence
  Description of Artificial Sequence: Synthetic oligonucleotide
  Target: LAMA2; (-) strand; PAM type: YTN; PAM sequence: TTT
accttttgactgagtaatca

SEQ ID NO: 204801 - DNA, 20 bp, Artificial Sequence
  Description of Artificial Sequence: Synthetic oligonucleotide
  Target: LAMA2; (-) strand; PAM type: YTN; PAM sequence: TTT
taccttttgactgagtaatc

SEQ ID NO: 204802 - DNA, 20 bp, Artificial Sequence
  Description of Artificial Sequence: Synthetic oligonucleotide
  Target: LAMA2; (-) strand; PAM type: YTN; PAM sequence: CTT
ttaccttttgactgagtaat

SEQ ID NO: 204803 - DNA, 20 bp, Artificial Sequence
  Description of Artificial Sequence: Synthetic oligonucleotide
  Target: LAMA2; (-) strand; PAM type: YTN; PAM sequence: CTA
cttttaccttttgactgagt

SEQ ID NO: 204804 - DNA, 20 bp, Artificial Sequence
  Description of Artificial Sequence: Synthetic oligonucleotide
  Target: LAMA2; (-) strand; PAM type: YTN; PAM sequence: TTA
tctacttttaccttttgact

SEQ ID NO: 204805 - DNA, 20 bp, Artificial Sequence
  Description of Artificial Sequence: Synthetic oligonucleotide
  Target: LAMA2; (-) strand; PAM type: YTN; PAM sequence: TTT
atctacttttaccttttgac

SEQ ID NO: 204806 - DNA, 20 bp, Artificial Sequence
  Description of Artificial Sequence: Synthetic oligonucleotide
  Target: LAMA2; (-) strand; PAM type: YTN; PAM sequence: CTA
ataaatttatctacttttac

SEQ ID NO: 204807 - DNA, 20 bp, Artificial Sequence
  Description of Artificial Sequence: Synthetic oligonucleotide
  Target: LAMA2; (-) strand; PAM type: YTN; PAM sequence: TTG
acaacatctaataaatttat

SEQ ID NO: 204808 - DNA, 20 bp, Artificial Sequence
  Description of Artificial Sequence: Synthetic oligonucleotide
  Target: LAMA2; (-) strand; PAM type: YTN; PAM sequence: TTT
gacaacatctaataaattta

SEQ ID NO: 204809 - DNA, 20 bp, Artificial Sequence
  Description of Artificial Sequence: Synthetic oligonucleotide
  Target: LAMA2; (-) strand; PAM type: YTN; PAM sequence: CTC
ccaaagaagaatttgacaac

SEQ ID NO: 204810 - DNA, 20 bp, Artificial Sequence
  Description of Artificial Sequence: Synthetic oligonucleotide
  Target: LAMA2; (-) strand; PAM type: YTN; PAM sequence: TTA
ctcccaaagaagaatttgac

SEQ ID NO: 204811 - DNA, 20 bp, Artificial Sequence
  Description of Artificial Sequence: Synthetic oligonucleotide
  Target: LAMA2; (-) strand; PAM type: YTN; PAM sequence: TTG
gaaaatggcattactcccaa

SEQ ID NO: 204812 - DNA, 20 bp, Artificial Sequence
  Description of Artificial Sequence: Synthetic oligonucleotide
  Target: LAMA2; (-) strand; PAM type: YTN; PAM sequence: TTA
ggattggaaaatggcattac

SEQ ID NO: 204813 - DNA, 20 bp, Artificial Sequence
  Description of Artificial Sequence: Synthetic oligonucleotide
  Target: LAMA2; (-) strand; PAM type: YTN; PAM sequence: CTT
aggattggaaaatggcatta

SEQ ID NO: 204814 - DNA, 20 bp, Artificial Sequence
  Description of Artificial Sequence: Synthetic oligonucleotide
  Target: LAMA2; (-) strand; PAM type: YTN; PAM sequence: CTG
atcttaggattggaaaatgg

SEQ ID NO: 204815 - DNA, 20 bp, Artificial Sequence
  Description of Artificial Sequence: Synthetic oligonucleotide
  Target: LAMA2; (-) strand; PAM type: YTN; PAM sequence: CTC
acatgctgatcttaggattg

SEQ ID NO: 204816 - DNA, 20 bp, Artificial Sequence
  Description of Artificial Sequence: Synthetic oligonucleotide
  Target: LAMA2; (-) strand; PAM type: YTN; PAM sequence: TTC
tcacatgctgatcttaggat

SEQ ID NO: 204817 - DNA, 20 bp, Artificial Sequence
  Description of Artificial Sequence: Synthetic oligonucleotide
  Target: LAMA2; (-) strand; PAM type: YTN; PAM sequence: CTA
tggaaacagaacacattctc

SEQ ID NO: 204818 - DNA, 20 bp, Artificial Sequence
  Description of Artificial Sequence: Synthetic oligonucleotide
  Target: LAMA2; (-) strand; PAM type: YTN; PAM sequence: TTG
gagaacctatggaaacagaa

SEQ ID NO: 204819 - DNA, 20 bp, Artificial Sequence
  Description of Artificial Sequence: Synthetic oligonucleotide
  Target: LAMA2; (-) strand; PAM type: YTN; PAM sequence: TTG
ttggagaacctatggaaaca

SEQ ID NO: 204820 - DNA, 20 bp, Artificial Sequence
  Description of Artificial Sequence: Synthetic oligonucleotide
  Target: LAMA2; (-) strand; PAM type: YTN; PAM sequence: TTT
gttggagaacctatggaaac

SEQ ID NO: 204821 - DNA, 20 bp, Artificial Sequence
  Description of Artificial Sequence: Synthetic oligonucleotide
  Target: LAMA2; (-) strand; PAM type: YTN; PAM sequence: TTG
gcaatataatttgttggaga

SEQ ID NO: 204822 - DNA, 20 bp, Artificial Sequence
  Description of Artificial Sequence: Synthetic oligonucleotide
  Target: LAMA2; (-) strand; PAM type: YTN; PAM sequence: TTT
ggcaatataatttgttggag

SEQ ID NO: 204823 - DNA, 20 bp, Artificial Sequence
  Description of Artificial Sequence: Synthetic oligonucleotide
  Target: LAMA2; (-) strand; PAM type: YTN; PAM sequence: TTG
gaacataaagtttggcaata

SEQ ID NO: 204824 - DNA, 20 bp, Artificial Sequence
  Description of Artificial Sequence: Synthetic oligonucleotide
  Target: LAMA2; (-) strand; PAM type: YTN; PAM sequence: TTT
ggaacataaagtttggcaat

SEQ ID NO: 204825 - DNA, 20 bp, Artificial Sequence
  Description of Artificial Sequence: Synthetic oligonucleotide
  Target: LAMA2; (-) strand; PAM type: YTN; PAM sequence: CTT
tggaacataaagtttggcaa

SEQ ID NO: 204826 - DNA, 20 bp, Artificial Sequence
  Description of Artificial Sequence: Synthetic oligonucleotide
  Target: LAMA2; (-) strand; PAM type: YTN; PAM sequence: CTA
ccagacatatccccacaaag

SEQ ID NO: 204827 - DNA, 20 bp, Artificial Sequence
  Description of Artificial Sequence: Synthetic oligonucleotide
  Target: LAMA2; (-) strand; PAM type: YTN; PAM sequence: CTG
ccccaatcaactaccagaca

SEQ ID NO: 204828 - DNA, 20 bp, Artificial Sequence
  Description of Artificial Sequence: Synthetic oligonucleotide
  Target: LAMA2; (-) strand; PAM type: YTN; PAM sequence: CTC
tgccccaatcaactaccaga

SEQ ID NO: 204829 - DNA, 20 bp, Artificial Sequence
  Description of Artificial Sequence: Synthetic oligonucleotide
  Target: LAMA2; (-) strand; PAM type: YTN; PAM sequence: TTC
tctgccccaatcaactacca

SEQ ID NO: 204830 - DNA, 20 bp, Artificial Sequence
  Description of Artificial Sequence: Synthetic oligonucleotide
  Target: LAMA2; (-) strand; PAM type: YTN; PAM sequence: TTT
ctctgccccaatcaactacc

SEQ ID NO: 204831 - DNA, 20 bp, Artificial Sequence
  Description of Artificial Sequence: Synthetic oligonucleotide
  Target: LAMA2; (-) strand; PAM type: YTN; PAM sequence: TTT
tctctgccccaatcaactac

SEQ ID NO: 204832 - DNA, 20 bp, Artificial Sequence
  Description of Artificial Sequence: Synthetic oligonucleotide
  Target: LAMA2; (-) strand; PAM type: YTN; PAM sequence: CTC
attttctctgccccaatcaa

SEQ ID NO: 204833 - DNA, 20 bp, Artificial Sequence
  Description of Artificial Sequence: Synthetic oligonucleotide
  Target: LAMA2; (-) strand; PAM type: YTN; PAM sequence: TTC
tcattttctctgccccaatc

SEQ ID NO: 204834 - DNA, 20 bp, Artificial Sequence
  Description of Artificial Sequence: Synthetic oligonucleotide
  Target: LAMA2; (-) strand; PAM type: YTN; PAM sequence: TTT
ctcattttctctgccccaat

SEQ ID NO: 204835 - DNA, 20 bp, Artificial Sequence
  Description of Artificial Sequence: Synthetic oligonucleotide
  Target: LAMA2; (-) strand; PAM type: YTN; PAM sequence: TTT
tctcattttctctgccccaa

SEQ ID NO: 204836 - DNA, 20 bp, Artificial Sequence
  Description of Artificial Sequence: Synthetic oligonucleotide
  Target: LAMA2; (-) strand; PAM type: YTN; PAM sequence: TTT
ttctcattttctctgcccca

SEQ ID NO: 204837 - DNA, 20 bp, Artificial Sequence
  Description of Artificial Sequence: Synthetic oligonucleotide
  Target: LAMA2; (-) strand; PAM type: YTN; PAM sequence: CTA
agtttttctcattttctctg

SEQ ID NO: 204838 - DNA, 20 bp, Artificial Sequence
  Description of Artificial Sequence: Synthetic oligonucleotide
  Target: LAMA2; (-) strand; PAM type: YTN; PAM sequence: TTC
atactaagtttttctcattt

SEQ ID NO: 204839 - DNA, 20 bp, Artificial Sequence
  Description of Artificial Sequence: Synthetic oligonucleotide
  Target: LAMA2; (-) strand; PAM type: YTN; PAM sequence: CTT
catactaagtttttctcatt

SEQ ID NO: 204840 - DNA, 20 bp, Artificial Sequence
  Description of Artificial Sequence: Synthetic oligonucleotide
  Target: LAMA2; (-) strand; PAM type: YTN; PAM sequence: TTC
ttcatactaagtttttctca

SEQ ID NO: 204841 - DNA, 20 bp, Artificial Sequence
  Description of Artificial Sequence: Synthetic oligonucleotide
  Target: LAMA2; (-) strand; PAM type: YTN; PAM sequence: TTT
cttcatactaagtttttctc

SEQ ID NO: 204842 - DNA, 20 bp, Artificial Sequence
  Description of Artificial Sequence: Synthetic oligonucleotide
  Target: LAMA2; (-) strand; PAM type: YTN; PAM sequence: TTT
tcttcatactaagtttttct

SEQ ID NO: 204843 - DNA, 20 bp, Artificial Sequence
  Description of Artificial Sequence: Synthetic oligonucleotide
  Target: LAMA2; (-) strand; PAM type: YTN; PAM sequence: CTT
ttcttcatactaagtttttc

SEQ ID NO: 204844 - DNA, 20 bp, Artificial Sequence
  Description of Artificial Sequence: Synthetic oligonucleotide
  Target: LAMA2; (-) strand; PAM type: YTN; PAM sequence: CTC
ttttcttcatactaagtttt

SEQ ID NO: 204845 - DNA, 20 bp, Artificial Sequence
  Description of Artificial Sequence: Synthetic oligonucleotide
  Target: LAMA2; (-) strand; PAM type: YTN; PAM sequence: CTA
agactcttttcttcatacta

SEQ ID NO: 204846 - DNA, 20 bp, Artificial Sequence
  Description of Artificial Sequence: Synthetic oligonucleotide
  Target: LAMA2; (-) strand; PAM type: YTN; PAM sequence: TTC
aagcctaagactcttttctt

SEQ ID NO: 204847 - DNA, 20 bp, Artificial Sequence
  Description of Artificial Sequence: Synthetic oligonucleotide
  Target: LAMA2; (-) strand; PAM type: YTN; PAM sequence: TTT
caagcctaagactcttttct

SEQ ID NO: 204848 - DNA, 20 bp, Artificial Sequence
  Description of Artificial Sequence: Synthetic oligonucleotide
  Target: LAMA2; (-) strand; PAM type: YTN; PAM sequence: TTA
atttcaagcctaagactctt

SEQ ID NO: 204849 - DNA, 20 bp, Artificial Sequence
  Description of Artificial Sequence: Synthetic oligonucleotide
  Target: LAMA2; (-) strand; PAM type: YTN; PAM sequence: CTT
aatttcaagcctaagactct

SEQ ID NO: 204850 - DNA, 20 bp, Artificial Sequence
  Description of Artificial Sequence: Synthetic oligonucleotide
  Target: LAMA2; (-) strand; PAM type: YTN; PAM sequence: CTG
tgtcttaatttcaagcctaa

SEQ ID NO: 204851 - DNA, 20 bp, Artificial Sequence
  Description of Artificial Sequence: Synthetic oligonucleotide
  Target: LAMA2; (-) strand; PAM type: YTN; PAM sequence: TTA
aacctgtgtcttaatttcaa

SEQ ID NO: 204852 - DNA, 20 bp, Artificial Sequence
  Description of Artificial Sequence: Synthetic oligonucleotide
  Target: LAMA2; (-) strand; PAM type: YTN; PAM sequence: CTA
aggtgaaacaagtgatcagc

SEQ ID NO: 204853 - DNA, 20 bp, Artificial Sequence
  Description of Artificial Sequence: Synthetic oligonucleotide
  Target: LAMA2; (-) strand; PAM type: YTN; PAM sequence: TTG
tctaaggtgaaacaagtgat

SEQ ID NO: 204854 - DNA, 20 bp, Artificial Sequence
  Description of Artificial Sequence: Synthetic oligonucleotide
  Target: LAMA2; (-) strand; PAM type: YTN; PAM sequence: CTT
gtctaaggtgaaacaagtga

SEQ ID NO: 204855 - DNA, 20 bp, Artificial Sequence
  Description of Artificial Sequence: Synthetic oligonucleotide
  Target: LAMA2; (-) strand; PAM type: YTN; PAM sequence: CTG
acttgtctaaggtgaaacaa

SEQ ID NO: 204856 - DNA, 20 bp, Artificial Sequence
  Description of Artificial Sequence: Synthetic oligonucleotide
  Target: LAMA2; (-) strand; PAM type: YTN; PAM sequence: TTG
gctgacttgtctaaggtgaa

SEQ ID NO: 204857 - DNA, 20 bp, Artificial Sequence
  Description of Artificial Sequence: Synthetic oligonucleotide
  Target: LAMA2; (-) strand; PAM type: YTN; PAM sequence: CTG
tggagcagatgaaaaaagtt

SEQ ID NO: 204858 - DNA, 20 bp, Artificial Sequence
  Description of Artificial Sequence: Synthetic oligonucleotide
  Target: LAMA2; (-) strand; PAM type: YTN; PAM sequence: TTA
ccacagatctgtggagcaga

SEQ ID NO: 204859 - DNA, 20 bp, Artificial Sequence
  Description of Artificial Sequence: Synthetic oligonucleotide
  Target: LAMA2; (-) strand; PAM type: YTN; PAM sequence: CTT
accacagatctgtggagcag

SEQ ID NO: 204860 - DNA, 20 bp, Artificial Sequence
  Description of Artificial Sequence: Synthetic oligonucleotide
  Target: LAMA2; (-) strand; PAM type: YTN; PAM sequence: TTA
atccttaccacagatctgtg

SEQ ID NO: 204861 - DNA, 20 bp, Artificial Sequence
  Description of Artificial Sequence: Synthetic oligonucleotide
  Target: LAMA2; (-) strand; PAM type: YTN; PAM sequence: TTT
aatccttaccacagatctgt

SEQ ID NO: 204862 - DNA, 20 bp, Artificial Sequence
  Description of Artificial Sequence: Synthetic oligonucleotide
  Target: LAMA2; (-) strand; PAM type: YTN; PAM sequence: CTC
atttaatccttaccacagat

SEQ ID NO: 204863 - DNA, 20 bp, Artificial Sequence
  Description of Artificial Sequence: Synthetic oligonucleotide
  Target: LAMA2; (-) strand; PAM type: YTN; PAM sequence: TTC
atggatgtcatctcatttaa

SEQ ID NO: 204864 - DNA, 20 bp, Artificial Sequence
  Description of Artificial Sequence: Synthetic oligonucleotide
  Target: LAMA2; (-) strand; PAM type: YTN; PAM sequence: TTT
catggatgtcatctcattta

SEQ ID NO: 204865 - DNA, 20 bp, Artificial Sequence
  Description of Artificial Sequence: Synthetic oligonucleotide
  Target: LAMA2; (-) strand; PAM type: YTN; PAM sequence: CTG
tcatatgtttcatggatgtc

SEQ ID NO: 204866 - DNA, 20 bp, Artificial Sequence
  Description of Artificial Sequence: Synthetic oligonucleotide
  Target: LAMA2; (-) strand; PAM type: YTN; PAM sequence: TTC
tgtcatatgtttcatggatg

SEQ ID NO: 204867 - DNA, 20 bp, Artificial Sequence
  Description of Artificial Sequence: Synthetic oligonucleotide
  Target: LAMA2; (-) strand; PAM type: YTN; PAM sequence: CTA
tggcaaggtattctgtcata

SEQ ID NO: 204868 - DNA, 20 bp, Artificial Sequence
  Description of Artificial Sequence: Synthetic oligonucleotide
  Target: LAMA2; (-) strand; PAM type: YTN; PAM sequence: CTG
agtagccactatggcaaggt

SEQ ID NO: 204869 - DNA, 20 bp, Artificial Sequence
  Description of Artificial Sequence: Synthetic oligonucleotide
  Target: LAMA2; (-) strand; PAM type: YTN; PAM sequence: TTA
catgctgagtagccactatg

SEQ ID NO: 204870 - DNA, 20 bp, Artificial Sequence
  Description of Artificial Sequence: Synthetic oligonucleotide
  Target: LAMA2; (-) strand; PAM type: YTN; PAM sequence: CTT
acatgctgagtagccactat

SEQ ID NO: 204871 - DNA, 20 bp, Artificial Sequence
  Description of Artificial Sequence: Synthetic oligonucleotide
  Target: LAMA2; (-) strand; PAM type: YTN; PAM sequence: CTC
aaagaaacaaacaaaaaact

SEQ ID NO: 204872 - DNA, 20 bp, Artificial Sequence
  Description of Artificial Sequence: Synthetic oligonucleotide
  Target: LAMA2; (-) strand; PAM type: YTN; PAM sequence: CTG
tctcaaagaaacaaacaaaa

SEQ ID NO: 204873 - DNA, 20 bp, Artificial Sequence
  Description of Artificial Sequence: Synthetic oligonucleotide
  Target: LAMA2; (-) strand; PAM type: YTN; PAM sequence: CTC
tgtctcaaagaaacaaacaa

SEQ ID NO: 204874 - DNA, 20 bp, Artificial Sequence
  Description of Artificial Sequence: Synthetic oligonucleotide
  Target: LAMA2; (-) strand; PAM type: YTN; PAM sequence: CTG
gtgacagagggagactctgt

SEQ ID NO: 204875 - DNA, 20 bp, Artificial Sequence
  Description of Artificial Sequence: Synthetic oligonucleotide
  Target: LAMA2; (-) strand; PAM type: YTN; PAM sequence: CTC
cagcctggtgacagagggag

SEQ ID NO: 204876 - DNA, 20 bp, Artificial Sequence
  Description of Artificial Sequence: Synthetic oligonucleotide
  Target: LAMA2; (-) strand; PAM type: YTN; PAM sequence: CTG
cactccagcctggtgacaga

SEQ ID NO: 204877 - DNA, 20 bp, Artificial Sequence
  Description of Artificial Sequence: Synthetic oligonucleotide
  Target: LAMA2; (-) strand; PAM type: YTN; PAM sequence: CTC
gccactgcactccagcctgg

SEQ ID NO: 204878 - DNA, 20 bp, Artificial Sequence
  Description of Artificial Sequence: Synthetic oligonucleotide
  Target: LAMA2; (-) strand; PAM type: YTN; PAM sequence: TTG
cagtgagcagagatctcgcc

SEQ ID NO: 204879 - DNA, 20 bp, Artificial Sequence
  Description of Artificial Sequence: Synthetic oligonucleotide
  Target: LAMA2; (-) strand; PAM type: YTN; PAM sequence: TTG
aatccagcaggcagaggttg

SEQ ID NO: 204880 - DNA, 20 bp, Artificial Sequence
  Description of Artificial Sequence: Synthetic oligonucleotide
  Target: LAMA2; (-) strand; PAM type: YTN; PAM sequence: CTT
gaatccagcaggcagaggtt

SEQ ID NO: 204881 - DNA, 20 bp, Artificial Sequence
  Description of Artificial Sequence: Synthetic oligonucleotide
  Target: LAMA2; (-) strand; PAM type: YTN; PAM sequence: TTG
ggaggagaatcacttgaatc

SEQ ID NO: 204882 - DNA, 20 bp, Artificial Sequence
  Description of Artificial Sequence: Synthetic oligonucleotide
  Target: LAMA2; (-) strand; PAM type: YTN; PAM sequence: TTT
gggaggagaatcacttgaat

SEQ ID NO: 204883 - DNA, 20 bp, Artificial Sequence
  Description of Artificial Sequence: Synthetic oligonucleotide
  Target: LAMA2; (-) strand; PAM type: YTN; PAM sequence: CTA
tttgggaggagaatcacttg

SEQ ID NO: 204884 - DNA, 20 bp, Artificial Sequence
  Description of Artificial Sequence: Synthetic oligonucleotide
  Target: LAMA2; (-) strand; PAM type: YTN; PAM sequence: CTG
taatcccagctatttgggag

SEQ ID NO: 204885 - DNA, 20 bp, Artificial Sequence
  Description of Artificial Sequence: Synthetic oligonucleotide
  Target: LAMA2; (-) strand; PAM type: YTN; PAM sequence: CTG
gtgccggatgcctgtaatcc

SEQ ID NO: 204886 - DNA, 20 bp, Artificial Sequence
  Description of Artificial Sequence: Synthetic oligonucleotide
  Target: LAMA2; (-) strand; PAM type: YTN; PAM sequence: CTG
ggcctggtgccggatgcctg

SEQ ID NO: 204887 - DNA, 20 bp, Artificial Sequence
  Description of Artificial Sequence: Synthetic oligonucleotide
  Target: LAMA2; (-) strand; PAM type: YTN; PAM sequence: TTA
gctgggcctggtgccggatg

SEQ ID NO: 204888 - DNA, 20 bp, Artificial Sequence
  Description of Artificial Sequence: Synthetic oligonucleotide
  Target: LAMA2; (-) strand; PAM type: YTN; PAM sequence: CTA
aaaatacaaaaaattagctg

SEQ ID NO: 204889 - DNA, 20 bp, Artificial Sequence
  Description of Artificial Sequence: Synthetic oligonucleotide
  Target: LAMA2; (-) strand; PAM type: YTN; PAM sequence: CTA
ctaaaaatacaaaaaattag

SEQ ID NO: 204890 - DNA, 20 bp, Artificial Sequence
  Description of Artificial Sequence: Synthetic oligonucleotide
  Target: LAMA2; (-) strand; PAM type: YTN; PAM sequence: CTC
tactaaaaatacaaaaaatt

SEQ ID NO: 204891 - DNA, 20 bp, Artificial Sequence
  Description of Artificial Sequence: Synthetic oligonucleotide
  Target: LAMA2; (-) strand; PAM type: YTN; PAM sequence: CTG
gccaacatggtgaaaccccg

SEQ ID NO: 204892 - DNA, 20 bp, Artificial Sequence
  Description of Artificial Sequence: Synthetic oligonucleotide
  Target: LAMA2; (-) strand; PAM type: YTN; PAM sequence: TTC
gagaccagcctggccaacat

SEQ ID NO: 204893 - DNA, 20 bp, Artificial Sequence
  Description of Artificial Sequence: Synthetic oligonucleotide
  Target: LAMA2; (-) strand; PAM type: YTN; PAM sequence: TTA
cccgaggtcaggagttcgag

SEQ ID NO: 204894 - DNA, 20 bp, Artificial Sequence
  Description of Artificial Sequence: Synthetic oligonucleotide
  Target: LAMA2; (-) strand; PAM type: YTN; PAM sequence: TTG
ggaggccaagacgagcagat

SEQ ID NO: 204895 - DNA, 20 bp, Artificial Sequence
  Description of Artificial Sequence: Synthetic oligonucleotide
  Target: LAMA2; (-) strand; PAM type: YTN; PAM sequence: TTT
gggaggccaagacgagcaga

SEQ ID NO: 204896 - DNA, 20 bp, Artificial Sequence
  Description of Artificial Sequence: Synthetic oligonucleotide
  Target: LAMA2; (-) strand; PAM type: YTN; PAM sequence: CTT
tgggaggccaagacgagcag

SEQ ID NO: 204897 - DNA, 20 bp, Artificial Sequence
  Description of Artificial Sequence: Synthetic oligonucleotide
  Target: LAMA2; (-) strand; PAM type: YTN; PAM sequence: CTA
taatcccagcactttgggag

SEQ ID NO: 204898 - DNA, 20 bp, Artificial Sequence
  Description of Artificial Sequence: Synthetic oligonucleotide
  Target: LAMA2; (-) strand; PAM type: YTN; PAM sequence: TTC
atgcctataatcccagcact

SEQ ID NO: 204899 - DNA, 20 bp, Artificial Sequence
  Description of Artificial Sequence: Synthetic oligonucleotide
  Target: LAMA2; (-) strand; PAM type: YTN; PAM sequence: CTA
ggccgggcacagtggttcat

SEQ ID NO: 204900 - DNA, 20 bp, Artificial Sequence
  Description of Artificial Sequence: Synthetic oligonucleotide
  Target: LAMA2; (-) strand; PAM type: YTN; PAM sequence: CTA
catgctaggccgggcacagt

SEQ ID NO: 204901 - DNA, 20 bp, Artificial Sequence
  Description of Artificial Sequence: Synthetic oligonucleotide
  Target: LAMA2; (-) strand; PAM type: YTN; PAM sequence: TTA
aaaactacatgctaggccgg

SEQ ID NO: 204902 - DNA, 20 bp, Artificial Sequence
  Description of Artificial Sequence: Synthetic oligonucleotide
  Target: LAMA2; (-) strand; PAM type: YTN; PAM sequence: TTT
aaaaactacatgctaggccg

SEQ ID NO: 204903 - DNA, 20 bp, Artificial Sequence
  Description of Artificial Sequence: Synthetic oligonucleotide
  Target: LAMA2; (-) strand; PAM type: YTN; PAM sequence: TTT
taaaaactacatgctaggcc

SEQ ID NO: 204904 - DNA, 20 bp, Artificial Sequence
  Description of Artificial Sequence: Synthetic oligonucleotide
  Target: LAMA2; (-) strand; PAM type: YTN; PAM sequence: CTT
ttaaaaactacatgctaggc

SEQ ID NO: 204905 - DNA, 20 bp, Artificial Sequence
  Description of Artificial Sequence: Synthetic oligonucleotide
  Target: LAMA2; (-) strand; PAM type: YTN; PAM sequence: TTG
ccttttaaaaactacatgct

SEQ ID NO: 204906 - DNA, 20 bp, Artificial Sequence
  Description of Artificial Sequence: Synthetic oligonucleotide
  Target: LAMA2; (-) strand; PAM type: YTN; PAM sequence: TTT
gccttttaaaaactacatgc

SEQ ID NO: 204907 - DNA, 20 bp, Artificial Sequence
  Description of Artificial Sequence: Synthetic oligonucleotide
  Target: LAMA2; (-) strand; PAM type: YTN; PAM sequence: CTT
tgccttttaaaaactacatg

SEQ ID NO: 204908 - DNA, 20 bp, Artificial Sequence
  Description of Artificial Sequence: Synthetic oligonucleotide
  Target: LAMA2; (-) strand; PAM type: YTN; PAM sequence: TTG
ctttgccttttaaaaactac

SEQ ID NO: 204909 - DNA, 20 bp, Artificial Sequence
  Description of Artificial Sequence: Synthetic oligonucleotide
  Target: LAMA2; (-) strand; PAM type: YTN; PAM sequence: TTC
aattgctttgccttttaaaa

SEQ ID NO: 204910 - DNA, 20 bp, Artificial Sequence
  Description of Artificial Sequence: Synthetic oligonucleotide
  Target: LAMA2; (-) strand; PAM type: YTN; PAM sequence: TTT
caattgctttgccttttaaa

SEQ ID NO: 204911 - DNA, 20 bp, Artificial Sequence
  Description of Artificial Sequence: Synthetic oligonucleotide
  Target: LAMA2; (-) strand; PAM type: YTN; PAM sequence: TTA
caaatttcaattgctttgcc

SEQ ID NO: 204912 - DNA, 20 bp, Artificial Sequence
  Description of Artificial Sequence: Synthetic oligonucleotide
  Target: LAMA2; (-) strand; PAM type: YTN; PAM sequence: TTT
acaaatttcaattgctttgc

SEQ ID NO: 204913 - DNA, 20 bp, Artificial Sequence
  Description of Artificial Sequence: Synthetic oligonucleotide
  Target: LAMA2; (-) strand; PAM type: YTN; PAM sequence: CTT
tacaaatttcaattgctttg

SEQ ID NO: 204914 - DNA, 20 bp, Artificial Sequence
  Description of Artificial Sequence: Synthetic oligonucleotide
  Target: LAMA2; (-) strand; PAM type: YTN; PAM sequence: TTG
tagatatccaaatgctttac

SEQ ID NO: 204915 - DNA, 20 bp, Artificial Sequence
  Description of Artificial Sequence: Synthetic oligonucleotide
  Target: LAMA2; (-) strand; PAM type: YTN; PAM sequence: TTT
gtagatatccaaatgcttta

SEQ ID NO: 204916 - DNA, 20 bp, Artificial Sequence
  Description of Artificial Sequence: Synthetic oligonucleotide
  Target: LAMA2; (-) strand; PAM type: YTN; PAM sequence: TTT
tgtagatatccaaatgcttt

SEQ ID NO: 204917 - DNA, 20 bp, Artificial Sequence
  Description of Artificial Sequence: Synthetic oligonucleotide
  Target: LAMA2; (-) strand; PAM type: YTN; PAM sequence: CTT
ttgtagatatccaaatgctt

SEQ ID NO: 204918 - DNA, 20 bp, Artificial Sequence
  Description of Artificial Sequence: Synthetic oligonucleotide
  Target: LAMA2; (-) strand; PAM type: YTN; PAM sequence: CTC
gtcaaataacttttgtagat

SEQ ID NO: 204919 - DNA, 20 bp, Artificial Sequence
  Description of Artificial Sequence: Synthetic oligonucleotide
  Target: LAMA2; (-) strand; PAM type: YTN; PAM sequence: TTC
tcgtcaaataacttttgtag

SEQ ID NO: 204920 - DNA, 20 bp, Artificial Sequence
  Description of Artificial Sequence: Synthetic oligonucleotide
  Target: LAMA2; (-) strand; PAM type: YTN; PAM sequence: TTG
tatgttctcgtcaaataact

SEQ ID NO: 204921 - DNA, 20 bp, Artificial Sequence
  Description of Artificial Sequence: Synthetic oligonucleotide
  Target: LAMA2; (-) strand; PAM type: YTN; PAM sequence: CTT
gtatgttctcgtcaaataac

SEQ ID NO: 204922 - DNA, 20 bp, Artificial Sequence
  Description of Artificial Sequence: Synthetic oligonucleotide
  Target: LAMA2; (-) strand; PAM type: YTN; PAM sequence: TTA
ccagtccataagagatgtcc

SEQ ID NO: 204923 - DNA, 20 bp, Artificial Sequence
  Description of Artificial Sequence: Synthetic oligonucleotide
  Target: LAMA2; (-) strand; PAM type: YTN; PAM sequence: CTA
aaattaccagtccataagag

SEQ ID NO: 204924 - DNA, 20 bp, Artificial Sequence
  Description of Artificial Sequence: Synthetic oligonucleotide
  Target: LAMA2; (-) strand; PAM type: YTN; PAM sequence: TTA
acatcaagtagacaatccta

SEQ ID NO: 204925 - DNA, 20 bp, Artificial Sequence
  Description of Artificial Sequence: Synthetic oligonucleotide
  Target: LAMA2; (-) strand; PAM type: YTN; PAM sequence: TTA
gttaacatcaagtagacaat

SEQ ID NO: 204926 - DNA, 20 bp, Artificial Sequence
  Description of Artificial Sequence: Synthetic oligonucleotide
  Target: LAMA2; (-) strand; PAM type: YTN; PAM sequence: TTT
agttaacatcaagtagacaa

SEQ ID NO: 204927 - DNA, 20 bp, Artificial Sequence
  Description of Artificial Sequence: Synthetic oligonucleotide
  Target: LAMA2; (-) strand; PAM type: YTN; PAM sequence: TTA
ggaaggatatttagttaaca

SEQ ID NO: 204928 - DNA, 20 bp, Artificial Sequence
  Description of Artificial Sequence: Synthetic oligonucleotide
  Target: LAMA2; (-) strand; PAM type: YTN; PAM sequence: TTG
gcattaggaaggatatttag

SEQ ID NO: 204929 - DNA, 20 bp, Artificial Sequence
  Description of Artificial Sequence: Synthetic oligonucleotide
  Target: LAMA2; (-) strand; PAM type: YTN; PAM sequence: TTT
ggcattaggaaggatattta

SEQ ID NO: 204930 - DNA, 20 bp, Artificial Sequence
  Description of Artificial Sequence: Synthetic oligonucleotide
  Target: LAMA2; (-) strand; PAM type: YTN; PAM sequence: TTG
gtttggcattaggaaggata

SEQ ID NO: 204931 - DNA, 20 bp, Artificial Sequence
  Description of Artificial Sequence: Synthetic oligonucleotide
  Target: LAMA2; (-) strand; PAM type: YTN; PAM sequence: TTA
ccccatgtgttggtttggca

SEQ ID NO: 204932 - DNA, 20 bp, Artificial Sequence
  Description of Artificial Sequence: Synthetic oligonucleotide
  Target: LAMA2; (-) strand; PAM type: YTN; PAM sequence: CTT
accccatgtgttggtttggc

SEQ ID NO: 204933 - DNA, 20 bp, Artificial Sequence
  Description of Artificial Sequence: Synthetic oligonucleotide
  Target: LAMA2; (-) strand; PAM type: YTN; PAM sequence: TTC
ttaccccatgtgttggtttg

SEQ ID NO: 204934 - DNA, 20 bp, Artificial Sequence
  Description of Artificial Sequence: Synthetic oligonucleotide
  Target: LAMA2; (-) strand; PAM type: YTN; PAM sequence: TTA
ttcttaccccatgtgttggt

SEQ ID NO: 204935 - DNA, 20 bp, Artificial Sequence
  Description of Artificial Sequence: Synthetic oligonucleotide
  Target: LAMA2; (-) strand; PAM type: YTN; PAM sequence: CTT
attcttaccccatgtgttgg

SEQ ID NO: 204936 - DNA, 20 bp, Artificial Sequence
  Description of Artificial Sequence: Synthetic oligonucleotide
  Target: LAMA2; (-) strand; PAM type: YTN; PAM sequence: TTA
gtccagcatcacttattctt

SEQ ID NO: 204937 - DNA, 20 bp, Artificial Sequence
  Description of Artificial Sequence: Synthetic oligonucleotide
  Target: LAMA2; (-) strand; PAM type: YTN; PAM sequence: TTT
agtccagcatcacttattct

SEQ ID NO: 204938 - DNA, 20 bp, Artificial Sequence
  Description of Artificial Sequence: Synthetic oligonucleotide
  Target: LAMA2; (-) strand; PAM type: YTN; PAM sequence: TTT
tagtccagcatcacttattc

SEQ ID NO: 204939 - DNA, 20 bp, Artificial Sequence
  Description of Artificial Sequence: Synthetic oligonucleotide
  Target: LAMA2; (-) strand; PAM type: YTN; PAM sequence: TTT
ttagtccagcatcacttatt

SEQ ID NO: 204940 - DNA, 20 bp, Artificial Sequence
  Description of Artificial Sequence: Synthetic oligonucleotide
  Target: LAMA2; (-) strand; PAM type: YTN; PAM sequence: TTT
tttagtccagcatcacttat

SEQ ID NO: 204941 - DNA, 20 bp, Artificial Sequence
  Description of Artificial Sequence: Synthetic oligonucleotide
  Target: LAMA2; (-) strand; PAM type: YTN; PAM sequence: TTT
ttttagtccagcatcactta

SEQ ID NO: 204942 - DNA, 20 bp, Artificial Sequence
  Description of Artificial Sequence: Synthetic oligonucleotide
  Target: LAMA2; (-) strand; PAM type: YTN; PAM sequence: TTT
tttttagtccagcatcactt

SEQ ID NO: 204943 - DNA, 20 bp, Artificial Sequence
  Description of Artificial Sequence: Synthetic oligonucleotide
  Target: LAMA2; (-) strand; PAM type: YTN; PAM sequence: TTT
ttttttagtccagcatcact

SEQ ID NO: 204944 - DNA, 20 bp, Artificial Sequence
  Description of Artificial Sequence: Synthetic oligonucleotide
  Target: LAMA2; (-) strand; PAM type: YTN; PAM sequence: TTT
tttttttagtccagcatcac

SEQ ID NO: 204945 - DNA, 20 bp, Artificial Sequence
  Description of Artificial Sequence: Synthetic oligonucleotide
  Target: LAMA2; (-) strand; PAM type: YTN; PAM sequence: TTG
atagagaaatcaaatttttt

SEQ ID NO: 204946 - DNA, 20 bp, Artificial Sequence
  Description of Artificial Sequence: Synthetic oligonucleotide
  Target: LAMA2; (-) strand; PAM type: YTN; PAM sequence: TTT
gatagagaaatcaaattttt

SEQ ID NO: 204947 - DNA, 20 bp, Artificial Sequence
  Description of Artificial Sequence: Synthetic oligonucleotide
  Target: LAMA2; (-) strand; PAM type: YTN; PAM sequence: CTA
aaagtacatttgatagagaa

SEQ ID NO: 204948 - DNA, 20 bp, Artificial Sequence
  Description of Artificial Sequence: Synthetic oligonucleotide
  Target: LAMA2; (-) strand; PAM type: YTN; PAM sequence: TTA
cctaaaagtacatttgatag

SEQ ID NO: 204949 - DNA, 20 bp, Artificial Sequence
  Description of Artificial Sequence: Synthetic oligonucleotide
  Target: LAMA2; (-) strand; PAM type: YTN; PAM sequence: TTT
acctaaaagtacatttgata

SEQ ID NO: 204950 - DNA, 20 bp, Artificial Sequence
  Description of Artificial Sequence: Synthetic oligonucleotide
  Target: LAMA2; (-) strand; PAM type: YTN; PAM sequence: TTT
tacctaaaagtacatttgat

SEQ ID NO: 204951 - DNA, 20 bp, Artificial Sequence
  Description of Artificial Sequence: Synthetic oligonucleotide
  Target: LAMA2; (-) strand; PAM type: YTN; PAM sequence: TTT
ttacctaaaagtacatttga

SEQ ID NO: 204952 - DNA, 20 bp, Artificial Sequence
  Description of Artificial Sequence: Synthetic oligonucleotide
  Target: LAMA2; (-) strand; PAM type: YTN; PAM sequence: TTT
tttacctaaaagtacatttg

SEQ ID NO: 204953 - DNA, 20 bp, Artificial Sequence
  Description of Artificial Sequence: Synthetic oligonucleotide
  Target: LAMA2; (-) strand; PAM type: YTN; PAM sequence: TTT
ttttacctaaaagtacattt

SEQ ID NO: 204954 - DNA, 20 bp, Artificial Sequence
  Description of Artificial Sequence: Synthetic oligonucleotide
  Target: LAMA2; (-) strand; PAM type: YTN; PAM sequence: TTT
tttttacctaaaagtacatt

SEQ ID NO: 204955 - DNA, 20 bp, Artificial Sequence
  Description of Artificial Sequence: Synthetic oligonucleotide
  Target: LAMA2; (-) strand; PAM type: YTN; PAM sequence: TTT
ttttttacctaaaagtacat

SEQ ID NO: 204956 - DNA, 20 bp, Artificial Sequence
  Description of Artificial Sequence: Synthetic oligonucleotide
  Target: LAMA2; (-) strand; PAM type: YTN; PAM sequence: TTG
catatttttttttacctaaa

SEQ ID NO: 204957 - DNA, 20 bp, Artificial Sequence
  Description of Artificial Sequence: Synthetic oligonucleotide
  Target: LAMA2; (-) strand; PAM type: YTN; PAM sequence: TTT
gcatatttttttttacctaa

SEQ ID NO: 204958 - DNA, 20 bp, Artificial Sequence
  Description of Artificial Sequence: Synthetic oligonucleotide
  Target: LAMA2; (-) strand; PAM type: YTN; PAM sequence: CTT
tgcatatttttttttaccta

SEQ ID NO: 204959 - DNA, 20 bp, Artificial Sequence
  Description of Artificial Sequence: Synthetic oligonucleotide
  Target: LAMA2; (-) strand; PAM type: YTN; PAM sequence: TTA
tactttgcatattttttttt

SEQ ID NO: 204960 - DNA, 20 bp, Artificial Sequence
  Description of Artificial Sequence: Synthetic oligonucleotide
  Target: LAMA2; (-) strand; PAM type: YTN; PAM sequence: TTT
atactttgcatatttttttt

SEQ ID NO: 204961 - DNA, 20 bp, Artificial Sequence
  Description of Artificial Sequence: Synthetic oligonucleotide
  Target: LAMA2; (-) strand; PAM type: YTN; PAM sequence: TTT
tatactttgcatattttttt

SEQ ID NO: 204962 - DNA, 20 bp, Artificial Sequence
  Description of Artificial Sequence: Synthetic oligonucleotide
  Target: LAMA2; (-) strand; PAM type: YTN; PAM sequence: TTG
cccatacaaatattttatac

SEQ ID NO: 204963 - DNA, 20 bp, Artificial Sequence
  Description of Artificial Sequence: Synthetic oligonucleotide
  Target: LAMA2; (-) strand; PAM type: YTN; PAM sequence: TTT
gcccatacaaatattttata

SEQ ID NO: 204964 - DNA, 20 bp, Artificial Sequence
  Description of Artificial Sequence: Synthetic oligonucleotide
  Target: LAMA2; (-) strand; PAM type: YTN; PAM sequence: TTA
gtaaaacatttgcccataca

SEQ ID NO: 204965 - DNA, 20 bp, Artificial Sequence
  Description of Artificial Sequence: Synthetic oligonucleotide
  Target: LAMA2; (-) strand; PAM type: YTN; PAM sequence: CTT
agtaaaacatttgcccatac

SEQ ID NO: 204966 - DNA, 20 bp, Artificial Sequence
  Description of Artificial Sequence: Synthetic oligonucleotide
  Target: LAMA2; (-) strand; PAM type: YTN; PAM sequence: TTC
aatagaaaataacccaaaca

SEQ ID NO: 204967 - DNA, 20 bp, Artificial Sequence
  Description of Artificial Sequence: Synthetic oligonucleotide
  Target: LAMA2; (-) strand; PAM type: YTN; PAM sequence: TTG
ttcaatagaaaataacccaa

SEQ ID NO: 204968 - DNA, 20 bp, Artificial Sequence
  Description of Artificial Sequence: Synthetic oligonucleotide
  Target: LAMA2; (-) strand; PAM type: YTN; PAM sequence: TTT
gttcaatagaaaataaccca

SEQ ID NO: 204969 - DNA, 20 bp, Artificial Sequence
  Description of Artificial Sequence: Synthetic oligonucleotide
  Target: LAMA2; (-) strand; PAM type: YTN; PAM sequence: TTT
tgttcaatagaaaataaccc

SEQ ID NO: 204970 - DNA, 20 bp, Artificial Sequence
  Description of Artificial Sequence: Synthetic oligonucleotide
  Target: LAMA2; (-) strand; PAM type: YTN; PAM sequence: TTA
gcaggttttgttcaatagaa

SEQ ID NO: 204971 - DNA, 20 bp, Artificial Sequence
  Description of Artificial Sequence: Synthetic oligonucleotide
  Target: LAMA2; (-) strand; PAM type: YTN; PAM sequence: TTT
agcaggttttgttcaataga

SEQ ID NO: 204972 - DNA, 20 bp, Artificial Sequence
  Description of Artificial Sequence: Synthetic oligonucleotide
  Target: LAMA2; (-) strand; PAM type: YTN; PAM sequence: CTG
gtttagcaggttttgttcaa

SEQ ID NO: 204973 - DNA, 20 bp, Artificial Sequence
  Description of Artificial Sequence: Synthetic oligonucleotide
  Target: LAMA2; (-) strand; PAM type: YTN; PAM sequence: TTA
tgctggtttagcaggttttg

SEQ ID NO: 204974 - DNA, 20 bp, Artificial Sequence
  Description of Artificial Sequence: Synthetic oligonucleotide
  Target: LAMA2; (-) strand; PAM type: YTN; PAM sequence: CTT
atgctggtttagcaggtttt

SEQ ID NO: 204975 - DNA, 20 bp, Artificial Sequence
  Description of Artificial Sequence: Synthetic oligonucleotide
  Target: LAMA2; (-) strand; PAM type: YTN; PAM sequence: TTC
agtgcatcttatgctggttt

SEQ ID NO: 204976 - DNA, 20 bp, Artificial Sequence
  Description of Artificial Sequence: Synthetic oligonucleotide
  Target: LAMA2; (-) strand; PAM type: YTN; PAM sequence: TTA
gttcagtgcatcttatgctg

SEQ ID NO: 204977 - DNA, 20 bp, Artificial Sequence
  Description of Artificial Sequence: Synthetic oligonucleotide
  Target: LAMA2; (-) strand; PAM type: YTN; PAM sequence: TTT
agttcagtgcatcttatgct

SEQ ID NO: 204978 - DNA, 20 bp, Artificial Sequence
  Description of Artificial Sequence: Synthetic oligonucleotide
  Target: LAMA2; (-) strand; PAM type: YTN; PAM sequence: CTT
tagttcagtgcatcttatgc

SEQ ID NO: 204979 - DNA, 20 bp, Artificial Sequence
  Description of Artificial Sequence: Synthetic oligonucleotide
  Target: LAMA2; (-) strand; PAM type: YTN; PAM sequence: CTG
cactttagttcagtgcatct

SEQ ID NO: 204980 - DNA, 20 bp, Artificial Sequence
  Description of Artificial Sequence: Synthetic oligonucleotide
  Target: LAMA2; (-) strand; PAM type: YTN; PAM sequence: CTG
ctgcactttagttcagtgca

SEQ ID NO: 204981 - DNA, 20 bp, Artificial Sequence
  Description of Artificial Sequence: Synthetic oligonucleotide
  Target: LAMA2; (-) strand; PAM type: YTN; PAM sequence: CTC
tgctgcactttagttcagtg

SEQ ID NO: 204982 - DNA, 20 bp, Artificial Sequence
  Description of Artificial Sequence: Synthetic oligonucleotide
  Target: LAMA2; (-) strand; PAM type: YTN; PAM sequence: CTG
acagtagcatctctgctgca

SEQ ID NO: 204983 - DNA, 20 bp, Artificial Sequence
  Description of Artificial Sequence: Synthetic oligonucleotide
  Target: LAMA2; (-) strand; PAM type: YTN; PAM sequence: TTG
ctgacagtagcatctctgct

SEQ ID NO: 204984 - DNA, 20 bp, Artificial Sequence
  Description of Artificial Sequence: Synthetic oligonucleotide
  Target: LAMA2; (-) strand; PAM type: YTN; PAM sequence: CTT
gctgacagtagcatctctgc

SEQ ID NO: 204985 - DNA, 20 bp, Artificial Sequence
  Description of Artificial Sequence: Synthetic oligonucleotide
  Target: LAMA2; (-) strand; PAM type: YTN; PAM sequence: CTC
ttgctgacagtagcatctct

SEQ ID NO: 204986 - DNA, 20 bp, Artificial Sequence
  Description of Artificial Sequence: Synthetic oligonucleotide
  Target: LAMA2; (-) strand; PAM type: YTN; PAM sequence: TTC
tcttgctgacagtagcatct

SEQ ID NO: 204987 - DNA, 20 bp, Artificial Sequence
  Description of Artificial Sequence: Synthetic oligonucleotide
  Target: LAMA2; (-) strand; PAM type: YTN; PAM sequence: CTT
ctcttgctgacagtagcatc

SEQ ID NO: 204988 - DNA, 20 bp, Artificial Sequence
  Description of Artificial Sequence: Synthetic oligonucleotide
  Target: LAMA2; (-) strand; PAM type: YTN; PAM sequence: TTG
aatccttctcttgctgacag

SEQ ID NO: 204989 - DNA, 20 bp, Artificial Sequence
  Description of Artificial Sequence: Synthetic oligonucleotide
  Target: LAMA2; (-) strand; PAM type: YTN; PAM sequence: TTT
gaatccttctcttgctgaca

SEQ ID NO: 204990 - DNA, 20 bp, Artificial Sequence
  Description of Artificial Sequence: Synthetic oligonucleotide
  Target: LAMA2; (-) strand; PAM type: YTN; PAM sequence: CTT
tgaatccttctcttgctgac

SEQ ID NO: 204991 - DNA, 20 bp, Artificial Sequence
  Description of Artificial Sequence: Synthetic oligonucleotide
  Target: LAMA2; (-) strand; PAM type: YTN; PAM sequence: CTC
tttgaatccttctcttgctg

SEQ ID NO: 204992 - DNA, 20 bp, Artificial Sequence
  Description of Artificial Sequence: Synthetic oligonucleotide
  Target: LAMA2; (-) strand; PAM type: YTN; PAM sequence: CTC
tctttgaatccttctcttgc

SEQ ID NO: 204993 - DNA, 20 bp, Artificial Sequence
  Description of Artificial Sequence: Synthetic oligonucleotide
  Target: LAMA2; (-) strand; PAM type: YTN; PAM sequence: TTC
ctctctttgaatccttctct

SEQ ID NO: 204994 - DNA, 20 bp, Artificial Sequence
  Description of Artificial Sequence: Synthetic oligonucleotide
  Target: LAMA2; (-) strand; PAM type: YTN; PAM sequence: CTT
cctctctttgaatccttctc

SEQ ID NO: 204995 - DNA, 20 bp, Artificial Sequence
  Description of Artificial Sequence: Synthetic oligonucleotide
  Target: LAMA2; (-) strand; PAM type: YTN; PAM sequence: TTG
ggcttcctctctttgaatcc

SEQ ID NO: 204996 - DNA, 20 bp, Artificial Sequence
  Description of Artificial Sequence: Synthetic oligonucleotide
  Target: LAMA2; (-) strand; PAM type: YTN; PAM sequence: CTC
ggattgggcttcctctcttt

SEQ ID NO: 204997 - DNA, 20 bp, Artificial Sequence
  Description of Artificial Sequence: Synthetic oligonucleotide
  Target: LAMA2; (-) strand; PAM type: YTN; PAM sequence: TTG
tccaggtaatgctcggattg

SEQ ID NO: 204998 - DNA, 20 bp, Artificial Sequence
  Description of Artificial Sequence: Synthetic oligonucleotide
  Target: LAMA2; (-) strand; PAM type: YTN; PAM sequence: TTA
attgtccaggtaatgctcgg

SEQ ID NO: 204999 - DNA, 20 bp, Artificial Sequence
  Description of Artificial Sequence: Synthetic oligonucleotide
  Target: LAMA2; (-) strand; PAM type: YTN; PAM sequence: TTT
aattgtccaggtaatgctcg

SEQ ID NO: 205000 - DNA, 20 bp, Artificial Sequence
  Description of Artificial Sequence: Synthetic oligonucleotide
  Target: LAMA2; (-) strand; PAM type: YTN; PAM sequence: CTG
tttaattgtccaggtaatgc

SEQ ID NO: 205001 - DNA, 20 bp, Artificial Sequence
  Description of Artificial Sequence: Synthetic oligonucleotide
  Target: LAMA2; (-) strand; PAM type: YTN; PAM sequence: CTG
actgtttaattgtccaggta

SEQ ID NO: 205002 - DNA, 20 bp, Artificial Sequence
  Description of Artificial Sequence: Synthetic oligonucleotide
  Target: LAMA2; (-) strand; PAM type: YTN; PAM sequence: TTG
tgaaaatcccaataactgac

SEQ ID NO: 205003 - DNA, 20 bp, Artificial Sequence
  Description of Artificial Sequence: Synthetic oligonucleotide
  Target: LAMA2; (-) strand; PAM type: YTN; PAM sequence: CTA
agaattgtgaaaatcccaat

SEQ ID NO: 205004 - DNA, 20 bp, Artificial Sequence
  Description of Artificial Sequence: Synthetic oligonucleotide
  Target: LAMA2; (-) strand; PAM type: YTN; PAM sequence: TTA
aaaaagctaagaattgtgaa

SEQ ID NO: 205005 - DNA, 20 bp, Artificial Sequence
  Description of Artificial Sequence: Synthetic oligonucleotide
  Target: LAMA2; (-) strand; PAM type: YTN; PAM sequence: TTG
tgaaagttaaaaaagctaag

SEQ ID NO: 205006 - DNA, 20 bp, Artificial Sequence
  Description of Artificial Sequence: Synthetic oligonucleotide
  Target: LAMA2; (-) strand; PAM type: YTN; PAM sequence: CTA
agaattgtgaaagttaaaaa

SEQ ID NO: 205007 - DNA, 20 bp, Artificial Sequence
  Description of Artificial Sequence: Synthetic oligonucleotide
  Target: LAMA2; (-) strand; PAM type: YTN; PAM sequence: TTA
aaaaagctaagaattgtgaa

SEQ ID NO: 205008 - DNA, 20 bp, Artificial Sequence
  Description of Artificial Sequence: Synthetic oligonucleotide
  Target: LAMA2; (-) strand; PAM type: YTN; PAM sequence: CTC
aaagttaaaaaagctaagaa

SEQ ID NO: 205009 - DNA, 20 bp, Artificial Sequence
  Description of Artificial Sequence: Synthetic oligonucleotide
  Target: LAMA2; (-) strand; PAM type: YTN; PAM sequence: TTA
aaactcaaagttaaaaaagc

SEQ ID NO: 205010 - DNA, 20 bp, Artificial Sequence
  Description of Artificial Sequence: Synthetic oligonucleotide
  Target: LAMA2; (-) strand; PAM type: YTN; PAM sequence: TTT
aaaactcaaagttaaaaaag

SEQ ID NO: 205011 - DNA, 20 bp, Artificial Sequence
  Description of Artificial Sequence: Synthetic oligonucleotide
  Target: LAMA2; (-) strand; PAM type: YTN; PAM sequence: TTT
taaaactcaaagttaaaaaa

SEQ ID NO: 205012 - DNA, 20 bp, Artificial Sequence
  Description of Artificial Sequence: Synthetic oligonucleotide
  Target: LAMA2; (-) strand; PAM type: YTN; PAM sequence: TTT
ttaaaactcaaagttaaaaa

SEQ ID NO: 205013 - DNA, 20 bp, Artificial Sequence
  Description of Artificial Sequence: Synthetic oligonucleotide
  Target: LAMA2; (-) strand; PAM type: YTN; PAM sequence: CTC
catcatgatttttaaaactc

SEQ ID NO: 205014 - DNA, 20 bp, Artificial Sequence
  Description of Artificial Sequence: Synthetic oligonucleotide
  Target: LAMA2; (-) strand; PAM type: YTN; PAM sequence: CTC
tccatcatgatttttaaaac

SEQ ID NO: 205015 - DNA, 20 bp, Artificial Sequence
  Description of Artificial Sequence: Synthetic oligonucleotide
  Target: LAMA2; (-) strand; PAM type: YTN; PAM sequence: TTC
tctccatcatgatttttaaa

SEQ ID NO: 205016 - DNA, 20 bp, Artificial Sequence
  Description of Artificial Sequence: Synthetic oligonucleotide
  Target: LAMA2; (-) strand; PAM type: YTN; PAM sequence: TTT
ctctccatcatgatttttaa

SEQ ID NO: 205017 - DNA, 20 bp, Artificial Sequence
  Description of Artificial Sequence: Synthetic oligonucleotide
  Target: LAMA2; (-) strand; PAM type: YTN; PAM sequence: CTA
aatttctctccatcatgatt

SEQ ID NO: 205018 - DNA, 20 bp, Artificial Sequence
  Description of Artificial Sequence: Synthetic oligonucleotide
  Target: LAMA2; (-) strand; PAM type: YTN; PAM sequence: TTA
agaactaaatttctctccat

SEQ ID NO: 205019 - DNA, 20 bp, Artificial Sequence
  Description of Artificial Sequence: Synthetic oligonucleotide
  Target: LAMA2; (-) strand; PAM type: YTN; PAM sequence: TTC
atcaagcccagaaaataaaa

SEQ ID NO: 205020 - DNA, 20 bp, Artificial Sequence
  Description of Artificial Sequence: Synthetic oligonucleotide
  Target: LAMA2; (-) strand; PAM type: YTN; PAM sequence: CTT
catcaagcccagaaaataaa

SEQ ID NO: 205021 - DNA, 20 bp, Artificial Sequence
  Description of Artificial Sequence: Synthetic oligonucleotide
  Target: LAMA2; (-) strand; PAM type: YTN; PAM sequence: TTC
aatcttcatcaagcccagaa

SEQ ID NO: 205022 - DNA, 20 bp, Artificial Sequence
  Description of Artificial Sequence: Synthetic oligonucleotide
  Target: LAMA2; (-) strand; PAM type: YTN; PAM sequence: CTG
atgaaattcaatcttcatca

SEQ ID NO: 205023 - DNA, 20 bp, Artificial Sequence
  Description of Artificial Sequence: Synthetic oligonucleotide
  Target: LAMA2; (-) strand; PAM type: YTN; PAM sequence: CTC
tgatgaaattcaatcttcat

SEQ ID NO: 205024 - DNA, 20 bp, Artificial Sequence
  Description of Artificial Sequence: Synthetic oligonucleotide
  Target: LAMA2; (-) strand; PAM type: YTN; PAM sequence: CTC
atctctgatgaaattcaatc

SEQ ID NO: 205025 - DNA, 20 bp, Artificial Sequence
  Description of Artificial Sequence: Synthetic oligonucleotide
  Target: LAMA2; (-) strand; PAM type: YTN; PAM sequence: TTA
gctcatctctgatgaaattc

SEQ ID NO: 205026 - DNA, 20 bp, Artificial Sequence
  Description of Artificial Sequence: Synthetic oligonucleotide
  Target: LAMA2; (-) strand; PAM type: YTN; PAM sequence: TTT
agctcatctctgatgaaatt

SEQ ID NO: 205027 - DNA, 20 bp, Artificial Sequence
  Description of Artificial Sequence: Synthetic oligonucleotide
  Target: LAMA2; (-) strand; PAM type: YTN; PAM sequence: TTG
tttagctcatctctgatgaa

SEQ ID NO: 205028 - DNA, 20 bp, Artificial Sequence
  Description of Artificial Sequence: Synthetic oligonucleotide
  Target: LAMA2; (-) strand; PAM type: YTN; PAM sequence: TTT
gtttagctcatctctgatga

SEQ ID NO: 205029 - DNA, 20 bp, Artificial Sequence
  Description of Artificial Sequence: Synthetic oligonucleotide
  Target: LAMA2; (-) strand; PAM type: YTN; PAM sequence: TTA
atttgtttagctcatctctg

SEQ ID NO: 205030 - DNA, 20 bp, Artificial Sequence
  Description of Artificial Sequence: Synthetic oligonucleotide
  Target: LAMA2; (-) strand; PAM type: YTN; PAM sequence: TTT
aatttgtttagctcatctct

SEQ ID NO: 205031 - DNA, 20 bp, Artificial Sequence
  Description of Artificial Sequence: Synthetic oligonucleotide
  Target: LAMA2; (-) strand; PAM type: YTN; PAM sequence: TTT
taatttgtttagctcatctc

SEQ ID NO: 205032 - DNA, 20 bp, Artificial Sequence
  Description of Artificial Sequence: Synthetic oligonucleotide
  Target: LAMA2; (-) strand; PAM type: YTN; PAM sequence: TTC
agttttaatttgtttagctc

SEQ ID NO: 205033 - DNA, 20 bp, Artificial Sequence
  Description of Artificial Sequence: Synthetic oligonucleotide
  Target: LAMA2; (-) strand; PAM type: YTN; PAM sequence: CTT
cagttttaatttgtttagct

SEQ ID NO: 205034 - DNA, 20 bp, Artificial Sequence
  Description of Artificial Sequence: Synthetic oligonucleotide
  Target: LAMA2; (-) strand; PAM type: YTN; PAM sequence: TTA
aatgcttcagttttaatttg

SEQ ID NO: 205035 - DNA, 20 bp, Artificial Sequence
  Description of Artificial Sequence: Synthetic oligonucleotide
  Target: LAMA2; (-) strand; PAM type: YTN; PAM sequence: CTA
aattaaatgcttcagtttta

SEQ ID NO: 205036 - DNA, 20 bp, Artificial Sequence
  Description of Artificial Sequence: Synthetic oligonucleotide
  Target: LAMA2; (-) strand; PAM type: YTN; PAM sequence: TTC
taaattaaatgcttcagttt

SEQ ID NO: 205037 - DNA, 20 bp, Artificial Sequence
  Description of Artificial Sequence: Synthetic oligonucleotide
  Target: LAMA2; (-) strand; PAM type: YTN; PAM sequence: TTT
ctaaattaaatgcttcagtt

SEQ ID NO: 205038 - DNA, 20 bp, Artificial Sequence
  Description of Artificial Sequence: Synthetic oligonucleotide
  Target: LAMA2; (-) strand; PAM type: YTN; PAM sequence: TTT
tctaaattaaatgcttcagt

SEQ ID NO: 205039 - DNA, 20 bp, Artificial Sequence
  Description of Artificial Sequence: Synthetic oligonucleotide
  Target: LAMA2; (-) strand; PAM type: YTN; PAM sequence: TTG
agttttctaaattaaatgct

SEQ ID NO: 205040 - DNA, 20 bp, Artificial Sequence
  Description of Artificial Sequence: Synthetic oligonucleotide
  Target: LAMA2; (-) strand; PAM type: YTN; PAM sequence: TTT
gagttttctaaattaaatgc

SEQ ID NO: 205041 - DNA, 20 bp, Artificial Sequence
  Description of Artificial Sequence: Synthetic oligonucleotide
  Target: LAMA2; (-) strand; PAM type: YTN; PAM sequence: CTG
aagaaatttgagttttctaa

SEQ ID NO: 205042 - DNA, 20 bp, Artificial Sequence
  Description of Artificial Sequence: Synthetic oligonucleotide
  Target: LAMA2; (-) strand; PAM type: YTN; PAM sequence: TTA
ggctgaagaaatttgagttt

SEQ ID NO: 205043 - DNA, 20 bp, Artificial Sequence
  Description of Artificial Sequence: Synthetic oligonucleotide
  Target: LAMA2; (-) strand; PAM type: YTN; PAM sequence: TTT
aggctgaagaaatttgagtt

SEQ ID NO: 205044 - DNA, 20 bp, Artificial Sequence
  Description of Artificial Sequence: Synthetic oligonucleotide
  Target: LAMA2; (-) strand; PAM type: YTN; PAM sequence: TTT
taggctgaagaaatttgagt

SEQ ID NO: 205045 - DNA, 20 bp, Artificial Sequence
  Description of Artificial Sequence: Synthetic oligonucleotide
  Target: LAMA2; (-) strand; PAM type: YTN; PAM sequence: TTA
aatgaacaattttaggctga

SEQ ID NO: 205046 - DNA, 20 bp, Artificial Sequence
  Description of Artificial Sequence: Synthetic oligonucleotide
  Target: LAMA2; (-) strand; PAM type: YTN; PAM sequence: TTT
aaatgaacaattttaggctg

SEQ ID NO: 205047 - DNA, 20 bp, Artificial Sequence
  Description of Artificial Sequence: Synthetic oligonucleotide
  Target: LAMA2; (-) strand; PAM type: YTN; PAM sequence: TTG
tttaaatgaacaattttagg

SEQ ID NO: 205048 - DNA, 20 bp, Artificial Sequence
  Description of Artificial Sequence: Synthetic oligonucleotide
  Target: LAMA2; (-) strand; PAM type: YTN; PAM sequence: CTT
gtttaaatgaacaattttag

SEQ ID NO: 205049 - DNA, 20 bp, Artificial Sequence
  Description of Artificial Sequence: Synthetic oligonucleotide
  Target: LAMA2; (-) strand; PAM type: YTN; PAM sequence: CTA
acaaacttgtttaaatgaac

SEQ ID NO: 205050 - DNA, 20 bp, Artificial Sequence
  Description of Artificial Sequence: Synthetic oligonucleotide
  Target: LAMA2; (-) strand; PAM type: YTN; PAM sequence: TTG
agaatctaacaaacttgttt

SEQ ID NO: 205051 - DNA, 20 bp, Artificial Sequence
  Description of Artificial Sequence: Synthetic oligonucleotide
  Target: LAMA2; (-) strand; PAM type: YTN; PAM sequence: TTT
gagaatctaacaaacttgtt

SEQ ID NO: 205052 - DNA, 20 bp, Artificial Sequence
  Description of Artificial Sequence: Synthetic oligonucleotide
  Target: LAMA2; (-) strand; PAM type: YTN; PAM sequence: TTA
atttgagaatctaacaaact

SEQ ID NO: 205053 - DNA, 20 bp, Artificial Sequence
  Description of Artificial Sequence: Synthetic oligonucleotide
  Target: LAMA2; (-) strand; PAM type: YTN; PAM sequence: CTA
ttaatttgagaatctaacaa

SEQ ID NO: 205054 - DNA, 20 bp, Artificial Sequence
  Description of Artificial Sequence: Synthetic oligonucleotide
  Target: LAMA2; (-) strand; PAM type: YTN; PAM sequence: TTC
agtatcctattaatttgaga

SEQ ID NO: 205055 - DNA, 20 bp, Artificial Sequence
  Description of Artificial Sequence: Synthetic oligonucleotide
  Target: LAMA2; (-) strand; PAM type: YTN; PAM sequence: TTA
ttcagtatcctattaatttg

SEQ ID NO: 205056 - DNA, 20 bp, Artificial Sequence
  Description of Artificial Sequence: Synthetic oligonucleotide
  Target: LAMA2; (-) strand; PAM type: YTN; PAM sequence: TTT
attcagtatcctattaattt

SEQ ID NO: 205057 - DNA, 20 bp, Artificial Sequence
  Description of Artificial Sequence: Synthetic oligonucleotide
  Target: LAMA2; (-) strand; PAM type: YTN; PAM sequence: TTC
atatttattcagtatcctat

SEQ ID NO: 205058 - DNA, 20 bp, Artificial Sequence
  Description of Artificial Sequence: Synthetic oligonucleotide
  Target: LAMA2; (-) strand; PAM type: YTN; PAM sequence: TTT
catatttattcagtatccta

SEQ ID NO: 205059 - DNA, 20 bp, Artificial Sequence
  Description of Artificial Sequence: Synthetic oligonucleotide
  Target: LAMA2; (-) strand; PAM type: YTN; PAM sequence: TTC
caggaaagaataatttcata

SEQ ID NO: 205060 - DNA, 20 bp, Artificial Sequence
  Description of Artificial Sequence: Synthetic oligonucleotide
  Target: LAMA2; (-) strand; PAM type: YTN; PAM sequence: TTT
ccaggaaagaataatttcat

SEQ ID NO: 205061 - DNA, 20 bp, Artificial Sequence
  Description of Artificial Sequence: Synthetic oligonucleotide
  Target: LAMA2; (-) strand; PAM type: YTN; PAM sequence: CTT
tccaggaaagaataatttca

SEQ ID NO: 205062 - DNA, 20 bp, Artificial Sequence
  Description of Artificial Sequence: Synthetic oligonucleotide
  Target: LAMA2; (-) strand; PAM type: YTN; PAM sequence: TTA
actttccaggaaagaataat

SEQ ID NO: 205063 - DNA, 20 bp, Artificial Sequence
  Description of Artificial Sequence: Synthetic oligonucleotide
  Target: LAMA2; (-) strand; PAM type: YTN; PAM sequence: TTT
aactttccaggaaagaataa

SEQ ID NO: 205064 - DNA, 20 bp, Artificial Sequence
  Description of Artificial Sequence: Synthetic oligonucleotide
  Target: LAMA2; (-) strand; PAM type: YTN; PAM sequence: TTC
catttaactttccaggaaag

SEQ ID NO: 205065 - DNA, 20 bp, Artificial Sequence
  Description of Artificial Sequence: Synthetic oligonucleotide
  Target: LAMA2; (-) strand; PAM type: YTN; PAM sequence: TTT
ccatttaactttccaggaaa

SEQ ID NO: 205066 - DNA, 20 bp, Artificial Sequence
  Description of Artificial Sequence: Synthetic oligonucleotide
  Target: LAMA2; (-) strand; PAM type: YTN; PAM sequence: TTT
tccatttaactttccaggaa

SEQ ID NO: 205067 - DNA, 20 bp, Artificial Sequence
  Description of Artificial Sequence: Synthetic oligonucleotide
  Target: LAMA2; (-) strand; PAM type: YTN; PAM sequence: TTT
ttccatttaactttccagga

SEQ ID NO: 205068 - DNA, 20 bp, Artificial Sequence
  Description of Artificial Sequence: Synthetic oligonucleotide
  Target: LAMA2; (-) strand; PAM type: YTN; PAM sequence: CTG
tttttccatttaactttcca

SEQ ID NO: 205069 - DNA, 20 bp, Artificial Sequence
  Description of Artificial Sequence: Synthetic oligonucleotide
  Target: LAMA2; (-) strand; PAM type: YTN; PAM sequence: CTG
tcctgtttttccatttaact

SEQ ID NO: 205070 - DNA, 20 bp, Artificial Sequence
  Description of Artificial Sequence: Synthetic oligonucleotide
  Target: LAMA2; (-) strand; PAM type: YTN; PAM sequence: TTC
tgtcctgtttttccatttaa

SEQ ID NO: 205071 - DNA, 20 bp, Artificial Sequence
  Description of Artificial Sequence: Synthetic oligonucleotide
  Target: LAMA2; (-) strand; PAM type: YTN; PAM sequence: TTA
taaaatagcgattctgtcct

SEQ ID NO: 205072 - DNA, 20 bp, Artificial Sequence
  Description of Artificial Sequence: Synthetic oligonucleotide
  Target: LAMA2; (-) strand; PAM type: YTN; PAM sequence: TTA
gttataaaatagcgattctg

SEQ ID NO: 205073 - DNA, 20 bp, Artificial Sequence
  Description of Artificial Sequence: Synthetic oligonucleotide
  Target: LAMA2; (-) strand; PAM type: YTN; PAM sequence: TTA
atatgtattagttataaaat

SEQ ID NO: 205074 - DNA, 20 bp, Artificial Sequence
  Description of Artificial Sequence: Synthetic oligonucleotide
  Target: LAMA2; (-) strand; PAM type: YTN; PAM sequence: CTT
aatatgtattagttataaaa

SEQ ID NO: 205075 - DNA, 20 bp, Artificial Sequence
  Description of Artificial Sequence: Synthetic oligonucleotide
  Target: LAMA2; (-) strand; PAM type: YTN; PAM sequence: TTG
acttaatatgtattagttat

SEQ ID NO: 205076 - DNA, 20 bp, Artificial Sequence
  Description of Artificial Sequence: Synthetic oligonucleotide
  Target: LAMA2; (-) strand; PAM type: YTN; PAM sequence: CTT
gacttaatatgtattagtta

SEQ ID NO: 205077 - DNA, 20 bp, Artificial Sequence
  Description of Artificial Sequence: Synthetic oligonucleotide
  Target: LAMA2; (-) strand; PAM type: YTN; PAM sequence: TTC
ttgacttaatatgtattagt

SEQ ID NO: 205078 - DNA, 20 bp, Artificial Sequence
  Description of Artificial Sequence: Synthetic oligonucleotide
  Target: LAMA2; (-) strand; PAM type: YTN; PAM sequence: TTT
cttgacttaatatgtattag

SEQ ID NO: 205079 - DNA, 20 bp, Artificial Sequence
  Description of Artificial Sequence: Synthetic oligonucleotide
  Target: LAMA2; (-) strand; PAM type: YTN; PAM sequence: CTA
tttcttgacttaatatgtat

SEQ ID NO: 205080 - DNA, 20 bp, Artificial Sequence
  Description of Artificial Sequence: Synthetic oligonucleotide
  Target: LAMA2; (-) strand; PAM type: YTN; PAM sequence: TTA
ctatttcttgacttaatatg

SEQ ID NO: 205081 - DNA, 20 bp, Artificial Sequence
  Description of Artificial Sequence: Synthetic oligonucleotide
  Target: LAMA2; (-) strand; PAM type: YTN; PAM sequence: TTT
actatttcttgacttaatat

SEQ ID NO: 205082 - DNA, 20 bp, Artificial Sequence
  Description of Artificial Sequence: Synthetic oligonucleotide
  Target: LAMA2; (-) strand; PAM type: YTN; PAM sequence: CTT
tactatttcttgacttaata

SEQ ID NO: 205083 - DNA, 20 bp, Artificial Sequence
  Description of Artificial Sequence: Synthetic oligonucleotide
  Target: LAMA2; (-) strand; PAM type: YTN; PAM sequence: TTG
aagacaaataatcctttact

SEQ ID NO: 205084 - DNA, 20 bp, Artificial Sequence
  Description of Artificial Sequence: Synthetic oligonucleotide
  Target: LAMA2; (-) strand; PAM type: YTN; PAM sequence: CTT
gaagacaaataatcctttac

SEQ ID NO: 205085 - DNA, 20 bp, Artificial Sequence
  Description of Artificial Sequence: Synthetic oligonucleotide
  Target: LAMA2; (-) strand; PAM type: YTN; PAM sequence: TTC
ttgaagacaaataatccttt

SEQ ID NO: 205086 - DNA, 20 bp, Artificial Sequence
  Description of Artificial Sequence: Synthetic oligonucleotide
  Target: LAMA2; (-) strand; PAM type: YTN; PAM sequence: TTT
cttgaagacaaataatcctt

SEQ ID NO: 205087 - DNA, 20 bp, Artificial Sequence
  Description of Artificial Sequence: Synthetic oligonucleotide
  Target: LAMA2; (-) strand; PAM type: YTN; PAM sequence: TTT
tcttgaagacaaataatcct

SEQ ID NO: 205088 - DNA, 20 bp, Artificial Sequence
  Description of Artificial Sequence: Synthetic oligonucleotide
  Target: LAMA2; (-) strand; PAM type: YTN; PAM sequence: TTA
caggatgttttcttgaagac

SEQ ID NO: 205089 - DNA, 20 bp, Artificial Sequence
  Description of Artificial Sequence: Synthetic oligonucleotide
  Target: LAMA2; (-) strand; PAM type: YTN; PAM sequence: TTT
acaggatgttttcttgaaga

SEQ ID NO: 205090 - DNA, 20 bp, Artificial Sequence
  Description of Artificial Sequence: Synthetic oligonucleotide
  Target: LAMA2; (-) strand; PAM type: YTN; PAM sequence: CTT
tacaggatgttttcttgaag

SEQ ID NO: 205091 - DNA, 20 bp, Artificial Sequence
  Description of Artificial Sequence: Synthetic oligonucleotide
  Target: LAMA2; (-) strand; PAM type: YTN; PAM sequence: TTC
tttacaggatgttttcttga

SEQ ID NO: 205092 - DNA, 20 bp, Artificial Sequence
  Description of Artificial Sequence: Synthetic oligonucleotide
  Target: LAMA2; (-) strand; PAM type: YTN; PAM sequence: TTG
ccattctttacaggatgttt

SEQ ID NO: 205093 - DNA, 20 bp, Artificial Sequence
  Description of Artificial Sequence: Synthetic oligonucleotide
  Target: LAMA2; (-) strand; PAM type: YTN; PAM sequence: CTA
tataccaccaacattgccat

SEQ ID NO: 205094 - DNA, 20 bp, Artificial Sequence
  Description of Artificial Sequence: Synthetic oligonucleotide
  Target: LAMA2; (-) strand; PAM type: YTN; PAM sequence: TTA
catctatataccaccaacat

SEQ ID NO: 205095 - DNA, 20 bp, Artificial Sequence
  Description of Artificial Sequence: Synthetic oligonucleotide
  Target: LAMA2; (-) strand; PAM type: YTN; PAM sequence: TTT
acatctatataccaccaaca

SEQ ID NO: 205096 - DNA, 20 bp, Artificial Sequence
  Description of Artificial Sequence: Synthetic oligonucleotide
  Target: LAMA2; (-) strand; PAM type: YTN; PAM sequence: TTT
tacatctatataccaccaac

SEQ ID NO: 205097 - DNA, 20 bp, Artificial Sequence
  Description of Artificial Sequence: Synthetic oligonucleotide
  Target: LAMA2; (-) strand; PAM type: YTN; PAM sequence: TTA
agcattttacatctatatac

SEQ ID NO: 205098 - DNA, 20 bp, Artificial Sequence
  Description of Artificial Sequence: Synthetic oligonucleotide
  Target: LAMA2; (-) strand; PAM type: YTN; PAM sequence: TTT
aagcattttacatctatata

SEQ ID NO: 205099 - DNA, 20 bp, Artificial Sequence
  Description of Artificial Sequence: Synthetic oligonucleotide
  Target: LAMA2; (-) strand; PAM type: YTN; PAM sequence: TTT
taagcattttacatctatat

SEQ ID NO: 205100 - DNA, 20 bp, Artificial Sequence
  Description of Artificial Sequence: Synthetic oligonucleotide
  Target: LAMA2; (-) strand; PAM type: YTN; PAM sequence: TTT
ttaagcattttacatctata

SEQ ID NO: 205101 - DNA, 20 bp, Artificial Sequence
  Description of Artificial Sequence: Synthetic oligonucleotide
  Target: LAMA2; (-) strand; PAM type: YTN; PAM sequence: CTT
tttaagcattttacatctat

SEQ ID NO: 205102 - DNA, 20 bp, Artificial Sequence
  Description of Artificial Sequence: Synthetic oligonucleotide
  Target: LAMA2; (-) strand; PAM type: YTN; PAM sequence: TTC
tttttaagcattttacatct

SEQ ID NO: 205103 - DNA, 20 bp, Artificial Sequence
  Description of Artificial Sequence: Synthetic oligonucleotide
  Target: LAMA2; (-) strand; PAM type: YTN; PAM sequence: CTA
gataatcattctttttaagc

SEQ ID NO: 205104 - DNA, 20 bp, Artificial Sequence
  Description of Artificial Sequence: Synthetic oligonucleotide
  Target: LAMA2; (-) strand; PAM type: YTN; PAM sequence: TTC
tagataatcattctttttaa

SEQ ID NO: 205105 - DNA, 20 bp, Artificial Sequence
  Description of Artificial Sequence: Synthetic oligonucleotide
  Target: LAMA2; (-) strand; PAM type: YTN; PAM sequence: CTT
ctagataatcattcttttta

SEQ ID NO: 205106 - DNA, 20 bp, Artificial Sequence
  Description of Artificial Sequence: Synthetic oligonucleotide
  Target: LAMA2; (-) strand; PAM type: YTN; PAM sequence: TTA
taacatgtataacatcttct

SEQ ID NO: 205107 - DNA, 20 bp, Artificial Sequence
  Description of Artificial Sequence: Synthetic oligonucleotide
  Target: LAMA2; (-) strand; PAM type: YTN; PAM sequence: TTA
aagataattataacatgtat

SEQ ID NO: 205108 - DNA, 20 bp, Artificial Sequence
  Description of Artificial Sequence: Synthetic oligonucleotide
  Target: LAMA2; (-) strand; PAM type: YTN; PAM sequence: CTT
aaagataattataacatgta

SEQ ID NO: 205109 - DNA, 20 bp, Artificial Sequence
  Description of Artificial Sequence: Synthetic oligonucleotide
  Target: LAMA2; (-) strand; PAM type: YTN; PAM sequence: TTA
gagaaggcagacttaaagat

SEQ ID NO: 205110 - DNA, 20 bp, Artificial Sequence
  Description of Artificial Sequence: Synthetic oligonucleotide
  Target: LAMA2; (-) strand; PAM type: YTN; PAM sequence: TTA
cagaattagagaaggcagac

SEQ ID NO: 205111 - DNA, 20 bp, Artificial Sequence
  Description of Artificial Sequence: Synthetic oligonucleotide
  Target: LAMA2; (-) strand; PAM type: YTN; PAM sequence: CTT
acagaattagagaaggcaga

SEQ ID NO: 205112 - DNA, 20 bp, Artificial Sequence
  Description of Artificial Sequence: Synthetic oligonucleotide
  Target: LAMA2; (-) strand; PAM type: YTN; PAM sequence: TTA
acttacagaattagagaagg

SEQ ID NO: 205113 - DNA, 20 bp, Artificial Sequence
  Description of Artificial Sequence: Synthetic oligonucleotide
  Target: LAMA2; (-) strand; PAM type: YTN; PAM sequence: TTT
aacttacagaattagagaag

SEQ ID NO: 205114 - DNA, 20 bp, Artificial Sequence
  Description of Artificial Sequence: Synthetic oligonucleotide
  Target: LAMA2; (-) strand; PAM type: YTN; PAM sequence: TTG
tgtttaacttacagaattag

SEQ ID NO: 205115 - DNA, 20 bp, Artificial Sequence
  Description of Artificial Sequence: Synthetic oligonucleotide
  Target: LAMA2; (-) strand; PAM type: YTN; PAM sequence: TTT
gtgtttaacttacagaatta

SEQ ID NO: 205116 - DNA, 20 bp, Artificial Sequence
  Description of Artificial Sequence: Synthetic oligonucleotide
  Target: LAMA2; (-) strand; PAM type: YTN; PAM sequence: TTA
aagtatcaatatttgtgttt

SEQ ID NO: 205117 - DNA, 20 bp, Artificial Sequence
  Description of Artificial Sequence: Synthetic oligonucleotide
  Target: LAMA2; (-) strand; PAM type: YTN; PAM sequence: TTA
aaaattaaagtatcaatatt

SEQ ID NO: 205118 - DNA, 20 bp, Artificial Sequence
  Description of Artificial Sequence: Synthetic oligonucleotide
  Target: LAMA2; (-) strand; PAM type: YTN; PAM sequence: TTT
aaaaattaaagtatcaatat

SEQ ID NO: 205119 - DNA, 20 bp, Artificial Sequence
  Description of Artificial Sequence: Synthetic oligonucleotide
  Target: LAMA2; (-) strand; PAM type: YTN; PAM sequence: TTT
taaaaattaaagtatcaata

SEQ ID NO: 205120 - DNA, 20 bp, Artificial Sequence
  Description of Artificial Sequence: Synthetic oligonucleotide
  Target: LAMA2; (-) strand; PAM type: YTN; PAM sequence: TTA
aaaatattttaaaaattaaa

SEQ ID NO: 205121 - DNA, 20 bp, Artificial Sequence
  Description of Artificial Sequence: Synthetic oligonucleotide
  Target: LAMA2; (-) strand; PAM type: YTN; PAM sequence: TTT
aaaaatattttaaaaattaa

SEQ ID NO: 205122 - DNA, 20 bp, Artificial Sequence
  Description of Artificial Sequence: Synthetic oligonucleotide
  Target: LAMA2; (-) strand; PAM type: YTN; PAM sequence: TTT
taaaaatattttaaaaatta

SEQ ID NO: 205123 - DNA, 20 bp, Artificial Sequence
  Description of Artificial Sequence: Synthetic oligonucleotide
  Target: LAMA2; (-) strand; PAM type: YTN; PAM sequence: CTT
ttaaaaatattttaaaaatt

SEQ ID NO: 205124 - DNA, 20 bp, Artificial Sequence
  Description of Artificial Sequence: Synthetic oligonucleotide
  Target: LAMA2; (-) strand; PAM type: YTN; PAM sequence: CTA
cttttaaaaatattttaaaa

SEQ ID NO: 205125 - DNA, 20 bp, Artificial Sequence
  Description of Artificial Sequence: Synthetic oligonucleotide
  Target: LAMA2; (-) strand; PAM type: YTN; PAM sequence: TTC
agctacttttaaaaatattt

SEQ ID NO: 205126 - DNA, 20 bp, Artificial Sequence
  Description of Artificial Sequence: Synthetic oligonucleotide
  Target: LAMA2; (-) strand; PAM type: YTN; PAM sequence: TTT
cagctacttttaaaaatatt

SEQ ID NO: 205127 - DNA, 20 bp, Artificial Sequence
  Description of Artificial Sequence: Synthetic oligonucleotide
  Target: LAMA2; (-) strand; PAM type: YTN; PAM sequence: TTT
tcagctacttttaaaaatat

SEQ ID NO: 205128 - DNA, 20 bp, Artificial Sequence
  Description of Artificial Sequence: Synthetic oligonucleotide
  Target: LAMA2; (-) strand; PAM type: YTN; PAM sequence: TTG
aaggatggagccccattttc

SEQ ID NO: 205129 - DNA, 20 bp, Artificial Sequence
  Description of Artificial Sequence: Synthetic oligonucleotide
  Target: LAMA2; (-) strand; PAM type: YTN; PAM sequence: TTT
gaaggatggagccccatttt

SEQ ID NO: 205130 - DNA, 20 bp, Artificial Sequence
  Description of Artificial Sequence: Synthetic oligonucleotide
  Target: LAMA2; (-) strand; PAM type: YTN; PAM sequence: CTT
tgaaggatggagccccattt

SEQ ID NO: 205131 - DNA, 20 bp, Artificial Sequence
  Description of Artificial Sequence: Synthetic oligonucleotide
  Target: LAMA2; (-) strand; PAM type: YTN; PAM sequence: TTA
gaactttgaaggatggagcc

SEQ ID NO: 205132 - DNA, 20 bp, Artificial Sequence
  Description of Artificial Sequence: Synthetic oligonucleotide
  Target: LAMA2; (-) strand; PAM type: YTN; PAM sequence: TTG
ttagaactttgaaggatgga

SEQ ID NO: 205133 - DNA, 20 bp, Artificial Sequence
  Description of Artificial Sequence: Synthetic oligonucleotide
  Target: LAMA2; (-) strand; PAM type: YTN; PAM sequence: TTG
tattgttagaactttgaagg

SEQ ID NO: 205134 - DNA, 20 bp, Artificial Sequence
  Description of Artificial Sequence: Synthetic oligonucleotide
  Target: LAMA2; (-) strand; PAM type: YTN; PAM sequence: CTA
taaattgtattgttagaact

SEQ ID NO: 205135 - DNA, 20 bp, Artificial Sequence
  Description of Artificial Sequence: Synthetic oligonucleotide
  Target: LAMA2; (-) strand; PAM type: YTN; PAM sequence: TTA
ctataaattgtattgttaga

SEQ ID NO: 205136 - DNA, 20 bp, Artificial Sequence
  Description of Artificial Sequence: Synthetic oligonucleotide
  Target: LAMA2; (-) strand; PAM type: YTN; PAM sequence: TTT
actataaattgtattgttag

SEQ ID NO: 205137 - DNA, 20 bp, Artificial Sequence
  Description of Artificial Sequence: Synthetic oligonucleotide
  Target: LAMA2; (-) strand; PAM type: YTN; PAM sequence: CTT
tactataaattgtattgtta

SEQ ID NO: 205138 - DNA, 20 bp, Artificial Sequence
  Description of Artificial Sequence: Synthetic oligonucleotide
  Target: LAMA2; (-) strand; PAM type: YTN; PAM sequence: TTC
tttactataaattgtattgt

SEQ ID NO: 205139 - DNA, 20 bp, Artificial Sequence
  Description of Artificial Sequence: Synthetic oligonucleotide
  Target: LAMA2; (-) strand; PAM type: YTN; PAM sequence: CTC
atacatattctttactataa

SEQ ID NO: 205140 - DNA, 20 bp, Artificial Sequence
  Description of Artificial Sequence: Synthetic oligonucleotide
  Target: LAMA2; (-) strand; PAM type: YTN; PAM sequence: TTC
tcatacatattctttactat

SEQ ID NO: 205141 - DNA, 20 bp, Artificial Sequence
  Description of Artificial Sequence: Synthetic oligonucleotide
  Target: LAMA2; (-) strand; PAM type: YTN; PAM sequence: TTT
ctcatacatattctttacta

SEQ ID NO: 205142 - DNA, 20 bp, Artificial Sequence
  Description of Artificial Sequence: Synthetic oligonucleotide
  Target: LAMA2; (-) strand; PAM type: YTN; PAM sequence: CTA
agaacaaatgtttctcatac

SEQ ID NO: 205143 - DNA, 20 bp, Artificial Sequence
  Description of Artificial Sequence: Synthetic oligonucleotide
  Target: LAMA2; (-) strand; PAM type: YTN; PAM sequence: TTC
taagaacaaatgtttctcat

SEQ ID NO: 205144 - DNA, 20 bp, Artificial Sequence
  Description of Artificial Sequence: Synthetic oligonucleotide
  Target: LAMA2; (-) strand; PAM type: YTN; PAM sequence: CTT
ctaagaacaaatgtttctca

SEQ ID NO: 205145 - DNA, 20 bp, Artificial Sequence
  Description of Artificial Sequence: Synthetic oligonucleotide
  Target: LAMA2; (-) strand; PAM type: YTN; PAM sequence: CTG
aacttctaagaacaaatgtt

SEQ ID NO: 205146 - DNA, 20 bp, Artificial Sequence
  Description of Artificial Sequence: Synthetic oligonucleotide
  Target: LAMA2; (-) strand; PAM type: YTN; PAM sequence: TTC
tgaacttctaagaacaaatg

SEQ ID NO: 205147 - DNA, 20 bp, Artificial Sequence
  Description of Artificial Sequence: Synthetic oligonucleotide
  Target: LAMA2; (-) strand; PAM type: YTN; PAM sequence: TTT
ctgaacttctaagaacaaat

SEQ ID NO: 205148 - DNA, 20 bp, Artificial Sequence
  Description of Artificial Sequence: Synthetic oligonucleotide
  Target: LAMA2; (-) strand; PAM type: YTN; PAM sequence: TTT
tctgaacttctaagaacaaa

SEQ ID NO: 205149 - DNA, 20 bp, Artificial Sequence
  Description of Artificial Sequence: Synthetic oligonucleotide
  Target: LAMA2; (-) strand; PAM type: YTN; PAM sequence: TTT
ttctgaacttctaagaacaa

SEQ ID NO: 205150 - DNA, 20 bp, Artificial Sequence
  Description of Artificial Sequence: Synthetic oligonucleotide
  Target: LAMA2; (-) strand; PAM type: YTN; PAM sequence: TTG
atttttctgaacttctaaga

SEQ ID NO: 205151 - DNA, 20 bp, Artificial Sequence
  Description of Artificial Sequence: Synthetic oligonucleotide
  Target: LAMA2; (-) strand; PAM type: YTN; PAM sequence: TTT
gatttttctgaacttctaag

SEQ ID NO: 205152 - DNA, 20 bp, Artificial Sequence
  Description of Artificial Sequence: Synthetic oligonucleotide
  Target: LAMA2; (-) strand; PAM type: YTN; PAM sequence: TTA
tatatttgatttttctgaac

SEQ ID NO: 205153 - DNA, 20 bp, Artificial Sequence
  Description of Artificial Sequence: Synthetic oligonucleotide
  Target: LAMA2; (-) strand; PAM type: YTN; PAM sequence: TTC
atattatatatttgattttt

SEQ ID NO: 205154 - DNA, 20 bp, Artificial Sequence
  Description of Artificial Sequence: Synthetic oligonucleotide
  Target: LAMA2; (-) strand; PAM type: YTN; PAM sequence: CTT
catattatatatttgatttt

SEQ ID NO: 205155 - DNA, 20 bp, Artificial Sequence
  Description of Artificial Sequence: Synthetic oligonucleotide
  Target: LAMA2; (-) strand; PAM type: YTN; PAM sequence: CTA
tcttcatattatatatttga

SEQ ID NO: 205156 - DNA, 20 bp, Artificial Sequence
  Description of Artificial Sequence: Synthetic oligonucleotide
  Target: LAMA2; (-) strand; PAM type: YTN; PAM sequence: TTC
tatcttcatattatatattt

SEQ ID NO: 205157 - DNA, 20 bp, Artificial Sequence
  Description of Artificial Sequence: Synthetic oligonucleotide
  Target: LAMA2; (-) strand; PAM type: YTN; PAM sequence: TTA
ttctatcttcatattatata

SEQ ID NO: 205158 - DNA, 20 bp, Artificial Sequence
  Description of Artificial Sequence: Synthetic oligonucleotide
  Target: LAMA2; (-) strand; PAM type: YTN; PAM sequence: CTA
cattattctatcttcatatt

SEQ ID NO: 205159 - DNA, 20 bp, Artificial Sequence
  Description of Artificial Sequence: Synthetic oligonucleotide
  Target: LAMA2; (-) strand; PAM type: YTN; PAM sequence: CTC
tacattattctatcttcata

SEQ ID NO: 205160 - DNA, 20 bp, Artificial Sequence
  Description of Artificial Sequence: Synthetic oligonucleotide
  Target: LAMA2; (-) strand; PAM type: YTN; PAM sequence: TTC
tctacattattctatcttca

SEQ ID NO: 205161 - DNA, 20 bp, Artificial Sequence
  Description of Artificial Sequence: Synthetic oligonucleotide
  Target: LAMA2; (-) strand; PAM type: YTN; PAM sequence: CTT
ctctacattattctatcttc

SEQ ID NO: 205162 - DNA, 20 bp, Artificial Sequence
  Description of Artificial Sequence: Synthetic oligonucleotide
  Target: LAMA2; (-) strand; PAM type: YTN; PAM sequence: TTA
acttctctacattattctat

SEQ ID NO: 205163 - DNA, 20 bp, Artificial Sequence
  Description of Artificial Sequence: Synthetic oligonucleotide
  Target: LAMA2; (-) strand; PAM type: YTN; PAM sequence: TTT
aacttctctacattattcta

SEQ ID NO: 205164 - DNA, 20 bp, Artificial Sequence
  Description of Artificial Sequence: Synthetic oligonucleotide
  Target: LAMA2; (-) strand; PAM type: YTN; PAM sequence: CTT
taacttctctacattattct

SEQ ID NO: 205165 - DNA, 20 bp, Artificial Sequence
  Description of Artificial Sequence: Synthetic oligonucleotide
  Target: LAMA2; (-) strand; PAM type: YTN; PAM sequence: CTC
tttaacttctctacattatt

SEQ ID NO: 205166 - DNA, 20 bp, Artificial Sequence
  Description of Artificial Sequence: Synthetic oligonucleotide
  Target: LAMA2; (-) strand; PAM type: YTN; PAM sequence: CTC
ctctttaacttctctacatt

SEQ ID NO: 205167 - DNA, 20 bp, Artificial Sequence
  Description of Artificial Sequence: Synthetic oligonucleotide
  Target: LAMA2; (-) strand; PAM type: YTN; PAM sequence: TTC
tcctctttaacttctctaca

SEQ ID NO: 205168 - DNA, 20 bp, Artificial Sequence
  Description of Artificial Sequence: Synthetic oligonucleotide
  Target: LAMA2; (-) strand; PAM type: YTN; PAM sequence: TTT
ctcctctttaacttctctac

SEQ ID NO: 205169 - DNA, 20 bp, Artificial Sequence
  Description of Artificial Sequence: Synthetic oligonucleotide
  Target: LAMA2; (-) strand; PAM type: YTN; PAM sequence: CTT
tctcctctttaacttctcta

SEQ ID NO: 205170 - DNA, 20 bp, Artificial Sequence
  Description of Artificial Sequence: Synthetic oligonucleotide
  Target: LAMA2; (-) strand; PAM type: YTN; PAM sequence: TTC
agaatcagtcacccctttct

SEQ ID NO: 205171 - DNA, 20 bp, Artificial Sequence
  Description of Artificial Sequence: Synthetic oligonucleotide
  Target: LAMA2; (-) strand; PAM type: YTN; PAM sequence: TTG
attcagaatcagtcacccct

SEQ ID NO: 205172 - DNA, 20 bp, Artificial Sequence
  Description of Artificial Sequence: Synthetic oligonucleotide
  Target: LAMA2; (-) strand; PAM type: YTN; PAM sequence: CTT
gattcagaatcagtcacccc

SEQ ID NO: 205173 - DNA, 20 bp, Artificial Sequence
  Description of Artificial Sequence: Synthetic oligonucleotide
  Target: LAMA2; (-) strand; PAM type: YTN; PAM sequence: CTC
acttgattcagaatcagtca

SEQ ID NO: 205174 - DNA, 20 bp, Artificial Sequence
  Description of Artificial Sequence: Synthetic oligonucleotide
  Target: LAMA2; (-) strand; PAM type: YTN; PAM sequence: CTA
aaactcacttgattcagaat

SEQ ID NO: 205175 - DNA, 20 bp, Artificial Sequence
  Description of Artificial Sequence: Synthetic oligonucleotide
  Target: LAMA2; (-) strand; PAM type: YTN; PAM sequence: TTA
aaagaagctaaaactcactt

SEQ ID NO: 205176 - DNA, 20 bp, Artificial Sequence
  Description of Artificial Sequence: Synthetic oligonucleotide
  Target: LAMA2; (-) strand; PAM type: YTN; PAM sequence: CTT
aaaagaagctaaaactcact

SEQ ID NO: 205177 - DNA, 20 bp, Artificial Sequence
  Description of Artificial Sequence: Synthetic oligonucleotide
  Target: LAMA2; (-) strand; PAM type: YTN; PAM sequence: TTC
acttaaaagaagctaaaact

SEQ ID NO: 205178 - DNA, 20 bp, Artificial Sequence
  Description of Artificial Sequence: Synthetic oligonucleotide
  Target: LAMA2; (-) strand; PAM type: YTN; PAM sequence: TTT
cacttaaaagaagctaaaac

SEQ ID NO: 205179 - DNA, 20 bp, Artificial Sequence
  Description of Artificial Sequence: Synthetic oligonucleotide
  Target: LAMA2; (-) strand; PAM type: YTN; PAM sequence: TTA
gcatatgtgaggagcatgca

SEQ ID NO: 205180 - DNA, 20 bp, Artificial Sequence
  Description of Artificial Sequence: Synthetic oligonucleotide
  Target: LAMA2; (-) strand; PAM type: YTN; PAM sequence: TTA
tacattagcatatgtgagga

SEQ ID NO: 205181 - DNA, 20 bp, Artificial Sequence
  Description of Artificial Sequence: Synthetic oligonucleotide
  Target: LAMA2; (-) strand; PAM type: YTN; PAM sequence: TTT
atacattagcatatgtgagg

SEQ ID NO: 205182 - DNA, 20 bp, Artificial Sequence
  Description of Artificial Sequence: Synthetic oligonucleotide
  Target: LAMA2; (-) strand; PAM type: YTN; PAM sequence: TTT
tatacattagcatatgtgag

SEQ ID NO: 205183 - DNA, 20 bp, Artificial Sequence
  Description of Artificial Sequence: Synthetic oligonucleotide
  Target: LAMA2; (-) strand; PAM type: YTN; PAM sequence: TTG
atgttttatacattagcata

SEQ ID NO: 205184 - DNA, 20 bp, Artificial Sequence
  Description of Artificial Sequence: Synthetic oligonucleotide
  Target: LAMA2; (-) strand; PAM type: YTN; PAM sequence: CTA
taaattgatgttttatacat

SEQ ID NO: 205185 - DNA, 20 bp, Artificial Sequence
  Description of Artificial Sequence: Synthetic oligonucleotide
  Target: LAMA2; (-) strand; PAM type: YTN; PAM sequence: TTC
tataaattgatgttttatac

SEQ ID NO: 205186 - DNA, 20 bp, Artificial Sequence
  Description of Artificial Sequence: Synthetic oligonucleotide
  Target: LAMA2; (-) strand; PAM type: YTN; PAM sequence: CTA
ttctataaattgatgtttta

SEQ ID NO: 205187 - DNA, 20 bp, Artificial Sequence
  Description of Artificial Sequence: Synthetic oligonucleotide
  Target: LAMA2; (-) strand; PAM type: YTN; PAM sequence: TTC
aaatactattctataaattg

SEQ ID NO: 205188 - DNA, 20 bp, Artificial Sequence
  Description of Artificial Sequence: Synthetic oligonucleotide
  Target: LAMA2; (-) strand; PAM type: YTN; PAM sequence: CTA
ggcaggtaattcaaatacta

SEQ ID NO: 205189 - DNA, 20 bp, Artificial Sequence
  Description of Artificial Sequence: Synthetic oligonucleotide
  Target: LAMA2; (-) strand; PAM type: YTN; PAM sequence: TTG
caaagcctaggcaggtaatt

SEQ ID NO: 205190 - DNA, 20 bp, Artificial Sequence
  Description of Artificial Sequence: Synthetic oligonucleotide
  Target: LAMA2; (-) strand; PAM type: YTN; PAM sequence: CTT
gcaaagcctaggcaggtaat

SEQ ID NO: 205191 - DNA, 20 bp, Artificial Sequence
  Description of Artificial Sequence: Synthetic oligonucleotide
  Target: LAMA2; (-) strand; PAM type: YTN; PAM sequence: CTA
ggcttgcaaagcctaggcag

SEQ ID NO: 205192 - DNA, 20 bp, Artificial Sequence
  Description of Artificial Sequence: Synthetic oligonucleotide
  Target: LAMA2; (-) strand; PAM type: YTN; PAM sequence: TTC
aaaggtctaggcttgcaaag

SEQ ID NO: 205193 - DNA, 20 bp, Artificial Sequence
  Description of Artificial Sequence: Synthetic oligonucleotide
  Target: LAMA2; (-) strand; PAM type: YTN; PAM sequence: TTG
aatgcaaattcaaaggtcta

SEQ ID NO: 205194 - DNA, 20 bp, Artificial Sequence
  Description of Artificial Sequence: Synthetic oligonucleotide
  Target: LAMA2; (-) strand; PAM type: YTN; PAM sequence: TTT
gaatgcaaattcaaaggtct

SEQ ID NO: 205195 - DNA, 20 bp, Artificial Sequence
  Description of Artificial Sequence: Synthetic oligonucleotide
  Target: LAMA2; (-) strand; PAM type: YTN; PAM sequence: CTA
gaaaatgtacatcaagaatt

SEQ ID NO: 205196 - DNA, 20 bp, Artificial Sequence
  Description of Artificial Sequence: Synthetic oligonucleotide
  Target: LAMA2; (-) strand; PAM type: YTN; PAM sequence: CTA
gtcccccagctagaaaatgt

SEQ ID NO: 205197 - DNA, 20 bp, Artificial Sequence
  Description of Artificial Sequence: Synthetic oligonucleotide
  Target: LAMA2; (-) strand; PAM type: YTN; PAM sequence: TTC
tagtcccccagctagaaaat

SEQ ID NO: 205198 - DNA, 20 bp, Artificial Sequence
  Description of Artificial Sequence: Synthetic oligonucleotide
  Target: LAMA2; (-) strand; PAM type: YTN; PAM sequence: TTT
ctagtcccccagctagaaaa

SEQ ID NO: 205199 - DNA, 20 bp, Artificial Sequence
  Description of Artificial Sequence: Synthetic oligonucleotide
  Target: LAMA2; (-) strand; PAM type: YTN; PAM sequence: CTT
tctagtcccccagctagaaa

SEQ ID NO: 205200 - DNA, 20 bp, Artificial Sequence
  Description of Artificial Sequence: Synthetic oligonucleotide
  Target: LAMA2; (-) strand; PAM type: YTN; PAM sequence: TTG
ctttctagtcccccagctag

SEQ ID NO: 205201 - DNA, 20 bp, Artificial Sequence
  Description of Artificial Sequence: Synthetic oligonucleotide
  Target: LAMA2; (-) strand; PAM type: YTN; PAM sequence: CTT
gctttctagtcccccagcta

SEQ ID NO: 205202 - DNA, 20 bp, Artificial Sequence
  Description of Artificial Sequence: Synthetic oligonucleotide
  Target: LAMA2; (-) strand; PAM type: YTN; PAM sequence: CTG
aaaggaaagtgtcttgcttt

SEQ ID NO: 205203 - DNA, 20 bp, Artificial Sequence
  Description of Artificial Sequence: Synthetic oligonucleotide
  Target: LAMA2; (-) strand; PAM type: YTN; PAM sequence: TTA
atagatggggagcccaaggt

SEQ ID NO: 205204 - DNA, 20 bp, Artificial Sequence
  Description of Artificial Sequence: Synthetic oligonucleotide
  Target: LAMA2; (-) strand; PAM type: YTN; PAM sequence: CTT
aatagatggggagcccaagg

SEQ ID NO: 205205 - DNA, 20 bp, Artificial Sequence
  Description of Artificial Sequence: Synthetic oligonucleotide
  Target: LAMA2; (-) strand; PAM type: YTN; PAM sequence: CTC
cacttaatagatggggagcc

SEQ ID NO: 205206 - DNA, 20 bp, Artificial Sequence
  Description of Artificial Sequence: Synthetic oligonucleotide
  Target: LAMA2; (-) strand; PAM type: YTN; PAM sequence: TTA
atgatctccacttaatagat

SEQ ID NO: 205207 - DNA, 20 bp, Artificial Sequence
  Description of Artificial Sequence: Synthetic oligonucleotide
  Target: LAMA2; (-) strand; PAM type: YTN; PAM sequence: TTT
aatgatctccacttaataga

SEQ ID NO: 205208 - DNA, 20 bp, Artificial Sequence
  Description of Artificial Sequence: Synthetic oligonucleotide
  Target: LAMA2; (-) strand; PAM type: YTN; PAM sequence: TTT
taatgatctccacttaatag

SEQ ID NO: 205209 - DNA, 20 bp, Artificial Sequence
  Description of Artificial Sequence: Synthetic oligonucleotide
  Target: LAMA2; (-) strand; PAM type: YTN; PAM sequence: TTA
ggacagcggtgcaaggcaga

SEQ ID NO: 205210 - DNA, 20 bp, Artificial Sequence
  Description of Artificial Sequence: Synthetic oligonucleotide
  Target: LAMA2; (-) strand; PAM type: YTN; PAM sequence: CTT
aggacagcggtgcaaggcag

SEQ ID NO: 205211 - DNA, 20 bp, Artificial Sequence
  Description of Artificial Sequence: Synthetic oligonucleotide
  Target: LAMA2; (-) strand; PAM type: YTN; PAM sequence: CTC
aaatccttaggacagcggtg

SEQ ID NO: 205212 - DNA, 20 bp, Artificial Sequence
  Description of Artificial Sequence: Synthetic oligonucleotide
  Target: LAMA2; (-) strand; PAM type: YTN; PAM sequence: TTA
tctcaaatccttaggacagc

SEQ ID NO: 205213 - DNA, 20 bp, Artificial Sequence
  Description of Artificial Sequence: Synthetic oligonucleotide
  Target: LAMA2; (-) strand; PAM type: YTN; PAM sequence: TTT
atctcaaatccttaggacag

SEQ ID NO: 205214 - DNA, 20 bp, Artificial Sequence
  Description of Artificial Sequence: Synthetic oligonucleotide
  Target: LAMA2; (-) strand; PAM type: YTN; PAM sequence: CTT
tatctcaaatccttaggaca

SEQ ID NO: 205215 - DNA, 20 bp, Artificial Sequence
  Description of Artificial Sequence: Synthetic oligonucleotide
  Target: LAMA2; (-) strand; PAM type: YTN; PAM sequence: TTG
tatgctttatctcaaatcct

SEQ ID NO: 205216 - DNA, 20 bp, Artificial Sequence
  Description of Artificial Sequence: Synthetic oligonucleotide
  Target: LAMA2; (-) strand; PAM type: YTN; PAM sequence: TTT
gtatgctttatctcaaatcc

SEQ ID NO: 205217 - DNA, 20 bp, Artificial Sequence
  Description of Artificial Sequence: Synthetic oligonucleotide
  Target: LAMA2; (-) strand; PAM type: YTN; PAM sequence: CTT
tgtatgctttatctcaaatc

SEQ ID NO: 205218 - DNA, 20 bp, Artificial Sequence
  Description of Artificial Sequence: Synthetic oligonucleotide
  Target: LAMA2; (-) strand; PAM type: YTN; PAM sequence: CTA
tgtgccaagccctttgtatg

SEQ ID NO: 205219 - DNA, 20 bp, Artificial Sequence
  Description of Artificial Sequence: Synthetic oligonucleotide
  Target: LAMA2; (-) strand; PAM type: YTN; PAM sequence: CTA
ctatgtgccaagccctttgt

SEQ ID NO: 205220 - DNA, 20 bp, Artificial Sequence
  Description of Artificial Sequence: Synthetic oligonucleotide
  Target: LAMA2; (-) strand; PAM type: YTN; PAM sequence: TTA
ggagcacctactatgtgcca

SEQ ID NO: 205221 - DNA, 20 bp, Artificial Sequence
  Description of Artificial Sequence: Synthetic oligonucleotide
  Target: LAMA2; (-) strand; PAM type: YTN; PAM sequence: TTT
aggagcacctactatgtgcc

SEQ ID NO: 205222 - DNA, 20 bp, Artificial Sequence
  Description of Artificial Sequence: Synthetic oligonucleotide
  Target: LAMA2; (-) strand; PAM type: YTN; PAM sequence: TTA
ccatttaggagcacctacta

SEQ ID NO: 205223 - DNA, 20 bp, Artificial Sequence
  Description of Artificial Sequence: Synthetic oligonucleotide
  Target: LAMA2; (-) strand; PAM type: YTN; PAM sequence: CTG
atgtgaagaataaagttacc

SEQ ID NO: 205224 - DNA, 20 bp, Artificial Sequence
  Description of Artificial Sequence: Synthetic oligonucleotide
  Target: LAMA2; (-) strand; PAM type: YTN; PAM sequence: TTA
taagtataagcaaagcctga

SEQ ID NO: 205225 - DNA, 20 bp, Artificial Sequence
  Description of Artificial Sequence: Synthetic oligonucleotide
  Target: LAMA2; (-) strand; PAM type: YTN; PAM sequence: TTT
ataagtataagcaaagcctg

SEQ ID NO: 205226 - DNA, 20 bp, Artificial Sequence
  Description of Artificial Sequence: Synthetic oligonucleotide
  Target: LAMA2; (-) strand; PAM type: YTN; PAM sequence: TTT
tataagtataagcaaagcct

SEQ ID NO: 205227 - DNA, 20 bp, Artificial Sequence
  Description of Artificial Sequence: Synthetic oligonucleotide
  Target: LAMA2; (-) strand; PAM type: YTN; PAM sequence: CTT
ttataagtataagcaaagcc

SEQ ID NO: 205228 - DNA, 20 bp, Artificial Sequence
  Description of Artificial Sequence: Synthetic oligonucleotide
  Target: LAMA2; (-) strand; PAM type: YTN; PAM sequence: CTG
gcttttataagtataagcaa

SEQ ID NO: 205229 - DNA, 20 bp, Artificial Sequence
  Description of Artificial Sequence: Synthetic oligonucleotide
  Target: LAMA2; (-) strand; PAM type: YTN; PAM sequence: CTA
caaaactggcttttataagt

SEQ ID NO: 205230 - DNA, 20 bp, Artificial Sequence
  Description of Artificial Sequence: Synthetic oligonucleotide
  Target: LAMA2; (-) strand; PAM type: YTN; PAM sequence: TTA
tctacaaaactggcttttat

SEQ ID NO: 205231 - DNA, 20 bp, Artificial Sequence
  Description of Artificial Sequence: Synthetic oligonucleotide
  Target: LAMA2; (-) strand; PAM type: YTN; PAM sequence: TTC
agcaaattatctacaaaact

SEQ ID NO: 205232 - DNA, 20 bp, Artificial Sequence
  Description of Artificial Sequence: Synthetic oligonucleotide
  Target: LAMA2; (-) strand; PAM type: YTN; PAM sequence: CTA
ttcagcaaattatctacaaa

SEQ ID NO: 205233 - DNA, 20 bp, Artificial Sequence
  Description of Artificial Sequence: Synthetic oligonucleotide
  Target: LAMA2; (-) strand; PAM type: YTN; PAM sequence: TTC
tattcagcaaattatctaca

SEQ ID NO: 205234 - DNA, 20 bp, Artificial Sequence
  Description of Artificial Sequence: Synthetic oligonucleotide
  Target: LAMA2; (-) strand; PAM type: YTN; PAM sequence: TTA
gttctattcagcaaattatc

SEQ ID NO: 205235 - DNA, 20 bp, Artificial Sequence
  Description of Artificial Sequence: Synthetic oligonucleotide
  Target: LAMA2; (-) strand; PAM type: YTN; PAM sequence: CTT
agttctattcagcaaattat

SEQ ID NO: 205236 - DNA, 20 bp, Artificial Sequence
  Description of Artificial Sequence: Synthetic oligonucleotide
  Target: LAMA2; (-) strand; PAM type: YTN; PAM sequence: TTC
ttagttctattcagcaaatt

SEQ ID NO: 205237 - DNA, 20 bp, Artificial Sequence
  Description of Artificial Sequence: Synthetic oligonucleotide
  Target: LAMA2; (-) strand; PAM type: YTN; PAM sequence: CTA
ttcttagttctattcagcaa

SEQ ID NO: 205238 - DNA, 20 bp, Artificial Sequence
  Description of Artificial Sequence: Synthetic oligonucleotide
  Target: LAMA2; (-) strand; PAM type: YTN; PAM sequence: TTA
taactattcttagttctatt

SEQ ID NO: 205239 - DNA, 20 bp, Artificial Sequence
  Description of Artificial Sequence: Synthetic oligonucleotide
  Target: LAMA2; (-) strand; PAM type: YTN; PAM sequence: TTT
ataactattcttagttctat

SEQ ID NO: 205240 - DNA, 20 bp, Artificial Sequence
  Description of Artificial Sequence: Synthetic oligonucleotide
  Target: LAMA2; (-) strand; PAM type: YTN; PAM sequence: CTA
acccaatatttataactatt

SEQ ID NO: 205241 - DNA, 20 bp, Artificial Sequence
  Description of Artificial Sequence: Synthetic oligonucleotide
  Target: LAMA2; (-) strand; PAM type: YTN; PAM sequence: CTC
aaataaactaacccaatatt

SEQ ID NO: 205242 - DNA, 20 bp, Artificial Sequence
  Description of Artificial Sequence: Synthetic oligonucleotide
  Target: LAMA2; (-) strand; PAM type: YTN; PAM sequence: TTA
tcatagcagctcaaataaac

SEQ ID NO: 205243 - DNA, 20 bp, Artificial Sequence
  Description of Artificial Sequence: Synthetic oligonucleotide
  Target: LAMA2; (-) strand; PAM type: YTN; PAM sequence: TTA
tggtatgttatcatagcagc

SEQ ID NO: 205244 - DNA, 20 bp, Artificial Sequence
  Description of Artificial Sequence: Synthetic oligonucleotide
  Target: LAMA2; (-) strand; PAM type: YTN; PAM sequence: TTT
atggtatgttatcatagcag

SEQ ID NO: 205245 - DNA, 20 bp, Artificial Sequence
  Description of Artificial Sequence: Synthetic oligonucleotide
  Target: LAMA2; (-) strand; PAM type: YTN; PAM sequence: TTA
taatccatccagtttatggt

SEQ ID NO: 205246 - DNA, 20 bp, Artificial Sequence
  Description of Artificial Sequence: Synthetic oligonucleotide
  Target: LAMA2; (-) strand; PAM type: YTN; PAM sequence: CTT
ataatccatccagtttatgg

SEQ ID NO: 205247 - DNA, 20 bp, Artificial Sequence
  Description of Artificial Sequence: Synthetic oligonucleotide
  Target: LAMA2; (-) strand; PAM type: YTN; PAM sequence: TTG
cttataatccatccagttta

SEQ ID NO: 205248 - DNA, 20 bp, Artificial Sequence
  Description of Artificial Sequence: Synthetic oligonucleotide
  Target: LAMA2; (-) strand; PAM type: YTN; PAM sequence: TTT
gcttataatccatccagttt

SEQ ID NO: 205249 - DNA, 20 bp, Artificial Sequence
  Description of Artificial Sequence: Synthetic oligonucleotide
  Target: LAMA2; (-) strand; PAM type: YTN; PAM sequence: CTT
tgcttataatccatccagtt

SEQ ID NO: 205250 - DNA, 20 bp, Artificial Sequence
  Description of Artificial Sequence: Synthetic oligonucleotide
  Target: LAMA2; (-) strand; PAM type: YTN; PAM sequence: TTA
tctttgcttataatccatcc

SEQ ID NO: 205251 - DNA, 20 bp, Artificial Sequence
  Description of Artificial Sequence: Synthetic oligonucleotide
  Target: LAMA2; (-) strand; PAM type: YTN; PAM sequence: CTG
tgagaaataaattatctttg

SEQ ID NO: 205252 - DNA, 20 bp, Artificial Sequence
  Description of Artificial Sequence: Synthetic oligonucleotide
  Target: LAMA2; (-) strand; PAM type: YTN; PAM sequence: CTC
cagactgtgagaaataaatt

SEQ ID NO: 205253 - DNA, 20 bp, Artificial Sequence
  Description of Artificial Sequence: Synthetic oligonucleotide
  Target: LAMA2; (-) strand; PAM type: YTN; PAM sequence: TTC
ccagcctccagactgtgaga

SEQ ID NO: 205254 - DNA, 20 bp, Artificial Sequence
  Description of Artificial Sequence: Synthetic oligonucleotide
  Target: LAMA2; (-) strand; PAM type: YTN; PAM sequence: CTT
cccagcctccagactgtgag

SEQ ID NO: 205255 - DNA, 20 bp, Artificial Sequence
  Description of Artificial Sequence: Synthetic oligonucleotide
  Target: LAMA2; (-) strand; PAM type: YTN; PAM sequence: TTG
gacttcccagcctccagact

SEQ ID NO: 205256 - DNA, 20 bp, Artificial Sequence
  Description of Artificial Sequence: Synthetic oligonucleotide
  Target: LAMA2; (-) strand; PAM type: YTN; PAM sequence: CTT
ggacttcccagcctccagac

SEQ ID NO: 205257 - DNA, 20 bp, Artificial Sequence
  Description of Artificial Sequence: Synthetic oligonucleotide
  Target: LAMA2; (-) strand; PAM type: YTN; PAM sequence: CTG
tggtcttggacttcccagcc

SEQ ID NO: 205258 - DNA, 20 bp, Artificial Sequence
  Description of Artificial Sequence: Synthetic oligonucleotide
  Target: LAMA2; (-) strand; PAM type: YTN; PAM sequence: CTG
ctgtggtcttggacttccca

SEQ ID NO: 205259 - DNA, 20 bp, Artificial Sequence
  Description of Artificial Sequence: Synthetic oligonucleotide
  Target: LAMA2; (-) strand; PAM type: YTN; PAM sequence: TTG
ccactgctgtggtcttggac

SEQ ID NO: 205260 - DNA, 20 bp, Artificial Sequence
  Description of Artificial Sequence: Synthetic oligonucleotide
  Target: LAMA2; (-) strand; PAM type: YTN; PAM sequence: TTT
gccactgctgtggtcttgga

SEQ ID NO: 205261 - DNA, 20 bp, Artificial Sequence
  Description of Artificial Sequence: Synthetic oligonucleotide
  Target: LAMA2; (-) strand; PAM type: YTN; PAM sequence: CTG
aatttgccactgctgtggtc

SEQ ID NO: 205262 - DNA, 20 bp, Artificial Sequence
  Description of Artificial Sequence: Synthetic oligonucleotide
  Target: LAMA2; (-) strand; PAM type: YTN; PAM sequence: CTG
gacactgaatttgccactgc

SEQ ID NO: 205263 - DNA, 20 bp, Artificial Sequence
  Description of Artificial Sequence: Synthetic oligonucleotide
  Target: LAMA2; (-) strand; PAM type: YTN; PAM sequence: CTC
actggacactgaatttgcca

SEQ ID NO: 205264 - DNA, 20 bp, Artificial Sequence
  Description of Artificial Sequence: Synthetic oligonucleotide
  Target: LAMA2; (-) strand; PAM type: YTN; PAM sequence: CTA
taaacaggaaagcaggtact

SEQ ID NO: 205265 - DNA, 20 bp, Artificial Sequence
  Description of Artificial Sequence: Synthetic oligonucleotide
  Target: LAMA2; (-) strand; PAM type: YTN; PAM sequence: CTG
tctataaacaggaaagcagg

SEQ ID NO: 205266 - DNA, 20 bp, Artificial Sequence
  Description of Artificial Sequence: Synthetic oligonucleotide
  Target: LAMA2; (-) strand; PAM type: YTN; PAM sequence: CTA
cagaaaaaaaacgtgctgtc

SEQ ID NO: 205267 - DNA, 20 bp, Artificial Sequence
  Description of Artificial Sequence: Synthetic oligonucleotide
  Target: LAMA2; (-) strand; PAM type: YTN; PAM sequence: TTC
atcatgcgaggctacagaaa

SEQ ID NO: 205268 - DNA, 20 bp, Artificial Sequence
  Description of Artificial Sequence: Synthetic oligonucleotide
  Target: LAMA2; (-) strand; PAM type: YTN; PAM sequence: TTT
catcatgcgaggctacagaa

SEQ ID NO: 205269 - DNA, 20 bp, Artificial Sequence
  Description of Artificial Sequence: Synthetic oligonucleotide
  Target: LAMA2; (-) strand; PAM type: YTN; PAM sequence: CTT
tcatcatgcgaggctacaga

SEQ ID NO: 205270 - DNA, 20 bp, Artificial Sequence
  Description of Artificial Sequence: Synthetic oligonucleotide
  Target: LAMA2; (-) strand; PAM type: YTN; PAM sequence: CTC
cctttcatcatgcgaggcta

SEQ ID NO: 205271 - DNA, 20 bp, Artificial Sequence
  Description of Artificial Sequence: Synthetic oligonucleotide
  Target: LAMA2; (-) strand; PAM type: YTN; PAM sequence: TTG
ctccctttcatcatgcgagg

SEQ ID NO: 205272 - DNA, 20 bp, Artificial Sequence
  Description of Artificial Sequence: Synthetic oligonucleotide
  Target: LAMA2; (-) strand; PAM type: YTN; PAM sequence: CTT
gctccctttcatcatgcgag

SEQ ID NO: 205273 - DNA, 20 bp, Artificial Sequence
  Description of Artificial Sequence: Synthetic oligonucleotide
  Target: LAMA2; (-) strand; PAM type: YTN; PAM sequence: CTC
ttgctccctttcatcatgcg

SEQ ID NO: 205274 - DNA, 20 bp, Artificial Sequence
  Description of Artificial Sequence: Synthetic oligonucleotide
  Target: LAMA2; (-) strand; PAM type: YTN; PAM sequence: CTG
aaagaggtccctcttgctcc

SEQ ID NO: 205275 - DNA, 20 bp, Artificial Sequence
  Description of Artificial Sequence: Synthetic oligonucleotide
  Target: LAMA2; (-) strand; PAM type: YTN; PAM sequence: TTA
gggaggtgaccagcgtctga

SEQ ID NO: 205276 - DNA, 20 bp, Artificial Sequence
  Description of Artificial Sequence: Synthetic oligonucleotide
  Target: LAMA2; (-) strand; PAM type: YTN; PAM sequence: TTT
agggaggtgaccagcgtctg

SEQ ID NO: 205277 - DNA, 20 bp, Artificial Sequence
  Description of Artificial Sequence: Synthetic oligonucleotide
  Target: LAMA2; (-) strand; PAM type: YTN; PAM sequence: CTT
tagggaggtgaccagcgtct

SEQ ID NO: 205278 - DNA, 20 bp, Artificial Sequence
  Description of Artificial Sequence: Synthetic oligonucleotide
  Target: LAMA2; (-) strand; PAM type: YTN; PAM sequence: CTC
caatgtgaggatatcaggag

SEQ ID NO: 205279 - DNA, 20 bp, Artificial Sequence
  Description of Artificial Sequence: Synthetic oligonucleotide
  Target: LAMA2; (-) strand; PAM type: YTN; PAM sequence: CTA
atctccaatgtgaggatatc

SEQ ID NO: 205280 - DNA, 20 bp, Artificial Sequence
  Description of Artificial Sequence: Synthetic oligonucleotide
  Target: LAMA2; (-) strand; PAM type: YTN; PAM sequence: TTG
aaacctaatctccaatgtga

SEQ ID NO: 205281 - DNA, 20 bp, Artificial Sequence
  Description of Artificial Sequence: Synthetic oligonucleotide
  Target: LAMA2; (-) strand; PAM type: YTN; PAM sequence: TTC
atatgttgaaacctaatctc

SEQ ID NO: 205282 - DNA, 20 bp, Artificial Sequence
  Description of Artificial Sequence: Synthetic oligonucleotide
  Target: LAMA2; (-) strand; PAM type: YTN; PAM sequence: CTA
aaattcatatgttgaaacct

SEQ ID NO: 205283 - DNA, 20 bp, Artificial Sequence
  Description of Artificial Sequence: Synthetic oligonucleotide
  Target: LAMA2; (-) strand; PAM type: YTN; PAM sequence: TTG
tgtccccctaaaattcatat

SEQ ID NO: 205284 - DNA, 20 bp, Artificial Sequence
  Description of Artificial Sequence: Synthetic oligonucleotide
  Target: LAMA2; (-) strand; PAM type: YTN; PAM sequence: TTT
gtgtccccctaaaattcata

SEQ ID NO: 205285 - DNA, 20 bp, Artificial Sequence
  Description of Artificial Sequence: Synthetic oligonucleotide
  Target: LAMA2; (-) strand; PAM type: YTN; PAM sequence: TTA
tgaatgtttgtgtcccccta

SEQ ID NO: 205286 - DNA, 20 bp, Artificial Sequence
  Description of Artificial Sequence: Synthetic oligonucleotide
  Target: LAMA2; (-) strand; PAM type: YTN; PAM sequence: CTA
tgttatgaatgtttgtgtcc

SEQ ID NO: 205287 - DNA, 20 bp, Artificial Sequence
  Description of Artificial Sequence: Synthetic oligonucleotide
  Target: LAMA2; (-) strand; PAM type: YTN; PAM sequence: TTC
tatgttatgaatgtttgtgt

SEQ ID NO: 205288 - DNA, 20 bp, Artificial Sequence
  Description of Artificial Sequence: Synthetic oligonucleotide
  Target: LAMA2; (-) strand; PAM type: YTN; PAM sequence: TTT
ctatgttatgaatgtttgtg

SEQ ID NO: 205289 - DNA, 20 bp, Artificial Sequence
  Description of Artificial Sequence: Synthetic oligonucleotide
  Target: LAMA2; (-) strand; PAM type: YTN; PAM sequence: TTT
tctatgttatgaatgtttgt

SEQ ID NO: 205290 - DNA, 20 bp, Artificial Sequence
  Description of Artificial Sequence: Synthetic oligonucleotide
  Target: LAMA2; (-) strand; PAM type: YTN; PAM sequence: TTA
aaataatatgtattttctat

SEQ ID NO: 205291 - DNA, 20 bp, Artificial Sequence
  Description of Artificial Sequence: Synthetic oligonucleotide
  Target: LAMA2; (-) strand; PAM type: YTN; PAM sequence: TTT
aaaataatatgtattttcta

SEQ ID NO: 205292 - DNA, 20 bp, Artificial Sequence
  Description of Artificial Sequence: Synthetic oligonucleotide
  Target: LAMA2; (-) strand; PAM type: YTN; PAM sequence: TTT
taaaataatatgtattttct

SEQ ID NO: 205293 - DNA, 20 bp, Artificial Sequence
  Description of Artificial Sequence: Synthetic oligonucleotide
  Target: LAMA2; (-) strand; PAM type: YTN; PAM sequence: TTA
atagtggtcataataaagaa

SEQ ID NO: 205294 - DNA, 20 bp, Artificial Sequence
  Description of Artificial Sequence: Synthetic oligonucleotide
  Target: LAMA2; (-) strand; PAM type: YTN; PAM sequence: TTT
aatagtggtcataataaaga

SEQ ID NO: 205295 - DNA, 20 bp, Artificial Sequence
  Description of Artificial Sequence: Synthetic oligonucleotide
  Target: LAMA2; (-) strand; PAM type: YTN; PAM sequence: TTT
taatagtggtcataataaag

SEQ ID NO: 205296 - DNA, 20 bp, Artificial Sequence
  Description of Artificial Sequence: Synthetic oligonucleotide
  Target: LAMA2; (-) strand; PAM type: YTN; PAM sequence: TTG
gttttaatagtggtcataat

SEQ ID NO: 205297 - DNA, 20 bp, Artificial Sequence
  Description of Artificial Sequence: Synthetic oligonucleotide
  Target: LAMA2; (-) strand; PAM type: YTN; PAM sequence: TTT
ggttttaatagtggtcataa

SEQ ID NO: 205298 - DNA, 20 bp, Artificial Sequence
  Description of Artificial Sequence: Synthetic oligonucleotide
  Target: LAMA2; (-) strand; PAM type: YTN; PAM sequence: CTG
tttggttttaatagtggtca

SEQ ID NO: 205299 - DNA, 20 bp, Artificial Sequence
  Description of Artificial Sequence: Synthetic oligonucleotide
  Target: LAMA2; (-) strand; PAM type: YTN; PAM sequence: TTC
tgtttggttttaatagtggt

SEQ ID NO: 205300 - DNA, 20 bp, Artificial Sequence
  Description of Artificial Sequence: Synthetic oligonucleotide
  Target: LAMA2; (-) strand; PAM type: YTN; PAM sequence: TTT
ctgtttggttttaatagtgg

SEQ ID NO: 205301 - DNA, 20 bp, Artificial Sequence
  Description of Artificial Sequence: Synthetic oligonucleotide
  Target: LAMA2; (-) strand; PAM type: YTN; PAM sequence: TTT
tctgtttggttttaatagtg

SEQ ID NO: 205302 - DNA, 20 bp, Artificial Sequence
  Description of Artificial Sequence: Synthetic oligonucleotide
  Target: LAMA2; (-) strand; PAM type: YTN; PAM sequence: CTA
cagttttctgtttggtttta

SEQ ID NO: 205303 - DNA, 20 bp, Artificial Sequence
  Description of Artificial Sequence: Synthetic oligonucleotide
  Target: LAMA2; (-) strand; PAM type: YTN; PAM sequence: TTC
tacagttttctgtttggttt

SEQ ID NO: 205304 - DNA, 20 bp, Artificial Sequence
  Description of Artificial Sequence: Synthetic oligonucleotide
  Target: LAMA2; (-) strand; PAM type: YTN; PAM sequence: CTA
gttctacagttttctgtttg

SEQ ID NO: 205305 - DNA, 20 bp, Artificial Sequence
  Description of Artificial Sequence: Synthetic oligonucleotide
  Target: LAMA2; (-) strand; PAM type: YTN; PAM sequence: TTG
gctagttctacagttttctg

SEQ ID NO: 205306 - DNA, 20 bp, Artificial Sequence
  Description of Artificial Sequence: Synthetic oligonucleotide
  Target: LAMA2; (-) strand; PAM type: YTN; PAM sequence: CTT
ggctagttctacagttttct

SEQ ID NO: 205307 - DNA, 20 bp, Artificial Sequence
  Description of Artificial Sequence: Synthetic oligonucleotide
  Target: LAMA2; (-) strand; PAM type: YTN; PAM sequence: CTG
taagataccttggctagttc

SEQ ID NO: 205308 - DNA, 20 bp, Artificial Sequence
  Description of Artificial Sequence: Synthetic oligonucleotide
  Target: LAMA2; (-) strand; PAM type: YTN; PAM sequence: CTC
tgtaagataccttggctagt

SEQ ID NO: 205309 - DNA, 20 bp, Artificial Sequence
  Description of Artificial Sequence: Synthetic oligonucleotide
  Target: LAMA2; (-) strand; PAM type: YTN; PAM sequence: CTG
aaacatatctctgtaagata

SEQ ID NO: 205310 - DNA, 20 bp, Artificial Sequence
  Description of Artificial Sequence: Synthetic oligonucleotide
  Target: LAMA2; (-) strand; PAM type: YTN; PAM sequence: CTC
tgaaacatatctctgtaaga

SEQ ID NO: 205311 - DNA, 20 bp, Artificial Sequence
  Description of Artificial Sequence: Synthetic oligonucleotide
  Target: LAMA2; (-) strand; PAM type: YTN; PAM sequence: CTC
ctctgaaacatatctctgta

SEQ ID NO: 205312 - DNA, 20 bp, Artificial Sequence
  Description of Artificial Sequence: Synthetic oligonucleotide
  Target: LAMA2; (-) strand; PAM type: YTN; PAM sequence: CTA
ataaacactcctctgaaaca

SEQ ID NO: 205313 - DNA, 20 bp, Artificial Sequence
  Description of Artificial Sequence: Synthetic oligonucleotide
  Target: LAMA2; (-) strand; PAM type: YTN; PAM sequence: CTA
aacaaatagtgtatacaaca

SEQ ID NO: 205314 - DNA, 20 bp, Artificial Sequence
  Description of Artificial Sequence: Synthetic oligonucleotide
  Target: LAMA2; (-) strand; PAM type: YTN; PAM sequence: CTA
aaaaacagaaaaagctaaac

SEQ ID NO: 205315 - DNA, 20 bp, Artificial Sequence
  Description of Artificial Sequence: Synthetic oligonucleotide
  Target: LAMA2; (-) strand; PAM type: YTN; PAM sequence: CTG
taatagcataggccgaggac

SEQ ID NO: 205316 - DNA, 20 bp, Artificial Sequence
  Description of Artificial Sequence: Synthetic oligonucleotide
  Target: LAMA2; (-) strand; PAM type: YTN; PAM sequence: TTC
tgtaatagcataggccgagg

SEQ ID NO: 205317 - DNA, 20 bp, Artificial Sequence
  Description of Artificial Sequence: Synthetic oligonucleotide
  Target: LAMA2; (-) strand; PAM type: YTN; PAM sequence: TTT
ctgtaatagcataggccgag

SEQ ID NO: 205318 - DNA, 20 bp, Artificial Sequence
  Description of Artificial Sequence: Synthetic oligonucleotide
  Target: LAMA2; (-) strand; PAM type: YTN; PAM sequence: CTT
tctgtaatagcataggccga

SEQ ID NO: 205319 - DNA, 20 bp, Artificial Sequence
  Description of Artificial Sequence: Synthetic oligonucleotide
  Target: LAMA2; (-) strand; PAM type: YTN; PAM sequence: TTC
tttctgtaatagcataggcc

SEQ ID NO: 205320 - DNA, 20 bp, Artificial Sequence
  Description of Artificial Sequence: Synthetic oligonucleotide
  Target: LAMA2; (-) strand; PAM type: YTN; PAM sequence: CTC
aggaaaccaatagtaaatac

SEQ ID NO: 205321 - DNA, 20 bp, Artificial Sequence
  Description of Artificial Sequence: Synthetic oligonucleotide
  Target: LAMA2; (-) strand; PAM type: YTN; PAM sequence: TTC
cctcaggaaaccaatagtaa

SEQ ID NO: 205322 - DNA, 20 bp, Artificial Sequence
  Description of Artificial Sequence: Synthetic oligonucleotide
  Target: LAMA2; (-) strand; PAM type: YTN; PAM sequence: CTT
ccctcaggaaaccaatagta

SEQ ID NO: 205323 - DNA, 20 bp, Artificial Sequence
  Description of Artificial Sequence: Synthetic oligonucleotide
  Target: LAMA2; (-) strand; PAM type: YTN; PAM sequence: TTG
cttccctcaggaaaccaata

SEQ ID NO: 205324 - DNA, 20 bp, Artificial Sequence
  Description of Artificial Sequence: Synthetic oligonucleotide
  Target: LAMA2; (-) strand; PAM type: YTN; PAM sequence: TTA
aaataattgcttccctcagg

SEQ ID NO: 205325 - DNA, 20 bp, Artificial Sequence
  Description of Artificial Sequence: Synthetic oligonucleotide
  Target: LAMA2; (-) strand; PAM type: YTN; PAM sequence: TTA
aaccataaataatcaataat

SEQ ID NO: 205326 - DNA, 20 bp, Artificial Sequence
  Description of Artificial Sequence: Synthetic oligonucleotide
  Target: LAMA2; (-) strand; PAM type: YTN; PAM sequence: TTC
cccattaaaccataaataat

SEQ ID NO: 205327 - DNA, 20 bp, Artificial Sequence
  Description of Artificial Sequence: Synthetic oligonucleotide
  Target: LAMA2; (-) strand; PAM type: YTN; PAM sequence: TTA
gaatacaatggttccccatt

SEQ ID NO: 205328 - DNA, 20 bp, Artificial Sequence
  Description of Artificial Sequence: Synthetic oligonucleotide
  Target: LAMA2; (-) strand; PAM type: YTN; PAM sequence: CTG
tgagttagaatacaatggtt

SEQ ID NO: 205329 - DNA, 20 bp, Artificial Sequence
  Description of Artificial Sequence: Synthetic oligonucleotide
  Target: LAMA2; (-) strand; PAM type: YTN; PAM sequence: TTC
ctgtgagttagaatacaatg

SEQ ID NO: 205330 - DNA, 20 bp, Artificial Sequence
  Description of Artificial Sequence: Synthetic oligonucleotide
  Target: LAMA2; (-) strand; PAM type: YTN; PAM sequence: TTA
ttcctgtgagttagaataca

SEQ ID NO: 205331 - DNA, 20 bp, Artificial Sequence
  Description of Artificial Sequence: Synthetic oligonucleotide
  Target: LAMA2; (-) strand; PAM type: YTN; PAM sequence: TTT
attcctgtgagttagaatac

SEQ ID NO: 205332 - DNA, 20 bp, Artificial Sequence
  Description of Artificial Sequence: Synthetic oligonucleotide
  Target: LAMA2; (-) strand; PAM type: YTN; PAM sequence: TTT
tattcctgtgagttagaata

SEQ ID NO: 205333 - DNA, 20 bp, Artificial Sequence
  Description of Artificial Sequence: Synthetic oligonucleotide
  Target: LAMA2; (-) strand; PAM type: YTN; PAM sequence: TTG
ttttattcctgtgagttaga

SEQ ID NO: 205334 - DNA, 20 bp, Artificial Sequence
  Description of Artificial Sequence: Synthetic oligonucleotide
  Target: LAMA2; (-) strand; PAM type: YTN; PAM sequence: TTA
ttgttttattcctgtgagtt

SEQ ID NO: 205335 - DNA, 20 bp, Artificial Sequence
  Description of Artificial Sequence: Synthetic oligonucleotide
  Target: LAMA2; (-) strand; PAM type: YTN; PAM sequence: TTG
ttattgttttattcctgtga

SEQ ID NO: 205336 - DNA, 20 bp, Artificial Sequence
  Description of Artificial Sequence: Synthetic oligonucleotide
  Target: LAMA2; (-) strand; PAM type: YTN; PAM sequence: TTT
gttattgttttattcctgtg

SEQ ID NO: 205337 - DNA, 20 bp, Artificial Sequence
  Description of Artificial Sequence: Synthetic oligonucleotide
  Target: LAMA2; (-) strand; PAM type: YTN; PAM sequence: CTA
tttgttattgttttattcct

SEQ ID NO: 205338 - DNA, 20 bp, Artificial Sequence
  Description of Artificial Sequence: Synthetic oligonucleotide
  Target: LAMA2; (-) strand; PAM type: YTN; PAM sequence: TTG
catgcatcctatttgttatt

SEQ ID NO: 205339 - DNA, 20 bp, Artificial Sequence
  Description of Artificial Sequence: Synthetic oligonucleotide
  Target: LAMA2; (-) strand; PAM type: YTN; PAM sequence: TTT
gcatgcatcctatttgttat

SEQ ID NO: 205340 - DNA, 20 bp, Artificial Sequence
  Description of Artificial Sequence: Synthetic oligonucleotide
  Target: LAMA2; (-) strand; PAM type: YTN; PAM sequence: TTT
tgcatgcatcctatttgtta

SEQ ID NO: 205341 - DNA, 20 bp, Artificial Sequence
  Description of Artificial Sequence: Synthetic oligonucleotide
  Target: LAMA2; (-) strand; PAM type: YTN; PAM sequence: TTA
tgagatattttgcatgcatc

SEQ ID NO: 205342 - DNA, 20 bp, Artificial Sequence
  Description of Artificial Sequence: Synthetic oligonucleotide
  Target: LAMA2; (-) strand; PAM type: YTN; PAM sequence: TTT
atgagatattttgcatgcat

SEQ ID NO: 205343 - DNA, 20 bp, Artificial Sequence
  Description of Artificial Sequence: Synthetic oligonucleotide
  Target: LAMA2; (-) strand; PAM type: YTN; PAM sequence: TTA
ggtacacatttatgagatat

SEQ ID NO: 205344 - DNA, 20 bp, Artificial Sequence
  Description of Artificial Sequence: Synthetic oligonucleotide
  Target: LAMA2; (-) strand; PAM type: YTN; PAM sequence: TTG
ttaggtacacatttatgaga

SEQ ID NO: 205345 - DNA, 20 bp, Artificial Sequence
  Description of Artificial Sequence: Synthetic oligonucleotide
  Target: LAMA2; (-) strand; PAM type: YTN; PAM sequence: TTT
gttaggtacacatttatgag

SEQ ID NO: 205346 - DNA, 20 bp, Artificial Sequence
  Description of Artificial Sequence: Synthetic oligonucleotide
  Target: LAMA2; (-) strand; PAM type: YTN; PAM sequence: TTA
tttgttaggtacacatttat

SEQ ID NO: 205347 - DNA, 20 bp, Artificial Sequence
  Description of Artificial Sequence: Synthetic oligonucleotide
  Target: LAMA2; (-) strand; PAM type: YTN; PAM sequence: TTT
atttgttaggtacacattta

SEQ ID NO: 205348 - DNA, 20 bp, Artificial Sequence
  Description of Artificial Sequence: Synthetic oligonucleotide
  Target: LAMA2; (-) strand; PAM type: YTN; PAM sequence: TTT
tatttgttaggtacacattt

SEQ ID NO: 205349 - DNA, 20 bp, Artificial Sequence
  Description of Artificial Sequence: Synthetic oligonucleotide
  Target: LAMA2; (-) strand; PAM type: YTN; PAM sequence: TTG
aagatgtatgttttatttgt

SEQ ID NO: 205350 - DNA, 20 bp, Artificial Sequence
  Description of Artificial Sequence: Synthetic oligonucleotide
  Target: LAMA2; (-) strand; PAM type: YTN; PAM sequence: TTT
gaagatgtatgttttatttg

SEQ ID NO: 205351 - DNA, 20 bp, Artificial Sequence
  Description of Artificial Sequence: Synthetic oligonucleotide
  Target: LAMA2; (-) strand; PAM type: YTN; PAM sequence: TTC
gtatttgaagatgtatgttt

SEQ ID NO: 205352 - DNA, 20 bp, Artificial Sequence
  Description of Artificial Sequence: Synthetic oligonucleotide
  Target: LAMA2; (-) strand; PAM type: YTN; PAM sequence: CTA
aatgcatattcgtatttgaa

SEQ ID NO: 205353 - DNA, 20 bp, Artificial Sequence
  Description of Artificial Sequence: Synthetic oligonucleotide
  Target: LAMA2; (-) strand; PAM type: YTN; PAM sequence: CTC
taaatgcatattcgtatttg

SEQ ID NO: 205354 - DNA, 20 bp, Artificial Sequence
  Description of Artificial Sequence: Synthetic oligonucleotide
  Target: LAMA2; (-) strand; PAM type: YTN; PAM sequence: CTC
agacagcaagccaggctcta

SEQ ID NO: 205355 - DNA, 20 bp, Artificial Sequence
  Description of Artificial Sequence: Synthetic oligonucleotide
  Target: LAMA2; (-) strand; PAM type: YTN; PAM sequence: TTA
agacctcagacagcaagcca

SEQ ID NO: 205356 - DNA, 20 bp, Artificial Sequence
  Description of Artificial Sequence: Synthetic oligonucleotide
  Target: LAMA2; (-) strand; PAM type: YTN; PAM sequence: TTG
aagcacagaacaagttaaga

SEQ ID NO: 205357 - DNA, 20 bp, Artificial Sequence
  Description of Artificial Sequence: Synthetic oligonucleotide
  Target: LAMA2; (-) strand; PAM type: YTN; PAM sequence: TTA
taatagggagttgaagcaca

SEQ ID NO: 205358 - DNA, 20 bp, Artificial Sequence
  Description of Artificial Sequence: Synthetic oligonucleotide
  Target: LAMA2; (-) strand; PAM type: YTN; PAM sequence: TTC
catgtgtagcatccattata

SEQ ID NO: 205359 - DNA, 20 bp, Artificial Sequence
  Description of Artificial Sequence: Synthetic oligonucleotide
  Target: LAMA2; (-) strand; PAM type: YTN; PAM sequence: CTT
ccatgtgtagcatccattat

SEQ ID NO: 205360 - DNA, 20 bp, Artificial Sequence
  Description of Artificial Sequence: Synthetic oligonucleotide
  Target: LAMA2; (-) strand; PAM type: YTN; PAM sequence: CTC
caatggtgacccaagagctt

SEQ ID NO: 205361 - DNA, 20 bp, Artificial Sequence
  Description of Artificial Sequence: Synthetic oligonucleotide
  Target: LAMA2; (-) strand; PAM type: YTN; PAM sequence: TTA
cctccaatggtgacccaaga

SEQ ID NO: 205362 - DNA, 20 bp, Artificial Sequence
  Description of Artificial Sequence: Synthetic oligonucleotide
  Target: LAMA2; (-) strand; PAM type: YTN; PAM sequence: CTA
ttacctccaatggtgaccca

SEQ ID NO: 205363 - DNA, 20 bp, Artificial Sequence
  Description of Artificial Sequence: Synthetic oligonucleotide
  Target: LAMA2; (-) strand; PAM type: YTN; PAM sequence: CTA
tagggcgctattacctccaa

SEQ ID NO: 205364 - DNA, 20 bp, Artificial Sequence
  Description of Artificial Sequence: Synthetic oligonucleotide
  Target: LAMA2; (-) strand; PAM type: YTN; PAM sequence: CTC
tatagggcgctattacctcc

SEQ ID NO: 205365 - DNA, 20 bp, Artificial Sequence
  Description of Artificial Sequence: Synthetic oligonucleotide
  Target: LAMA2; (-) strand; PAM type: YTN; PAM sequence: TTC
ccagacacaaaactctatag

SEQ ID NO: 205366 - DNA, 20 bp, Artificial Sequence
  Description of Artificial Sequence: Synthetic oligonucleotide
  Target: LAMA2; (-) strand; PAM type: YTN; PAM sequence: CTT
cccagacacaaaactctata

SEQ ID NO: 205367 - DNA, 20 bp, Artificial Sequence
  Description of Artificial Sequence: Synthetic oligonucleotide
  Target: LAMA2; (-) strand; PAM type: YTN; PAM sequence: TTC
ttcccagacacaaaactcta

SEQ ID NO: 205368 - DNA, 20 bp, Artificial Sequence
  Description of Artificial Sequence: Synthetic oligonucleotide
  Target: LAMA2; (-) strand; PAM type: YTN; PAM sequence: CTT
cttcccagacacaaaactct

SEQ ID NO: 205369 - DNA, 20 bp, Artificial Sequence
  Description of Artificial Sequence: Synthetic oligonucleotide
  Target: LAMA2; (-) strand; PAM type: YTN; PAM sequence: CTA
caaagtccacttcttcccag

SEQ ID NO: 205370 - DNA, 20 bp, Artificial Sequence
  Description of Artificial Sequence: Synthetic oligonucleotide
  Target: LAMA2; (-) strand; PAM type: YTN; PAM sequence: CTA
actacaaagtccacttcttc

SEQ ID NO: 205371 - DNA, 20 bp, Artificial Sequence
  Description of Artificial Sequence: Synthetic oligonucleotide
  Target: LAMA2; (-) strand; PAM type: YTN; PAM sequence: TTA
atcgcctaactacaaagtcc

SEQ ID NO: 205372 - DNA, 20 bp, Artificial Sequence
  Description of Artificial Sequence: Synthetic oligonucleotide
  Target: LAMA2; (-) strand; PAM type: YTN; PAM sequence: TTT
aatcgcctaactacaaagtc

SEQ ID NO: 205373 - DNA, 20 bp, Artificial Sequence
  Description of Artificial Sequence: Synthetic oligonucleotide
  Target: LAMA2; (-) strand; PAM type: YTN; PAM sequence: CTG
gtaaatatttaatcgcctaa

SEQ ID NO: 205374 - DNA, 20 bp, Artificial Sequence
  Description of Artificial Sequence: Synthetic oligonucleotide
  Target: LAMA2; (-) strand; PAM type: YTN; PAM sequence: TTA
aggcaagctggtaaatattt

SEQ ID NO: 205375 - DNA, 20 bp, Artificial Sequence
  Description of Artificial Sequence: Synthetic oligonucleotide
  Target: LAMA2; (-) strand; PAM type: YTN; PAM sequence: CTT
aaggcaagctggtaaatatt

SEQ ID NO: 205376 - DNA, 20 bp, Artificial Sequence
  Description of Artificial Sequence: Synthetic oligonucleotide
  Target: LAMA2; (-) strand; PAM type: YTN; PAM sequence: TTG
gcttaaggcaagctggtaaa

SEQ ID NO: 205377 - DNA, 20 bp, Artificial Sequence
  Description of Artificial Sequence: Synthetic oligonucleotide
  Target: LAMA2; (-) strand; PAM type: YTN; PAM sequence: CTT
ggcttaaggcaagctggtaa

SEQ ID NO: 205378 - DNA, 20 bp, Artificial Sequence
  Description of Artificial Sequence: Synthetic oligonucleotide
  Target: LAMA2; (-) strand; PAM type: YTN; PAM sequence: TTA
acatgtacttggcttaaggc

SEQ ID NO: 205379 - DNA, 20 bp, Artificial Sequence
  Description of Artificial Sequence: Synthetic oligonucleotide
  Target: LAMA2; (-) strand; PAM type: YTN; PAM sequence: TTT
aacatgtacttggcttaagg

SEQ ID NO: 205380 - DNA, 20 bp, Artificial Sequence
  Description of Artificial Sequence: Synthetic oligonucleotide
  Target: LAMA2; (-) strand; PAM type: YTN; PAM sequence: CTT
taacatgtacttggcttaag

SEQ ID NO: 205381 - DNA, 20 bp, Artificial Sequence
  Description of Artificial Sequence: Synthetic oligonucleotide
  Target: LAMA2; (-) strand; PAM type: YTN; PAM sequence: TTA
aaaacaaaataataatacaa

SEQ ID NO: 205382 - DNA, 20 bp, Artificial Sequence
  Description of Artificial Sequence: Synthetic oligonucleotide
  Target: LAMA2; (-) strand; PAM type: YTN; PAM sequence: TTT
aaaaacaaaataataataca

SEQ ID NO: 205383 - DNA, 20 bp, Artificial Sequence
  Description of Artificial Sequence: Synthetic oligonucleotide
  Target: LAMA2; (-) strand; PAM type: YTN; PAM sequence: CTA
tttaaaaacaaaataataat

SEQ ID NO: 205384 - DNA, 20 bp, Artificial Sequence
  Description of Artificial Sequence: Synthetic oligonucleotide
  Target: LAMA2; (-) strand; PAM type: YTN; PAM sequence: TTA
aggcaagataaatatgagag

SEQ ID NO: 205385 - DNA, 20 bp, Artificial Sequence
  Description of Artificial Sequence: Synthetic oligonucleotide
  Target: LAMA2; (-) strand; PAM type: YTN; PAM sequence: CTA
attaaggcaagataaatatg

SEQ ID NO: 205386 - DNA, 20 bp, Artificial Sequence
  Description of Artificial Sequence: Synthetic oligonucleotide
  Target: LAMA2; (-) strand; PAM type: YTN; PAM sequence: CTC
cctaattaaggcaagataaa

SEQ ID NO: 205387 - DNA, 20 bp, Artificial Sequence
  Description of Artificial Sequence: Synthetic oligonucleotide
  Target: LAMA2; (-) strand; PAM type: YTN; PAM sequence: TTA
ataaacaataaactccctaa

SEQ ID NO: 205388 - DNA, 20 bp, Artificial Sequence
  Description of Artificial Sequence: Synthetic oligonucleotide
  Target: LAMA2; (-) strand; PAM type: YTN; PAM sequence: TTT
aataaacaataaactcccta

SEQ ID NO: 205389 - DNA, 20 bp, Artificial Sequence
  Description of Artificial Sequence: Synthetic oligonucleotide
  Target: LAMA2; (-) strand; PAM type: YTN; PAM sequence: TTT
taataaacaataaactccct

SEQ ID NO: 205390 - DNA, 20 bp, Artificial Sequence
  Description of Artificial Sequence: Synthetic oligonucleotide
  Target: LAMA2; (-) strand; PAM type: YTN; PAM sequence: TTT
ttaataaacaataaactccc

SEQ ID NO: 205391 - DNA, 20 bp, Artificial Sequence
  Description of Artificial Sequence: Synthetic oligonucleotide
  Target: LAMA2; (-) strand; PAM type: YTN; PAM sequence: CTT
tttaataaacaataaactcc

SEQ ID NO: 205392 - DNA, 20 bp, Artificial Sequence
  Description of Artificial Sequence: Synthetic oligonucleotide
  Target: LAMA2; (-) strand; PAM type: YTN; PAM sequence: TTA
aagctttttaataaacaata

SEQ ID NO: 205393 - DNA, 20 bp, Artificial Sequence
  Description of Artificial Sequence: Synthetic oligonucleotide
  Target: LAMA2; (-) strand; PAM type: YTN; PAM sequence: TTC
agattaaagctttttaataa

SEQ ID NO: 205394 - DNA, 20 bp, Artificial Sequence
  Description of Artificial Sequence: Synthetic oligonucleotide
  Target: LAMA2; (-) strand; PAM type: YTN; PAM sequence: TTC
aaacagcacacacacacacc

SEQ ID NO: 205395 - DNA, 20 bp, Artificial Sequence
  Description of Artificial Sequence: Synthetic oligonucleotide
  Target: LAMA2; (-) strand; PAM type: YTN; PAM sequence: TTT
caaacagcacacacacacac

SEQ ID NO: 205396 - DNA, 20 bp, Artificial Sequence
  Description of Artificial Sequence: Synthetic oligonucleotide
  Target: LAMA2; (-) strand; PAM type: YTN; PAM sequence: TTG
tttcaaacagcacacacaca

SEQ ID NO: 205397 - DNA, 20 bp, Artificial Sequence
  Description of Artificial Sequence: Synthetic oligonucleotide
  Target: LAMA2; (-) strand; PAM type: YTN; PAM sequence: TTT
gtttcaaacagcacacacac

SEQ ID NO: 205398 - DNA, 20 bp, Artificial Sequence
  Description of Artificial Sequence: Synthetic oligonucleotide
  Target: LAMA2; (-) strand; PAM type: YTN; PAM sequence: TTC
atttgtttcaaacagcacac

SEQ ID NO: 205399 - DNA, 20 bp, Artificial Sequence
  Description of Artificial Sequence: Synthetic oligonucleotide
  Target: LAMA2; (-) strand; PAM type: YTN; PAM sequence: TTA
gttcatttgtttcaaacagc

SEQ ID NO: 205400 - DNA, 20 bp, Artificial Sequence
  Description of Artificial Sequence: Synthetic oligonucleotide
  Target: LAMA2; (-) strand; PAM type: YTN; PAM sequence: TTT
agttcatttgtttcaaacag

SEQ ID NO: 205401 - DNA, 20 bp, Artificial Sequence
  Description of Artificial Sequence: Synthetic oligonucleotide
  Target: LAMA2; (-) strand; PAM type: YTN; PAM sequence: TTT
tagttcatttgtttcaaaca

SEQ ID NO: 205402 - DNA, 20 bp, Artificial Sequence
  Description of Artificial Sequence: Synthetic oligonucleotide
  Target: LAMA2; (-) strand; PAM type: YTN; PAM sequence: TTT
ttagttcatttgtttcaaac

SEQ ID NO: 205403 - DNA, 20 bp, Artificial Sequence
  Description of Artificial Sequence: Synthetic oligonucleotide
  Target: LAMA2; (-) strand; PAM type: YTN; PAM sequence: TTA
aaaacatttttagttcattt

SEQ ID NO: 205404 - DNA, 20 bp, Artificial Sequence
  Description of Artificial Sequence: Synthetic oligonucleotide
  Target: LAMA2; (-) strand; PAM type: YTN; PAM sequence: CTC
aattaaaaacatttttagtt

SEQ ID NO: 205405 - DNA, 20 bp, Artificial Sequence
  Description of Artificial Sequence: Synthetic oligonucleotide
  Target: LAMA2; (-) strand; PAM type: YTN; PAM sequence: TTG
cagctcaattaaaaacattt

SEQ ID NO: 205406 - DNA, 20 bp, Artificial Sequence
  Description of Artificial Sequence: Synthetic oligonucleotide
  Target: LAMA2; (-) strand; PAM type: YTN; PAM sequence: CTT
gcagctcaattaaaaacatt

SEQ ID NO: 205407 - DNA, 20 bp, Artificial Sequence
  Description of Artificial Sequence: Synthetic oligonucleotide
  Target: LAMA2; (-) strand; PAM type: YTN; PAM sequence: TTC
acttgcagctcaattaaaaa

SEQ ID NO: 205408 - DNA, 20 bp, Artificial Sequence
  Description of Artificial Sequence: Synthetic oligonucleotide
  Target: LAMA2; (-) strand; PAM type: YTN; PAM sequence: CTT
cacttgcagctcaattaaaa

SEQ ID NO: 205409 - DNA, 20 bp, Artificial Sequence
  Description of Artificial Sequence: Synthetic oligonucleotide
  Target: LAMA2; (-) strand; PAM type: YTN; PAM sequence: TTG
acaagtcttcacttgcagct

SEQ ID NO: 205410 - DNA, 20 bp, Artificial Sequence
  Description of Artificial Sequence: Synthetic oligonucleotide
  Target: LAMA2; (-) strand; PAM type: YTN; PAM sequence: TTA
tgtattgacaagtcttcact

SEQ ID NO: 205411 - DNA, 20 bp, Artificial Sequence
  Description of Artificial Sequence: Synthetic oligonucleotide
  Target: LAMA2; (-) strand; PAM type: YTN; PAM sequence: TTT
atgtattgacaagtcttcac

SEQ ID NO: 205412 - DNA, 20 bp, Artificial Sequence
  Description of Artificial Sequence: Synthetic oligonucleotide
  Target: LAMA2; (-) strand; PAM type: YTN; PAM sequence: CTG
tataatttatgtattgacaa

SEQ ID NO: 205413 - DNA, 20 bp, Artificial Sequence
  Description of Artificial Sequence: Synthetic oligonucleotide
  Target: LAMA2; (-) strand; PAM type: YTN; PAM sequence: TTA
tgcatatatagagatatata

SEQ ID NO: 205414 - DNA, 20 bp, Artificial Sequence
  Description of Artificial Sequence: Synthetic oligonucleotide
  Target: LAMA2; (-) strand; PAM type: YTN; PAM sequence: TTT
atgcatatatagagatatat

SEQ ID NO: 205415 - DNA, 20 bp, Artificial Sequence
  Description of Artificial Sequence: Synthetic oligonucleotide
  Target: LAMA2; (-) strand; PAM type: YTN; PAM sequence: CTT
tatgcatatatagagatata

SEQ ID NO: 205416 - DNA, 20 bp, Artificial Sequence
  Description of Artificial Sequence: Synthetic oligonucleotide
  Target: LAMA2; (-) strand; PAM type: YTN; PAM sequence: CTC
tttatgcatatatagagata

SEQ ID NO: 205417 - DNA, 20 bp, Artificial Sequence
  Description of Artificial Sequence: Synthetic oligonucleotide
  Target: LAMA2; (-) strand; PAM type: YTN; PAM sequence: TTA
aaatatcctctttatgcata

SEQ ID NO: 205418 - DNA, 20 bp, Artificial Sequence
  Description of Artificial Sequence: Synthetic oligonucleotide
  Target: LAMA2; (-) strand; PAM type: YTN; PAM sequence: CTG
attaaaatatcctctttatg

SEQ ID NO: 205419 - DNA, 20 bp, Artificial Sequence
  Description of Artificial Sequence: Synthetic oligonucleotide
  Target: LAMA2; (-) strand; PAM type: YTN; PAM sequence: TTA
aatacagggacatgtgctga

SEQ ID NO: 205420 - DNA, 20 bp, Artificial Sequence
  Description of Artificial Sequence: Synthetic oligonucleotide
  Target: LAMA2; (-) strand; PAM type: YTN; PAM sequence: TTT
aaatacagggacatgtgctg

SEQ ID NO: 205421 - DNA, 20 bp, Artificial Sequence
  Description of Artificial Sequence: Synthetic oligonucleotide
  Target: LAMA2; (-) strand; PAM type: YTN; PAM sequence: TTT
taaatacagggacatgtgct

SEQ ID NO: 205422 - DNA, 20 bp, Artificial Sequence
  Description of Artificial Sequence: Synthetic oligonucleotide
  Target: LAMA2; (-) strand; PAM type: YTN; PAM sequence: CTT
ttaaatacagggacatgtgc

SEQ ID NO: 205423 - DNA, 20 bp, Artificial Sequence
  Description of Artificial Sequence: Synthetic oligonucleotide
  Target: LAMA2; (-) strand; PAM type: YTN; PAM sequence: TTA
acttttaaatacagggacat

SEQ ID NO: 205424 - DNA, 20 bp, Artificial Sequence
  Description of Artificial Sequence: Synthetic oligonucleotide
  Target: LAMA2; (-) strand; PAM type: YTN; PAM sequence: TTT
aacttttaaatacagggaca

SEQ ID NO: 205425 - DNA, 20 bp, Artificial Sequence
  Description of Artificial Sequence: Synthetic oligonucleotide
  Target: LAMA2; (-) strand; PAM type: YTN; PAM sequence: TTT
taacttttaaatacagggac

SEQ ID NO: 205426 - DNA, 20 bp, Artificial Sequence
  Description of Artificial Sequence: Synthetic oligonucleotide
  Target: LAMA2; (-) strand; PAM type: YTN; PAM sequence: CTT
ttaacttttaaatacaggga

SEQ ID NO: 205427 - DNA, 20 bp, Artificial Sequence
  Description of Artificial Sequence: Synthetic oligonucleotide
  Target: LAMA2; (-) strand; PAM type: YTN; PAM sequence: TTC
ttttaacttttaaatacagg

SEQ ID NO: 205428 - DNA, 20 bp, Artificial Sequence
  Description of Artificial Sequence: Synthetic oligonucleotide
  Target: LAMA2; (-) strand; PAM type: YTN; PAM sequence: CTG
tagagcggttcttttaactt

SEQ ID NO: 205429 - DNA, 20 bp, Artificial Sequence
  Description of Artificial Sequence: Synthetic oligonucleotide
  Target: LAMA2; (-) strand; PAM type: YTN; PAM sequence: CTC
tgtagagcggttcttttaac

SEQ ID NO: 205430 - DNA, 20 bp, Artificial Sequence
  Description of Artificial Sequence: Synthetic oligonucleotide
  Target: LAMA2; (-) strand; PAM type: YTN; PAM sequence: TTA
gctctgtagagcggttcttt

SEQ ID NO: 205431 - DNA, 20 bp, Artificial Sequence
  Description of Artificial Sequence: Synthetic oligonucleotide
  Target: LAMA2; (-) strand; PAM type: YTN; PAM sequence: CTT
agctctgtagagcggttctt

SEQ ID NO: 205432 - DNA, 20 bp, Artificial Sequence
  Description of Artificial Sequence: Synthetic oligonucleotide
  Target: LAMA2; (-) strand; PAM type: YTN; PAM sequence: TTC
ttagctctgtagagcggttc

SEQ ID NO: 205433 - DNA, 20 bp, Artificial Sequence
  Description of Artificial Sequence: Synthetic oligonucleotide
  Target: LAMA2; (-) strand; PAM type: YTN; PAM sequence: CTG
tattcttagctctgtagagc

SEQ ID NO: 205434 - DNA, 20 bp, Artificial Sequence
  Description of Artificial Sequence: Synthetic oligonucleotide
  Target: LAMA2; (-) strand; PAM type: YTN; PAM sequence: TTA
aaatacctgtattcttagct

SEQ ID NO: 205435 - DNA, 20 bp, Artificial Sequence
  Description of Artificial Sequence: Synthetic oligonucleotide
  Target: LAMA2; (-) strand; PAM type: YTN; PAM sequence: TTA
aaaaattaaaatacctgtat

SEQ ID NO: 205436 - DNA, 20 bp, Artificial Sequence
  Description of Artificial Sequence: Synthetic oligonucleotide
  Target: LAMA2; (-) strand; PAM type: YTN; PAM sequence: TTT
aaaaaattaaaatacctgta

SEQ ID NO: 205437 - DNA, 20 bp, Artificial Sequence
  Description of Artificial Sequence: Synthetic oligonucleotide
  Target: LAMA2; (-) strand; PAM type: YTN; PAM sequence: TTA
taatcatttaaaaaattaaa

SEQ ID NO: 205438 - DNA, 20 bp, Artificial Sequence
  Description of Artificial Sequence: Synthetic oligonucleotide
  Target: LAMA2; (-) strand; PAM type: YTN; PAM sequence: TTC
ccccgttataatcatttaaa

SEQ ID NO: 205439 - DNA, 20 bp, Artificial Sequence
  Description of Artificial Sequence: Synthetic oligonucleotide
  Target: LAMA2; (-) strand; PAM type: YTN; PAM sequence: TTT
cccccgttataatcatttaa

SEQ ID NO: 205440 - DNA, 20 bp, Artificial Sequence
  Description of Artificial Sequence: Synthetic oligonucleotide
  Target: LAMA2; (-) strand; PAM type: YTN; PAM sequence: CTA
aagaaacaacagtggaattt

SEQ ID NO: 205441 - DNA, 20 bp, Artificial Sequence
  Description of Artificial Sequence: Synthetic oligonucleotide
  Target: LAMA2; (-) strand; PAM type: YTN; PAM sequence: CTC
atcaaacactaaagaaacaa

SEQ ID NO: 205442 - DNA, 20 bp, Artificial Sequence
  Description of Artificial Sequence: Synthetic oligonucleotide
  Target: LAMA2; (-) strand; PAM type: YTN; PAM sequence: TTA
caatccctcatcaaacacta

SEQ ID NO: 205443 - DNA, 20 bp, Artificial Sequence
  Description of Artificial Sequence: Synthetic oligonucleotide
  Target: LAMA2; (-) strand; PAM type: YTN; PAM sequence: TTA
gattacaatccctcatcaaa

SEQ ID NO: 205444 - DNA, 20 bp, Artificial Sequence
  Description of Artificial Sequence: Synthetic oligonucleotide
  Target: LAMA2; (-) strand; PAM type: YTN; PAM sequence: CTG
attagattacaatccctcat

SEQ ID NO: 205445 - DNA, 20 bp, Artificial Sequence
  Description of Artificial Sequence: Synthetic oligonucleotide
  Target: LAMA2; (-) strand; PAM type: YTN; PAM sequence: TTA
aactgattagattacaatcc

SEQ ID NO: 205446 - DNA, 20 bp, Artificial Sequence
  Description of Artificial Sequence: Synthetic oligonucleotide
  Target: LAMA2; (-) strand; PAM type: YTN; PAM sequence: TTT
aaactgattagattacaatc

SEQ ID NO: 205447 - DNA, 20 bp, Artificial Sequence
  Description of Artificial Sequence: Synthetic oligonucleotide
  Target: LAMA2; (-) strand; PAM type: YTN; PAM sequence: TTA
tagtcgtttaaactgattag

SEQ ID NO: 205448 - DNA, 20 bp, Artificial Sequence
  Description of Artificial Sequence: Synthetic oligonucleotide
  Target: LAMA2; (-) strand; PAM type: YTN; PAM sequence: TTT
atagtcgtttaaactgatta

SEQ ID NO: 205449 - DNA, 20 bp, Artificial Sequence
  Description of Artificial Sequence: Synthetic oligonucleotide
  Target: LAMA2; (-) strand; PAM type: YTN; PAM sequence: CTG
tgtttatagtcgtttaaact

SEQ ID NO: 205450 - DNA, 20 bp, Artificial Sequence
  Description of Artificial Sequence: Synthetic oligonucleotide
  Target: LAMA2; (-) strand; PAM type: YTN; PAM sequence: TTA
aatgatcatcgctgtgttta

SEQ ID NO: 205451 - DNA, 20 bp, Artificial Sequence
  Description of Artificial Sequence: Synthetic oligonucleotide
  Target: LAMA2; (-) strand; PAM type: YTN; PAM sequence: CTT
aaatgatcatcgctgtgttt

SEQ ID NO: 205452 - DNA, 20 bp, Artificial Sequence
  Description of Artificial Sequence: Synthetic oligonucleotide
  Target: LAMA2; (-) strand; PAM type: YTN; PAM sequence: TTC
gaatcaaaatccaacttaaa

SEQ ID NO: 205453 - DNA, 20 bp, Artificial Sequence
  Description of Artificial Sequence: Synthetic oligonucleotide
  Target: LAMA2; (-) strand; PAM type: YTN; PAM sequence: TTT
cgaatcaaaatccaacttaa

SEQ ID NO: 205454 - DNA, 20 bp, Artificial Sequence
  Description of Artificial Sequence: Synthetic oligonucleotide
  Target: LAMA2; (-) strand; PAM type: YTN; PAM sequence: TTT
tcgaatcaaaatccaactta

SEQ ID NO: 205455 - DNA, 20 bp, Artificial Sequence
  Description of Artificial Sequence: Synthetic oligonucleotide
  Target: LAMA2; (-) strand; PAM type: YTN; PAM sequence: CTT
ttcgaatcaaaatccaactt

SEQ ID NO: 205456 - DNA, 20 bp, Artificial Sequence
  Description of Artificial Sequence: Synthetic oligonucleotide
  Target: LAMA2; (-) strand; PAM type: YTN; PAM sequence: TTA
cttttcgaatcaaaatccaa

SEQ ID NO: 205457 - DNA, 20 bp, Artificial Sequence
  Description of Artificial Sequence: Synthetic oligonucleotide
  Target: LAMA2; (-) strand; PAM type: YTN; PAM sequence: CTT
acttttcgaatcaaaatcca

SEQ ID NO: 205458 - DNA, 20 bp, Artificial Sequence
  Description of Artificial Sequence: Synthetic oligonucleotide
  Target: LAMA2; (-) strand; PAM type: YTN; PAM sequence: TTC
caagaacttacttttcgaat

SEQ ID NO: 205459 - DNA, 20 bp, Artificial Sequence
  Description of Artificial Sequence: Synthetic oligonucleotide
  Target: LAMA2; (-) strand; PAM type: YTN; PAM sequence: CTA
aattccaagaacttactttt

SEQ ID NO: 205460 - DNA, 20 bp, Artificial Sequence
  Description of Artificial Sequence: Synthetic oligonucleotide
  Target: LAMA2; (-) strand; PAM type: YTN; PAM sequence: TTG
tgcaataccctaaattccaa

SEQ ID NO: 205461 - DNA, 20 bp, Artificial Sequence
  Description of Artificial Sequence: Synthetic oligonucleotide
  Target: LAMA2; (-) strand; PAM type: YTN; PAM sequence: CTG
tatgggacagattgtgcaat

SEQ ID NO: 205462 - DNA, 20 bp, Artificial Sequence
  Description of Artificial Sequence: Synthetic oligonucleotide
  Target: LAMA2; (-) strand; PAM type: YTN; PAM sequence: TTC
ccctgtatgggacagattgt

SEQ ID NO: 205463 - DNA, 20 bp, Artificial Sequence
  Description of Artificial Sequence: Synthetic oligonucleotide
  Target: LAMA2; (-) strand; PAM type: YTN; PAM sequence: TTT
cccctgtatgggacagattg

SEQ ID NO: 205464 - DNA, 20 bp, Artificial Sequence
  Description of Artificial Sequence: Synthetic oligonucleotide
  Target: LAMA2; (-) strand; PAM type: YTN; PAM sequence: TTT
tcccctgtatgggacagatt

SEQ ID NO: 205465 - DNA, 20 bp, Artificial Sequence
  Description of Artificial Sequence: Synthetic oligonucleotide
  Target: LAMA2; (-) strand; PAM type: YTN; PAM sequence: TTT
ttcccctgtatgggacagat

SEQ ID NO: 205466 - DNA, 20 bp, Artificial Sequence
  Description of Artificial Sequence: Synthetic oligonucleotide
  Target: LAMA2; (-) strand; PAM type: YTN; PAM sequence: TTT
tttcccctgtatgggacaga

SEQ ID NO: 205467 - DNA, 20 bp, Artificial Sequence
  Description of Artificial Sequence: Synthetic oligonucleotide
  Target: LAMA2; (-) strand; PAM type: YTN; PAM sequence: TTT
ttttcccctgtatgggacag

SEQ ID NO: 205468 - DNA, 20 bp, Artificial Sequence
  Description of Artificial Sequence: Synthetic oligonucleotide
  Target: LAMA2; (-) strand; PAM type: YTN; PAM sequence: TTT
tttttcccctgtatgggaca

SEQ ID NO: 205469 - DNA, 20 bp, Artificial Sequence
  Description of Artificial Sequence: Synthetic oligonucleotide
  Target: LAMA2; (-) strand; PAM type: YTN; PAM sequence: TTT
ttttttcccctgtatgggac

SEQ ID NO: 205470 - DNA, 20 bp, Artificial Sequence
  Description of Artificial Sequence: Synthetic oligonucleotide
  Target: LAMA2; (-) strand; PAM type: YTN; PAM sequence: TTA
gtaaaaatcacaagtaggtg

SEQ ID NO: 205471 - DNA, 20 bp, Artificial Sequence
  Description of Artificial Sequence: Synthetic oligonucleotide
  Target: LAMA2; (-) strand; PAM type: YTN; PAM sequence: CTC
acggaaaaaaattagtaaaa

SEQ ID NO: 205472 - DNA, 20 bp, Artificial Sequence
  Description of Artificial Sequence: Synthetic oligonucleotide
  Target: LAMA2; (-) strand; PAM type: YTN; PAM sequence: TTC
tcacggaaaaaaattagtaa

SEQ ID NO: 205473 - DNA, 20 bp, Artificial Sequence
  Description of Artificial Sequence: Synthetic oligonucleotide
  Target: LAMA2; (-) strand; PAM type: YTN; PAM sequence: CTA
ttctcacggaaaaaaattag

SEQ ID NO: 205474 - DNA, 20 bp, Artificial Sequence
  Description of Artificial Sequence: Synthetic oligonucleotide
  Target: LAMA2; (-) strand; PAM type: YTN; PAM sequence: TTC
tattctcacggaaaaaaatt

SEQ ID NO: 205475 - DNA, 20 bp, Artificial Sequence
  Description of Artificial Sequence: Synthetic oligonucleotide
  Target: LAMA2; (-) strand; PAM type: YTN; PAM sequence: TTC
ccagcaggattctattctca

SEQ ID NO: 205476 - DNA, 20 bp, Artificial Sequence
  Description of Artificial Sequence: Synthetic oligonucleotide
  Target: LAMA2; (-) strand; PAM type: YTN; PAM sequence: CTT
cccagcaggattctattctc

SEQ ID NO: 205477 - DNA, 20 bp, Artificial Sequence
  Description of Artificial Sequence: Synthetic oligonucleotide
  Target: LAMA2; (-) strand; PAM type: YTN; PAM sequence: CTA
agagaataaaataagcttcc

SEQ ID NO: 205478 - DNA, 20 bp, Artificial Sequence
  Description of Artificial Sequence: Synthetic oligonucleotide
  Target: LAMA2; (-) strand; PAM type: YTN; PAM sequence: CTC
cggagggggaaaaaaaggag

SEQ ID NO: 205479 - DNA, 20 bp, Artificial Sequence
  Description of Artificial Sequence: Synthetic oligonucleotide
  Target: LAMA2; (-) strand; PAM type: YTN; PAM sequence: TTC
tccggagggggaaaaaaagg

SEQ ID NO: 205480 - DNA, 20 bp, Artificial Sequence
  Description of Artificial Sequence: Synthetic oligonucleotide
  Target: LAMA2; (-) strand; PAM type: YTN; PAM sequence: TTG
taaaccagtcatcgttctcc

SEQ ID NO: 205481 - DNA, 20 bp, Artificial Sequence
  Description of Artificial Sequence: Synthetic oligonucleotide
  Target: LAMA2; (-) strand; PAM type: YTN; PAM sequence: TTT
gtaaaccagtcatcgttctc

SEQ ID NO: 205482 - DNA, 20 bp, Artificial Sequence
  Description of Artificial Sequence: Synthetic oligonucleotide
  Target: LAMA2; (-) strand; PAM type: YTN; PAM sequence: CTA
tttgtaaaccagtcatcgtt

SEQ ID NO: 205483 - DNA, 20 bp, Artificial Sequence
  Description of Artificial Sequence: Synthetic oligonucleotide
  Target: LAMA2; (-) strand; PAM type: YTN; PAM sequence: TTG
ctatttgtaaaccagtcatc

SEQ ID NO: 205484 - DNA, 20 bp, Artificial Sequence
  Description of Artificial Sequence: Synthetic oligonucleotide
  Target: LAMA2; (-) strand; PAM type: YTN; PAM sequence: TTG
atataaattgctatttgtaa

SEQ ID NO: 205485 - DNA, 20 bp, Artificial Sequence
  Description of Artificial Sequence: Synthetic oligonucleotide
  Target: LAMA2; (-) strand; PAM type: YTN; PAM sequence: CTG
tgtcagttgatataaattgc

SEQ ID NO: 205486 - DNA, 20 bp, Artificial Sequence
  Description of Artificial Sequence: Synthetic oligonucleotide
  Target: LAMA2; (-) strand; PAM type: YTN; PAM sequence: CTG
agatcaacagtataaggaaa

SEQ ID NO: 205487 - DNA, 20 bp, Artificial Sequence
  Description of Artificial Sequence: Synthetic oligonucleotide
  Target: LAMA2; (-) strand; PAM type: YTN; PAM sequence: TTC
tgagatcaacagtataagga

SEQ ID NO: 205488 - DNA, 20 bp, Artificial Sequence
  Description of Artificial Sequence: Synthetic oligonucleotide
  Target: LAMA2; (-) strand; PAM type: YTN; PAM sequence: CTG
cagaacagttctgagatcaa

SEQ ID NO: 205489 - DNA, 20 bp, Artificial Sequence
  Description of Artificial Sequence: Synthetic oligonucleotide
  Target: LAMA2; (-) strand; PAM type: YTN; PAM sequence: TTC
aggactgcagaacagttctg

SEQ ID NO: 205490 - DNA, 20 bp, Artificial Sequence
  Description of Artificial Sequence: Synthetic oligonucleotide
  Target: LAMA2; (-) strand; PAM type: YTN; PAM sequence: CTT
caggactgcagaacagttct

SEQ ID NO: 205491 - DNA, 20 bp, Artificial Sequence
  Description of Artificial Sequence: Synthetic oligonucleotide
  Target: LAMA2; (-) strand; PAM type: YTN; PAM sequence: TTC
atacttcaggactgcagaac

SEQ ID NO: 205492 - DNA, 20 bp, Artificial Sequence
  Description of Artificial Sequence: Synthetic oligonucleotide
  Target: LAMA2; (-) strand; PAM type: YTN; PAM sequence: TTT
catacttcaggactgcagaa

SEQ ID NO: 205493 - DNA, 20 bp, Artificial Sequence
  Description of Artificial Sequence: Synthetic oligonucleotide
  Target: LAMA2; (-) strand; PAM type: YTN; PAM sequence: CTG
taccaaaaaatggcaatagt

SEQ ID NO: 205494 - DNA, 20 bp, Artificial Sequence
  Description of Artificial Sequence: Synthetic oligonucleotide
  Target: LAMA2; (-) strand; PAM type: YTN; PAM sequence: CTG
gctgtaccaaaaaatggcaa

SEQ ID NO: 205495 - DNA, 20 bp, Artificial Sequence
  Description of Artificial Sequence: Synthetic oligonucleotide
  Target: LAMA2; (-) strand; PAM type: YTN; PAM sequence: TTA
gagcactggctgtaccaaaa

SEQ ID NO: 205496 - DNA, 20 bp, Artificial Sequence
  Description of Artificial Sequence: Synthetic oligonucleotide
  Target: LAMA2; (-) strand; PAM type: YTN; PAM sequence: TTT
agagcactggctgtaccaaa

SEQ ID NO: 205497 - DNA, 20 bp, Artificial Sequence
  Description of Artificial Sequence: Synthetic oligonucleotide
  Target: LAMA2; (-) strand; PAM type: YTN; PAM sequence: TTT
tagagcactggctgtaccaa

SEQ ID NO: 205498 - DNA, 20 bp, Artificial Sequence
  Description of Artificial Sequence: Synthetic oligonucleotide
  Target: LAMA2; (-) strand; PAM type: YTN; PAM sequence: TTT
ttagagcactggctgtacca

SEQ ID NO: 205499 - DNA, 20 bp, Artificial Sequence
  Description of Artificial Sequence: Synthetic oligonucleotide
  Target: LAMA2; (-) strand; PAM type: YTN; PAM sequence: TTT
tttagagcactggctgtacc

SEQ ID NO: 205500 - DNA, 20 bp, Artificial Sequence
  Description of Artificial Sequence: Synthetic oligonucleotide
  Target: LAMA2; (-) strand; PAM type: YTN; PAM sequence: TTA
cattttttagagcactggct

SEQ ID NO: 205501 - DNA, 20 bp, Artificial Sequence
  Description of Artificial Sequence: Synthetic oligonucleotide
  Target: LAMA2; (-) strand; PAM type: YTN; PAM sequence: TTT
acattttttagagcactggc

SEQ ID NO: 205502 - DNA, 20 bp, Artificial Sequence
  Description of Artificial Sequence: Synthetic oligonucleotide
  Target: LAMA2; (-) strand; PAM type: YTN; PAM sequence: TTC
atccatttacattttttaga

SEQ ID NO: 205503 - DNA, 20 bp, Artificial Sequence
  Description of Artificial Sequence: Synthetic oligonucleotide
  Target: LAMA2; (-) strand; PAM type: YTN; PAM sequence: TTT
catccatttacattttttag

SEQ ID NO: 205504 - DNA, 20 bp, Artificial Sequence
  Description of Artificial Sequence: Synthetic oligonucleotide
  Target: LAMA2; (-) strand; PAM type: YTN; PAM sequence: CTT
tcatccatttacatttttta

SEQ ID NO: 205505 - DNA, 20 bp, Artificial Sequence
  Description of Artificial Sequence: Synthetic oligonucleotide
  Target: LAMA2; (-) strand; PAM type: YTN; PAM sequence: TTG
aatcgctttcatccatttac

SEQ ID NO: 205506 - DNA, 20 bp, Artificial Sequence
  Description of Artificial Sequence: Synthetic oligonucleotide
  Target: LAMA2; (-) strand; PAM type: YTN; PAM sequence: TTC
cataatagattgaatcgctt

SEQ ID NO: 205507 - DNA, 20 bp, Artificial Sequence
  Description of Artificial Sequence: Synthetic oligonucleotide
  Target: LAMA2; (-) strand; PAM type: YTN; PAM sequence: CTT
ccataatagattgaatcgct

SEQ ID NO: 205508 - DNA, 20 bp, Artificial Sequence
  Description of Artificial Sequence: Synthetic oligonucleotide
  Target: LAMA2; (-) strand; PAM type: YTN; PAM sequence: CTG
cttccataatagattgaatc

SEQ ID NO: 205509 - DNA, 20 bp, Artificial Sequence
  Description of Artificial Sequence: Synthetic oligonucleotide
  Target: LAMA2; (-) strand; PAM type: YTN; PAM sequence: TTC
tgcttccataatagattgaa

SEQ ID NO: 205510 - DNA, 20 bp, Artificial Sequence
  Description of Artificial Sequence: Synthetic oligonucleotide
  Target: LAMA2; (-) strand; PAM type: YTN; PAM sequence: TTT
ctgcttccataatagattga

SEQ ID NO: 205511 - DNA, 20 bp, Artificial Sequence
  Description of Artificial Sequence: Synthetic oligonucleotide
  Target: LAMA2; (-) strand; PAM type: YTN; PAM sequence: TTG
taaagcaaataggaagatgt

SEQ ID NO: 205512 - DNA, 20 bp, Artificial Sequence
  Description of Artificial Sequence: Synthetic oligonucleotide
  Target: LAMA2; (-) strand; PAM type: YTN; PAM sequence: TTT
gtaaagcaaataggaagatg

SEQ ID NO: 205513 - DNA, 20 bp, Artificial Sequence
  Description of Artificial Sequence: Synthetic oligonucleotide
  Target: LAMA2; (-) strand; PAM type: YTN; PAM sequence: CTC
ggaaaaatttgtaaagcaaa

SEQ ID NO: 205514 - DNA, 20 bp, Artificial Sequence
  Description of Artificial Sequence: Synthetic oligonucleotide
  Target: LAMA2; (-) strand; PAM type: YTN; PAM sequence: TTA
ctcggaaaaatttgtaaagc

SEQ ID NO: 205515 - DNA, 20 bp, Artificial Sequence
  Description of Artificial Sequence: Synthetic oligonucleotide
  Target: LAMA2; (-) strand; PAM type: YTN; PAM sequence: TTT
actcggaaaaatttgtaaag

SEQ ID NO: 205516 - DNA, 20 bp, Artificial Sequence
  Description of Artificial Sequence: Synthetic oligonucleotide
  Target: LAMA2; (-) strand; PAM type: YTN; PAM sequence: TTT
tactcggaaaaatttgtaaa

SEQ ID NO: 205517 - DNA, 20 bp, Artificial Sequence
  Description of Artificial Sequence: Synthetic oligonucleotide
  Target: LAMA2; (-) strand; PAM type: YTN; PAM sequence: CTG
cattttactcggaaaaattt

SEQ ID NO: 205518 - DNA, 20 bp, Artificial Sequence
  Description of Artificial Sequence: Synthetic oligonucleotide
  Target: LAMA2; (-) strand; PAM type: YTN; PAM sequence: CTG
actgcattttactcggaaaa

SEQ ID NO: 205519 - DNA, 20 bp, Artificial Sequence
  Description of Artificial Sequence: Synthetic oligonucleotide
  Target: LAMA2; (-) strand; PAM type: YTN; PAM sequence: TTA
caaacctgactgcattttac

SEQ ID NO: 205520 - DNA, 20 bp, Artificial Sequence
  Description of Artificial Sequence: Synthetic oligonucleotide
  Target: LAMA2; (-) strand; PAM type: YTN; PAM sequence: TTA
tgcaatgttacaaacctgac

SEQ ID NO: 205521 - DNA, 20 bp, Artificial Sequence
  Description of Artificial Sequence: Synthetic oligonucleotide
  Target: LAMA2; (-) strand; PAM type: YTN; PAM sequence: TTT
atgcaatgttacaaacctga

SEQ ID NO: 205522 - DNA, 20 bp, Artificial Sequence
  Description of Artificial Sequence: Synthetic oligonucleotide
  Target: LAMA2; (-) strand; PAM type: YTN; PAM sequence: TTT
tatgcaatgttacaaacctg

SEQ ID NO: 205523 - DNA, 20 bp, Artificial Sequence
  Description of Artificial Sequence: Synthetic oligonucleotide
  Target: LAMA2; (-) strand; PAM type: YTN; PAM sequence: TTT
ttatgcaatgttacaaacct

SEQ ID NO: 205524 - DNA, 20 bp, Artificial Sequence
  Description of Artificial Sequence: Synthetic oligonucleotide
  Target: LAMA2; (-) strand; PAM type: YTN; PAM sequence: CTA
aaacaagtttttatgcaatg

SEQ ID NO: 205525 - DNA, 20 bp, Artificial Sequence
  Description of Artificial Sequence: Synthetic oligonucleotide
  Target: LAMA2; (-) strand; PAM type: YTN; PAM sequence: TTC
taaaacaagtttttatgcaa

SEQ ID NO: 205526 - DNA, 20 bp, Artificial Sequence
  Description of Artificial Sequence: Synthetic oligonucleotide
  Target: LAMA2; (-) strand; PAM type: YTN; PAM sequence: TTA
gtgtaaagaattctaaaaca

SEQ ID NO: 205527 - DNA, 20 bp, Artificial Sequence
  Description of Artificial Sequence: Synthetic oligonucleotide
  Target: LAMA2; (-) strand; PAM type: YTN; PAM sequence: TTT
agtgtaaagaattctaaaac

SEQ ID NO: 205528 - DNA, 20 bp, Artificial Sequence
  Description of Artificial Sequence: Synthetic oligonucleotide
  Target: LAMA2; (-) strand; PAM type: YTN; PAM sequence: TTA
atttagtgtaaagaattcta

SEQ ID NO: 205529 - DNA, 20 bp, Artificial Sequence
  Description of Artificial Sequence: Synthetic oligonucleotide
  Target: LAMA2; (-) strand; PAM type: YTN; PAM sequence: TTT
aatttagtgtaaagaattct

SEQ ID NO: 205530 - DNA, 20 bp, Artificial Sequence
  Description of Artificial Sequence: Synthetic oligonucleotide
  Target: LAMA2; (-) strand; PAM type: YTN; PAM sequence: CTT
taatttagtgtaaagaattc

SEQ ID NO: 205531 - DNA, 20 bp, Artificial Sequence
  Description of Artificial Sequence: Synthetic oligonucleotide
  Target: LAMA2; (-) strand; PAM type: YTN; PAM sequence: TTA
tcatctttaatttagtgtaa

SEQ ID NO: 205532 - DNA, 20 bp, Artificial Sequence
  Description of Artificial Sequence: Synthetic oligonucleotide
  Target: LAMA2; (-) strand; PAM type: YTN; PAM sequence: TTT
atcatctttaatttagtgta

SEQ ID NO: 205533 - DNA, 20 bp, Artificial Sequence
  Description of Artificial Sequence: Synthetic oligonucleotide
  Target: LAMA2; (-) strand; PAM type: YTN; PAM sequence: CTT
tatcatctttaatttagtgt

SEQ ID NO: 205534 - DNA, 20 bp, Artificial Sequence
  Description of Artificial Sequence: Synthetic oligonucleotide
  Target: LAMA2; (-) strand; PAM type: YTN; PAM sequence: TTG
ctttatcatctttaatttag

SEQ ID NO: 205535 - DNA, 20 bp, Artificial Sequence
  Description of Artificial Sequence: Synthetic oligonucleotide
  Target: LAMA2; (-) strand; PAM type: YTN; PAM sequence: TTA
gtatgaaaagcagattgctt

SEQ ID NO: 205536 - DNA, 20 bp, Artificial Sequence
  Description of Artificial Sequence: Synthetic oligonucleotide
  Target: LAMA2; (-) strand; PAM type: YTN; PAM sequence: TTT
agtatgaaaagcagattgct

SEQ ID NO: 205537 - DNA, 20 bp, Artificial Sequence
  Description of Artificial Sequence: Synthetic oligonucleotide
  Target: LAMA2; (-) strand; PAM type: YTN; PAM sequence: CTG
tttagtatgaaaagcagatt

SEQ ID NO: 205538 - DNA, 20 bp, Artificial Sequence
  Description of Artificial Sequence: Synthetic oligonucleotide
  Target: LAMA2; (-) strand; PAM type: YTN; PAM sequence: TTC
actgtttagtatgaaaagca

SEQ ID NO: 205539 - DNA, 20 bp, Artificial Sequence
  Description of Artificial Sequence: Synthetic oligonucleotide
  Target: LAMA2; (-) strand; PAM type: YTN; PAM sequence: CTT
cactgtttagtatgaaaagc

SEQ ID NO: 205540 - DNA, 20 bp, Artificial Sequence
  Description of Artificial Sequence: Synthetic oligonucleotide
  Target: LAMA2; (-) strand; PAM type: YTN; PAM sequence: TTC
acttcactgtttagtatgaa

SEQ ID NO: 205541 - DNA, 20 bp, Artificial Sequence
  Description of Artificial Sequence: Synthetic oligonucleotide
  Target: LAMA2; (-) strand; PAM type: YTN; PAM sequence: TTT
cacttcactgtttagtatga

SEQ ID NO: 205542 - DNA, 20 bp, Artificial Sequence
  Description of Artificial Sequence: Synthetic oligonucleotide
  Target: LAMA2; (-) strand; PAM type: YTN; PAM sequence: TTT
tcacttcactgtttagtatg

SEQ ID NO: 205543 - DNA, 20 bp, Artificial Sequence
  Description of Artificial Sequence: Synthetic oligonucleotide
  Target: LAMA2; (-) strand; PAM type: YTN; PAM sequence: CTT
ttcacttcactgtttagtat

SEQ ID NO: 205544 - DNA, 20 bp, Artificial Sequence
  Description of Artificial Sequence: Synthetic oligonucleotide
  Target: LAMA2; (-) strand; PAM type: YTN; PAM sequence: TTA
aaataatgcttttcacttca

SEQ ID NO: 205545 - DNA, 20 bp, Artificial Sequence
  Description of Artificial Sequence: Synthetic oligonucleotide
  Target: LAMA2; (-) strand; PAM type: YTN; PAM sequence: TTT
aaaataatgcttttcacttc

SEQ ID NO: 205546 - DNA, 20 bp, Artificial Sequence
  Description of Artificial Sequence: Synthetic oligonucleotide
  Target: LAMA2; (-) strand; PAM type: YTN; PAM sequence: CTT
taaaataatgcttttcactt

SEQ ID NO: 205547 - DNA, 20 bp, Artificial Sequence
  Description of Artificial Sequence: Synthetic oligonucleotide
  Target: LAMA2; (-) strand; PAM type: YTN; PAM sequence: TTC
tttaaaataatgcttttcac

SEQ ID NO: 205548 - DNA, 20 bp, Artificial Sequence
  Description of Artificial Sequence: Synthetic oligonucleotide
  Target: LAMA2; (-) strand; PAM type: YTN; PAM sequence: TTT
ctttaaaataatgcttttca

SEQ ID NO: 205549 - DNA, 20 bp, Artificial Sequence
  Description of Artificial Sequence: Synthetic oligonucleotide
  Target: LAMA2; (-) strand; PAM type: YTN; PAM sequence: CTA
acaaaacagaaatatttctt

SEQ ID NO: 205550 - DNA, 20 bp, Artificial Sequence
  Description of Artificial Sequence: Synthetic oligonucleotide
  Target: LAMA2; (-) strand; PAM type: YTN; PAM sequence: TTC
gtacactaacaaaacagaaa

SEQ ID NO: 205551 - DNA, 20 bp, Artificial Sequence
  Description of Artificial Sequence: Synthetic oligonucleotide
  Target: LAMA2; (-) strand; PAM type: YTN; PAM sequence: TTT
cgtacactaacaaaacagaa

SEQ ID NO: 205552 - DNA, 20 bp, Artificial Sequence
  Description of Artificial Sequence: Synthetic oligonucleotide
  Target: LAMA2; (-) strand; PAM type: YTN; PAM sequence: TTA
cagaatttcgtacactaaca

SEQ ID NO: 205553 - DNA, 20 bp, Artificial Sequence
  Description of Artificial Sequence: Synthetic oligonucleotide
  Target: LAMA2; (-) strand; PAM type: YTN; PAM sequence: CTA
ttacagaatttcgtacacta

SEQ ID NO: 205554 - DNA, 20 bp, Artificial Sequence
  Description of Artificial Sequence: Synthetic oligonucleotide
  Target: LAMA2; (-) strand; PAM type: YTN; PAM sequence: TTA
gccactattacagaatttcg

SEQ ID NO: 205555 - DNA, 20 bp, Artificial Sequence
  Description of Artificial Sequence: Synthetic oligonucleotide
  Target: LAMA2; (-) strand; PAM type: YTN; PAM sequence: CTA
aagaagttagccactattac

SEQ ID NO: 205556 - DNA, 20 bp, Artificial Sequence
  Description of Artificial Sequence: Synthetic oligonucleotide
  Target: LAMA2; (-) strand; PAM type: YTN; PAM sequence: TTC
ctaaagaagttagccactat

SEQ ID NO: 205557 - DNA, 20 bp, Artificial Sequence
  Description of Artificial Sequence: Synthetic oligonucleotide
  Target: LAMA2; (-) strand; PAM type: YTN; PAM sequence: CTA
aaaaggttcctaaagaagtt

SEQ ID NO: 205558 - DNA, 20 bp, Artificial Sequence
  Description of Artificial Sequence: Synthetic oligonucleotide
  Target: LAMA2; (-) strand; PAM type: YTN; PAM sequence: TTC
acctaaaaaggttcctaaag

SEQ ID NO: 205559 - DNA, 20 bp, Artificial Sequence
  Description of Artificial Sequence: Synthetic oligonucleotide
  Target: LAMA2; (-) strand; PAM type: YTN; PAM sequence: TTT
cacctaaaaaggttcctaaa

SEQ ID NO: 205560 - DNA, 20 bp, Artificial Sequence
  Description of Artificial Sequence: Synthetic oligonucleotide
  Target: LAMA2; (-) strand; PAM type: YTN; PAM sequence: TTC
atagtcaatcataagtttca

SEQ ID NO: 205561 - DNA, 20 bp, Artificial Sequence
  Description of Artificial Sequence: Synthetic oligonucleotide
  Target: LAMA2; (-) strand; PAM type: YTN; PAM sequence: TTT
catagtcaatcataagtttc

SEQ ID NO: 205562 - DNA, 20 bp, Artificial Sequence
  Description of Artificial Sequence: Synthetic oligonucleotide
  Target: LAMA2; (-) strand; PAM type: YTN; PAM sequence: CTA
gaatagatttcatagtcaat

SEQ ID NO: 205563 - DNA, 20 bp, Artificial Sequence
  Description of Artificial Sequence: Synthetic oligonucleotide
  Target: LAMA2; (-) strand; PAM type: YTN; PAM sequence: TTG
tcctagaatagatttcatag

SEQ ID NO: 205564 - DNA, 20 bp, Artificial Sequence
  Description of Artificial Sequence: Synthetic oligonucleotide
  Target: LAMA2; (-) strand; PAM type: YTN; PAM sequence: TTT
gtcctagaatagatttcata

SEQ ID NO: 205565 - DNA, 20 bp, Artificial Sequence
  Description of Artificial Sequence: Synthetic oligonucleotide
  Target: LAMA2; (-) strand; PAM type: YTN; PAM sequence: TTT
tgtcctagaatagatttcat

SEQ ID NO: 205566 - DNA, 20 bp, Artificial Sequence
  Description of Artificial Sequence: Synthetic oligonucleotide
  Target: LAMA2; (-) strand; PAM type: YTN; PAM sequence: TTA
ttttgtcctagaatagattt

SEQ ID NO: 205567 - DNA, 20 bp, Artificial Sequence
  Description of Artificial Sequence: Synthetic oligonucleotide
  Target: LAMA2; (-) strand; PAM type: YTN; PAM sequence: TTT
attttgtcctagaatagatt

SEQ ID NO: 205568 - DNA, 20 bp, Artificial Sequence
  Description of Artificial Sequence: Synthetic oligonucleotide
  Target: LAMA2; (-) strand; PAM type: YTN; PAM sequence: TTT
tattttgtcctagaatagat

SEQ ID NO: 205569 - DNA, 20 bp, Artificial Sequence
  Description of Artificial Sequence: Synthetic oligonucleotide
  Target: LAMA2; (-) strand; PAM type: YTN; PAM sequence: CTC
attttattttgtcctagaat

SEQ ID NO: 205570 - DNA, 20 bp, Artificial Sequence
  Description of Artificial Sequence: Synthetic oligonucleotide
  Target: LAMA2; (-) strand; PAM type: YTN; PAM sequence: TTC
tcattttattttgtcctaga

SEQ ID NO: 205571 - DNA, 20 bp, Artificial Sequence
  Description of Artificial Sequence: Synthetic oligonucleotide
  Target: LAMA2; (-) strand; PAM type: YTN; PAM sequence: CTA
ttctcattttattttgtcct

SEQ ID NO: 205572 - DNA, 20 bp, Artificial Sequence
  Description of Artificial Sequence: Synthetic oligonucleotide
  Target: LAMA2; (-) strand; PAM type: YTN; PAM sequence: TTC
tattctcattttattttgtc

SEQ ID NO: 205573 - DNA, 20 bp, Artificial Sequence
  Description of Artificial Sequence: Synthetic oligonucleotide
  Target: LAMA2; (-) strand; PAM type: YTN; PAM sequence: TTA
gacatataattctattctca

SEQ ID NO: 205574 - DNA, 20 bp, Artificial Sequence
  Description of Artificial Sequence: Synthetic oligonucleotide
  Target: LAMA2; (-) strand; PAM type: YTN; PAM sequence: TTA
attagacatataattctatt

SEQ ID NO: 205575 - DNA, 20 bp, Artificial Sequence
  Description of Artificial Sequence: Synthetic oligonucleotide
  Target: LAMA2; (-) strand; PAM type: YTN; PAM sequence: TTT
aattagacatataattctat

SEQ ID NO: 205576 - DNA, 20 bp, Artificial Sequence
  Description of Artificial Sequence: Synthetic oligonucleotide
  Target: LAMA2; (-) strand; PAM type: YTN; PAM sequence: CTA
gatatatcatttaattagac

SEQ ID NO: 205577 - DNA, 20 bp, Artificial Sequence
  Description of Artificial Sequence: Synthetic oligonucleotide
  Target: LAMA2; (-) strand; PAM type: YTN; PAM sequence: TTG
cctagatatatcatttaatt

SEQ ID NO: 205578 - DNA, 20 bp, Artificial Sequence
  Description of Artificial Sequence: Synthetic oligonucleotide
  Target: LAMA2; (-) strand; PAM type: YTN; PAM sequence: TTT
gcctagatatatcatttaat

SEQ ID NO: 205579 - DNA, 20 bp, Artificial Sequence
  Description of Artificial Sequence: Synthetic oligonucleotide
  Target: LAMA2; (-) strand; PAM type: YTN; PAM sequence: TTA
gtttgcctagatatatcatt

SEQ ID NO: 205580 - DNA, 20 bp, Artificial Sequence
  Description of Artificial Sequence: Synthetic oligonucleotide
  Target: LAMA2; (-) strand; PAM type: YTN; PAM sequence: TTG
aatggttagtttgcctagat

SEQ ID NO: 205581 - DNA, 20 bp, Artificial Sequence
  Description of Artificial Sequence: Synthetic oligonucleotide
  Target: LAMA2; (-) strand; PAM type: YTN; PAM sequence: CTT
gaatggttagtttgcctaga

SEQ ID NO: 205582 - DNA, 20 bp, Artificial Sequence
  Description of Artificial Sequence: Synthetic oligonucleotide
  Target: LAMA2; (-) strand; PAM type: YTN; PAM sequence: TTA
aaacttgaatggttagtttg

SEQ ID NO: 205583 - DNA, 20 bp, Artificial Sequence
  Description of Artificial Sequence: Synthetic oligonucleotide
  Target: LAMA2; (-) strand; PAM type: YTN; PAM sequence: TTC
ataaaaattaaaacttgaat

SEQ ID NO: 205584 - DNA, 20 bp, Artificial Sequence
  Description of Artificial Sequence: Synthetic oligonucleotide
  Target: LAMA2; (-) strand; PAM type: YTN; PAM sequence: TTT
cataaaaattaaaacttgaa

SEQ ID NO: 205585 - DNA, 20 bp, Artificial Sequence
  Description of Artificial Sequence: Synthetic oligonucleotide
  Target: LAMA2; (-) strand; PAM type: YTN; PAM sequence: TTT
tcataaaaattaaaacttga

SEQ ID NO: 205586 - DNA, 20 bp, Artificial Sequence
  Description of Artificial Sequence: Synthetic oligonucleotide
  Target: LAMA2; (-) strand; PAM type: YTN; PAM sequence: TTA
aacacatgtacagatgtcag

SEQ ID NO: 205587 - DNA, 20 bp, Artificial Sequence
  Description of Artificial Sequence: Synthetic oligonucleotide
  Target: LAMA2; (-) strand; PAM type: YTN; PAM sequence: CTG
gaaattaaacacatgtacag

SEQ ID NO: 205588 - DNA, 20 bp, Artificial Sequence
  Description of Artificial Sequence: Synthetic oligonucleotide
  Target: LAMA2; (-) strand; PAM type: YTN; PAM sequence: CTC
actggaaattaaacacatgt

SEQ ID NO: 205589 - DNA, 20 bp, Artificial Sequence
  Description of Artificial Sequence: Synthetic oligonucleotide
  Target: LAMA2; (-) strand; PAM type: YTN; PAM sequence: TTG
agctcactggaaattaaaca

SEQ ID NO: 205590 - DNA, 20 bp, Artificial Sequence
  Description of Artificial Sequence: Synthetic oligonucleotide
  Target: LAMA2; (-) strand; PAM type: YTN; PAM sequence: TTT
gagctcactggaaattaaac

SEQ ID NO: 205591 - DNA, 20 bp, Artificial Sequence
  Description of Artificial Sequence: Synthetic oligonucleotide
  Target: LAMA2; (-) strand; PAM type: YTN; PAM sequence: TTT
tgagctcactggaaattaaa

SEQ ID NO: 205592 - DNA, 20 bp, Artificial Sequence
  Description of Artificial Sequence: Synthetic oligonucleotide
  Target: LAMA2; (-) strand; PAM type: YTN; PAM sequence: TTG
aagtattttgagctcactgg

SEQ ID NO: 205593 - DNA, 20 bp, Artificial Sequence
  Description of Artificial Sequence: Synthetic oligonucleotide
  Target: LAMA2; (-) strand; PAM type: YTN; PAM sequence: CTT
gaagtattttgagctcactg

SEQ ID NO: 205594 - DNA, 20 bp, Artificial Sequence
  Description of Artificial Sequence: Synthetic oligonucleotide
  Target: LAMA2; (-) strand; PAM type: YTN; PAM sequence: CTC
aaatgagatcacttgaagta

SEQ ID NO: 205595 - DNA, 20 bp, Artificial Sequence
  Description of Artificial Sequence: Synthetic oligonucleotide
  Target: LAMA2; (-) strand; PAM type: YTN; PAM sequence: TTA
atactcaaatgagatcactt

SEQ ID NO: 205596 - DNA, 20 bp, Artificial Sequence
  Description of Artificial Sequence: Synthetic oligonucleotide
  Target: LAMA2; (-) strand; PAM type: YTN; PAM sequence: CTA
gttaatactcaaatgagatc

SEQ ID NO: 205597 - DNA, 20 bp, Artificial Sequence
  Description of Artificial Sequence: Synthetic oligonucleotide
  Target: LAMA2; (-) strand; PAM type: YTN; PAM sequence: TTC
cctagttaatactcaaatga

SEQ ID NO: 205598 - DNA, 20 bp, Artificial Sequence
  Description of Artificial Sequence: Synthetic oligonucleotide
  Target: LAMA2; (-) strand; PAM type: YTN; PAM sequence: TTT
ccctagttaatactcaaatg

SEQ ID NO: 205599 - DNA, 20 bp, Artificial Sequence
  Description of Artificial Sequence: Synthetic oligonucleotide
  Target: LAMA2; (-) strand; PAM type: YTN; PAM sequence: CTG
tgaatgtatttccctagtta

SEQ ID NO: 205600 - DNA, 20 bp, Artificial Sequence
  Description of Artificial Sequence: Synthetic oligonucleotide
  Target: LAMA2; (-) strand; PAM type: YTN; PAM sequence: CTG
gactgtgaatgtatttccct

SEQ ID NO: 205601 - DNA, 20 bp, Artificial Sequence
  Description of Artificial Sequence: Synthetic oligonucleotide
  Target: LAMA2; (-) strand; PAM type: YTN; PAM sequence: TTG
ctggactgtgaatgtatttc

SEQ ID NO: 205602 - DNA, 20 bp, Artificial Sequence
  Description of Artificial Sequence: Synthetic oligonucleotide
  Target: LAMA2; (-) strand; PAM type: YTN; PAM sequence: TTA
aaataatgtagacataaaag

SEQ ID NO: 205603 - DNA, 20 bp, Artificial Sequence
  Description of Artificial Sequence: Synthetic oligonucleotide
  Target: LAMA2; (-) strand; PAM type: YTN; PAM sequence: TTT
aaaataatgtagacataaaa

SEQ ID NO: 205604 - DNA, 20 bp, Artificial Sequence
  Description of Artificial Sequence: Synthetic oligonucleotide
  Target: LAMA2; (-) strand; PAM type: YTN; PAM sequence: CTA
tgatttaaaataatgtagac

SEQ ID NO: 205605 - DNA, 20 bp, Artificial Sequence
  Description of Artificial Sequence: Synthetic oligonucleotide
  Target: LAMA2; (-) strand; PAM type: YTN; PAM sequence: CTA
tgctatgatttaaaataatg

SEQ ID NO: 205606 - DNA, 20 bp, Artificial Sequence
  Description of Artificial Sequence: Synthetic oligonucleotide
  Target: LAMA2; (-) strand; PAM type: YTN; PAM sequence: CTG
gtcataaagcacagtggaaa

SEQ ID NO: 205607 - DNA, 20 bp, Artificial Sequence
  Description of Artificial Sequence: Synthetic oligonucleotide
  Target: LAMA2; (-) strand; PAM type: YTN; PAM sequence: TTC
tggtcataaagcacagtgga

SEQ ID NO: 205608 - DNA, 20 bp, Artificial Sequence
  Description of Artificial Sequence: Synthetic oligonucleotide
  Target: LAMA2; (-) strand; PAM type: YTN; PAM sequence: TTG
caaataaatgtgttctggtc

SEQ ID NO: 205609 - DNA, 20 bp, Artificial Sequence
  Description of Artificial Sequence: Synthetic oligonucleotide
  Target: LAMA2; (-) strand; PAM type: YTN; PAM sequence: TTT
gcaaataaatgtgttctggt

SEQ ID NO: 205610 - DNA, 20 bp, Artificial Sequence
  Description of Artificial Sequence: Synthetic oligonucleotide
  Target: LAMA2; (-) strand; PAM type: YTN; PAM sequence: CTT
tgcaaataaatgtgttctgg

SEQ ID NO: 205611 - DNA, 20 bp, Artificial Sequence
  Description of Artificial Sequence: Synthetic oligonucleotide
  Target: LAMA2; (-) strand; PAM type: YTN; PAM sequence: CTA
caatataaggtaagtgaaaa

SEQ ID NO: 205612 - DNA, 20 bp, Artificial Sequence
  Description of Artificial Sequence: Synthetic oligonucleotide
  Target: LAMA2; (-) strand; PAM type: YTN; PAM sequence: CTA
catactacaatataaggtaa

SEQ ID NO: 205613 - DNA, 20 bp, Artificial Sequence
  Description of Artificial Sequence: Synthetic oligonucleotide
  Target: LAMA2; (-) strand; PAM type: YTN; PAM sequence: CTA
tactacatactacaatataa

SEQ ID NO: 205614 - DNA, 20 bp, Artificial Sequence
  Description of Artificial Sequence: Synthetic oligonucleotide
  Target: LAMA2; (-) strand; PAM type: YTN; PAM sequence: TTG
tcctatactacatactacaa

SEQ ID NO: 205615 - DNA, 20 bp, Artificial Sequence
  Description of Artificial Sequence: Synthetic oligonucleotide
  Target: LAMA2; (-) strand; PAM type: YTN; PAM sequence: TTG
accgtatcaattgtcctata

SEQ ID NO: 205616 - DNA, 20 bp, Artificial Sequence
  Description of Artificial Sequence: Synthetic oligonucleotide
  Target: LAMA2; (-) strand; PAM type: YTN; PAM sequence: TTA
aacagttgaccgtatcaatt

SEQ ID NO: 205617 - DNA, 20 bp, Artificial Sequence
  Description of Artificial Sequence: Synthetic oligonucleotide
  Target: LAMA2; (-) strand; PAM type: YTN; PAM sequence: TTT
aaacagttgaccgtatcaat

SEQ ID NO: 205618 - DNA, 20 bp, Artificial Sequence
  Description of Artificial Sequence: Synthetic oligonucleotide
  Target: LAMA2; (-) strand; PAM type: YTN; PAM sequence: TTT
taaacagttgaccgtatcaa

SEQ ID NO: 205619 - DNA, 20 bp, Artificial Sequence
  Description of Artificial Sequence: Synthetic oligonucleotide
  Target: LAMA2; (-) strand; PAM type: YTN; PAM sequence: CTG
acgttttaaacagttgaccg

SEQ ID NO: 205620 - DNA, 20 bp, Artificial Sequence
  Description of Artificial Sequence: Synthetic oligonucleotide
  Target: LAMA2; (-) strand; PAM type: YTN; PAM sequence: TTG
catctgacgttttaaacagt

SEQ ID NO: 205621 - DNA, 20 bp, Artificial Sequence
  Description of Artificial Sequence: Synthetic oligonucleotide
  Target: LAMA2; (-) strand; PAM type: YTN; PAM sequence: CTA
tcattgcatctgacgtttta

SEQ ID NO: 205622 - DNA, 20 bp, Artificial Sequence
  Description of Artificial Sequence: Synthetic oligonucleotide
  Target: LAMA2; (-) strand; PAM type: YTN; PAM sequence: CTC
tatcattgcatctgacgttt

SEQ ID NO: 205623 - DNA, 20 bp, Artificial Sequence
  Description of Artificial Sequence: Synthetic oligonucleotide
  Target: LAMA2; (-) strand; PAM type: YTN; PAM sequence: CTA
aggctctatcattgcatctg

SEQ ID NO: 205624 - DNA, 20 bp, Artificial Sequence
  Description of Artificial Sequence: Synthetic oligonucleotide
  Target: LAMA2; (-) strand; PAM type: YTN; PAM sequence: CTA
taaatgctaaggctctatca

SEQ ID NO: 205625 - DNA, 20 bp, Artificial Sequence
  Description of Artificial Sequence: Synthetic oligonucleotide
  Target: LAMA2; (-) strand; PAM type: YTN; PAM sequence: CTA
catctataaatgctaaggct

SEQ ID NO: 205626 - DNA, 20 bp, Artificial Sequence
  Description of Artificial Sequence: Synthetic oligonucleotide
  Target: LAMA2; (-) strand; PAM type: YTN; PAM sequence: CTG
tgaatgctacatctataaat

SEQ ID NO: 205627 - DNA, 20 bp, Artificial Sequence
  Description of Artificial Sequence: Synthetic oligonucleotide
  Target: LAMA2; (-) strand; PAM type: YTN; PAM sequence: TTG
caactgtgaatgctacatct

SEQ ID NO: 205628 - DNA, 20 bp, Artificial Sequence
  Description of Artificial Sequence: Synthetic oligonucleotide
  Target: LAMA2; (-) strand; PAM type: YTN; PAM sequence: CTG
aaagagttgcaactgtgaat

SEQ ID NO: 205629 - DNA, 20 bp, Artificial Sequence
  Description of Artificial Sequence: Synthetic oligonucleotide
  Target: LAMA2; (-) strand; PAM type: YTN; PAM sequence: CTG
aaactgaaagagttgcaact

SEQ ID NO: 205630 - DNA, 20 bp, Artificial Sequence
  Description of Artificial Sequence: Synthetic oligonucleotide
  Target: LAMA2; (-) strand; PAM type: YTN; PAM sequence: CTC
acaaatgtctgaaactgaaa

SEQ ID NO: 205631 - DNA, 20 bp, Artificial Sequence
  Description of Artificial Sequence: Synthetic oligonucleotide
  Target: LAMA2; (-) strand; PAM type: YTN; PAM sequence: TTC
ctcacaaatgtctgaaactg

SEQ ID NO: 205632 - DNA, 20 bp, Artificial Sequence
  Description of Artificial Sequence: Synthetic oligonucleotide
  Target: LAMA2; (-) strand; PAM type: YTN; PAM sequence: CTA
tgagattcctcacaaatgtc

SEQ ID NO: 205633 - DNA, 20 bp, Artificial Sequence
  Description of Artificial Sequence: Synthetic oligonucleotide
  Target: LAMA2; (-) strand; PAM type: YTN; PAM sequence: TTA
cacacctatgagattcctca

SEQ ID NO: 205634 - DNA, 20 bp, Artificial Sequence
  Description of Artificial Sequence: Synthetic oligonucleotide
  Target: LAMA2; (-) strand; PAM type: YTN; PAM sequence: TTC
aaaccatattacacacctat

SEQ ID NO: 205635 - DNA, 20 bp, Artificial Sequence
  Description of Artificial Sequence: Synthetic oligonucleotide
  Target: LAMA2; (-) strand; PAM type: YTN; PAM sequence: TTT
caaaccatattacacaccta

SEQ ID NO: 205636 - DNA, 20 bp, Artificial Sequence
  Description of Artificial Sequence: Synthetic oligonucleotide
  Target: LAMA2; (-) strand; PAM type: YTN; PAM sequence: CTC
acaaatttcaaaccatatta

SEQ ID NO: 205637 - DNA, 20 bp, Artificial Sequence
  Description of Artificial Sequence: Synthetic oligonucleotide
  Target: LAMA2; (-) strand; PAM type: YTN; PAM sequence: CTG
tcctcacaaatttcaaacca

SEQ ID NO: 205638 - DNA, 20 bp, Artificial Sequence
  Description of Artificial Sequence: Synthetic oligonucleotide
  Target: LAMA2; (-) strand; PAM type: YTN; PAM sequence: TTG
ctgtcctcacaaatttcaaa

SEQ ID NO: 205639 - DNA, 20 bp, Artificial Sequence
  Description of Artificial Sequence: Synthetic oligonucleotide
  Target: LAMA2; (-) strand; PAM type: YTN; PAM sequence: CTA
gagtcagagcacgaattgct

SEQ ID NO: 205640 - DNA, 20 bp, Artificial Sequence
  Description of Artificial Sequence: Synthetic oligonucleotide
  Target: LAMA2; (-) strand; PAM type: YTN; PAM sequence: CTG
gccgccaatgactagagtca

SEQ ID NO: 205641 - DNA, 20 bp, Artificial Sequence
  Description of Artificial Sequence: Synthetic oligonucleotide
  Target: LAMA2; (-) strand; PAM type: YTN; PAM sequence: CTC
actggccgccaatgactaga

SEQ ID NO: 205642 - DNA, 20 bp, Artificial Sequence
  Description of Artificial Sequence: Synthetic oligonucleotide
  Target: LAMA2; (-) strand; PAM type: YTN; PAM sequence: TTG
ctcactggccgccaatgact

SEQ ID NO: 205643 - DNA, 20 bp, Artificial Sequence
  Description of Artificial Sequence: Synthetic oligonucleotide
  Target: LAMA2; (-) strand; PAM type: YTN; PAM sequence: CTT
gctcactggccgccaatgac

SEQ ID NO: 205644 - DNA, 20 bp, Artificial Sequence
  Description of Artificial Sequence: Synthetic oligonucleotide
  Target: LAMA2; (-) strand; PAM type: YTN; PAM sequence: TTG
cgcttgctcactggccgcca

SEQ ID NO: 205645 - DNA, 20 bp, Artificial Sequence
  Description of Artificial Sequence: Synthetic oligonucleotide
  Target: LAMA2; (-) strand; PAM type: YTN; PAM sequence: CTG
ggtgatcagttgcgcttgct

SEQ ID NO: 205646 - DNA, 20 bp, Artificial Sequence
  Description of Artificial Sequence: Synthetic oligonucleotide
  Target: LAMA2; (-) strand; PAM type: YTN; PAM sequence: TTG
atactgggtgatcagttgcg

SEQ ID NO: 205647 - DNA, 20 bp, Artificial Sequence
  Description of Artificial Sequence: Synthetic oligonucleotide
  Target: LAMA2; (-) strand; PAM type: YTN; PAM sequence: TTG
tgaagttgatactgggtgat

SEQ ID NO: 205648 - DNA, 20 bp, Artificial Sequence
  Description of Artificial Sequence: Synthetic oligonucleotide
  Target: LAMA2; (-) strand; PAM type: YTN; PAM sequence: TTA
gtggaaaccacattgtgaag

SEQ ID NO: 205649 - DNA, 20 bp, Artificial Sequence
  Description of Artificial Sequence: Synthetic oligonucleotide
  Target: LAMA2; (-) strand; PAM type: YTN; PAM sequence: TTA
atataaggtgccgattagtg

SEQ ID NO: 205650 - DNA, 20 bp, Artificial Sequence
  Description of Artificial Sequence: Synthetic oligonucleotide
  Target: LAMA2; (-) strand; PAM type: YTN; PAM sequence: TTC
ataaaaattaatataaggtg

SEQ ID NO: 205651 - DNA, 20 bp, Artificial Sequence
  Description of Artificial Sequence: Synthetic oligonucleotide
  Target: LAMA2; (-) strand; PAM type: YTN; PAM sequence: TTT
cataaaaattaatataaggt

SEQ ID NO: 205652 - DNA, 20 bp, Artificial Sequence
  Description of Artificial Sequence: Synthetic oligonucleotide
  Target: LAMA2; (-) strand; PAM type: YTN; PAM sequence: TTA
tttcataaaaattaatataa

SEQ ID NO: 205653 - DNA, 20 bp, Artificial Sequence
  Description of Artificial Sequence: Synthetic oligonucleotide
  Target: LAMA2; (-) strand; PAM type: YTN; PAM sequence: TTA
ttatttcataaaaattaata

SEQ ID NO: 205654 - DNA, 20 bp, Artificial Sequence
  Description of Artificial Sequence: Synthetic oligonucleotide
  Target: LAMA2; (-) strand; PAM type: YTN; PAM sequence: TTT
attatttcataaaaattaat

SEQ ID NO: 205655 - DNA, 20 bp, Artificial Sequence
  Description of Artificial Sequence: Synthetic oligonucleotide
  Target: LAMA2; (-) strand; PAM type: YTN; PAM sequence: TTT
tattatttcataaaaattaa

SEQ ID NO: 205656 - DNA, 20 bp, Artificial Sequence
  Description of Artificial Sequence: Synthetic oligonucleotide
  Target: LAMA2; (-) strand; PAM type: YTN; PAM sequence: TTT
ttattatttcataaaaatta

SEQ ID NO: 205657 - DNA, 20 bp, Artificial Sequence
  Description of Artificial Sequence: Synthetic oligonucleotide
  Target: LAMA2; (-) strand; PAM type: YTN; PAM sequence: CTA
tgaaataaggtttttattat

SEQ ID NO: 205658 - DNA, 20 bp, Artificial Sequence
  Description of Artificial Sequence: Synthetic oligonucleotide
  Target: LAMA2; (-) strand; PAM type: YTN; PAM sequence: CTG
ctatgaaataaggtttttat

SEQ ID NO: 205659 - DNA, 20 bp, Artificial Sequence
  Description of Artificial Sequence: Synthetic oligonucleotide
  Target: LAMA2; (-) strand; PAM type: YTN; PAM sequence: CTC
ctgctatgaaataaggtttt

SEQ ID NO: 205660 - DNA, 20 bp, Artificial Sequence
  Description of Artificial Sequence: Synthetic oligonucleotide
  Target: LAMA2; (-) strand; PAM type: YTN; PAM sequence: TTG
ggtacccgctcctgctatga

SEQ ID NO: 205661 - DNA, 20 bp, Artificial Sequence
  Description of Artificial Sequence: Synthetic oligonucleotide
  Target: LAMA2; (-) strand; PAM type: YTN; PAM sequence: TTT
gggtacccgctcctgctatg

SEQ ID NO: 205662 - DNA, 20 bp, Artificial Sequence
  Description of Artificial Sequence: Synthetic oligonucleotide
  Target: LAMA2; (-) strand; PAM type: YTN; PAM sequence: TTT
tgggtacccgctcctgctat

SEQ ID NO: 205663 - DNA, 20 bp, Artificial Sequence
  Description of Artificial Sequence: Synthetic oligonucleotide
  Target: LAMA2; (-) strand; PAM type: YTN; PAM sequence: TTT
ttgggtacccgctcctgcta

SEQ ID NO: 205664 - DNA, 20 bp, Artificial Sequence
  Description of Artificial Sequence: Synthetic oligonucleotide
  Target: LAMA2; (-) strand; PAM type: YTN; PAM sequence: CTT
tttgggtacccgctcctgct

SEQ ID NO: 205665 - DNA, 20 bp, Artificial Sequence
  Description of Artificial Sequence: Synthetic oligonucleotide
  Target: LAMA2; (-) strand; PAM type: YTN; PAM sequence: CTA
ctttttgggtacccgctcct

SEQ ID NO: 205666 - DNA, 20 bp, Artificial Sequence
  Description of Artificial Sequence: Synthetic oligonucleotide
  Target: LAMA2; (-) strand; PAM type: YTN; PAM sequence: TTA
actactttttgggtacccgc

SEQ ID NO: 205667 - DNA, 20 bp, Artificial Sequence
  Description of Artificial Sequence: Synthetic oligonucleotide
  Target: LAMA2; (-) strand; PAM type: YTN; PAM sequence: TTT
aactactttttgggtacccg

SEQ ID NO: 205668 - DNA, 20 bp, Artificial Sequence
  Description of Artificial Sequence: Synthetic oligonucleotide
  Target: LAMA2; (-) strand; PAM type: YTN; PAM sequence: TTA
gccatttaactactttttgg

SEQ ID NO: 205669 - DNA, 20 bp, Artificial Sequence
  Description of Artificial Sequence: Synthetic oligonucleotide
  Target: LAMA2; (-) strand; PAM type: YTN; PAM sequence: CTG
taaaggattagccatttaac

SEQ ID NO: 205670 - DNA, 20 bp, Artificial Sequence
  Description of Artificial Sequence: Synthetic oligonucleotide
  Target: LAMA2; (-) strand; PAM type: YTN; PAM sequence: TTC
caaaaacataaaaactgtaa

SEQ ID NO: 205671 - DNA, 20 bp, Artificial Sequence
  Description of Artificial Sequence: Synthetic oligonucleotide
  Target: LAMA2; (-) strand; PAM type: YTN; PAM sequence: TTT
ccaaaaacataaaaactgta

SEQ ID NO: 205672 - DNA, 20 bp, Artificial Sequence
  Description of Artificial Sequence: Synthetic oligonucleotide
  Target: LAMA2; (-) strand; PAM type: YTN; PAM sequence: TTG
agatcacaaatttccaaaaa

SEQ ID NO: 205673 - DNA, 20 bp, Artificial Sequence
  Description of Artificial Sequence: Synthetic oligonucleotide
  Target: LAMA2; (-) strand; PAM type: YTN; PAM sequence: CTT
gagatcacaaatttccaaaa

SEQ ID NO: 205674 - DNA, 20 bp, Artificial Sequence
  Description of Artificial Sequence: Synthetic oligonucleotide
  Target: LAMA2; (-) strand; PAM type: YTN; PAM sequence: TTG
agggatagtcttgagatcac

SEQ ID NO: 205675 - DNA, 20 bp, Artificial Sequence
  Description of Artificial Sequence: Synthetic oligonucleotide
  Target: LAMA2; (-) strand; PAM type: YTN; PAM sequence: CTT
gagggatagtcttgagatca

SEQ ID NO: 205676 - DNA, 20 bp, Artificial Sequence
  Description of Artificial Sequence: Synthetic oligonucleotide
  Target: LAMA2; (-) strand; PAM type: YTN; PAM sequence: TTC
ttgagggatagtcttgagat

SEQ ID NO: 205677 - DNA, 20 bp, Artificial Sequence
  Description of Artificial Sequence: Synthetic oligonucleotide
  Target: LAMA2; (-) strand; PAM type: YTN; PAM sequence: TTG
acattcttgagggatagtct

SEQ ID NO: 205678 - DNA, 20 bp, Artificial Sequence
  Description of Artificial Sequence: Synthetic oligonucleotide
  Target: LAMA2; (-) strand; PAM type: YTN; PAM sequence: CTT
gacattcttgagggatagtc

SEQ ID NO: 205679 - DNA, 20 bp, Artificial Sequence
  Description of Artificial Sequence: Synthetic oligonucleotide
  Target: LAMA2; (-) strand; PAM type: YTN; PAM sequence: TTC
agcaaaaccttgacattctt

SEQ ID NO: 205680 - DNA, 20 bp, Artificial Sequence
  Description of Artificial Sequence: Synthetic oligonucleotide
  Target: LAMA2; (-) strand; PAM type: YTN; PAM sequence: CTT
cagcaaaaccttgacattct

SEQ ID NO: 205681 - DNA, 20 bp, Artificial Sequence
  Description of Artificial Sequence: Synthetic oligonucleotide
  Target: LAMA2; (-) strand; PAM type: YTN; PAM sequence: TTA
acttcagcaaaaccttgaca

SEQ ID NO: 205682 - DNA, 20 bp, Artificial Sequence
  Description of Artificial Sequence: Synthetic oligonucleotide
  Target: LAMA2; (-) strand; PAM type: YTN; PAM sequence: TTT
aacttcagcaaaaccttgac

SEQ ID NO: 205683 - DNA, 20 bp, Artificial Sequence
  Description of Artificial Sequence: Synthetic oligonucleotide
  Target: LAMA2; (-) strand; PAM type: YTN; PAM sequence: CTT
taacttcagcaaaaccttga

SEQ ID NO: 205684 - DNA, 20 bp, Artificial Sequence
  Description of Artificial Sequence: Synthetic oligonucleotide
  Target: LAMA2; (-) strand; PAM type: YTN; PAM sequence: CTG
accacagaataacaaatgtc

SEQ ID NO: 205685 - DNA, 20 bp, Artificial Sequence
  Description of Artificial Sequence: Synthetic oligonucleotide
  Target: LAMA2; (-) strand; PAM type: YTN; PAM sequence: CTG
aaataatctgaccacagaat

SEQ ID NO: 205686 - DNA, 20 bp, Artificial Sequence
  Description of Artificial Sequence: Synthetic oligonucleotide
  Target: LAMA2; (-) strand; PAM type: YTN; PAM sequence: CTA
ctgaaataatctgaccacag

SEQ ID NO: 205687 - DNA, 20 bp, Artificial Sequence
  Description of Artificial Sequence: Synthetic oligonucleotide
  Target: LAMA2; (-) strand; PAM type: YTN; PAM sequence: CTC
aactactgaaataatctgac

SEQ ID NO: 205688 - DNA, 20 bp, Artificial Sequence
  Description of Artificial Sequence: Synthetic oligonucleotide
  Target: LAMA2; (-) strand; PAM type: YTN; PAM sequence: CTA
catctcaactactgaaataa

SEQ ID NO: 205689 - DNA, 20 bp, Artificial Sequence
  Description of Artificial Sequence: Synthetic oligonucleotide
  Target: LAMA2; (-) strand; PAM type: YTN; PAM sequence: TTA
atgtgagactacatctcaac

SEQ ID NO: 205690 - DNA, 20 bp, Artificial Sequence
  Description of Artificial Sequence: Synthetic oligonucleotide
  Target: LAMA2; (-) strand; PAM type: YTN; PAM sequence: CTT
aatgtgagactacatctcaa

SEQ ID NO: 205691 - DNA, 20 bp, Artificial Sequence
  Description of Artificial Sequence: Synthetic oligonucleotide
  Target: LAMA2; (-) strand; PAM type: YTN; PAM sequence: CTC
ccttaatgtgagactacatc

SEQ ID NO: 205692 - DNA, 20 bp, Artificial Sequence
  Description of Artificial Sequence: Synthetic oligonucleotide
  Target: LAMA2; (-) strand; PAM type: YTN; PAM sequence: TTC
tcccttaatgtgagactaca

SEQ ID NO: 205693 - DNA, 20 bp, Artificial Sequence
  Description of Artificial Sequence: Synthetic oligonucleotide
  Target: LAMA2; (-) strand; PAM type: YTN; PAM sequence: TTT
ctcccttaatgtgagactac

SEQ ID NO: 205694 - DNA, 20 bp, Artificial Sequence
  Description of Artificial Sequence: Synthetic oligonucleotide
  Target: LAMA2; (-) strand; PAM type: YTN; PAM sequence: TTG
cagatttctcccttaatgtg

SEQ ID NO: 205695 - DNA, 20 bp, Artificial Sequence
  Description of Artificial Sequence: Synthetic oligonucleotide
  Target: LAMA2; (-) strand; PAM type: YTN; PAM sequence: TTT
gcagatttctcccttaatgt

SEQ ID NO: 205696 - DNA, 20 bp, Artificial Sequence
  Description of Artificial Sequence: Synthetic oligonucleotide
  Target: LAMA2; (-) strand; PAM type: YTN; PAM sequence: CTA
gtttgcagatttctccctta

SEQ ID NO: 205697 - DNA, 20 bp, Artificial Sequence
  Description of Artificial Sequence: Synthetic oligonucleotide
  Target: LAMA2; (-) strand; PAM type: YTN; PAM sequence: TTC
tagtttgcagatttctccct

SEQ ID NO: 205698 - DNA, 20 bp, Artificial Sequence
  Description of Artificial Sequence: Synthetic oligonucleotide
  Target: LAMA2; (-) strand; PAM type: YTN; PAM sequence: TTT
ctagtttgcagatttctccc

SEQ ID NO: 205699 - DNA, 20 bp, Artificial Sequence
  Description of Artificial Sequence: Synthetic oligonucleotide
  Target: LAMA2; (-) strand; PAM type: YTN; PAM sequence: TTG
caaaccatttctagtttgca

SEQ ID NO: 205700 - DNA, 20 bp, Artificial Sequence
  Description of Artificial Sequence: Synthetic oligonucleotide
  Target: LAMA2; (-) strand; PAM type: YTN; PAM sequence: TTT
gcaaaccatttctagtttgc

SEQ ID NO: 205701 - DNA, 20 bp, Artificial Sequence
  Description of Artificial Sequence: Synthetic oligonucleotide
  Target: LAMA2; (-) strand; PAM type: YTN; PAM sequence: TTG
ccatttgcaaaccatttcta

SEQ ID NO: 205702 - DNA, 20 bp, Artificial Sequence
  Description of Artificial Sequence: Synthetic oligonucleotide
  Target: LAMA2; (-) strand; PAM type: YTN; PAM sequence: CTT
gccatttgcaaaccatttct

SEQ ID NO: 205703 - DNA, 20 bp, Artificial Sequence
  Description of Artificial Sequence: Synthetic oligonucleotide
  Target: LAMA2; (-) strand; PAM type: YTN; PAM sequence: TTG
ccttgccatttgcaaaccat

SEQ ID NO: 205704 - DNA, 20 bp, Artificial Sequence
  Description of Artificial Sequence: Synthetic oligonucleotide
  Target: LAMA2; (-) strand; PAM type: YTN; PAM sequence: TTT
gccttgccatttgcaaacca

SEQ ID NO: 205705 - DNA, 20 bp, Artificial Sequence
  Description of Artificial Sequence: Synthetic oligonucleotide
  Target: LAMA2; (-) strand; PAM type: YTN; PAM sequence: CTT
tgccttgccatttgcaaacc

SEQ ID NO: 205706 - DNA, 20 bp, Artificial Sequence
  Description of Artificial Sequence: Synthetic oligonucleotide
  Target: LAMA2; (-) strand; PAM type: YTN; PAM sequence: TTG
aatgctttgccttgccattt

SEQ ID NO: 205707 - DNA, 20 bp, Artificial Sequence
  Description of Artificial Sequence: Synthetic oligonucleotide
  Target: LAMA2; (-) strand; PAM type: YTN; PAM sequence: TTT
gaatgctttgccttgccatt

SEQ ID NO: 205708 - DNA, 20 bp, Artificial Sequence
  Description of Artificial Sequence: Synthetic oligonucleotide
  Target: LAMA2; (-) strand; PAM type: YTN; PAM sequence: TTA
tttgaatgctttgccttgcc

SEQ ID NO: 205709 - DNA, 20 bp, Artificial Sequence
  Description of Artificial Sequence: Synthetic oligonucleotide
  Target: LAMA2; (-) strand; PAM type: YTN; PAM sequence: TTA
tcacatgtaacagttatttg

SEQ ID NO: 205710 - DNA, 20 bp, Artificial Sequence
  Description of Artificial Sequence: Synthetic oligonucleotide
  Target: LAMA2; (-) strand; PAM type: YTN; PAM sequence: TTT
atcacatgtaacagttattt

SEQ ID NO: 205711 - DNA, 20 bp, Artificial Sequence
  Description of Artificial Sequence: Synthetic oligonucleotide
  Target: LAMA2; (-) strand; PAM type: YTN; PAM sequence: TTT
tatcacatgtaacagttatt

SEQ ID NO: 205712 - DNA, 20 bp, Artificial Sequence
  Description of Artificial Sequence: Synthetic oligonucleotide
  Target: LAMA2; (-) strand; PAM type: YTN; PAM sequence: TTT
ttatcacatgtaacagttat

SEQ ID NO: 205713 - DNA, 20 bp, Artificial Sequence
  Description of Artificial Sequence: Synthetic oligonucleotide
  Target: LAMA2; (-) strand; PAM type: YTN; PAM sequence: CTG
aaacccaaaagagattttta

SEQ ID NO: 205714 - DNA, 20 bp, Artificial Sequence
  Description of Artificial Sequence: Synthetic oligonucleotide
  Target: LAMA2; (-) strand; PAM type: YTN; PAM sequence: TTG
tcatcctgaaacccaaaaga

SEQ ID NO: 205715 - DNA, 20 bp, Artificial Sequence
  Description of Artificial Sequence: Synthetic oligonucleotide
  Target: LAMA2; (-) strand; PAM type: YTN; PAM sequence: CTT
gtcatcctgaaacccaaaag

SEQ ID NO: 205716 - DNA, 20 bp, Artificial Sequence
  Description of Artificial Sequence: Synthetic oligonucleotide
  Target: LAMA2; (-) strand; PAM type: YTN; PAM sequence: CTG
taccttgtcatcctgaaacc

SEQ ID NO: 205717 - DNA, 20 bp, Artificial Sequence
  Description of Artificial Sequence: Synthetic oligonucleotide
  Target: LAMA2; (-) strand; PAM type: YTN; PAM sequence: CTG
ggccctgtaccttgtcatcc

SEQ ID NO: 205718 - DNA, 20 bp, Artificial Sequence
  Description of Artificial Sequence: Synthetic oligonucleotide
  Target: LAMA2; (-) strand; PAM type: YTN; PAM sequence: TTA
aatgccagtccctgggccct

SEQ ID NO: 205719 - DNA, 20 bp, Artificial Sequence
  Description of Artificial Sequence: Synthetic oligonucleotide
  Target: LAMA2; (-) strand; PAM type: YTN; PAM sequence: TTT
aaatgccagtccctgggccc

SEQ ID NO: 205720 - DNA, 20 bp, Artificial Sequence
  Description of Artificial Sequence: Synthetic oligonucleotide
  Target: LAMA2; (-) strand; PAM type: YTN; PAM sequence: CTT
taaatgccagtccctgggcc

SEQ ID NO: 205721 - DNA, 20 bp, Artificial Sequence
  Description of Artificial Sequence: Synthetic oligonucleotide
  Target: LAMA2; (-) strand; PAM type: YTN; PAM sequence: CTC
tttaaatgccagtccctggg

SEQ ID NO: 205722 - DNA, 20 bp, Artificial Sequence
  Description of Artificial Sequence: Synthetic oligonucleotide
  Target: LAMA2; (-) strand; PAM type: YTN; PAM sequence: TTC
tctttaaatgccagtccctg

SEQ ID NO: 205723 - DNA, 20 bp, Artificial Sequence
  Description of Artificial Sequence: Synthetic oligonucleotide
  Target: LAMA2; (-) strand; PAM type: YTN; PAM sequence: TTA
agtgtgtgtataggagttct

SEQ ID NO: 205724 - DNA, 20 bp, Artificial Sequence
  Description of Artificial Sequence: Synthetic oligonucleotide
  Target: LAMA2; (-) strand; PAM type: YTN; PAM sequence: TTT
aagtgtgtgtataggagttc

SEQ ID NO: 205725 - DNA, 20 bp, Artificial Sequence
  Description of Artificial Sequence: Synthetic oligonucleotide
  Target: LAMA2; (-) strand; PAM type: YTN; PAM sequence: TTG
aatttaagtgtgtgtatagg

SEQ ID NO: 205726 - DNA, 20 bp, Artificial Sequence
  Description of Artificial Sequence: Synthetic oligonucleotide
  Target: LAMA2; (-) strand; PAM type: YTN; PAM sequence: TTG
ttgaatttaagtgtgtgtat

SEQ ID NO: 205727 - DNA, 20 bp, Artificial Sequence
  Description of Artificial Sequence: Synthetic oligonucleotide
  Target: LAMA2; (-) strand; PAM type: YTN; PAM sequence: TTT
gttgaatttaagtgtgtgta

SEQ ID NO: 205728 - DNA, 20 bp, Artificial Sequence
  Description of Artificial Sequence: Synthetic oligonucleotide
  Target: LAMA2; (-) strand; PAM type: YTN; PAM sequence: TTT
tgttgaatttaagtgtgtgt

SEQ ID NO: 205729 - DNA, 20 bp, Artificial Sequence
  Description of Artificial Sequence: Synthetic oligonucleotide
  Target: LAMA2; (-) strand; PAM type: YTN; PAM sequence: TTT
ttgttgaatttaagtgtgtg

SEQ ID NO: 205730 - DNA, 20 bp, Artificial Sequence
  Description of Artificial Sequence: Synthetic oligonucleotide
  Target: LAMA2; (-) strand; PAM type: YTN; PAM sequence: TTT
tttgttgaatttaagtgtgt

SEQ ID NO: 205731 - DNA, 20 bp, Artificial Sequence
  Description of Artificial Sequence: Synthetic oligonucleotide
  Target: LAMA2; (-) strand; PAM type: YTN; PAM sequence: CTT
ttttgttgaatttaagtgtg

SEQ ID NO: 205732 - DNA, 20 bp, Artificial Sequence
  Description of Artificial Sequence: Synthetic oligonucleotide
  Target: LAMA2; (-) strand; PAM type: YTN; PAM sequence: TTA
tagaatacagacttttttgt

SEQ ID NO: 205733 - DNA, 20 bp, Artificial Sequence
  Description of Artificial Sequence: Synthetic oligonucleotide
  Target: LAMA2; (-) strand; PAM type: YTN; PAM sequence: TTG
gatattatagaatacagact

SEQ ID NO: 205734 - DNA, 20 bp, Artificial Sequence
  Description of Artificial Sequence: Synthetic oligonucleotide
  Target: LAMA2; (-) strand; PAM type: YTN; PAM sequence: TTA
aggtaattggatattataga

SEQ ID NO: 205735 - DNA, 20 bp, Artificial Sequence
  Description of Artificial Sequence: Synthetic oligonucleotide
  Target: LAMA2; (-) strand; PAM type: YTN; PAM sequence: CTA
cacaattaaggtaattggat

SEQ ID NO: 205736 - DNA, 20 bp, Artificial Sequence
  Description of Artificial Sequence: Synthetic oligonucleotide
  Target: LAMA2; (-) strand; PAM type: YTN; PAM sequence: TTC
cccactacacaattaaggta

SEQ ID NO: 205737 - DNA, 20 bp, Artificial Sequence
  Description of Artificial Sequence: Synthetic oligonucleotide
  Target: LAMA2; (-) strand; PAM type: YTN; PAM sequence: TTT
ccccactacacaattaaggt

SEQ ID NO: 205738 - DNA, 20 bp, Artificial Sequence
  Description of Artificial Sequence: Synthetic oligonucleotide
  Target: LAMA2; (-) strand; PAM type: YTN; PAM sequence: TTT
tccccactacacaattaagg

SEQ ID NO: 205739 - DNA, 20 bp, Artificial Sequence
  Description of Artificial Sequence: Synthetic oligonucleotide
  Target: LAMA2; (-) strand; PAM type: YTN; PAM sequence: TTC
attttccccactacacaatt

SEQ ID NO: 205740 - DNA, 20 bp, Artificial Sequence
  Description of Artificial Sequence: Synthetic oligonucleotide
  Target: LAMA2; (-) strand; PAM type: YTN; PAM sequence: CTT
cattttccccactacacaat

SEQ ID NO: 205741 - DNA, 20 bp, Artificial Sequence
  Description of Artificial Sequence: Synthetic oligonucleotide
  Target: LAMA2; (-) strand; PAM type: YTN; PAM sequence: CTC
ttcattttccccactacaca

SEQ ID NO: 205742 - DNA, 20 bp, Artificial Sequence
  Description of Artificial Sequence: Synthetic oligonucleotide
  Target: LAMA2; (-) strand; PAM type: YTN; PAM sequence: TTC
aactcttcattttccccact

SEQ ID NO: 205743 - DNA, 20 bp, Artificial Sequence
  Description of Artificial Sequence: Synthetic oligonucleotide
  Target: LAMA2; (-) strand; PAM type: YTN; PAM sequence: CTA
accagaaattcaactcttca

SEQ ID NO: 205744 - DNA, 20 bp, Artificial Sequence
  Description of Artificial Sequence: Synthetic oligonucleotide
  Target: LAMA2; (-) strand; PAM type: YTN; PAM sequence: CTA
gctaaccagaaattcaactc

SEQ ID NO: 205745 - DNA, 20 bp, Artificial Sequence
  Description of Artificial Sequence: Synthetic oligonucleotide
  Target: LAMA2; (-) strand; PAM type: YTN; PAM sequence: CTA
gtctagctaaccagaaattc

SEQ ID NO: 205746 - DNA, 20 bp, Artificial Sequence
  Description of Artificial Sequence: Synthetic oligonucleotide
  Target: LAMA2; (-) strand; PAM type: YTN; PAM sequence: CTA
ccctagtctagctaaccaga

SEQ ID NO: 205747 - DNA, 20 bp, Artificial Sequence
  Description of Artificial Sequence: Synthetic oligonucleotide
  Target: LAMA2; (-) strand; PAM type: YTN; PAM sequence: TTC
ctaccctagtctagctaacc

SEQ ID NO: 205748 - DNA, 20 bp, Artificial Sequence
  Description of Artificial Sequence: Synthetic oligonucleotide
  Target: LAMA2; (-) strand; PAM type: YTN; PAM sequence: CTT
cctaccctagtctagctaac

SEQ ID NO: 205749 - DNA, 20 bp, Artificial Sequence
  Description of Artificial Sequence: Synthetic oligonucleotide
  Target: LAMA2; (-) strand; PAM type: YTN; PAM sequence: CTG
gtgtcttcctaccctagtct

SEQ ID NO: 205750 - DNA, 20 bp, Artificial Sequence
  Description of Artificial Sequence: Synthetic oligonucleotide
  Target: LAMA2; (-) strand; PAM type: YTN; PAM sequence: TTG
aaatgtcaaagcacaaaaca

SEQ ID NO: 205751 - DNA, 20 bp, Artificial Sequence
  Description of Artificial Sequence: Synthetic oligonucleotide
  Target: LAMA2; (-) strand; PAM type: YTN; PAM sequence: CTA
caacaaaatcatcaatgtca

SEQ ID NO: 205752 - DNA, 20 bp, Artificial Sequence
  Description of Artificial Sequence: Synthetic oligonucleotide
  Target: LAMA2; (-) strand; PAM type: YTN; PAM sequence: TTC
aaggaggtgacgtacctaca

SEQ ID NO: 205753 - DNA, 20 bp, Artificial Sequence
  Description of Artificial Sequence: Synthetic oligonucleotide
  Target: LAMA2; (-) strand; PAM type: YTN; PAM sequence: TTC
atatcagtagattcaaggag

SEQ ID NO: 205754 - DNA, 20 bp, Artificial Sequence
  Description of Artificial Sequence: Synthetic oligonucleotide
  Target: LAMA2; (-) strand; PAM type: YTN; PAM sequence: CTT
catatcagtagattcaagga

SEQ ID NO: 205755 - DNA, 20 bp, Artificial Sequence
  Description of Artificial Sequence: Synthetic oligonucleotide
  Target: LAMA2; (-) strand; PAM type: YTN; PAM sequence: CTC
ttcatatcagtagattcaag

SEQ ID NO: 205756 - DNA, 20 bp, Artificial Sequence
  Description of Artificial Sequence: Synthetic oligonucleotide
  Target: LAMA2; (-) strand; PAM type: YTN; PAM sequence: TTC
tcttcatatcagtagattca

SEQ ID NO: 205757 - DNA, 20 bp, Artificial Sequence
  Description of Artificial Sequence: Synthetic oligonucleotide
  Target: LAMA2; (-) strand; PAM type: YTN; PAM sequence: TTT
ctcttcatatcagtagattc

SEQ ID NO: 205758 - DNA, 20 bp, Artificial Sequence
  Description of Artificial Sequence: Synthetic oligonucleotide
  Target: LAMA2; (-) strand; PAM type: YTN; PAM sequence: CTT
tctcttcatatcagtagatt

SEQ ID NO: 205759 - DNA, 20 bp, Artificial Sequence
  Description of Artificial Sequence: Synthetic oligonucleotide
  Target: LAMA2; (-) strand; PAM type: YTN; PAM sequence: TTA
tagctttctcttcatatcag

SEQ ID NO: 205760 - DNA, 20 bp, Artificial Sequence
  Description of Artificial Sequence: Synthetic oligonucleotide
  Target: LAMA2; (-) strand; PAM type: YTN; PAM sequence: TTA
gttatagctttctcttcata

SEQ ID NO: 205761 - DNA, 20 bp, Artificial Sequence
  Description of Artificial Sequence: Synthetic oligonucleotide
  Target: LAMA2; (-) strand; PAM type: YTN; PAM sequence: TTT
agttatagctttctcttcat

SEQ ID NO: 205762 - DNA, 20 bp, Artificial Sequence
  Description of Artificial Sequence: Synthetic oligonucleotide
  Target: LAMA2; (-) strand; PAM type: YTN; PAM sequence: CTT
tagttatagctttctcttca

SEQ ID NO: 205763 - DNA, 20 bp, Artificial Sequence
  Description of Artificial Sequence: Synthetic oligonucleotide
  Target: LAMA2; (-) strand; PAM type: YTN; PAM sequence: TTA
actttagttatagctttctc

SEQ ID NO: 205764 - DNA, 20 bp, Artificial Sequence
  Description of Artificial Sequence: Synthetic oligonucleotide
  Target: LAMA2; (-) strand; PAM type: YTN; PAM sequence: CTT
aactttagttatagctttct

SEQ ID NO: 205765 - DNA, 20 bp, Artificial Sequence
  Description of Artificial Sequence: Synthetic oligonucleotide
  Target: LAMA2; (-) strand; PAM type: YTN; PAM sequence: TTG
tcttaactttagttatagct

SEQ ID NO: 205766 - DNA, 20 bp, Artificial Sequence
  Description of Artificial Sequence: Synthetic oligonucleotide
  Target: LAMA2; (-) strand; PAM type: YTN; PAM sequence: TTA
acattgtcttaactttagtt

SEQ ID NO: 205767 - DNA, 20 bp, Artificial Sequence
  Description of Artificial Sequence: Synthetic oligonucleotide
  Target: LAMA2; (-) strand; PAM type: YTN; PAM sequence: TTT
aacattgtcttaactttagt

SEQ ID NO: 205768 - DNA, 20 bp, Artificial Sequence
  Description of Artificial Sequence: Synthetic oligonucleotide
  Target: LAMA2; (-) strand; PAM type: YTN; PAM sequence: CTT
taacattgtcttaactttag

SEQ ID NO: 205769 - DNA, 20 bp, Artificial Sequence
  Description of Artificial Sequence: Synthetic oligonucleotide
  Target: LAMA2; (-) strand; PAM type: YTN; PAM sequence: TTA
ctttaacattgtcttaactt

SEQ ID NO: 205770 - DNA, 20 bp, Artificial Sequence
  Description of Artificial Sequence: Synthetic oligonucleotide
  Target: LAMA2; (-) strand; PAM type: YTN; PAM sequence: CTT
actttaacattgtcttaact

SEQ ID NO: 205771 - DNA, 20 bp, Artificial Sequence
  Description of Artificial Sequence: Synthetic oligonucleotide
  Target: LAMA2; (-) strand; PAM type: YTN; PAM sequence: TTG
gaccttactttaacattgtc

SEQ ID NO: 205772 - DNA, 20 bp, Artificial Sequence
  Description of Artificial Sequence: Synthetic oligonucleotide
  Target: LAMA2; (-) strand; PAM type: YTN; PAM sequence: CTG
agaattggaccttactttaa

SEQ ID NO: 205773 - DNA, 20 bp, Artificial Sequence
  Description of Artificial Sequence: Synthetic oligonucleotide
  Target: LAMA2; (-) strand; PAM type: YTN; PAM sequence: CTG
tagataactgagaattggac

SEQ ID NO: 205774 - DNA, 20 bp, Artificial Sequence
  Description of Artificial Sequence: Synthetic oligonucleotide
  Target: LAMA2; (-) strand; PAM type: YTN; PAM sequence: TTG
gatagccctgtagataactg

SEQ ID NO: 205775 - DNA, 20 bp, Artificial Sequence
  Description of Artificial Sequence: Synthetic oligonucleotide
  Target: LAMA2; (-) strand; PAM type: YTN; PAM sequence: TTT
ggatagccctgtagataact

SEQ ID NO: 205776 - DNA, 20 bp, Artificial Sequence
  Description of Artificial Sequence: Synthetic oligonucleotide
  Target: LAMA2; (-) strand; PAM type: YTN; PAM sequence: TTT
tggatagccctgtagataac

SEQ ID NO: 205777 - DNA, 20 bp, Artificial Sequence
  Description of Artificial Sequence: Synthetic oligonucleotide
  Target: LAMA2; (-) strand; PAM type: YTN; PAM sequence: CTT
ttggatagccctgtagataa

SEQ ID NO: 205778 - DNA, 20 bp, Artificial Sequence
  Description of Artificial Sequence: Synthetic oligonucleotide
  Target: LAMA2; (-) strand; PAM type: YTN; PAM sequence: TTC
ttttggatagccctgtagat

SEQ ID NO: 205779 - DNA, 20 bp, Artificial Sequence
  Description of Artificial Sequence: Synthetic oligonucleotide
  Target: LAMA2; (-) strand; PAM type: YTN; PAM sequence: TTT
cttttggatagccctgtaga

SEQ ID NO: 205780 - DNA, 20 bp, Artificial Sequence
  Description of Artificial Sequence: Synthetic oligonucleotide
  Target: LAMA2; (-) strand; PAM type: YTN; PAM sequence: TTT
tcttttggatagccctgtag

SEQ ID NO: 205781 - DNA, 20 bp, Artificial Sequence
  Description of Artificial Sequence: Synthetic oligonucleotide
  Target: LAMA2; (-) strand; PAM type: YTN; PAM sequence: TTT
ttcttttggatagccctgta

SEQ ID NO: 205782 - DNA, 20 bp, Artificial Sequence
  Description of Artificial Sequence: Synthetic oligonucleotide
  Target: LAMA2; (-) strand; PAM type: YTN; PAM sequence: TTC
catttttcttttggatagcc

SEQ ID NO: 205783 - DNA, 20 bp, Artificial Sequence
  Description of Artificial Sequence: Synthetic oligonucleotide
  Target: LAMA2; (-) strand; PAM type: YTN; PAM sequence: TTT
ccatttttcttttggatagc

SEQ ID NO: 205784 - DNA, 20 bp, Artificial Sequence
  Description of Artificial Sequence: Synthetic oligonucleotide
  Target: LAMA2; (-) strand; PAM type: YTN; PAM sequence: TTA
aatgaaatttccatttttct

SEQ ID NO: 205785 - DNA, 20 bp, Artificial Sequence
  Description of Artificial Sequence: Synthetic oligonucleotide
  Target: LAMA2; (-) strand; PAM type: YTN; PAM sequence: TTT
aaatgaaatttccatttttc

SEQ ID NO: 205786 - DNA, 20 bp, Artificial Sequence
  Description of Artificial Sequence: Synthetic oligonucleotide
  Target: LAMA2; (-) strand; PAM type: YTN; PAM sequence: TTT
taaatgaaatttccattttt

SEQ ID NO: 205787 - DNA, 20 bp, Artificial Sequence
  Description of Artificial Sequence: Synthetic oligonucleotide
  Target: LAMA2; (-) strand; PAM type: YTN; PAM sequence: CTA
ttttaaatgaaatttccatt

SEQ ID NO: 205788 - DNA, 20 bp, Artificial Sequence
  Description of Artificial Sequence: Synthetic oligonucleotide
  Target: LAMA2; (-) strand; PAM type: YTN; PAM sequence: TTA
aaagatgcagctattttaaa

SEQ ID NO: 205789 - DNA, 20 bp, Artificial Sequence
  Description of Artificial Sequence: Synthetic oligonucleotide
  Target: LAMA2; (-) strand; PAM type: YTN; PAM sequence: CTT
aaaagatgcagctattttaa

SEQ ID NO: 205790 - DNA, 20 bp, Artificial Sequence
  Description of Artificial Sequence: Synthetic oligonucleotide
  Target: LAMA2; (-) strand; PAM type: YTN; PAM sequence: CTA
cttaaaagatgcagctattt

SEQ ID NO: 205791 - DNA, 20 bp, Artificial Sequence
  Description of Artificial Sequence: Synthetic oligonucleotide
  Target: LAMA2; (-) strand; PAM type: YTN; PAM sequence: TTC
ctacttaaaagatgcagcta

SEQ ID NO: 205792 - DNA, 20 bp, Artificial Sequence
  Description of Artificial Sequence: Synthetic oligonucleotide
  Target: LAMA2; (-) strand; PAM type: YTN; PAM sequence: CTG
gcatataatagcccaaaata

SEQ ID NO: 205793 - DNA, 20 bp, Artificial Sequence
  Description of Artificial Sequence: Synthetic oligonucleotide
  Target: LAMA2; (-) strand; PAM type: YTN; PAM sequence: TTA
aatagcaccagtgatgagtc

SEQ ID NO: 205794 - DNA, 20 bp, Artificial Sequence
  Description of Artificial Sequence: Synthetic oligonucleotide
  Target: LAMA2; (-) strand; PAM type: YTN; PAM sequence: TTG
atgggaggagaaattaaata

SEQ ID NO: 205795 - DNA, 20 bp, Artificial Sequence
  Description of Artificial Sequence: Synthetic oligonucleotide
  Target: LAMA2; (-) strand; PAM type: YTN; PAM sequence: CTC
attgatgggaggagaaatta

SEQ ID NO: 205796 - DNA, 20 bp, Artificial Sequence
  Description of Artificial Sequence: Synthetic oligonucleotide
  Target: LAMA2; (-) strand; PAM type: YTN; PAM sequence: CTC
tcattgatgggaggagaaat

SEQ ID NO: 205797 - DNA, 20 bp, Artificial Sequence
  Description of Artificial Sequence: Synthetic oligonucleotide
  Target: LAMA2; (-) strand; PAM type: YTN; PAM sequence: CTC
agggagagctctcattgatg

SEQ ID NO: 205798 - DNA, 20 bp, Artificial Sequence
  Description of Artificial Sequence: Synthetic oligonucleotide
  Target: LAMA2; (-) strand; PAM type: YTN; PAM sequence: CTC
acaatgtgtctcagggagag

SEQ ID NO: 205799 - DNA, 20 bp, Artificial Sequence
  Description of Artificial Sequence: Synthetic oligonucleotide
  Target: LAMA2; (-) strand; PAM type: YTN; PAM sequence: CTC
agaaagatctcacaatgtgt

SEQ ID NO: 205800 - DNA, 20 bp, Artificial Sequence
  Description of Artificial Sequence: Synthetic oligonucleotide
  Target: LAMA2; (-) strand; PAM type: YTN; PAM sequence: TTC
atcctcagaaagatctcaca

SEQ ID NO: 205801 - DNA, 20 bp, Artificial Sequence
  Description of Artificial Sequence: Synthetic oligonucleotide
  Target: LAMA2; (-) strand; PAM type: YTN; PAM sequence: TTT
catcctcagaaagatctcac

SEQ ID NO: 205802 - DNA, 20 bp, Artificial Sequence
  Description of Artificial Sequence: Synthetic oligonucleotide
  Target: LAMA2; (-) strand; PAM type: YTN; PAM sequence: TTA
agtgatttcatcctcagaaa

SEQ ID NO: 205803 - DNA, 20 bp, Artificial Sequence
  Description of Artificial Sequence: Synthetic oligonucleotide
  Target: LAMA2; (-) strand; PAM type: YTN; PAM sequence: CTG
gggttaagtgatttcatcct

SEQ ID NO: 205804 - DNA, 20 bp, Artificial Sequence
  Description of Artificial Sequence: Synthetic oligonucleotide
  Target: LAMA2; (-) strand; PAM type: YTN; PAM sequence: TTG
ctggggttaagtgatttcat

SEQ ID NO: 205805 - DNA, 20 bp, Artificial Sequence
  Description of Artificial Sequence: Synthetic oligonucleotide
  Target: LAMA2; (-) strand; PAM type: YTN; PAM sequence: CTG
aaaataatcagtggcgttgc

SEQ ID NO: 205806 - DNA, 20 bp, Artificial Sequence
  Description of Artificial Sequence: Synthetic oligonucleotide
  Target: LAMA2; (-) strand; PAM type: YTN; PAM sequence: TTG
tagctgaaaataatcagtgg

SEQ ID NO: 205807 - DNA, 20 bp, Artificial Sequence
  Description of Artificial Sequence: Synthetic oligonucleotide
  Target: LAMA2; (-) strand; PAM type: YTN; PAM sequence: TTG
ttgtagctgaaaataatcag

SEQ ID NO: 205808 - DNA, 20 bp, Artificial Sequence
  Description of Artificial Sequence: Synthetic oligonucleotide
  Target: LAMA2; (-) strand; PAM type: YTN; PAM sequence: TTG
atgtgtgtgcatagaagtgt

SEQ ID NO: 205809 - DNA, 20 bp, Artificial Sequence
  Description of Artificial Sequence: Synthetic oligonucleotide
  Target: LAMA2; (-) strand; PAM type: YTN; PAM sequence: TTG
gcgtgattgatgtgtgtgca

SEQ ID NO: 205810 - DNA, 20 bp, Artificial Sequence
  Description of Artificial Sequence: Synthetic oligonucleotide
  Target: LAMA2; (-) strand; PAM type: YTN; PAM sequence: TTT
ggcgtgattgatgtgtgtgc

SEQ ID NO: 205811 - DNA, 20 bp, Artificial Sequence
  Description of Artificial Sequence: Synthetic oligonucleotide
  Target: LAMA2; (-) strand; PAM type: YTN; PAM sequence: TTT
tggcgtgattgatgtgtgtg

SEQ ID NO: 205812 - DNA, 20 bp, Artificial Sequence
  Description of Artificial Sequence: Synthetic oligonucleotide
  Target: LAMA2; (-) strand; PAM type: YTN; PAM sequence: TTT
ttggcgtgattgatgtgtgt

SEQ ID NO: 205813 - DNA, 20 bp, Artificial Sequence
  Description of Artificial Sequence: Synthetic oligonucleotide
  Target: LAMA2; (-) strand; PAM type: YTN; PAM sequence: TTT
tttggcgtgattgatgtgtg

SEQ ID NO: 205814 - DNA, 20 bp, Artificial Sequence
  Description of Artificial Sequence: Synthetic oligonucleotide
  Target: LAMA2; (-) strand; PAM type: YTN; PAM sequence: TTA
gtcagaatgttttttggcgt

SEQ ID NO: 205815 - DNA, 20 bp, Artificial Sequence
  Description of Artificial Sequence: Synthetic oligonucleotide
  Target: LAMA2; (-) strand; PAM type: YTN; PAM sequence: TTT
agtcagaatgttttttggcg

SEQ ID NO: 205816 - DNA, 20 bp, Artificial Sequence
  Description of Artificial Sequence: Synthetic oligonucleotide
  Target: LAMA2; (-) strand; PAM type: YTN; PAM sequence: TTT
tagtcagaatgttttttggc

SEQ ID NO: 205817 - DNA, 20 bp, Artificial Sequence
  Description of Artificial Sequence: Synthetic oligonucleotide
  Target: LAMA2; (-) strand; PAM type: YTN; PAM sequence: TTT
ttagtcagaatgttttttgg

SEQ ID NO: 205818 - DNA, 20 bp, Artificial Sequence
  Description of Artificial Sequence: Synthetic oligonucleotide
  Target: LAMA2; (-) strand; PAM type: YTN; PAM sequence: CTT
tttagtcagaatgttttttg

SEQ ID NO: 205819 - DNA, 20 bp, Artificial Sequence
  Description of Artificial Sequence: Synthetic oligonucleotide
  Target: LAMA2; (-) strand; PAM type: YTN; PAM sequence: TTG
agctttttagtcagaatgtt

SEQ ID NO: 205820 - DNA, 20 bp, Artificial Sequence
  Description of Artificial Sequence: Synthetic oligonucleotide
  Target: LAMA2; (-) strand; PAM type: YTN; PAM sequence: TTT
gagctttttagtcagaatgt

SEQ ID NO: 205821 - DNA, 20 bp, Artificial Sequence
  Description of Artificial Sequence: Synthetic oligonucleotide
  Target: LAMA2; (-) strand; PAM type: YTN; PAM sequence: TTT
tgagctttttagtcagaatg

SEQ ID NO: 205822 - DNA, 20 bp, Artificial Sequence
  Description of Artificial Sequence: Synthetic oligonucleotide
  Target: LAMA2; (-) strand; PAM type: YTN; PAM sequence: CTT
ttgagctttttagtcagaat

SEQ ID NO: 205823 - DNA, 20 bp, Artificial Sequence
  Description of Artificial Sequence: Synthetic oligonucleotide
  Target: LAMA2; (-) strand; PAM type: YTN; PAM sequence: TTC
ttttgagctttttagtcaga

SEQ ID NO: 205824 - DNA, 20 bp, Artificial Sequence
  Description of Artificial Sequence: Synthetic oligonucleotide
  Target: LAMA2; (-) strand; PAM type: YTN; PAM sequence: TTT
cttttgagctttttagtcag

SEQ ID NO: 205825 - DNA, 20 bp, Artificial Sequence
  Description of Artificial Sequence: Synthetic oligonucleotide
  Target: LAMA2; (-) strand; PAM type: YTN; PAM sequence: TTT
tcttttgagctttttagtca

SEQ ID NO: 205826 - DNA, 20 bp, Artificial Sequence
  Description of Artificial Sequence: Synthetic oligonucleotide
  Target: LAMA2; (-) strand; PAM type: YTN; PAM sequence: TTA
ttttcttttgagctttttag

SEQ ID NO: 205827 - DNA, 20 bp, Artificial Sequence
  Description of Artificial Sequence: Synthetic oligonucleotide
  Target: LAMA2; (-) strand; PAM type: YTN; PAM sequence: TTA
attattttcttttgagcttt

SEQ ID NO: 205828 - DNA, 20 bp, Artificial Sequence
  Description of Artificial Sequence: Synthetic oligonucleotide
  Target: LAMA2; (-) strand; PAM type: YTN; PAM sequence: CTT
aattattttcttttgagctt

SEQ ID NO: 205829 - DNA, 20 bp, Artificial Sequence
  Description of Artificial Sequence: Synthetic oligonucleotide
  Target: LAMA2; (-) strand; PAM type: YTN; PAM sequence: TTC
atatggaaaagagaatgctt

SEQ ID NO: 205830 - DNA, 20 bp, Artificial Sequence
  Description of Artificial Sequence: Synthetic oligonucleotide
  Target: LAMA2; (-) strand; PAM type: YTN; PAM sequence: CTT
catatggaaaagagaatgct

SEQ ID NO: 205831 - DNA, 20 bp, Artificial Sequence
  Description of Artificial Sequence: Synthetic oligonucleotide
  Target: LAMA2; (-) strand; PAM type: YTN; PAM sequence: CTG
gtcagtaatatcttcatatg

SEQ ID NO: 205832 - DNA, 20 bp, Artificial Sequence
  Description of Artificial Sequence: Synthetic oligonucleotide
  Target: LAMA2; (-) strand; PAM type: YTN; PAM sequence: CTG
ctggtcagtaatatcttcat

SEQ ID NO: 205833 - DNA, 20 bp, Artificial Sequence
  Description of Artificial Sequence: Synthetic oligonucleotide
  Target: LAMA2; (-) strand; PAM type: YTN; PAM sequence: TTC
tgctggtcagtaatatcttc

SEQ ID NO: 205834 - DNA, 20 bp, Artificial Sequence
  Description of Artificial Sequence: Synthetic oligonucleotide
  Target: LAMA2; (-) strand; PAM type: YTN; PAM sequence: TTT
ctgctggtcagtaatatctt

SEQ ID NO: 205835 - DNA, 20 bp, Artificial Sequence
  Description of Artificial Sequence: Synthetic oligonucleotide
  Target: LAMA2; (-) strand; PAM type: YTN; PAM sequence: CTT
tctgctggtcagtaatatct

SEQ ID NO: 205836 - DNA, 20 bp, Artificial Sequence
  Description of Artificial Sequence: Synthetic oligonucleotide
  Target: LAMA2; (-) strand; PAM type: YTN; PAM sequence: TTC
cactttctgctggtcagtaa

SEQ ID NO: 205837 - DNA, 20 bp, Artificial Sequence
  Description of Artificial Sequence: Synthetic oligonucleotide
  Target: LAMA2; (-) strand; PAM type: YTN; PAM sequence: TTT
ccactttctgctggtcagta

SEQ ID NO: 205838 - DNA, 20 bp, Artificial Sequence
  Description of Artificial Sequence: Synthetic oligonucleotide
  Target: LAMA2; (-) strand; PAM type: YTN; PAM sequence: TTT
tccactttctgctggtcagt

SEQ ID NO: 205839 - DNA, 20 bp, Artificial Sequence
  Description of Artificial Sequence: Synthetic oligonucleotide
  Target: LAMA2; (-) strand; PAM type: YTN; PAM sequence: TTT
ttccactttctgctggtcag

SEQ ID NO: 205840 - DNA, 20 bp, Artificial Sequence
  Description of Artificial Sequence: Synthetic oligonucleotide
  Target: LAMA2; (-) strand; PAM type: YTN; PAM sequence: TTA
tgtatacatttttccacttt

SEQ ID NO: 205841 - DNA, 20 bp, Artificial Sequence
  Description of Artificial Sequence: Synthetic oligonucleotide
  Target: LAMA2; (-) strand; PAM type: YTN; PAM sequence: CTA
taaacattatgtatacattt

SEQ ID NO: 205842 - DNA, 20 bp, Artificial Sequence
  Description of Artificial Sequence: Synthetic oligonucleotide
  Target: LAMA2; (-) strand; PAM type: YTN; PAM sequence: TTA
agtcagtatctataaacatt

SEQ ID NO: 205843 - DNA, 20 bp, Artificial Sequence
  Description of Artificial Sequence: Synthetic oligonucleotide
  Target: LAMA2; (-) strand; PAM type: YTN; PAM sequence: TTG
ttaagtcagtatctataaac

SEQ ID NO: 205844 - DNA, 20 bp, Artificial Sequence
  Description of Artificial Sequence: Synthetic oligonucleotide
  Target: LAMA2; (-) strand; PAM type: YTN; PAM sequence: CTC
attgttaagtcagtatctat

SEQ ID NO: 205845 - DNA, 20 bp, Artificial Sequence
  Description of Artificial Sequence: Synthetic oligonucleotide
  Target: LAMA2; (-) strand; PAM type: YTN; PAM sequence: TTC
actcattgttaagtcagtat

SEQ ID NO: 205846 - DNA, 20 bp, Artificial Sequence
  Description of Artificial Sequence: Synthetic oligonucleotide
  Target: LAMA2; (-) strand; PAM type: YTN; PAM sequence: CTG
ttcactcattgttaagtcag

SEQ ID NO: 205847 - DNA, 20 bp, Artificial Sequence
  Description of Artificial Sequence: Synthetic oligonucleotide
  Target: LAMA2; (-) strand; PAM type: YTN; PAM sequence: TTG
tgagacgcaactgttcactc

SEQ ID NO: 205848 - DNA, 20 bp, Artificial Sequence
  Description of Artificial Sequence: Synthetic oligonucleotide
  Target: LAMA2; (-) strand; PAM type: YTN; PAM sequence: TTT
gtgagacgcaactgttcact

SEQ ID NO: 205849 - DNA, 20 bp, Artificial Sequence
  Description of Artificial Sequence: Synthetic oligonucleotide
  Target: LAMA2; (-) strand; PAM type: YTN; PAM sequence: CTG
aaatttgtgagacgcaactg

SEQ ID NO: 205850 - DNA, 20 bp, Artificial Sequence
  Description of Artificial Sequence: Synthetic oligonucleotide
  Target: LAMA2; (-) strand; PAM type: YTN; PAM sequence: CTG
ctgaaatttgtgagacgcaa

SEQ ID NO: 205851 - DNA, 20 bp, Artificial Sequence
  Description of Artificial Sequence: Synthetic oligonucleotide
  Target: LAMA2; (-) strand; PAM type: YTN; PAM sequence: CTG
tcaagacaacgctgctgaaa

SEQ ID NO: 205852 - DNA, 20 bp, Artificial Sequence
  Description of Artificial Sequence: Synthetic oligonucleotide
  Target: LAMA2; (-) strand; PAM type: YTN; PAM sequence: CTA
gcaacacagaagcaccatga

SEQ ID NO: 205853 - DNA, 20 bp, Artificial Sequence
  Description of Artificial Sequence: Synthetic oligonucleotide
  Target: LAMA2; (-) strand; PAM type: YTN; PAM sequence: TTG
cctagcaacacagaagcacc

SEQ ID NO: 205854 - DNA, 20 bp, Artificial Sequence
  Description of Artificial Sequence: Synthetic oligonucleotide
  Target: LAMA2; (-) strand; PAM type: YTN; PAM sequence: CTC
gggttgcctagcaacacaga

SEQ ID NO: 205855 - DNA, 20 bp, Artificial Sequence
  Description of Artificial Sequence: Synthetic oligonucleotide
  Target: LAMA2; (-) strand; PAM type: YTN; PAM sequence: TTC
catcccctcgggttgcctag

SEQ ID NO: 205856 - DNA, 20 bp, Artificial Sequence
  Description of Artificial Sequence: Synthetic oligonucleotide
  Target: LAMA2; (-) strand; PAM type: YTN; PAM sequence: TTT
ccatcccctcgggttgccta

SEQ ID NO: 205857 - DNA, 20 bp, Artificial Sequence
  Description of Artificial Sequence: Synthetic oligonucleotide
  Target: LAMA2; (-) strand; PAM type: YTN; PAM sequence: TTT
tccatcccctcgggttgcct

SEQ ID NO: 205858 - DNA, 20 bp, Artificial Sequence
  Description of Artificial Sequence: Synthetic oligonucleotide
  Target: LAMA2; (-) strand; PAM type: YTN; PAM sequence: TTA
aattttccatcccctcgggt

SEQ ID NO: 205859 - DNA, 20 bp, Artificial Sequence
  Description of Artificial Sequence: Synthetic oligonucleotide
  Target: LAMA2; (-) strand; PAM type: YTN; PAM sequence: TTT
aaattttccatcccctcggg

SEQ ID NO: 205860 - DNA, 20 bp, Artificial Sequence
  Description of Artificial Sequence: Synthetic oligonucleotide
  Target: LAMA2; (-) strand; PAM type: YTN; PAM sequence: TTG
agtttaaattttccatcccc

SEQ ID NO: 205861 - DNA, 20 bp, Artificial Sequence
  Description of Artificial Sequence: Synthetic oligonucleotide
  Target: LAMA2; (-) strand; PAM type: YTN; PAM sequence: TTT
gagtttaaattttccatccc

SEQ ID NO: 205862 - DNA, 20 bp, Artificial Sequence
  Description of Artificial Sequence: Synthetic oligonucleotide
  Target: LAMA2; (-) strand; PAM type: YTN; PAM sequence: CTA
acatacataagtaaatttga

SEQ ID NO: 205863 - DNA, 20 bp, Artificial Sequence
  Description of Artificial Sequence: Synthetic oligonucleotide
  Target: LAMA2; (-) strand; PAM type: YTN; PAM sequence: CTA
aaatctaacatacataagta

SEQ ID NO: 205864 - DNA, 20 bp, Artificial Sequence
  Description of Artificial Sequence: Synthetic oligonucleotide
  Target: LAMA2; (-) strand; PAM type: YTN; PAM sequence: CTC
aatataatatgtctaaaatc

SEQ ID NO: 205865 - DNA, 20 bp, Artificial Sequence
  Description of Artificial Sequence: Synthetic oligonucleotide
  Target: LAMA2; (-) strand; PAM type: YTN; PAM sequence: CTC
tcaatataatatgtctaaaa

SEQ ID NO: 205866 - DNA, 20 bp, Artificial Sequence
  Description of Artificial Sequence: Synthetic oligonucleotide
  Target: LAMA2; (-) strand; PAM type: YTN; PAM sequence: CTG
taatgacatgtgtaatacac

SEQ ID NO: 205867 - DNA, 20 bp, Artificial Sequence
  Description of Artificial Sequence: Synthetic oligonucleotide
  Target: LAMA2; (-) strand; PAM type: YTN; PAM sequence: CTA
gcctgtaatgacatgtgtaa

SEQ ID NO: 205868 - DNA, 20 bp, Artificial Sequence
  Description of Artificial Sequence: Synthetic oligonucleotide
  Target: LAMA2; (-) strand; PAM type: YTN; PAM sequence: CTC
acataaaagacagaatagaa

SEQ ID NO: 205869 - DNA, 20 bp, Artificial Sequence
  Description of Artificial Sequence: Synthetic oligonucleotide
  Target: LAMA2; (-) strand; PAM type: YTN; PAM sequence: CTG
agaaactcacataaaagaca

SEQ ID NO: 205870 - DNA, 20 bp, Artificial Sequence
  Description of Artificial Sequence: Synthetic oligonucleotide
  Target: LAMA2; (-) strand; PAM type: YTN; PAM sequence: TTC
atgtatatactgagaaactc

SEQ ID NO: 205871 - DNA, 20 bp, Artificial Sequence
  Description of Artificial Sequence: Synthetic oligonucleotide
  Target: LAMA2; (-) strand; PAM type: YTN; PAM sequence: TTT
catgtatatactgagaaact

SEQ ID NO: 205872 - DNA, 20 bp, Artificial Sequence
  Description of Artificial Sequence: Synthetic oligonucleotide
  Target: LAMA2; (-) strand; PAM type: YTN; PAM sequence: CTT
tcatgtatatactgagaaac

SEQ ID NO: 205873 - DNA, 20 bp, Artificial Sequence
  Description of Artificial Sequence: Synthetic oligonucleotide
  Target: LAMA2; (-) strand; PAM type: YTN; PAM sequence: TTC
aaaaatagaggagcaaggat

SEQ ID NO: 205874 - DNA, 20 bp, Artificial Sequence
  Description of Artificial Sequence: Synthetic oligonucleotide
  Target: LAMA2; (-) strand; PAM type: YTN; PAM sequence: TTT
caaaaatagaggagcaagga

SEQ ID NO: 205875 - DNA, 20 bp, Artificial Sequence
  Description of Artificial Sequence: Synthetic oligonucleotide
  Target: LAMA2; (-) strand; PAM type: YTN; PAM sequence: TTT
tcaaaaatagaggagcaagg

SEQ ID NO: 205876 - DNA, 20 bp, Artificial Sequence
  Description of Artificial Sequence: Synthetic oligonucleotide
  Target: LAMA2; (-) strand; PAM type: YTN; PAM sequence: TTA
attttcaaaaatagaggagc

SEQ ID NO: 205877 - DNA, 20 bp, Artificial Sequence
  Description of Artificial Sequence: Synthetic oligonucleotide
  Target: LAMA2; (-) strand; PAM type: YTN; PAM sequence: CTA
tgttaattttcaaaaataga

SEQ ID NO: 205878 - DNA, 20 bp, Artificial Sequence
  Description of Artificial Sequence: Synthetic oligonucleotide
  Target: LAMA2; (-) strand; PAM type: YTN; PAM sequence: TTA
ggactatgttaattttcaaa

SEQ ID NO: 205879 - DNA, 20 bp, Artificial Sequence
  Description of Artificial Sequence: Synthetic oligonucleotide
  Target: LAMA2; (-) strand; PAM type: YTN; PAM sequence: CTG
tcaaccataaaaatgcatat

SEQ ID NO: 205880 - DNA, 20 bp, Artificial Sequence
  Description of Artificial Sequence: Synthetic oligonucleotide
  Target: LAMA2; (-) strand; PAM type: YTN; PAM sequence: CTC
atataccacgactgtcaacc

SEQ ID NO: 205881 - DNA, 20 bp, Artificial Sequence
  Description of Artificial Sequence: Synthetic oligonucleotide
  Target: LAMA2; (-) strand; PAM type: YTN; PAM sequence: CTC
tcatataccacgactgtcaa

SEQ ID NO: 205882 - DNA, 20 bp, Artificial Sequence
  Description of Artificial Sequence: Synthetic oligonucleotide
  Target: LAMA2; (-) strand; PAM type: YTN; PAM sequence: TTC
tctcatataccacgactgtc

SEQ ID NO: 205883 - DNA, 20 bp, Artificial Sequence
  Description of Artificial Sequence: Synthetic oligonucleotide
  Target: LAMA2; (-) strand; PAM type: YTN; PAM sequence: TTT
ctctcatataccacgactgt

SEQ ID NO: 205884 - DNA, 20 bp, Artificial Sequence
  Description of Artificial Sequence: Synthetic oligonucleotide
  Target: LAMA2; (-) strand; PAM type: YTN; PAM sequence: TTT
tctctcatataccacgactg

SEQ ID NO: 205885 - DNA, 20 bp, Artificial Sequence
  Description of Artificial Sequence: Synthetic oligonucleotide
  Target: LAMA2; (-) strand; PAM type: YTN; PAM sequence: CTA
catattttctctcatatacc

SEQ ID NO: 205886 - DNA, 20 bp, Artificial Sequence
  Description of Artificial Sequence: Synthetic oligonucleotide
  Target: LAMA2; (-) strand; PAM type: YTN; PAM sequence: TTA
catcaaaggctacatatttt

SEQ ID NO: 205887 - DNA, 20 bp, Artificial Sequence
  Description of Artificial Sequence: Synthetic oligonucleotide
  Target: LAMA2; (-) strand; PAM type: YTN; PAM sequence: TTT
acatcaaaggctacatattt

SEQ ID NO: 205888 - DNA, 20 bp, Artificial Sequence
  Description of Artificial Sequence: Synthetic oligonucleotide
  Target: LAMA2; (-) strand; PAM type: YTN; PAM sequence: TTT
tacatcaaaggctacatatt

SEQ ID NO: 205889 - DNA, 20 bp, Artificial Sequence
  Description of Artificial Sequence: Synthetic oligonucleotide
  Target: LAMA2; (-) strand; PAM type: YTN; PAM sequence: TTT
ttacatcaaaggctacatat

SEQ ID NO: 205890 - DNA, 20 bp, Artificial Sequence
  Description of Artificial Sequence: Synthetic oligonucleotide
  Target: LAMA2; (-) strand; PAM type: YTN; PAM sequence: CTT
tttacatcaaaggctacata

SEQ ID NO: 205891 - DNA, 20 bp, Artificial Sequence
  Description of Artificial Sequence: Synthetic oligonucleotide
  Target: LAMA2; (-) strand; PAM type: YTN; PAM sequence: TTA
aaaacaatctttttacatca

SEQ ID NO: 205892 - DNA, 20 bp, Artificial Sequence
  Description of Artificial Sequence: Synthetic oligonucleotide
  Target: LAMA2; (-) strand; PAM type: YTN; PAM sequence: TTT
aaaaacaatctttttacatc

SEQ ID NO: 205893 - DNA, 20 bp, Artificial Sequence
  Description of Artificial Sequence: Synthetic oligonucleotide
  Target: LAMA2; (-) strand; PAM type: YTN; PAM sequence: TTT
taaaaacaatctttttacat

SEQ ID NO: 205894 - DNA, 20 bp, Artificial Sequence
  Description of Artificial Sequence: Synthetic oligonucleotide
  Target: LAMA2; (-) strand; PAM type: YTN; PAM sequence: TTT
ttaaaaacaatctttttaca

SEQ ID NO: 205895 - DNA, 20 bp, Artificial Sequence
  Description of Artificial Sequence: Synthetic oligonucleotide
  Target: LAMA2; (-) strand; PAM type: YTN; PAM sequence: TTT
tttaaaaacaatctttttac

SEQ ID NO: 205896 - DNA, 20 bp, Artificial Sequence
  Description of Artificial Sequence: Synthetic oligonucleotide
  Target: LAMA2; (-) strand; PAM type: YTN; PAM sequence: TTT
ttttaaaaacaatcttttta

SEQ ID NO: 205897 - DNA, 20 bp, Artificial Sequence
  Description of Artificial Sequence: Synthetic oligonucleotide
  Target: LAMA2; (-) strand; PAM type: YTN; PAM sequence: TTA
tgtttttttaaaaacaatct

SEQ ID NO: 205898 - DNA, 20 bp, Artificial Sequence
  Description of Artificial Sequence: Synthetic oligonucleotide
  Target: LAMA2; (-) strand; PAM type: YTN; PAM sequence: TTT
atgtttttttaaaaacaatc

SEQ ID NO: 205899 - DNA, 20 bp, Artificial Sequence
  Description of Artificial Sequence: Synthetic oligonucleotide
  Target: LAMA2; (-) strand; PAM type: YTN; PAM sequence: TTG
taaagtttatgtttttttaa

SEQ ID NO: 205900 - DNA, 20 bp, Artificial Sequence
  Description of Artificial Sequence: Synthetic oligonucleotide
  Target: LAMA2; (-) strand; PAM type: YTN; PAM sequence: CTG
acacacacaagcatatattg

SEQ ID NO: 205901 - DNA, 20 bp, Artificial Sequence
  Description of Artificial Sequence: Synthetic oligonucleotide
  Target: LAMA2; (-) strand; PAM type: YTN; PAM sequence: CTG
actgacacacacaagcatat

SEQ ID NO: 205902 - DNA, 20 bp, Artificial Sequence
  Description of Artificial Sequence: Synthetic oligonucleotide
  Target: LAMA2; (-) strand; PAM type: YTN; PAM sequence: CTC
tgactgacacacacaagcat

SEQ ID NO: 205903 - DNA, 20 bp, Artificial Sequence
  Description of Artificial Sequence: Synthetic oligonucleotide
  Target: LAMA2; (-) strand; PAM type: YTN; PAM sequence: CTC
cccctctgactgacacacac

SEQ ID NO: 205904 - DNA, 20 bp, Artificial Sequence
  Description of Artificial Sequence: Synthetic oligonucleotide
  Target: LAMA2; (-) strand; PAM type: YTN; PAM sequence: CTC
cacctccccctctgactgac

SEQ ID NO: 205905 - DNA, 20 bp, Artificial Sequence
  Description of Artificial Sequence: Synthetic oligonucleotide
  Target: LAMA2; (-) strand; PAM type: YTN; PAM sequence: CTC
tccacctccccctctgactg

SEQ ID NO: 205906 - DNA, 20 bp, Artificial Sequence
  Description of Artificial Sequence: Synthetic oligonucleotide
  Target: LAMA2; (-) strand; PAM type: YTN; PAM sequence: CTC
tctccacctccccctctgac

SEQ ID NO: 205907 - DNA, 20 bp, Artificial Sequence
  Description of Artificial Sequence: Synthetic oligonucleotide
  Target: LAMA2; (-) strand; PAM type: YTN; PAM sequence: CTG
cctctctccacctccccctc

SEQ ID NO: 205908 - DNA, 20 bp, Artificial Sequence
  Description of Artificial Sequence: Synthetic oligonucleotide
  Target: LAMA2; (-) strand; PAM type: YTN; PAM sequence: TTC
agaaacactgcctctctcca

SEQ ID NO: 205909 - DNA, 20 bp, Artificial Sequence
  Description of Artificial Sequence: Synthetic oligonucleotide
  Target: LAMA2; (-) strand; PAM type: YTN; PAM sequence: TTT
cagaaacactgcctctctcc

SEQ ID NO: 205910 - DNA, 20 bp, Artificial Sequence
  Description of Artificial Sequence: Synthetic oligonucleotide
  Target: LAMA2; (-) strand; PAM type: YTN; PAM sequence: TTG
tttcagaaacactgcctctc

SEQ ID NO: 205911 - DNA, 20 bp, Artificial Sequence
  Description of Artificial Sequence: Synthetic oligonucleotide
  Target: LAMA2; (-) strand; PAM type: YTN; PAM sequence: CTT
gtttcagaaacactgcctct

SEQ ID NO: 205912 - DNA, 20 bp, Artificial Sequence
  Description of Artificial Sequence: Synthetic oligonucleotide
  Target: LAMA2; (-) strand; PAM type: YTN; PAM sequence: CTC
ttgtttcagaaacactgcct

SEQ ID NO: 205913 - DNA, 20 bp, Artificial Sequence
  Description of Artificial Sequence: Synthetic oligonucleotide
  Target: LAMA2; (-) strand; PAM type: YTN; PAM sequence: TTC
atagatctcttgtttcagaa

SEQ ID NO: 205914 - DNA, 20 bp, Artificial Sequence
  Description of Artificial Sequence: Synthetic oligonucleotide
  Target: LAMA2; (-) strand; PAM type: YTN; PAM sequence: TTT
catagatctcttgtttcaga

SEQ ID NO: 205915 - DNA, 20 bp, Artificial Sequence
  Description of Artificial Sequence: Synthetic oligonucleotide
  Target: LAMA2; (-) strand; PAM type: YTN; PAM sequence: CTT
tcatagatctcttgtttcag

SEQ ID NO: 205916 - DNA, 20 bp, Artificial Sequence
  Description of Artificial Sequence: Synthetic oligonucleotide
  Target: LAMA2; (-) strand; PAM type: YTN; PAM sequence: TTC
tttcatagatctcttgtttc

SEQ ID NO: 205917 - DNA, 20 bp, Artificial Sequence
  Description of Artificial Sequence: Synthetic oligonucleotide
  Target: LAMA2; (-) strand; PAM type: YTN; PAM sequence: CTT
ctttcatagatctcttgttt

SEQ ID NO: 205918 - DNA, 20 bp, Artificial Sequence
  Description of Artificial Sequence: Synthetic oligonucleotide
  Target: LAMA2; (-) strand; PAM type: YTN; PAM sequence: TTC
ccttctttcatagatctctt

SEQ ID NO: 205919 - DNA, 20 bp, Artificial Sequence
  Description of Artificial Sequence: Synthetic oligonucleotide
  Target: LAMA2; (-) strand; PAM type: YTN; PAM sequence: CTG
ttcccttctttcatagatct

SEQ ID NO: 205920 - DNA, 20 bp, Artificial Sequence
  Description of Artificial Sequence: Synthetic oligonucleotide
  Target: LAMA2; (-) strand; PAM type: YTN; PAM sequence: CTA
acagactgttcccttctttc

SEQ ID NO: 205921 - DNA, 20 bp, Artificial Sequence
  Description of Artificial Sequence: Synthetic oligonucleotide
  Target: LAMA2; (-) strand; PAM type: YTN; PAM sequence: TTA
aatgagaagaaccaggtgga

SEQ ID NO: 205922 - DNA, 20 bp, Artificial Sequence
  Description of Artificial Sequence: Synthetic oligonucleotide
  Target: LAMA2; (-) strand; PAM type: YTN; PAM sequence: TTA
tagtaattaaatgagaagaa

SEQ ID NO: 205923 - DNA, 20 bp, Artificial Sequence
  Description of Artificial Sequence: Synthetic oligonucleotide
  Target: LAMA2; (-) strand; PAM type: YTN; PAM sequence: TTA
attatagtaattaaatgaga

SEQ ID NO: 205924 - DNA, 20 bp, Artificial Sequence
  Description of Artificial Sequence: Synthetic oligonucleotide
  Target: LAMA2; (-) strand; PAM type: YTN; PAM sequence: CTG
catatattaattatagtaat

SEQ ID NO: 205925 - DNA, 20 bp, Artificial Sequence
  Description of Artificial Sequence: Synthetic oligonucleotide
  Target: LAMA2; (-) strand; PAM type: YTN; PAM sequence: TTC
tgcatatattaattatagta

SEQ ID NO: 205926 - DNA, 20 bp, Artificial Sequence
  Description of Artificial Sequence: Synthetic oligonucleotide
  Target: LAMA2; (-) strand; PAM type: YTN; PAM sequence: CTT
ctgcatatattaattatagt

SEQ ID NO: 205927 - DNA, 20 bp, Artificial Sequence
  Description of Artificial Sequence: Synthetic oligonucleotide
  Target: LAMA2; (-) strand; PAM type: YTN; PAM sequence: TTC
ttctgcatatattaattata

SEQ ID NO: 205928 - DNA, 20 bp, Artificial Sequence
  Description of Artificial Sequence: Synthetic oligonucleotide
  Target: LAMA2; (-) strand; PAM type: YTN; PAM sequence: TTT
cttctgcatatattaattat

SEQ ID NO: 205929 - DNA, 20 bp, Artificial Sequence
  Description of Artificial Sequence: Synthetic oligonucleotide
  Target: LAMA2; (-) strand; PAM type: YTN; PAM sequence: TTT
tcttctgcatatattaatta

SEQ ID NO: 205930 - DNA, 20 bp, Artificial Sequence
  Description of Artificial Sequence: Synthetic oligonucleotide
  Target: LAMA2; (-) strand; PAM type: YTN; PAM sequence: TTT
ttcttctgcatatattaatt

SEQ ID NO: 205931 - DNA, 20 bp, Artificial Sequence
  Description of Artificial Sequence: Synthetic oligonucleotide
  Target: LAMA2; (-) strand; PAM type: YTN; PAM sequence: TTA
atttttcttctgcatatatt

SEQ ID NO: 205932 - DNA, 20 bp, Artificial Sequence
  Description of Artificial Sequence: Synthetic oligonucleotide
  Target: LAMA2; (-) strand; PAM type: YTN; PAM sequence: CTA
ttaatttttcttctgcatat

SEQ ID NO: 205933 - DNA, 20 bp, Artificial Sequence
  Description of Artificial Sequence: Synthetic oligonucleotide
  Target: LAMA2; (-) strand; PAM type: YTN; PAM sequence: TTA
agaaccctattaatttttct

SEQ ID NO: 205934 - DNA, 20 bp, Artificial Sequence
  Description of Artificial Sequence: Synthetic oligonucleotide
  Target: LAMA2; (-) strand; PAM type: YTN; PAM sequence: TTT
aagaaccctattaatttttc

SEQ ID NO: 205935 - DNA, 20 bp, Artificial Sequence
  Description of Artificial Sequence: Synthetic oligonucleotide
  Target: LAMA2; (-) strand; PAM type: YTN; PAM sequence: CTG
gatttaagaaccctattaat

SEQ ID NO: 205936 - DNA, 20 bp, Artificial Sequence
  Description of Artificial Sequence: Synthetic oligonucleotide
  Target: LAMA2; (-) strand; PAM type: YTN; PAM sequence: CTC
cctggatttaagaaccctat

SEQ ID NO: 205937 - DNA, 20 bp, Artificial Sequence
  Description of Artificial Sequence: Synthetic oligonucleotide
  Target: LAMA2; (-) strand; PAM type: YTN; PAM sequence: TTA
atatctccctggatttaaga

SEQ ID NO: 205938 - DNA, 20 bp, Artificial Sequence
  Description of Artificial Sequence: Synthetic oligonucleotide
  Target: LAMA2; (-) strand; PAM type: YTN; PAM sequence: TTT
aatatctccctggatttaag

SEQ ID NO: 205939 - DNA, 20 bp, Artificial Sequence
  Description of Artificial Sequence: Synthetic oligonucleotide
  Target: LAMA2; (-) strand; PAM type: YTN; PAM sequence: TTG
acatttaatatctccctgga

SEQ ID NO: 205940 - DNA, 20 bp, Artificial Sequence
  Description of Artificial Sequence: Synthetic oligonucleotide
  Target: LAMA2; (-) strand; PAM type: YTN; PAM sequence: TTT
gacatttaatatctccctgg

SEQ ID NO: 205941 - DNA, 20 bp, Artificial Sequence
  Description of Artificial Sequence: Synthetic oligonucleotide
  Target: LAMA2; (-) strand; PAM type: YTN; PAM sequence: TTT
tgacatttaatatctccctg

SEQ ID NO: 205942 - DNA, 20 bp, Artificial Sequence
  Description of Artificial Sequence: Synthetic oligonucleotide
  Target: LAMA2; (-) strand; PAM type: YTN; PAM sequence: TTT
ttgacatttaatatctccct

SEQ ID NO: 205943 - DNA, 20 bp, Artificial Sequence
  Description of Artificial Sequence: Synthetic oligonucleotide
  Target: LAMA2; (-) strand; PAM type: YTN; PAM sequence: TTC
aaatatccacatttttgaca

SEQ ID NO: 205944 - DNA, 20 bp, Artificial Sequence
  Description of Artificial Sequence: Synthetic oligonucleotide
  Target: LAMA2; (-) strand; PAM type: YTN; PAM sequence: TTA
attcaaatatccacattttt

SEQ ID NO: 205945 - DNA, 20 bp, Artificial Sequence
  Description of Artificial Sequence: Synthetic oligonucleotide
  Target: LAMA2; (-) strand; PAM type: YTN; PAM sequence: TTT
aattcaaatatccacatttt

SEQ ID NO: 205946 - DNA, 20 bp, Artificial Sequence
  Description of Artificial Sequence: Synthetic oligonucleotide
  Target: LAMA2; (-) strand; PAM type: YTN; PAM sequence: CTT
taattcaaatatccacattt

SEQ ID NO: 205947 - DNA, 20 bp, Artificial Sequence
  Description of Artificial Sequence: Synthetic oligonucleotide
  Target: LAMA2; (-) strand; PAM type: YTN; PAM sequence: TTA
gtctttaattcaaatatcca

SEQ ID NO: 205948 - DNA, 20 bp, Artificial Sequence
  Description of Artificial Sequence: Synthetic oligonucleotide
  Target: LAMA2; (-) strand; PAM type: YTN; PAM sequence: TTG
attagtctttaattcaaata

SEQ ID NO: 205949 - DNA, 20 bp, Artificial Sequence
  Description of Artificial Sequence: Synthetic oligonucleotide
  Target: LAMA2; (-) strand; PAM type: YTN; PAM sequence: TTC
aagttgattagtctttaatt

SEQ ID NO: 205950 - DNA, 20 bp, Artificial Sequence
  Description of Artificial Sequence: Synthetic oligonucleotide
  Target: LAMA2; (-) strand; PAM type: YTN; PAM sequence: TTG
ttcaagttgattagtcttta

SEQ ID NO: 205951 - DNA, 20 bp, Artificial Sequence
  Description of Artificial Sequence: Synthetic oligonucleotide
  Target: LAMA2; (-) strand; PAM type: YTN; PAM sequence: TTA
taatgtattgttcaagttga

SEQ ID NO: 205952 - DNA, 20 bp, Artificial Sequence
  Description of Artificial Sequence: Synthetic oligonucleotide
  Target: LAMA2; (-) strand; PAM type: YTN; PAM sequence: TTA
acattataatgtattgttca

SEQ ID NO: 205953 - DNA, 20 bp, Artificial Sequence
  Description of Artificial Sequence: Synthetic oligonucleotide
  Target: LAMA2; (-) strand; PAM type: YTN; PAM sequence: TTT
aacattataatgtattgttc

SEQ ID NO: 205954 - DNA, 20 bp, Artificial Sequence
  Description of Artificial Sequence: Synthetic oligonucleotide
  Target: LAMA2; (-) strand; PAM type: YTN; PAM sequence: CTT
taacattataatgtattgtt

SEQ ID NO: 205955 - DNA, 20 bp, Artificial Sequence
  Description of Artificial Sequence: Synthetic oligonucleotide
  Target: LAMA2; (-) strand; PAM type: YTN; PAM sequence: TTC
tttaacattataatgtattg

SEQ ID NO: 205956 - DNA, 20 bp, Artificial Sequence
  Description of Artificial Sequence: Synthetic oligonucleotide
  Target: LAMA2; (-) strand; PAM type: YTN; PAM sequence: CTA
ccagttctttaacattataa

SEQ ID NO: 205957 - DNA, 20 bp, Artificial Sequence
  Description of Artificial Sequence: Synthetic oligonucleotide
  Target: LAMA2; (-) strand; PAM type: YTN; PAM sequence: TTA
atatgctaccagttctttaa

SEQ ID NO: 205958 - DNA, 20 bp, Artificial Sequence
  Description of Artificial Sequence: Synthetic oligonucleotide
  Target: LAMA2; (-) strand; PAM type: YTN; PAM sequence: TTG
aaattaatatgctaccagtt

SEQ ID NO: 205959 - DNA, 20 bp, Artificial Sequence
  Description of Artificial Sequence: Synthetic oligonucleotide
  Target: LAMA2; (-) strand; PAM type: YTN; PAM sequence: CTT
gaaattaatatgctaccagt

SEQ ID NO: 205960 - DNA, 20 bp, Artificial Sequence
  Description of Artificial Sequence: Synthetic oligonucleotide
  Target: LAMA2; (-) strand; PAM type: YTN; PAM sequence: CTC
acttgaaattaatatgctac

SEQ ID NO: 205961 - DNA, 20 bp, Artificial Sequence
  Description of Artificial Sequence: Synthetic oligonucleotide
  Target: LAMA2; (-) strand; PAM type: YTN; PAM sequence: CTC
tcacttgaaattaatatgct

SEQ ID NO: 205962 - DNA, 20 bp, Artificial Sequence
  Description of Artificial Sequence: Synthetic oligonucleotide
  Target: LAMA2; (-) strand; PAM type: YTN; PAM sequence: TTA
aaactctcacttgaaattaa

SEQ ID NO: 205963 - DNA, 20 bp, Artificial Sequence
  Description of Artificial Sequence: Synthetic oligonucleotide
  Target: LAMA2; (-) strand; PAM type: YTN; PAM sequence: TTT
aaaactctcacttgaaatta

SEQ ID NO: 205964 - DNA, 20 bp, Artificial Sequence
  Description of Artificial Sequence: Synthetic oligonucleotide
  Target: LAMA2; (-) strand; PAM type: YTN; PAM sequence: TTA
tcaagtttaaaactctcact

SEQ ID NO: 205965 - DNA, 20 bp, Artificial Sequence
  Description of Artificial Sequence: Synthetic oligonucleotide
  Target: LAMA2; (-) strand; PAM type: YTN; PAM sequence: CTG
cagttatcaagtttaaaact

SEQ ID NO: 205966 - DNA, 20 bp, Artificial Sequence
  Description of Artificial Sequence: Synthetic oligonucleotide
  Target: LAMA2; (-) strand; PAM type: YTN; PAM sequence: TTC
acaaaaccactgcagttatc

SEQ ID NO: 205967 - DNA, 20 bp, Artificial Sequence
  Description of Artificial Sequence: Synthetic oligonucleotide
  Target: LAMA2; (-) strand; PAM type: YTN; PAM sequence: TTG
gattcacaaaaccactgcag

SEQ ID NO: 205968 - DNA, 20 bp, Artificial Sequence
  Description of Artificial Sequence: Synthetic oligonucleotide
  Target: LAMA2; (-) strand; PAM type: YTN; PAM sequence: TTA
aaattggattcacaaaacca

SEQ ID NO: 205969 - DNA, 20 bp, Artificial Sequence
  Description of Artificial Sequence: Synthetic oligonucleotide
  Target: LAMA2; (-) strand; PAM type: YTN; PAM sequence: CTT
aaaattggattcacaaaacc

SEQ ID NO: 205970 - DNA, 20 bp, Artificial Sequence
  Description of Artificial Sequence: Synthetic oligonucleotide
  Target: LAMA2; (-) strand; PAM type: YTN; PAM sequence: CTC
ttaaaattggattcacaaaa

SEQ ID NO: 205971 - DNA, 20 bp, Artificial Sequence
  Description of Artificial Sequence: Synthetic oligonucleotide
  Target: LAMA2; (-) strand; PAM type: YTN; PAM sequence: TTA
actcttaaaattggattcac

SEQ ID NO: 205972 - DNA, 20 bp, Artificial Sequence
  Description of Artificial Sequence: Synthetic oligonucleotide
  Target: LAMA2; (-) strand; PAM type: YTN; PAM sequence: TTT
aactcttaaaattggattca

SEQ ID NO: 205973 - DNA, 20 bp, Artificial Sequence
  Description of Artificial Sequence: Synthetic oligonucleotide
  Target: LAMA2; (-) strand; PAM type: YTN; PAM sequence: TTG
acacaacatttaactcttaa

SEQ ID NO: 205974 - DNA, 20 bp, Artificial Sequence
  Description of Artificial Sequence: Synthetic oligonucleotide
  Target: LAMA2; (-) strand; PAM type: YTN; PAM sequence: TTC
atggcattgacacaacattt

SEQ ID NO: 205975 - DNA, 20 bp, Artificial Sequence
  Description of Artificial Sequence: Synthetic oligonucleotide
  Target: LAMA2; (-) strand; PAM type: YTN; PAM sequence: CTG
attcatggcattgacacaac

SEQ ID NO: 205976 - DNA, 20 bp, Artificial Sequence
  Description of Artificial Sequence: Synthetic oligonucleotide
  Target: LAMA2; (-) strand; PAM type: YTN; PAM sequence: CTC
tgattcatggcattgacaca

SEQ ID NO: 205977 - DNA, 20 bp, Artificial Sequence
  Description of Artificial Sequence: Synthetic oligonucleotide
  Target: LAMA2; (-) strand; PAM type: YTN; PAM sequence: TTC
tctgattcatggcattgaca

SEQ ID NO: 205978 - DNA, 20 bp, Artificial Sequence
  Description of Artificial Sequence: Synthetic oligonucleotide
  Target: LAMA2; (-) strand; PAM type: YTN; PAM sequence: CTA
ttctctgattcatggcattg

SEQ ID NO: 205979 - DNA, 20 bp, Artificial Sequence
  Description of Artificial Sequence: Synthetic oligonucleotide
  Target: LAMA2; (-) strand; PAM type: YTN; PAM sequence: TTA
taaatatctattctctgatt

SEQ ID NO: 205980 - DNA, 20 bp, Artificial Sequence
  Description of Artificial Sequence: Synthetic oligonucleotide
  Target: LAMA2; (-) strand; PAM type: YTN; PAM sequence: TTG
ttataaatatctattctctg

SEQ ID NO: 205981 - DNA, 20 bp, Artificial Sequence
  Description of Artificial Sequence: Synthetic oligonucleotide
  Target: LAMA2; (-) strand; PAM type: YTN; PAM sequence: TTT
gttataaatatctattctct

SEQ ID NO: 205982 - DNA, 20 bp, Artificial Sequence
  Description of Artificial Sequence: Synthetic oligonucleotide
  Target: LAMA2; (-) strand; PAM type: YTN; PAM sequence: TTT
tgttataaatatctattctc

SEQ ID NO: 205983 - DNA, 20 bp, Artificial Sequence
  Description of Artificial Sequence: Synthetic oligonucleotide
  Target: LAMA2; (-) strand; PAM type: YTN; PAM sequence: CTT
ttgttataaatatctattct

SEQ ID NO: 205984 - DNA, 20 bp, Artificial Sequence
  Description of Artificial Sequence: Synthetic oligonucleotide
  Target: LAMA2; (-) strand; PAM type: YTN; PAM sequence: TTC
atacagatcttttgttataa

SEQ ID NO: 205985 - DNA, 20 bp, Artificial Sequence
  Description of Artificial Sequence: Synthetic oligonucleotide
  Target: LAMA2; (-) strand; PAM type: YTN; PAM sequence: TTT
catacagatcttttgttata

SEQ ID NO: 205986 - DNA, 20 bp, Artificial Sequence
  Description of Artificial Sequence: Synthetic oligonucleotide
  Target: LAMA2; (-) strand; PAM type: YTN; PAM sequence: TTA
tgcatcatttcatacagatc

SEQ ID NO: 205987 - DNA, 20 bp, Artificial Sequence
  Description of Artificial Sequence: Synthetic oligonucleotide
  Target: LAMA2; (-) strand; PAM type: YTN; PAM sequence: CTA
ttatgcatcatttcatacag

SEQ ID NO: 205988 - DNA, 20 bp, Artificial Sequence
  Description of Artificial Sequence: Synthetic oligonucleotide
  Target: LAMA2; (-) strand; PAM type: YTN; PAM sequence: TTC
agccatcaccatctattatg

SEQ ID NO: 205989 - DNA, 20 bp, Artificial Sequence
  Description of Artificial Sequence: Synthetic oligonucleotide
  Target: LAMA2; (-) strand; PAM type: YTN; PAM sequence: CTT
cagccatcaccatctattat

SEQ ID NO: 205990 - DNA, 20 bp, Artificial Sequence
  Description of Artificial Sequence: Synthetic oligonucleotide
  Target: LAMA2; (-) strand; PAM type: YTN; PAM sequence: TTC
agcagcttcagccatcacca

SEQ ID NO: 205991 - DNA, 20 bp, Artificial Sequence
  Description of Artificial Sequence: Synthetic oligonucleotide
  Target: LAMA2; (-) strand; PAM type: YTN; PAM sequence: TTT
cagcagcttcagccatcacc

SEQ ID NO: 205992 - DNA, 20 bp, Artificial Sequence
  Description of Artificial Sequence: Synthetic oligonucleotide
  Target: LAMA2; (-) strand; PAM type: YTN; PAM sequence: TTT
tcagcagcttcagccatcac

SEQ ID NO: 205993 - DNA, 20 bp, Artificial Sequence
  Description of Artificial Sequence: Synthetic oligonucleotide
  Target: LAMA2; (-) strand; PAM type: YTN; PAM sequence: TTA
gaccatcaattttcagcagc

SEQ ID NO: 205994 - DNA, 20 bp, Artificial Sequence
  Description of Artificial Sequence: Synthetic oligonucleotide
  Target: LAMA2; (-) strand; PAM type: YTN; PAM sequence: TTT
agaccatcaattttcagcag

SEQ ID NO: 205995 - DNA, 20 bp, Artificial Sequence
  Description of Artificial Sequence: Synthetic oligonucleotide
  Target: LAMA2; (-) strand; PAM type: YTN; PAM sequence: TTG
atttagaccatcaattttca

SEQ ID NO: 205996 - DNA, 20 bp, Artificial Sequence
  Description of Artificial Sequence: Synthetic oligonucleotide
  Target: LAMA2; (-) strand; PAM type: YTN; PAM sequence: TTT
gatttagaccatcaattttc

SEQ ID NO: 205997 - DNA, 20 bp, Artificial Sequence
  Description of Artificial Sequence: Synthetic oligonucleotide
  Target: LAMA2; (-) strand; PAM type: YTN; PAM sequence: TTT
tgatttagaccatcaatttt

SEQ ID NO: 205998 - DNA, 20 bp, Artificial Sequence
  Description of Artificial Sequence: Synthetic oligonucleotide
  Target: LAMA2; (-) strand; PAM type: YTN; PAM sequence: CTT
ttgatttagaccatcaattt

SEQ ID NO: 205999 - DNA, 20 bp, Artificial Sequence
  Description of Artificial Sequence: Synthetic oligonucleotide
  Target: LAMA2; (-) strand; PAM type: YTN; PAM sequence: CTA
atccatccttttgatttaga

SEQ ID NO: 206000 - DNA, 20 bp, Artificial Sequence
  Description of Artificial Sequence: Synthetic oligonucleotide
  Target: LAMA2; (-) strand; PAM type: YTN; PAM sequence: TTC
ctaatccatccttttgattt

SEQ ID NO: 206001 - DNA, 20 bp, Artificial Sequence
  Description of Artificial Sequence: Synthetic oligonucleotide
  Target: LAMA2; (-) strand; PAM type: YTN; PAM sequence: TTC
cgcaaagattcctaatccat

SEQ ID NO: 206002 - DNA, 20 bp, Artificial Sequence
  Description of Artificial Sequence: Synthetic oligonucleotide
  Target: LAMA2; (-) strand; PAM type: YTN; PAM sequence: CTG
taataattccgcaaagattc

SEQ ID NO: 206003 - DNA, 20 bp, Artificial Sequence
  Description of Artificial Sequence: Synthetic oligonucleotide
  Target: LAMA2; (-) strand; PAM type: YTN; PAM sequence: CTA
caggtctgtaataattccgc

SEQ ID NO: 206004 - DNA, 20 bp, Artificial Sequence
  Description of Artificial Sequence: Synthetic oligonucleotide
  Target: LAMA2; (-) strand; PAM type: YTN; PAM sequence: CTC
acaaaactacaggtctgtaa

SEQ ID NO: 206005 - DNA, 20 bp, Artificial Sequence
  Description of Artificial Sequence: Synthetic oligonucleotide
  Target: LAMA2; (-) strand; PAM type: YTN; PAM sequence: TTC
tcacaaaactacaggtctgt

SEQ ID NO: 206006 - DNA, 20 bp, Artificial Sequence
  Description of Artificial Sequence: Synthetic oligonucleotide
  Target: LAMA2; (-) strand; PAM type: YTN; PAM sequence: TTT
ctcacaaaactacaggtctg

SEQ ID NO: 206007 - DNA, 20 bp, Artificial Sequence
  Description of Artificial Sequence: Synthetic oligonucleotide
  Target: LAMA2; (-) strand; PAM type: YTN; PAM sequence: TTT
tctcacaaaactacaggtct

SEQ ID NO: 206008 - DNA, 20 bp, Artificial Sequence
  Description of Artificial Sequence: Synthetic oligonucleotide
  Target: LAMA2; (-) strand; PAM type: YTN; PAM sequence: CTT
ttctcacaaaactacaggtc

SEQ ID NO: 206009 - DNA, 20 bp, Artificial Sequence
  Description of Artificial Sequence: Synthetic oligonucleotide
  Target: LAMA2; (-) strand; PAM type: YTN; PAM sequence: CTG
cttttctcacaaaactacag

SEQ ID NO: 206010 - DNA, 20 bp, Artificial Sequence
  Description of Artificial Sequence: Synthetic oligonucleotide
  Target: LAMA2; (-) strand; PAM type: YTN; PAM sequence: CTC
tgcttttctcacaaaactac

SEQ ID NO: 206011 - DNA, 20 bp, Artificial Sequence
  Description of Artificial Sequence: Synthetic oligonucleotide
  Target: LAMA2; (-) strand; PAM type: YTN; PAM sequence: TTC
tctgcttttctcacaaaact

SEQ ID NO: 206012 - DNA, 20 bp, Artificial Sequence
  Description of Artificial Sequence: Synthetic oligonucleotide
  Target: LAMA2; (-) strand; PAM type: YTN; PAM sequence: TTG
acattctctgcttttctcac

SEQ ID NO: 206013 - DNA, 20 bp, Artificial Sequence
  Description of Artificial Sequence: Synthetic oligonucleotide
  Target: LAMA2; (-) strand; PAM type: YTN; PAM sequence: CTT
gacattctctgcttttctca

SEQ ID NO: 206014 - DNA, 20 bp, Artificial Sequence
  Description of Artificial Sequence: Synthetic oligonucleotide
  Target: LAMA2; (-) strand; PAM type: YTN; PAM sequence: TTG
aagtaaaagaccttgacatt

SEQ ID NO: 206015 - DNA, 20 bp, Artificial Sequence
  Description of Artificial Sequence: Synthetic oligonucleotide
  Target: LAMA2; (-) strand; PAM type: YTN; PAM sequence: CTT
gaagtaaaagaccttgacat

SEQ ID NO: 206016 - DNA, 20 bp, Artificial Sequence
  Description of Artificial Sequence: Synthetic oligonucleotide
  Target: LAMA2; (-) strand; PAM type: YTN; PAM sequence: CTC
cttgaagtaaaagaccttga

SEQ ID NO: 206017 - DNA, 20 bp, Artificial Sequence
  Description of Artificial Sequence: Synthetic oligonucleotide
  Target: LAMA2; (-) strand; PAM type: YTN; PAM sequence: TTC
aaatcctccttgaagtaaaa

SEQ ID NO: 206018 - DNA, 20 bp, Artificial Sequence
  Description of Artificial Sequence: Synthetic oligonucleotide
  Target: LAMA2; (-) strand; PAM type: YTN; PAM sequence: CTT
caaatcctccttgaagtaaa

SEQ ID NO: 206019 - DNA, 20 bp, Artificial Sequence
  Description of Artificial Sequence: Synthetic oligonucleotide
  Target: LAMA2; (-) strand; PAM type: YTN; PAM sequence: CTA
atgcaataatgtataccccc

SEQ ID NO: 206020 - DNA, 20 bp, Artificial Sequence
  Description of Artificial Sequence: Synthetic oligonucleotide
  Target: LAMA2; (-) strand; PAM type: YTN; PAM sequence: CTA
agctaatgcaataatgtata

SEQ ID NO: 206021 - DNA, 20 bp, Artificial Sequence
  Description of Artificial Sequence: Synthetic oligonucleotide
  Target: LAMA2; (-) strand; PAM type: YTN; PAM sequence: CTG
actaagctaatgcaataatg

SEQ ID NO: 206022 - DNA, 20 bp, Artificial Sequence
  Description of Artificial Sequence: Synthetic oligonucleotide
  Target: LAMA2; (-) strand; PAM type: YTN; PAM sequence: CTG
taaactgactaagctaatgc

SEQ ID NO: 206023 - DNA, 20 bp, Artificial Sequence
  Description of Artificial Sequence: Synthetic oligonucleotide
  Target: LAMA2; (-) strand; PAM type: YTN; PAM sequence: CTA
gctgtaaactgactaagcta

SEQ ID NO: 206024 - DNA, 20 bp, Artificial Sequence
  Description of Artificial Sequence: Synthetic oligonucleotide
  Target: LAMA2; (-) strand; PAM type: YTN; PAM sequence: CTA
gctagctgtaaactgactaa

SEQ ID NO: 206025 - DNA, 20 bp, Artificial Sequence
  Description of Artificial Sequence: Synthetic oligonucleotide
  Target: LAMA2; (-) strand; PAM type: YTN; PAM sequence: CTG
tctagctagctgtaaactga

SEQ ID NO: 206026 - DNA, 20 bp, Artificial Sequence
  Description of Artificial Sequence: Synthetic oligonucleotide
  Target: LAMA2; (-) strand; PAM type: YTN; PAM sequence: TTG
cactgtctagctagctgtaa

SEQ ID NO: 206027 - DNA, 20 bp, Artificial Sequence
  Description of Artificial Sequence: Synthetic oligonucleotide
  Target: LAMA2; (-) strand; PAM type: YTN; PAM sequence: TTT
gcactgtctagctagctgta

SEQ ID NO: 206028 - DNA, 20 bp, Artificial Sequence
  Description of Artificial Sequence: Synthetic oligonucleotide
  Target: LAMA2; (-) strand; PAM type: YTN; PAM sequence: TTC
acaagtttgcactgtctagc

SEQ ID NO: 206029 - DNA, 20 bp, Artificial Sequence
  Description of Artificial Sequence: Synthetic oligonucleotide
  Target: LAMA2; (-) strand; PAM type: YTN; PAM sequence: CTT
cacaagtttgcactgtctag

SEQ ID NO: 206030 - DNA, 20 bp, Artificial Sequence
  Description of Artificial Sequence: Synthetic oligonucleotide
  Target: LAMA2; (-) strand; PAM type: YTN; PAM sequence: CTC
cttcacaagtttgcactgtc

SEQ ID NO: 206031 - DNA, 20 bp, Artificial Sequence
  Description of Artificial Sequence: Synthetic oligonucleotide
  Target: LAMA2; (-) strand; PAM type: YTN; PAM sequence: CTG
aaaacatcctccttcacaag

SEQ ID NO: 206032 - DNA, 20 bp, Artificial Sequence
  Description of Artificial Sequence: Synthetic oligonucleotide
  Target: LAMA2; (-) strand; PAM type: YTN; PAM sequence: CTA
gtgtgatatactgaaaacat

SEQ ID NO: 206033 - DNA, 20 bp, Artificial Sequence
  Description of Artificial Sequence: Synthetic oligonucleotide
  Target: LAMA2; (-) strand; PAM type: YTN; PAM sequence: CTG
gtgccatgatcctagtgtga

SEQ ID NO: 206034 - DNA, 20 bp, Artificial Sequence
  Description of Artificial Sequence: Synthetic oligonucleotide
  Target: LAMA2; (-) strand; PAM type: YTN; PAM sequence: TTC
aggactggtgccatgatcct

SEQ ID NO: 206035 - DNA, 20 bp, Artificial Sequence
  Description of Artificial Sequence: Synthetic oligonucleotide
  Target: LAMA2; (-) strand; PAM type: YTN; PAM sequence: CTT
caggactggtgccatgatcc

SEQ ID NO: 206036 - DNA, 20 bp, Artificial Sequence
  Description of Artificial Sequence: Synthetic oligonucleotide
  Target: LAMA2; (-) strand; PAM type: YTN; PAM sequence: TTC
ttcaggactggtgccatgat

SEQ ID NO: 206037 - DNA, 20 bp, Artificial Sequence
  Description of Artificial Sequence: Synthetic oligonucleotide
  Target: LAMA2; (-) strand; PAM type: YTN; PAM sequence: TTT
cttcaggactggtgccatga

SEQ ID NO: 206038 - DNA, 20 bp, Artificial Sequence
  Description of Artificial Sequence: Synthetic oligonucleotide
  Target: LAMA2; (-) strand; PAM type: YTN; PAM sequence: CTA
tttcttcaggactggtgcca

SEQ ID NO: 206039 - DNA, 20 bp, Artificial Sequence
  Description of Artificial Sequence: Synthetic oligonucleotide
  Target: LAMA2; (-) strand; PAM type: YTN; PAM sequence: TTC
cccctatttcttcaggactg

SEQ ID NO: 206040 - DNA, 20 bp, Artificial Sequence
  Description of Artificial Sequence: Synthetic oligonucleotide
  Target: LAMA2; (-) strand; PAM type: YTN; PAM sequence: TTC
ccacacataggtgtgtatat

SEQ ID NO: 206041 - DNA, 20 bp, Artificial Sequence
  Description of Artificial Sequence: Synthetic oligonucleotide
  Target: LAMA2; (-) strand; PAM type: YTN; PAM sequence: TTA
gcattcccacacataggtgt

SEQ ID NO: 206042 - DNA, 20 bp, Artificial Sequence
  Description of Artificial Sequence: Synthetic oligonucleotide
  Target: LAMA2; (-) strand; PAM type: YTN; PAM sequence: CTA
tcccattagcattcccacac

SEQ ID NO: 206043 - DNA, 20 bp, Artificial Sequence
  Description of Artificial Sequence: Synthetic oligonucleotide
  Target: LAMA2; (-) strand; PAM type: YTN; PAM sequence: TTC
tatcccattagcattcccac

SEQ ID NO: 206044 - DNA, 20 bp, Artificial Sequence
  Description of Artificial Sequence: Synthetic oligonucleotide
  Target: LAMA2; (-) strand; PAM type: YTN; PAM sequence: CTG
tatcagattctatcccatta

SEQ ID NO: 206045 - DNA, 20 bp, Artificial Sequence
  Description of Artificial Sequence: Synthetic oligonucleotide
  Target: LAMA2; (-) strand; PAM type: YTN; PAM sequence: CTA
actgtatcagattctatccc

SEQ ID NO: 206046 - DNA, 20 bp, Artificial Sequence
  Description of Artificial Sequence: Synthetic oligonucleotide
  Target: LAMA2; (-) strand; PAM type: YTN; PAM sequence: TTC
agaccctaactgtatcagat

SEQ ID NO: 206047 - DNA, 20 bp, Artificial Sequence
  Description of Artificial Sequence: Synthetic oligonucleotide
  Target: LAMA2; (-) strand; PAM type: YTN; PAM sequence: TTT
cagaccctaactgtatcaga

SEQ ID NO: 206048 - DNA, 20 bp, Artificial Sequence
  Description of Artificial Sequence: Synthetic oligonucleotide
  Target: LAMA2; (-) strand; PAM type: YTN; PAM sequence: CTC
gtagtgtttcagaccctaac

SEQ ID NO: 206049 - DNA, 20 bp, Artificial Sequence
  Description of Artificial Sequence: Synthetic oligonucleotide
  Target: LAMA2; (-) strand; PAM type: YTN; PAM sequence: TTG
aatcaaagtaccataagaac

SEQ ID NO: 206050 - DNA, 20 bp, Artificial Sequence
  Description of Artificial Sequence: Synthetic oligonucleotide
  Target: LAMA2; (-) strand; PAM type: YTN; PAM sequence: CTA
aatattgaatcaaagtacca

SEQ ID NO: 206051 - DNA, 20 bp, Artificial Sequence
  Description of Artificial Sequence: Synthetic oligonucleotide
  Target: LAMA2; (-) strand; PAM type: YTN; PAM sequence: CTC
aactaaatattgaatcaaag

SEQ ID NO: 206052 - DNA, 20 bp, Artificial Sequence
  Description of Artificial Sequence: Synthetic oligonucleotide
  Target: LAMA2; (-) strand; PAM type: YTN; PAM sequence: TTA
ctcaactaaatattgaatca

SEQ ID NO: 206053 - DNA, 20 bp, Artificial Sequence
  Description of Artificial Sequence: Synthetic oligonucleotide
  Target: LAMA2; (-) strand; PAM type: YTN; PAM sequence: CTA
atgaggataatacaaataag

SEQ ID NO: 206054 - DNA, 20 bp, Artificial Sequence
  Description of Artificial Sequence: Synthetic oligonucleotide
  Target: LAMA2; (-) strand; PAM type: YTN; PAM sequence: TTC
aatctaatgaggataataca

SEQ ID NO: 206055 - DNA, 20 bp, Artificial Sequence
  Description of Artificial Sequence: Synthetic oligonucleotide
  Target: LAMA2; (-) strand; PAM type: YTN; PAM sequence: CTA
tacaggttcaatctaatgag

SEQ ID NO: 206056 - DNA, 20 bp, Artificial Sequence
  Description of Artificial Sequence: Synthetic oligonucleotide
  Target: LAMA2; (-) strand; PAM type: YTN; PAM sequence: TTC
aaagataaacctatacaggt

SEQ ID NO: 206057 - DNA, 20 bp, Artificial Sequence
  Description of Artificial Sequence: Synthetic oligonucleotide
  Target: LAMA2; (-) strand; PAM type: YTN; PAM sequence: TTT
caaagataaacctatacagg

SEQ ID NO: 206058 - DNA, 20 bp, Artificial Sequence
  Description of Artificial Sequence: Synthetic oligonucleotide
  Target: LAMA2; (-) strand; PAM type: YTN; PAM sequence: TTA
gtttcaaagataaacctata

SEQ ID NO: 206059 - DNA, 20 bp, Artificial Sequence
  Description of Artificial Sequence: Synthetic oligonucleotide
  Target: LAMA2; (-) strand; PAM type: YTN; PAM sequence: TTT
agtttcaaagataaacctat

SEQ ID NO: 206060 - DNA, 20 bp, Artificial Sequence
  Description of Artificial Sequence: Synthetic oligonucleotide
  Target: LAMA2; (-) strand; PAM type: YTN; PAM sequence: CTT
tagtttcaaagataaaccta

SEQ ID NO: 206061 - DNA, 20 bp, Artificial Sequence
  Description of Artificial Sequence: Synthetic oligonucleotide
  Target: LAMA2; (-) strand; PAM type: YTN; PAM sequence: TTA
atctttagtttcaaagataa

SEQ ID NO: 206062 - DNA, 20 bp, Artificial Sequence
  Description of Artificial Sequence: Synthetic oligonucleotide
  Target: LAMA2; (-) strand; PAM type: YTN; PAM sequence: TTT
aatctttagtttcaaagata

SEQ ID NO: 206063 - DNA, 20 bp, Artificial Sequence
  Description of Artificial Sequence: Synthetic oligonucleotide
  Target: LAMA2; (-) strand; PAM type: YTN; PAM sequence: TTC
aatttaatctttagtttcaa

SEQ ID NO: 206064 - DNA, 20 bp, Artificial Sequence
  Description of Artificial Sequence: Synthetic oligonucleotide
  Target: LAMA2; (-) strand; PAM type: YTN; PAM sequence: TTA
aattcaatttaatctttagt

SEQ ID NO: 206065 - DNA, 20 bp, Artificial Sequence
  Description of Artificial Sequence: Synthetic oligonucleotide
  Target: LAMA2; (-) strand; PAM type: YTN; PAM sequence: CTT
aaattcaatttaatctttag

SEQ ID NO: 206066 - DNA, 20 bp, Artificial Sequence
  Description of Artificial Sequence: Synthetic oligonucleotide
  Target: LAMA2; (-) strand; PAM type: YTN; PAM sequence: TTG
ataaaaaatacagtagaact

SEQ ID NO: 206067 - DNA, 20 bp, Artificial Sequence
  Description of Artificial Sequence: Synthetic oligonucleotide
  Target: LAMA2; (-) strand; PAM type: YTN; PAM sequence: CTT
gataaaaaatacagtagaac

SEQ ID NO: 206068 - DNA, 20 bp, Artificial Sequence
  Description of Artificial Sequence: Synthetic oligonucleotide
  Target: LAMA2; (-) strand; PAM type: YTN; PAM sequence: TTA
aaaataatcttgataaaaaa

SEQ ID NO: 206069 - DNA, 20 bp, Artificial Sequence
  Description of Artificial Sequence: Synthetic oligonucleotide
  Target: LAMA2; (-) strand; PAM type: YTN; PAM sequence: TTT
aaaaataatcttgataaaaa

SEQ ID NO: 206070 - DNA, 20 bp, Artificial Sequence
  Description of Artificial Sequence: Synthetic oligonucleotide
  Target: LAMA2; (-) strand; PAM type: YTN; PAM sequence: TTT
taaaaataatcttgataaaa

SEQ ID NO: 206071 - DNA, 20 bp, Artificial Sequence
  Description of Artificial Sequence: Synthetic oligonucleotide
  Target: LAMA2; (-) strand; PAM type: YTN; PAM sequence: CTA
ttttaaaaataatcttgata

SEQ ID NO: 206072 - DNA, 20 bp, Artificial Sequence
  Description of Artificial Sequence: Synthetic oligonucleotide
  Target: LAMA2; (-) strand; PAM type: YTN; PAM sequence: CTG
tgatacaagctattttaaaa

SEQ ID NO: 206073 - DNA, 20 bp, Artificial Sequence
  Description of Artificial Sequence: Synthetic oligonucleotide
  Target: LAMA2; (-) strand; PAM type: YTN; PAM sequence: TTC
ctgtgatacaagctatttta

SEQ ID NO: 206074 - DNA, 20 bp, Artificial Sequence
  Description of Artificial Sequence: Synthetic oligonucleotide
  Target: LAMA2; (-) strand; PAM type: YTN; PAM sequence: CTC
aggattcctgtgatacaagc

SEQ ID NO: 206075 - DNA, 20 bp, Artificial Sequence
  Description of Artificial Sequence: Synthetic oligonucleotide
  Target: LAMA2; (-) strand; PAM type: YTN; PAM sequence: TTA
ggtatgtactcaggattcct

SEQ ID NO: 206076 - DNA, 20 bp, Artificial Sequence
  Description of Artificial Sequence: Synthetic oligonucleotide
  Target: LAMA2; (-) strand; PAM type: YTN; PAM sequence: CTA
tacagtagaggatagtatta

SEQ ID NO: 206077 - DNA, 20 bp, Artificial Sequence
  Description of Artificial Sequence: Synthetic oligonucleotide
  Target: LAMA2; (-) strand; PAM type: YTN; PAM sequence: TTC
tatacagtagaggatagtat

SEQ ID NO: 206078 - DNA, 20 bp, Artificial Sequence
  Description of Artificial Sequence: Synthetic oligonucleotide
  Target: LAMA2; (-) strand; PAM type: YTN; PAM sequence: TTT
ctatacagtagaggatagta

SEQ ID NO: 206079 - DNA, 20 bp, Artificial Sequence
  Description of Artificial Sequence: Synthetic oligonucleotide
  Target: LAMA2; (-) strand; PAM type: YTN; PAM sequence: CTA
aatttctatacagtagagga

SEQ ID NO: 206080 - DNA, 20 bp, Artificial Sequence
  Description of Artificial Sequence: Synthetic oligonucleotide
  Target: LAMA2; (-) strand; PAM type: YTN; PAM sequence: TTA
ctaaatttctatacagtaga

SEQ ID NO: 206081 - DNA, 20 bp, Artificial Sequence
  Description of Artificial Sequence: Synthetic oligonucleotide
  Target: LAMA2; (-) strand; PAM type: YTN; PAM sequence: TTA
ttactaaatttctatacagt

SEQ ID NO: 206082 - DNA, 20 bp, Artificial Sequence
  Description of Artificial Sequence: Synthetic oligonucleotide
  Target: LAMA2; (-) strand; PAM type: YTN; PAM sequence: TTC
attattactaaatttctata

SEQ ID NO: 206083 - DNA, 20 bp, Artificial Sequence
  Description of Artificial Sequence: Synthetic oligonucleotide
  Target: LAMA2; (-) strand; PAM type: YTN; PAM sequence: TTT
cattattactaaatttctat

SEQ ID NO: 206084 - DNA, 20 bp, Artificial Sequence
  Description of Artificial Sequence: Synthetic oligonucleotide
  Target: LAMA2; (-) strand; PAM type: YTN; PAM sequence: TTT
tcattattactaaatttcta

SEQ ID NO: 206085 - DNA, 20 bp, Artificial Sequence
  Description of Artificial Sequence: Synthetic oligonucleotide
  Target: LAMA2; (-) strand; PAM type: YTN; PAM sequence: TTT
ttcattattactaaatttct

SEQ ID NO: 206086 - DNA, 20 bp, Artificial Sequence
  Description of Artificial Sequence: Synthetic oligonucleotide
  Target: LAMA2; (-) strand; PAM type: YTN; PAM sequence: CTT
tttcattattactaaatttc

SEQ ID NO: 206087 - DNA, 20 bp, Artificial Sequence
  Description of Artificial Sequence: Synthetic oligonucleotide
  Target: LAMA2; (-) strand; PAM type: YTN; PAM sequence: CTG
cccagaaaaccaaatccagg

SEQ ID NO: 206088 - DNA, 20 bp, Artificial Sequence
  Description of Artificial Sequence: Synthetic oligonucleotide
  Target: LAMA2; (-) strand; PAM type: YTN; PAM sequence: CTC
tgcccagaaaaccaaatcca

SEQ ID NO: 206089 - DNA, 20 bp, Artificial Sequence
  Description of Artificial Sequence: Synthetic oligonucleotide
  Target: LAMA2; (-) strand; PAM type: YTN; PAM sequence: TTC
tctgcccagaaaaccaaatc

SEQ ID NO: 206090 - DNA, 20 bp, Artificial Sequence
  Description of Artificial Sequence: Synthetic oligonucleotide
  Target: LAMA2; (-) strand; PAM type: YTN; PAM sequence: TTT
ctctgcccagaaaaccaaat

SEQ ID NO: 206091 - DNA, 20 bp, Artificial Sequence
  Description of Artificial Sequence: Synthetic oligonucleotide
  Target: LAMA2; (-) strand; PAM type: YTN; PAM sequence: TTT
tctctgcccagaaaaccaaa

SEQ ID NO: 206092 - DNA, 20 bp, Artificial Sequence
  Description of Artificial Sequence: Synthetic oligonucleotide
  Target: LAMA2; (-) strand; PAM type: YTN; PAM sequence: TTA
attttctctgcccagaaaac

SEQ ID NO: 206093 - DNA, 20 bp, Artificial Sequence
  Description of Artificial Sequence: Synthetic oligonucleotide
  Target: LAMA2; (-) strand; PAM type: YTN; PAM sequence: TTT
aattttctctgcccagaaaa

SEQ ID NO: 206094 - DNA, 20 bp, Artificial Sequence
  Description of Artificial Sequence: Synthetic oligonucleotide
  Target: LAMA2; (-) strand; PAM type: YTN; PAM sequence: TTT
taattttctctgcccagaaa

SEQ ID NO: 206095 - DNA, 20 bp, Artificial Sequence
  Description of Artificial Sequence: Synthetic oligonucleotide
  Target: LAMA2; (-) strand; PAM type: YTN; PAM sequence: TTT
ttaattttctctgcccagaa

SEQ ID NO: 206096 - DNA, 20 bp, Artificial Sequence
  Description of Artificial Sequence: Synthetic oligonucleotide
  Target: LAMA2; (-) strand; PAM type: YTN; PAM sequence: TTA
aagtttttaattttctctgc

SEQ ID NO: 206097 - DNA, 20 bp, Artificial Sequence
  Description of Artificial Sequence: Synthetic oligonucleotide
  Target: LAMA2; (-) strand; PAM type: YTN; PAM sequence: CTT
aaagtttttaattttctctg

SEQ ID NO: 206098 - DNA, 20 bp, Artificial Sequence
  Description of Artificial Sequence: Synthetic oligonucleotide
  Target: LAMA2; (-) strand; PAM type: YTN; PAM sequence: CTG
cttaaagtttttaattttct

SEQ ID NO: 206099 - DNA, 20 bp, Artificial Sequence
  Description of Artificial Sequence: Synthetic oligonucleotide
  Target: LAMA2; (-) strand; PAM type: YTN; PAM sequence: CTA
catgatacctgcttaaagtt

SEQ ID NO: 206100 - DNA, 20 bp, Artificial Sequence
  Description of Artificial Sequence: Synthetic oligonucleotide
  Target: LAMA2; (-) strand; PAM type: YTN; PAM sequence: TTC
tacatgatacctgcttaaag

SEQ ID NO: 206101 - DNA, 20 bp, Artificial Sequence
  Description of Artificial Sequence: Synthetic oligonucleotide
  Target: LAMA2; (-) strand; PAM type: YTN; PAM sequence: TTA
ttctacatgatacctgctta

SEQ ID NO: 206102 - DNA, 20 bp, Artificial Sequence
  Description of Artificial Sequence: Synthetic oligonucleotide
  Target: LAMA2; (-) strand; PAM type: YTN; PAM sequence: TTG
agtatgttattctacatgat

SEQ ID NO: 206103 - DNA, 20 bp, Artificial Sequence
  Description of Artificial Sequence: Synthetic oligonucleotide
  Target: LAMA2; (-) strand; PAM type: YTN; PAM sequence: CTG
ttgagtatgttattctacat

SEQ ID NO: 206104 - DNA, 20 bp, Artificial Sequence
  Description of Artificial Sequence: Synthetic oligonucleotide
  Target: LAMA2; (-) strand; PAM type: YTN; PAM sequence: TTG
tcacccacaaaataatatct

SEQ ID NO: 206105 - DNA, 20 bp, Artificial Sequence
  Description of Artificial Sequence: Synthetic oligonucleotide
  Target: LAMA2; (-) strand; PAM type: YTN; PAM sequence: CTA
taaaaattgtcacccacaaa

SEQ ID NO: 206106 - DNA, 20 bp, Artificial Sequence
  Description of Artificial Sequence: Synthetic oligonucleotide
  Target: LAMA2; (-) strand; PAM type: YTN; PAM sequence: CTG
acatataatgtctataaaaa

SEQ ID NO: 206107 - DNA, 20 bp, Artificial Sequence
  Description of Artificial Sequence: Synthetic oligonucleotide
  Target: LAMA2; (-) strand; PAM type: YTN; PAM sequence: TTC
atctgacatataatgtctat

SEQ ID NO: 206108 - DNA, 20 bp, Artificial Sequence
  Description of Artificial Sequence: Synthetic oligonucleotide
  Target: LAMA2; (-) strand; PAM type: YTN; PAM sequence: TTT
catctgacatataatgtcta

SEQ ID NO: 206109 - DNA, 20 bp, Artificial Sequence
  Description of Artificial Sequence: Synthetic oligonucleotide
  Target: LAMA2; (-) strand; PAM type: YTN; PAM sequence: CTA
tttcatctgacatataatgt

SEQ ID NO: 206110 - DNA, 20 bp, Artificial Sequence
  Description of Artificial Sequence: Synthetic oligonucleotide
  Target: LAMA2; (-) strand; PAM type: YTN; PAM sequence: TTA
gctatttcatctgacatata

SEQ ID NO: 206111 - DNA, 20 bp, Artificial Sequence
  Description of Artificial Sequence: Synthetic oligonucleotide
  Target: LAMA2; (-) strand; PAM type: YTN; PAM sequence: TTA
attagctatttcatctgaca

SEQ ID NO: 206112 - DNA, 20 bp, Artificial Sequence
  Description of Artificial Sequence: Synthetic oligonucleotide
  Target: LAMA2; (-) strand; PAM type: YTN; PAM sequence: TTA
atgttaattagctatttcat

SEQ ID NO: 206113 - DNA, 20 bp, Artificial Sequence
  Description of Artificial Sequence: Synthetic oligonucleotide
  Target: LAMA2; (-) strand; PAM type: YTN; PAM sequence: TTA
aatataatagaattaatgtt

SEQ ID NO: 206114 - DNA, 20 bp, Artificial Sequence
  Description of Artificial Sequence: Synthetic oligonucleotide
  Target: LAMA2; (-) strand; PAM type: YTN; PAM sequence: TTA
tgttaaatataatagaatta

SEQ ID NO: 206115 - DNA, 20 bp, Artificial Sequence
  Description of Artificial Sequence: Synthetic oligonucleotide
  Target: LAMA2; (-) strand; PAM type: YTN; PAM sequence: TTC
accgaggtatatagggtgtt

SEQ ID NO: 206116 - DNA, 20 bp, Artificial Sequence
  Description of Artificial Sequence: Synthetic oligonucleotide
  Target: LAMA2; (-) strand; PAM type: YTN; PAM sequence: TTA
ttcaccgaggtatatagggt

SEQ ID NO: 206117 - DNA, 20 bp, Artificial Sequence
  Description of Artificial Sequence: Synthetic oligonucleotide
  Target: LAMA2; (-) strand; PAM type: YTN; PAM sequence: TTT
attcaccgaggtatataggg

SEQ ID NO: 206118 - DNA, 20 bp, Artificial Sequence
  Description of Artificial Sequence: Synthetic oligonucleotide
  Target: LAMA2; (-) strand; PAM type: YTN; PAM sequence: CTT
tattcaccgaggtatatagg

SEQ ID NO: 206119 - DNA, 20 bp, Artificial Sequence
  Description of Artificial Sequence: Synthetic oligonucleotide
  Target: LAMA2; (-) strand; PAM type: YTN; PAM sequence: TTC
tttattcaccgaggtatata

SEQ ID NO: 206120 - DNA, 20 bp, Artificial Sequence
  Description of Artificial Sequence: Synthetic oligonucleotide
  Target: LAMA2; (-) strand; PAM type: YTN; PAM sequence: CTT
ctttattcaccgaggtatat

SEQ ID NO: 206121 - DNA, 20 bp, Artificial Sequence
  Description of Artificial Sequence: Synthetic oligonucleotide
  Target: LAMA2; (-) strand; PAM type: YTN; PAM sequence: TTA
gaaatcttctttattcaccg

SEQ ID NO: 206122 - DNA, 20 bp, Artificial Sequence
  Description of Artificial Sequence: Synthetic oligonucleotide
  Target: LAMA2; (-) strand; PAM type: YTN; PAM sequence: TTT
agaaatcttctttattcacc

SEQ ID NO: 206123 - DNA, 20 bp, Artificial Sequence
  Description of Artificial Sequence: Synthetic oligonucleotide
  Target: LAMA2; (-) strand; PAM type: YTN; PAM sequence: CTT
tagaaatcttctttattcac

SEQ ID NO: 206124 - DNA, 20 bp, Artificial Sequence
  Description of Artificial Sequence: Synthetic oligonucleotide
  Target: LAMA2; (-) strand; PAM type: YTN; PAM sequence: CTC
atcctttagaaatcttcttt

SEQ ID NO: 206125 - DNA, 20 bp, Artificial Sequence
  Description of Artificial Sequence: Synthetic oligonucleotide
  Target: LAMA2; (-) strand; PAM type: YTN; PAM sequence: TTA
aactcatcctttagaaatct

SEQ ID NO: 206126 - DNA, 20 bp, Artificial Sequence
  Description of Artificial Sequence: Synthetic oligonucleotide
  Target: LAMA2; (-) strand; PAM type: YTN; PAM sequence: CTT
aaactcatcctttagaaatc

SEQ ID NO: 206127 - DNA, 20 bp, Artificial Sequence
  Description of Artificial Sequence: Synthetic oligonucleotide
  Target: LAMA2; (-) strand; PAM type: YTN; PAM sequence: CTC
ttaaactcatcctttagaaa

SEQ ID NO: 206128 - DNA, 20 bp, Artificial Sequence
  Description of Artificial Sequence: Synthetic oligonucleotide
  Target: LAMA2; (-) strand; PAM type: YTN; PAM sequence: TTA
tcaatacctcttaaactcat

SEQ ID NO: 206129 - DNA, 20 bp, Artificial Sequence
  Description of Artificial Sequence: Synthetic oligonucleotide
  Target: LAMA2; (-) strand; PAM type: YTN; PAM sequence: CTT
atcaatacctcttaaactca

SEQ ID NO: 206130 - DNA, 20 bp, Artificial Sequence
  Description of Artificial Sequence: Synthetic oligonucleotide
  Target: LAMA2; (-) strand; PAM type: YTN; PAM sequence: CTG
gtccttatcaatacctctta

SEQ ID NO: 206131 - DNA, 20 bp, Artificial Sequence
  Description of Artificial Sequence: Synthetic oligonucleotide
  Target: LAMA2; (-) strand; PAM type: YTN; PAM sequence: CTA
aatatctggtccttatcaat

SEQ ID NO: 206132 - DNA, 20 bp, Artificial Sequence
  Description of Artificial Sequence: Synthetic oligonucleotide
  Target: LAMA2; (-) strand; PAM type: YTN; PAM sequence: TTA
ctaaatatctggtccttatc

SEQ ID NO: 206133 - DNA, 20 bp, Artificial Sequence
  Description of Artificial Sequence: Synthetic oligonucleotide
  Target: LAMA2; (-) strand; PAM type: YTN; PAM sequence: TTT
actaaatatctggtccttat

SEQ ID NO: 206134 - DNA, 20 bp, Artificial Sequence
  Description of Artificial Sequence: Synthetic oligonucleotide
  Target: LAMA2; (-) strand; PAM type: YTN; PAM sequence: CTT
tactaaatatctggtcctta

SEQ ID NO: 206135 - DNA, 20 bp, Artificial Sequence
  Description of Artificial Sequence: Synthetic oligonucleotide
  Target: LAMA2; (-) strand; PAM type: YTN; PAM sequence: TTC
tttactaaatatctggtcct

SEQ ID NO: 206136 - DNA, 20 bp, Artificial Sequence
  Description of Artificial Sequence: Synthetic oligonucleotide
  Target: LAMA2; (-) strand; PAM type: YTN; PAM sequence: TTT
ctttactaaatatctggtcc

SEQ ID NO: 206137 - DNA, 20 bp, Artificial Sequence
  Description of Artificial Sequence: Synthetic oligonucleotide
  Target: LAMA2; (-) strand; PAM type: YTN; PAM sequence: CTA
gggaatcatgggatttcttt

SEQ ID NO: 206138 - DNA, 20 bp, Artificial Sequence
  Description of Artificial Sequence: Synthetic oligonucleotide
  Target: LAMA2; (-) strand; PAM type: YTN; PAM sequence: CTG
aagagtcacaaatctaggga

SEQ ID NO: 206139 - DNA, 20 bp, Artificial Sequence
  Description of Artificial Sequence: Synthetic oligonucleotide
  Target: LAMA2; (-) strand; PAM type: YTN; PAM sequence: TTA
aatgtgtcactgaagagtca

SEQ ID NO: 206140 - DNA, 20 bp, Artificial Sequence
  Description of Artificial Sequence: Synthetic oligonucleotide
  Target: LAMA2; (-) strand; PAM type: YTN; PAM sequence: CTA
attaaatgtgtcactgaaga

SEQ ID NO: 206141 - DNA, 20 bp, Artificial Sequence
  Description of Artificial Sequence: Synthetic oligonucleotide
  Target: LAMA2; (-) strand; PAM type: YTN; PAM sequence: TTA
actaattaaatgtgtcactg

SEQ ID NO: 206142 - DNA, 20 bp, Artificial Sequence
  Description of Artificial Sequence: Synthetic oligonucleotide
  Target: LAMA2; (-) strand; PAM type: YTN; PAM sequence: TTC
acaaagcattaactaattaa

SEQ ID NO: 206143 - DNA, 20 bp, Artificial Sequence
  Description of Artificial Sequence: Synthetic oligonucleotide
  Target: LAMA2; (-) strand; PAM type: YTN; PAM sequence: CTG
ggattcacaaagcattaact

SEQ ID NO: 206144 - DNA, 20 bp, Artificial Sequence
  Description of Artificial Sequence: Synthetic oligonucleotide
  Target: LAMA2; (-) strand; PAM type: YTN; PAM sequence: TTC
tgggattcacaaagcattaa

SEQ ID NO: 206145 - DNA, 20 bp, Artificial Sequence
  Description of Artificial Sequence: Synthetic oligonucleotide
  Target: LAMA2; (-) strand; PAM type: YTN; PAM sequence: CTA
tgacaaaaatatggtatatc

SEQ ID NO: 206146 - DNA, 20 bp, Artificial Sequence
  Description of Artificial Sequence: Synthetic oligonucleotide
  Target: LAMA2; (-) strand; PAM type: YTN; PAM sequence: TTA
ctatgacaaaaatatggtat

SEQ ID NO: 206147 - DNA, 20 bp, Artificial Sequence
  Description of Artificial Sequence: Synthetic oligonucleotide
  Target: LAMA2; (-) strand; PAM type: YTN; PAM sequence: TTG
ttactatgacaaaaatatgg

SEQ ID NO: 206148 - DNA, 20 bp, Artificial Sequence
  Description of Artificial Sequence: Synthetic oligonucleotide
  Target: LAMA2; (-) strand; PAM type: YTN; PAM sequence: TTG
ttgttactatgacaaaaata

SEQ ID NO: 206149 - DNA, 20 bp, Artificial Sequence
  Description of Artificial Sequence: Synthetic oligonucleotide
  Target: LAMA2; (-) strand; PAM type: YTN; PAM sequence: TTA
aattgttgttactatgacaa

SEQ ID NO: 206150 - DNA, 20 bp, Artificial Sequence
  Description of Artificial Sequence: Synthetic oligonucleotide
  Target: LAMA2; (-) strand; PAM type: YTN; PAM sequence: CTA
taggagaatcagaattaaat

SEQ ID NO: 206151 - DNA, 20 bp, Artificial Sequence
  Description of Artificial Sequence: Synthetic oligonucleotide
  Target: LAMA2; (-) strand; PAM type: YTN; PAM sequence: TTC
atctataggagaatcagaat

SEQ ID NO: 206152 - DNA, 20 bp, Artificial Sequence
  Description of Artificial Sequence: Synthetic oligonucleotide
  Target: LAMA2; (-) strand; PAM type: YTN; PAM sequence: TTC
aaagtagcatgaaagataga

SEQ ID NO: 206153 - DNA, 20 bp, Artificial Sequence
  Description of Artificial Sequence: Synthetic oligonucleotide
  Target: LAMA2; (-) strand; PAM type: YTN; PAM sequence: TTA
aaaaccgaattcaaagtagc

SEQ ID NO: 206154 - DNA, 20 bp, Artificial Sequence
  Description of Artificial Sequence: Synthetic oligonucleotide
  Target: LAMA2; (-) strand; PAM type: YTN; PAM sequence: TTT
aaaaaccgaattcaaagtag

SEQ ID NO: 206155 - DNA, 20 bp, Artificial Sequence
  Description of Artificial Sequence: Synthetic oligonucleotide
  Target: LAMA2; (-) strand; PAM type: YTN; PAM sequence: TTT
taaaaaccgaattcaaagta

SEQ ID NO: 206156 - DNA, 20 bp, Artificial Sequence
  Description of Artificial Sequence: Synthetic oligonucleotide
  Target: LAMA2; (-) strand; PAM type: YTN; PAM sequence: TTC
agttttaaaaaccgaattca

SEQ ID NO: 206157 - DNA, 20 bp, Artificial Sequence
  Description of Artificial Sequence: Synthetic oligonucleotide
  Target: LAMA2; (-) strand; PAM type: YTN; PAM sequence: TTA
aattcagttttaaaaaccga

SEQ ID NO: 206158 - DNA, 20 bp, Artificial Sequence
  Description of Artificial Sequence: Synthetic oligonucleotide
  Target: LAMA2; (-) strand; PAM type: YTN; PAM sequence: TTT
aaattcagttttaaaaaccg

SEQ ID NO: 206159 - DNA, 20 bp, Artificial Sequence
  Description of Artificial Sequence: Synthetic oligonucleotide
  Target: LAMA2; (-) strand; PAM type: YTN; PAM sequence: CTG
tgatatttaaattcagtttt

SEQ ID NO: 206160 - DNA, 20 bp, Artificial Sequence
  Description of Artificial Sequence: Synthetic oligonucleotide
  Target: LAMA2; (-) strand; PAM type: YTN; PAM sequence: TTG
aatatcatatgataagtact

SEQ ID NO: 206161 - DNA, 20 bp, Artificial Sequence
  Description of Artificial Sequence: Synthetic oligonucleotide
  Target: LAMA2; (-) strand; PAM type: YTN; PAM sequence: TTG
ttgaatatcatatgataagt

SEQ ID NO: 206162 - DNA, 20 bp, Artificial Sequence
  Description of Artificial Sequence: Synthetic oligonucleotide
  Target: LAMA2; (-) strand; PAM type: YTN; PAM sequence: TTG
ataaaataaaataaaatgga

SEQ ID NO: 206163 - DNA, 20 bp, Artificial Sequence
  Description of Artificial Sequence: Synthetic oligonucleotide
  Target: LAMA2; (-) strand; PAM type: YTN; PAM sequence: CTA
aaataaaagttgataaaata

SEQ ID NO: 206164 - DNA, 20 bp, Artificial Sequence
  Description of Artificial Sequence: Synthetic oligonucleotide
  Target: LAMA2; (-) strand; PAM type: YTN; PAM sequence: TTC
taaaataaaagttgataaaa

SEQ ID NO: 206165 - DNA, 20 bp, Artificial Sequence
  Description of Artificial Sequence: Synthetic oligonucleotide
  Target: LAMA2; (-) strand; PAM type: YTN; PAM sequence: CTG
attctaaaataaaagttgat

SEQ ID NO: 206166 - DNA, 20 bp, Artificial Sequence
  Description of Artificial Sequence: Synthetic oligonucleotide
  Target: LAMA2; (-) strand; PAM type: YTN; PAM sequence: CTC
cctgattctaaaataaaagt

SEQ ID NO: 206167 - DNA, 20 bp, Artificial Sequence
  Description of Artificial Sequence: Synthetic oligonucleotide
  Target: LAMA2; (-) strand; PAM type: YTN; PAM sequence: CTG
cacatgtactccctgattct

SEQ ID NO: 206168 - DNA, 20 bp, Artificial Sequence
  Description of Artificial Sequence: Synthetic oligonucleotide
  Target: LAMA2; (-) strand; PAM type: YTN; PAM sequence: TTG
tgtgatatatacctgcacat

SEQ ID NO: 206169 - DNA, 20 bp, Artificial Sequence
  Description of Artificial Sequence: Synthetic oligonucleotide
  Target: LAMA2; (-) strand; PAM type: YTN; PAM sequence: CTT
gtgtgatatatacctgcaca

SEQ ID NO: 206170 - DNA, 20 bp, Artificial Sequence
  Description of Artificial Sequence: Synthetic oligonucleotide
  Target: LAMA2; (-) strand; PAM type: YTN; PAM sequence: CTC
agcatcacacaatatatctt

SEQ ID NO: 206171 - DNA, 20 bp, Artificial Sequence
  Description of Artificial Sequence: Synthetic oligonucleotide
  Target: LAMA2; (-) strand; PAM type: YTN; PAM sequence: CTC
caaacctcagcatcacacaa

SEQ ID NO: 206172 - DNA, 20 bp, Artificial Sequence
  Description of Artificial Sequence: Synthetic oligonucleotide
  Target: LAMA2; (-) strand; PAM type: YTN; PAM sequence: TTG
tactccaaacctcagcatca

SEQ ID NO: 206173 - DNA, 20 bp, Artificial Sequence
  Description of Artificial Sequence: Synthetic oligonucleotide
  Target: LAMA2; (-) strand; PAM type: YTN; PAM sequence: TTT
gtactccaaacctcagcatc

SEQ ID NO: 206174 - DNA, 20 bp, Artificial Sequence
  Description of Artificial Sequence: Synthetic oligonucleotide
  Target: LAMA2; (-) strand; PAM type: YTN; PAM sequence: TTC
atttgtactccaaacctcag

SEQ ID NO: 206175 - DNA, 20 bp, Artificial Sequence
  Description of Artificial Sequence: Synthetic oligonucleotide
  Target: LAMA2; (-) strand; PAM type: YTN; PAM sequence: CTG
aatgacagattcatttgtac

SEQ ID NO: 206176 - DNA, 20 bp, Artificial Sequence
  Description of Artificial Sequence: Synthetic oligonucleotide
  Target: LAMA2; (-) strand; PAM type: YTN; PAM sequence: CTA
cctgaatgacagattcattt

SEQ ID NO: 206177 - DNA, 20 bp, Artificial Sequence
  Description of Artificial Sequence: Synthetic oligonucleotide
  Target: LAMA2; (-) strand; PAM type: YTN; PAM sequence: CTA
tacccactacctgaatgaca

SEQ ID NO: 206178 - DNA, 20 bp, Artificial Sequence
  Description of Artificial Sequence: Synthetic oligonucleotide
  Target: LAMA2; (-) strand; PAM type: YTN; PAM sequence: CTA
tcaggtactatacccactac

SEQ ID NO: 206179 - DNA, 20 bp, Artificial Sequence
  Description of Artificial Sequence: Synthetic oligonucleotide
  Target: LAMA2; (-) strand; PAM type: YTN; PAM sequence: CTG
cctatcaggtactataccca

SEQ ID NO: 206180 - DNA, 20 bp, Artificial Sequence
  Description of Artificial Sequence: Synthetic oligonucleotide
  Target: LAMA2; (-) strand; PAM type: YTN; PAM sequence: CTC
aaaacaaaactgcctatcag

SEQ ID NO: 206181 - DNA, 20 bp, Artificial Sequence
  Description of Artificial Sequence: Synthetic oligonucleotide
  Target: LAMA2; (-) strand; PAM type: YTN; PAM sequence: TTG
tctcaaaacaaaactgccta

SEQ ID NO: 206182 - DNA, 20 bp, Artificial Sequence
  Description of Artificial Sequence: Synthetic oligonucleotide
  Target: LAMA2; (-) strand; PAM type: YTN; PAM sequence: TTT
gtctcaaaacaaaactgcct

SEQ ID NO: 206183 - DNA, 20 bp, Artificial Sequence
  Description of Artificial Sequence: Synthetic oligonucleotide
  Target: LAMA2; (-) strand; PAM type: YTN; PAM sequence: CTT
tgtctcaaaacaaaactgcc

SEQ ID NO: 206184 - DNA, 20 bp, Artificial Sequence
  Description of Artificial Sequence: Synthetic oligonucleotide
  Target: LAMA2; (-) strand; PAM type: YTN; PAM sequence: TTA
cagagtgagactttgtctca

SEQ ID NO: 206185 - DNA, 20 bp, Artificial Sequence
  Description of Artificial Sequence: Synthetic oligonucleotide
  Target: LAMA2; (-) strand; PAM type: YTN; PAM sequence: CTG
ggttacagagtgagactttg

SEQ ID NO: 206186 - DNA, 20 bp, Artificial Sequence
  Description of Artificial Sequence: Synthetic oligonucleotide
  Target: LAMA2; (-) strand; PAM type: YTN; PAM sequence: CTC
cagcctgggttacagagtga

SEQ ID NO: 206187 - DNA, 20 bp, Artificial Sequence
  Description of Artificial Sequence: Synthetic oligonucleotide
  Target: LAMA2; (-) strand; PAM type: YTN; PAM sequence: CTG
cactccagcctgggttacag

SEQ ID NO: 206188 - DNA, 20 bp, Artificial Sequence
  Description of Artificial Sequence: Synthetic oligonucleotide
  Target: LAMA2; (-) strand; PAM type: YTN; PAM sequence: TTG
cagtgagccgagatcgtgcc

SEQ ID NO: 206189 - DNA, 20 bp, Artificial Sequence
  Description of Artificial Sequence: Synthetic oligonucleotide
  Target: LAMA2; (-) strand; PAM type: YTN; PAM sequence: TTG
aacccaggaggtggaggttg

SEQ ID NO: 206190 - DNA, 20 bp, Artificial Sequence
  Description of Artificial Sequence: Synthetic oligonucleotide
  Target: LAMA2; (-) strand; PAM type: YTN; PAM sequence: CTT
gaacccaggaggtggaggtt

SEQ ID NO: 206191 - DNA, 20 bp, Artificial Sequence
  Description of Artificial Sequence: Synthetic oligonucleotide
  Target: LAMA2; (-) strand; PAM type: YTN; PAM sequence: CTG
aagcaggagaagtgcttgaa

SEQ ID NO: 206192 - DNA, 20 bp, Artificial Sequence
  Description of Artificial Sequence: Synthetic oligonucleotide
  Target: LAMA2; (-) strand; PAM type: YTN; PAM sequence: CTA
tggaggctgaagcaggagaa

SEQ ID NO: 206193 - DNA, 20 bp, Artificial Sequence
  Description of Artificial Sequence: Synthetic oligonucleotide
  Target: LAMA2; (-) strand; PAM type: YTN; PAM sequence: CTA
ctatggaggctgaagcagga

SEQ ID NO: 206194 - DNA, 20 bp, Artificial Sequence
  Description of Artificial Sequence: Synthetic oligonucleotide
  Target: LAMA2; (-) strand; PAM type: YTN; PAM sequence: CTG
taatcccagctactatggag

SEQ ID NO: 206195 - DNA, 20 bp, Artificial Sequence
  Description of Artificial Sequence: Synthetic oligonucleotide
  Target: LAMA2; (-) strand; PAM type: YTN; PAM sequence: TTA
tccaggcgtggtggcaggca

SEQ ID NO: 206196 - DNA, 20 bp, Artificial Sequence
  Description of Artificial Sequence: Synthetic oligonucleotide
  Target: LAMA2; (-) strand; PAM type: YTN; PAM sequence: CTA
aaaatacaaaaaagttatcc

SEQ ID NO: 206197 - DNA, 20 bp, Artificial Sequence
  Description of Artificial Sequence: Synthetic oligonucleotide
  Target: LAMA2; (-) strand; PAM type: YTN; PAM sequence: CTA
ctaaaaatacaaaaaagtta

SEQ ID NO: 206198 - DNA, 20 bp, Artificial Sequence
  Description of Artificial Sequence: Synthetic oligonucleotide
  Target: LAMA2; (-) strand; PAM type: YTN; PAM sequence: CTC
tactaaaaatacaaaaaagt

SEQ ID NO: 206199 - DNA, 20 bp, Artificial Sequence
  Description of Artificial Sequence: Synthetic oligonucleotide
  Target: LAMA2; (-) strand; PAM type: YTN; PAM sequence: CTG
tctctactaaaaatacaaaa

SEQ ID NO: 206200 - DNA, 20 bp, Artificial Sequence
  Description of Artificial Sequence: Synthetic oligonucleotide
  Target: LAMA2; (-) strand; PAM type: YTN; PAM sequence: TTC
aagaccagcccggccaacac

SEQ ID NO: 206201 - DNA, 20 bp, Artificial Sequence
  Description of Artificial Sequence: Synthetic oligonucleotide
  Target: LAMA2; (-) strand; PAM type: YTN; PAM sequence: CTG
aggtcaggagttcaagacca

SEQ ID NO: 206202 - DNA, 20 bp, Artificial Sequence
  Description of Artificial Sequence: Synthetic oligonucleotide
  Target: LAMA2; (-) strand; PAM type: YTN; PAM sequence: TTG
gaaggccaaggcaggcggat

SEQ ID NO: 206203 - DNA, 20 bp, Artificial Sequence
  Description of Artificial Sequence: Synthetic oligonucleotide
  Target: LAMA2; (-) strand; PAM type: YTN; PAM sequence: TTT
ggaaggccaaggcaggcgga

SEQ ID NO: 206204 - DNA, 20 bp, Artificial Sequence
  Description of Artificial Sequence: Synthetic oligonucleotide
  Target: LAMA2; (-) strand; PAM type: YTN; PAM sequence: CTT
tggaaggccaaggcaggcgg

SEQ ID NO: 206205 - DNA, 20 bp, Artificial Sequence
  Description of Artificial Sequence: Synthetic oligonucleotide
  Target: LAMA2; (-) strand; PAM type: YTN; PAM sequence: CTG
taatcccagcactttggaag

SEQ ID NO: 206206 - DNA, 20 bp, Artificial Sequence
  Description of Artificial Sequence: Synthetic oligonucleotide
  Target: LAMA2; (-) strand; PAM type: YTN; PAM sequence: TTC
atgcctgtaatcccagcact

SEQ ID NO: 206207 - DNA, 20 bp, Artificial Sequence
  Description of Artificial Sequence: Synthetic oligonucleotide
  Target: LAMA2; (-) strand; PAM type: YTN; PAM sequence: CTG
gggccaggtgcggtggttca

SEQ ID NO: 206208 - DNA, 20 bp, Artificial Sequence
  Description of Artificial Sequence: Synthetic oligonucleotide
  Target: LAMA2; (-) strand; PAM type: YTN; PAM sequence: CTA
ctggggccaggtgcggtggt

SEQ ID NO: 206209 - DNA, 20 bp, Artificial Sequence
  Description of Artificial Sequence: Synthetic oligonucleotide
  Target: LAMA2; (-) strand; PAM type: YTN; PAM sequence: TTA
aaccacctactggggccagg

SEQ ID NO: 206210 - DNA, 20 bp, Artificial Sequence
  Description of Artificial Sequence: Synthetic oligonucleotide
  Target: LAMA2; (-) strand; PAM type: YTN; PAM sequence: TTT
aaaccacctactggggccag

SEQ ID NO: 206211 - DNA, 20 bp, Artificial Sequence
  Description of Artificial Sequence: Synthetic oligonucleotide
  Target: LAMA2; (-) strand; PAM type: YTN; PAM sequence: CTG
ggcaatacaacagaggggag

SEQ ID NO: 206212 - DNA, 20 bp, Artificial Sequence
  Description of Artificial Sequence: Synthetic oligonucleotide
  Target: LAMA2; (-) strand; PAM type: YTN; PAM sequence: TTA
aagaagaaaaatataaggtc

SEQ ID NO: 206213 - DNA, 20 bp, Artificial Sequence
  Description of Artificial Sequence: Synthetic oligonucleotide
  Target: LAMA2; (-) strand; PAM type: YTN; PAM sequence: TTT
aaagaagaaaaatataaggt

SEQ ID NO: 206214 - DNA, 20 bp, Artificial Sequence
  Description of Artificial Sequence: Synthetic oligonucleotide
  Target: LAMA2; (-) strand; PAM type: YTN; PAM sequence: CTG
atttaaagaagaaaaatata

SEQ ID NO: 206215 - DNA, 20 bp, Artificial Sequence
  Description of Artificial Sequence: Synthetic oligonucleotide
  Target: LAMA2; (-) strand; PAM type: YTN; PAM sequence: TTA
ctgatttaaagaagaaaaat

SEQ ID NO: 206216 - DNA, 20 bp, Artificial Sequence
  Description of Artificial Sequence: Synthetic oligonucleotide
  Target: LAMA2; (-) strand; PAM type: YTN; PAM sequence: TTA
acaacataaaaaattactga

SEQ ID NO: 206217 - DNA, 20 bp, Artificial Sequence
  Description of Artificial Sequence: Synthetic oligonucleotide
  Target: LAMA2; (-) strand; PAM type: YTN; PAM sequence: TTT
aacaacataaaaaattactg

SEQ ID NO: 206218 - DNA, 20 bp, Artificial Sequence
  Description of Artificial Sequence: Synthetic oligonucleotide
  Target: LAMA2; (-) strand; PAM type: YTN; PAM sequence: TTT
taacaacataaaaaattact

SEQ ID NO: 206219 - DNA, 20 bp, Artificial Sequence
  Description of Artificial Sequence: Synthetic oligonucleotide
  Target: LAMA2; (-) strand; PAM type: YTN; PAM sequence: TTG
attttaacaacataaaaaat

SEQ ID NO: 206220 - DNA, 20 bp, Artificial Sequence
  Description of Artificial Sequence: Synthetic oligonucleotide
  Target: LAMA2; (-) strand; PAM type: YTN; PAM sequence: CTG
caaaaattgattttaacaac

SEQ ID NO: 206221 - DNA, 20 bp, Artificial Sequence
  Description of Artificial Sequence: Synthetic oligonucleotide
  Target: LAMA2; (-) strand; PAM type: YTN; PAM sequence: CTC
tgcaaaaattgattttaaca

SEQ ID NO: 206222 - DNA, 20 bp, Artificial Sequence
  Description of Artificial Sequence: Synthetic oligonucleotide
  Target: LAMA2; (-) strand; PAM type: YTN; PAM sequence: CTA
atctctgcaaaaattgattt

SEQ ID NO: 206223 - DNA, 20 bp, Artificial Sequence
  Description of Artificial Sequence: Synthetic oligonucleotide
  Target: LAMA2; (-) strand; PAM type: YTN; PAM sequence: TTC
taatctctgcaaaaattgat

SEQ ID NO: 206224 - DNA, 20 bp, Artificial Sequence
  Description of Artificial Sequence: Synthetic oligonucleotide
  Target: LAMA2; (-) strand; PAM type: YTN; PAM sequence: TTA
ggccaaatacattctaatct

SEQ ID NO: 206225 - DNA, 20 bp, Artificial Sequence
  Description of Artificial Sequence: Synthetic oligonucleotide
  Target: LAMA2; (-) strand; PAM type: YTN; PAM sequence: TTA
agaatgagaaattaggccaa

SEQ ID NO: 206226 - DNA, 20 bp, Artificial Sequence
  Description of Artificial Sequence: Synthetic oligonucleotide
  Target: LAMA2; (-) strand; PAM type: YTN; PAM sequence: CTT
aagaatgagaaattaggcca

SEQ ID NO: 206227 - DNA, 20 bp, Artificial Sequence
  Description of Artificial Sequence: Synthetic oligonucleotide
  Target: LAMA2; (-) strand; PAM type: YTN; PAM sequence: TTA
cttaagaatgagaaattagg

SEQ ID NO: 206228 - DNA, 20 bp, Artificial Sequence
  Description of Artificial Sequence: Synthetic oligonucleotide
  Target: LAMA2; (-) strand; PAM type: YTN; PAM sequence: TTT
acttaagaatgagaaattag

SEQ ID NO: 206229 - DNA, 20 bp, Artificial Sequence
  Description of Artificial Sequence: Synthetic oligonucleotide
  Target: LAMA2; (-) strand; PAM type: YTN; PAM sequence: TTT
tacttaagaatgagaaatta

SEQ ID NO: 206230 - DNA, 20 bp, Artificial Sequence
  Description of Artificial Sequence: Synthetic oligonucleotide
  Target: LAMA2; (-) strand; PAM type: YTN; PAM sequence: TTG
ttttacttaagaatgagaaa

SEQ ID NO: 206231 - DNA, 20 bp, Artificial Sequence
  Description of Artificial Sequence: Synthetic oligonucleotide
  Target: LAMA2; (-) strand; PAM type: YTN; PAM sequence: TTT
gttttacttaagaatgagaa

SEQ ID NO: 206232 - DNA, 20 bp, Artificial Sequence
  Description of Artificial Sequence: Synthetic oligonucleotide
  Target: LAMA2; (-) strand; PAM type: YTN; PAM sequence: TTT
tgttttacttaagaatgaga

SEQ ID NO: 206233 - DNA, 20 bp, Artificial Sequence
  Description of Artificial Sequence: Synthetic oligonucleotide
  Target: LAMA2; (-) strand; PAM type: YTN; PAM sequence: TTA
ttttgttttacttaagaatg

SEQ ID NO: 206234 - DNA, 20 bp, Artificial Sequence
  Description of Artificial Sequence: Synthetic oligonucleotide
  Target: LAMA2; (-) strand; PAM type: YTN; PAM sequence: CTT
attttgttttacttaagaat

SEQ ID NO: 206235 - DNA, 20 bp, Artificial Sequence
  Description of Artificial Sequence: Synthetic oligonucleotide
  Target: LAMA2; (-) strand; PAM type: YTN; PAM sequence: TTA
tgtccttattttgttttact

SEQ ID NO: 206236 - DNA, 20 bp, Artificial Sequence
  Description of Artificial Sequence: Synthetic oligonucleotide
  Target: LAMA2; (-) strand; PAM type: YTN; PAM sequence: CTA
taaattatgtccttattttg

SEQ ID NO: 206237 - DNA, 20 bp, Artificial Sequence
  Description of Artificial Sequence: Synthetic oligonucleotide
  Target: LAMA2; (-) strand; PAM type: YTN; PAM sequence: CTA
taccaaaaaatcagtatatg

SEQ ID NO: 206238 - DNA, 20 bp, Artificial Sequence
  Description of Artificial Sequence: Synthetic oligonucleotide
  Target: LAMA2; (-) strand; PAM type: YTN; PAM sequence: TTA
gtgatctataccaaaaaatc

SEQ ID NO: 206239 - DNA, 20 bp, Artificial Sequence
  Description of Artificial Sequence: Synthetic oligonucleotide
  Target: LAMA2; (-) strand; PAM type: YTN; PAM sequence: TTT
agtgatctataccaaaaaat

SEQ ID NO: 206240 - DNA, 20 bp, Artificial Sequence
  Description of Artificial Sequence: Synthetic oligonucleotide
  Target: LAMA2; (-) strand; PAM type: YTN; PAM sequence: TTA
tttagtgatctataccaaaa

SEQ ID NO: 206241 - DNA, 20 bp, Artificial Sequence
  Description of Artificial Sequence: Synthetic oligonucleotide
  Target: LAMA2; (-) strand; PAM type: YTN; PAM sequence: CTT
atttagtgatctataccaaa

SEQ ID NO: 206242 - DNA, 20 bp, Artificial Sequence
  Description of Artificial Sequence: Synthetic oligonucleotide
  Target: LAMA2; (-) strand; PAM type: YTN; PAM sequence: TTC
agtacttatttagtgatcta

SEQ ID NO: 206243 - DNA, 20 bp, Artificial Sequence
  Description of Artificial Sequence: Synthetic oligonucleotide
  Target: LAMA2; (-) strand; PAM type: YTN; PAM sequence: CTA
aagaaaaaagttcagtactt

SEQ ID NO: 206244 - DNA, 20 bp, Artificial Sequence
  Description of Artificial Sequence: Synthetic oligonucleotide
  Target: LAMA2; (-) strand; PAM type: YTN; PAM sequence: CTA
aacgtcctaaagaaaaaagt

SEQ ID NO: 206245 - DNA, 20 bp, Artificial Sequence
  Description of Artificial Sequence: Synthetic oligonucleotide
  Target: LAMA2; (-) strand; PAM type: YTN; PAM sequence: CTC
taaacgtcctaaagaaaaaa

SEQ ID NO: 206246 - DNA, 20 bp, Artificial Sequence
  Description of Artificial Sequence: Synthetic oligonucleotide
  Target: LAMA2; (-) strand; PAM type: YTN; PAM sequence: CTG
tcaaaaactctaaacgtcct

SEQ ID NO: 206247 - DNA, 20 bp, Artificial Sequence
  Description of Artificial Sequence: Synthetic oligonucleotide
  Target: LAMA2; (-) strand; PAM type: YTN; PAM sequence: CTA
tatacctgtcaaaaactcta

SEQ ID NO: 206248 - DNA, 20 bp, Artificial Sequence
  Description of Artificial Sequence: Synthetic oligonucleotide
  Target: LAMA2; (-) strand; PAM type: YTN; PAM sequence: TTG
actatatacctgtcaaaaac

SEQ ID NO: 206249 - DNA, 20 bp, Artificial Sequence
  Description of Artificial Sequence: Synthetic oligonucleotide
  Target: LAMA2; (-) strand; PAM type: YTN; PAM sequence: CTT
gactatatacctgtcaaaaa

SEQ ID NO: 206250 - DNA, 20 bp, Artificial Sequence
  Description of Artificial Sequence: Synthetic oligonucleotide
  Target: LAMA2; (-) strand; PAM type: YTN; PAM sequence: TTC
atatacaaatcatcagagag

SEQ ID NO: 206251 - DNA, 20 bp, Artificial Sequence
  Description of Artificial Sequence: Synthetic oligonucleotide
  Target: LAMA2; (-) strand; PAM type: YTN; PAM sequence: CTA
tcaataaagaatgaattcat

SEQ ID NO: 206252 - DNA, 20 bp, Artificial Sequence
  Description of Artificial Sequence: Synthetic oligonucleotide
  Target: LAMA2; (-) strand; PAM type: YTN; PAM sequence: TTG
atactatcaataaagaatga

SEQ ID NO: 206253 - DNA, 20 bp, Artificial Sequence
  Description of Artificial Sequence: Synthetic oligonucleotide
  Target: LAMA2; (-) strand; PAM type: YTN; PAM sequence: TTG
tcatgttgatactatcaata

SEQ ID NO: 206254 - DNA, 20 bp, Artificial Sequence
  Description of Artificial Sequence: Synthetic oligonucleotide
  Target: LAMA2; (-) strand; PAM type: YTN; PAM sequence: TTT
gtcatgttgatactatcaat

SEQ ID NO: 206255 - DNA, 20 bp, Artificial Sequence
  Description of Artificial Sequence: Synthetic oligonucleotide
  Target: LAMA2; (-) strand; PAM type: YTN; PAM sequence: TTT
tgtcatgttgatactatcaa

SEQ ID NO: 206256 - DNA, 20 bp, Artificial Sequence
  Description of Artificial Sequence: Synthetic oligonucleotide
  Target: LAMA2; (-) strand; PAM type: YTN; PAM sequence: TTG
tatgttttgtcatgttgata

SEQ ID NO: 206257 - DNA, 20 bp, Artificial Sequence
  Description of Artificial Sequence: Synthetic oligonucleotide
  Target: LAMA2; (-) strand; PAM type: YTN; PAM sequence: CTT
gtatgttttgtcatgttgat

SEQ ID NO: 206258 - DNA, 20 bp, Artificial Sequence
  Description of Artificial Sequence: Synthetic oligonucleotide
  Target: LAMA2; (-) strand; PAM type: YTN; PAM sequence: TTA
ggacaaaggccttgtatgtt

SEQ ID NO: 206259 - DNA, 20 bp, Artificial Sequence
  Description of Artificial Sequence: Synthetic oligonucleotide
  Target: LAMA2; (-) strand; PAM type: YTN; PAM sequence: TTA
taagatccattaggacaaag

SEQ ID NO: 206260 - DNA, 20 bp, Artificial Sequence
  Description of Artificial Sequence: Synthetic oligonucleotide
  Target: LAMA2; (-) strand; PAM type: YTN; PAM sequence: TTT
ataagatccattaggacaaa

SEQ ID NO: 206261 - DNA, 20 bp, Artificial Sequence
  Description of Artificial Sequence: Synthetic oligonucleotide
  Target: LAMA2; (-) strand; PAM type: YTN; PAM sequence: TTA
gatttataagatccattagg

SEQ ID NO: 206262 - DNA, 20 bp, Artificial Sequence
  Description of Artificial Sequence: Synthetic oligonucleotide
  Target: LAMA2; (-) strand; PAM type: YTN; PAM sequence: CTG
cattagatttataagatcca

SEQ ID NO: 206263 - DNA, 20 bp, Artificial Sequence
  Description of Artificial Sequence: Synthetic oligonucleotide
  Target: LAMA2; (-) strand; PAM type: YTN; PAM sequence: CTC
ctgcattagatttataagat

SEQ ID NO: 206264 - DNA, 20 bp, Artificial Sequence
  Description of Artificial Sequence: Synthetic oligonucleotide
  Target: LAMA2; (-) strand; PAM type: YTN; PAM sequence: CTG
cctcctgcattagatttata

SEQ ID NO: 206265 - DNA, 20 bp, Artificial Sequence
  Description of Artificial Sequence: Synthetic oligonucleotide
  Target: LAMA2; (-) strand; PAM type: YTN; PAM sequence: CTG
tctgcctcctgcattagatt

SEQ ID NO: 206266 - DNA, 20 bp, Artificial Sequence
  Description of Artificial Sequence: Synthetic oligonucleotide
  Target: LAMA2; (-) strand; PAM type: YTN; PAM sequence: TTA
ctgtctgcctcctgcattag

SEQ ID NO: 206267 - DNA, 20 bp, Artificial Sequence
  Description of Artificial Sequence: Synthetic oligonucleotide
  Target: LAMA2; (-) strand; PAM type: YTN; PAM sequence: TTA
gttactgtctgcctcctgca

SEQ ID NO: 206268 - DNA, 20 bp, Artificial Sequence
  Description of Artificial Sequence: Synthetic oligonucleotide
  Target: LAMA2; (-) strand; PAM type: YTN; PAM sequence: TTT
agttactgtctgcctcctgc

SEQ ID NO: 206269 - DNA, 20 bp, Artificial Sequence
  Description of Artificial Sequence: Synthetic oligonucleotide
  Target: LAMA2; (-) strand; PAM type: YTN; PAM sequence: TTG
tttagttactgtctgcctcc

SEQ ID NO: 206270 - DNA, 20 bp, Artificial Sequence
  Description of Artificial Sequence: Synthetic oligonucleotide
  Target: LAMA2; (-) strand; PAM type: YTN; PAM sequence: TTA
tattgtttagttactgtctg

SEQ ID NO: 206271 - DNA, 20 bp, Artificial Sequence
  Description of Artificial Sequence: Synthetic oligonucleotide
  Target: LAMA2; (-) strand; PAM type: YTN; PAM sequence: TTA
ccgcatatacaattatattg

SEQ ID NO: 206272 - DNA, 20 bp, Artificial Sequence
  Description of Artificial Sequence: Synthetic oligonucleotide
  Target: LAMA2; (-) strand; PAM type: YTN; PAM sequence: CTT
accgcatatacaattatatt

SEQ ID NO: 206273 - DNA, 20 bp, Artificial Sequence
  Description of Artificial Sequence: Synthetic oligonucleotide
  Target: LAMA2; (-) strand; PAM type: YTN; PAM sequence: TTC
atagcacttaccgcatatac

SEQ ID NO: 206274 - DNA, 20 bp, Artificial Sequence
  Description of Artificial Sequence: Synthetic oligonucleotide
  Target: LAMA2; (-) strand; PAM type: YTN; PAM sequence: CTT
catagcacttaccgcatata

SEQ ID NO: 206275 - DNA, 20 bp, Artificial Sequence
  Description of Artificial Sequence: Synthetic oligonucleotide
  Target: LAMA2; (-) strand; PAM type: YTN; PAM sequence: TTC
cttcatagcacttaccgcat

SEQ ID NO: 206276 - DNA, 20 bp, Artificial Sequence
  Description of Artificial Sequence: Synthetic oligonucleotide
  Target: LAMA2; (-) strand; PAM type: YTN; PAM sequence: TTA
attccttcatagcacttacc

SEQ ID NO: 206277 - DNA, 20 bp, Artificial Sequence
  Description of Artificial Sequence: Synthetic oligonucleotide
  Target: LAMA2; (-) strand; PAM type: YTN; PAM sequence: TTT
aattccttcatagcacttac

SEQ ID NO: 206278 - DNA, 20 bp, Artificial Sequence
  Description of Artificial Sequence: Synthetic oligonucleotide
  Target: LAMA2; (-) strand; PAM type: YTN; PAM sequence: TTG
tttaattccttcatagcact

SEQ ID NO: 206279 - DNA, 20 bp, Artificial Sequence
  Description of Artificial Sequence: Synthetic oligonucleotide
  Target: LAMA2; (-) strand; PAM type: YTN; PAM sequence: CTT
gtttaattccttcatagcac

SEQ ID NO: 206280 - DNA, 20 bp, Artificial Sequence
  Description of Artificial Sequence: Synthetic oligonucleotide
  Target: LAMA2; (-) strand; PAM type: YTN; PAM sequence: TTG
tgtcaccttgtttaattcct

SEQ ID NO: 206281 - DNA, 20 bp, Artificial Sequence
  Description of Artificial Sequence: Synthetic oligonucleotide
  Target: LAMA2; (-) strand; PAM type: YTN; PAM sequence: CTG
ttgtgtcaccttgtttaatt

SEQ ID NO: 206282 - DNA, 20 bp, Artificial Sequence
  Description of Artificial Sequence: Synthetic oligonucleotide
  Target: LAMA2; (-) strand; PAM type: YTN; PAM sequence: TTC
tgttgtgtcaccttgtttaa

SEQ ID NO: 206283 - DNA, 20 bp, Artificial Sequence
  Description of Artificial Sequence: Synthetic oligonucleotide
  Target: LAMA2; (-) strand; PAM type: YTN; PAM sequence: TTT
ctgttgtgtcaccttgttta

SEQ ID NO: 206284 - DNA, 20 bp, Artificial Sequence
  Description of Artificial Sequence: Synthetic oligonucleotide
  Target: LAMA2; (-) strand; PAM type: YTN; PAM sequence: CTT
tctgttgtgtcaccttgttt

SEQ ID NO: 206285 - DNA, 20 bp, Artificial Sequence
  Description of Artificial Sequence: Synthetic oligonucleotide
  Target: LAMA2; (-) strand; PAM type: YTN; PAM sequence: CTA
ctttctgttgtgtcaccttg

SEQ ID NO: 206286 - DNA, 20 bp, Artificial Sequence
  Description of Artificial Sequence: Synthetic oligonucleotide
  Target: LAMA2; (-) strand; PAM type: YTN; PAM sequence: TTG
cccgacacaactactttctg

SEQ ID NO: 206287 - DNA, 20 bp, Artificial Sequence
  Description of Artificial Sequence: Synthetic oligonucleotide
  Target: LAMA2; (-) strand; PAM type: YTN; PAM sequence: CTA
aaattgcccgacacaactac

SEQ ID NO: 206288 - DNA, 20 bp, Artificial Sequence
  Description of Artificial Sequence: Synthetic oligonucleotide
  Target: LAMA2; (-) strand; PAM type: YTN; PAM sequence: TTA
tctaaaattgcccgacacaa

SEQ ID NO: 206289 - DNA, 20 bp, Artificial Sequence
  Description of Artificial Sequence: Synthetic oligonucleotide
  Target: LAMA2; (-) strand; PAM type: YTN; PAM sequence: TTT
atctaaaattgcccgacaca

SEQ ID NO: 206290 - DNA, 20 bp, Artificial Sequence
  Description of Artificial Sequence: Synthetic oligonucleotide
  Target: LAMA2; (-) strand; PAM type: YTN; PAM sequence: TTT
tatctaaaattgcccgacac

SEQ ID NO: 206291 - DNA, 20 bp, Artificial Sequence
  Description of Artificial Sequence: Synthetic oligonucleotide
  Target: LAMA2; (-) strand; PAM type: YTN; PAM sequence: CTC
gccattttatctaaaattgc

SEQ ID NO: 206292 - DNA, 20 bp, Artificial Sequence
  Description of Artificial Sequence: Synthetic oligonucleotide
  Target: LAMA2; (-) strand; PAM type: YTN; PAM sequence: TTC
actcgccattttatctaaaa

SEQ ID NO: 206293 - DNA, 20 bp, Artificial Sequence
  Description of Artificial Sequence: Synthetic oligonucleotide
  Target: LAMA2; (-) strand; PAM type: YTN; PAM sequence: CTC
catgcacagcattcactcgc

SEQ ID NO: 206294 - DNA, 20 bp, Artificial Sequence
  Description of Artificial Sequence: Synthetic oligonucleotide
  Target: LAMA2; (-) strand; PAM type: YTN; PAM sequence: CTG
gcaagatgtcacctccatgc

SEQ ID NO: 206295 - DNA, 20 bp, Artificial Sequence
  Description of Artificial Sequence: Synthetic oligonucleotide
  Target: LAMA2; (-) strand; PAM type: YTN; PAM sequence: CTC
tggcaagatgtcacctccat

SEQ ID NO: 206296 - DNA, 20 bp, Artificial Sequence
  Description of Artificial Sequence: Synthetic oligonucleotide
  Target: LAMA2; (-) strand; PAM type: YTN; PAM sequence: CTG
tctctggcaagatgtcacct

SEQ ID NO: 206297 - DNA, 20 bp, Artificial Sequence
  Description of Artificial Sequence: Synthetic oligonucleotide
  Target: LAMA2; (-) strand; PAM type: YTN; PAM sequence: CTC
ctgtctctggcaagatgtca

SEQ ID NO: 206298 - DNA, 20 bp, Artificial Sequence
  Description of Artificial Sequence: Synthetic oligonucleotide
  Target: LAMA2; (-) strand; PAM type: YTN; PAM sequence: TTC
tcctgtctctggcaagatgt

SEQ ID NO: 206299 - DNA, 20 bp, Artificial Sequence
  Description of Artificial Sequence: Synthetic oligonucleotide
  Target: LAMA2; (-) strand; PAM type: YTN; PAM sequence: CTC
attctcctgtctctggcaag

SEQ ID NO: 206300 - DNA, 20 bp, Artificial Sequence
  Description of Artificial Sequence: Synthetic oligonucleotide
  Target: LAMA2; (-) strand; PAM type: YTN; PAM sequence: TTC
tcattctcctgtctctggca

SEQ ID NO: 206301 - DNA, 20 bp, Artificial Sequence
  Description of Artificial Sequence: Synthetic oligonucleotide
  Target: LAMA2; (-) strand; PAM type: YTN; PAM sequence: TTT
ctcattctcctgtctctggc

SEQ ID NO: 206302 - DNA, 20 bp, Artificial Sequence
  Description of Artificial Sequence: Synthetic oligonucleotide
  Target: LAMA2; (-) strand; PAM type: YTN; PAM sequence: CTT
tctcattctcctgtctctgg

SEQ ID NO: 206303 - DNA, 20 bp, Artificial Sequence
  Description of Artificial Sequence: Synthetic oligonucleotide
  Target: LAMA2; (-) strand; PAM type: YTN; PAM sequence: CTC
tttctcattctcctgtctct

SEQ ID NO: 206304 - DNA, 20 bp, Artificial Sequence
  Description of Artificial Sequence: Synthetic oligonucleotide
  Target: LAMA2; (-) strand; PAM type: YTN; PAM sequence: TTC
acatgccaaactctttctca

SEQ ID NO: 206305 - DNA, 20 bp, Artificial Sequence
  Description of Artificial Sequence: Synthetic oligonucleotide
  Target: LAMA2; (-) strand; PAM type: YTN; PAM sequence: CTT
cacatgccaaactctttctc

SEQ ID NO: 206306 - DNA, 20 bp, Artificial Sequence
  Description of Artificial Sequence: Synthetic oligonucleotide
  Target: LAMA2; (-) strand; PAM type: YTN; PAM sequence: TTC
cccgatcttcacatgccaaa

SEQ ID NO: 206307 - DNA, 20 bp, Artificial Sequence
  Description of Artificial Sequence: Synthetic oligonucleotide
  Target: LAMA2; (-) strand; PAM type: YTN; PAM sequence: TTT
ccccgatcttcacatgccaa

SEQ ID NO: 206308 - DNA, 20 bp, Artificial Sequence
  Description of Artificial Sequence: Synthetic oligonucleotide
  Target: LAMA2; (-) strand; PAM type: YTN; PAM sequence: CTC
atttccccgatcttcacatg

SEQ ID NO: 206309 - DNA, 20 bp, Artificial Sequence
  Description of Artificial Sequence: Synthetic oligonucleotide
  Target: LAMA2; (-) strand; PAM type: YTN; PAM sequence: CTG
ccccatgtgctcatttcccc

SEQ ID NO: 206310 - DNA, 20 bp, Artificial Sequence
  Description of Artificial Sequence: Synthetic oligonucleotide
  Target: LAMA2; (-) strand; PAM type: YTN; PAM sequence: CTC
tgccccatgtgctcatttcc

SEQ ID NO: 206311 - DNA, 20 bp, Artificial Sequence
  Description of Artificial Sequence: Synthetic oligonucleotide
  Target: LAMA2; (-) strand; PAM type: YTN; PAM sequence: CTC
cctctgccccatgtgctcat

SEQ ID NO: 206312 - DNA, 20 bp, Artificial Sequence
  Description of Artificial Sequence: Synthetic oligonucleotide
  Target: LAMA2; (-) strand; PAM type: YTN; PAM sequence: TTC
cctccctctgccccatgtgc

SEQ ID NO: 206313 - DNA, 20 bp, Artificial Sequence
  Description of Artificial Sequence: Synthetic oligonucleotide
  Target: LAMA2; (-) strand; PAM type: YTN; PAM sequence: TTT
ccctccctctgccccatgtg

SEQ ID NO: 206314 - DNA, 20 bp, Artificial Sequence
  Description of Artificial Sequence: Synthetic oligonucleotide
  Target: LAMA2; (-) strand; PAM type: YTN; PAM sequence: TTC
acatttccctccctctgccc

SEQ ID NO: 206315 - DNA, 20 bp, Artificial Sequence
  Description of Artificial Sequence: Synthetic oligonucleotide
  Target: LAMA2; (-) strand; PAM type: YTN; PAM sequence: TTT
cacatttccctccctctgcc

SEQ ID NO: 206316 - DNA, 20 bp, Artificial Sequence
  Description of Artificial Sequence: Synthetic oligonucleotide
  Target: LAMA2; (-) strand; PAM type: YTN; PAM sequence: TTT
tcacatttccctccctctgc

SEQ ID NO: 206317 - DNA, 20 bp, Artificial Sequence
  Description of Artificial Sequence: Synthetic oligonucleotide
  Target: LAMA2; (-) strand; PAM type: YTN; PAM sequence: CTT
ttcacatttccctccctctg

SEQ ID NO: 206318 - DNA, 20 bp, Artificial Sequence
  Description of Artificial Sequence: Synthetic oligonucleotide
  Target: LAMA2; (-) strand; PAM type: YTN; PAM sequence: CTC
cccaccatcatgccttttca

SEQ ID NO: 206319 - DNA, 20 bp, Artificial Sequence
  Description of Artificial Sequence: Synthetic oligonucleotide
  Target: LAMA2; (-) strand; PAM type: YTN; PAM sequence: CTC
aaacactccccaccatcatg

SEQ ID NO: 206320 - DNA, 20 bp, Artificial Sequence
  Description of Artificial Sequence: Synthetic oligonucleotide
  Target: LAMA2; (-) strand; PAM type: YTN; PAM sequence: CTC
acccctcaaacactccccac

SEQ ID NO: 206321 - DNA, 20 bp, Artificial Sequence
  Description of Artificial Sequence: Synthetic oligonucleotide
  Target: LAMA2; (-) strand; PAM type: YTN; PAM sequence: CTC
tcacccctcaaacactcccc

SEQ ID NO: 206322 - DNA, 20 bp, Artificial Sequence
  Description of Artificial Sequence: Synthetic oligonucleotide
  Target: LAMA2; (-) strand; PAM type: YTN; PAM sequence: TTC
tctcacccctcaaacactcc

SEQ ID NO: 206323 - DNA, 20 bp, Artificial Sequence
  Description of Artificial Sequence: Synthetic oligonucleotide
  Target: LAMA2; (-) strand; PAM type: YTN; PAM sequence: TTT
ctctcacccctcaaacactc

SEQ ID NO: 206324 - DNA, 20 bp, Artificial Sequence
  Description of Artificial Sequence: Synthetic oligonucleotide
  Target: LAMA2; (-) strand; PAM type: YTN; PAM sequence: CTG
atgatagtttctctcacccc

SEQ ID NO: 206325 - DNA, 20 bp, Artificial Sequence
  Description of Artificial Sequence: Synthetic oligonucleotide
  Target: LAMA2; (-) strand; PAM type: YTN; PAM sequence: CTC
tgatgatagtttctctcacc

SEQ ID NO: 206326 - DNA, 20 bp, Artificial Sequence
  Description of Artificial Sequence: Synthetic oligonucleotide
  Target: LAMA2; (-) strand; PAM type: YTN; PAM sequence: TTA
ctctgatgatagtttctctc

SEQ ID NO: 206327 - DNA, 20 bp, Artificial Sequence
  Description of Artificial Sequence: Synthetic oligonucleotide
  Target: LAMA2; (-) strand; PAM type: YTN; PAM sequence: CTG
ttactctgatgatagtttct

SEQ ID NO: 206328 - DNA, 20 bp, Artificial Sequence
  Description of Artificial Sequence: Synthetic oligonucleotide
  Target: LAMA2; (-) strand; PAM type: YTN; PAM sequence: TTG
cctgttactctgatgatagt

SEQ ID NO: 206329 - DNA, 20 bp, Artificial Sequence
  Description of Artificial Sequence: Synthetic oligonucleotide
  Target: LAMA2; (-) strand; PAM type: YTN; PAM sequence: CTG
taggttgcctgttactctga

SEQ ID NO: 206330 - DNA, 20 bp, Artificial Sequence
  Description of Artificial Sequence: Synthetic oligonucleotide
  Target: LAMA2; (-) strand; PAM type: YTN; PAM sequence: TTC
tgtaggttgcctgttactct

SEQ ID NO: 206331 - DNA, 20 bp, Artificial Sequence
  Description of Artificial Sequence: Synthetic oligonucleotide
  Target: LAMA2; (-) strand; PAM type: YTN; PAM sequence: CTC
ccattctgtaggttgcctgt

SEQ ID NO: 206332 - DNA, 20 bp, Artificial Sequence
  Description of Artificial Sequence: Synthetic oligonucleotide
  Target: LAMA2; (-) strand; PAM type: YTN; PAM sequence: TTC
tcccattctgtaggttgcct

SEQ ID NO: 206333 - DNA, 20 bp, Artificial Sequence
  Description of Artificial Sequence: Synthetic oligonucleotide
  Target: LAMA2; (-) strand; PAM type: YTN; PAM sequence: TTT
ctcccattctgtaggttgcc

SEQ ID NO: 206334 - DNA, 20 bp, Artificial Sequence
  Description of Artificial Sequence: Synthetic oligonucleotide
  Target: LAMA2; (-) strand; PAM type: YTN; PAM sequence: TTT
tctcccattctgtaggttgc

SEQ ID NO: 206335 - DNA, 20 bp, Artificial Sequence
  Description of Artificial Sequence: Synthetic oligonucleotide
  Target: LAMA2; (-) strand; PAM type: YTN; PAM sequence: TTG
caaaaattttctcccattct

SEQ ID NO: 206336 - DNA, 20 bp, Artificial Sequence
  Description of Artificial Sequence: Synthetic oligonucleotide
  Target: LAMA2; (-) strand; PAM type: YTN; PAM sequence: TTG
tcagatggatagattgcaaa

SEQ ID NO: 206337 - DNA, 20 bp, Artificial Sequence
  Description of Artificial Sequence: Synthetic oligonucleotide
  Target: LAMA2; (-) strand; PAM type: YTN; PAM sequence: TTT
gtcagatggatagattgcaa

SEQ ID NO: 206338 - DNA, 20 bp, Artificial Sequence
  Description of Artificial Sequence: Synthetic oligonucleotide
  Target: LAMA2; (-) strand; PAM type: YTN; PAM sequence: CTT
tgtcagatggatagattgca

SEQ ID NO: 206339 - DNA, 20 bp, Artificial Sequence
  Description of Artificial Sequence: Synthetic oligonucleotide
  Target: LAMA2; (-) strand; PAM type: YTN; PAM sequence: TTA
gccctttgtcagatggatag

SEQ ID NO: 206340 - DNA, 20 bp, Artificial Sequence
  Description of Artificial Sequence: Synthetic oligonucleotide
  Target: LAMA2; (-) strand; PAM type: YTN; PAM sequence: CTG
ggtattagccctttgtcaga

SEQ ID NO: 206341 - DNA, 20 bp, Artificial Sequence
  Description of Artificial Sequence: Synthetic oligonucleotide
  Target: LAMA2; (-) strand; PAM type: YTN; PAM sequence: TTC
tgggtattagccctttgtca

SEQ ID NO: 206342 - DNA, 20 bp, Artificial Sequence
  Description of Artificial Sequence: Synthetic oligonucleotide
  Target: LAMA2; (-) strand; PAM type: YTN; PAM sequence: TTG
tagattctgggtattagccc

SEQ ID NO: 206343 - DNA, 20 bp, Artificial Sequence
  Description of Artificial Sequence: Synthetic oligonucleotide
  Target: LAMA2; (-) strand; PAM type: YTN; PAM sequence: CTT
gtagattctgggtattagcc

SEQ ID NO: 206344 - DNA, 20 bp, Artificial Sequence
  Description of Artificial Sequence: Synthetic oligonucleotide
  Target: LAMA2; (-) strand; PAM type: YTN; PAM sequence: TTC
cttgtagattctgggtatta

SEQ ID NO: 206345 - DNA, 20 bp, Artificial Sequence
  Description of Artificial Sequence: Synthetic oligonucleotide
  Target: LAMA2; (-) strand; PAM type: YTN; PAM sequence: TTA
tgttccttgtagattctggg

SEQ ID NO: 206346 - DNA, 20 bp, Artificial Sequence
  Description of Artificial Sequence: Synthetic oligonucleotide
  Target: LAMA2; (-) strand; PAM type: YTN; PAM sequence: TTT
atgttccttgtagattctgg

SEQ ID NO: 206347 - DNA, 20 bp, Artificial Sequence
  Description of Artificial Sequence: Synthetic oligonucleotide
  Target: LAMA2; (-) strand; PAM type: YTN; PAM sequence: TTG
tttatgttccttgtagattc

SEQ ID NO: 206348 - DNA, 20 bp, Artificial Sequence
  Description of Artificial Sequence: Synthetic oligonucleotide
  Target: LAMA2; (-) strand; PAM type: YTN; PAM sequence: TTT
gtttatgttccttgtagatt

SEQ ID NO: 206349 - DNA, 20 bp, Artificial Sequence
  Description of Artificial Sequence: Synthetic oligonucleotide
  Target: LAMA2; (-) strand; PAM type: YTN; PAM sequence: TTG
tgaatttgtttatgttcctt

SEQ ID NO: 206350 - DNA, 20 bp, Artificial Sequence
  Description of Artificial Sequence: Synthetic oligonucleotide
  Target: LAMA2; (-) strand; PAM type: YTN; PAM sequence: CTT
gtgaatttgtttatgttcct

SEQ ID NO: 206351 - DNA, 20 bp, Artificial Sequence
  Description of Artificial Sequence: Synthetic oligonucleotide
  Target: LAMA2; (-) strand; PAM type: YTN; PAM sequence: TTC
ttgtgaatttgtttatgttc

SEQ ID NO: 206352 - DNA, 20 bp, Artificial Sequence
  Description of Artificial Sequence: Synthetic oligonucleotide
  Target: LAMA2; (-) strand; PAM type: YTN; PAM sequence: TTT
cttgtgaatttgtttatgtt

SEQ ID NO: 206353 - DNA, 20 bp, Artificial Sequence
  Description of Artificial Sequence: Synthetic oligonucleotide
  Target: LAMA2; (-) strand; PAM type: YTN; PAM sequence: TTT
tcttgtgaatttgtttatgt

SEQ ID NO: 206354 - DNA, 20 bp, Artificial Sequence
  Description of Artificial Sequence: Synthetic oligonucleotide
  Target: LAMA2; (-) strand; PAM type: YTN; PAM sequence: TTT
ttcttgtgaatttgtttatg

SEQ ID NO: 206355 - DNA, 20 bp, Artificial Sequence
  Description of Artificial Sequence: Synthetic oligonucleotide
  Target: LAMA2; (-) strand; PAM type: YTN; PAM sequence: CTT
tttcttgtgaatttgtttat

SEQ ID NO: 206356 - DNA, 20 bp, Artificial Sequence
  Description of Artificial Sequence: Synthetic oligonucleotide
  Target: LAMA2; (-) strand; PAM type: YTN; PAM sequence: TTG
ctttttcttgtgaatttgtt

SEQ ID NO: 206357 - DNA, 20 bp, Artificial Sequence
  Description of Artificial Sequence: Synthetic oligonucleotide
  Target: LAMA2; (-) strand; PAM type: YTN; PAM sequence: TTC
gatggggttgctttttcttg

SEQ ID NO: 206358 - DNA, 20 bp, Artificial Sequence
  Description of Artificial Sequence: Synthetic oligonucleotide
  Target: LAMA2; (-) strand; PAM type: YTN; PAM sequence: TTT
cgatggggttgctttttctt

SEQ ID NO: 206359 - DNA, 20 bp, Artificial Sequence
  Description of Artificial Sequence: Synthetic oligonucleotide
  Target: LAMA2; (-) strand; PAM type: YTN; PAM sequence: TTT
tcgatggggttgctttttct

SEQ ID NO: 206360 - DNA, 20 bp, Artificial Sequence
  Description of Artificial Sequence: Synthetic oligonucleotide
  Target: LAMA2; (-) strand; PAM type: YTN; PAM sequence: CTT
ttcgatggggttgctttttc

SEQ ID NO: 206361 - DNA, 20 bp, Artificial Sequence
  Description of Artificial Sequence: Synthetic oligonucleotide
  Target: LAMA2; (-) strand; PAM type: YTN; PAM sequence: TTG
cccacttttcgatggggttg

SEQ ID NO: 206362 - DNA, 20 bp, Artificial Sequence
  Description of Artificial Sequence: Synthetic oligonucleotide
  Target: LAMA2; (-) strand; PAM type: YTN; PAM sequence: TTT
gcccacttttcgatggggtt

SEQ ID NO: 206363 - DNA, 20 bp, Artificial Sequence
  Description of Artificial Sequence: Synthetic oligonucleotide
  Target: LAMA2; (-) strand; PAM type: YTN; PAM sequence: CTT
tgcccacttttcgatggggt

SEQ ID NO: 206364 - DNA, 20 bp, Artificial Sequence
  Description of Artificial Sequence: Synthetic oligonucleotide
  Target: LAMA2; (-) strand; PAM type: YTN; PAM sequence: TTC
atatcctttgcccacttttc

SEQ ID NO: 206365 - DNA, 20 bp, Artificial Sequence
  Description of Artificial Sequence: Synthetic oligonucleotide
  Target: LAMA2; (-) strand; PAM type: YTN; PAM sequence: CTG
ttcatatcctttgcccactt

SEQ ID NO: 206366 - DNA, 20 bp, Artificial Sequence
  Description of Artificial Sequence: Synthetic oligonucleotide
  Target: LAMA2; (-) strand; PAM type: YTN; PAM sequence: TTG
agaagtgtctgttcatatcc

SEQ ID NO: 206367 - DNA, 20 bp, Artificial Sequence
  Description of Artificial Sequence: Synthetic oligonucleotide
  Target: LAMA2; (-) strand; PAM type: YTN; PAM sequence: TTT
gagaagtgtctgttcatatc

SEQ ID NO: 206368 - DNA, 20 bp, Artificial Sequence
  Description of Artificial Sequence: Synthetic oligonucleotide
  Target: LAMA2; (-) strand; PAM type: YTN; PAM sequence: TTT
tgagaagtgtctgttcatat

SEQ ID NO: 206369 - DNA, 20 bp, Artificial Sequence
  Description of Artificial Sequence: Synthetic oligonucleotide
  Target: LAMA2; (-) strand; PAM type: YTN; PAM sequence: CTT
ttgagaagtgtctgttcata

SEQ ID NO: 206370 - DNA, 20 bp, Artificial Sequence
  Description of Artificial Sequence: Synthetic oligonucleotide
  Target: LAMA2; (-) strand; PAM type: YTN; PAM sequence: TTC
ttttgagaagtgtctgttca

SEQ ID NO: 206371 - DNA, 20 bp, Artificial Sequence
  Description of Artificial Sequence: Synthetic oligonucleotide
  Target: LAMA2; (-) strand; PAM type: YTN; PAM sequence: CTT
cttttgagaagtgtctgttc

SEQ ID NO: 206372 - DNA, 20 bp, Artificial Sequence
  Description of Artificial Sequence: Synthetic oligonucleotide
  Target: LAMA2; (-) strand; PAM type: YTN; PAM sequence: TTG
gccacataaatgtcttcttt

SEQ ID NO: 206373 - DNA, 20 bp, Artificial Sequence
  Description of Artificial Sequence: Synthetic oligonucleotide
  Target: LAMA2; (-) strand; PAM type: YTN; PAM sequence: TTG
ttggccacataaatgtcttc

SEQ ID NO: 206374 - DNA, 20 bp, Artificial Sequence
  Description of Artificial Sequence: Synthetic oligonucleotide
  Target: LAMA2; (-) strand; PAM type: YTN; PAM sequence: TTT
gttggccacataaatgtctt

SEQ ID NO: 206375 - DNA, 20 bp, Artificial Sequence
  Description of Artificial Sequence: Synthetic oligonucleotide
  Target: LAMA2; (-) strand; PAM type: YTN; PAM sequence: TTC
atatgtttgttggccacata

SEQ ID NO: 206376 - DNA, 20 bp, Artificial Sequence
  Description of Artificial Sequence: Synthetic oligonucleotide
  Target: LAMA2; (-) strand; PAM type: YTN; PAM sequence: TTT
catatgtttgttggccacat

SEQ ID NO: 206377 - DNA, 20 bp, Artificial Sequence
  Description of Artificial Sequence: Synthetic oligonucleotide
  Target: LAMA2; (-) strand; PAM type: YTN; PAM sequence: TTT
tcatatgtttgttggccaca

SEQ ID NO: 206378 - DNA, 20 bp, Artificial Sequence
  Description of Artificial Sequence: Synthetic oligonucleotide
  Target: LAMA2; (-) strand; PAM type: YTN; PAM sequence: TTT
ttcatatgtttgttggccac

SEQ ID NO: 206379 - DNA, 20 bp, Artificial Sequence
  Description of Artificial Sequence: Synthetic oligonucleotide
  Target: LAMA2; (-) strand; PAM type: YTN; PAM sequence: TTT
tttcatatgtttgttggcca

SEQ ID NO: 206380 - DNA, 20 bp, Artificial Sequence
  Description of Artificial Sequence: Synthetic oligonucleotide
  Target: LAMA2; (-) strand; PAM type: YTN; PAM sequence: TTT
ttttcatatgtttgttggcc

SEQ ID NO: 206381 - DNA, 20 bp, Artificial Sequence
  Description of Artificial Sequence: Synthetic oligonucleotide
  Target: LAMA2; (-) strand; PAM type: YTN; PAM sequence: CTT
tttttcatatgtttgttggc

SEQ ID NO: 206382 - DNA, 20 bp, Artificial Sequence
  Description of Artificial Sequence: Synthetic oligonucleotide
  Target: LAMA2; (-) strand; PAM type: YTN; PAM sequence: TTA
ccagtgatggtgagcttttt

SEQ ID NO: 206383 - DNA, 20 bp, Artificial Sequence
  Description of Artificial Sequence: Synthetic oligonucleotide
  Target: LAMA2; (-) strand; PAM type: YTN; PAM sequence: CTA
attaccagtgatggtgagct

SEQ ID NO: 206384 - DNA, 20 bp, Artificial Sequence
  Description of Artificial Sequence: Synthetic oligonucleotide
  Target: LAMA2; (-) strand; PAM type: YTN; PAM sequence: CTC
taattaccagtgatggtgag

SEQ ID NO: 206385 - DNA, 20 bp, Artificial Sequence
  Description of Artificial Sequence: Synthetic oligonucleotide
  Target: LAMA2; (-) strand; PAM type: YTN; PAM sequence: TTC
tctaattaccagtgatggtg

SEQ ID NO: 206386 - DNA, 20 bp, Artificial Sequence
  Description of Artificial Sequence: Synthetic oligonucleotide
  Target: LAMA2; (-) strand; PAM type: YTN; PAM sequence: TTT
ctctaattaccagtgatggt

SEQ ID NO: 206387 - DNA, 20 bp, Artificial Sequence
  Description of Artificial Sequence: Synthetic oligonucleotide
  Target: LAMA2; (-) strand; PAM type: YTN; PAM sequence: TTG
catttctctaattaccagtg

SEQ ID NO: 206388 - DNA, 20 bp, Artificial Sequence
  Description of Artificial Sequence: Synthetic oligonucleotide
  Target: LAMA2; (-) strand; PAM type: YTN; PAM sequence: TTT
gcatttctctaattaccagt

SEQ ID NO: 206389 - DNA, 20 bp, Artificial Sequence
  Description of Artificial Sequence: Synthetic oligonucleotide
  Target: LAMA2; (-) strand; PAM type: YTN; PAM sequence: TTG
atttgcatttctctaattac

SEQ ID NO: 206390 - DNA, 20 bp, Artificial Sequence
  Description of Artificial Sequence: Synthetic oligonucleotide
  Target: LAMA2; (-) strand; PAM type: YTN; PAM sequence: TTT
gatttgcatttctctaatta

SEQ ID NO: 206391 - DNA, 20 bp, Artificial Sequence
  Description of Artificial Sequence: Synthetic oligonucleotide
  Target: LAMA2; (-) strand; PAM type: YTN; PAM sequence: TTT
tgatttgcatttctctaatt

SEQ ID NO: 206392 - DNA, 20 bp, Artificial Sequence
  Description of Artificial Sequence: Synthetic oligonucleotide
  Target: LAMA2; (-) strand; PAM type: YTN; PAM sequence: TTG
tcgttttgatttgcatttct

SEQ ID NO: 206393 - DNA, 20 bp, Artificial Sequence
  Description of Artificial Sequence: Synthetic oligonucleotide
  Target: LAMA2; (-) strand; PAM type: YTN; PAM sequence: CTC
attgtcgttttgatttgcat

SEQ ID NO: 206394 - DNA, 20 bp, Artificial Sequence
  Description of Artificial Sequence: Synthetic oligonucleotide
  Target: LAMA2; (-) strand; PAM type: YTN; PAM sequence: TTG
gtatctcattgtcgttttga

SEQ ID NO: 206395 - DNA, 20 bp, Artificial Sequence
  Description of Artificial Sequence: Synthetic oligonucleotide
  Target: LAMA2; (-) strand; PAM type: YTN; PAM sequence: CTG
gcatgagttggtatctcatt

SEQ ID NO: 206396 - DNA, 20 bp, Artificial Sequence
  Description of Artificial Sequence: Synthetic oligonucleotide
  Target: LAMA2; (-) strand; PAM type: YTN; PAM sequence: CTA
actggcatgagttggtatct

SEQ ID NO: 206397 - DNA, 20 bp, Artificial Sequence
  Description of Artificial Sequence: Synthetic oligonucleotide
  Target: LAMA2; (-) strand; PAM type: YTN; PAM sequence: TTC
taactggcatgagttggtat

SEQ ID NO: 206398 - DNA, 20 bp, Artificial Sequence
  Description of Artificial Sequence: Synthetic oligonucleotide
  Target: LAMA2; (-) strand; PAM type: YTN; PAM sequence: TTA
atgatcgccattctaactgg

SEQ ID NO: 206399 - DNA, 20 bp, Artificial Sequence
  Description of Artificial Sequence: Synthetic oligonucleotide
  Target: LAMA2; (-) strand; PAM type: YTN; PAM sequence: TTT
aatgatcgccattctaactg

SEQ ID NO: 206400 - DNA, 20 bp, Artificial Sequence
  Description of Artificial Sequence: Synthetic oligonucleotide
  Target: LAMA2; (-) strand; PAM type: YTN; PAM sequence: TTT
taatgatcgccattctaact

SEQ ID NO: 206401 - DNA, 20 bp, Artificial Sequence
  Description of Artificial Sequence: Synthetic oligonucleotide
  Target: LAMA2; (-) strand; PAM type: YTN; PAM sequence: CTG
acattttaatgatcgccatt

SEQ ID NO: 206402 - DNA, 20 bp, Artificial Sequence
  Description of Artificial Sequence: Synthetic oligonucleotide
  Target: LAMA2; (-) strand; PAM type: YTN; PAM sequence: TTC
ctgacattttaatgatcgcc

SEQ ID NO: 206403 - DNA, 20 bp, Artificial Sequence
  Description of Artificial Sequence: Synthetic oligonucleotide
  Target: LAMA2; (-) strand; PAM type: YTN; PAM sequence: TTT
cctgacattttaatgatcgc

SEQ ID NO: 206404 - DNA, 20 bp, Artificial Sequence
  Description of Artificial Sequence: Synthetic oligonucleotide
  Target: LAMA2; (-) strand; PAM type: YTN; PAM sequence: TTG
tttcctgacattttaatgat

SEQ ID NO: 206405 - DNA, 20 bp, Artificial Sequence
  Description of Artificial Sequence: Synthetic oligonucleotide
  Target: LAMA2; (-) strand; PAM type: YTN; PAM sequence: CTG
ttgtttcctgacattttaat

SEQ ID NO: 206406 - DNA, 20 bp, Artificial Sequence
  Description of Artificial Sequence: Synthetic oligonucleotide
  Target: LAMA2; (-) strand; PAM type: YTN; PAM sequence: CTC
cagcatctgttgtttcctga

SEQ ID NO: 206407 - DNA, 20 bp, Artificial Sequence
  Description of Artificial Sequence: Synthetic oligonucleotide
  Target: LAMA2; (-) strand; PAM type: YTN; PAM sequence: CTC
tccagcatctgttgtttcct

SEQ ID NO: 206408 - DNA, 20 bp, Artificial Sequence
  Description of Artificial Sequence: Synthetic oligonucleotide
  Target: LAMA2; (-) strand; PAM type: YTN; PAM sequence: CTC
cacatcctctccagcatctg

SEQ ID NO: 206409 - DNA, 20 bp, Artificial Sequence
  Description of Artificial Sequence: Synthetic oligonucleotide
  Target: LAMA2; (-) strand; PAM type: YTN; PAM sequence: TTC
tccacatcctctccagcatc

SEQ ID NO: 206410 - DNA, 20 bp, Artificial Sequence
  Description of Artificial Sequence: Synthetic oligonucleotide
  Target: LAMA2; (-) strand; PAM type: YTN; PAM sequence: TTT
ctccacatcctctccagcat

SEQ ID NO: 206411 - DNA, 20 bp, Artificial Sequence
  Description of Artificial Sequence: Synthetic oligonucleotide
  Target: LAMA2; (-) strand; PAM type: YTN; PAM sequence: CTA
tttctccacatcctctccag

SEQ ID NO: 206412 - DNA, 20 bp, Artificial Sequence
  Description of Artificial Sequence: Synthetic oligonucleotide
  Target: LAMA2; (-) strand; PAM type: YTN; PAM sequence: TTC
ctatttctccacatcctctc

SEQ ID NO: 206413 - DNA, 20 bp, Artificial Sequence
  Description of Artificial Sequence: Synthetic oligonucleotide
  Target: LAMA2; (-) strand; PAM type: YTN; PAM sequence: CTA
acagtgtaaaagcattccta

SEQ ID NO: 206414 - DNA, 20 bp, Artificial Sequence
  Description of Artificial Sequence: Synthetic oligonucleotide
  Target: LAMA2; (-) strand; PAM type: YTN; PAM sequence: TTC
acactaacagtgtaaaagca

SEQ ID NO: 206415 - DNA, 20 bp, Artificial Sequence
  Description of Artificial Sequence: Synthetic oligonucleotide
  Target: LAMA2; (-) strand; PAM type: YTN; PAM sequence: TTA
cattcacactaacagtgtaa

SEQ ID NO: 206416 - DNA, 20 bp, Artificial Sequence
  Description of Artificial Sequence: Synthetic oligonucleotide
  Target: LAMA2; (-) strand; PAM type: YTN; PAM sequence: TTT
acattcacactaacagtgta

SEQ ID NO: 206417 - DNA, 20 bp, Artificial Sequence
  Description of Artificial Sequence: Synthetic oligonucleotide
  Target: LAMA2; (-) strand; PAM type: YTN; PAM sequence: CTA
atttacattcacactaacag

SEQ ID NO: 206418 - DNA, 20 bp, Artificial Sequence
  Description of Artificial Sequence: Synthetic oligonucleotide
  Target: LAMA2; (-) strand; PAM type: YTN; PAM sequence: CTG
aactaatttacattcacact

SEQ ID NO: 206419 - DNA, 20 bp, Artificial Sequence
  Description of Artificial Sequence: Synthetic oligonucleotide
  Target: LAMA2; (-) strand; PAM type: YTN; PAM sequence: TTC
cagaatgtctgaactaattt

SEQ ID NO: 206420 - DNA, 20 bp, Artificial Sequence
  Description of Artificial Sequence: Synthetic oligonucleotide
  Target: LAMA2; (-) strand; PAM type: YTN; PAM sequence: CTT
ccagaatgtctgaactaatt

SEQ ID NO: 206421 - DNA, 20 bp, Artificial Sequence
  Description of Artificial Sequence: Synthetic oligonucleotide
  Target: LAMA2; (-) strand; PAM type: YTN; PAM sequence: CTG
tcttccagaatgtctgaact

SEQ ID NO: 206422 - DNA, 20 bp, Artificial Sequence
  Description of Artificial Sequence: Synthetic oligonucleotide
  Target: LAMA2; (-) strand; PAM type: YTN; PAM sequence: TTG
aggaatcaccacactgtctt

SEQ ID NO: 206423 - DNA, 20 bp, Artificial Sequence
  Description of Artificial Sequence: Synthetic oligonucleotide
  Target: LAMA2; (-) strand; PAM type: YTN; PAM sequence: CTT
gaggaatcaccacactgtct

SEQ ID NO: 206424 - DNA, 20 bp, Artificial Sequence
  Description of Artificial Sequence: Synthetic oligonucleotide
  Target: LAMA2; (-) strand; PAM type: YTN; PAM sequence: CTA
gatccttgaggaatcaccac

SEQ ID NO: 206425 - DNA, 20 bp, Artificial Sequence
  Description of Artificial Sequence: Synthetic oligonucleotide
  Target: LAMA2; (-) strand; PAM type: YTN; PAM sequence: TTC
tagatccttgaggaatcacc

SEQ ID NO: 206426 - DNA, 20 bp, Artificial Sequence
  Description of Artificial Sequence: Synthetic oligonucleotide
  Target: LAMA2; (-) strand; PAM type: YTN; PAM sequence: TTC
cggttctagatccttgagga

SEQ ID NO: 206427 - DNA, 20 bp, Artificial Sequence
  Description of Artificial Sequence: Synthetic oligonucleotide
  Target: LAMA2; (-) strand; PAM type: YTN; PAM sequence: TTT
ccggttctagatccttgagg

SEQ ID NO: 206428 - DNA, 20 bp, Artificial Sequence
  Description of Artificial Sequence: Synthetic oligonucleotide
  Target: LAMA2; (-) strand; PAM type: YTN; PAM sequence: CTG
ggtcaaatggtatttccggt

SEQ ID NO: 206429 - DNA, 20 bp, Artificial Sequence
  Description of Artificial Sequence: Synthetic oligonucleotide
  Target: LAMA2; (-) strand; PAM type: YTN; PAM sequence: TTG
gataaatacccagtaatggg

SEQ ID NO: 206430 - DNA, 20 bp, Artificial Sequence
  Description of Artificial Sequence: Synthetic oligonucleotide
  Target: LAMA2; (-) strand; PAM type: YTN; PAM sequence: TTT
ggataaatacccagtaatgg

SEQ ID NO: 206431 - DNA, 20 bp, Artificial Sequence
  Description of Artificial Sequence: Synthetic oligonucleotide
  Target: LAMA2; (-) strand; PAM type: YTN; PAM sequence: CTT
tggataaatacccagtaatg

SEQ ID NO: 206432 - DNA, 20 bp, Artificial Sequence
  Description of Artificial Sequence: Synthetic oligonucleotide
  Target: LAMA2; (-) strand; PAM type: YTN; PAM sequence: TTA
taatcctttggataaatacc

SEQ ID NO: 206433 - DNA, 20 bp, Artificial Sequence
  Description of Artificial Sequence: Synthetic oligonucleotide
  Target: LAMA2; (-) strand; PAM type: YTN; PAM sequence: TTT
ataatcctttggataaatac

SEQ ID NO: 206434 - DNA, 20 bp, Artificial Sequence
  Description of Artificial Sequence: Synthetic oligonucleotide
  Target: LAMA2; (-) strand; PAM type: YTN; PAM sequence: TTA
tagtagaatgatttataatc

SEQ ID NO: 206435 - DNA, 20 bp, Artificial Sequence
  Description of Artificial Sequence: Synthetic oligonucleotide
  Target: LAMA2; (-) strand; PAM type: YTN; PAM sequence: TTT
atagtagaatgatttataat

SEQ ID NO: 206436 - DNA, 20 bp, Artificial Sequence
  Description of Artificial Sequence: Synthetic oligonucleotide
  Target: LAMA2; (-) strand; PAM type: YTN; PAM sequence: CTT
tatagtagaatgatttataa

SEQ ID NO: 206437 - DNA, 20 bp, Artificial Sequence
  Description of Artificial Sequence: Synthetic oligonucleotide
  Target: LAMA2; (-) strand; PAM type: YTN; PAM sequence: CTG
cagtaaacatacgtgtgcat

SEQ ID NO: 206438 - DNA, 20 bp, Artificial Sequence
  Description of Artificial Sequence: Synthetic oligonucleotide
  Target: LAMA2; (-) strand; PAM type: YTN; PAM sequence: TTG
tgaatagtgctgcagtaaac

SEQ ID NO: 206439 - DNA, 20 bp, Artificial Sequence
  Description of Artificial Sequence: Synthetic oligonucleotide
  Target: LAMA2; (-) strand; PAM type: YTN; PAM sequence: CTA
ttgtgaatagtgctgcagta

SEQ ID NO: 206440 - DNA, 20 bp, Artificial Sequence
  Description of Artificial Sequence: Synthetic oligonucleotide
  Target: LAMA2; (-) strand; PAM type: YTN; PAM sequence: TTG
ctattgtgaatagtgctgca

SEQ ID NO: 206441 - DNA, 20 bp, Artificial Sequence
  Description of Artificial Sequence: Synthetic oligonucleotide
  Target: LAMA2; (-) strand; PAM type: YTN; PAM sequence: TTT
gctattgtgaatagtgctgc

SEQ ID NO: 206442 - DNA, 20 bp, Artificial Sequence
  Description of Artificial Sequence: Synthetic oligonucleotide
  Target: LAMA2; (-) strand; PAM type: YTN; PAM sequence: CTT
tgctattgtgaatagtgctg

SEQ ID NO: 206443 - DNA, 20 bp, Artificial Sequence
  Description of Artificial Sequence: Synthetic oligonucleotide
  Target: LAMA2; (-) strand; PAM type: YTN; PAM sequence: TTC
caagtctttgctattgtgaa

SEQ ID NO: 206444 - DNA, 20 bp, Artificial Sequence
  Description of Artificial Sequence: Synthetic oligonucleotide
  Target: LAMA2; (-) strand; PAM type: YTN; PAM sequence: TTG
gttccaagtctttgctattg

SEQ ID NO: 206445 - DNA, 20 bp, Artificial Sequence
  Description of Artificial Sequence: Synthetic oligonucleotide
  Target: LAMA2; (-) strand; PAM type: YTN; PAM sequence: TTG
ggttggttccaagtctttgc

SEQ ID NO: 206446 - DNA, 20 bp, Artificial Sequence
  Description of Artificial Sequence: Synthetic oligonucleotide
  Target: LAMA2; (-) strand; PAM type: YTN; PAM sequence: TTT
gggttggttccaagtctttg

SEQ ID NO: 206447 - DNA, 20 bp, Artificial Sequence
  Description of Artificial Sequence: Synthetic oligonucleotide
  Target: LAMA2; (-) strand; PAM type: YTN; PAM sequence: TTG
ataggcatttgggttggttc

SEQ ID NO: 206448 - DNA, 20 bp, Artificial Sequence
  Description of Artificial Sequence: Synthetic oligonucleotide
  Target: LAMA2; (-) strand; PAM type: YTN; PAM sequence: CTA
tcattgataggcatttgggt

SEQ ID NO: 206449 - DNA, 20 bp, Artificial Sequence
  Description of Artificial Sequence: Synthetic oligonucleotide
  Target: LAMA2; (-) strand; PAM type: YTN; PAM sequence: TTA
tccagtctatcattgatagg

SEQ ID NO: 206450 - DNA, 20 bp, Artificial Sequence
  Description of Artificial Sequence: Synthetic oligonucleotide
  Target: LAMA2; (-) strand; PAM type: YTN; PAM sequence: TTT
atccagtctatcattgatag

SEQ ID NO: 206451 - DNA, 20 bp, Artificial Sequence
  Description of Artificial Sequence: Synthetic oligonucleotide
  Target: LAMA2; (-) strand; PAM type: YTN; PAM sequence: CTT
tatccagtctatcattgata

SEQ ID NO: 206452 - DNA, 20 bp, Artificial Sequence
  Description of Artificial Sequence: Synthetic oligonucleotide
  Target: LAMA2; (-) strand; PAM type: YTN; PAM sequence: TTC
tttatccagtctatcattga

SEQ ID NO: 206453 - DNA, 20 bp, Artificial Sequence
  Description of Artificial Sequence: Synthetic oligonucleotide
  Target: LAMA2; (-) strand; PAM type: YTN; PAM sequence: TTT
ctttatccagtctatcattg

SEQ ID NO: 206454 - DNA, 20 bp, Artificial Sequence
  Description of Artificial Sequence: Synthetic oligonucleotide
  Target: LAMA2; (-) strand; PAM type: YTN; PAM sequence: TTT
tctttatccagtctatcatt

SEQ ID NO: 206455 - DNA, 20 bp, Artificial Sequence
  Description of Artificial Sequence: Synthetic oligonucleotide
  Target: LAMA2; (-) strand; PAM type: YTN; PAM sequence: TTC
catggtgtatatgtgccaca

SEQ ID NO: 206456 - DNA, 20 bp, Artificial Sequence
  Description of Artificial Sequence: Synthetic oligonucleotide
  Target: LAMA2; (-) strand; PAM type: YTN; PAM sequence: CTA
gtgttccatggtgtatatgt

SEQ ID NO: 206457 - DNA, 20 bp, Artificial Sequence
  Description of Artificial Sequence: Synthetic oligonucleotide
  Target: LAMA2; (-) strand; PAM type: YTN; PAM sequence: CTG
cctagtgttccatggtgtat

SEQ ID NO: 206458 - DNA, 20 bp, Artificial Sequence
  Description of Artificial Sequence: Synthetic oligonucleotide
  Target: LAMA2; (-) strand; PAM type: YTN; PAM sequence: TTC
acggctgcctagtgttccat

SEQ ID NO: 206459 - DNA, 20 bp, Artificial Sequence
  Description of Artificial Sequence: Synthetic oligonucleotide
  Target: LAMA2; (-) strand; PAM type: YTN; PAM sequence: TTT
cacggctgcctagtgttcca

SEQ ID NO: 206460 - DNA, 20 bp, Artificial Sequence
  Description of Artificial Sequence: Synthetic oligonucleotide
  Target: LAMA2; (-) strand; PAM type: YTN; PAM sequence: TTT
tcacggctgcctagtgttcc

SEQ ID NO: 206461 - DNA, 20 bp, Artificial Sequence
  Description of Artificial Sequence: Synthetic oligonucleotide
  Target: LAMA2; (-) strand; PAM type: YTN; PAM sequence: TTT
ttcacggctgcctagtgttc

SEQ ID NO: 206462 - DNA, 20 bp, Artificial Sequence
  Description of Artificial Sequence: Synthetic oligonucleotide
  Target: LAMA2; (-) strand; PAM type: YTN; PAM sequence: CTT
tttcacggctgcctagtgtt

SEQ ID NO: 206463 - DNA, 20 bp, Artificial Sequence
  Description of Artificial Sequence: Synthetic oligonucleotide
  Target: LAMA2; (-) strand; PAM type: YTN; PAM sequence: CTC
atcctttttcacggctgcct

SEQ ID NO: 206464 - DNA, 20 bp, Artificial Sequence
  Description of Artificial Sequence: Synthetic oligonucleotide
  Target: LAMA2; (-) strand; PAM type: YTN; PAM sequence: CTG
caaaggacatgaactcatcc

SEQ ID NO: 206465 - DNA, 20 bp, Artificial Sequence
  Description of Artificial Sequence: Synthetic oligonucleotide
  Target: LAMA2; (-) strand; PAM type: YTN; PAM sequence: TTC
atccatgtccctgcaaagga

SEQ ID NO: 206466 - DNA, 20 bp, Artificial Sequence
  Description of Artificial Sequence: Synthetic oligonucleotide
  Target: LAMA2; (-) strand; PAM type: YTN; PAM sequence: CTT
catccatgtccctgcaaagg

SEQ ID NO: 206467 - DNA, 20 bp, Artificial Sequence
  Description of Artificial Sequence: Synthetic oligonucleotide
  Target: LAMA2; (-) strand; PAM type: YTN; PAM sequence: TTC
cagcttcatccatgtccctg

SEQ ID NO: 206468 - DNA, 20 bp, Artificial Sequence
  Description of Artificial Sequence: Synthetic oligonucleotide
  Target: LAMA2; (-) strand; PAM type: YTN; PAM sequence: TTT
ccagcttcatccatgtccct

SEQ ID NO: 206469 - DNA, 20 bp, Artificial Sequence
  Description of Artificial Sequence: Synthetic oligonucleotide
  Target: LAMA2; (-) strand; PAM type: YTN; PAM sequence: CTG
agaatgatggtttccagctt

SEQ ID NO: 206470 - DNA, 20 bp, Artificial Sequence
  Description of Artificial Sequence: Synthetic oligonucleotide
  Target: LAMA2; (-) strand; PAM type: YTN; PAM sequence: TTG
ctgagaatgatggtttccag

SEQ ID NO: 206471 - DNA, 20 bp, Artificial Sequence
  Description of Artificial Sequence: Synthetic oligonucleotide
  Target: LAMA2; (-) strand; PAM type: YTN; PAM sequence: TTT
gctgagaatgatggtttcca

SEQ ID NO: 206472 - DNA, 20 bp, Artificial Sequence
  Description of Artificial Sequence: Synthetic oligonucleotide
  Target: LAMA2; (-) strand; PAM type: YTN; PAM sequence: TTA
gtttgctgagaatgatggtt

SEQ ID NO: 206473 - DNA, 20 bp, Artificial Sequence
  Description of Artificial Sequence: Synthetic oligonucleotide
  Target: LAMA2; (-) strand; PAM type: YTN; PAM sequence: CTG
ttagtttgctgagaatgatg

SEQ ID NO: 206474 - DNA, 20 bp, Artificial Sequence
  Description of Artificial Sequence: Synthetic oligonucleotide
  Target: LAMA2; (-) strand; PAM type: YTN; PAM sequence: CTC
tgttagtttgctgagaatga

SEQ ID NO: 206475 - DNA, 20 bp, Artificial Sequence
  Description of Artificial Sequence: Synthetic oligonucleotide
  Target: LAMA2; (-) strand; PAM type: YTN; PAM sequence: TTC
ctctgttagtttgctgagaa

SEQ ID NO: 206476 - DNA, 20 bp, Artificial Sequence
  Description of Artificial Sequence: Synthetic oligonucleotide
  Target: LAMA2; (-) strand; PAM type: YTN; PAM sequence: CTG
ttcctctgttagtttgctga

SEQ ID NO: 206477 - DNA, 20 bp, Artificial Sequence
  Description of Artificial Sequence: Synthetic oligonucleotide
  Target: LAMA2; (-) strand; PAM type: YTN; PAM sequence: TTC
tgttcctctgttagtttgct

SEQ ID NO: 206478 - DNA, 20 bp, Artificial Sequence
  Description of Artificial Sequence: Synthetic oligonucleotide
  Target: LAMA2; (-) strand; PAM type: YTN; PAM sequence: TTT
ctgttcctctgttagtttgc

SEQ ID NO: 206479 - DNA, 20 bp, Artificial Sequence
  Description of Artificial Sequence: Synthetic oligonucleotide
  Target: LAMA2; (-) strand; PAM type: YTN; PAM sequence: TTT
tctgttcctctgttagtttg

SEQ ID NO: 206480 - DNA, 20 bp, Artificial Sequence
  Description of Artificial Sequence: Synthetic oligonucleotide
  Target: LAMA2; (-) strand; PAM type: YTN; PAM sequence: TTG
gttttctgttcctctgttag

SEQ ID NO: 206481 - DNA, 20 bp, Artificial Sequence
  Description of Artificial Sequence: Synthetic oligonucleotide
  Target: LAMA2; (-) strand; PAM type: YTN; PAM sequence: TTT
ggttttctgttcctctgtta

SEQ ID NO: 206482 - DNA, 20 bp, Artificial Sequence
  Description of Artificial Sequence: Synthetic oligonucleotide
  Target: LAMA2; (-) strand; PAM type: YTN; PAM sequence: TTA
tgagtgagaacatgcagtgt

SEQ ID NO: 206483 - DNA, 20 bp, Artificial Sequence
  Description of Artificial Sequence: Synthetic oligonucleotide
  Target: LAMA2; (-) strand; PAM type: YTN; PAM sequence: CTT
atgagtgagaacatgcagtg

SEQ ID NO: 206484 - DNA, 20 bp, Artificial Sequence
  Description of Artificial Sequence: Synthetic oligonucleotide
  Target: LAMA2; (-) strand; PAM type: YTN; PAM sequence: TTC
aacacccacttatgagtgag

SEQ ID NO: 206485 - DNA, 20 bp, Artificial Sequence
  Description of Artificial Sequence: Synthetic oligonucleotide
  Target: LAMA2; (-) strand; PAM type: YTN; PAM sequence: CTG
ttcaacacccacttatgagt

SEQ ID NO: 206486 - DNA, 20 bp, Artificial Sequence
  Description of Artificial Sequence: Synthetic oligonucleotide
  Target: LAMA2; (-) strand; PAM type: YTN; PAM sequence: CTC
actgttcaacacccacttat

SEQ ID NO: 206487 - DNA, 20 bp, Artificial Sequence
  Description of Artificial Sequence: Synthetic oligonucleotide
  Target: LAMA2; (-) strand; PAM type: YTN; PAM sequence: TTC
tcactgttcaacacccactt

SEQ ID NO: 206488 - DNA, 20 bp, Artificial Sequence
  Description of Artificial Sequence: Synthetic oligonucleotide
  Target: LAMA2; (-) strand; PAM type: YTN; PAM sequence: CTG
tgtccgtccatatgttctca

SEQ ID NO: 206489 - DNA, 20 bp, Artificial Sequence
  Description of Artificial Sequence: Synthetic oligonucleotide
  Target: LAMA2; (-) strand; PAM type: YTN; PAM sequence: CTC
cctgtgtccgtccatatgtt

SEQ ID NO: 206490 - DNA, 20 bp, Artificial Sequence
  Description of Artificial Sequence: Synthetic oligonucleotide
  Target: LAMA2; (-) strand; PAM type: YTN; PAM sequence: CTC
ctccctgtgtccgtccatat

SEQ ID NO: 206491 - DNA, 20 bp, Artificial Sequence
  Description of Artificial Sequence: Synthetic oligonucleotide
  Target: LAMA2; (-) strand; PAM type: YTN; PAM sequence: TTC
tcctccctgtgtccgtccat

SEQ ID NO: 206492 - DNA, 20 bp, Artificial Sequence
  Description of Artificial Sequence: Synthetic oligonucleotide
  Target: LAMA2; (-) strand; PAM type: YTN; PAM sequence: CTC
ccccaacaggccccagtgtg

SEQ ID NO: 206493 - DNA, 20 bp, Artificial Sequence
  Description of Artificial Sequence: Synthetic oligonucleotide
  Target: LAMA2; (-) strand; PAM type: YTN; PAM sequence: CTC
ccacccctcccccaacaggc

SEQ ID NO: 206494 - DNA, 20 bp, Artificial Sequence
  Description of Artificial Sequence: Synthetic oligonucleotide
  Target: LAMA2; (-) strand; PAM type: YTN; PAM sequence: TTG
cctcccacccctcccccaac

SEQ ID NO: 206495 - DNA, 20 bp, Artificial Sequence
  Description of Artificial Sequence: Synthetic oligonucleotide
  Target: LAMA2; (-) strand; PAM type: YTN; PAM sequence: CTT
gcctcccacccctcccccaa

SEQ ID NO: 206496 - DNA, 20 bp, Artificial Sequence
  Description of Artificial Sequence: Synthetic oligonucleotide
  Target: LAMA2; (-) strand; PAM type: YTN; PAM sequence: CTC
cccttgcctcccacccctcc

SEQ ID NO: 206497 - DNA, 20 bp, Artificial Sequence
  Description of Artificial Sequence: Synthetic oligonucleotide
  Target: LAMA2; (-) strand; PAM type: YTN; PAM sequence: CTA
tccctccccttgcctcccac

SEQ ID NO: 206498 - DNA, 20 bp, Artificial Sequence
  Description of Artificial Sequence: Synthetic oligonucleotide
  Target: LAMA2; (-) strand; PAM type: YTN; PAM sequence: CTA
atgctatccctccccttgcc

SEQ ID NO: 206499 - DNA, 20 bp, Artificial Sequence
  Description of Artificial Sequence: Synthetic oligonucleotide
  Target: LAMA2; (-) strand; PAM type: YTN; PAM sequence: CTC
ctaatgctatccctcccctt

SEQ ID NO: 206500 - DNA, 20 bp, Artificial Sequence
  Description of Artificial Sequence: Synthetic oligonucleotide
  Target: LAMA2; (-) strand; PAM type: YTN; PAM sequence: TTC
tcctaatgctatccctcccc

SEQ ID NO: 206501 - DNA, 20 bp, Artificial Sequence
  Description of Artificial Sequence: Synthetic oligonucleotide
  Target: LAMA2; (-) strand; PAM type: YTN; PAM sequence: TTT
ctcctaatgctatccctccc

SEQ ID NO: 206502 - DNA, 20 bp, Artificial Sequence
  Description of Artificial Sequence: Synthetic oligonucleotide
  Target: LAMA2; (-) strand; PAM type: YTN; PAM sequence: TTA
ggtatttctcctaatgctat

SEQ ID NO: 206503 - DNA, 20 bp, Artificial Sequence
  Description of Artificial Sequence: Synthetic oligonucleotide
  Target: LAMA2; (-) strand; PAM type: YTN; PAM sequence: CTA
cattaggtatttctcctaat

SEQ ID NO: 206504 - DNA, 20 bp, Artificial Sequence
  Description of Artificial Sequence: Synthetic oligonucleotide
  Target: LAMA2; (-) strand; PAM type: YTN; PAM sequence: CTG
cagccatcaacccatcatct

SEQ ID NO: 206505 - DNA, 20 bp, Artificial Sequence
  Description of Artificial Sequence: Synthetic oligonucleotide
  Target: LAMA2; (-) strand; PAM type: YTN; PAM sequence: TTG
ctgcagccatcaacccatca

SEQ ID NO: 206506 - DNA, 20 bp, Artificial Sequence
  Description of Artificial Sequence: Synthetic oligonucleotide
  Target: LAMA2; (-) strand; PAM type: YTN; PAM sequence: TTT
gctgcagccatcaacccatc

SEQ ID NO: 206507 - DNA, 20 bp, Artificial Sequence
  Description of Artificial Sequence: Synthetic oligonucleotide
  Target: LAMA2; (-) strand; PAM type: YTN; PAM sequence: TTA
cataggaatacatgtgccat

SEQ ID NO: 206508 - DNA, 20 bp, Artificial Sequence
  Description of Artificial Sequence: Synthetic oligonucleotide
  Target: LAMA2; (-) strand; PAM type: YTN; PAM sequence: TTG
ttacataggaatacatgtgc

SEQ ID NO: 206509 - DNA, 20 bp, Artificial Sequence
  Description of Artificial Sequence: Synthetic oligonucleotide
  Target: LAMA2; (-) strand; PAM type: YTN; PAM sequence: TTT
gttacataggaatacatgtg

SEQ ID NO: 206510 - DNA, 20 bp, Artificial Sequence
  Description of Artificial Sequence: Synthetic oligonucleotide
  Target: LAMA2; (-) strand; PAM type: YTN; PAM sequence: CTG
ggatacatgtgcaaaatgtg

SEQ ID NO: 206511 - DNA, 20 bp, Artificial Sequence
  Description of Artificial Sequence: Synthetic oligonucleotide
  Target: LAMA2; (-) strand; PAM type: YTN; PAM sequence: TTC
tgggatacatgtgcaaaatg

SEQ ID NO: 206512 - DNA, 20 bp, Artificial Sequence
  Description of Artificial Sequence: Synthetic oligonucleotide
  Target: LAMA2; (-) strand; PAM type: YTN; PAM sequence: TTA
agttctgggatacatgtgca

SEQ ID NO: 206513 - DNA, 20 bp, Artificial Sequence
  Description of Artificial Sequence: Synthetic oligonucleotide
  Target: LAMA2; (-) strand; PAM type: YTN; PAM sequence: TTT
aagttctgggatacatgtgc

SEQ ID NO: 206514 - DNA, 20 bp, Artificial Sequence
  Description of Artificial Sequence: Synthetic oligonucleotide
  Target: LAMA2; (-) strand; PAM type: YTN; PAM sequence: CTT
taagttctgggatacatgtg

SEQ ID NO: 206515 - DNA, 20 bp, Artificial Sequence
  Description of Artificial Sequence: Synthetic oligonucleotide
  Target: LAMA2; (-) strand; PAM type: YTN; PAM sequence: CTA
ctttaagttctgggatacat

SEQ ID NO: 206516 - DNA, 20 bp, Artificial Sequence
  Description of Artificial Sequence: Synthetic oligonucleotide
  Target: LAMA2; (-) strand; PAM type: YTN; PAM sequence: TTC
tactttaagttctgggatac

SEQ ID NO: 206517 - DNA, 20 bp, Artificial Sequence
  Description of Artificial Sequence: Synthetic oligonucleotide
  Target: LAMA2; (-) strand; PAM type: YTN; PAM sequence: TTT
ctactttaagttctgggata

SEQ ID NO: 206518 - DNA, 20 bp, Artificial Sequence
  Description of Artificial Sequence: Synthetic oligonucleotide
  Target: LAMA2; (-) strand; PAM type: YTN; PAM sequence: CTT
tctactttaagttctgggat

SEQ ID NO: 206519 - DNA, 20 bp, Artificial Sequence
  Description of Artificial Sequence: Synthetic oligonucleotide
  Target: LAMA2; (-) strand; PAM type: YTN; PAM sequence: TTC
tttctactttaagttctggg

SEQ ID NO: 206520 - DNA, 20 bp, Artificial Sequence
  Description of Artificial Sequence: Synthetic oligonucleotide
  Target: LAMA2; (-) strand; PAM type: YTN; PAM sequence: TTT
ctttctactttaagttctgg

SEQ ID NO: 206521 - DNA, 20 bp, Artificial Sequence
  Description of Artificial Sequence: Synthetic oligonucleotide
  Target: LAMA2; (-) strand; PAM type: YTN; PAM sequence: CTT
tctttctactttaagttctg

SEQ ID NO: 206522 - DNA, 20 bp, Artificial Sequence
  Description of Artificial Sequence: Synthetic oligonucleotide
  Target: LAMA2; (-) strand; PAM type: YTN; PAM sequence: TTC
tttctttctactttaagttc

SEQ ID NO: 206523 - DNA, 20 bp, Artificial Sequence
  Description of Artificial Sequence: Synthetic oligonucleotide
  Target: LAMA2; (-) strand; PAM type: YTN; PAM sequence: TTT
ctttctttctactttaagtt

SEQ ID NO: 206524 - DNA, 20 bp, Artificial Sequence
  Description of Artificial Sequence: Synthetic oligonucleotide
  Target: LAMA2; (-) strand; PAM type: YTN; PAM sequence: CTT
tctttctttctactttaagt

SEQ ID NO: 206525 - DNA, 20 bp, Artificial Sequence
  Description of Artificial Sequence: Synthetic oligonucleotide
  Target: LAMA2; (-) strand; PAM type: YTN; PAM sequence: CTC
tttctttctttctactttaa

SEQ ID NO: 206526 - DNA, 20 bp, Artificial Sequence
  Description of Artificial Sequence: Synthetic oligonucleotide
  Target: LAMA2; (-) strand; PAM type: YTN; PAM sequence: TTC
tctttctttctttctacttt

SEQ ID NO: 206527 - DNA, 20 bp, Artificial Sequence
  Description of Artificial Sequence: Synthetic oligonucleotide
  Target: LAMA2; (-) strand; PAM type: YTN; PAM sequence: TTT
ctctttctttctttctactt

SEQ ID NO: 206528 - DNA, 20 bp, Artificial Sequence
  Description of Artificial Sequence: Synthetic oligonucleotide
  Target: LAMA2; (-) strand; PAM type: YTN; PAM sequence: TTT
tctctttctttctttctact

SEQ ID NO: 206529 - DNA, 20 bp, Artificial Sequence
  Description of Artificial Sequence: Synthetic oligonucleotide
  Target: LAMA2; (-) strand; PAM type: YTN; PAM sequence: CTT
ttctctttctttctttctac

SEQ ID NO: 206530 - DNA, 20 bp, Artificial Sequence
  Description of Artificial Sequence: Synthetic oligonucleotide
  Target: LAMA2; (-) strand; PAM type: YTN; PAM sequence: TTC
ttttctctttctttctttct

SEQ ID NO: 206531 - DNA, 20 bp, Artificial Sequence
  Description of Artificial Sequence: Synthetic oligonucleotide
  Target: LAMA2; (-) strand; PAM type: YTN; PAM sequence: CTT
cttttctctttctttctttc

SEQ ID NO: 206532 - DNA, 20 bp, Artificial Sequence
  Description of Artificial Sequence: Synthetic oligonucleotide
  Target: LAMA2; (-) strand; PAM type: YTN; PAM sequence: TTC
ttcttttctctttctttctt

SEQ ID NO: 206533 - DNA, 20 bp, Artificial Sequence
  Description of Artificial Sequence: Synthetic oligonucleotide
  Target: LAMA2; (-) strand; PAM type: YTN; PAM sequence: TTT
cttcttttctctttctttct

SEQ ID NO: 206534 - DNA, 20 bp, Artificial Sequence
  Description of Artificial Sequence: Synthetic oligonucleotide
  Target: LAMA2; (-) strand; PAM type: YTN; PAM sequence: CTT
tcttcttttctctttctttc

SEQ ID NO: 206535 - DNA, 20 bp, Artificial Sequence
  Description of Artificial Sequence: Synthetic oligonucleotide
  Target: LAMA2; (-) strand; PAM type: YTN; PAM sequence: TTC
tttcttcttttctctttctt

SEQ ID NO: 206536 - DNA, 20 bp, Artificial Sequence
  Description of Artificial Sequence: Synthetic oligonucleotide
  Target: LAMA2; (-) strand; PAM type: YTN; PAM sequence: TTT
ctttcttcttttctctttct

SEQ ID NO: 206537 - DNA, 20 bp, Artificial Sequence
  Description of Artificial Sequence: Synthetic oligonucleotide
  Target: LAMA2; (-) strand; PAM type: YTN; PAM sequence: CTT
tctttcttcttttctctttc

SEQ ID NO: 206538 - DNA, 20 bp, Artificial Sequence
  Description of Artificial Sequence: Synthetic oligonucleotide
  Target: LAMA2; (-) strand; PAM type: YTN; PAM sequence: TTC
tttctttcttcttttctctt

SEQ ID NO: 206539 - DNA, 20 bp, Artificial Sequence
  Description of Artificial Sequence: Synthetic oligonucleotide
  Target: LAMA2; (-) strand; PAM type: YTN; PAM sequence: TTT
ctttctttcttcttttctct

SEQ ID NO: 206540 - DNA, 20 bp, Artificial Sequence
  Description of Artificial Sequence: Synthetic oligonucleotide
  Target: LAMA2; (-) strand; PAM type: YTN; PAM sequence: TTG
tttctttctttcttcttttc

SEQ ID NO: 206541 - DNA, 20 bp, Artificial Sequence
  Description of Artificial Sequence: Synthetic oligonucleotide
  Target: LAMA2; (-) strand; PAM type: YTN; PAM sequence: TTT
gtttctttctttcttctttt

SEQ ID NO: 206542 - DNA, 20 bp, Artificial Sequence
  Description of Artificial Sequence: Synthetic oligonucleotide
  Target: LAMA2; (-) strand; PAM type: YTN; PAM sequence: CTT
tgtttctttctttcttcttt

SEQ ID NO: 206543 - DNA, 20 bp, Artificial Sequence
  Description of Artificial Sequence: Synthetic oligonucleotide
  Target: LAMA2; (-) strand; PAM type: YTN; PAM sequence: CTC
tttgtttctttctttcttct

SEQ ID NO: 206544 - DNA, 20 bp, Artificial Sequence
  Description of Artificial Sequence: Synthetic oligonucleotide
  Target: LAMA2; (-) strand; PAM type: YTN; PAM sequence: CTC
tctttgtttctttctttctt

SEQ ID NO: 206545 - DNA, 20 bp, Artificial Sequence
  Description of Artificial Sequence: Synthetic oligonucleotide
  Target: LAMA2; (-) strand; PAM type: YTN; PAM sequence: CTC
tctctttgtttctttctttc

SEQ ID NO: 206546 - DNA, 20 bp, Artificial Sequence
  Description of Artificial Sequence: Synthetic oligonucleotide
  Target: LAMA2; (-) strand; PAM type: YTN; PAM sequence: CTC
tctctctttgtttctttctt

SEQ ID NO: 206547 - DNA, 20 bp, Artificial Sequence
  Description of Artificial Sequence: Synthetic oligonucleotide
  Target: LAMA2; (-) strand; PAM type: YTN; PAM sequence: CTC
tctctctctttgtttctttc

SEQ ID NO: 206548 - DNA, 20 bp, Artificial Sequence
  Description of Artificial Sequence: Synthetic oligonucleotide
  Target: LAMA2; (-) strand; PAM type: YTN; PAM sequence: TTC
tctctctctctttgtttctt

SEQ ID NO: 206549 - DNA, 20 bp, Artificial Sequence
  Description of Artificial Sequence: Synthetic oligonucleotide
  Target: LAMA2; (-) strand; PAM type: YTN; PAM sequence: TTT
ctctctctctctttgtttct

SEQ ID NO: 206550 - DNA, 20 bp, Artificial Sequence
  Description of Artificial Sequence: Synthetic oligonucleotide
  Target: LAMA2; (-) strand; PAM type: YTN; PAM sequence: CTT
tctctctctctctttgtttc

SEQ ID NO: 206551 - DNA, 20 bp, Artificial Sequence
  Description of Artificial Sequence: Synthetic oligonucleotide
  Target: LAMA2; (-) strand; PAM type: YTN; PAM sequence: TTC
tttctctctctctctttgtt

SEQ ID NO: 206552 - DNA, 20 bp, Artificial Sequence
  Description of Artificial Sequence: Synthetic oligonucleotide
  Target: LAMA2; (-) strand; PAM type: YTN; PAM sequence: TTT
ctttctctctctctctttgt

SEQ ID NO: 206553 - DNA, 20 bp, Artificial Sequence
  Description of Artificial Sequence: Synthetic oligonucleotide
  Target: LAMA2; (-) strand; PAM type: YTN; PAM sequence: CTT
tctttctctctctctctttg

SEQ ID NO: 206554 - DNA, 20 bp, Artificial Sequence
  Description of Artificial Sequence: Synthetic oligonucleotide
  Target: LAMA2; (-) strand; PAM type: YTN; PAM sequence: CTC
tttctttctctctctctctt

SEQ ID NO: 206555 - DNA, 20 bp, Artificial Sequence
  Description of Artificial Sequence: Synthetic oligonucleotide
  Target: LAMA2; (-) strand; PAM type: YTN; PAM sequence: TTC
tctttctttctctctctctc

SEQ ID NO: 206556 - DNA, 20 bp, Artificial Sequence
  Description of Artificial Sequence: Synthetic oligonucleotide
  Target: LAMA2; (-) strand; PAM type: YTN; PAM sequence: TTT
ctctttctttctctctctct

SEQ ID NO: 206557 - DNA, 20 bp, Artificial Sequence
  Description of Artificial Sequence: Synthetic oligonucleotide
  Target: LAMA2; (-) strand; PAM type: YTN; PAM sequence: CTT
tctctttctttctctctctc

SEQ ID NO: 206558 - DNA, 20 bp, Artificial Sequence
  Description of Artificial Sequence: Synthetic oligonucleotide
  Target: LAMA2; (-) strand; PAM type: YTN; PAM sequence: TTC
tttctctttctttctctctc

SEQ ID NO: 206559 - DNA, 20 bp, Artificial Sequence
  Description of Artificial Sequence: Synthetic oligonucleotide
  Target: LAMA2; (-) strand; PAM type: YTN; PAM sequence: TTT
ctttctctttctttctctct

SEQ ID NO: 206560 - DNA, 20 bp, Artificial Sequence
  Description of Artificial Sequence: Synthetic oligonucleotide
  Target: LAMA2; (-) strand; PAM type: YTN; PAM sequence: CTT
tctttctctttctttctctc

SEQ ID NO: 206561 - DNA, 20 bp, Artificial Sequence
  Description of Artificial Sequence: Synthetic oligonucleotide
  Target: LAMA2; (-) strand; PAM type: YTN; PAM sequence: TTC
tttctttctctttctttctc

SEQ ID NO: 206562 - DNA, 20 bp, Artificial Sequence
  Description of Artificial Sequence: Synthetic oligonucleotide
  Target: LAMA2; (-) strand; PAM type: YTN; PAM sequence: TTT
ctttctttctctttctttct

SEQ ID NO: 206563 - DNA, 20 bp, Artificial Sequence
  Description of Artificial Sequence: Synthetic oligonucleotide
  Target: LAMA2; (-) strand; PAM type: YTN; PAM sequence: CTT
tctttctttctctttctttc

SEQ ID NO: 206564 - DNA, 20 bp, Artificial Sequence
  Description of Artificial Sequence: Synthetic oligonucleotide
  Target: LAMA2; (-) strand; PAM type: YTN; PAM sequence: TTC
tttctttctttctctttctt

SEQ ID NO: 206565 - DNA, 20 bp, Artificial Sequence
  Description of Artificial Sequence: Synthetic oligonucleotide
  Target: LAMA2; (-) strand; PAM type: YTN; PAM sequence: TTT
ctttctttctttctctttct

SEQ ID NO: 206566 - DNA, 20 bp, Artificial Sequence
  Description of Artificial Sequence: Synthetic oligonucleotide
  Target: LAMA2; (-) strand; PAM type: YTN; PAM sequence: CTT
tctttctttctttctctttc

SEQ ID NO: 206567 - DNA, 20 bp, Artificial Sequence
  Description of Artificial Sequence: Synthetic oligonucleotide
  Target: LAMA2; (-) strand; PAM type: YTN; PAM sequence: TTC
tttctttctttctttctctt

SEQ ID NO: 206568 - DNA, 20 bp, Artificial Sequence
  Description of Artificial Sequence: Synthetic oligonucleotide
  Target: LAMA2; (-) strand; PAM type: YTN; PAM sequence: TTC
gttctttctttctttctttc

SEQ ID NO: 206569 - DNA, 20 bp, Artificial Sequence
  Description of Artificial Sequence: Synthetic oligonucleotide
  Target: LAMA2; (-) strand; PAM type: YTN; PAM sequence: TTT
cgttctttctttctttcttt

SEQ ID NO: 206570 - DNA, 20 bp, Artificial Sequence
  Description of Artificial Sequence: Synthetic oligonucleotide
  Target: LAMA2; (-) strand; PAM type: YTN; PAM sequence: CTT
tcgttctttctttctttctt

SEQ ID NO: 206571 - DNA, 20 bp, Artificial Sequence
  Description of Artificial Sequence: Synthetic oligonucleotide
  Target: LAMA2; (-) strand; PAM type: YTN; PAM sequence: TTC
tttcgttctttctttctttc

SEQ ID NO: 206572 - DNA, 20 bp, Artificial Sequence
  Description of Artificial Sequence: Synthetic oligonucleotide
  Target: LAMA2; (-) strand; PAM type: YTN; PAM sequence: TTT
ctttcgttctttctttcttt

SEQ ID NO: 206573 - DNA, 20 bp, Artificial Sequence
  Description of Artificial Sequence: Synthetic oligonucleotide
  Target: LAMA2; (-) strand; PAM type: YTN; PAM sequence: CTT
tctttcgttctttctttctt

SEQ ID NO: 206574 - DNA, 20 bp, Artificial Sequence
  Description of Artificial Sequence: Synthetic oligonucleotide
  Target: LAMA2; (-) strand; PAM type: YTN; PAM sequence: TTC
tttctttcgttctttctttc

SEQ ID NO: 206575 - DNA, 20 bp, Artificial Sequence
  Description of Artificial Sequence: Synthetic oligonucleotide
  Target: LAMA2; (-) strand; PAM type: YTN; PAM sequence: TTT
ctttctttcgttctttcttt

SEQ ID NO: 206576 - DNA, 20 bp, Artificial Sequence
  Description of Artificial Sequence: Synthetic oligonucleotide
  Target: LAMA2; (-) strand; PAM type: YTN; PAM sequence: CTT
tctttctttcgttctttctt

SEQ ID NO: 206577 - DNA, 20 bp, Artificial Sequence
  Description of Artificial Sequence: Synthetic oligonucleotide
  Target: LAMA2; (-) strand; PAM type: YTN; PAM sequence: CTC
tttctttctttcgttctttc

SEQ ID NO: 206578 - DNA, 20 bp, Artificial Sequence
  Description of Artificial Sequence: Synthetic oligonucleotide
  Target: LAMA2; (-) strand; PAM type: YTN; PAM sequence: CTC
tctttctttctttcgttctt

SEQ ID NO: 206579 - DNA, 20 bp, Artificial Sequence
  Description of Artificial Sequence: Synthetic oligonucleotide
  Target: LAMA2; (-) strand; PAM type: YTN; PAM sequence: CTC
tctctttctttctttcgttc

SEQ ID NO: 206580 - DNA, 20 bp, Artificial Sequence
  Description of Artificial Sequence: Synthetic oligonucleotide
  Target: LAMA2; (-) strand; PAM type: YTN; PAM sequence: CTC
tctctctttctttctttcgt

SEQ ID NO: 206581 - DNA, 20 bp, Artificial Sequence
  Description of Artificial Sequence: Synthetic oligonucleotide
  Target: LAMA2; (-) strand; PAM type: YTN; PAM sequence: CTC
tctctctctttctttctttc

SEQ ID NO: 206582 - DNA, 20 bp, Artificial Sequence
  Description of Artificial Sequence: Synthetic oligonucleotide
  Target: LAMA2; (-) strand; PAM type: YTN; PAM sequence: TTC
tctctctctctttctttctt

SEQ ID NO: 206583 - DNA, 20 bp, Artificial Sequence
  Description of Artificial Sequence: Synthetic oligonucleotide
  Target: LAMA2; (-) strand; PAM type: YTN; PAM sequence: TTT
ctctctctctctttctttct

SEQ ID NO: 206584 - DNA, 20 bp, Artificial Sequence
  Description of Artificial Sequence: Synthetic oligonucleotide
  Target: LAMA2; (-) strand; PAM type: YTN; PAM sequence: CTT
tctctctctctctttctttc

SEQ ID NO: 206585 - DNA, 20 bp, Artificial Sequence
  Description of Artificial Sequence: Synthetic oligonucleotide
  Target: LAMA2; (-) strand; PAM type: YTN; PAM sequence: TTC
ctttctctctctctctttct

SEQ ID NO: 206586 - DNA, 20 bp, Artificial Sequence
  Description of Artificial Sequence: Synthetic oligonucleotide
  Target: LAMA2; (-) strand; PAM type: YTN; PAM sequence: CTT
cctttctctctctctctttc

SEQ ID NO: 206587 - DNA, 20 bp, Artificial Sequence
  Description of Artificial Sequence: Synthetic oligonucleotide
  Target: LAMA2; (-) strand; PAM type: YTN; PAM sequence: CTC
ttcctttctctctctctctt

SEQ ID NO: 206588 - DNA, 20 bp, Artificial Sequence
  Description of Artificial Sequence: Synthetic oligonucleotide
  Target: LAMA2; (-) strand; PAM type: YTN; PAM sequence: CTC
tcttcctttctctctctctc

SEQ ID NO: 206589 - DNA, 20 bp, Artificial Sequence
  Description of Artificial Sequence: Synthetic oligonucleotide
  Target: LAMA2; (-) strand; PAM type: YTN; PAM sequence: CTC
cctctcttcctttctctctc

SEQ ID NO: 206590 - DNA, 20 bp, Artificial Sequence
  Description of Artificial Sequence: Synthetic oligonucleotide
  Target: LAMA2; (-) strand; PAM type: YTN; PAM sequence: CTC
cctccctctcttcctttctc

SEQ ID NO: 206591 - DNA, 20 bp, Artificial Sequence
  Description of Artificial Sequence: Synthetic oligonucleotide
  Target: LAMA2; (-) strand; PAM type: YTN; PAM sequence: CTC
cctccctccctctcttcctt

SEQ ID NO: 206592 - DNA, 20 bp, Artificial Sequence
  Description of Artificial Sequence: Synthetic oligonucleotide
  Target: LAMA2; (-) strand; PAM type: YTN; PAM sequence: TTG
gccatcccctccctccctcc

SEQ ID NO: 206593 - DNA, 20 bp, Artificial Sequence
  Description of Artificial Sequence: Synthetic oligonucleotide
  Target: LAMA2; (-) strand; PAM type: YTN; PAM sequence: CTA
gtcacattggccatcccctc

SEQ ID NO: 206594 - DNA, 20 bp, Artificial Sequence
  Description of Artificial Sequence: Synthetic oligonucleotide
  Target: LAMA2; (-) strand; PAM type: YTN; PAM sequence: CTC
tagtcacattggccatcccc

SEQ ID NO: 206595 - DNA, 20 bp, Artificial Sequence
  Description of Artificial Sequence: Synthetic oligonucleotide
  Target: LAMA2; (-) strand; PAM type: YTN; PAM sequence: TTC
actctagtcacattggccat

SEQ ID NO: 206596 - DNA, 20 bp, Artificial Sequence
  Description of Artificial Sequence: Synthetic oligonucleotide
  Target: LAMA2; (-) strand; PAM type: YTN; PAM sequence: CTT
cactctagtcacattggcca

SEQ ID NO: 206597 - DNA, 20 bp, Artificial Sequence
  Description of Artificial Sequence: Synthetic oligonucleotide
  Target: LAMA2; (-) strand; PAM type: YTN; PAM sequence: TTA
cttcactctagtcacattgg

SEQ ID NO: 206598 - DNA, 20 bp, Artificial Sequence
  Description of Artificial Sequence: Synthetic oligonucleotide
  Target: LAMA2; (-) strand; PAM type: YTN; PAM sequence: CTT
acttcactctagtcacattg

SEQ ID NO: 206599 - DNA, 20 bp, Artificial Sequence
  Description of Artificial Sequence: Synthetic oligonucleotide
  Target: LAMA2; (-) strand; PAM type: YTN; PAM sequence: CTC
ttacttcactctagtcacat

SEQ ID NO: 206600 - DNA, 20 bp, Artificial Sequence
  Description of Artificial Sequence: Synthetic oligonucleotide
  Target: LAMA2; (-) strand; PAM type: YTN; PAM sequence: CTC
tcttacttcactctagtcac

SEQ ID NO: 206601 - DNA, 20 bp, Artificial Sequence
  Description of Artificial Sequence: Synthetic oligonucleotide
  Target: LAMA2; (-) strand; PAM type: YTN; PAM sequence: TTC
ccctctcttacttcactcta

SEQ ID NO: 206602 - DNA, 20 bp, Artificial Sequence
  Description of Artificial Sequence: Synthetic oligonucleotide
  Target: LAMA2; (-) strand; PAM type: YTN; PAM sequence: CTT
cccctctcttacttcactct

SEQ ID NO: 206603 - DNA, 20 bp, Artificial Sequence
  Description of Artificial Sequence: Synthetic oligonucleotide
  Target: LAMA2; (-) strand; PAM type: YTN; PAM sequence: TTC
ttcccctctcttacttcact

SEQ ID NO: 206604 - DNA, 20 bp, Artificial Sequence
  Description of Artificial Sequence: Synthetic oligonucleotide
  Target: LAMA2; (-) strand; PAM type: YTN; PAM sequence: CTA
ttcttcccctctcttacttc

SEQ ID NO: 206605 - DNA, 20 bp, Artificial Sequence
  Description of Artificial Sequence: Synthetic oligonucleotide
  Target: LAMA2; (-) strand; PAM type: YTN; PAM sequence: CTA
atactattcttcccctctct

SEQ ID NO: 206606 - DNA, 20 bp, Artificial Sequence
  Description of Artificial Sequence: Synthetic oligonucleotide
  Target: LAMA2; (-) strand; PAM type: YTN; PAM sequence: TTG
actaatactattcttcccct

SEQ ID NO: 206607 - DNA, 20 bp, Artificial Sequence
  Description of Artificial Sequence: Synthetic oligonucleotide
  Target: LAMA2; (-) strand; PAM type: YTN; PAM sequence: TTT
gactaatactattcttcccc

SEQ ID NO: 206608 - DNA, 20 bp, Artificial Sequence
  Description of Artificial Sequence: Synthetic oligonucleotide
  Target: LAMA2; (-) strand; PAM type: YTN; PAM sequence: CTT
tgactaatactattcttccc

SEQ ID NO: 206609 - DNA, 20 bp, Artificial Sequence
  Description of Artificial Sequence: Synthetic oligonucleotide
  Target: LAMA2; (-) strand; PAM type: YTN; PAM sequence: TTC
aactttgactaatactattc

SEQ ID NO: 206610 - DNA, 20 bp, Artificial Sequence
  Description of Artificial Sequence: Synthetic oligonucleotide
  Target: LAMA2; (-) strand; PAM type: YTN; PAM sequence: TTT
caactttgactaatactatt

SEQ ID NO: 206611 - DNA, 20 bp, Artificial Sequence
  Description of Artificial Sequence: Synthetic oligonucleotide
  Target: LAMA2; (-) strand; PAM type: YTN; PAM sequence: TTC
aatttcaactttgactaata

SEQ ID NO: 206612 - DNA, 20 bp, Artificial Sequence
  Description of Artificial Sequence: Synthetic oligonucleotide
  Target: LAMA2; (-) strand; PAM type: YTN; PAM sequence: CTT
caatttcaactttgactaat

SEQ ID NO: 206613 - DNA, 20 bp, Artificial Sequence
  Description of Artificial Sequence: Synthetic oligonucleotide
  Target: LAMA2; (-) strand; PAM type: YTN; PAM sequence: TTG
tgtcttcaatttcaactttg

SEQ ID NO: 206614 - DNA, 20 bp, Artificial Sequence
  Description of Artificial Sequence: Synthetic oligonucleotide
  Target: LAMA2; (-) strand; PAM type: YTN; PAM sequence: TTT
gtgtcttcaatttcaacttt

SEQ ID NO: 206615 - DNA, 20 bp, Artificial Sequence
  Description of Artificial Sequence: Synthetic oligonucleotide
  Target: LAMA2; (-) strand; PAM type: YTN; PAM sequence: TTG
aatagccagtttgtgtcttc

SEQ ID NO: 206616 - DNA, 20 bp, Artificial Sequence
  Description of Artificial Sequence: Synthetic oligonucleotide
  Target: LAMA2; (-) strand; PAM type: YTN; PAM sequence: CTT
gaatagccagtttgtgtctt

SEQ ID NO: 206617 - DNA, 20 bp, Artificial Sequence
  Description of Artificial Sequence: Synthetic oligonucleotide
  Target: LAMA2; (-) strand; PAM type: YTN; PAM sequence: CTG
gccacatcacaggcataaag

SEQ ID NO: 206618 - DNA, 20 bp, Artificial Sequence
  Description of Artificial Sequence: Synthetic oligonucleotide
  Target: LAMA2; (-) strand; PAM type: YTN; PAM sequence: TTA
caggtgtgagccaccatgcc

SEQ ID NO: 206619 - DNA, 20 bp, Artificial Sequence
  Description of Artificial Sequence: Synthetic oligonucleotide
  Target: LAMA2; (-) strand; PAM type: YTN; PAM sequence: CTG
gaattacaggtgtgagccac

SEQ ID NO: 206620 - DNA, 20 bp, Artificial Sequence
  Description of Artificial Sequence: Synthetic oligonucleotide
  Target: LAMA2; (-) strand; PAM type: YTN; PAM sequence: CTC
cgaaagtgctggaattacag

SEQ ID NO: 206621 - DNA, 20 bp, Artificial Sequence
  Description of Artificial Sequence: Synthetic oligonucleotide
  Target: LAMA2; (-) strand; PAM type: YTN; PAM sequence: CTC
agcctccgaaagtgctggaa

SEQ ID NO: 206622 - DNA, 20 bp, Artificial Sequence
  Description of Artificial Sequence: Synthetic oligonucleotide
  Target: LAMA2; (-) strand; PAM type: YTN; PAM sequence: CTG
cctcagcctccgaaagtgct

SEQ ID NO: 206623 - DNA, 20 bp, Artificial Sequence
  Description of Artificial Sequence: Synthetic oligonucleotide
  Target: LAMA2; (-) strand; PAM type: YTN; PAM sequence: CTC
aagtgatccacctgcctcag

SEQ ID NO: 206624 - DNA, 20 bp, Artificial Sequence
  Description of Artificial Sequence: Synthetic oligonucleotide
  Target: LAMA2; (-) strand; PAM type: YTN; PAM sequence: CTG
acctcaagtgatccacctgc

SEQ ID NO: 206625 - DNA, 20 bp, Artificial Sequence
  Description of Artificial Sequence: Synthetic oligonucleotide
  Target: LAMA2; (-) strand; PAM type: YTN; PAM sequence: CTG
gaacccctgacctcaagtga

SEQ ID NO: 206626 - DNA, 20 bp, Artificial Sequence
  Description of Artificial Sequence: Synthetic oligonucleotide
  Target: LAMA2; (-) strand; PAM type: YTN; PAM sequence: CTG
gtctggaacccctgacctca

SEQ ID NO: 206627 - DNA, 20 bp, Artificial Sequence
  Description of Artificial Sequence: Synthetic oligonucleotide
  Target: LAMA2; (-) strand; PAM type: YTN; PAM sequence: TTG
ccaggctggtctggaacccc

SEQ ID NO: 206628 - DNA, 20 bp, Artificial Sequence
  Description of Artificial Sequence: Synthetic oligonucleotide
  Target: LAMA2; (-) strand; PAM type: YTN; PAM sequence: TTT
gccaggctggtctggaaccc

SEQ ID NO: 206629 - DNA, 20 bp, Artificial Sequence
  Description of Artificial Sequence: Synthetic oligonucleotide
  Target: LAMA2; (-) strand; PAM type: YTN; PAM sequence: TTC
accatgtttgccaggctggt

SEQ ID NO: 206630 - DNA, 20 bp, Artificial Sequence
  Description of Artificial Sequence: Synthetic oligonucleotide
  Target: LAMA2; (-) strand; PAM type: YTN; PAM sequence: TTT
caccatgtttgccaggctgg

SEQ ID NO: 206631 - DNA, 20 bp, Artificial Sequence
  Description of Artificial Sequence: Synthetic oligonucleotide
  Target: LAMA2; (-) strand; PAM type: YTN; PAM sequence: TTG
gtagagacagggtttcacca

SEQ ID NO: 206632 - DNA, 20 bp, Artificial Sequence
  Description of Artificial Sequence: Synthetic oligonucleotide
  Target: LAMA2; (-) strand; PAM type: YTN; PAM sequence: TTT
ggtagagacagggtttcacc

SEQ ID NO: 206633 - DNA, 20 bp, Artificial Sequence
  Description of Artificial Sequence: Synthetic oligonucleotide
  Target: LAMA2; (-) strand; PAM type: YTN; PAM sequence: TTT
tggtagagacagggtttcac

SEQ ID NO: 206634 - DNA, 20 bp, Artificial Sequence
  Description of Artificial Sequence: Synthetic oligonucleotide
  Target: LAMA2; (-) strand; PAM type: YTN; PAM sequence: TTT
ttggtagagacagggtttca

SEQ ID NO: 206635 - DNA, 20 bp, Artificial Sequence
  Description of Artificial Sequence: Synthetic oligonucleotide
  Target: LAMA2; (-) strand; PAM type: YTN; PAM sequence: TTG
catttttggtagagacaggg

SEQ ID NO: 206636 - DNA, 20 bp, Artificial Sequence
  Description of Artificial Sequence: Synthetic oligonucleotide
  Target: LAMA2; (-) strand; PAM type: YTN; PAM sequence: TTT
gcatttttggtagagacagg

SEQ ID NO: 206637 - DNA, 20 bp, Artificial Sequence
  Description of Artificial Sequence: Synthetic oligonucleotide
  Target: LAMA2; (-) strand; PAM type: YTN; PAM sequence: TTT
tgcatttttggtagagacag

SEQ ID NO: 206638 - DNA, 20 bp, Artificial Sequence
  Description of Artificial Sequence: Synthetic oligonucleotide
  Target: LAMA2; (-) strand; PAM type: YTN; PAM sequence: TTT
ttgcatttttggtagagaca

SEQ ID NO: 206639 - DNA, 20 bp, Artificial Sequence
  Description of Artificial Sequence: Synthetic oligonucleotide
  Target: LAMA2; (-) strand; PAM type: YTN; PAM sequence: CTG
gccaatttttgcatttttgg

SEQ ID NO: 206640 - DNA, 20 bp, Artificial Sequence
  Description of Artificial Sequence: Synthetic oligonucleotide
  Target: LAMA2; (-) strand; PAM type: YTN; PAM sequence: CTG
ggagtataggcatgtgccac

SEQ ID NO: 206641 - DNA, 20 bp, Artificial Sequence
  Description of Artificial Sequence: Synthetic oligonucleotide
  Target: LAMA2; (-) strand; PAM type: YTN; PAM sequence: CTC
ccgagtagctgggagtatag

SEQ ID NO: 206642 - DNA, 20 bp, Artificial Sequence
  Description of Artificial Sequence: Synthetic oligonucleotide
  Target: LAMA2; (-) strand; PAM type: YTN; PAM sequence: CTC
agcctcccgagtagctggga

SEQ ID NO: 206643 - DNA, 20 bp, Artificial Sequence
  Description of Artificial Sequence: Synthetic oligonucleotide
  Target: LAMA2; (-) strand; PAM type: YTN; PAM sequence: CTA
cctcagcctcccgagtagct

SEQ ID NO: 206644 - DNA, 20 bp, Artificial Sequence
  Description of Artificial Sequence: Synthetic oligonucleotide
  Target: LAMA2; (-) strand; PAM type: YTN; PAM sequence: CTC
ctacctcagcctcccgagta

SEQ ID NO: 206645 - DNA, 20 bp, Artificial Sequence
  Description of Artificial Sequence: Synthetic oligonucleotide
  Target: LAMA2; (-) strand; PAM type: YTN; PAM sequence: TTC
tcctacctcagcctcccgag

SEQ ID NO: 206646 - DNA, 20 bp, Artificial Sequence
  Description of Artificial Sequence: Synthetic oligonucleotide
  Target: LAMA2; (-) strand; PAM type: YTN; PAM sequence: TTC
aagtgattctcctacctcag

SEQ ID NO: 206647 - DNA, 20 bp, Artificial Sequence
  Description of Artificial Sequence: Synthetic oligonucleotide
  Target: LAMA2; (-) strand; PAM type: YTN; PAM sequence: TTC
caggttcaagtgattctcct

SEQ ID NO: 206648 - DNA, 20 bp, Artificial Sequence
  Description of Artificial Sequence: Synthetic oligonucleotide
  Target: LAMA2; (-) strand; PAM type: YTN; PAM sequence: CTT
ccaggttcaagtgattctcc

SEQ ID NO: 206649 - DNA, 20 bp, Artificial Sequence
  Description of Artificial Sequence: Synthetic oligonucleotide
  Target: LAMA2; (-) strand; PAM type: YTN; PAM sequence: CTG
ccttccaggttcaagtgatt

SEQ ID NO: 206650 - DNA, 20 bp, Artificial Sequence
  Description of Artificial Sequence: Synthetic oligonucleotide
  Target: LAMA2; (-) strand; PAM type: YTN; PAM sequence: CTC
tgccttccaggttcaagtga

SEQ ID NO: 206651 - DNA, 20 bp, Artificial Sequence
  Description of Artificial Sequence: Synthetic oligonucleotide
  Target: LAMA2; (-) strand; PAM type: YTN; PAM sequence: CTG
cagcctctgccttccaggtt

SEQ ID NO: 206652 - DNA, 20 bp, Artificial Sequence
  Description of Artificial Sequence: Synthetic oligonucleotide
  Target: LAMA2; (-) strand; PAM type: YTN; PAM sequence: CTC
actgcagcctctgccttcca

SEQ ID NO: 206653 - DNA, 20 bp, Artificial Sequence
  Description of Artificial Sequence: Synthetic oligonucleotide
  Target: LAMA2; (-) strand; PAM type: YTN; PAM sequence: TTG
gctcactgcagcctctgcct

SEQ ID NO: 206654 - DNA, 20 bp, Artificial Sequence
  Description of Artificial Sequence: Synthetic oligonucleotide
  Target: LAMA2; (-) strand; PAM type: YTN; PAM sequence: CTT
ggctcactgcagcctctgcc

SEQ ID NO: 206655 - DNA, 20 bp, Artificial Sequence
  Description of Artificial Sequence: Synthetic oligonucleotide
  Target: LAMA2; (-) strand; PAM type: YTN; PAM sequence: CTG
gagtgcaatggtgcaatctt

SEQ ID NO: 206656 - DNA, 20 bp, Artificial Sequence
  Description of Artificial Sequence: Synthetic oligonucleotide
  Target: LAMA2; (-) strand; PAM type: YTN; PAM sequence: TTG
gccaggctggagtgcaatgg

SEQ ID NO: 206657 - DNA, 20 bp, Artificial Sequence
  Description of Artificial Sequence: Synthetic oligonucleotide
  Target: LAMA2; (-) strand; PAM type: YTN; PAM sequence: CTG
ttggccaggctggagtgcaa

SEQ ID NO: 206658 - DNA, 20 bp, Artificial Sequence
  Description of Artificial Sequence: Synthetic oligonucleotide
  Target: LAMA2; (-) strand; PAM type: YTN; PAM sequence: CTC
tgttggccaggctggagtgc

SEQ ID NO: 206659 - DNA, 20 bp, Artificial Sequence
  Description of Artificial Sequence: Synthetic oligonucleotide
  Target: LAMA2; (-) strand; PAM type: YTN; PAM sequence: CTC
gctctgttggccaggctgga

SEQ ID NO: 206660 - DNA, 20 bp, Artificial Sequence
  Description of Artificial Sequence: Synthetic oligonucleotide
  Target: LAMA2; (-) strand; PAM type: YTN; PAM sequence: TTG
agacagagtctcgctctgtt

SEQ ID NO: 206661 - DNA, 20 bp, Artificial Sequence
  Description of Artificial Sequence: Synthetic oligonucleotide
  Target: LAMA2; (-) strand; PAM type: YTN; PAM sequence: TTT
gagacagagtctcgctctgt

SEQ ID NO: 206662 - DNA, 20 bp, Artificial Sequence
  Description of Artificial Sequence: Synthetic oligonucleotide
  Target: LAMA2; (-) strand; PAM type: YTN; PAM sequence: TTT
tgagacagagtctcgctctg

SEQ ID NO: 206663 - DNA, 20 bp, Artificial Sequence
  Description of Artificial Sequence: Synthetic oligonucleotide
  Target: LAMA2; (-) strand; PAM type: YTN; PAM sequence: CTT
ttgagacagagtctcgctct

SEQ ID NO: 206664 - DNA, 20 bp, Artificial Sequence
  Description of Artificial Sequence: Synthetic oligonucleotide
  Target: LAMA2; (-) strand; PAM type: YTN; PAM sequence: TTC
ttttgagacagagtctcgct

SEQ ID NO: 206665 - DNA, 20 bp, Artificial Sequence
  Description of Artificial Sequence: Synthetic oligonucleotide
  Target: LAMA2; (-) strand; PAM type: YTN; PAM sequence: TTT
cttttgagacagagtctcgc

SEQ ID NO: 206666 - DNA, 20 bp, Artificial Sequence
  Description of Artificial Sequence: Synthetic oligonucleotide
  Target: LAMA2; (-) strand; PAM type: YTN; PAM sequence: TTT
tcttttgagacagagtctcg

SEQ ID NO: 206667 - DNA, 20 bp, Artificial Sequence
  Description of Artificial Sequence: Synthetic oligonucleotide
  Target: LAMA2; (-) strand; PAM type: YTN; PAM sequence: TTT
ttcttttgagacagagtctc

SEQ ID NO: 206668 - DNA, 20 bp, Artificial Sequence
  Description of Artificial Sequence: Synthetic oligonucleotide
  Target: LAMA2; (-) strand; PAM type: YTN; PAM sequence: TTT
tttcttttgagacagagtct

SEQ ID NO: 206669 - DNA, 20 bp, Artificial Sequence
  Description of Artificial Sequence: Synthetic oligonucleotide
  Target: LAMA2; (-) strand; PAM type: YTN; PAM sequence: TTT
ttttcttttgagacagagtc

SEQ ID NO: 206670 - DNA, 20 bp, Artificial Sequence
  Description of Artificial Sequence: Synthetic oligonucleotide
  Target: LAMA2; (-) strand; PAM type: YTN; PAM sequence: TTT
tttttcttttgagacagagt

SEQ ID NO: 206671 - DNA, 20 bp, Artificial Sequence
  Description of Artificial Sequence: Synthetic oligonucleotide
  Target: LAMA2; (-) strand; PAM type: YTN; PAM sequence: TTT
ttttttcttttgagacagag

SEQ ID NO: 206672 - DNA, 20 bp, Artificial Sequence
  Description of Artificial Sequence: Synthetic oligonucleotide
  Target: LAMA2; (-) strand; PAM type: YTN; PAM sequence: CTT
tttttttcttttgagacaga

SEQ ID NO: 206673 - DNA, 20 bp, Artificial Sequence
  Description of Artificial Sequence: Synthetic oligonucleotide
  Target: LAMA2; (-) strand; PAM type: YTN; PAM sequence: TTA
caggtataaacttttttttt

SEQ ID NO: 206674 - DNA, 20 bp, Artificial Sequence
  Description of Artificial Sequence: Synthetic oligonucleotide
  Target: LAMA2; (-) strand; PAM type: YTN; PAM sequence: CTC
attacaggtataaacttttt

SEQ ID NO: 206675 - DNA, 20 bp, Artificial Sequence
  Description of Artificial Sequence: Synthetic oligonucleotide
  Target: LAMA2; (-) strand; PAM type: YTN; PAM sequence: CTC
atctcattacaggtataaac

SEQ ID NO: 206676 - DNA, 20 bp, Artificial Sequence
  Description of Artificial Sequence: Synthetic oligonucleotide
  Target: LAMA2; (-) strand; PAM type: YTN; PAM sequence: TTC
tcatctcattacaggtataa

SEQ ID NO: 206677 - DNA, 20 bp, Artificial Sequence
  Description of Artificial Sequence: Synthetic oligonucleotide
  Target: LAMA2; (-) strand; PAM type: YTN; PAM sequence: CTT
ctcatctcattacaggtata

SEQ ID NO: 206678 - DNA, 20 bp, Artificial Sequence
  Description of Artificial Sequence: Synthetic oligonucleotide
  Target: LAMA2; (-) strand; PAM type: YTN; PAM sequence: CTG
aacttctcatctcattacag

SEQ ID NO: 206679 - DNA, 20 bp, Artificial Sequence
  Description of Artificial Sequence: Synthetic oligonucleotide
  Target: LAMA2; (-) strand; PAM type: YTN; PAM sequence: CTG
gaaaatctgaacttctcatc

SEQ ID NO: 206680 - DNA, 20 bp, Artificial Sequence
  Description of Artificial Sequence: Synthetic oligonucleotide
  Target: LAMA2; (-) strand; PAM type: YTN; PAM sequence: TTA
tacaacacacactggaaaat

SEQ ID NO: 206681 - DNA, 20 bp, Artificial Sequence
  Description of Artificial Sequence: Synthetic oligonucleotide
  Target: LAMA2; (-) strand; PAM type: YTN; PAM sequence: TTT
atacaacacacactggaaaa

SEQ ID NO: 206682 - DNA, 20 bp, Artificial Sequence
  Description of Artificial Sequence: Synthetic oligonucleotide
  Target: LAMA2; (-) strand; PAM type: YTN; PAM sequence: TTC
atttatacaacacacactgg

SEQ ID NO: 206683 - DNA, 20 bp, Artificial Sequence
  Description of Artificial Sequence: Synthetic oligonucleotide
  Target: LAMA2; (-) strand; PAM type: YTN; PAM sequence: CTT
catttatacaacacacactg

SEQ ID NO: 206684 - DNA, 20 bp, Artificial Sequence
  Description of Artificial Sequence: Synthetic oligonucleotide
  Target: LAMA2; (-) strand; PAM type: YTN; PAM sequence: TTG
ggtccttcatttatacaaca

SEQ ID NO: 206685 - DNA, 20 bp, Artificial Sequence
  Description of Artificial Sequence: Synthetic oligonucleotide
  Target: LAMA2; (-) strand; PAM type: YTN; PAM sequence: CTG
agaaaattgggtccttcatt

SEQ ID NO: 206686 - DNA, 20 bp, Artificial Sequence
  Description of Artificial Sequence: Synthetic oligonucleotide
  Target: LAMA2; (-) strand; PAM type: YTN; PAM sequence: CTG
tctgagaaaattgggtcctt

SEQ ID NO: 206687 - DNA, 20 bp, Artificial Sequence
  Description of Artificial Sequence: Synthetic oligonucleotide
  Target: LAMA2; (-) strand; PAM type: YTN; PAM sequence: TTC
tgtctgagaaaattgggtcc

SEQ ID NO: 206688 - DNA, 20 bp, Artificial Sequence
  Description of Artificial Sequence: Synthetic oligonucleotide
  Target: LAMA2; (-) strand; PAM type: YTN; PAM sequence: CTT
ctgtctgagaaaattgggtc

SEQ ID NO: 206689 - DNA, 20 bp, Artificial Sequence
  Description of Artificial Sequence: Synthetic oligonucleotide
  Target: LAMA2; (-) strand; PAM type: YTN; PAM sequence: TTA
tcttctgtctgagaaaattg

SEQ ID NO: 206690 - DNA, 20 bp, Artificial Sequence
  Description of Artificial Sequence: Synthetic oligonucleotide
  Target: LAMA2; (-) strand; PAM type: YTN; PAM sequence: TTT
atcttctgtctgagaaaatt

SEQ ID NO: 206691 - DNA, 20 bp, Artificial Sequence
  Description of Artificial Sequence: Synthetic oligonucleotide
  Target: LAMA2; (-) strand; PAM type: YTN; PAM sequence: TTT
tatcttctgtctgagaaaat

SEQ ID NO: 206692 - DNA, 20 bp, Artificial Sequence
  Description of Artificial Sequence: Synthetic oligonucleotide
  Target: LAMA2; (-) strand; PAM type: YTN; PAM sequence: CTT
ttatcttctgtctgagaaaa

SEQ ID NO: 206693 - DNA, 20 bp, Artificial Sequence
  Description of Artificial Sequence: Synthetic oligonucleotide
  Target: LAMA2; (-) strand; PAM type: YTN; PAM sequence: CTC
cttttatcttctgtctgaga

SEQ ID NO: 206694 - DNA, 20 bp, Artificial Sequence
  Description of Artificial Sequence: Synthetic oligonucleotide
  Target: LAMA2; (-) strand; PAM type: YTN; PAM sequence: CTC
aactccttttatcttctgtc

SEQ ID NO: 206695 - DNA, 20 bp, Artificial Sequence
  Description of Artificial Sequence: Synthetic oligonucleotide
  Target: LAMA2; (-) strand; PAM type: YTN; PAM sequence: TTA
cgaacctcaactccttttat

SEQ ID NO: 206696 - DNA, 20 bp, Artificial Sequence
  Description of Artificial Sequence: Synthetic oligonucleotide
  Target: LAMA2; (-) strand; PAM type: YTN; PAM sequence: CTC
gttacgaacctcaactcctt

SEQ ID NO: 206697 - DNA, 20 bp, Artificial Sequence
  Description of Artificial Sequence: Synthetic oligonucleotide
  Target: LAMA2; (-) strand; PAM type: YTN; PAM sequence: TTA
aaatcacctcgttacgaacc

SEQ ID NO: 206698 - DNA, 20 bp, Artificial Sequence
  Description of Artificial Sequence: Synthetic oligonucleotide
  Target: LAMA2; (-) strand; PAM type: YTN; PAM sequence: CTT
aaaatcacctcgttacgaac

SEQ ID NO: 206699 - DNA, 20 bp, Artificial Sequence
  Description of Artificial Sequence: Synthetic oligonucleotide
  Target: LAMA2; (-) strand; PAM type: YTN; PAM sequence: CTA
tgatccatccttaaaatcac

SEQ ID NO: 206700 - DNA, 20 bp, Artificial Sequence
  Description of Artificial Sequence: Synthetic oligonucleotide
  Target: LAMA2; (-) strand; PAM type: YTN; PAM sequence: TTC
tatgatccatccttaaaatc

SEQ ID NO: 206701 - DNA, 20 bp, Artificial Sequence
  Description of Artificial Sequence: Synthetic oligonucleotide
  Target: LAMA2; (-) strand; PAM type: YTN; PAM sequence: TTG
atgattctatgatccatcct

SEQ ID NO: 206702 - DNA, 20 bp, Artificial Sequence
  Description of Artificial Sequence: Synthetic oligonucleotide
  Target: LAMA2; (-) strand; PAM type: YTN; PAM sequence: CTT
gatgattctatgatccatcc

SEQ ID NO: 206703 - DNA, 20 bp, Artificial Sequence
  Description of Artificial Sequence: Synthetic oligonucleotide
  Target: LAMA2; (-) strand; PAM type: YTN; PAM sequence: CTG
gcttgatgattctatgatcc

SEQ ID NO: 206704 - DNA, 20 bp, Artificial Sequence
  Description of Artificial Sequence: Synthetic oligonucleotide
  Target: LAMA2; (-) strand; PAM type: YTN; PAM sequence: TTC
ctggcttgatgattctatga

SEQ ID NO: 206705 - DNA, 20 bp, Artificial Sequence
  Description of Artificial Sequence: Synthetic oligonucleotide
  Target: LAMA2; (-) strand; PAM type: YTN; PAM sequence: CTT
cctggcttgatgattctatg

SEQ ID NO: 206706 - DNA, 20 bp, Artificial Sequence
  Description of Artificial Sequence: Synthetic oligonucleotide
  Target: LAMA2; (-) strand; PAM type: YTN; PAM sequence: CTC
cttcctggcttgatgattct

SEQ ID NO: 206707 - DNA, 20 bp, Artificial Sequence
  Description of Artificial Sequence: Synthetic oligonucleotide
  Target: LAMA2; (-) strand; PAM type: YTN; PAM sequence: CTC
tccttcctggcttgatgatt

SEQ ID NO: 206708 - DNA, 20 bp, Artificial Sequence
  Description of Artificial Sequence: Synthetic oligonucleotide
  Target: LAMA2; (-) strand; PAM type: YTN; PAM sequence: CTC
tctccttcctggcttgatga

SEQ ID NO: 206709 - DNA, 20 bp, Artificial Sequence
  Description of Artificial Sequence: Synthetic oligonucleotide
  Target: LAMA2; (-) strand; PAM type: YTN; PAM sequence: TTC
actctctccttcctggcttg

SEQ ID NO: 206710 - DNA, 20 bp, Artificial Sequence
  Description of Artificial Sequence: Synthetic oligonucleotide
  Target: LAMA2; (-) strand; PAM type: YTN; PAM sequence: TTT
cactctctccttcctggctt

SEQ ID NO: 206711 - DNA, 20 bp, Artificial Sequence
  Description of Artificial Sequence: Synthetic oligonucleotide
  Target: LAMA2; (-) strand; PAM type: YTN; PAM sequence: TTG
atttcactctctccttcctg

SEQ ID NO: 206712 - DNA, 20 bp, Artificial Sequence
  Description of Artificial Sequence: Synthetic oligonucleotide
  Target: LAMA2; (-) strand; PAM type: YTN; PAM sequence: CTT
gatttcactctctccttcct

SEQ ID NO: 206713 - DNA, 20 bp, Artificial Sequence
  Description of Artificial Sequence: Synthetic oligonucleotide
  Target: LAMA2; (-) strand; PAM type: YTN; PAM sequence: CTC
cttgatttcactctctcctt

SEQ ID NO: 206714 - DNA, 20 bp, Artificial Sequence
  Description of Artificial Sequence: Synthetic oligonucleotide
  Target: LAMA2; (-) strand; PAM type: YTN; PAM sequence: TTC
tccttgatttcactctctcc

SEQ ID NO: 206715 - DNA, 20 bp, Artificial Sequence
  Description of Artificial Sequence: Synthetic oligonucleotide
  Target: LAMA2; (-) strand; PAM type: YTN; PAM sequence: CTT
ctccttgatttcactctctc

SEQ ID NO: 206716 - DNA, 20 bp, Artificial Sequence
  Description of Artificial Sequence: Synthetic oligonucleotide
  Target: LAMA2; (-) strand; PAM type: YTN; PAM sequence: CTA
tccatcaccttctccttgat

SEQ ID NO: 206717 - DNA, 20 bp, Artificial Sequence
  Description of Artificial Sequence: Synthetic oligonucleotide
  Target: LAMA2; (-) strand; PAM type: YTN; PAM sequence: CTC
ctatccatcaccttctcctt

SEQ ID NO: 206718 - DNA, 20 bp, Artificial Sequence
  Description of Artificial Sequence: Synthetic oligonucleotide
  Target: LAMA2; (-) strand; PAM type: YTN; PAM sequence: TTC
tcctatccatcaccttctcc

SEQ ID NO: 206719 - DNA, 20 bp, Artificial Sequence
  Description of Artificial Sequence: Synthetic oligonucleotide
  Target: LAMA2; (-) strand; PAM type: YTN; PAM sequence: TTT
ctcctatccatcaccttctc

SEQ ID NO: 206720 - DNA, 20 bp, Artificial Sequence
  Description of Artificial Sequence: Synthetic oligonucleotide
  Target: LAMA2; (-) strand; PAM type: YTN; PAM sequence: CTT
tctcctatccatcaccttct

SEQ ID NO: 206721 - DNA, 20 bp, Artificial Sequence
  Description of Artificial Sequence: Synthetic oligonucleotide
  Target: LAMA2; (-) strand; PAM type: YTN; PAM sequence: CTC
agggtcctttctcctatcca

SEQ ID NO: 206722 - DNA, 20 bp, Artificial Sequence
  Description of Artificial Sequence: Synthetic oligonucleotide
  Target: LAMA2; (-) strand; PAM type: YTN; PAM sequence: TTA
taataactcagggtcctttc

SEQ ID NO: 206723 - DNA, 20 bp, Artificial Sequence
  Description of Artificial Sequence: Synthetic oligonucleotide
  Target: LAMA2; (-) strand; PAM type: YTN; PAM sequence: CTG
ttataataactcagggtcct

SEQ ID NO: 206724 - DNA, 20 bp, Artificial Sequence
  Description of Artificial Sequence: Synthetic oligonucleotide
  Target: LAMA2; (-) strand; PAM type: YTN; PAM sequence: CTC
tgttataataactcagggtc

SEQ ID NO: 206725 - DNA, 20 bp, Artificial Sequence
  Description of Artificial Sequence: Synthetic oligonucleotide
  Target: LAMA2; (-) strand; PAM type: YTN; PAM sequence: TTG
gactctgttataataactca

SEQ ID NO: 206726 - DNA, 20 bp, Artificial Sequence
  Description of Artificial Sequence: Synthetic oligonucleotide
  Target: LAMA2; (-) strand; PAM type: YTN; PAM sequence: CTT
ggactctgttataataactc

SEQ ID NO: 206727 - DNA, 20 bp, Artificial Sequence
  Description of Artificial Sequence: Synthetic oligonucleotide
  Target: LAMA2; (-) strand; PAM type: YTN; PAM sequence: CTC
ttggactctgttataataac

SEQ ID NO: 206728 - DNA, 20 bp, Artificial Sequence
  Description of Artificial Sequence: Synthetic oligonucleotide
  Target: LAMA2; (-) strand; PAM type: YTN; PAM sequence: CTG
actcttggactctgttataa

SEQ ID NO: 206729 - DNA, 20 bp, Artificial Sequence
  Description of Artificial Sequence: Synthetic oligonucleotide
  Target: LAMA2; (-) strand; PAM type: YTN; PAM sequence: CTC
tgactcttggactctgttat

SEQ ID NO: 206730 - DNA, 20 bp, Artificial Sequence
  Description of Artificial Sequence: Synthetic oligonucleotide
  Target: LAMA2; (-) strand; PAM type: YTN; PAM sequence: CTC
tctgactcttggactctgtt

SEQ ID NO: 206731 - DNA, 20 bp, Artificial Sequence
  Description of Artificial Sequence: Synthetic oligonucleotide
  Target: LAMA2; (-) strand; PAM type: YTN; PAM sequence: CTG
tgcagctctctgactcttgg

SEQ ID NO: 206732 - DNA, 20 bp, Artificial Sequence
  Description of Artificial Sequence: Synthetic oligonucleotide
  Target: LAMA2; (-) strand; PAM type: YTN; PAM sequence: CTG
gcatatcccaccccatctgt

SEQ ID NO: 206733 - DNA, 20 bp, Artificial Sequence
  Description of Artificial Sequence: Synthetic oligonucleotide
  Target: LAMA2; (-) strand; PAM type: YTN; PAM sequence: TTG
acctggcatatcccacccca

SEQ ID NO: 206734 - DNA, 20 bp, Artificial Sequence
  Description of Artificial Sequence: Synthetic oligonucleotide
  Target: LAMA2; (-) strand; PAM type: YTN; PAM sequence: CTT
gacctggcatatcccacccc

SEQ ID NO: 206735 - DNA, 20 bp, Artificial Sequence
  Description of Artificial Sequence: Synthetic oligonucleotide
  Target: LAMA2; (-) strand; PAM type: YTN; PAM sequence: TTC
cttgacctggcatatcccac

SEQ ID NO: 206736 - DNA, 20 bp, Artificial Sequence
  Description of Artificial Sequence: Synthetic oligonucleotide
  Target: LAMA2; (-) strand; PAM type: YTN; PAM sequence: TTT
ccttgacctggcatatccca

SEQ ID NO: 206737 - DNA, 20 bp, Artificial Sequence
  Description of Artificial Sequence: Synthetic oligonucleotide
  Target: LAMA2; (-) strand; PAM type: YTN; PAM sequence: CTT
tccttgacctggcatatccc

SEQ ID NO: 206738 - DNA, 20 bp, Artificial Sequence
  Description of Artificial Sequence: Synthetic oligonucleotide
  Target: LAMA2; (-) strand; PAM type: YTN; PAM sequence: CTC
ccatggccctttccttgacc

SEQ ID NO: 206739 - DNA, 20 bp, Artificial Sequence
  Description of Artificial Sequence: Synthetic oligonucleotide
  Target: LAMA2; (-) strand; PAM type: YTN; PAM sequence: CTC
cgcatcaggcacccactccc

SEQ ID NO: 206740 - DNA, 20 bp, Artificial Sequence
  Description of Artificial Sequence: Synthetic oligonucleotide
  Target: LAMA2; (-) strand; PAM type: YTN; PAM sequence: CTC
tccgcatcaggcacccactc

SEQ ID NO: 206741 - DNA, 20 bp, Artificial Sequence
  Description of Artificial Sequence: Synthetic oligonucleotide
  Target: LAMA2; (-) strand; PAM type: YTN; PAM sequence: CTC
ctctccgcatcaggcaccca

SEQ ID NO: 206742 - DNA, 20 bp, Artificial Sequence
  Description of Artificial Sequence: Synthetic oligonucleotide
  Target: LAMA2; (-) strand; PAM type: YTN; PAM sequence: TTC
ctcctctccgcatcaggcac

SEQ ID NO: 206743 - DNA, 20 bp, Artificial Sequence
  Description of Artificial Sequence: Synthetic oligonucleotide
  Target: LAMA2; (-) strand; PAM type: YTN; PAM sequence: TTT
cctcctctccgcatcaggca

SEQ ID NO: 206744 - DNA, 20 bp, Artificial Sequence
  Description of Artificial Sequence: Synthetic oligonucleotide
  Target: LAMA2; (-) strand; PAM type: YTN; PAM sequence: TTT
tcctcctctccgcatcaggc

SEQ ID NO: 206745 - DNA, 20 bp, Artificial Sequence
  Description of Artificial Sequence: Synthetic oligonucleotide
  Target: LAMA2; (-) strand; PAM type: YTN; PAM sequence: CTT
ttcctcctctccgcatcagg

SEQ ID NO: 206746 - DNA, 20 bp, Artificial Sequence
  Description of Artificial Sequence: Synthetic oligonucleotide
  Target: LAMA2; (-) strand; PAM type: YTN; PAM sequence: CTC
ttttcctcctctccgcatca

SEQ ID NO: 206747 - DNA, 20 bp, Artificial Sequence
  Description of Artificial Sequence: Synthetic oligonucleotide
  Target: LAMA2; (-) strand; PAM type: YTN; PAM sequence: CTG
acctcttttcctcctctccg

SEQ ID NO: 206748 - DNA, 20 bp, Artificial Sequence
  Description of Artificial Sequence: Synthetic oligonucleotide
  Target: LAMA2; (-) strand; PAM type: YTN; PAM sequence: CTC
gctgacctcttttcctcctc

SEQ ID NO: 206749 - DNA, 20 bp, Artificial Sequence
  Description of Artificial Sequence: Synthetic oligonucleotide
  Target: LAMA2; (-) strand; PAM type: YTN; PAM sequence: CTC
ctcgctgacctcttttcctc

SEQ ID NO: 206750 - DNA, 20 bp, Artificial Sequence
  Description of Artificial Sequence: Synthetic oligonucleotide
  Target: LAMA2; (-) strand; PAM type: YTN; PAM sequence: TTA
cctcctcgctgacctctttt

SEQ ID NO: 206751 - DNA, 20 bp, Artificial Sequence
  Description of Artificial Sequence: Synthetic oligonucleotide
  Target: LAMA2; (-) strand; PAM type: YTN; PAM sequence: TTT
acctcctcgctgacctcttt

SEQ ID NO: 206752 - DNA, 20 bp, Artificial Sequence
  Description of Artificial Sequence: Synthetic oligonucleotide
  Target: LAMA2; (-) strand; PAM type: YTN; PAM sequence: CTT
tacctcctcgctgacctctt

SEQ ID NO: 206753 - DNA, 20 bp, Artificial Sequence
  Description of Artificial Sequence: Synthetic oligonucleotide
  Target: LAMA2; (-) strand; PAM type: YTN; PAM sequence: CTC
tttacctcctcgctgacctc

SEQ ID NO: 206754 - DNA, 20 bp, Artificial Sequence
  Description of Artificial Sequence: Synthetic oligonucleotide
  Target: LAMA2; (-) strand; PAM type: YTN; PAM sequence: CTG
tgcccaggctctttacctcc

SEQ ID NO: 206755 - DNA, 20 bp, Artificial Sequence
  Description of Artificial Sequence: Synthetic oligonucleotide
  Target: LAMA2; (-) strand; PAM type: YTN; PAM sequence: CTA
ccaacatgactgtgcccagg

SEQ ID NO: 206756 - DNA, 20 bp, Artificial Sequence
  Description of Artificial Sequence: Synthetic oligonucleotide
  Target: LAMA2; (-) strand; PAM type: YTN; PAM sequence: CTG
taaaatctaccaacatgact

SEQ ID NO: 206757 - DNA, 20 bp, Artificial Sequence
  Description of Artificial Sequence: Synthetic oligonucleotide
  Target: LAMA2; (-) strand; PAM type: YTN; PAM sequence: TTA
tgtaactgtaaaatctacca

SEQ ID NO: 206758 - DNA, 20 bp, Artificial Sequence
  Description of Artificial Sequence: Synthetic oligonucleotide
  Target: LAMA2; (-) strand; PAM type: YTN; PAM sequence: CTT
atgtaactgtaaaatctacc

SEQ ID NO: 206759 - DNA, 20 bp, Artificial Sequence
  Description of Artificial Sequence: Synthetic oligonucleotide
  Target: LAMA2; (-) strand; PAM type: YTN; PAM sequence: CTC
cttatgtaactgtaaaatct

SEQ ID NO: 206760 - DNA, 20 bp, Artificial Sequence
  Description of Artificial Sequence: Synthetic oligonucleotide
  Target: LAMA2; (-) strand; PAM type: YTN; PAM sequence: CTC
tccttatgtaactgtaaaat

SEQ ID NO: 206761 - DNA, 20 bp, Artificial Sequence
  Description of Artificial Sequence: Synthetic oligonucleotide
  Target: LAMA2; (-) strand; PAM type: YTN; PAM sequence: CTA
cctctccttatgtaactgta

SEQ ID NO: 206762 - DNA, 20 bp, Artificial Sequence
  Description of Artificial Sequence: Synthetic oligonucleotide
  Target: LAMA2; (-) strand; PAM type: YTN; PAM sequence: TTC
ctacctctccttatgtaact

SEQ ID NO: 206763 - DNA, 20 bp, Artificial Sequence
  Description of Artificial Sequence: Synthetic oligonucleotide
  Target: LAMA2; (-) strand; PAM type: YTN; PAM sequence: CTT
cctacctctccttatgtaac

SEQ ID NO: 206764 - DNA, 20 bp, Artificial Sequence
  Description of Artificial Sequence: Synthetic oligonucleotide
  Target: LAMA2; (-) strand; PAM type: YTN; PAM sequence: TTC
cttcctacctctccttatgt

SEQ ID NO: 206765 - DNA, 20 bp, Artificial Sequence
  Description of Artificial Sequence: Synthetic oligonucleotide
  Target: LAMA2; (-) strand; PAM type: YTN; PAM sequence: CTT
ccttcctacctctccttatg

SEQ ID NO: 206766 - DNA, 20 bp, Artificial Sequence
  Description of Artificial Sequence: Synthetic oligonucleotide
  Target: LAMA2; (-) strand; PAM type: YTN; PAM sequence: TTC
gccatcttccttcctacctc

SEQ ID NO: 206767 - DNA, 20 bp, Artificial Sequence
  Description of Artificial Sequence: Synthetic oligonucleotide
  Target: LAMA2; (-) strand; PAM type: YTN; PAM sequence: CTG
gttcgccatcttccttccta

SEQ ID NO: 206768 - DNA, 20 bp, Artificial Sequence
  Description of Artificial Sequence: Synthetic oligonucleotide
  Target: LAMA2; (-) strand; PAM type: YTN; PAM sequence: TTC
tggttcgccatcttccttcc

SEQ ID NO: 206769 - DNA, 20 bp, Artificial Sequence
  Description of Artificial Sequence: Synthetic oligonucleotide
  Target: LAMA2; (-) strand; PAM type: YTN; PAM sequence: TTT
ctggttcgccatcttccttc

SEQ ID NO: 206770 - DNA, 20 bp, Artificial Sequence
  Description of Artificial Sequence: Synthetic oligonucleotide
  Target: LAMA2; (-) strand; PAM type: YTN; PAM sequence: CTT
tctggttcgccatcttcctt

SEQ ID NO: 206771 - DNA, 20 bp, Artificial Sequence
  Description of Artificial Sequence: Synthetic oligonucleotide
  Target: LAMA2; (-) strand; PAM type: YTN; PAM sequence: TTA
ctttctggttcgccatcttc

SEQ ID NO: 206772 - DNA, 20 bp, Artificial Sequence
  Description of Artificial Sequence: Synthetic oligonucleotide
  Target: LAMA2; (-) strand; PAM type: YTN; PAM sequence: CTT
actttctggttcgccatctt

SEQ ID NO: 206773 - DNA, 20 bp, Artificial Sequence
  Description of Artificial Sequence: Synthetic oligonucleotide
  Target: LAMA2; (-) strand; PAM type: YTN; PAM sequence: TTA
atgacttactttctggttcg

SEQ ID NO: 206774 - DNA, 20 bp, Artificial Sequence
  Description of Artificial Sequence: Synthetic oligonucleotide
  Target: LAMA2; (-) strand; PAM type: YTN; PAM sequence: TTA
ttaatgacttactttctggt

SEQ ID NO: 206775 - DNA, 20 bp, Artificial Sequence
  Description of Artificial Sequence: Synthetic oligonucleotide
  Target: LAMA2; (-) strand; PAM type: YTN; PAM sequence: TTC
cagccattattaatgactta

SEQ ID NO: 206776 - DNA, 20 bp, Artificial Sequence
  Description of Artificial Sequence: Synthetic oligonucleotide
  Target: LAMA2; (-) strand; PAM type: YTN; PAM sequence: CTT
ccagccattattaatgactt

SEQ ID NO: 206777 - DNA, 20 bp, Artificial Sequence
  Description of Artificial Sequence: Synthetic oligonucleotide
  Target: LAMA2; (-) strand; PAM type: YTN; PAM sequence: CTC
ataaaaccaccttccagcca

SEQ ID NO: 206778 - DNA, 20 bp, Artificial Sequence
  Description of Artificial Sequence: Synthetic oligonucleotide
  Target: LAMA2; (-) strand; PAM type: YTN; PAM sequence: CTG
aaaatccacatccctcataa

SEQ ID NO: 206779 - DNA, 20 bp, Artificial Sequence
  Description of Artificial Sequence: Synthetic oligonucleotide
  Target: LAMA2; (-) strand; PAM type: YTN; PAM sequence: CTC
tgaaaatccacatccctcat

SEQ ID NO: 206780 - DNA, 20 bp, Artificial Sequence
  Description of Artificial Sequence: Synthetic oligonucleotide
  Target: LAMA2; (-) strand; PAM type: YTN; PAM sequence: CTC
tctgaaaatccacatccctc

SEQ ID NO: 206781 - DNA, 20 bp, Artificial Sequence
  Description of Artificial Sequence: Synthetic oligonucleotide
  Target: LAMA2; (-) strand; PAM type: YTN; PAM sequence: TTC
tctctgaaaatccacatccc

SEQ ID NO: 206782 - DNA, 20 bp, Artificial Sequence
  Description of Artificial Sequence: Synthetic oligonucleotide
  Target: LAMA2; (-) strand; PAM type: YTN; PAM sequence: TTT
ctctctgaaaatccacatcc

SEQ ID NO: 206783 - DNA, 20 bp, Artificial Sequence
  Description of Artificial Sequence: Synthetic oligonucleotide
  Target: LAMA2; (-) strand; PAM type: YTN; PAM sequence: CTT
tctctctgaaaatccacatc

SEQ ID NO: 206784 - DNA, 20 bp, Artificial Sequence
  Description of Artificial Sequence: Synthetic oligonucleotide
  Target: LAMA2; (-) strand; PAM type: YTN; PAM sequence: CTC
tttctctctgaaaatccaca

SEQ ID NO: 206785 - DNA, 20 bp, Artificial Sequence
  Description of Artificial Sequence: Synthetic oligonucleotide
  Target: LAMA2; (-) strand; PAM type: YTN; PAM sequence: TTC
tctttctctctgaaaatcca

SEQ ID NO: 206786 - DNA, 20 bp, Artificial Sequence
  Description of Artificial Sequence: Synthetic oligonucleotide
  Target: LAMA2; (-) strand; PAM type: YTN; PAM sequence: TTT
ctctttctctctgaaaatcc

SEQ ID NO: 206787 - DNA, 20 bp, Artificial Sequence
  Description of Artificial Sequence: Synthetic oligonucleotide
  Target: LAMA2; (-) strand; PAM type: YTN; PAM sequence: TTT
tctctttctctctgaaaatc

SEQ ID NO: 206788 - DNA, 20 bp, Artificial Sequence
  Description of Artificial Sequence: Synthetic oligonucleotide
  Target: LAMA2; (-) strand; PAM type: YTN; PAM sequence: TTA
atcagttttctctttctctc

SEQ ID NO: 206789 - DNA, 20 bp, Artificial Sequence
  Description of Artificial Sequence: Synthetic oligonucleotide
  Target: LAMA2; (-) strand; PAM type: YTN; PAM sequence: CTT
aatcagttttctctttctct

SEQ ID NO: 206790 - DNA, 20 bp, Artificial Sequence
  Description of Artificial Sequence: Synthetic oligonucleotide
  Target: LAMA2; (-) strand; PAM type: YTN; PAM sequence: TTC
ttaatcagttttctctttct

SEQ ID NO: 206791 - DNA, 20 bp, Artificial Sequence
  Description of Artificial Sequence: Synthetic oligonucleotide
  Target: LAMA2; (-) strand; PAM type: YTN; PAM sequence: CTT
cttaatcagttttctctttc

SEQ ID NO: 206792 - DNA, 20 bp, Artificial Sequence
  Description of Artificial Sequence: Synthetic oligonucleotide
  Target: LAMA2; (-) strand; PAM type: YTN; PAM sequence: CTA
cttcttaatcagttttctct

SEQ ID NO: 206793 - DNA, 20 bp, Artificial Sequence
  Description of Artificial Sequence: Synthetic oligonucleotide
  Target: LAMA2; (-) strand; PAM type: YTN; PAM sequence: TTG
atgctacttcttaatcagtt

SEQ ID NO: 206794 - DNA, 20 bp, Artificial Sequence
  Description of Artificial Sequence: Synthetic oligonucleotide
  Target: LAMA2; (-) strand; PAM type: YTN; PAM sequence: TTT
gatgctacttcttaatcagt

SEQ ID NO: 206795 - DNA, 20 bp, Artificial Sequence
  Description of Artificial Sequence: Synthetic oligonucleotide
  Target: LAMA2; (-) strand; PAM type: YTN; PAM sequence: CTT
tgatgctacttcttaatcag

SEQ ID NO: 206796 - DNA, 20 bp, Artificial Sequence
  Description of Artificial Sequence: Synthetic oligonucleotide
  Target: LAMA2; (-) strand; PAM type: YTN; PAM sequence: CTC
tttgatgctacttcttaatc

SEQ ID NO: 206797 - DNA, 20 bp, Artificial Sequence
  Description of Artificial Sequence: Synthetic oligonucleotide
  Target: LAMA2; (-) strand; PAM type: YTN; PAM sequence: CTC
ctctttgatgctacttctta

SEQ ID NO: 206798 - DNA, 20 bp, Artificial Sequence
  Description of Artificial Sequence: Synthetic oligonucleotide
  Target: LAMA2; (-) strand; PAM type: YTN; PAM sequence: TTG
ctcctctttgatgctacttc

SEQ ID NO: 206799 - DNA, 20 bp, Artificial Sequence
  Description of Artificial Sequence: Synthetic oligonucleotide
  Target: LAMA2; (-) strand; PAM type: YTN; PAM sequence: TTT
gctcctctttgatgctactt

SEQ ID NO: 206800 - DNA, 20 bp, Artificial Sequence
  Description of Artificial Sequence: Synthetic oligonucleotide
  Target: LAMA2; (-) strand; PAM type: YTN; PAM sequence: CTT
tgctcctctttgatgctact

SEQ ID NO: 206801 - DNA, 20 bp, Artificial Sequence
  Description of Artificial Sequence: Synthetic oligonucleotide
  Target: LAMA2; (-) strand; PAM type: YTN; PAM sequence: TTG
tgcatcaactttgctcctct

SEQ ID NO: 206802 - DNA, 20 bp, Artificial Sequence
  Description of Artificial Sequence: Synthetic oligonucleotide
  Target: LAMA2; (-) strand; PAM type: YTN; PAM sequence: CTA
gagataggttgtgcatcaac

SEQ ID NO: 206803 - DNA, 20 bp, Artificial Sequence
  Description of Artificial Sequence: Synthetic oligonucleotide
  Target: LAMA2; (-) strand; PAM type: YTN; PAM sequence: TTC
aagatctagagataggttgt

SEQ ID NO: 206804 - DNA, 20 bp, Artificial Sequence
  Description of Artificial Sequence: Synthetic oligonucleotide
  Target: LAMA2; (-) strand; PAM type: YTN; PAM sequence: CTT
caagatctagagataggttg

SEQ ID NO: 206805 - DNA, 20 bp, Artificial Sequence
  Description of Artificial Sequence: Synthetic oligonucleotide
  Target: LAMA2; (-) strand; PAM type: YTN; PAM sequence: CTA
taagaccttcaagatctaga

SEQ ID NO: 206806 - DNA, 20 bp, Artificial Sequence
  Description of Artificial Sequence: Synthetic oligonucleotide
  Target: LAMA2; (-) strand; PAM type: YTN; PAM sequence: TTC
tataagaccttcaagatcta

SEQ ID NO: 206807 - DNA, 20 bp, Artificial Sequence
  Description of Artificial Sequence: Synthetic oligonucleotide
  Target: LAMA2; (-) strand; PAM type: YTN; PAM sequence: TTA
gaaacaatattctataagac

SEQ ID NO: 206808 - DNA, 20 bp, Artificial Sequence
  Description of Artificial Sequence: Synthetic oligonucleotide
  Target: LAMA2; (-) strand; PAM type: YTN; PAM sequence: CTT
agaaacaatattctataaga

SEQ ID NO: 206809 - DNA, 20 bp, Artificial Sequence
  Description of Artificial Sequence: Synthetic oligonucleotide
  Target: LAMA2; (-) strand; PAM type: YTN; PAM sequence: CTG
acttagaaacaatattctat

SEQ ID NO: 206810 - DNA, 20 bp, Artificial Sequence
  Description of Artificial Sequence: Synthetic oligonucleotide
  Target: LAMA2; (-) strand; PAM type: YTN; PAM sequence: TTC
tgacttagaaacaatattct

SEQ ID NO: 206811 - DNA, 20 bp, Artificial Sequence
  Description of Artificial Sequence: Synthetic oligonucleotide
  Target: LAMA2; (-) strand; PAM type: YTN; PAM sequence: CTT
ctgacttagaaacaatattc

SEQ ID NO: 206812 - DNA, 20 bp, Artificial Sequence
  Description of Artificial Sequence: Synthetic oligonucleotide
  Target: LAMA2; (-) strand; PAM type: YTN; PAM sequence: CTG
tcatcatacttctgacttag

SEQ ID NO: 206813 - DNA, 20 bp, Artificial Sequence
  Description of Artificial Sequence: Synthetic oligonucleotide
  Target: LAMA2; (-) strand; PAM type: YTN; PAM sequence: CTC
cccctgtcatcatacttctg

SEQ ID NO: 206814 - DNA, 20 bp, Artificial Sequence
  Description of Artificial Sequence: Synthetic oligonucleotide
  Target: LAMA2; (-) strand; PAM type: YTN; PAM sequence: CTC
ctccccctgtcatcatactt

SEQ ID NO: 206815 - DNA, 20 bp, Artificial Sequence
  Description of Artificial Sequence: Synthetic oligonucleotide
  Target: LAMA2; (-) strand; PAM type: YTN; PAM sequence: TTG
gctcctccccctgtcatcat

SEQ ID NO: 206816 - DNA, 20 bp, Artificial Sequence
  Description of Artificial Sequence: Synthetic oligonucleotide
  Target: LAMA2; (-) strand; PAM type: YTN; PAM sequence: CTT
ggctcctccccctgtcatca

SEQ ID NO: 206817 - DNA, 20 bp, Artificial Sequence
  Description of Artificial Sequence: Synthetic oligonucleotide
  Target: LAMA2; (-) strand; PAM type: YTN; PAM sequence: TTC
ggccatcttggctcctcccc

SEQ ID NO: 206818 - DNA, 20 bp, Artificial Sequence
  Description of Artificial Sequence: Synthetic oligonucleotide
  Target: LAMA2; (-) strand; PAM type: YTN; PAM sequence: CTA
ttcggccatcttggctcctc

SEQ ID NO: 206819 - DNA, 20 bp, Artificial Sequence
  Description of Artificial Sequence: Synthetic oligonucleotide
  Target: LAMA2; (-) strand; PAM type: YTN; PAM sequence: TTC
ctattcggccatcttggctc

SEQ ID NO: 206820 - DNA, 20 bp, Artificial Sequence
  Description of Artificial Sequence: Synthetic oligonucleotide
  Target: LAMA2; (-) strand; PAM type: YTN; PAM sequence: CTG
ttcctattcggccatcttgg

SEQ ID NO: 206821 - DNA, 20 bp, Artificial Sequence
  Description of Artificial Sequence: Synthetic oligonucleotide
  Target: LAMA2; (-) strand; PAM type: YTN; PAM sequence: CTG
tagagcggagctgttcctat

SEQ ID NO: 206822 - DNA, 20 bp, Artificial Sequence
  Description of Artificial Sequence: Synthetic oligonucleotide
  Target: LAMA2; (-) strand; PAM type: YTN; PAM sequence: CTG
ggagctgtagagcggagctg

SEQ ID NO: 206823 - DNA, 20 bp, Artificial Sequence
  Description of Artificial Sequence: Synthetic oligonucleotide
  Target: LAMA2; (-) strand; PAM type: YTN; PAM sequence: CTC
acactgggagctgtagagcg

SEQ ID NO: 206824 - DNA, 20 bp, Artificial Sequence
  Description of Artificial Sequence: Synthetic oligonucleotide
  Target: LAMA2; (-) strand; PAM type: YTN; PAM sequence: CTG
cgtcgctcacactgggagct

SEQ ID NO: 206825 - DNA, 20 bp, Artificial Sequence
  Description of Artificial Sequence: Synthetic oligonucleotide
  Target: LAMA2; (-) strand; PAM type: YTN; PAM sequence: TTC
tgcgtcgctcacactgggag

SEQ ID NO: 206826 - DNA, 20 bp, Artificial Sequence
  Description of Artificial Sequence: Synthetic oligonucleotide
  Target: LAMA2; (-) strand; PAM type: YTN; PAM sequence: CTT
ctgcgtcgctcacactggga

SEQ ID NO: 206827 - DNA, 20 bp, Artificial Sequence
  Description of Artificial Sequence: Synthetic oligonucleotide
  Target: LAMA2; (-) strand; PAM type: YTN; PAM sequence: CTC
agatggaaatgcagaaatca

SEQ ID NO: 206828 - DNA, 20 bp, Artificial Sequence
  Description of Artificial Sequence: Synthetic oligonucleotide
  Target: LAMA2; (-) strand; PAM type: YTN; PAM sequence: CTA
gtgagatgaacccggtacct

SEQ ID NO: 206829 - DNA, 20 bp, Artificial Sequence
  Description of Artificial Sequence: Synthetic oligonucleotide
  Target: LAMA2; (-) strand; PAM type: YTN; PAM sequence: CTC
cctagtgagatgaacccggt

SEQ ID NO: 206830 - DNA, 20 bp, Artificial Sequence
  Description of Artificial Sequence: Synthetic oligonucleotide
  Target: LAMA2; (-) strand; PAM type: YTN; PAM sequence: CTG
gcactccctagtgagatgaa

SEQ ID NO: 206831 - DNA, 20 bp, Artificial Sequence
  Description of Artificial Sequence: Synthetic oligonucleotide
  Target: LAMA2; (-) strand; PAM type: YTN; PAM sequence: CTG
tctggcactccctagtgaga

SEQ ID NO: 206832 - DNA, 20 bp, Artificial Sequence
  Description of Artificial Sequence: Synthetic oligonucleotide
  Target: LAMA2; (-) strand; PAM type: YTN; PAM sequence: CTG
cgcccactgtctggcactcc

SEQ ID NO: 206833 - DNA, 20 bp, Artificial Sequence
  Description of Artificial Sequence: Synthetic oligonucleotide
  Target: LAMA2; (-) strand; PAM type: YTN; PAM sequence: CTG
gcctgcgcccactgtctggc

SEQ ID NO: 206834 - DNA, 20 bp, Artificial Sequence
  Description of Artificial Sequence: Synthetic oligonucleotide
  Target: LAMA2; (-) strand; PAM type: YTN; PAM sequence: CTC
gcgcacggtgcgcacacaca

SEQ ID NO: 206835 - DNA, 20 bp, Artificial Sequence
  Description of Artificial Sequence: Synthetic oligonucleotide
  Target: LAMA2; (-) strand; PAM type: YTN; PAM sequence: TTC
ggctcgcgcacggtgcgcac

SEQ ID NO: 206836 - DNA, 20 bp, Artificial Sequence
  Description of Artificial Sequence: Synthetic oligonucleotide
  Target: LAMA2; (-) strand; PAM type: YTN; PAM sequence: CTT
cggctcgcgcacggtgcgca

SEQ ID NO: 206837 - DNA, 20 bp, Artificial Sequence
  Description of Artificial Sequence: Synthetic oligonucleotide
  Target: LAMA2; (-) strand; PAM type: YTN; PAM sequence: CTG
cttcggctcgcgcacggtgc

SEQ ID NO: 206838 - DNA, 20 bp, Artificial Sequence
  Description of Artificial Sequence: Synthetic oligonucleotide
  Target: LAMA2; (-) strand; PAM type: YTN; PAM sequence: CTC
gccctgcttcggctcgcgca

SEQ ID NO: 206839 - DNA, 20 bp, Artificial Sequence
  Description of Artificial Sequence: Synthetic oligonucleotide
  Target: LAMA2; (-) strand; PAM type: YTN; PAM sequence: TTC
ccaggtgaggcaatgcctcg

SEQ ID NO: 206840 - DNA, 20 bp, Artificial Sequence
  Description of Artificial Sequence: Synthetic oligonucleotide
  Target: LAMA2; (-) strand; PAM type: YTN; PAM sequence: CTT
cccaggtgaggcaatgcctc

SEQ ID NO: 206841 - DNA, 20 bp, Artificial Sequence
  Description of Artificial Sequence: Synthetic oligonucleotide
  Target: LAMA2; (-) strand; PAM type: YTN; PAM sequence: TTG
cgcttcccaggtgaggcaat

SEQ ID NO: 206842 - DNA, 20 bp, Artificial Sequence
  Description of Artificial Sequence: Synthetic oligonucleotide
  Target: LAMA2; (-) strand; PAM type: YTN; PAM sequence: CTT
gcgcttcccaggtgaggcaa

SEQ ID NO: 206843 - DNA, 20 bp, Artificial Sequence
  Description of Artificial Sequence: Synthetic oligonucleotide
  Target: LAMA2; (-) strand; PAM type: YTN; PAM sequence: CTG
accccttgcgcttcccaggt

SEQ ID NO: 206844 - DNA, 20 bp, Artificial Sequence
  Description of Artificial Sequence: Synthetic oligonucleotide
  Target: LAMA2; (-) strand; PAM type: YTN; PAM sequence: CTC
cctgaccccttgcgcttccc

SEQ ID NO: 206845 - DNA, 20 bp, Artificial Sequence
  Description of Artificial Sequence: Synthetic oligonucleotide
  Target: LAMA2; (-) strand; PAM type: YTN; PAM sequence: CTC
ggaaagggaactccctgacc

SEQ ID NO: 206846 - DNA, 20 bp, Artificial Sequence
  Description of Artificial Sequence: Synthetic oligonucleotide
  Target: LAMA2; (-) strand; PAM type: YTN; PAM sequence: TTG
actcggaaagggaactccct

SEQ ID NO: 206847 - DNA, 20 bp, Artificial Sequence
  Description of Artificial Sequence: Synthetic oligonucleotide
  Target: LAMA2; (-) strand; PAM type: YTN; PAM sequence: TTT
gactcggaaagggaactccc

SEQ ID NO: 206848 - DNA, 20 bp, Artificial Sequence
  Description of Artificial Sequence: Synthetic oligonucleotide
  Target: LAMA2; (-) strand; PAM type: YTN; PAM sequence: CTT
tgactcggaaagggaactcc

SEQ ID NO: 206849 - DNA, 20 bp, Artificial Sequence
  Description of Artificial Sequence: Synthetic oligonucleotide
  Target: LAMA2; (-) strand; PAM type: YTN; PAM sequence: TTC
tttgactcggaaagggaact

SEQ ID NO: 206850 - DNA, 20 bp, Artificial Sequence
  Description of Artificial Sequence: Synthetic oligonucleotide
  Target: LAMA2; (-) strand; PAM type: YTN; PAM sequence: TTT
ctttgactcggaaagggaac

SEQ ID NO: 206851 - DNA, 20 bp, Artificial Sequence
  Description of Artificial Sequence: Synthetic oligonucleotide
  Target: LAMA2; (-) strand; PAM type: YTN; PAM sequence: CTT
tctttgactcggaaagggaa

SEQ ID NO: 206852 - DNA, 20 bp, Artificial Sequence
  Description of Artificial Sequence: Synthetic oligonucleotide
  Target: LAMA2; (-) strand; PAM type: YTN; PAM sequence: TTC
caggtgcgtccgtcacccct

SEQ ID NO: 206853 - DNA, 20 bp, Artificial Sequence
  Description of Artificial Sequence: Synthetic oligonucleotide
  Target: LAMA2; (-) strand; PAM type: YTN; PAM sequence: TTT
ccaggtgcgtccgtcacccc

SEQ ID NO: 206854 - DNA, 20 bp, Artificial Sequence
  Description of Artificial Sequence: Synthetic oligonucleotide
  Target: LAMA2; (-) strand; PAM type: YTN; PAM sequence: TTT
tccaggtgcgtccgtcaccc

SEQ ID NO: 206855 - DNA, 20 bp, Artificial Sequence
  Description of Artificial Sequence: Synthetic oligonucleotide
  Target: LAMA2; (-) strand; PAM type: YTN; PAM sequence: TTC
gggtgggagtgacccgattt

SEQ ID NO: 206856 - DNA, 20 bp, Artificial Sequence
  Description of Artificial Sequence: Synthetic oligonucleotide
  Target: LAMA2; (-) strand; PAM type: YTN; PAM sequence: CTG
aaaagcgcaatattcgggtg

SEQ ID NO: 206857 - DNA, 20 bp, Artificial Sequence
  Description of Artificial Sequence: Synthetic oligonucleotide
  Target: LAMA2; (-) strand; PAM type: YTN; PAM sequence: TTA
agccggtctgaaaagcgcaa

SEQ ID NO: 206858 - DNA, 20 bp, Artificial Sequence
  Description of Artificial Sequence: Synthetic oligonucleotide
  Target: LAMA2; (-) strand; PAM type: YTN; PAM sequence: CTT
aagccggtctgaaaagcgca

SEQ ID NO: 206859 - DNA, 20 bp, Artificial Sequence
  Description of Artificial Sequence: Synthetic oligonucleotide
  Target: LAMA2; (-) strand; PAM type: YTN; PAM sequence: TTC
ttaagccggtctgaaaagcg

SEQ ID NO: 206860 - DNA, 20 bp, Artificial Sequence
  Description of Artificial Sequence: Synthetic oligonucleotide
  Target: LAMA2; (-) strand; PAM type: YTN; PAM sequence: TTT
cttaagccggtctgaaaagc

SEQ ID NO: 206861 - DNA, 20 bp, Artificial Sequence
  Description of Artificial Sequence: Synthetic oligonucleotide
  Target: LAMA2; (-) strand; PAM type: YTN; PAM sequence: CTC
gtggtgcgccgtttcttaag

SEQ ID NO: 206862 - DNA, 20 bp, Artificial Sequence
  Description of Artificial Sequence: Synthetic oligonucleotide
  Target: LAMA2; (-) strand; PAM type: YTN; PAM sequence: CTC
cgagccaggtgtgggatata

SEQ ID NO: 206863 - DNA, 20 bp, Artificial Sequence
  Description of Artificial Sequence: Synthetic oligonucleotide
  Target: LAMA2; (-) strand; PAM type: YTN; PAM sequence: TTC
cgtgggcgtaggaccctccg

SEQ ID NO: 206864 - DNA, 20 bp, Artificial Sequence
  Description of Artificial Sequence: Synthetic oligonucleotide
  Target: LAMA2; (-) strand; PAM type: YTN; PAM sequence: CTA
gcaatcagcgagattccgtg

SEQ ID NO: 206865 - DNA, 20 bp, Artificial Sequence
  Description of Artificial Sequence: Synthetic oligonucleotide
  Target: LAMA2; (-) strand; PAM type: YTN; PAM sequence: CTG
tgctagcaatcagcgagatt

SEQ ID NO: 206866 - DNA, 20 bp, Artificial Sequence
  Description of Artificial Sequence: Synthetic oligonucleotide
  Target: LAMA2; (-) strand; PAM type: YTN; PAM sequence: CTG
ctgtgctagcaatcagcgag

SEQ ID NO: 206867 - DNA, 20 bp, Artificial Sequence
  Description of Artificial Sequence: Synthetic oligonucleotide
  Target: LAMA2; (-) strand; PAM type: YTN; PAM sequence: CTC
agactgctgtgctagcaatc

SEQ ID NO: 206868 - DNA, 20 bp, Artificial Sequence
  Description of Artificial Sequence: Synthetic oligonucleotide
  Target: LAMA2; (-) strand; PAM type: YTN; PAM sequence: TTG
atctcagactgctgtgctag

SEQ ID NO: 206869 - DNA, 20 bp, Artificial Sequence
  Description of Artificial Sequence: Synthetic oligonucleotide
  Target: LAMA2; (-) strand; PAM type: YTN; PAM sequence: TTT
gatctcagactgctgtgcta

SEQ ID NO: 206870 - DNA, 20 bp, Artificial Sequence
  Description of Artificial Sequence: Synthetic oligonucleotide
  Target: LAMA2; (-) strand; PAM type: YTN; PAM sequence: TTG
cagtttgatctcagactgct

SEQ ID NO: 206871 - DNA, 20 bp, Artificial Sequence
  Description of Artificial Sequence: Synthetic oligonucleotide
  Target: LAMA2; (-) strand; PAM type: YTN; PAM sequence: CTT
gcagtttgatctcagactgc

SEQ ID NO: 206872 - DNA, 20 bp, Artificial Sequence
  Description of Artificial Sequence: Synthetic oligonucleotide
  Target: LAMA2; (-) strand; PAM type: YTN; PAM sequence: TTG
ccgccttgcagtttgatctc

SEQ ID NO: 206873 - DNA, 20 bp, Artificial Sequence
  Description of Artificial Sequence: Synthetic oligonucleotide
  Target: LAMA2; (-) strand; PAM type: YTN; PAM sequence: CTC
gttgccgccttgcagtttga

SEQ ID NO: 206874 - DNA, 20 bp, Artificial Sequence
  Description of Artificial Sequence: Synthetic oligonucleotide
  Target: LAMA2; (-) strand; PAM type: YTN; PAM sequence: CTC
ccccagcctcgttgccgcct

SEQ ID NO: 206875 - DNA, 20 bp, Artificial Sequence
  Description of Artificial Sequence: Synthetic oligonucleotide
  Target: LAMA2; (-) strand; PAM type: YTN; PAM sequence: CTG
ggcaatggcgggcgcccctc

SEQ ID NO: 206876 - DNA, 20 bp, Artificial Sequence
  Description of Artificial Sequence: Synthetic oligonucleotide
  Target: LAMA2; (-) strand; PAM type: YTN; PAM sequence: CTA
agcaagcctgggcaatggcg

SEQ ID NO: 206877 - DNA, 20 bp, Artificial Sequence
  Description of Artificial Sequence: Synthetic oligonucleotide
  Target: LAMA2; (-) strand; PAM type: YTN; PAM sequence: TTA
cctaagcaagcctgggcaat

SEQ ID NO: 206878 - DNA, 20 bp, Artificial Sequence
  Description of Artificial Sequence: Synthetic oligonucleotide
  Target: LAMA2; (-) strand; PAM type: YTN; PAM sequence: TTT
acctaagcaagcctgggcaa

SEQ ID NO: 206879 - DNA, 20 bp, Artificial Sequence
  Description of Artificial Sequence: Synthetic oligonucleotide
  Target: LAMA2; (-) strand; PAM type: YTN; PAM sequence: TTG
tttacctaagcaagcctggg

SEQ ID NO: 206880 - DNA, 20 bp, Artificial Sequence
  Description of Artificial Sequence: Synthetic oligonucleotide
  Target: LAMA2; (-) strand; PAM type: YTN; PAM sequence: TTT
gtttacctaagcaagcctgg

SEQ ID NO: 206881 - DNA, 20 bp, Artificial Sequence
  Description of Artificial Sequence: Synthetic oligonucleotide
  Target: LAMA2; (-) strand; PAM type: YTN; PAM sequence: CTT
tgtttacctaagcaagcctg

SEQ ID NO: 206882 - DNA, 20 bp, Artificial Sequence
  Description of Artificial Sequence: Synthetic oligonucleotide
  Target: LAMA2; (-) strand; PAM type: YTN; PAM sequence: CTG
ctttgtttacctaagcaagc

SEQ ID NO: 206883 - DNA, 20 bp, Artificial Sequence
  Description of Artificial Sequence: Synthetic oligonucleotide
  Target: LAMA2; (-) strand; PAM type: YTN; PAM sequence: TTC
ccggctgctttgtttaccta

SEQ ID NO: 206884 - DNA, 20 bp, Artificial Sequence
  Description of Artificial Sequence: Synthetic oligonucleotide
  Target: LAMA2; (-) strand; PAM type: YTN; PAM sequence: CTT
cccggctgctttgtttacct

SEQ ID NO: 206885 - DNA, 20 bp, Artificial Sequence
  Description of Artificial Sequence: Synthetic oligonucleotide
  Target: LAMA2; (-) strand; PAM type: YTN; PAM sequence: TTC
gagcttcccggctgctttgt

SEQ ID NO: 206886 - DNA, 20 bp, Artificial Sequence
  Description of Artificial Sequence: Synthetic oligonucleotide
  Target: LAMA2; (-) strand; PAM type: YTN; PAM sequence: CTC
cacccagttcgagcttcccg

SEQ ID NO: 206887 - DNA, 20 bp, Artificial Sequence
  Description of Artificial Sequence: Synthetic oligonucleotide
  Target: LAMA2; (-) strand; PAM type: YTN; PAM sequence: CTG
tggtgggctccacccagttc

SEQ ID NO: 206888 - DNA, 20 bp, Artificial Sequence
  Description of Artificial Sequence: Synthetic oligonucleotide
  Target: LAMA2; (-) strand; PAM type: YTN; PAM sequence: TTG
agctgtggtgggctccaccc

SEQ ID NO: 206889 - DNA, 20 bp, Artificial Sequence
  Description of Artificial Sequence: Synthetic oligonucleotide
  Target: LAMA2; (-) strand; PAM type: YTN; PAM sequence: CTT
gagctgtggtgggctccacc

SEQ ID NO: 206890 - DNA, 20 bp, Artificial Sequence
  Description of Artificial Sequence: Synthetic oligonucleotide
  Target: LAMA2; (-) strand; PAM type: YTN; PAM sequence: CTC
cttgagctgtggtgggctcc

SEQ ID NO: 206891 - DNA, 20 bp, Artificial Sequence
  Description of Artificial Sequence: Synthetic oligonucleotide
  Target: LAMA2; (-) strand; PAM type: YTN; PAM sequence: CTA
cagaggcaggcaggcctcct

SEQ ID NO: 206892 - DNA, 20 bp, Artificial Sequence
  Description of Artificial Sequence: Synthetic oligonucleotide
  Target: LAMA2; (-) strand; PAM type: YTN; PAM sequence: CTG
cccccagaggtggagcctac

SEQ ID NO: 206893 - DNA, 20 bp, Artificial Sequence
  Description of Artificial Sequence: Synthetic oligonucleotide
  Target: LAMA2; (-) strand; PAM type: YTN; PAM sequence: CTG
tgccctgcccccagaggtgg

SEQ ID NO: 206894 - DNA, 20 bp, Artificial Sequence
  Description of Artificial Sequence: Synthetic oligonucleotide
  Target: LAMA2; (-) strand; PAM type: YTN; PAM sequence: TTG
tctgtgccctgcccccagag

SEQ ID NO: 206895 - DNA, 20 bp, Artificial Sequence
  Description of Artificial Sequence: Synthetic oligonucleotide
  Target: LAMA2; (-) strand; PAM type: YTN; PAM sequence: TTT
gtctgtgccctgcccccaga

SEQ ID NO: 206896 - DNA, 20 bp, Artificial Sequence
  Description of Artificial Sequence: Synthetic oligonucleotide
  Target: LAMA2; (-) strand; PAM type: YTN; PAM sequence: TTG
tttgtctgtgccctgccccc

SEQ ID NO: 206897 - DNA, 20 bp, Artificial Sequence
  Description of Artificial Sequence: Synthetic oligonucleotide
  Target: LAMA2; (-) strand; PAM type: YTN; PAM sequence: TTT
gtttgtctgtgccctgcccc

SEQ ID NO: 206898 - DNA, 20 bp, Artificial Sequence
  Description of Artificial Sequence: Synthetic oligonucleotide
  Target: LAMA2; (-) strand; PAM type: YTN; PAM sequence: TTT
tgtttgtctgtgccctgccc

SEQ ID NO: 206899 - DNA, 20 bp, Artificial Sequence
  Description of Artificial Sequence: Synthetic oligonucleotide
  Target: LAMA2; (-) strand; PAM type: YTN; PAM sequence: TTT
ttgtttgtctgtgccctgcc

SEQ ID NO: 206900 - DNA, 20 bp, Artificial Sequence
  Description of Artificial Sequence: Synthetic oligonucleotide
  Target: LAMA2; (-) strand; PAM type: YTN; PAM sequence: CTT
tttgtttgtctgtgccctgc

SEQ ID NO: 206901 - DNA, 20 bp, Artificial Sequence
  Description of Artificial Sequence: Synthetic oligonucleotide
  Target: LAMA2; (-) strand; PAM type: YTN; PAM sequence: CTG
tctttttgtttgtctgtgcc

SEQ ID NO: 206902 - DNA, 20 bp, Artificial Sequence
  Description of Artificial Sequence: Synthetic oligonucleotide
  Target: LAMA2; (-) strand; PAM type: YTN; PAM sequence: CTG
ctgtctttttgtttgtctgt

SEQ ID NO: 206903 - DNA, 20 bp, Artificial Sequence
  Description of Artificial Sequence: Synthetic oligonucleotide
  Target: LAMA2; (-) strand; PAM type: YTN; PAM sequence: TTA
ctgctgtctttttgtttgtc

SEQ ID NO: 206904 - DNA, 20 bp, Artificial Sequence
  Description of Artificial Sequence: Synthetic oligonucleotide
  Target: LAMA2; (-) strand; PAM type: YTN; PAM sequence: CTG
cagaggttactgctgtcttt

SEQ ID NO: 206905 - DNA, 20 bp, Artificial Sequence
  Description of Artificial Sequence: Synthetic oligonucleotide
  Target: LAMA2; (-) strand; PAM type: YTN; PAM sequence: TTA
agtctgcagaggttactgct

SEQ ID NO: 206906 - DNA, 20 bp, Artificial Sequence
  Description of Artificial Sequence: Synthetic oligonucleotide
  Target: LAMA2; (-) strand; PAM type: YTN; PAM sequence: CTT
aagtctgcagaggttactgc

SEQ ID NO: 206907 - DNA, 20 bp, Artificial Sequence
  Description of Artificial Sequence: Synthetic oligonucleotide
  Target: LAMA2; (-) strand; PAM type: YTN; PAM sequence: CTG
tcagacagggacacttaagt

SEQ ID NO: 206908 - DNA, 20 bp, Artificial Sequence
  Description of Artificial Sequence: Synthetic oligonucleotide
  Target: LAMA2; (-) strand; PAM type: YTN; PAM sequence: TTC
aaagctgtcagacagggaca

SEQ ID NO: 206909 - DNA, 20 bp, Artificial Sequence
  Description of Artificial Sequence: Synthetic oligonucleotide
  Target: LAMA2; (-) strand; PAM type: YTN; PAM sequence: CTT
caaagctgtcagacagggac

SEQ ID NO: 206910 - DNA, 20 bp, Artificial Sequence
  Description of Artificial Sequence: Synthetic oligonucleotide
  Target: LAMA2; (-) strand; PAM type: YTN; PAM sequence: CTC
ttcaaagctgtcagacaggg

SEQ ID NO: 206911 - DNA, 20 bp, Artificial Sequence
  Description of Artificial Sequence: Synthetic oligonucleotide
  Target: LAMA2; (-) strand; PAM type: YTN; PAM sequence: CTC
tcttcaaagctgtcagacag

SEQ ID NO: 206912 - DNA, 20 bp, Artificial Sequence
  Description of Artificial Sequence: Synthetic oligonucleotide
  Target: LAMA2; (-) strand; PAM type: YTN; PAM sequence: CTG
ctctcttcaaagctgtcaga

SEQ ID NO: 206913 - DNA, 20 bp, Artificial Sequence
  Description of Artificial Sequence: Synthetic oligonucleotide
  Target: LAMA2; (-) strand; PAM type: YTN; PAM sequence: CTG
ggagaaccactgctctcttc

SEQ ID NO: 206914 - DNA, 20 bp, Artificial Sequence
  Description of Artificial Sequence: Synthetic oligonucleotide
  Target: LAMA2; (-) strand; PAM type: YTN; PAM sequence: CTG
cgtactgggagaaccactgc

SEQ ID NO: 206915 - DNA, 20 bp, Artificial Sequence
  Description of Artificial Sequence: Synthetic oligonucleotide
  Target: LAMA2; (-) strand; PAM type: YTN; PAM sequence: CTC
cagctgcgtactgggagaac

SEQ ID NO: 206916 - DNA, 20 bp, Artificial Sequence
  Description of Artificial Sequence: Synthetic oligonucleotide
  Target: LAMA2; (-) strand; PAM type: YTN; PAM sequence: CTC
agatctccagctgcgtactg

SEQ ID NO: 206917 - DNA, 20 bp, Artificial Sequence
  Description of Artificial Sequence: Synthetic oligonucleotide
  Target: LAMA2; (-) strand; PAM type: YTN; PAM sequence: TTC
tcagatctccagctgcgtac

SEQ ID NO: 206918 - DNA, 20 bp, Artificial Sequence
  Description of Artificial Sequence: Synthetic oligonucleotide
  Target: LAMA2; (-) strand; PAM type: YTN; PAM sequence: CTG
cccattctcagatctccagc

SEQ ID NO: 206919 - DNA, 20 bp, Artificial Sequence
  Description of Artificial Sequence: Synthetic oligonucleotide
  Target: LAMA2; (-) strand; PAM type: YTN; PAM sequence: TTG
aggaggcagtctgcccattc

SEQ ID NO: 206920 - DNA, 20 bp, Artificial Sequence
  Description of Artificial Sequence: Synthetic oligonucleotide
  Target: LAMA2; (-) strand; PAM type: YTN; PAM sequence: CTT
gaggaggcagtctgcccatt

SEQ ID NO: 206921 - DNA, 20 bp, Artificial Sequence
  Description of Artificial Sequence: Synthetic oligonucleotide
  Target: LAMA2; (-) strand; PAM type: YTN; PAM sequence: CTC
gggggtcaggagtcagggac

SEQ ID NO: 206922 - DNA, 20 bp, Artificial Sequence
  Description of Artificial Sequence: Synthetic oligonucleotide
  Target: LAMA2; (-) strand; PAM type: YTN; PAM sequence: CTG
ctcgggggtcaggagtcagg

SEQ ID NO: 206923 - DNA, 20 bp, Artificial Sequence
  Description of Artificial Sequence: Synthetic oligonucleotide
  Target: LAMA2; (-) strand; PAM type: YTN; PAM sequence: TTA
ggctgctcgggggtcaggag

SEQ ID NO: 206924 - DNA, 20 bp, Artificial Sequence
  Description of Artificial Sequence: Synthetic oligonucleotide
  Target: LAMA2; (-) strand; PAM type: YTN; PAM sequence: CTC
ccagttaggctgctcggggg

SEQ ID NO: 206925 - DNA, 20 bp, Artificial Sequence
  Description of Artificial Sequence: Synthetic oligonucleotide
  Target: LAMA2; (-) strand; PAM type: YTN; PAM sequence: CTG
gggggtgcctcccagttagg

SEQ ID NO: 206926 - DNA, 20 bp, Artificial Sequence
  Description of Artificial Sequence: Synthetic oligonucleotide
  Target: LAMA2; (-) strand; PAM type: YTN; PAM sequence: CTG
ctggggggtgcctcccagtt

SEQ ID NO: 206927 - DNA, 20 bp, Artificial Sequence
  Description of Artificial Sequence: Synthetic oligonucleotide
  Target: LAMA2; (-) strand; PAM type: YTN; PAM sequence: CTG
ccgtgtgaggtgtcagtgtg

SEQ ID NO: 206928 - DNA, 20 bp, Artificial Sequence
  Description of Artificial Sequence: Synthetic oligonucleotide
  Target: LAMA2; (-) strand; PAM type: YTN; PAM sequence: TTG
gaataccctgccgtgtgagg

SEQ ID NO: 206929 - DNA, 20 bp, Artificial Sequence
  Description of Artificial Sequence: Synthetic oligonucleotide
  Target: LAMA2; (-) strand; PAM type: YTN; PAM sequence: CTG
ttggaataccctgccgtgtg

SEQ ID NO: 206930 - DNA, 20 bp, Artificial Sequence
  Description of Artificial Sequence: Synthetic oligonucleotide
  Target: LAMA2; (-) strand; PAM type: YTN; PAM sequence: CTG
caggtctgttggaataccct

SEQ ID NO: 206931 - DNA, 20 bp, Artificial Sequence
  Description of Artificial Sequence: Synthetic oligonucleotide
  Target: LAMA2; (-) strand; PAM type: YTN; PAM sequence: CTC
agctgcaggtctgttggaat

SEQ ID NO: 206932 - DNA, 20 bp, Artificial Sequence
  Description of Artificial Sequence: Synthetic oligonucleotide
  Target: LAMA2; (-) strand; PAM type: YTN; PAM sequence: CTA
acagacaggaccctcagctg

SEQ ID NO: 206933 - DNA, 20 bp, Artificial Sequence
  Description of Artificial Sequence: Synthetic oligonucleotide
  Target: LAMA2; (-) strand; PAM type: YTN; PAM sequence: TTC
taacagacaggaccctcagc

SEQ ID NO: 206934 - DNA, 20 bp, Artificial Sequence
  Description of Artificial Sequence: Synthetic oligonucleotide
  Target: LAMA2; (-) strand; PAM type: YTN; PAM sequence: CTT
ctaacagacaggaccctcag

SEQ ID NO: 206935 - DNA, 20 bp, Artificial Sequence
  Description of Artificial Sequence: Synthetic oligonucleotide
  Target: LAMA2; (-) strand; PAM type: YTN; PAM sequence: TTC
cttctaacagacaggaccct

SEQ ID NO: 206936 - DNA, 20 bp, Artificial Sequence
  Description of Artificial Sequence: Synthetic oligonucleotide
  Target: LAMA2; (-) strand; PAM type: YTN; PAM sequence: TTT
ccttctaacagacaggaccc

SEQ ID NO: 206937 - DNA, 20 bp, Artificial Sequence
  Description of Artificial Sequence: Synthetic oligonucleotide
  Target: LAMA2; (-) strand; PAM type: YTN; PAM sequence: TTT
tccttctaacagacaggacc

SEQ ID NO: 206938 - DNA, 20 bp, Artificial Sequence
  Description of Artificial Sequence: Synthetic oligonucleotide
  Target: LAMA2; (-) strand; PAM type: YTN; PAM sequence: TTA
gttttccttctaacagacag

SEQ ID NO: 206939 - DNA, 20 bp, Artificial Sequence
  Description of Artificial Sequence: Synthetic oligonucleotide
  Target: LAMA2; (-) strand; PAM type: YTN; PAM sequence: TTG
ttagttttccttctaacaga

SEQ ID NO: 206940 - DNA, 20 bp, Artificial Sequence
  Description of Artificial Sequence: Synthetic oligonucleotide
  Target: LAMA2; (-) strand; PAM type: YTN; PAM sequence: CTG
gttgttagttttccttctaa

SEQ ID NO: 206941 - DNA, 20 bp, Artificial Sequence
  Description of Artificial Sequence: Synthetic oligonucleotide
  Target: LAMA2; (-) strand; PAM type: YTN; PAM sequence: TTC
tggttgttagttttccttct

SEQ ID NO: 206942 - DNA, 20 bp, Artificial Sequence
  Description of Artificial Sequence: Synthetic oligonucleotide
  Target: LAMA2; (-) strand; PAM type: YTN; PAM sequence: TTT
ctggttgttagttttccttc

SEQ ID NO: 206943 - DNA, 20 bp, Artificial Sequence
  Description of Artificial Sequence: Synthetic oligonucleotide
  Target: LAMA2; (-) strand; PAM type: YTN; PAM sequence: CTT
tctggttgttagttttcctt

SEQ ID NO: 206944 - DNA, 20 bp, Artificial Sequence
  Description of Artificial Sequence: Synthetic oligonucleotide
  Target: LAMA2; (-) strand; PAM type: YTN; PAM sequence: TTC
ggtgtagatgtcctttctgg

SEQ ID NO: 206945 - DNA, 20 bp, Artificial Sequence
  Description of Artificial Sequence: Synthetic oligonucleotide
  Target: LAMA2; (-) strand; PAM type: YTN; PAM sequence: TTT
cggtgtagatgtcctttctg

SEQ ID NO: 206946 - DNA, 20 bp, Artificial Sequence
  Description of Artificial Sequence: Synthetic oligonucleotide
  Target: LAMA2; (-) strand; PAM type: YTN; PAM sequence: TTT
tcggtgtagatgtcctttct

SEQ ID NO: 206947 - DNA, 20 bp, Artificial Sequence
  Description of Artificial Sequence: Synthetic oligonucleotide
  Target: LAMA2; (-) strand; PAM type: YTN; PAM sequence: TTG
atgatggtgatgtacagatg

SEQ ID NO: 206948 - DNA, 20 bp, Artificial Sequence
  Description of Artificial Sequence: Synthetic oligonucleotide
  Target: LAMA2; (-) strand; PAM type: YTN; PAM sequence: TTT
gatgatggtgatgtacagat

SEQ ID NO: 206949 - DNA, 20 bp, Artificial Sequence
  Description of Artificial Sequence: Synthetic oligonucleotide
  Target: LAMA2; (-) strand; PAM type: YTN; PAM sequence: CTT
tgatgatggtgatgtacaga

SEQ ID NO: 206950 - DNA, 20 bp, Artificial Sequence
  Description of Artificial Sequence: Synthetic oligonucleotide
  Target: LAMA2; (-) strand; PAM type: YTN; PAM sequence: TTG
gtctttgatgatggtgatgt

SEQ ID NO: 206951 - DNA, 20 bp, Artificial Sequence
  Description of Artificial Sequence: Synthetic oligonucleotide
  Target: LAMA2; (-) strand; PAM type: YTN; PAM sequence: TTT
ggtctttgatgatggtgatg

SEQ ID NO: 206952 - DNA, 20 bp, Artificial Sequence
  Description of Artificial Sequence: Synthetic oligonucleotide
  Target: LAMA2; (-) strand; PAM type: YTN; PAM sequence: TTT
tggtctttgatgatggtgat

SEQ ID NO: 206953 - DNA, 20 bp, Artificial Sequence
  Description of Artificial Sequence: Synthetic oligonucleotide
  Target: LAMA2; (-) strand; PAM type: YTN; PAM sequence: CTT
ttggtctttgatgatggtga

SEQ ID NO: 206954 - DNA, 20 bp, Artificial Sequence
  Description of Artificial Sequence: Synthetic oligonucleotide
  Target: LAMA2; (-) strand; PAM type: YTN; PAM sequence: CTA
cttttggtctttgatgatgg

SEQ ID NO: 206955 - DNA, 20 bp, Artificial Sequence
  Description of Artificial Sequence: Synthetic oligonucleotide
  Target: LAMA2; (-) strand; PAM type: YTN; PAM sequence: TTA
tctacttttggtctttgatg

SEQ ID NO: 206956 - DNA, 20 bp, Artificial Sequence
  Description of Artificial Sequence: Synthetic oligonucleotide
  Target: LAMA2; (-) strand; PAM type: YTN; PAM sequence: TTT
atctacttttggtctttgat

SEQ ID NO: 206957 - DNA, 20 bp, Artificial Sequence
  Description of Artificial Sequence: Synthetic oligonucleotide
  Target: LAMA2; (-) strand; PAM type: YTN; PAM sequence: TTT
tatctacttttggtctttga

SEQ ID NO: 206958 - DNA, 20 bp, Artificial Sequence
  Description of Artificial Sequence: Synthetic oligonucleotide
  Target: LAMA2; (-) strand; PAM type: YTN; PAM sequence: TTG
tggttttatctacttttggt

SEQ ID NO: 206959 - DNA, 20 bp, Artificial Sequence
  Description of Artificial Sequence: Synthetic oligonucleotide
  Target: LAMA2; (-) strand; PAM type: YTN; PAM sequence: TTT
gtggttttatctacttttgg

SEQ ID NO: 206960 - DNA, 20 bp, Artificial Sequence
  Description of Artificial Sequence: Synthetic oligonucleotide
  Target: LAMA2; (-) strand; PAM type: YTN; PAM sequence: CTT
tgtggttttatctacttttg

SEQ ID NO: 206961 - DNA, 20 bp, Artificial Sequence
  Description of Artificial Sequence: Synthetic oligonucleotide
  Target: LAMA2; (-) strand; PAM type: YTN; PAM sequence: TTC
cccatctttgtggttttatc

SEQ ID NO: 206962 - DNA, 20 bp, Artificial Sequence
  Description of Artificial Sequence: Synthetic oligonucleotide
  Target: LAMA2; (-) strand; PAM type: YTN; PAM sequence: TTT
ccccatctttgtggttttat

SEQ ID NO: 206963 - DNA, 20 bp, Artificial Sequence
  Description of Artificial Sequence: Synthetic oligonucleotide
  Target: LAMA2; (-) strand; PAM type: YTN; PAM sequence: TTT
tccccatctttgtggtttta

SEQ ID NO: 206964 - DNA, 20 bp, Artificial Sequence
  Description of Artificial Sequence: Synthetic oligonucleotide
  Target: LAMA2; (-) strand; PAM type: YTN; PAM sequence: TTT
ttccccatctttgtggtttt

SEQ ID NO: 206965 - DNA, 20 bp, Artificial Sequence
  Description of Artificial Sequence: Synthetic oligonucleotide
  Target: LAMA2; (-) strand; PAM type: YTN; PAM sequence: TTT
tttccccatctttgtggttt

SEQ ID NO: 206966 - DNA, 20 bp, Artificial Sequence
  Description of Artificial Sequence: Synthetic oligonucleotide
  Target: LAMA2; (-) strand; PAM type: YTN; PAM sequence: CTG
ttttttccccatctttgtgg

SEQ ID NO: 206967 - DNA, 20 bp, Artificial Sequence
  Description of Artificial Sequence: Synthetic oligonucleotide
  Target: LAMA2; (-) strand; PAM type: YTN; PAM sequence: TTC
tgttttttccccatctttgt

SEQ ID NO: 206968 - DNA, 20 bp, Artificial Sequence
  Description of Artificial Sequence: Synthetic oligonucleotide
  Target: LAMA2; (-) strand; PAM type: YTN; PAM sequence: CTG
ttctgttttttccccatctt

SEQ ID NO: 206969 - DNA, 20 bp, Artificial Sequence
  Description of Artificial Sequence: Synthetic oligonucleotide
  Target: LAMA2; (-) strand; PAM type: YTN; PAM sequence: TTC
tgttctgttttttccccatc

SEQ ID NO: 206970 - DNA, 20 bp, Artificial Sequence
  Description of Artificial Sequence: Synthetic oligonucleotide
  Target: LAMA2; (-) strand; PAM type: YTN; PAM sequence: TTT
ctgttctgttttttccccat

SEQ ID NO: 206971 - DNA, 20 bp, Artificial Sequence
  Description of Artificial Sequence: Synthetic oligonucleotide
  Target: LAMA2; (-) strand; PAM type: YTN; PAM sequence: TTT
tctgttctgttttttcccca

SEQ ID NO: 206972 - DNA, 20 bp, Artificial Sequence
  Description of Artificial Sequence: Synthetic oligonucleotide
  Target: LAMA2; (-) strand; PAM type: YTN; PAM sequence: TTT
ttctgttctgttttttcccc

SEQ ID NO: 206973 - DNA, 20 bp, Artificial Sequence
  Description of Artificial Sequence: Synthetic oligonucleotide
  Target: LAMA2; (-) strand; PAM type: YTN; PAM sequence: TTC
cagtttttctgttctgtttt

SEQ ID NO: 206974 - DNA, 20 bp, Artificial Sequence
  Description of Artificial Sequence: Synthetic oligonucleotide
  Target: LAMA2; (-) strand; PAM type: YTN; PAM sequence: TTT
ccagtttttctgttctgttt

SEQ ID NO: 206975 - DNA, 20 bp, Artificial Sequence
  Description of Artificial Sequence: Synthetic oligonucleotide
  Target: LAMA2; (-) strand; PAM type: YTN; PAM sequence: TTA
gagtttccagtttttctgtt

SEQ ID NO: 206976 - DNA, 20 bp, Artificial Sequence
  Description of Artificial Sequence: Synthetic oligonucleotide
  Target: LAMA2; (-) strand; PAM type: YTN; PAM sequence: TTT
agagtttccagtttttctgt

SEQ ID NO: 206977 - DNA, 20 bp, Artificial Sequence
  Description of Artificial Sequence: Synthetic oligonucleotide
  Target: LAMA2; (-) strand; PAM type: YTN; PAM sequence: TTT
tagagtttccagtttttctg

SEQ ID NO: 206978 - DNA, 20 bp, Artificial Sequence
  Description of Artificial Sequence: Synthetic oligonucleotide
  Target: LAMA2; (-) strand; PAM type: YTN; PAM sequence: CTG
cgttttagagtttccagttt

SEQ ID NO: 206979 - DNA, 20 bp, Artificial Sequence
  Description of Artificial Sequence: Synthetic oligonucleotide
  Target: LAMA2; (-) strand; PAM type: YTN; PAM sequence: CTC
tgcgttttagagtttccagt

SEQ ID NO: 206980 - DNA, 20 bp, Artificial Sequence
  Description of Artificial Sequence: Synthetic oligonucleotide
  Target: LAMA2; (-) strand; PAM type: YTN; PAM sequence: TTG
gaggaggagaggcgctctgc

SEQ ID NO: 206981 - DNA, 20 bp, Artificial Sequence
  Description of Artificial Sequence: Synthetic oligonucleotide
  Target: LAMA2; (-) strand; PAM type: YTN; PAM sequence: TTT
ggaggaggagaggcgctctg

SEQ ID NO: 206982 - DNA, 20 bp, Artificial Sequence
  Description of Artificial Sequence: Synthetic oligonucleotide
  Target: LAMA2; (-) strand; PAM type: YTN; PAM sequence: CTT
tggaggaggagaggcgctct

SEQ ID NO: 206983 - DNA, 20 bp, Artificial Sequence
  Description of Artificial Sequence: Synthetic oligonucleotide
  Target: LAMA2; (-) strand; PAM type: YTN; PAM sequence: TTC
ctttggaggaggagaggcgc

SEQ ID NO: 206984 - DNA, 20 bp, Artificial Sequence
  Description of Artificial Sequence: Synthetic oligonucleotide
  Target: LAMA2; (-) strand; PAM type: YTN; PAM sequence: CTG
cgttcctttggaggaggaga

SEQ ID NO: 206985 - DNA, 20 bp, Artificial Sequence
  Description of Artificial Sequence: Synthetic oligonucleotide
  Target: LAMA2; (-) strand; PAM type: YTN; PAM sequence: CTG
gtgaggaactgcgttccttt

SEQ ID NO: 206986 - DNA, 20 bp, Artificial Sequence
  Description of Artificial Sequence: Synthetic oligonucleotide
  Target: LAMA2; (-) strand; PAM type: YTN; PAM sequence: TTG
ctggtgaggaactgcgttcc

SEQ ID NO: 206987 - DNA, 20 bp, Artificial Sequence
  Description of Artificial Sequence: Synthetic oligonucleotide
  Target: LAMA2; (-) strand; PAM type: YTN; PAM sequence: CTG
ttgctggtgaggaactgcgt

SEQ ID NO: 206988 - DNA, 20 bp, Artificial Sequence
  Description of Artificial Sequence: Synthetic oligonucleotide
  Target: LAMA2; (-) strand; PAM type: YTN; PAM sequence: TTC
tgttgctggtgaggaactgc

SEQ ID NO: 206989 - DNA, 20 bp, Artificial Sequence
  Description of Artificial Sequence: Synthetic oligonucleotide
  Target: LAMA2; (-) strand; PAM type: YTN; PAM sequence: TTG
ttctgttgctggtgaggaac

SEQ ID NO: 206990 - DNA, 20 bp, Artificial Sequence
  Description of Artificial Sequence: Synthetic oligonucleotide
  Target: LAMA2; (-) strand; PAM type: YTN; PAM sequence: TTT
gttctgttgctggtgaggaa

SEQ ID NO: 206991 - DNA, 20 bp, Artificial Sequence
  Description of Artificial Sequence: Synthetic oligonucleotide
  Target: LAMA2; (-) strand; PAM type: YTN; PAM sequence: CTT
tgttctgttgctggtgagga

SEQ ID NO: 206992 - DNA, 20 bp, Artificial Sequence
  Description of Artificial Sequence: Synthetic oligonucleotide
  Target: LAMA2; (-) strand; PAM type: YTN; PAM sequence: CTC
catccagctttgttctgttg

SEQ ID NO: 206993 - DNA, 20 bp, Artificial Sequence
  Description of Artificial Sequence: Synthetic oligonucleotide
  Target: LAMA2; (-) strand; PAM type: YTN; PAM sequence: TTC
tccatccagctttgttctgt

SEQ ID NO: 206994 - DNA, 20 bp, Artificial Sequence
  Description of Artificial Sequence: Synthetic oligonucleotide
  Target: LAMA2; (-) strand; PAM type: YTN; PAM sequence: CTC
gtcaaaatcattctccatcc

SEQ ID NO: 206995 - DNA, 20 bp, Artificial Sequence
  Description of Artificial Sequence: Synthetic oligonucleotide
  Target: LAMA2; (-) strand; PAM type: YTN; PAM sequence: CTC
agctcgtcaaaatcattctc

SEQ ID NO: 206996 - DNA, 20 bp, Artificial Sequence
  Description of Artificial Sequence: Synthetic oligonucleotide
  Target: LAMA2; (-) strand; PAM type: YTN; PAM sequence: CTC
tcagctcgtcaaaatcattc

SEQ ID NO: 206997 - DNA, 20 bp, Artificial Sequence
  Description of Artificial Sequence: Synthetic oligonucleotide
  Target: LAMA2; (-) strand; PAM type: YTN; PAM sequence: TTC
tctcagctcgtcaaaatcat

SEQ ID NO: 206998 - DNA, 20 bp, Artificial Sequence
  Description of Artificial Sequence: Synthetic oligonucleotide
  Target: LAMA2; (-) strand; PAM type: YTN; PAM sequence: CTT
ctctcagctcgtcaaaatca

SEQ ID NO: 206999 - DNA, 20 bp, Artificial Sequence
  Description of Artificial Sequence: Synthetic oligonucleotide
  Target: LAMA2; (-) strand; PAM type: YTN; PAM sequence: TTC
ttctctcagctcgtcaaaat

SEQ ID NO: 207000 - DNA, 20 bp, Artificial Sequence
  Description of Artificial Sequence: Synthetic oligonucleotide
  Target: LAMA2; (-) strand; PAM type: YTN; PAM sequence: CTT
cttctctcagctcgtcaaaa

SEQ ID NO: 207001 - DNA, 20 bp, Artificial Sequence
  Description of Artificial Sequence: Synthetic oligonucleotide
  Target: LAMA2; (-) strand; PAM type: YTN; PAM sequence: CTG
aagccttcttctctcagctc

SEQ ID NO: 207002 - DNA, 20 bp, Artificial Sequence
  Description of Artificial Sequence: Synthetic oligonucleotide
  Target: LAMA2; (-) strand; PAM type: YTN; PAM sequence: TTG
atcgtctgaagccttcttct

SEQ ID NO: 207003 - DNA, 20 bp, Artificial Sequence
  Description of Artificial Sequence: Synthetic oligonucleotide
  Target: LAMA2; (-) strand; PAM type: YTN; PAM sequence: TTT
gatcgtctgaagccttcttc

SEQ ID NO: 207004 - DNA, 20 bp, Artificial Sequence
  Description of Artificial Sequence: Synthetic oligonucleotide
  Target: LAMA2; (-) strand; PAM type: YTN; PAM sequence: CTC
agagtaatttgatcgtctga

SEQ ID NO: 207005 - DNA, 20 bp, Artificial Sequence
  Description of Artificial Sequence: Synthetic oligonucleotide
  Target: LAMA2; (-) strand; PAM type: YTN; PAM sequence: CTC
ccgtagctcagagtaatttg

SEQ ID NO: 207006 - DNA, 20 bp, Artificial Sequence
  Description of Artificial Sequence: Synthetic oligonucleotide
  Target: LAMA2; (-) strand; PAM type: YTN; PAM sequence: TTG
aatgtcctcccgtagctcag

SEQ ID NO: 207007 - DNA, 20 bp, Artificial Sequence
  Description of Artificial Sequence: Synthetic oligonucleotide
  Target: LAMA2; (-) strand; PAM type: YTN; PAM sequence: TTT
gaatgtcctcccgtagctca

SEQ ID NO: 207008 - DNA, 20 bp, Artificial Sequence
  Description of Artificial Sequence: Synthetic oligonucleotide
  Target: LAMA2; (-) strand; PAM type: YTN; PAM sequence: TTG
gtttgaatgtcctcccgtag

SEQ ID NO: 207009 - DNA, 20 bp, Artificial Sequence
  Description of Artificial Sequence: Synthetic oligonucleotide
  Target: LAMA2; (-) strand; PAM type: YTN; PAM sequence: TTT
ggtttgaatgtcctcccgta

SEQ ID NO: 207010 - DNA, 20 bp, Artificial Sequence
  Description of Artificial Sequence: Synthetic oligonucleotide
  Target: LAMA2; (-) strand; PAM type: YTN; PAM sequence: CTT
tggtttgaatgtcctcccgt

SEQ ID NO: 207011 - DNA, 20 bp, Artificial Sequence
  Description of Artificial Sequence: Synthetic oligonucleotide
  Target: LAMA2; (-) strand; PAM type: YTN; PAM sequence: TTG
cctttggtttgaatgtcctc

SEQ ID NO: 207012 - DNA, 20 bp, Artificial Sequence
  Description of Artificial Sequence: Synthetic oligonucleotide
  Target: LAMA2; (-) strand; PAM type: YTN; PAM sequence: TTT
gcctttggtttgaatgtcct

SEQ ID NO: 207013 - DNA, 20 bp, Artificial Sequence
  Description of Artificial Sequence: Synthetic oligonucleotide
  Target: LAMA2; (-) strand; PAM type: YTN; PAM sequence: CTT
tgcctttggtttgaatgtcc

SEQ ID NO: 207014 - DNA, 20 bp, Artificial Sequence
  Description of Artificial Sequence: Synthetic oligonucleotide
  Target: LAMA2; (-) strand; PAM type: YTN; PAM sequence: TTC
tttgcctttggtttgaatgt

SEQ ID NO: 207015 - DNA, 20 bp, Artificial Sequence
  Description of Artificial Sequence: Synthetic oligonucleotide
  Target: LAMA2; (-) strand; PAM type: YTN; PAM sequence: CTT
ctttgcctttggtttgaatg

SEQ ID NO: 207016 - DNA, 20 bp, Artificial Sequence
  Description of Artificial Sequence: Synthetic oligonucleotide
  Target: LAMA2; (-) strand; PAM type: YTN; PAM sequence: TTC
aacttctttgcctttggttt

SEQ ID NO: 207017 - DNA, 20 bp, Artificial Sequence
  Description of Artificial Sequence: Synthetic oligonucleotide
  Target: LAMA2; (-) strand; PAM type: YTN; PAM sequence: TTT
caacttctttgcctttggtt

SEQ ID NO: 207018 - DNA, 20 bp, Artificial Sequence
  Description of Artificial Sequence: Synthetic oligonucleotide
  Target: LAMA2; (-) strand; PAM type: YTN; PAM sequence: TTT
tcaacttctttgcctttggt

SEQ ID NO: 207019 - DNA, 20 bp, Artificial Sequence
  Description of Artificial Sequence: Synthetic oligonucleotide
  Target: LAMA2; (-) strand; PAM type: YTN; PAM sequence: TTC
aaagttttcaacttctttgc

SEQ ID NO: 207020 - DNA, 20 bp, Artificial Sequence
  Description of Artificial Sequence: Synthetic oligonucleotide
  Target: LAMA2; (-) strand; PAM type: YTN; PAM sequence: TTT
caaagttttcaacttctttg

SEQ ID NO: 207021 - DNA, 20 bp, Artificial Sequence
  Description of Artificial Sequence: Synthetic oligonucleotide
  Target: LAMA2; (-) strand; PAM type: YTN; PAM sequence: TTT
tcaaagttttcaacttcttt

SEQ ID NO: 207022 - DNA, 20 bp, Artificial Sequence
  Description of Artificial Sequence: Synthetic oligonucleotide
  Target: LAMA2; (-) strand; PAM type: YTN; PAM sequence: TTT
ttcaaagttttcaacttctt

SEQ ID NO: 207023 - DNA, 20 bp, Artificial Sequence
  Description of Artificial Sequence: Synthetic oligonucleotide
  Target: LAMA2; (-) strand; PAM type: YTN; PAM sequence: TTT
tttcaaagttttcaacttct

SEQ ID NO: 207024 - DNA, 20 bp, Artificial Sequence
  Description of Artificial Sequence: Synthetic oligonucleotide
  Target: LAMA2; (-) strand; PAM type: YTN; PAM sequence: TTT
ttttcaaagttttcaacttc

SEQ ID NO: 207025 - DNA, 20 bp, Artificial Sequence
  Description of Artificial Sequence: Synthetic oligonucleotide
  Target: LAMA2; (-) strand; PAM type: YTN; PAM sequence: CTA
aatttttttcaaagttttca

SEQ ID NO: 207026 - DNA, 20 bp, Artificial Sequence
  Description of Artificial Sequence: Synthetic oligonucleotide
  Target: LAMA2; (-) strand; PAM type: YTN; PAM sequence: TTC
taaatttttttcaaagtttt

SEQ ID NO: 207027 - DNA, 20 bp, Artificial Sequence
  Description of Artificial Sequence: Synthetic oligonucleotide
  Target: LAMA2; (-) strand; PAM type: YTN; PAM sequence: CTT
ctaaatttttttcaaagttt

SEQ ID NO: 207028 - DNA, 20 bp, Artificial Sequence
  Description of Artificial Sequence: Synthetic oligonucleotide
  Target: LAMA2; (-) strand; PAM type: YTN; PAM sequence: TTC
ttctaaatttttttcaaagt

SEQ ID NO: 207029 - DNA, 20 bp, Artificial Sequence
  Description of Artificial Sequence: Synthetic oligonucleotide
  Target: LAMA2; (-) strand; PAM type: YTN; PAM sequence: TTA
tacattcttctaaatttttt

SEQ ID NO: 207030 - DNA, 20 bp, Artificial Sequence
  Description of Artificial Sequence: Synthetic oligonucleotide
  Target: LAMA2; (-) strand; PAM type: YTN; PAM sequence: CTA
gttatacattcttctaaatt

SEQ ID NO: 207031 - DNA, 20 bp, Artificial Sequence
  Description of Artificial Sequence: Synthetic oligonucleotide
  Target: LAMA2; (-) strand; PAM type: YTN; PAM sequence: TTC
tagttatacattcttctaaa

SEQ ID NO: 207032 - DNA, 20 bp, Artificial Sequence
  Description of Artificial Sequence: Synthetic oligonucleotide
  Target: LAMA2; (-) strand; PAM type: YTN; PAM sequence: TTA
ttctagttatacattcttct

SEQ ID NO: 207033 - DNA, 20 bp, Artificial Sequence
  Description of Artificial Sequence: Synthetic oligonucleotide
  Target: LAMA2; (-) strand; PAM type: YTN; PAM sequence: TTG
gttattctagttatacattc

SEQ ID NO: 207034 - DNA, 20 bp, Artificial Sequence
  Description of Artificial Sequence: Synthetic oligonucleotide
  Target: LAMA2; (-) strand; PAM type: YTN; PAM sequence: CTG
tattggttattctagttata

SEQ ID NO: 207035 - DNA, 20 bp, Artificial Sequence
  Description of Artificial Sequence: Synthetic oligonucleotide
  Target: LAMA2; (-) strand; PAM type: YTN; PAM sequence: CTC
tgtattggttattctagtta

SEQ ID NO: 207036 - DNA, 20 bp, Artificial Sequence
  Description of Artificial Sequence: Synthetic oligonucleotide
  Target: LAMA2; (-) strand; PAM type: YTN; PAM sequence: TTC
tctgtattggttattctagt

SEQ ID NO: 207037 - DNA, 20 bp, Artificial Sequence
  Description of Artificial Sequence: Synthetic oligonucleotide
  Target: LAMA2; (-) strand; PAM type: YTN; PAM sequence: CTT
ctctgtattggttattctag

SEQ ID NO: 207038 - DNA, 20 bp, Artificial Sequence
  Description of Artificial Sequence: Synthetic oligonucleotide
  Target: LAMA2; (-) strand; PAM type: YTN; PAM sequence: TTA
agcacttctctgtattggtt

SEQ ID NO: 207039 - DNA, 20 bp, Artificial Sequence
  Description of Artificial Sequence: Synthetic oligonucleotide
  Target: LAMA2; (-) strand; PAM type: YTN; PAM sequence: TTT
aagcacttctctgtattggt

SEQ ID NO: 207040 - DNA, 20 bp, Artificial Sequence
  Description of Artificial Sequence: Synthetic oligonucleotide
  Target: LAMA2; (-) strand; PAM type: YTN; PAM sequence: CTT
taagcacttctctgtattgg

SEQ ID NO: 207041 - DNA, 20 bp, Artificial Sequence
  Description of Artificial Sequence: Synthetic oligonucleotide
  Target: LAMA2; (-) strand; PAM type: YTN; PAM sequence: CTC
ctttaagcacttctctgtat

SEQ ID NO: 207042 - DNA, 20 bp, Artificial Sequence
  Description of Artificial Sequence: Synthetic oligonucleotide
  Target: LAMA2; (-) strand; PAM type: YTN; PAM sequence: CTC
catcagctcctttaagcact

SEQ ID NO: 207043 - DNA, 20 bp, Artificial Sequence
  Description of Artificial Sequence: Synthetic oligonucleotide
  Target: LAMA2; (-) strand; PAM type: YTN; PAM sequence: TTC
agctccatcagctcctttaa

SEQ ID NO: 207044 - DNA, 20 bp, Artificial Sequence
  Description of Artificial Sequence: Synthetic oligonucleotide
  Target: LAMA2; (-) strand; PAM type: YTN; PAM sequence: TTT
cagctccatcagctccttta

SEQ ID NO: 207045 - DNA, 20 bp, Artificial Sequence
  Description of Artificial Sequence: Synthetic oligonucleotide
  Target: LAMA2; (-) strand; PAM type: YTN; PAM sequence: TTT
tcagctccatcagctccttt

SEQ ID NO: 207046 - DNA, 20 bp, Artificial Sequence
  Description of Artificial Sequence: Synthetic oligonucleotide
  Target: LAMA2; (-) strand; PAM type: YTN; PAM sequence: TTG
gttttcagctccatcagctc

SEQ ID NO: 207047 - DNA, 20 bp, Artificial Sequence
  Description of Artificial Sequence: Synthetic oligonucleotide
  Target: LAMA2; (-) strand; PAM type: YTN; PAM sequence: CTT
ggttttcagctccatcagct

SEQ ID NO: 207048 - DNA, 20 bp, Artificial Sequence
  Description of Artificial Sequence: Synthetic oligonucleotide
  Target: LAMA2; (-) strand; PAM type: YTN; PAM sequence: CTC
gagccttggttttcagctcc

SEQ ID NO: 207049 - DNA, 20 bp, Artificial Sequence
  Description of Artificial Sequence: Synthetic oligonucleotide
  Target: LAMA2; (-) strand; PAM type: YTN; PAM sequence: TTC
tcgagccttggttttcagct

SEQ ID NO: 207050 - DNA, 20 bp, Artificial Sequence
  Description of Artificial Sequence: Synthetic oligonucleotide
  Target: LAMA2; (-) strand; PAM type: YTN; PAM sequence: TTC
acgtagttctcgagccttgg

SEQ ID NO: 207051 - DNA, 20 bp, Artificial Sequence
  Description of Artificial Sequence: Synthetic oligonucleotide
  Target: LAMA2; (-) strand; PAM type: YTN; PAM sequence: CTT
cacgtagttctcgagccttg

SEQ ID NO: 207052 - DNA, 20 bp, Artificial Sequence
  Description of Artificial Sequence: Synthetic oligonucleotide
  Target: LAMA2; (-) strand; PAM type: YTN; PAM sequence: TTC
ttcacgtagttctcgagcct

SEQ ID NO: 207053 - DNA, 20 bp, Artificial Sequence
  Description of Artificial Sequence: Synthetic oligonucleotide
  Target: LAMA2; (-) strand; PAM type: YTN; PAM sequence: CTG
cattcttcacgtagttctcg

SEQ ID NO: 207054 - DNA, 20 bp, Artificial Sequence
  Description of Artificial Sequence: Synthetic oligonucleotide
  Target: LAMA2; (-) strand; PAM type: YTN; PAM sequence: TTC
tgcattcttcacgtagttct

SEQ ID NO: 207055 - DNA, 20 bp, Artificial Sequence
  Description of Artificial Sequence: Synthetic oligonucleotide
  Target: LAMA2; (-) strand; PAM type: YTN; PAM sequence: CTT
ctgcattcttcacgtagttc

SEQ ID NO: 207056 - DNA, 20 bp, Artificial Sequence
  Description of Artificial Sequence: Synthetic oligonucleotide
  Target: LAMA2; (-) strand; PAM type: YTN; PAM sequence: CTG
aggcttctgcattcttcacg

SEQ ID NO: 207057 - DNA, 20 bp, Artificial Sequence
  Description of Artificial Sequence: Synthetic oligonucleotide
  Target: LAMA2; (-) strand; PAM type: YTN; PAM sequence: CTC
ctgaggcttctgcattcttc

SEQ ID NO: 207058 - DNA, 20 bp, Artificial Sequence
  Description of Artificial Sequence: Synthetic oligonucleotide
  Target: LAMA2; (-) strand; PAM type: YTN; PAM sequence: TTG
atcgcatcggctcctgaggc

SEQ ID NO: 207059 - DNA, 20 bp, Artificial Sequence
  Description of Artificial Sequence: Synthetic oligonucleotide
  Target: LAMA2; (-) strand; PAM type: YTN; PAM sequence: TTC
cagttgatcgcatcggctcc

SEQ ID NO: 207060 - DNA, 20 bp, Artificial Sequence
  Description of Artificial Sequence: Synthetic oligonucleotide
  Target: LAMA2; (-) strand; PAM type: YTN; PAM sequence: CTT
ccagttgatcgcatcggctc

SEQ ID NO: 207061 - DNA, 20 bp, Artificial Sequence
  Description of Artificial Sequence: Synthetic oligonucleotide
  Target: LAMA2; (-) strand; PAM type: YTN; PAM sequence: TTC
ttccagttgatcgcatcggc

SEQ ID NO: 207062 - DNA, 20 bp, Artificial Sequence
  Description of Artificial Sequence: Synthetic oligonucleotide
  Target: LAMA2; (-) strand; PAM type: YTN; PAM sequence: TTT
cttccagttgatcgcatcgg

SEQ ID NO: 207063 - DNA, 20 bp, Artificial Sequence
  Description of Artificial Sequence: Synthetic oligonucleotide
  Target: LAMA2; (-) strand; PAM type: YTN; PAM sequence: CTT
tcttccagttgatcgcatcg

SEQ ID NO: 207064 - DNA, 20 bp, Artificial Sequence
  Description of Artificial Sequence: Synthetic oligonucleotide
  Target: LAMA2; (-) strand; PAM type: YTN; PAM sequence: CTG
ataccctttcttccagttga

SEQ ID NO: 207065 - DNA, 20 bp, Artificial Sequence
  Description of Artificial Sequence: Synthetic oligonucleotide
  Target: LAMA2; (-) strand; PAM type: YTN; PAM sequence: TTG
ctgataccctttcttccagt

SEQ ID NO: 207066 - DNA, 20 bp, Artificial Sequence
  Description of Artificial Sequence: Synthetic oligonucleotide
  Target: LAMA2; (-) strand; PAM type: YTN; PAM sequence: TTC
cattgctgataccctttctt

SEQ ID NO: 207067 - DNA, 20 bp, Artificial Sequence
  Description of Artificial Sequence: Synthetic oligonucleotide
  Target: LAMA2; (-) strand; PAM type: YTN; PAM sequence: CTT
ccattgctgataccctttct

SEQ ID NO: 207068 - DNA, 20 bp, Artificial Sequence
  Description of Artificial Sequence: Synthetic oligonucleotide
  Target: LAMA2; (-) strand; PAM type: YTN; PAM sequence: TTC
atcttccattgctgataccc

SEQ ID NO: 207069 - DNA, 20 bp, Artificial Sequence
  Description of Artificial Sequence: Synthetic oligonucleotide
  Target: LAMA2; (-) strand; PAM type: YTN; PAM sequence: TTT
catcttccattgctgatacc

SEQ ID NO: 207070 - DNA, 20 bp, Artificial Sequence
  Description of Artificial Sequence: Synthetic oligonucleotide
  Target: LAMA2; (-) strand; PAM type: YTN; PAM sequence: TTC
atttcatcttccattgctga

SEQ ID NO: 207071 - DNA, 20 bp, Artificial Sequence
  Description of Artificial Sequence: Synthetic oligonucleotide
  Target: LAMA2; (-) strand; PAM type: YTN; PAM sequence: TTC
attcatttcatcttccattg

SEQ ID NO: 207072 - DNA, 20 bp, Artificial Sequence
  Description of Artificial Sequence: Synthetic oligonucleotide
  Target: LAMA2; (-) strand; PAM type: YTN; PAM sequence: TTT
cattcatttcatcttccatt

SEQ ID NO: 207073 - DNA, 20 bp, Artificial Sequence
  Description of Artificial Sequence: Synthetic oligonucleotide
  Target: LAMA2; (-) strand; PAM type: YTN; PAM sequence: TTC
atttcattcatttcatcttc

SEQ ID NO: 207074 - DNA, 20 bp, Artificial Sequence
  Description of Artificial Sequence: Synthetic oligonucleotide
  Target: LAMA2; (-) strand; PAM type: YTN; PAM sequence: CTT
catttcattcatttcatctt

SEQ ID NO: 207075 - DNA, 20 bp, Artificial Sequence
  Description of Artificial Sequence: Synthetic oligonucleotide
  Target: LAMA2; (-) strand; PAM type: YTN; PAM sequence: CTC
gcttcatttcattcatttca

SEQ ID NO: 207076 - DNA, 20 bp, Artificial Sequence
  Description of Artificial Sequence: Synthetic oligonucleotide
  Target: LAMA2; (-) strand; PAM type: YTN; PAM sequence: TTC
tcgcttcatttcattcattt

SEQ ID NO: 207077 - DNA, 20 bp, Artificial Sequence
  Description of Artificial Sequence: Synthetic oligonucleotide
  Target: LAMA2; (-) strand; PAM type: YTN; PAM sequence: CTT
ctcgcttcatttcattcatt

SEQ ID NO: 207078 - DNA, 20 bp, Artificial Sequence
  Description of Artificial Sequence: Synthetic oligonucleotide
  Target: LAMA2; (-) strand; PAM type: YTN; PAM sequence: TTC
ccttctcgcttcatttcatt

SEQ ID NO: 207079 - DNA, 20 bp, Artificial Sequence
  Description of Artificial Sequence: Synthetic oligonucleotide
  Target: LAMA2; (-) strand; PAM type: YTN; PAM sequence: CTT
cccttctcgcttcatttcat

SEQ ID NO: 207080 - DNA, 20 bp, Artificial Sequence
  Description of Artificial Sequence: Synthetic oligonucleotide
  Target: LAMA2; (-) strand; PAM type: YTN; PAM sequence: CTA
aacttcccttctcgcttcat

SEQ ID NO: 207081 - DNA, 20 bp, Artificial Sequence
  Description of Artificial Sequence: Synthetic oligonucleotide
  Target: LAMA2; (-) strand; PAM type: YTN; PAM sequence: CTC
taaacttcccttctcgcttc

SEQ ID NO: 207082 - DNA, 20 bp, Artificial Sequence
  Description of Artificial Sequence: Synthetic oligonucleotide
  Target: LAMA2; (-) strand; PAM type: YTN; PAM sequence: TTC
tctaaacttcccttctcgct

SEQ ID NO: 207083 - DNA, 20 bp, Artificial Sequence
  Description of Artificial Sequence: Synthetic oligonucleotide
  Target: LAMA2; (-) strand; PAM type: YTN; PAM sequence: TTT
ctctaaacttcccttctcgc

SEQ ID NO: 207084 - DNA, 20 bp, Artificial Sequence
  Description of Artificial Sequence: Synthetic oligonucleotide
  Target: LAMA2; (-) strand; PAM type: YTN; PAM sequence: TTT
tctctaaacttcccttctcg

SEQ ID NO: 207085 - DNA, 20 bp, Artificial Sequence
  Description of Artificial Sequence: Synthetic oligonucleotide
  Target: LAMA2; (-) strand; PAM type: YTN; PAM sequence: TTT
ttctctaaacttcccttctc

SEQ ID NO: 207086 - DNA, 20 bp, Artificial Sequence
  Description of Artificial Sequence: Synthetic oligonucleotide
  Target: LAMA2; (-) strand; PAM type: YTN; PAM sequence: TTT
tttctctaaacttcccttct

SEQ ID NO: 207087 - DNA, 20 bp, Artificial Sequence
  Description of Artificial Sequence: Synthetic oligonucleotide
  Target: LAMA2; (-) strand; PAM type: YTN; PAM sequence: CTT
ttttctctaaacttcccttc

SEQ ID NO: 207088 - DNA, 20 bp, Artificial Sequence
  Description of Artificial Sequence: Synthetic oligonucleotide
  Target: LAMA2; (-) strand; PAM type: YTN; PAM sequence: TTC
ttttttctctaaacttccct

SEQ ID NO: 207089 - DNA, 20 bp, Artificial Sequence
  Description of Artificial Sequence: Synthetic oligonucleotide
  Target: LAMA2; (-) strand; PAM type: YTN; PAM sequence: TTA
ttcttttttctctaaacttc

SEQ ID NO: 207090 - DNA, 20 bp, Artificial Sequence
  Description of Artificial Sequence: Synthetic oligonucleotide
  Target: LAMA2; (-) strand; PAM type: YTN; PAM sequence: TTT
attcttttttctctaaactt

SEQ ID NO: 207091 - DNA, 20 bp, Artificial Sequence
  Description of Artificial Sequence: Synthetic oligonucleotide
  Target: LAMA2; (-) strand; PAM type: YTN; PAM sequence: TTT
tattcttttttctctaaact

SEQ ID NO: 207092 - DNA, 20 bp, Artificial Sequence
  Description of Artificial Sequence: Synthetic oligonucleotide
  Target: LAMA2; (-) strand; PAM type: YTN; PAM sequence: TTT
ttattcttttttctctaaac

SEQ ID NO: 207093 - DNA, 20 bp, Artificial Sequence
  Description of Artificial Sequence: Synthetic oligonucleotide
  Target: LAMA2; (-) strand; PAM type: YTN; PAM sequence: CTT
tttattcttttttctctaaa

SEQ ID NO: 207094 - DNA, 20 bp, Artificial Sequence
  Description of Artificial Sequence: Synthetic oligonucleotide
  Target: LAMA2; (-) strand; PAM type: YTN; PAM sequence: TTC
tttttattcttttttctcta

SEQ ID NO: 207095 - DNA, 20 bp, Artificial Sequence
  Description of Artificial Sequence: Synthetic oligonucleotide
  Target: LAMA2; (-) strand; PAM type: YTN; PAM sequence: TTT
ctttttattcttttttctct

SEQ ID NO: 207096 - DNA, 20 bp, Artificial Sequence
  Description of Artificial Sequence: Synthetic oligonucleotide
  Target: LAMA2; (-) strand; PAM type: YTN; PAM sequence: CTC
atttctttttattctttttt

SEQ ID NO: 207097 - DNA, 20 bp, Artificial Sequence
  Description of Artificial Sequence: Synthetic oligonucleotide
  Target: LAMA2; (-) strand; PAM type: YTN; PAM sequence: TTG
ctcatttctttttattcttt

SEQ ID NO: 207098 - DNA, 20 bp, Artificial Sequence
  Description of Artificial Sequence: Synthetic oligonucleotide
  Target: LAMA2; (-) strand; PAM type: YTN; PAM sequence: TTT
gctcatttctttttattctt

SEQ ID NO: 207099 - DNA, 20 bp, Artificial Sequence
  Description of Artificial Sequence: Synthetic oligonucleotide
  Target: LAMA2; (-) strand; PAM type: YTN; PAM sequence: CTT
tgctcatttctttttattct

SEQ ID NO: 207100 - DNA, 20 bp, Artificial Sequence
  Description of Artificial Sequence: Synthetic oligonucleotide
  Target: LAMA2; (-) strand; PAM type: YTN; PAM sequence: TTG
gaggctttgctcatttcttt

SEQ ID NO: 207101 - DNA, 20 bp, Artificial Sequence
  Description of Artificial Sequence: Synthetic oligonucleotide
  Target: LAMA2; (-) strand; PAM type: YTN; PAM sequence: CTT
ggaggctttgctcatttctt

SEQ ID NO: 207102 - DNA, 20 bp, Artificial Sequence
  Description of Artificial Sequence: Synthetic oligonucleotide
  Target: LAMA2; (-) strand; PAM type: YTN; PAM sequence: TTC
ttggaggctttgctcatttc

SEQ ID NO: 207103 - DNA, 20 bp, Artificial Sequence
  Description of Artificial Sequence: Synthetic oligonucleotide
  Target: LAMA2; (-) strand; PAM type: YTN; PAM sequence: TTT
cttggaggctttgctcattt

SEQ ID NO: 207104 - DNA, 20 bp, Artificial Sequence
  Description of Artificial Sequence: Synthetic oligonucleotide
  Target: LAMA2; (-) strand; PAM type: YTN; PAM sequence: TTC
acatagtcccatatttcttg

SEQ ID NO: 207105 - DNA, 20 bp, Artificial Sequence
  Description of Artificial Sequence: Synthetic oligonucleotide
  Target: LAMA2; (-) strand; PAM type: YTN; PAM sequence: TTT
cacatagtcccatatttctt

SEQ ID NO: 207106 - DNA, 20 bp, Artificial Sequence
  Description of Artificial Sequence: Synthetic oligonucleotide
  Target: LAMA2; (-) strand; PAM type: YTN; PAM sequence: TTT
tcacatagtcccatatttct

SEQ ID NO: 207107 - DNA, 20 bp, Artificial Sequence
  Description of Artificial Sequence: Synthetic oligonucleotide
  Target: LAMA2; (-) strand; PAM type: YTN; PAM sequence: CTT
ttcacatagtcccatatttc

SEQ ID NO: 207108 - DNA, 20 bp, Artificial Sequence
  Description of Artificial Sequence: Synthetic oligonucleotide
  Target: LAMA2; (-) strand; PAM type: YTN; PAM sequence: TTG
gtcttttcacatagtcccat

SEQ ID NO: 207109 - DNA, 20 bp, Artificial Sequence
  Description of Artificial Sequence: Synthetic oligonucleotide
  Target: LAMA2; (-) strand; PAM type: YTN; PAM sequence: TTT
ggtcttttcacatagtccca

SEQ ID NO: 207110 - DNA, 20 bp, Artificial Sequence
  Description of Artificial Sequence: Synthetic oligonucleotide
  Target: LAMA2; (-) strand; PAM type: YTN; PAM sequence: TTC
aggtacaccaatcagacgta

SEQ ID NO: 207111 - DNA, 20 bp, Artificial Sequence
  Description of Artificial Sequence: Synthetic oligonucleotide
  Target: LAMA2; (-) strand; PAM type: YTN; PAM sequence: TTT
caggtacaccaatcagacgt

SEQ ID NO: 207112 - DNA, 20 bp, Artificial Sequence
  Description of Artificial Sequence: Synthetic oligonucleotide
  Target: LAMA2; (-) strand; PAM type: YTN; PAM sequence: CTT
tcaggtacaccaatcagacg

SEQ ID NO: 207113 - DNA, 20 bp, Artificial Sequence
  Description of Artificial Sequence: Synthetic oligonucleotide
  Target: LAMA2; (-) strand; PAM type: YTN; PAM sequence: CTC
cacatcactttcaggtacac

SEQ ID NO: 207114 - DNA, 20 bp, Artificial Sequence
  Description of Artificial Sequence: Synthetic oligonucleotide
  Target: LAMA2; (-) strand; PAM type: YTN; PAM sequence: TTC
tccacatcactttcaggtac

SEQ ID NO: 207115 - DNA, 20 bp, Artificial Sequence
  Description of Artificial Sequence: Synthetic oligonucleotide
  Target: LAMA2; (-) strand; PAM type: YTN; PAM sequence: TTC
attctccacatcactttcag

SEQ ID NO: 207116 - DNA, 20 bp, Artificial Sequence
  Description of Artificial Sequence: Synthetic oligonucleotide
  Target: LAMA2; (-) strand; PAM type: YTN; PAM sequence: TTT
cattctccacatcactttca

SEQ ID NO: 207117 - DNA, 20 bp, Artificial Sequence
  Description of Artificial Sequence: Synthetic oligonucleotide
  Target: LAMA2; (-) strand; PAM type: YTN; PAM sequence: TTG
gtttcattctccacatcact

SEQ ID NO: 207118 - DNA, 20 bp, Artificial Sequence
  Description of Artificial Sequence: Synthetic oligonucleotide
  Target: LAMA2; (-) strand; PAM type: YTN; PAM sequence: CTT
ggtttcattctccacatcac

SEQ ID NO: 207119 - DNA, 20 bp, Artificial Sequence
  Description of Artificial Sequence: Synthetic oligonucleotide
  Target: LAMA2; (-) strand; PAM type: YTN; PAM sequence: TTC
caacttggtttcattctcca

SEQ ID NO: 207120 - DNA, 20 bp, Artificial Sequence
  Description of Artificial Sequence: Synthetic oligonucleotide
  Target: LAMA2; (-) strand; PAM type: YTN; PAM sequence: TTT
ccaacttggtttcattctcc

SEQ ID NO: 207121 - DNA, 20 bp, Artificial Sequence
  Description of Artificial Sequence: Synthetic oligonucleotide
  Target: LAMA2; (-) strand; PAM type: YTN; PAM sequence: TTT
tccaacttggtttcattctc

SEQ ID NO: 207122 - DNA, 20 bp, Artificial Sequence
  Description of Artificial Sequence: Synthetic oligonucleotide
  Target: LAMA2; (-) strand; PAM type: YTN; PAM sequence: CTG
cagagtgttttccaacttgg

SEQ ID NO: 207123 - DNA, 20 bp, Artificial Sequence
  Description of Artificial Sequence: Synthetic oligonucleotide
  Target: LAMA2; (-) strand; PAM type: YTN; PAM sequence: CTG
gataatatcctgcagagtgt

SEQ ID NO: 207124 - DNA, 20 bp, Artificial Sequence
  Description of Artificial Sequence: Synthetic oligonucleotide
  Target: LAMA2; (-) strand; PAM type: YTN; PAM sequence: CTC
ctggataatatcctgcagag

SEQ ID NO: 207125 - DNA, 20 bp, Artificial Sequence
  Description of Artificial Sequence: Synthetic oligonucleotide
  Target: LAMA2; (-) strand; PAM type: YTN; PAM sequence: TTC
tcctggataatatcctgcag

SEQ ID NO: 207126 - DNA, 20 bp, Artificial Sequence
  Description of Artificial Sequence: Synthetic oligonucleotide
  Target: LAMA2; (-) strand; PAM type: YTN; PAM sequence: TTG
gggaagttctcctggataat

SEQ ID NO: 207127 - DNA, 20 bp, Artificial Sequence
  Description of Artificial Sequence: Synthetic oligonucleotide
  Target: LAMA2; (-) strand; PAM type: YTN; PAM sequence: CTA
gattggggaagttctcctgg

SEQ ID NO: 207128 - DNA, 20 bp, Artificial Sequence
  Description of Artificial Sequence: Synthetic oligonucleotide
  Target: LAMA2; (-) strand; PAM type: YTN; PAM sequence: TTG
ctagattggggaagttctcc

SEQ ID NO: 207129 - DNA, 20 bp, Artificial Sequence
  Description of Artificial Sequence: Synthetic oligonucleotide
  Target: LAMA2; (-) strand; PAM type: YTN; PAM sequence: CTT
gctagattggggaagttctc

SEQ ID NO: 207130 - DNA, 20 bp, Artificial Sequence
  Description of Artificial Sequence: Synthetic oligonucleotide
  Target: LAMA2; (-) strand; PAM type: YTN; PAM sequence: CTG
ccttgctagattggggaagt

SEQ ID NO: 207131 - DNA, 20 bp, Artificial Sequence
  Description of Artificial Sequence: Synthetic oligonucleotide
  Target: LAMA2; (-) strand; PAM type: YTN; PAM sequence: TTG
gcctgccttgctagattggg

SEQ ID NO: 207132 - DNA, 20 bp, Artificial Sequence
  Description of Artificial Sequence: Synthetic oligonucleotide
  Target: LAMA2; (-) strand; PAM type: YTN; PAM sequence: CTG
aacgttggcctgccttgcta

SEQ ID NO: 207133 - DNA, 20 bp, Artificial Sequence
  Description of Artificial Sequence: Synthetic oligonucleotide
  Target: LAMA2; (-) strand; PAM type: YTN; PAM sequence: CTG
aatctgaacgttggcctgcc

SEQ ID NO: 207134 - DNA, 20 bp, Artificial Sequence
  Description of Artificial Sequence: Synthetic oligonucleotide
  Target: LAMA2; (-) strand; PAM type: YTN; PAM sequence: TTC
ctgaatctgaacgttggcct

SEQ ID NO: 207135 - DNA, 20 bp, Artificial Sequence
  Description of Artificial Sequence: Synthetic oligonucleotide
  Target: LAMA2; (-) strand; PAM type: YTN; PAM sequence: TTT
cctgaatctgaacgttggcc

SEQ ID NO: 207136 - DNA, 20 bp, Artificial Sequence
  Description of Artificial Sequence: Synthetic oligonucleotide
  Target: LAMA2; (-) strand; PAM type: YTN; PAM sequence: CTG
tatttcctgaatctgaacgt

SEQ ID NO: 207137 - DNA, 20 bp, Artificial Sequence
  Description of Artificial Sequence: Synthetic oligonucleotide
  Target: LAMA2; (-) strand; PAM type: YTN; PAM sequence: CTC
tgtatttcctgaatctgaac

SEQ ID NO: 207138 - DNA, 20 bp, Artificial Sequence
  Description of Artificial Sequence: Synthetic oligonucleotide
  Target: LAMA2; (-) strand; PAM type: YTN; PAM sequence: TTC
tctgtatttcctgaatctga

SEQ ID NO: 207139 - DNA, 20 bp, Artificial Sequence
  Description of Artificial Sequence: Synthetic oligonucleotide
  Target: LAMA2; (-) strand; PAM type: YTN; PAM sequence: TTG
tggcgttctctgtatttcct

SEQ ID NO: 207140 - DNA, 20 bp, Artificial Sequence
  Description of Artificial Sequence: Synthetic oligonucleotide
  Target: LAMA2; (-) strand; PAM type: YTN; PAM sequence: TTT
gtggcgttctctgtatttcc

SEQ ID NO: 207141 - DNA, 20 bp, Artificial Sequence
  Description of Artificial Sequence: Synthetic oligonucleotide
  Target: LAMA2; (-) strand; PAM type: YTN; PAM sequence: CTT
tgtggcgttctctgtatttc

SEQ ID NO: 207142 - DNA, 20 bp, Artificial Sequence
  Description of Artificial Sequence: Synthetic oligonucleotide
  Target: LAMA2; (-) strand; PAM type: YTN; PAM sequence: CTC
gaggagtatctttgtggcgt

SEQ ID NO: 207143 - DNA, 20 bp, Artificial Sequence
  Description of Artificial Sequence: Synthetic oligonucleotide
  Target: LAMA2; (-) strand; PAM type: YTN; PAM sequence: TTC
tcgaggagtatctttgtggc

SEQ ID NO: 207144 - DNA, 20 bp, Artificial Sequence
  Description of Artificial Sequence: Synthetic oligonucleotide
  Target: LAMA2; (-) strand; PAM type: YTN; PAM sequence: CTT
ctcgaggagtatctttgtgg

SEQ ID NO: 207145 - DNA, 20 bp, Artificial Sequence
  Description of Artificial Sequence: Synthetic oligonucleotide
  Target: LAMA2; (-) strand; PAM type: YTN; PAM sequence: CTC
ttctcgaggagtatctttgt

SEQ ID NO: 207146 - DNA, 20 bp, Artificial Sequence
  Description of Artificial Sequence: Synthetic oligonucleotide
  Target: LAMA2; (-) strand; PAM type: YTN; PAM sequence: TTG
ctcttctcgaggagtatctt

SEQ ID NO: 207147 - DNA, 20 bp, Artificial Sequence
  Description of Artificial Sequence: Synthetic oligonucleotide
  Target: LAMA2; (-) strand; PAM type: YTN; PAM sequence: TTG
gagttgctcttctcgaggag

SEQ ID NO: 207148 - DNA, 20 bp, Artificial Sequence
  Description of Artificial Sequence: Synthetic oligonucleotide
  Target: LAMA2; (-) strand; PAM type: YTN; PAM sequence: CTT
ggagttgctcttctcgagga

SEQ ID NO: 207149 - DNA, 20 bp, Artificial Sequence
  Description of Artificial Sequence: Synthetic oligonucleotide
  Target: LAMA2; (-) strand; PAM type: YTN; PAM sequence: TTA
tgtgtcttggagttgctctt

SEQ ID NO: 207150 - DNA, 20 bp, Artificial Sequence
  Description of Artificial Sequence: Synthetic oligonucleotide
  Target: LAMA2; (-) strand; PAM type: YTN; PAM sequence: CTG
acaattatgtgtcttggagt

SEQ ID NO: 207151 - DNA, 20 bp, Artificial Sequence
  Description of Artificial Sequence: Synthetic oligonucleotide
  Target: LAMA2; (-) strand; PAM type: YTN; PAM sequence: TTG
gtgaatctgacaattatgtg

SEQ ID NO: 207152 - DNA, 20 bp, Artificial Sequence
  Description of Artificial Sequence: Synthetic oligonucleotide
  Target: LAMA2; (-) strand; PAM type: YTN; PAM sequence: TTT
ggtgaatctgacaattatgt

SEQ ID NO: 207153 - DNA, 20 bp, Artificial Sequence
  Description of Artificial Sequence: Synthetic oligonucleotide
  Target: LAMA2; (-) strand; PAM type: YTN; PAM sequence: CTT
tggtgaatctgacaattatg

SEQ ID NO: 207154 - DNA, 20 bp, Artificial Sequence
  Description of Artificial Sequence: Synthetic oligonucleotide
  Target: LAMA2; (-) strand; PAM type: YTN; PAM sequence: TTC
aactttggtgaatctgacaa

SEQ ID NO: 207155 - DNA, 20 bp, Artificial Sequence
  Description of Artificial Sequence: Synthetic oligonucleotide
  Target: LAMA2; (-) strand; PAM type: YTN; PAM sequence: TTT
caactttggtgaatctgaca

SEQ ID NO: 207156 - DNA, 20 bp, Artificial Sequence
  Description of Artificial Sequence: Synthetic oligonucleotide
  Target: LAMA2; (-) strand; PAM type: YTN; PAM sequence: TTC
atttcaactttggtgaatct

SEQ ID NO: 207157 - DNA, 20 bp, Artificial Sequence
  Description of Artificial Sequence: Synthetic oligonucleotide
  Target: LAMA2; (-) strand; PAM type: YTN; PAM sequence: CTT
catttcaactttggtgaatc

SEQ ID NO: 207158 - DNA, 20 bp, Artificial Sequence
  Description of Artificial Sequence: Synthetic oligonucleotide
  Target: LAMA2; (-) strand; PAM type: YTN; PAM sequence: TTC
cttcatttcaactttggtga

SEQ ID NO: 207159 - DNA, 20 bp, Artificial Sequence
  Description of Artificial Sequence: Synthetic oligonucleotide
  Target: LAMA2; (-) strand; PAM type: YTN; PAM sequence: TTT
ccttcatttcaactttggtg

SEQ ID NO: 207160 - DNA, 20 bp, Artificial Sequence
  Description of Artificial Sequence: Synthetic oligonucleotide
  Target: LAMA2; (-) strand; PAM type: YTN; PAM sequence: TTT
tccttcatttcaactttggt

SEQ ID NO: 207161 - DNA, 20 bp, Artificial Sequence
  Description of Artificial Sequence: Synthetic oligonucleotide
  Target: LAMA2; (-) strand; PAM type: YTN; PAM sequence: TTT
ttccttcatttcaactttgg

SEQ ID NO: 207162 - DNA, 20 bp, Artificial Sequence
  Description of Artificial Sequence: Synthetic oligonucleotide
  Target: LAMA2; (-) strand; PAM type: YTN; PAM sequence: TTT
tttccttcatttcaactttg

SEQ ID NO: 207163 - DNA, 20 bp, Artificial Sequence
  Description of Artificial Sequence: Synthetic oligonucleotide
  Target: LAMA2; (-) strand; PAM type: YTN; PAM sequence: TTA
acattttttccttcatttca

SEQ ID NO: 207164 - DNA, 20 bp, Artificial Sequence
  Description of Artificial Sequence: Synthetic oligonucleotide
  Target: LAMA2; (-) strand; PAM type: YTN; PAM sequence: CTT
aacattttttccttcatttc

SEQ ID NO: 207165 - DNA, 20 bp, Artificial Sequence
  Description of Artificial Sequence: Synthetic oligonucleotide
  Target: LAMA2; (-) strand; PAM type: YTN; PAM sequence: CTG
cccttaacattttttccttc

SEQ ID NO: 207166 - DNA, 20 bp, Artificial Sequence
  Description of Artificial Sequence: Synthetic oligonucleotide
  Target: LAMA2; (-) strand; PAM type: YTN; PAM sequence: CTG
gctgcccttaacattttttc

SEQ ID NO: 207167 - DNA, 20 bp, Artificial Sequence
  Description of Artificial Sequence: Synthetic oligonucleotide
  Target: LAMA2; (-) strand; PAM type: YTN; PAM sequence: CTC
tggctgcccttaacattttt

SEQ ID NO: 207168 - DNA, 20 bp, Artificial Sequence
  Description of Artificial Sequence: Synthetic oligonucleotide
  Target: LAMA2; (-) strand; PAM type: YTN; PAM sequence: CTC
tctggctgcccttaacattt

SEQ ID NO: 207169 - DNA, 20 bp, Artificial Sequence
  Description of Artificial Sequence: Synthetic oligonucleotide
  Target: LAMA2; (-) strand; PAM type: YTN; PAM sequence: TTC
tctctggctgcccttaacat

SEQ ID NO: 207170 - DNA, 20 bp, Artificial Sequence
  Description of Artificial Sequence: Synthetic oligonucleotide
  Target: LAMA2; (-) strand; PAM type: YTN; PAM sequence: TTT
ctctctggctgcccttaaca

SEQ ID NO: 207171 - DNA, 20 bp, Artificial Sequence
  Description of Artificial Sequence: Synthetic oligonucleotide
  Target: LAMA2; (-) strand; PAM type: YTN; PAM sequence: CTT
tctctctggctgcccttaac

SEQ ID NO: 207172 - DNA, 20 bp, Artificial Sequence
  Description of Artificial Sequence: Synthetic oligonucleotide
  Target: LAMA2; (-) strand; PAM type: YTN; PAM sequence: TTG
agggtaacccgacctttctc

SEQ ID NO: 207173 - DNA, 20 bp, Artificial Sequence
  Description of Artificial Sequence: Synthetic oligonucleotide
  Target: LAMA2; (-) strand; PAM type: YTN; PAM sequence: TTT
gagggtaacccgacctttct

SEQ ID NO: 207174 - DNA, 20 bp, Artificial Sequence
  Description of Artificial Sequence: Synthetic oligonucleotide
  Target: LAMA2; (-) strand; PAM type: YTN; PAM sequence: CTT
tgagggtaacccgacctttc

SEQ ID NO: 207175 - DNA, 20 bp, Artificial Sequence
  Description of Artificial Sequence: Synthetic oligonucleotide
  Target: LAMA2; (-) strand; PAM type: YTN; PAM sequence: TTC
ctttgagggtaacccgacct

SEQ ID NO: 207176 - DNA, 20 bp, Artificial Sequence
  Description of Artificial Sequence: Synthetic oligonucleotide
  Target: LAMA2; (-) strand; PAM type: YTN; PAM sequence: TTT
cctttgagggtaacccgacc

SEQ ID NO: 207177 - DNA, 20 bp, Artificial Sequence
  Description of Artificial Sequence: Synthetic oligonucleotide
  Target: LAMA2; (-) strand; PAM type: YTN; PAM sequence: CTT
tcctttgagggtaacccgac

SEQ ID NO: 207178 - DNA, 20 bp, Artificial Sequence
  Description of Artificial Sequence: Synthetic oligonucleotide
  Target: LAMA2; (-) strand; PAM type: YTN; PAM sequence: CTG
atgggctttcctttgagggt

SEQ ID NO: 207179 - DNA, 20 bp, Artificial Sequence
  Description of Artificial Sequence: Synthetic oligonucleotide
  Target: LAMA2; (-) strand; PAM type: YTN; PAM sequence: TTA
gtctgatgggctttcctttg

SEQ ID NO: 207180 - DNA, 20 bp, Artificial Sequence
  Description of Artificial Sequence: Synthetic oligonucleotide
  Target: LAMA2; (-) strand; PAM type: YTN; PAM sequence: CTG
ttagtctgatgggctttcct

SEQ ID NO: 207181 - DNA, 20 bp, Artificial Sequence
  Description of Artificial Sequence: Synthetic oligonucleotide
  Target: LAMA2; (-) strand; PAM type: YTN; PAM sequence: CTG
ccgagagatccgctgttagt

SEQ ID NO: 207182 - DNA, 20 bp, Artificial Sequence
  Description of Artificial Sequence: Synthetic oligonucleotide
  Target: LAMA2; (-) strand; PAM type: YTN; PAM sequence: TTC
tgccgagagatccgctgtta

SEQ ID NO: 207183 - DNA, 20 bp, Artificial Sequence
  Description of Artificial Sequence: Synthetic oligonucleotide
  Target: LAMA2; (-) strand; PAM type: YTN; PAM sequence: TTT
ctgccgagagatccgctgtt

SEQ ID NO: 207184 - DNA, 20 bp, Artificial Sequence
  Description of Artificial Sequence: Synthetic oligonucleotide
  Target: LAMA2; (-) strand; PAM type: YTN; PAM sequence: TTG
tagggtttctgccgagagat

SEQ ID NO: 207185 - DNA, 20 bp, Artificial Sequence
  Description of Artificial Sequence: Synthetic oligonucleotide
  Target: LAMA2; (-) strand; PAM type: YTN; PAM sequence: CTT
gtagggtttctgccgagaga

SEQ ID NO: 207186 - DNA, 20 bp, Artificial Sequence
  Description of Artificial Sequence: Synthetic oligonucleotide
  Target: LAMA2; (-) strand; PAM type: YTN; PAM sequence: CTG
gcttgtagggtttctgccga

SEQ ID NO: 207187 - DNA, 20 bp, Artificial Sequence
  Description of Artificial Sequence: Synthetic oligonucleotide
  Target: LAMA2; (-) strand; PAM type: YTN; PAM sequence: TTC
tggcttgtagggtttctgcc

SEQ ID NO: 207188 - DNA, 20 bp, Artificial Sequence
  Description of Artificial Sequence: Synthetic oligonucleotide
  Target: LAMA2; (-) strand; PAM type: YTN; PAM sequence: CTT
ctggcttgtagggtttctgc

SEQ ID NO: 207189 - DNA, 20 bp, Artificial Sequence
  Description of Artificial Sequence: Synthetic oligonucleotide
  Target: LAMA2; (-) strand; PAM type: YTN; PAM sequence: CTC
ttctggcttgtagggtttct

SEQ ID NO: 207190 - DNA, 20 bp, Artificial Sequence
  Description of Artificial Sequence: Synthetic oligonucleotide
  Target: LAMA2; (-) strand; PAM type: YTN; PAM sequence: CTC
tcttctggcttgtagggttt

SEQ ID NO: 207191 - DNA, 20 bp, Artificial Sequence
  Description of Artificial Sequence: Synthetic oligonucleotide
  Target: LAMA2; (-) strand; PAM type: YTN; PAM sequence: TTG
gcccccactctcttctggct

SEQ ID NO: 207192 - DNA, 20 bp, Artificial Sequence
  Description of Artificial Sequence: Synthetic oligonucleotide
  Target: LAMA2; (-) strand; PAM type: YTN; PAM sequence: TTG
aatattggcccccactctct

SEQ ID NO: 207193 - DNA, 20 bp, Artificial Sequence
  Description of Artificial Sequence: Synthetic oligonucleotide
  Target: LAMA2; (-) strand; PAM type: YTN; PAM sequence: TTA
agaatgttgaatattggccc

SEQ ID NO: 207194 - DNA, 20 bp, Artificial Sequence
  Description of Artificial Sequence: Synthetic oligonucleotide
  Target: LAMA2; (-) strand; PAM type: YTN; PAM sequence: TTT
aagaatgttgaatattggcc

SEQ ID NO: 207195 - DNA, 20 bp, Artificial Sequence
  Description of Artificial Sequence: Synthetic oligonucleotide
  Target: LAMA2; (-) strand; PAM type: YTN; PAM sequence: CTT
taagaatgttgaatattggc

SEQ ID NO: 207196 - DNA, 20 bp, Artificial Sequence
  Description of Artificial Sequence: Synthetic oligonucleotide
  Target: LAMA2; (-) strand; PAM type: YTN; PAM sequence: TTC
tttaagaatgttgaatattg

SEQ ID NO: 207197 - DNA, 20 bp, Artificial Sequence
  Description of Artificial Sequence: Synthetic oligonucleotide
  Target: LAMA2; (-) strand; PAM type: YTN; PAM sequence: TTT
ctttaagaatgttgaatatt

SEQ ID NO: 207198 - DNA, 20 bp, Artificial Sequence
  Description of Artificial Sequence: Synthetic oligonucleotide
  Target: LAMA2; (-) strand; PAM type: YTN; PAM sequence: TTT
tctttaagaatgttgaatat

SEQ ID NO: 207199 - DNA, 20 bp, Artificial Sequence
  Description of Artificial Sequence: Synthetic oligonucleotide
  Target: LAMA2; (-) strand; PAM type: YTN; PAM sequence: CTT
ttctttaagaatgttgaata

SEQ ID NO: 207200 - DNA, 20 bp, Artificial Sequence
  Description of Artificial Sequence: Synthetic oligonucleotide
  Target: LAMA2; (-) strand; PAM type: YTN; PAM sequence: TTC
ttttctttaagaatgttgaa

SEQ ID NO: 207201 - DNA, 20 bp, Artificial Sequence
  Description of Artificial Sequence: Synthetic oligonucleotide
  Target: LAMA2; (-) strand; PAM type: YTN; PAM sequence: TTG
aaaattcttttctttaagaa

SEQ ID NO: 207202 - DNA, 20 bp, Artificial Sequence
  Description of Artificial Sequence: Synthetic oligonucleotide
  Target: LAMA2; (-) strand; PAM type: YTN; PAM sequence: CTG
ggttgaaaattcttttcttt

SEQ ID NO: 207203 - DNA, 20 bp, Artificial Sequence
  Description of Artificial Sequence: Synthetic oligonucleotide
  Target: LAMA2; (-) strand; PAM type: YTN; PAM sequence: TTC
tgggttgaaaattcttttct

SEQ ID NO: 207204 - DNA, 20 bp, Artificial Sequence
  Description of Artificial Sequence: Synthetic oligonucleotide
  Target: LAMA2; (-) strand; PAM type: YTN; PAM sequence: CTG
gatatgaaattctgggttga

SEQ ID NO: 207205 - DNA, 20 bp, Artificial Sequence
  Description of Artificial Sequence: Synthetic oligonucleotide
  Target: LAMA2; (-) strand; PAM type: YTN; PAM sequence: TTG
gctggatatgaaattctggg

SEQ ID NO: 207206 - DNA, 20 bp, Artificial Sequence
  Description of Artificial Sequence: Synthetic oligonucleotide
  Target: LAMA2; (-) strand; PAM type: YTN; PAM sequence: TTT
ggctggatatgaaattctgg

SEQ ID NO: 207207 - DNA, 20 bp, Artificial Sequence
  Description of Artificial Sequence: Synthetic oligonucleotide
  Target: LAMA2; (-) strand; PAM type: YTN; PAM sequence: TTA
gtttggctggatatgaaatt

SEQ ID NO: 207208 - DNA, 20 bp, Artificial Sequence
  Description of Artificial Sequence: Synthetic oligonucleotide
  Target: LAMA2; (-) strand; PAM type: YTN; PAM sequence: CTT
agtttggctggatatgaaat

SEQ ID NO: 207209 - DNA, 20 bp, Artificial Sequence
  Description of Artificial Sequence: Synthetic oligonucleotide
  Target: LAMA2; (-) strand; PAM type: YTN; PAM sequence: TTA
tgaagcttagtttggctgga

SEQ ID NO: 207210 - DNA, 20 bp, Artificial Sequence
  Description of Artificial Sequence: Synthetic oligonucleotide
  Target: LAMA2; (-) strand; PAM type: YTN; PAM sequence: CTT
atgaagcttagtttggctgg

SEQ ID NO: 207211 - DNA, 20 bp, Artificial Sequence
  Description of Artificial Sequence: Synthetic oligonucleotide
  Target: LAMA2; (-) strand; PAM type: YTN; PAM sequence: TTC
acttatgaagcttagtttgg

SEQ ID NO: 207212 - DNA, 20 bp, Artificial Sequence
  Description of Artificial Sequence: Synthetic oligonucleotide
  Target: LAMA2; (-) strand; PAM type: YTN; PAM sequence: CTT
cacttatgaagcttagtttg

SEQ ID NO: 207213 - DNA, 20 bp, Artificial Sequence
  Description of Artificial Sequence: Synthetic oligonucleotide
  Target: LAMA2; (-) strand; PAM type: YTN; PAM sequence: CTC
cttcacttatgaagcttagt

SEQ ID NO: 207214 - DNA, 20 bp, Artificial Sequence
  Description of Artificial Sequence: Synthetic oligonucleotide
  Target: LAMA2; (-) strand; PAM type: YTN; PAM sequence: TTC
tccttcacttatgaagctta

SEQ ID NO: 207215 - DNA, 20 bp, Artificial Sequence
  Description of Artificial Sequence: Synthetic oligonucleotide
  Target: LAMA2; (-) strand; PAM type: YTN; PAM sequence: TTT
ctccttcacttatgaagctt

SEQ ID NO: 207216 - DNA, 20 bp, Artificial Sequence
  Description of Artificial Sequence: Synthetic oligonucleotide
  Target: LAMA2; (-) strand; PAM type: YTN; PAM sequence: TTA
tttctccttcacttatgaag

SEQ ID NO: 207217 - DNA, 20 bp, Artificial Sequence
  Description of Artificial Sequence: Synthetic oligonucleotide
  Target: LAMA2; (-) strand; PAM type: YTN; PAM sequence: TTT
atttctccttcacttatgaa

SEQ ID NO: 207218 - DNA, 20 bp, Artificial Sequence
  Description of Artificial Sequence: Synthetic oligonucleotide
  Target: LAMA2; (-) strand; PAM type: YTN; PAM sequence: TTT
tatttctccttcacttatga

SEQ ID NO: 207219 - DNA, 20 bp, Artificial Sequence
  Description of Artificial Sequence: Synthetic oligonucleotide
  Target: LAMA2; (-) strand; PAM type: YTN; PAM sequence: CTA
taaagtattttatttctcct

SEQ ID NO: 207220 - DNA, 20 bp, Artificial Sequence
  Description of Artificial Sequence: Synthetic oligonucleotide
  Target: LAMA2; (-) strand; PAM type: YTN; PAM sequence: TTG
tctataaagtattttatttc

SEQ ID NO: 207221 - DNA, 20 bp, Artificial Sequence
  Description of Artificial Sequence: Synthetic oligonucleotide
  Target: LAMA2; (-) strand; PAM type: YTN; PAM sequence: CTT
gtctataaagtattttattt

SEQ ID NO: 207222 - DNA, 20 bp, Artificial Sequence
  Description of Artificial Sequence: Synthetic oligonucleotide
  Target: LAMA2; (-) strand; PAM type: YTN; PAM sequence: TTG
cttgtctataaagtatttta

SEQ ID NO: 207223 - DNA, 20 bp, Artificial Sequence
  Description of Artificial Sequence: Synthetic oligonucleotide
  Target: LAMA2; (-) strand; PAM type: YTN; PAM sequence: TTT
gcttgtctataaagtatttt

SEQ ID NO: 207224 - DNA, 20 bp, Artificial Sequence
  Description of Artificial Sequence: Synthetic oligonucleotide
  Target: LAMA2; (-) strand; PAM type: YTN; PAM sequence: CTC
aacatttgcttgtctataaa

SEQ ID NO: 207225 - DNA, 20 bp, Artificial Sequence
  Description of Artificial Sequence: Synthetic oligonucleotide
  Target: LAMA2; (-) strand; PAM type: YTN; PAM sequence: CTC
tcaacatttgcttgtctata

SEQ ID NO: 207226 - DNA, 20 bp, Artificial Sequence
  Description of Artificial Sequence: Synthetic oligonucleotide
  Target: LAMA2; (-) strand; PAM type: YTN; PAM sequence: CTG
gtggtgacaaaatctctcaa

SEQ ID NO: 207227 - DNA, 20 bp, Artificial Sequence
  Description of Artificial Sequence: Synthetic oligonucleotide
  Target: LAMA2; (-) strand; PAM type: YTN; PAM sequence: TTA
gggcaggcctggtggtgaca

SEQ ID NO: 207228 - DNA, 20 bp, Artificial Sequence
  Description of Artificial Sequence: Synthetic oligonucleotide
  Target: LAMA2; (-) strand; PAM type: YTN; PAM sequence: TTT
agggcaggcctggtggtgac

SEQ ID NO: 207229 - DNA, 20 bp, Artificial Sequence
  Description of Artificial Sequence: Synthetic oligonucleotide
  Target: LAMA2; (-) strand; PAM type: YTN; PAM sequence: TTT
tagggcaggcctggtggtga

SEQ ID NO: 207230 - DNA, 20 bp, Artificial Sequence
  Description of Artificial Sequence: Synthetic oligonucleotide
  Target: LAMA2; (-) strand; PAM type: YTN; PAM sequence: CTT
ttagggcaggcctggtggtg

SEQ ID NO: 207231 - DNA, 20 bp, Artificial Sequence
  Description of Artificial Sequence: Synthetic oligonucleotide
  Target: LAMA2; (-) strand; PAM type: YTN; PAM sequence: CTC
ttttagggcaggcctggtgg

SEQ ID NO: 207232 - DNA, 20 bp, Artificial Sequence
  Description of Artificial Sequence: Synthetic oligonucleotide
  Target: LAMA2; (-) strand; PAM type: YTN; PAM sequence: TTC
aggagctcttttagggcagg

SEQ ID NO: 207233 - DNA, 20 bp, Artificial Sequence
  Description of Artificial Sequence: Synthetic oligonucleotide
  Target: LAMA2; (-) strand; PAM type: YTN; PAM sequence: CTT
caggagctcttttagggcag

SEQ ID NO: 207234 - DNA, 20 bp, Artificial Sequence
  Description of Artificial Sequence: Synthetic oligonucleotide
  Target: LAMA2; (-) strand; PAM type: YTN; PAM sequence: TTC
cttcaggagctcttttaggg

SEQ ID NO: 207235 - DNA, 20 bp, Artificial Sequence
  Description of Artificial Sequence: Synthetic oligonucleotide
  Target: LAMA2; (-) strand; PAM type: YTN; PAM sequence: CTT
ccttcaggagctcttttagg

SEQ ID NO: 207236 - DNA, 20 bp, Artificial Sequence
  Description of Artificial Sequence: Synthetic oligonucleotide
  Target: LAMA2; (-) strand; PAM type: YTN; PAM sequence: TTA
gcgcttccttcaggagctct

SEQ ID NO: 207237 - DNA, 20 bp, Artificial Sequence
  Description of Artificial Sequence: Synthetic oligonucleotide
  Target: LAMA2; (-) strand; PAM type: YTN; PAM sequence: TTT
agcgcttccttcaggagctc

SEQ ID NO: 207238 - DNA, 20 bp, Artificial Sequence
  Description of Artificial Sequence: Synthetic oligonucleotide
  Target: LAMA2; (-) strand; PAM type: YTN; PAM sequence: TTC
catgtttagcgcttccttca

SEQ ID NO: 207239 - DNA, 20 bp, Artificial Sequence
  Description of Artificial Sequence: Synthetic oligonucleotide
  Target: LAMA2; (-) strand; PAM type: YTN; PAM sequence: TTT
ccatgtttagcgcttccttc

SEQ ID NO: 207240 - DNA, 20 bp, Artificial Sequence
  Description of Artificial Sequence: Synthetic oligonucleotide
  Target: LAMA2; (-) strand; PAM type: YTN; PAM sequence: CTT
tccatgtttagcgcttcctt

SEQ ID NO: 207241 - DNA, 20 bp, Artificial Sequence
  Description of Artificial Sequence: Synthetic oligonucleotide
  Target: LAMA2; (-) strand; PAM type: YTN; PAM sequence: TTC
ctttccatgtttagcgcttc

SEQ ID NO: 207242 - DNA, 20 bp, Artificial Sequence
  Description of Artificial Sequence: Synthetic oligonucleotide
  Target: LAMA2; (-) strand; PAM type: YTN; PAM sequence: TTG
ttcctttccatgtttagcgc

SEQ ID NO: 207243 - DNA, 20 bp, Artificial Sequence
  Description of Artificial Sequence: Synthetic oligonucleotide
  Target: LAMA2; (-) strand; PAM type: YTN; PAM sequence: CTG
gtaccggttgttcctttcca

SEQ ID NO: 207244 - DNA, 20 bp, Artificial Sequence
  Description of Artificial Sequence: Synthetic oligonucleotide
  Target: LAMA2; (-) strand; PAM type: YTN; PAM sequence: TTG
cagcggctggtaccggttgt

SEQ ID NO: 207245 - DNA, 20 bp, Artificial Sequence
  Description of Artificial Sequence: Synthetic oligonucleotide
  Target: LAMA2; (-) strand; PAM type: YTN; PAM sequence: TTT
gcagcggctggtaccggttg

SEQ ID NO: 207246 - DNA, 20 bp, Artificial Sequence
  Description of Artificial Sequence: Synthetic oligonucleotide
  Target: LAMA2; (-) strand; PAM type: YTN; PAM sequence: TTT
tgcagcggctggtaccggtt

SEQ ID NO: 207247 - DNA, 20 bp, Artificial Sequence
  Description of Artificial Sequence: Synthetic oligonucleotide
  Target: LAMA2; (-) strand; PAM type: YTN; PAM sequence: TTG
gcatgattttgcagcggctg

SEQ ID NO: 207248 - DNA, 20 bp, Artificial Sequence
  Description of Artificial Sequence: Synthetic oligonucleotide
  Target: LAMA2; (-) strand; PAM type: YTN; PAM sequence: TTT
ggcatgattttgcagcggct

SEQ ID NO: 207249 - DNA, 20 bp, Artificial Sequence
  Description of Artificial Sequence: Synthetic oligonucleotide
  Target: LAMA2; (-) strand; PAM type: YTN; PAM sequence: TTT
tggcatgattttgcagcggc

SEQ ID NO: 207250 - DNA, 20 bp, Artificial Sequence
  Description of Artificial Sequence: Synthetic oligonucleotide
  Target: LAMA2; (-) strand; PAM type: YTN; PAM sequence: TTA
cattttggcatgattttgca

SEQ ID NO: 207251 - DNA, 20 bp, Artificial Sequence
  Description of Artificial Sequence: Synthetic oligonucleotide
  Target: LAMA2; (-) strand; PAM type: YTN; PAM sequence: TTT
acattttggcatgattttgc

SEQ ID NO: 207252 - DNA, 20 bp, Artificial Sequence
  Description of Artificial Sequence: Synthetic oligonucleotide
  Target: LAMA2; (-) strand; PAM type: YTN; PAM sequence: CTT
tacattttggcatgattttg

SEQ ID NO: 207253 - DNA, 20 bp, Artificial Sequence
  Description of Artificial Sequence: Synthetic oligonucleotide
  Target: LAMA2; (-) strand; PAM type: YTN; PAM sequence: CTC
gatggtctttacattttggc

SEQ ID NO: 207254 - DNA, 20 bp, Artificial Sequence
  Description of Artificial Sequence: Synthetic oligonucleotide
  Target: LAMA2; (-) strand; PAM type: YTN; PAM sequence: CTA
gtctcgatggtctttacatt

SEQ ID NO: 207255 - DNA, 20 bp, Artificial Sequence
  Description of Artificial Sequence: Synthetic oligonucleotide
  Target: LAMA2; (-) strand; PAM type: YTN; PAM sequence: TTC
ctagtctcgatggtctttac

SEQ ID NO: 207256 - DNA, 20 bp, Artificial Sequence
  Description of Artificial Sequence: Synthetic oligonucleotide
  Target: LAMA2; (-) strand; PAM type: YTN; PAM sequence: CTT
cctagtctcgatggtcttta

SEQ ID NO: 207257 - DNA, 20 bp, Artificial Sequence
  Description of Artificial Sequence: Synthetic oligonucleotide
  Target: LAMA2; (-) strand; PAM type: YTN; PAM sequence: TTC
ttcctagtctcgatggtctt

SEQ ID NO: 207258 - DNA, 20 bp, Artificial Sequence
  Description of Artificial Sequence: Synthetic oligonucleotide
  Target: LAMA2; (-) strand; PAM type: YTN; PAM sequence: TTT
cttcctagtctcgatggtct

SEQ ID NO: 207259 - DNA, 20 bp, Artificial Sequence
  Description of Artificial Sequence: Synthetic oligonucleotide
  Target: LAMA2; (-) strand; PAM type: YTN; PAM sequence: TTG
atgcagtttcttcctagtct

SEQ ID NO: 207260 - DNA, 20 bp, Artificial Sequence
  Description of Artificial Sequence: Synthetic oligonucleotide
  Target: LAMA2; (-) strand; PAM type: YTN; PAM sequence: TTA
gttgatgcagtttcttccta

SEQ ID NO: 207261 - DNA, 20 bp, Artificial Sequence
  Description of Artificial Sequence: Synthetic oligonucleotide
  Target: LAMA2; (-) strand; PAM type: YTN; PAM sequence: CTC
attagttgatgcagtttctt

SEQ ID NO: 207262 - DNA, 20 bp, Artificial Sequence
  Description of Artificial Sequence: Synthetic oligonucleotide
  Target: LAMA2; (-) strand; PAM type: YTN; PAM sequence: TTG
ctcattagttgatgcagttt

SEQ ID NO: 207263 - DNA, 20 bp, Artificial Sequence
  Description of Artificial Sequence: Synthetic oligonucleotide
  Target: LAMA2; (-) strand; PAM type: YTN; PAM sequence: TTT
gctcattagttgatgcagtt

SEQ ID NO: 207264 - DNA, 20 bp, Artificial Sequence
  Description of Artificial Sequence: Synthetic oligonucleotide
  Target: LAMA2; (-) strand; PAM type: YTN; PAM sequence: TTT
tgctcattagttgatgcagt

SEQ ID NO: 207265 - DNA, 20 bp, Artificial Sequence
  Description of Artificial Sequence: Synthetic oligonucleotide
  Target: LAMA2; (-) strand; PAM type: YTN; PAM sequence: CTG
gtgattttgctcattagttg

SEQ ID NO: 207266 - DNA, 20 bp, Artificial Sequence
  Description of Artificial Sequence: Synthetic oligonucleotide
  Target: LAMA2; (-) strand; PAM type: YTN; PAM sequence: TTA
gctggtgattttgctcatta

SEQ ID NO: 207267 - DNA, 20 bp, Artificial Sequence
  Description of Artificial Sequence: Synthetic oligonucleotide
  Target: LAMA2; (-) strand; PAM type: YTN; PAM sequence: CTG
tcatgatgatgttagctggt

SEQ ID NO: 207268 - DNA, 20 bp, Artificial Sequence
  Description of Artificial Sequence: Synthetic oligonucleotide
  Target: LAMA2; (-) strand; PAM type: YTN; PAM sequence: TTG
atcctgtcatgatgatgtta

SEQ ID NO: 207269 - DNA, 20 bp, Artificial Sequence
  Description of Artificial Sequence: Synthetic oligonucleotide
  Target: LAMA2; (-) strand; PAM type: YTN; PAM sequence: TTT
gatcctgtcatgatgatgtt

SEQ ID NO: 207270 - DNA, 20 bp, Artificial Sequence
  Description of Artificial Sequence: Synthetic oligonucleotide
  Target: LAMA2; (-) strand; PAM type: YTN; PAM sequence: TTA
tgtgtgaatttgatcctgtc

SEQ ID NO: 207271 - DNA, 20 bp, Artificial Sequence
  Description of Artificial Sequence: Synthetic oligonucleotide
  Target: LAMA2; (-) strand; PAM type: YTN; PAM sequence: TTG
ttatgtgtgaatttgatcct

SEQ ID NO: 207272 - DNA, 20 bp, Artificial Sequence
  Description of Artificial Sequence: Synthetic oligonucleotide
  Target: LAMA2; (-) strand; PAM type: YTN; PAM sequence: TTA
atattgttatgtgtgaattt

SEQ ID NO: 207273 - DNA, 20 bp, Artificial Sequence
  Description of Artificial Sequence: Synthetic oligonucleotide
  Target: LAMA2; (-) strand; PAM type: YTN; PAM sequence: TTA
aagttaatattgttatgtgt

SEQ ID NO: 207274 - DNA, 20 bp, Artificial Sequence
  Description of Artificial Sequence: Synthetic oligonucleotide
  Target: LAMA2; (-) strand; PAM type: YTN; PAM sequence: TTT
aaagttaatattgttatgtg

SEQ ID NO: 207275 - DNA, 20 bp, Artificial Sequence
  Description of Artificial Sequence: Synthetic oligonucleotide
  Target: LAMA2; (-) strand; PAM type: YTN; PAM sequence: TTA
tatttaaagttaatattgtt

SEQ ID NO: 207276 - DNA, 20 bp, Artificial Sequence
  Description of Artificial Sequence: Synthetic oligonucleotide
  Target: LAMA2; (-) strand; PAM type: YTN; PAM sequence: TTT
atatttaaagttaatattgt

SEQ ID NO: 207277 - DNA, 20 bp, Artificial Sequence
  Description of Artificial Sequence: Synthetic oligonucleotide
  Target: LAMA2; (-) strand; PAM type: YTN; PAM sequence: TTA
gtccatttatatttaaagtt

SEQ ID NO: 207278 - DNA, 20 bp, Artificial Sequence
  Description of Artificial Sequence: Synthetic oligonucleotide
  Target: LAMA2; (-) strand; PAM type: YTN; PAM sequence: TTT
agtccatttatatttaaagt

SEQ ID NO: 207279 - DNA, 20 bp, Artificial Sequence
  Description of Artificial Sequence: Synthetic oligonucleotide
  Target: LAMA2; (-) strand; PAM type: YTN; PAM sequence: TTG
cagaatttagtccatttata

SEQ ID NO: 207280 - DNA, 20 bp, Artificial Sequence
  Description of Artificial Sequence: Synthetic oligonucleotide
  Target: LAMA2; (-) strand; PAM type: YTN; PAM sequence: TTA
attgcagaatttagtccatt

SEQ ID NO: 207281 - DNA, 20 bp, Artificial Sequence
  Description of Artificial Sequence: Synthetic oligonucleotide
  Target: LAMA2; (-) strand; PAM type: YTN; PAM sequence: TTT
aattgcagaatttagtccat

SEQ ID NO: 207282 - DNA, 20 bp, Artificial Sequence
  Description of Artificial Sequence: Synthetic oligonucleotide
  Target: LAMA2; (-) strand; PAM type: YTN; PAM sequence: TTT
taattgcagaatttagtcca

SEQ ID NO: 207283 - DNA, 20 bp, Artificial Sequence
  Description of Artificial Sequence: Synthetic oligonucleotide
  Target: LAMA2; (-) strand; PAM type: YTN; PAM sequence: CTT
ttaattgcagaatttagtcc

SEQ ID NO: 207284 - DNA, 20 bp, Artificial Sequence
  Description of Artificial Sequence: Synthetic oligonucleotide
  Target: LAMA2; (-) strand; PAM type: YTN; PAM sequence: TTG
tgtcttttaattgcagaatt

SEQ ID NO: 207285 - DNA, 20 bp, Artificial Sequence
  Description of Artificial Sequence: Synthetic oligonucleotide
  Target: LAMA2; (-) strand; PAM type: YTN; PAM sequence: TTT
gtgtcttttaattgcagaat

SEQ ID NO: 207286 - DNA, 20 bp, Artificial Sequence
  Description of Artificial Sequence: Synthetic oligonucleotide
  Target: LAMA2; (-) strand; PAM type: YTN; PAM sequence: TTG
ccagtttgtgtcttttaatt

SEQ ID NO: 207287 - DNA, 20 bp, Artificial Sequence
  Description of Artificial Sequence: Synthetic oligonucleotide
  Target: LAMA2; (-) strand; PAM type: YTN; PAM sequence: CTT
gccagtttgtgtcttttaat

SEQ ID NO: 207288 - DNA, 20 bp, Artificial Sequence
  Description of Artificial Sequence: Synthetic oligonucleotide
  Target: LAMA2; (-) strand; PAM type: YTN; PAM sequence: TTA
tccaacttgccagtttgtgt

SEQ ID NO: 207289 - DNA, 20 bp, Artificial Sequence
  Description of Artificial Sequence: Synthetic oligonucleotide
  Target: LAMA2; (-) strand; PAM type: YTN; PAM sequence: TTT
atccaacttgccagtttgtg

SEQ ID NO: 207290 - DNA, 20 bp, Artificial Sequence
  Description of Artificial Sequence: Synthetic oligonucleotide
  Target: LAMA2; (-) strand; PAM type: YTN; PAM sequence: CTT
tatccaacttgccagtttgt

SEQ ID NO: 207291 - DNA, 20 bp, Artificial Sequence
  Description of Artificial Sequence: Synthetic oligonucleotide
  Target: LAMA2; (-) strand; PAM type: YTN; PAM sequence: CTC
tttatccaacttgccagttt

SEQ ID NO: 207292 - DNA, 20 bp, Artificial Sequence
  Description of Artificial Sequence: Synthetic oligonucleotide
  Target: LAMA2; (-) strand; PAM type: YTN; PAM sequence: TTG
actctttatccaacttgcca

SEQ ID NO: 207293 - DNA, 20 bp, Artificial Sequence
  Description of Artificial Sequence: Synthetic oligonucleotide
  Target: LAMA2; (-) strand; PAM type: YTN; PAM sequence: CTT
gactctttatccaacttgcc

SEQ ID NO: 207294 - DNA, 20 bp, Artificial Sequence
  Description of Artificial Sequence: Synthetic oligonucleotide
  Target: LAMA2; (-) strand; PAM type: YTN; PAM sequence: CTG
atgggtcttgactctttatc

SEQ ID NO: 207295 - DNA, 20 bp, Artificial Sequence
  Description of Artificial Sequence: Synthetic oligonucleotide
  Target: LAMA2; (-) strand; PAM type: YTN; PAM sequence: CTG
aatacagcacactgatgggt

SEQ ID NO: 207296 - DNA, 20 bp, Artificial Sequence
  Description of Artificial Sequence: Synthetic oligonucleotide
  Target: LAMA2; (-) strand; PAM type: YTN; PAM sequence: TTC
ctgaatacagcacactgatg

SEQ ID NO: 207297 - DNA, 20 bp, Artificial Sequence
  Description of Artificial Sequence: Synthetic oligonucleotide
  Target: LAMA2; (-) strand; PAM type: YTN; PAM sequence: TTT
cctgaatacagcacactgat

SEQ ID NO: 207298 - DNA, 20 bp, Artificial Sequence
  Description of Artificial Sequence: Synthetic oligonucleotide
  Target: LAMA2; (-) strand; PAM type: YTN; PAM sequence: CTG
cacgtgagatgggtttcctg

SEQ ID NO: 207299 - DNA, 20 bp, Artificial Sequence
  Description of Artificial Sequence: Synthetic oligonucleotide
  Target: LAMA2; (-) strand; PAM type: YTN; PAM sequence: CTC
tgcacgtgagatgggtttcc

SEQ ID NO: 207300 - DNA, 20 bp, Artificial Sequence
  Description of Artificial Sequence: Synthetic oligonucleotide
  Target: LAMA2; (-) strand; PAM type: YTN; PAM sequence: CTA
tgtgtgtctctgcacgtgag

SEQ ID NO: 207301 - DNA, 20 bp, Artificial Sequence
  Description of Artificial Sequence: Synthetic oligonucleotide
  Target: LAMA2; (-) strand; PAM type: YTN; PAM sequence: TTG
agcctatgtgtgtctctgca

SEQ ID NO: 207302 - DNA, 20 bp, Artificial Sequence
  Description of Artificial Sequence: Synthetic oligonucleotide
  Target: LAMA2; (-) strand; PAM type: YTN; PAM sequence: TTT
gagcctatgtgtgtctctgc

SEQ ID NO: 207303 - DNA, 20 bp, Artificial Sequence
  Description of Artificial Sequence: Synthetic oligonucleotide
  Target: LAMA2; (-) strand; PAM type: YTN; PAM sequence: TTT
tgagcctatgtgtgtctctg

SEQ ID NO: 207304 - DNA, 20 bp, Artificial Sequence
  Description of Artificial Sequence: Synthetic oligonucleotide
  Target: LAMA2; (-) strand; PAM type: YTN; PAM sequence: TTA
ttttgagcctatgtgtgtct

SEQ ID NO: 207305 - DNA, 20 bp, Artificial Sequence
  Description of Artificial Sequence: Synthetic oligonucleotide
  Target: LAMA2; (-) strand; PAM type: YTN; PAM sequence: TTT
attttgagcctatgtgtgtc

SEQ ID NO: 207306 - DNA, 20 bp, Artificial Sequence
  Description of Artificial Sequence: Synthetic oligonucleotide
  Target: LAMA2; (-) strand; PAM type: YTN; PAM sequence: TTT
tattttgagcctatgtgtgt

SEQ ID NO: 207307 - DNA, 20 bp, Artificial Sequence
  Description of Artificial Sequence: Synthetic oligonucleotide
  Target: LAMA2; (-) strand; PAM type: YTN; PAM sequence: CTT
ttattttgagcctatgtgtg

SEQ ID NO: 207308 - DNA, 20 bp, Artificial Sequence
  Description of Artificial Sequence: Synthetic oligonucleotide
  Target: LAMA2; (-) strand; PAM type: YTN; PAM sequence: CTC
catccttttattttgagcct

SEQ ID NO: 207309 - DNA, 20 bp, Artificial Sequence
  Description of Artificial Sequence: Synthetic oligonucleotide
  Target: LAMA2; (-) strand; PAM type: YTN; PAM sequence: TTC
ctccatccttttattttgag

SEQ ID NO: 207310 - DNA, 20 bp, Artificial Sequence
  Description of Artificial Sequence: Synthetic oligonucleotide
  Target: LAMA2; (-) strand; PAM type: YTN; PAM sequence: CTT
cctccatccttttattttga

SEQ ID NO: 207311 - DNA, 20 bp, Artificial Sequence
  Description of Artificial Sequence: Synthetic oligonucleotide
  Target: LAMA2; (-) strand; PAM type: YTN; PAM sequence: TTG
gtagatcttcctccatcctt

SEQ ID NO: 207312 - DNA, 20 bp, Artificial Sequence
  Description of Artificial Sequence: Synthetic oligonucleotide
  Target: LAMA2; (-) strand; PAM type: YTN; PAM sequence: CTT
ggtagatcttcctccatcct

SEQ ID NO: 207313 - DNA, 20 bp, Artificial Sequence
  Description of Artificial Sequence: Synthetic oligonucleotide
  Target: LAMA2; (-) strand; PAM type: YTN; PAM sequence: TTG
gcttggtagatcttcctcca

SEQ ID NO: 207314 - DNA, 20 bp, Artificial Sequence
  Description of Artificial Sequence: Synthetic oligonucleotide
  Target: LAMA2; (-) strand; PAM type: YTN; PAM sequence: TTC
cattggcttggtagatcttc

SEQ ID NO: 207315 - DNA, 20 bp, Artificial Sequence
  Description of Artificial Sequence: Synthetic oligonucleotide
  Target: LAMA2; (-) strand; PAM type: YTN; PAM sequence: TTT
ccattggcttggtagatctt

SEQ ID NO: 207316 - DNA, 20 bp, Artificial Sequence
  Description of Artificial Sequence: Synthetic oligonucleotide
  Target: LAMA2; (-) strand; PAM type: YTN; PAM sequence: TTT
tccattggcttggtagatct

SEQ ID NO: 207317 - DNA, 20 bp, Artificial Sequence
  Description of Artificial Sequence: Synthetic oligonucleotide
  Target: LAMA2; (-) strand; PAM type: YTN; PAM sequence: TTG
ttttccattggcttggtaga

SEQ ID NO: 207318 - DNA, 20 bp, Artificial Sequence
  Description of Artificial Sequence: Synthetic oligonucleotide
  Target: LAMA2; (-) strand; PAM type: YTN; PAM sequence: TTT
gttttccattggcttggtag

SEQ ID NO: 207319 - DNA, 20 bp, Artificial Sequence
  Description of Artificial Sequence: Synthetic oligonucleotide
  Target: LAMA2; (-) strand; PAM type: YTN; PAM sequence: TTT
tgttttccattggcttggta

SEQ ID NO: 207320 - DNA, 20 bp, Artificial Sequence
  Description of Artificial Sequence: Synthetic oligonucleotide
  Target: LAMA2; (-) strand; PAM type: YTN; PAM sequence: TTT
ttgttttccattggcttggt

SEQ ID NO: 207321 - DNA, 20 bp, Artificial Sequence
  Description of Artificial Sequence: Synthetic oligonucleotide
  Target: LAMA2; (-) strand; PAM type: YTN; PAM sequence: TTT
tttgttttccattggcttgg

SEQ ID NO: 207322 - DNA, 20 bp, Artificial Sequence
  Description of Artificial Sequence: Synthetic oligonucleotide
  Target: LAMA2; (-) strand; PAM type: YTN; PAM sequence: TTT
ttttgttttccattggcttg

SEQ ID NO: 207323 - DNA, 20 bp, Artificial Sequence
  Description of Artificial Sequence: Synthetic oligonucleotide
  Target: LAMA2; (-) strand; PAM type: YTN; PAM sequence: CTT
tttttgttttccattggctt

SEQ ID NO: 207324 - DNA, 20 bp, Artificial Sequence
  Description of Artificial Sequence: Synthetic oligonucleotide
  Target: LAMA2; (-) strand; PAM type: YTN; PAM sequence: CTG
cctttttttgttttccattg

SEQ ID NO: 207325 - DNA, 20 bp, Artificial Sequence
  Description of Artificial Sequence: Synthetic oligonucleotide
  Target: LAMA2; (-) strand; PAM type: YTN; PAM sequence: TTG
caacccctgcctttttttgt

SEQ ID NO: 207326 - DNA, 20 bp, Artificial Sequence
  Description of Artificial Sequence: Synthetic oligonucleotide
  Target: LAMA2; (-) strand; PAM type: YTN; PAM sequence: CTA
ggattgcaacccctgccttt

SEQ ID NO: 207327 - DNA, 20 bp, Artificial Sequence
  Description of Artificial Sequence: Synthetic oligonucleotide
  Target: LAMA2; (-) strand; PAM type: YTN; PAM sequence: TTG
tcagagactaggattgcaac

SEQ ID NO: 207328 - DNA, 20 bp, Artificial Sequence
  Description of Artificial Sequence: Synthetic oligonucleotide
  Target: LAMA2; (-) strand; PAM type: YTN; PAM sequence: TTT
gtcagagactaggattgcaa

SEQ ID NO: 207329 - DNA, 20 bp, Artificial Sequence
  Description of Artificial Sequence: Synthetic oligonucleotide
  Target: LAMA2; (-) strand; PAM type: YTN; PAM sequence: TTT
tgtcagagactaggattgca

SEQ ID NO: 207330 - DNA, 20 bp, Artificial Sequence
  Description of Artificial Sequence: Synthetic oligonucleotide
  Target: LAMA2; (-) strand; PAM type: YTN; PAM sequence: CTG
ttttgtcagagactaggatt

SEQ ID NO: 207331 - DNA, 20 bp, Artificial Sequence
  Description of Artificial Sequence: Synthetic oligonucleotide
  Target: LAMA2; (-) strand; PAM type: YTN; PAM sequence: TTA
aagtctgttttgtcagagac

SEQ ID NO: 207332 - DNA, 20 bp, Artificial Sequence
  Description of Artificial Sequence: Synthetic oligonucleotide
  Target: LAMA2; (-) strand; PAM type: YTN; PAM sequence: TTT
aaagtctgttttgtcagaga

SEQ ID NO: 207333 - DNA, 20 bp, Artificial Sequence
  Description of Artificial Sequence: Synthetic oligonucleotide
  Target: LAMA2; (-) strand; PAM type: YTN; PAM sequence: TTG
gtttaaagtctgttttgtca

SEQ ID NO: 207334 - DNA, 20 bp, Artificial Sequence
  Description of Artificial Sequence: Synthetic oligonucleotide
  Target: LAMA2; (-) strand; PAM type: YTN; PAM sequence: TTG
ttggtttaaagtctgttttg

SEQ ID NO: 207335 - DNA, 20 bp, Artificial Sequence
  Description of Artificial Sequence: Synthetic oligonucleotide
  Target: LAMA2; (-) strand; PAM type: YTN; PAM sequence: TTT
gttggtttaaagtctgtttt

SEQ ID NO: 207336 - DNA, 20 bp, Artificial Sequence
  Description of Artificial Sequence: Synthetic oligonucleotide
  Target: LAMA2; (-) strand; PAM type: YTN; PAM sequence: CTT
tgttggtttaaagtctgttt

SEQ ID NO: 207337 - DNA, 20 bp, Artificial Sequence
  Description of Artificial Sequence: Synthetic oligonucleotide
  Target: LAMA2; (-) strand; PAM type: YTN; PAM sequence: TTG
atctttgttggtttaaagtc

SEQ ID NO: 207338 - DNA, 20 bp, Artificial Sequence
  Description of Artificial Sequence: Synthetic oligonucleotide
  Target: LAMA2; (-) strand; PAM type: YTN; PAM sequence: TTT
gatctttgttggtttaaagt

SEQ ID NO: 207339 - DNA, 20 bp, Artificial Sequence
  Description of Artificial Sequence: Synthetic oligonucleotide
  Target: LAMA2; (-) strand; PAM type: YTN; PAM sequence: TTT
tgatctttgttggtttaaag

SEQ ID NO: 207340 - DNA, 20 bp, Artificial Sequence
  Description of Artificial Sequence: Synthetic oligonucleotide
  Target: LAMA2; (-) strand; PAM type: YTN; PAM sequence: CTT
ttgatctttgttggtttaaa

SEQ ID NO: 207341 - DNA, 20 bp, Artificial Sequence
  Description of Artificial Sequence: Synthetic oligonucleotide
  Target: LAMA2; (-) strand; PAM type: YTN; PAM sequence: CTC
ttttgatctttgttggttta

SEQ ID NO: 207342 - DNA, 20 bp, Artificial Sequence
  Description of Artificial Sequence: Synthetic oligonucleotide
  Target: LAMA2; (-) strand; PAM type: YTN; PAM sequence: TTG
tctcttttgatctttgttgg

SEQ ID NO: 207343 - DNA, 20 bp, Artificial Sequence
  Description of Artificial Sequence: Synthetic oligonucleotide
  Target: LAMA2; (-) strand; PAM type: YTN; PAM sequence: TTT
gtctcttttgatctttgttg

SEQ ID NO: 207344 - DNA, 20 bp, Artificial Sequence
  Description of Artificial Sequence: Synthetic oligonucleotide
  Target: LAMA2; (-) strand; PAM type: YTN; PAM sequence: CTT
tgtctcttttgatctttgtt

SEQ ID NO: 207345 - DNA, 20 bp, Artificial Sequence
  Description of Artificial Sequence: Synthetic oligonucleotide
  Target: LAMA2; (-) strand; PAM type: YTN; PAM sequence: TTC
tttgtctcttttgatctttg

SEQ ID NO: 207346 - DNA, 20 bp, Artificial Sequence
  Description of Artificial Sequence: Synthetic oligonucleotide
  Target: LAMA2; (-) strand; PAM type: YTN; PAM sequence: CTT
ctttgtctcttttgatcttt

SEQ ID NO: 207347 - DNA, 20 bp, Artificial Sequence
  Description of Artificial Sequence: Synthetic oligonucleotide
  Target: LAMA2; (-) strand; PAM type: YTN; PAM sequence: TTA
tgtaatggccttctttgtct

SEQ ID NO: 207348 - DNA, 20 bp, Artificial Sequence
  Description of Artificial Sequence: Synthetic oligonucleotide
  Target: LAMA2; (-) strand; PAM type: YTN; PAM sequence: TTA
ccattatgtaatggccttct

SEQ ID NO: 207349 - DNA, 20 bp, Artificial Sequence
  Description of Artificial Sequence: Synthetic oligonucleotide
  Target: LAMA2; (-) strand; PAM type: YTN; PAM sequence: TTT
accattatgtaatggccttc

SEQ ID NO: 207350 - DNA, 20 bp, Artificial Sequence
  Description of Artificial Sequence: Synthetic oligonucleotide
  Target: LAMA2; (-) strand; PAM type: YTN; PAM sequence: CTT
taccattatgtaatggcctt

SEQ ID NO: 207351 - DNA, 20 bp, Artificial Sequence
  Description of Artificial Sequence: Synthetic oligonucleotide
  Target: LAMA2; (-) strand; PAM type: YTN; PAM sequence: TTG
atccctttaccattatgtaa

SEQ ID NO: 207352 - DNA, 20 bp, Artificial Sequence
  Description of Artificial Sequence: Synthetic oligonucleotide
  Target: LAMA2; (-) strand; PAM type: YTN; PAM sequence: TTG
aattgatccctttaccatta

SEQ ID NO: 207353 - DNA, 20 bp, Artificial Sequence
  Description of Artificial Sequence: Synthetic oligonucleotide
  Target: LAMA2; (-) strand; PAM type: YTN; PAM sequence: TTG
ttgaattgatccctttacca

SEQ ID NO: 207354 - DNA, 20 bp, Artificial Sequence
  Description of Artificial Sequence: Synthetic oligonucleotide
  Target: LAMA2; (-) strand; PAM type: YTN; PAM sequence: CTT
gttgaattgatccctttacc

SEQ ID NO: 207355 - DNA, 20 bp, Artificial Sequence
  Description of Artificial Sequence: Synthetic oligonucleotide
  Target: LAMA2; (-) strand; PAM type: YTN; PAM sequence: CTC
ttgttgaattgatcccttta

SEQ ID NO: 207356 - DNA, 20 bp, Artificial Sequence
  Description of Artificial Sequence: Synthetic oligonucleotide
  Target: LAMA2; (-) strand; PAM type: YTN; PAM sequence: CTC
ctcttgttgaattgatccct

SEQ ID NO: 207357 - DNA, 20 bp, Artificial Sequence
  Description of Artificial Sequence: Synthetic oligonucleotide
  Target: LAMA2; (-) strand; PAM type: YTN; PAM sequence: TTA
gctcctcttgttgaattgat

SEQ ID NO: 207358 - DNA, 20 bp, Artificial Sequence
  Description of Artificial Sequence: Synthetic oligonucleotide
  Target: LAMA2; (-) strand; PAM type: YTN; PAM sequence: TTA
ggatagttagctcctcttgt

SEQ ID NO: 207359 - DNA, 20 bp, Artificial Sequence
  Description of Artificial Sequence: Synthetic oligonucleotide
  Target: LAMA2; (-) strand; PAM type: YTN; PAM sequence: TTT
aggatagttagctcctcttg

SEQ ID NO: 207360 - DNA, 20 bp, Artificial Sequence
  Description of Artificial Sequence: Synthetic oligonucleotide
  Target: LAMA2; (-) strand; PAM type: YTN; PAM sequence: TTG
ggtgcataaatatttaggat

SEQ ID NO: 207361 - DNA, 20 bp, Artificial Sequence
  Description of Artificial Sequence: Synthetic oligonucleotide
  Target: LAMA2; (-) strand; PAM type: YTN; PAM sequence: CTG
tattgggtgcataaatattt

SEQ ID NO: 207362 - DNA, 20 bp, Artificial Sequence
  Description of Artificial Sequence: Synthetic oligonucleotide
  Target: LAMA2; (-) strand; PAM type: YTN; PAM sequence: CTC
ctgtattgggtgcataaata

SEQ ID NO: 207363 - DNA, 20 bp, Artificial Sequence
  Description of Artificial Sequence: Synthetic oligonucleotide
  Target: LAMA2; (-) strand; PAM type: YTN; PAM sequence: CTG
ggtgctcctgtattgggtgc

SEQ ID NO: 207364 - DNA, 20 bp, Artificial Sequence
  Description of Artificial Sequence: Synthetic oligonucleotide
  Target: LAMA2; (-) strand; PAM type: YTN; PAM sequence: TTA
tgaatctgggtgctcctgta

SEQ ID NO: 207365 - DNA, 20 bp, Artificial Sequence
  Description of Artificial Sequence: Synthetic oligonucleotide
  Target: LAMA2; (-) strand; PAM type: YTN; PAM sequence: TTT
atgaatctgggtgctcctgt

SEQ ID NO: 207366 - DNA, 20 bp, Artificial Sequence
  Description of Artificial Sequence: Synthetic oligonucleotide
  Target: LAMA2; (-) strand; PAM type: YTN; PAM sequence: CTT
tatgaatctgggtgctcctg

SEQ ID NO: 207367 - DNA, 20 bp, Artificial Sequence
  Description of Artificial Sequence: Synthetic oligonucleotide
  Target: LAMA2; (-) strand; PAM type: YTN; PAM sequence: TTG
ctttatgaatctgggtgctc

SEQ ID NO: 207368 - DNA, 20 bp, Artificial Sequence
  Description of Artificial Sequence: Synthetic oligonucleotide
  Target: LAMA2; (-) strand; PAM type: YTN; PAM sequence: CTT
gctttatgaatctgggtgct

SEQ ID NO: 207369 - DNA, 20 bp, Artificial Sequence
  Description of Artificial Sequence: Synthetic oligonucleotide
  Target: LAMA2; (-) strand; PAM type: YTN; PAM sequence: CTG
aggacttgctttatgaatct

SEQ ID NO: 207370 - DNA, 20 bp, Artificial Sequence
  Description of Artificial Sequence: Synthetic oligonucleotide
  Target: LAMA2; (-) strand; PAM type: YTN; PAM sequence: TTG
taggtcactgaggacttgct

SEQ ID NO: 207371 - DNA, 20 bp, Artificial Sequence
  Description of Artificial Sequence: Synthetic oligonucleotide
  Target: LAMA2; (-) strand; PAM type: YTN; PAM sequence: TTT
gtaggtcactgaggacttgc

SEQ ID NO: 207372 - DNA, 20 bp, Artificial Sequence
  Description of Artificial Sequence: Synthetic oligonucleotide
  Target: LAMA2; (-) strand; PAM type: YTN; PAM sequence: CTT
tgtaggtcactgaggacttg

SEQ ID NO: 207373 - DNA, 20 bp, Artificial Sequence
  Description of Artificial Sequence: Synthetic oligonucleotide
  Target: LAMA2; (-) strand; PAM type: YTN; PAM sequence: CTC
tttgtaggtcactgaggact

SEQ ID NO: 207374 - DNA, 20 bp, Artificial Sequence
  Description of Artificial Sequence: Synthetic oligonucleotide
  Target: LAMA2; (-) strand; PAM type: YTN; PAM sequence: CTA
agtctctttgtaggtcactg

SEQ ID NO: 207375 - DNA, 20 bp, Artificial Sequence
  Description of Artificial Sequence: Synthetic oligonucleotide
  Target: LAMA2; (-) strand; PAM type: YTN; PAM sequence: TTA
atgtgtgggagtctaagtct

SEQ ID NO: 207376 - DNA, 20 bp, Artificial Sequence
  Description of Artificial Sequence: Synthetic oligonucleotide
  Target: LAMA2; (-) strand; PAM type: YTN; PAM sequence: TTA
ttaatgtgtgggagtctaag

SEQ ID NO: 207377 - DNA, 20 bp, Artificial Sequence
  Description of Artificial Sequence: Synthetic oligonucleotide
  Target: LAMA2; (-) strand; PAM type: YTN; PAM sequence: CTC
ccattattaatgtgtgggag

SEQ ID NO: 207378 - DNA, 20 bp, Artificial Sequence
  Description of Artificial Sequence: Synthetic oligonucleotide
  Target: LAMA2; (-) strand; PAM type: YTN; PAM sequence: TTA
aagtctcccattattaatgt

SEQ ID NO: 207379 - DNA, 20 bp, Artificial Sequence
  Description of Artificial Sequence: Synthetic oligonucleotide
  Target: LAMA2; (-) strand; PAM type: YTN; PAM sequence: TTG
acagtggggtgttaaagtct

SEQ ID NO: 207380 - DNA, 20 bp, Artificial Sequence
  Description of Artificial Sequence: Synthetic oligonucleotide
  Target: LAMA2; (-) strand; PAM type: YTN; PAM sequence: CTA
atgttgacagtggggtgtta

SEQ ID NO: 207381 - DNA, 20 bp, Artificial Sequence
  Description of Artificial Sequence: Synthetic oligonucleotide
  Target: LAMA2; (-) strand; PAM type: YTN; PAM sequence: CTG
tctaatgttgacagtggggt

SEQ ID NO: 207382 - DNA, 20 bp, Artificial Sequence
  Description of Artificial Sequence: Synthetic oligonucleotide
  Target: LAMA2; (-) strand; PAM type: YTN; PAM sequence: TTG
atctgtctaatgttgacagt

SEQ ID NO: 207383 - DNA, 20 bp, Artificial Sequence
  Description of Artificial Sequence: Synthetic oligonucleotide
  Target: LAMA2; (-) strand; PAM type: YTN; PAM sequence: CTC
gttgatctgtctaatgttga

SEQ ID NO: 207384 - DNA, 20 bp, Artificial Sequence
  Description of Artificial Sequence: Synthetic oligonucleotide
  Target: LAMA2; (-) strand; PAM type: YTN; PAM sequence: CTG
tctcgttgatctgtctaatg

SEQ ID NO: 207385 - DNA, 20 bp, Artificial Sequence
  Description of Artificial Sequence: Synthetic oligonucleotide
  Target: LAMA2; (-) strand; PAM type: YTN; PAM sequence: TTC
tgtctcgttgatctgtctaa

SEQ ID NO: 207386 - DNA, 20 bp, Artificial Sequence
  Description of Artificial Sequence: Synthetic oligonucleotide
  Target: LAMA2; (-) strand; PAM type: YTN; PAM sequence: TTT
ctgtctcgttgatctgtcta

SEQ ID NO: 207387 - DNA, 20 bp, Artificial Sequence
  Description of Artificial Sequence: Synthetic oligonucleotide
  Target: LAMA2; (-) strand; PAM type: YTN; PAM sequence: CTT
tctgtctcgttgatctgtct

SEQ ID NO: 207388 - DNA, 20 bp, Artificial Sequence
  Description of Artificial Sequence: Synthetic oligonucleotide
  Target: LAMA2; (-) strand; PAM type: YTN; PAM sequence: TTG
actttctgtctcgttgatct

SEQ ID NO: 207389 - DNA, 20 bp, Artificial Sequence
  Description of Artificial Sequence: Synthetic oligonucleotide
  Target: LAMA2; (-) strand; PAM type: YTN; PAM sequence: TTG
ttgactttctgtctcgttga

SEQ ID NO: 207390 - DNA, 20 bp, Artificial Sequence
  Description of Artificial Sequence: Synthetic oligonucleotide
  Target: LAMA2; (-) strand; PAM type: YTN; PAM sequence: CTT
gttgactttctgtctcgttg

SEQ ID NO: 207391 - DNA, 20 bp, Artificial Sequence
  Description of Artificial Sequence: Synthetic oligonucleotide
  Target: LAMA2; (-) strand; PAM type: YTN; PAM sequence: CTG
ggtatccttgttgactttct

SEQ ID NO: 207392 - DNA, 20 bp, Artificial Sequence
  Description of Artificial Sequence: Synthetic oligonucleotide
  Target: LAMA2; (-) strand; PAM type: YTN; PAM sequence: TTC
ctgggtatccttgttgactt

SEQ ID NO: 207393 - DNA, 20 bp, Artificial Sequence
  Description of Artificial Sequence: Synthetic oligonucleotide
  Target: LAMA2; (-) strand; PAM type: YTN; PAM sequence: TTC
aattcctgggtatccttgtt

SEQ ID NO: 207394 - DNA, 20 bp, Artificial Sequence
  Description of Artificial Sequence: Synthetic oligonucleotide
  Target: LAMA2; (-) strand; PAM type: YTN; PAM sequence: CTG
agttcaattcctgggtatcc

SEQ ID NO: 207395 - DNA, 20 bp, Artificial Sequence
  Description of Artificial Sequence: Synthetic oligonucleotide
  Target: LAMA2; (-) strand; PAM type: YTN; PAM sequence: TTG
gtgcagagctgagttcaatt

SEQ ID NO: 207396 - DNA, 20 bp, Artificial Sequence
  Description of Artificial Sequence: Synthetic oligonucleotide
  Target: LAMA2; (-) strand; PAM type: YTN; PAM sequence: CTT
ggtgcagagctgagttcaat

SEQ ID NO: 207397 - DNA, 20 bp, Artificial Sequence
  Description of Artificial Sequence: Synthetic oligonucleotide
  Target: LAMA2; (-) strand; PAM type: YTN; PAM sequence: CTG
cttggtgcagagctgagttc

SEQ ID NO: 207398 - DNA, 20 bp, Artificial Sequence
  Description of Artificial Sequence: Synthetic oligonucleotide
  Target: LAMA2; (-) strand; PAM type: YTN; PAM sequence: TTA
ggtctgcttggtgcagagct

SEQ ID NO: 207399 - DNA, 20 bp, Artificial Sequence
  Description of Artificial Sequence: Synthetic oligonucleotide
  Target: LAMA2; (-) strand; PAM type: YTN; PAM sequence: CTA
ttaggtctgcttggtgcaga

SEQ ID NO: 207400 - DNA, 20 bp, Artificial Sequence
  Description of Artificial Sequence: Synthetic oligonucleotide
  Target: LAMA2; (-) strand; PAM type: YTN; PAM sequence: CTG
tagatgtctattaggtctgc

SEQ ID NO: 207401 - DNA, 20 bp, Artificial Sequence
  Description of Artificial Sequence: Synthetic oligonucleotide
  Target: LAMA2; (-) strand; PAM type: YTN; PAM sequence: TTC
tgtagatgtctattaggtct

SEQ ID NO: 207402 - DNA, 20 bp, Artificial Sequence
  Description of Artificial Sequence: Synthetic oligonucleotide
  Target: LAMA2; (-) strand; PAM type: YTN; PAM sequence: TTG
gggtggagagttctgtagat

SEQ ID NO: 207403 - DNA, 20 bp, Artificial Sequence
  Description of Artificial Sequence: Synthetic oligonucleotide
  Target: LAMA2; (-) strand; PAM type: YTN; PAM sequence: TTT
ggggtggagagttctgtaga

SEQ ID NO: 207404 - DNA, 20 bp, Artificial Sequence
  Description of Artificial Sequence: Synthetic oligonucleotide
  Target: LAMA2; (-) strand; PAM type: YTN; PAM sequence: TTG
atttggggtggagagttctg

SEQ ID NO: 207405 - DNA, 20 bp, Artificial Sequence
  Description of Artificial Sequence: Synthetic oligonucleotide
  Target: LAMA2; (-) strand; PAM type: YTN; PAM sequence: CTG
ttgatttggggtggagagtt

SEQ ID NO: 207406 - DNA, 20 bp, Artificial Sequence
  Description of Artificial Sequence: Synthetic oligonucleotide
  Target: LAMA2; (-) strand; PAM type: YTN; PAM sequence: TTC
tgttgatttggggtggagag

SEQ ID NO: 207407 - DNA, 20 bp, Artificial Sequence
  Description of Artificial Sequence: Synthetic oligonucleotide
  Target: LAMA2; (-) strand; PAM type: YTN; PAM sequence: CTG
aaaaaaatgtatattctgtt

SEQ ID NO: 207408 - DNA, 20 bp, Artificial Sequence
  Description of Artificial Sequence: Synthetic oligonucleotide
  Target: LAMA2; (-) strand; PAM type: YTN; PAM sequence: TTG
gaataggtgtggtgtggtgc

SEQ ID NO: 207409 - DNA, 20 bp, Artificial Sequence
  Description of Artificial Sequence: Synthetic oligonucleotide
  Target: LAMA2; (-) strand; PAM type: YTN; PAM sequence: TTT
ggaataggtgtggtgtggtg

SEQ ID NO: 207410 - DNA, 20 bp, Artificial Sequence
  Description of Artificial Sequence: Synthetic oligonucleotide
  Target: LAMA2; (-) strand; PAM type: YTN; PAM sequence: TTT
tggaataggtgtggtgtggt

SEQ ID NO: 207411 - DNA, 20 bp, Artificial Sequence
  Description of Artificial Sequence: Synthetic oligonucleotide
  Target: LAMA2; (-) strand; PAM type: YTN; PAM sequence: CTA
tgtggtcaattttggaatag

SEQ ID NO: 207412 - DNA, 20 bp, Artificial Sequence
  Description of Artificial Sequence: Synthetic oligonucleotide
  Target: LAMA2; (-) strand; PAM type: YTN; PAM sequence: TTC
caactatgtggtcaattttg

SEQ ID NO: 207413 - DNA, 20 bp, Artificial Sequence
  Description of Artificial Sequence: Synthetic oligonucleotide
  Target: LAMA2; (-) strand; PAM type: YTN; PAM sequence: CTT
ccaactatgtggtcaatttt

SEQ ID NO: 207414 - DNA, 20 bp, Artificial Sequence
  Description of Artificial Sequence: Synthetic oligonucleotide
  Target: LAMA2; (-) strand; PAM type: YTN; PAM sequence: TTA
cttccaactatgtggtcaat

SEQ ID NO: 207415 - DNA, 20 bp, Artificial Sequence
  Description of Artificial Sequence: Synthetic oligonucleotide
  Target: LAMA2; (-) strand; PAM type: YTN; PAM sequence: TTT
acttccaactatgtggtcaa

SEQ ID NO: 207416 - DNA, 20 bp, Artificial Sequence
  Description of Artificial Sequence: Synthetic oligonucleotide
  Target: LAMA2; (-) strand; PAM type: YTN; PAM sequence: CTT
tacttccaactatgtggtca

SEQ ID NO: 207417 - DNA, 20 bp, Artificial Sequence
  Description of Artificial Sequence: Synthetic oligonucleotide
  Target: LAMA2; (-) strand; PAM type: YTN; PAM sequence: CTG
aggagagctttacttccaac

SEQ ID NO: 207418 - DNA, 20 bp, Artificial Sequence
  Description of Artificial Sequence: Synthetic oligonucleotide
  Target: LAMA2; (-) strand; PAM type: YTN; PAM sequence: TTG
ctgaggagagctttacttcc

SEQ ID NO: 207419 - DNA, 20 bp, Artificial Sequence
  Description of Artificial Sequence: Synthetic oligonucleotide
  Target: LAMA2; (-) strand; PAM type: YTN; PAM sequence: TTT
gctgaggagagctttacttc

SEQ ID NO: 207420 - DNA, 20 bp, Artificial Sequence
  Description of Artificial Sequence: Synthetic oligonucleotide
  Target: LAMA2; (-) strand; PAM type: YTN; PAM sequence: TTA
catttgctgaggagagcttt

SEQ ID NO: 207421 - DNA, 20 bp, Artificial Sequence
  Description of Artificial Sequence: Synthetic oligonucleotide
  Target: LAMA2; (-) strand; PAM type: YTN; PAM sequence: TTT
acatttgctgaggagagctt

SEQ ID NO: 207422 - DNA, 20 bp, Artificial Sequence
  Description of Artificial Sequence: Synthetic oligonucleotide
  Target: LAMA2; (-) strand; PAM type: YTN; PAM sequence: TTT
tacatttgctgaggagagct

SEQ ID NO: 207423 - DNA, 20 bp, Artificial Sequence
  Description of Artificial Sequence: Synthetic oligonucleotide
  Target: LAMA2; (-) strand; PAM type: YTN; PAM sequence: CTT
ttacatttgctgaggagagc

SEQ ID NO: 207424 - DNA, 20 bp, Artificial Sequence
  Description of Artificial Sequence: Synthetic oligonucleotide
  Target: LAMA2; (-) strand; PAM type: YTN; PAM sequence: TTC
ttttacatttgctgaggaga

SEQ ID NO: 207425 - DNA, 20 bp, Artificial Sequence
  Description of Artificial Sequence: Synthetic oligonucleotide
  Target: LAMA2; (-) strand; PAM type: YTN; PAM sequence: CTG
ttcttttacatttgctgagg

SEQ ID NO: 207426 - DNA, 20 bp, Artificial Sequence
  Description of Artificial Sequence: Synthetic oligonucleotide
  Target: LAMA2; (-) strand; PAM type: YTN; PAM sequence: TTC
tgttcttttacatttgctga

SEQ ID NO: 207427 - DNA, 20 bp, Artificial Sequence
  Description of Artificial Sequence: Synthetic oligonucleotide
  Target: LAMA2; (-) strand; PAM type: YTN; PAM sequence: TTT
ctgttcttttacatttgctg

SEQ ID NO: 207428 - DNA, 20 bp, Artificial Sequence
  Description of Artificial Sequence: Synthetic oligonucleotide
  Target: LAMA2; (-) strand; PAM type: YTN; PAM sequence: TTA
taatttctgttcttttacat

SEQ ID NO: 207429 - DNA, 20 bp, Artificial Sequence
  Description of Artificial Sequence: Synthetic oligonucleotide
  Target: LAMA2; (-) strand; PAM type: YTN; PAM sequence: TTG
ttataatttctgttctttta

SEQ ID NO: 207430 - DNA, 20 bp, Artificial Sequence
  Description of Artificial Sequence: Synthetic oligonucleotide
  Target: LAMA2; (-) strand; PAM type: YTN; PAM sequence: TTT
gttataatttctgttctttt

SEQ ID NO: 207431 - DNA, 20 bp, Artificial Sequence
  Description of Artificial Sequence: Synthetic oligonucleotide
  Target: LAMA2; (-) strand; PAM type: YTN; PAM sequence: CTG
agagatagtttgttataatt

SEQ ID NO: 207432 - DNA, 20 bp, Artificial Sequence
  Description of Artificial Sequence: Synthetic oligonucleotide
  Target: LAMA2; (-) strand; PAM type: YTN; PAM sequence: CTG
tggtctgagagatagtttgt

SEQ ID NO: 207433 - DNA, 20 bp, Artificial Sequence
  Description of Artificial Sequence: Synthetic oligonucleotide
  Target: LAMA2; (-) strand; PAM type: YTN; PAM sequence: TTG
cactgtggtctgagagatag

SEQ ID NO: 207434 - DNA, 20 bp, Artificial Sequence
  Description of Artificial Sequence: Synthetic oligonucleotide
  Target: LAMA2; (-) strand; PAM type: YTN; PAM sequence: TTG
attgcactgtggtctgagag

SEQ ID NO: 207435 - DNA, 20 bp, Artificial Sequence
  Description of Artificial Sequence: Synthetic oligonucleotide
  Target: LAMA2; (-) strand; PAM type: YTN; PAM sequence: TTT
gattgcactgtggtctgaga

SEQ ID NO: 207436 - DNA, 20 bp, Artificial Sequence
  Description of Artificial Sequence: Synthetic oligonucleotide
  Target: LAMA2; (-) strand; PAM type: YTN; PAM sequence: CTA
gtttgattgcactgtggtct

SEQ ID NO: 207437 - DNA, 20 bp, Artificial Sequence
  Description of Artificial Sequence: Synthetic oligonucleotide
  Target: LAMA2; (-) strand; PAM type: YTN; PAM sequence: TTC
tagtttgattgcactgtggt

SEQ ID NO: 207438 - DNA, 20 bp, Artificial Sequence
  Description of Artificial Sequence: Synthetic oligonucleotide
  Target: LAMA2; (-) strand; PAM type: YTN; PAM sequence: CTG
agttctagtttgattgcact

SEQ ID NO: 207439 - DNA, 20 bp, Artificial Sequence
  Description of Artificial Sequence: Synthetic oligonucleotide
  Target: LAMA2; (-) strand; PAM type: YTN; PAM sequence: TTA
atcctgagttctagtttgat

SEQ ID NO: 207440 - DNA, 20 bp, Artificial Sequence
  Description of Artificial Sequence: Synthetic oligonucleotide
  Target: LAMA2; (-) strand; PAM type: YTN; PAM sequence: CTT
aatcctgagttctagtttga

SEQ ID NO: 207441 - DNA, 20 bp, Artificial Sequence
  Description of Artificial Sequence: Synthetic oligonucleotide
  Target: LAMA2; (-) strand; PAM type: YTN; PAM sequence: TTC
ttaatcctgagttctagttt

SEQ ID NO: 207442 - DNA, 20 bp, Artificial Sequence
  Description of Artificial Sequence: Synthetic oligonucleotide
  Target: LAMA2; (-) strand; PAM type: YTN; PAM sequence: TTG
agtgagattcttaatcctga

SEQ ID NO: 207443 - DNA, 20 bp, Artificial Sequence
  Description of Artificial Sequence: Synthetic oligonucleotide
  Target: LAMA2; (-) strand; PAM type: YTN; PAM sequence: TTT
gagtgagattcttaatcctg

SEQ ID NO: 207444 - DNA, 20 bp, Artificial Sequence
  Description of Artificial Sequence: Synthetic oligonucleotide
  Target: LAMA2; (-) strand; PAM type: YTN; PAM sequence: CTT
tgagtgagattcttaatcct

SEQ ID NO: 207445 - DNA, 20 bp, Artificial Sequence
  Description of Artificial Sequence: Synthetic oligonucleotide
  Target: LAMA2; (-) strand; PAM type: YTN; PAM sequence: TTG
agcggctttgagtgagattc

SEQ ID NO: 207446 - DNA, 20 bp, Artificial Sequence
  Description of Artificial Sequence: Synthetic oligonucleotide
  Target: LAMA2; (-) strand; PAM type: YTN; PAM sequence: TTC
catgtagttgagcggctttg

SEQ ID NO: 207447 - DNA, 20 bp, Artificial Sequence
  Description of Artificial Sequence: Synthetic oligonucleotide
  Target: LAMA2; (-) strand; PAM type: YTN; PAM sequence: TTT
ccatgtagttgagcggcttt

SEQ ID NO: 207448 - DNA, 20 bp, Artificial Sequence
  Description of Artificial Sequence: Synthetic oligonucleotide
  Target: LAMA2; (-) strand; PAM type: YTN; PAM sequence: TTC
agtttccatgtagttgagcg

SEQ ID NO: 207449 - DNA, 20 bp, Artificial Sequence
  Description of Artificial Sequence: Synthetic oligonucleotide
  Target: LAMA2; (-) strand; PAM type: YTN; PAM sequence: TTG
ttcagtttccatgtagttga

SEQ ID NO: 207450 - DNA, 20 bp, Artificial Sequence
  Description of Artificial Sequence: Synthetic oligonucleotide
  Target: LAMA2; (-) strand; PAM type: YTN; PAM sequence: TTC
aggagcaggttgttcagttt

SEQ ID NO: 207451 - DNA, 20 bp, Artificial Sequence
  Description of Artificial Sequence: Synthetic oligonucleotide
  Target: LAMA2; (-) strand; PAM type: YTN; PAM sequence: TTA
tgtacccagtagtcattcag

SEQ ID NO: 207452 - DNA, 20 bp, Artificial Sequence
  Description of Artificial Sequence: Synthetic oligonucleotide
  Target: LAMA2; (-) strand; PAM type: YTN; PAM sequence: TTC
gttatgtacccagtagtcat

SEQ ID NO: 207453 - DNA, 20 bp, Artificial Sequence
  Description of Artificial Sequence: Synthetic oligonucleotide
  Target: LAMA2; (-) strand; PAM type: YTN; PAM sequence: TTT
cgttatgtacccagtagtca

SEQ ID NO: 207454 - DNA, 20 bp, Artificial Sequence
  Description of Artificial Sequence: Synthetic oligonucleotide
  Target: LAMA2; (-) strand; PAM type: YTN; PAM sequence: TTC
atttcgttatgtacccagta

SEQ ID NO: 207455 - DNA, 20 bp, Artificial Sequence
  Description of Artificial Sequence: Synthetic oligonucleotide
  Target: LAMA2; (-) strand; PAM type: YTN; PAM sequence: CTT
catttcgttatgtacccagt

SEQ ID NO: 207456 - DNA, 20 bp, Artificial Sequence
  Description of Artificial Sequence: Synthetic oligonucleotide
  Target: LAMA2; (-) strand; PAM type: YTN; PAM sequence: CTG
ccttcatttcgttatgtacc

SEQ ID NO: 207457 - DNA, 20 bp, Artificial Sequence
  Description of Artificial Sequence: Synthetic oligonucleotide
  Target: LAMA2; (-) strand; PAM type: YTN; PAM sequence: TTC
tgccttcatttcgttatgta

SEQ ID NO: 207458 - DNA, 20 bp, Artificial Sequence
  Description of Artificial Sequence: Synthetic oligonucleotide
  Target: LAMA2; (-) strand; PAM type: YTN; PAM sequence: TTT
ctgccttcatttcgttatgt

SEQ ID NO: 207459 - DNA, 20 bp, Artificial Sequence
  Description of Artificial Sequence: Synthetic oligonucleotide
  Target: LAMA2; (-) strand; PAM type: YTN; PAM sequence: TTA
tttctgccttcatttcgtta

SEQ ID NO: 207460 - DNA, 20 bp, Artificial Sequence
  Description of Artificial Sequence: Synthetic oligonucleotide
  Target: LAMA2; (-) strand; PAM type: YTN; PAM sequence: TTT
atttctgccttcatttcgtt

SEQ ID NO: 207461 - DNA, 20 bp, Artificial Sequence
  Description of Artificial Sequence: Synthetic oligonucleotide
  Target: LAMA2; (-) strand; PAM type: YTN; PAM sequence: CTT
tatttctgccttcatttcgt

SEQ ID NO: 207462 - DNA, 20 bp, Artificial Sequence
  Description of Artificial Sequence: Synthetic oligonucleotide
  Target: LAMA2; (-) strand; PAM type: YTN; PAM sequence: TTC
aaagaacatctttatttctg

SEQ ID NO: 207463 - DNA, 20 bp, Artificial Sequence
  Description of Artificial Sequence: Synthetic oligonucleotide
  Target: LAMA2; (-) strand; PAM type: YTN; PAM sequence: TTT
caaagaacatctttatttct

SEQ ID NO: 207464 - DNA, 20 bp, Artificial Sequence
  Description of Artificial Sequence: Synthetic oligonucleotide
  Target: LAMA2; (-) strand; PAM type: YTN; PAM sequence: TTG
gtttcaaagaacatctttat

SEQ ID NO: 207465 - DNA, 20 bp, Artificial Sequence
  Description of Artificial Sequence: Synthetic oligonucleotide
  Target: LAMA2; (-) strand; PAM type: YTN; PAM sequence: CTC
gttggtttcaaagaacatct

SEQ ID NO: 207466 - DNA, 20 bp, Artificial Sequence
  Description of Artificial Sequence: Synthetic oligonucleotide
  Target: LAMA2; (-) strand; PAM type: YTN; PAM sequence: TTC
tcgttggtttcaaagaacat

SEQ ID NO: 207467 - DNA, 20 bp, Artificial Sequence
  Description of Artificial Sequence: Synthetic oligonucleotide
  Target: LAMA2; (-) strand; PAM type: YTN; PAM sequence: TTG
ttctcgttggtttcaaagaa

SEQ ID NO: 207468 - DNA, 20 bp, Artificial Sequence
  Description of Artificial Sequence: Synthetic oligonucleotide
  Target: LAMA2; (-) strand; PAM type: YTN; PAM sequence: TTT
gttctcgttggtttcaaaga

SEQ ID NO: 207469 - DNA, 20 bp, Artificial Sequence
  Description of Artificial Sequence: Synthetic oligonucleotide
  Target: LAMA2; (-) strand; PAM type: YTN; PAM sequence: CTT
tgttctcgttggtttcaaag

SEQ ID NO: 207470 - DNA, 20 bp, Artificial Sequence
  Description of Artificial Sequence: Synthetic oligonucleotide
  Target: LAMA2; (-) strand; PAM type: YTN; PAM sequence: CTG
gtatgtggtgtctttgttct

SEQ ID NO: 207471 - DNA, 20 bp, Artificial Sequence
  Description of Artificial Sequence: Synthetic oligonucleotide
  Target: LAMA2; (-) strand; PAM type: YTN; PAM sequence: TTC
tggtatgtggtgtctttgtt

SEQ ID NO: 207472 - DNA, 20 bp, Artificial Sequence
  Description of Artificial Sequence: Synthetic oligonucleotide
  Target: LAMA2; (-) strand; PAM type: YTN; PAM sequence: TTG
aatgcgtcccagagattctg

SEQ ID NO: 207473 - DNA, 20 bp, Artificial Sequence
  Description of Artificial Sequence: Synthetic oligonucleotide
  Target: LAMA2; (-) strand; PAM type: YTN; PAM sequence: TTT
gaatgcgtcccagagattct

SEQ ID NO: 207474 - DNA, 20 bp, Artificial Sequence
  Description of Artificial Sequence: Synthetic oligonucleotide
  Target: LAMA2; (-) strand; PAM type: YTN; PAM sequence: CTT
tgaatgcgtcccagagattc

SEQ ID NO: 207475 - DNA, 20 bp, Artificial Sequence
  Description of Artificial Sequence: Synthetic oligonucleotide
  Target: LAMA2; (-) strand; PAM type: YTN; PAM sequence: CTG
ctttgaatgcgtcccagaga

SEQ ID NO: 207476 - DNA, 20 bp, Artificial Sequence
  Description of Artificial Sequence: Synthetic oligonucleotide
  Target: LAMA2; (-) strand; PAM type: YTN; PAM sequence: CTA
cacactgctttgaatgcgtc

SEQ ID NO: 207477 - DNA, 20 bp, Artificial Sequence
  Description of Artificial Sequence: Synthetic oligonucleotide
  Target: LAMA2; (-) strand; PAM type: YTN; PAM sequence: CTC
tacacactgctttgaatgcg

SEQ ID NO: 207478 - DNA, 20 bp, Artificial Sequence
  Description of Artificial Sequence: Synthetic oligonucleotide
  Target: LAMA2; (-) strand; PAM type: YTN; PAM sequence: TTC
cctctacacactgctttgaa

SEQ ID NO: 207479 - DNA, 20 bp, Artificial Sequence
  Description of Artificial Sequence: Synthetic oligonucleotide
  Target: LAMA2; (-) strand; PAM type: YTN; PAM sequence: TTT
ccctctacacactgctttga

SEQ ID NO: 207480 - DNA, 20 bp, Artificial Sequence
  Description of Artificial Sequence: Synthetic oligonucleotide
  Target: LAMA2; (-) strand; PAM type: YTN; PAM sequence: CTA
taaatttccctctacacact

SEQ ID NO: 207481 - DNA, 20 bp, Artificial Sequence
  Description of Artificial Sequence: Synthetic oligonucleotide
  Target: LAMA2; (-) strand; PAM type: YTN; PAM sequence: TTA
gtgctataaatttccctcta

SEQ ID NO: 207482 - DNA, 20 bp, Artificial Sequence
  Description of Artificial Sequence: Synthetic oligonucleotide
  Target: LAMA2; (-) strand; PAM type: YTN; PAM sequence: TTT
agtgctataaatttccctct

SEQ ID NO: 207483 - DNA, 20 bp, Artificial Sequence
  Description of Artificial Sequence: Synthetic oligonucleotide
  Target: LAMA2; (-) strand; PAM type: YTN; PAM sequence: TTG
taggcatttagtgctataaa

SEQ ID NO: 207484 - DNA, 20 bp, Artificial Sequence
  Description of Artificial Sequence: Synthetic oligonucleotide
  Target: LAMA2; (-) strand; PAM type: YTN; PAM sequence: CTT
gtaggcatttagtgctataa

SEQ ID NO: 207485 - DNA, 20 bp, Artificial Sequence
  Description of Artificial Sequence: Synthetic oligonucleotide
  Target: LAMA2; (-) strand; PAM type: YTN; PAM sequence: CTC
ttgtaggcatttagtgctat

SEQ ID NO: 207486 - DNA, 20 bp, Artificial Sequence
  Description of Artificial Sequence: Synthetic oligonucleotide
  Target: LAMA2; (-) strand; PAM type: YTN; PAM sequence: TTC
tcttgtaggcatttagtgct

SEQ ID NO: 207487 - DNA, 20 bp, Artificial Sequence
  Description of Artificial Sequence: Synthetic oligonucleotide
  Target: LAMA2; (-) strand; PAM type: YTN; PAM sequence: TTT
ctcttgtaggcatttagtgc

SEQ ID NO: 207488 - DNA, 20 bp, Artificial Sequence
  Description of Artificial Sequence: Synthetic oligonucleotide
  Target: LAMA2; (-) strand; PAM type: YTN; PAM sequence: CTT
tctcttgtaggcatttagtg

SEQ ID NO: 207489 - DNA, 20 bp, Artificial Sequence
  Description of Artificial Sequence: Synthetic oligonucleotide
  Target: LAMA2; (-) strand; PAM type: YTN; PAM sequence: CTG
ctttctcttgtaggcattta

SEQ ID NO: 207490 - DNA, 20 bp, Artificial Sequence
  Description of Artificial Sequence: Synthetic oligonucleotide
  Target: LAMA2; (-) strand; PAM type: YTN; PAM sequence: TTC
ctgctttctcttgtaggcat

SEQ ID NO: 207491 - DNA, 20 bp, Artificial Sequence
  Description of Artificial Sequence: Synthetic oligonucleotide
  Target: LAMA2; (-) strand; PAM type: YTN; PAM sequence: TTT
cctgctttctcttgtaggca

SEQ ID NO: 207492 - DNA, 20 bp, Artificial Sequence
  Description of Artificial Sequence: Synthetic oligonucleotide
  Target: LAMA2; (-) strand; PAM type: YTN; PAM sequence: CTT
tcctgctttctcttgtaggc

SEQ ID NO: 207493 - DNA, 20 bp, Artificial Sequence
  Description of Artificial Sequence: Synthetic oligonucleotide
  Target: LAMA2; (-) strand; PAM type: YTN; PAM sequence: TTG
gatctttcctgctttctctt

SEQ ID NO: 207494 - DNA, 20 bp, Artificial Sequence
  Description of Artificial Sequence: Synthetic oligonucleotide
  Target: LAMA2; (-) strand; PAM type: YTN; PAM sequence: TTT
ggatctttcctgctttctct

SEQ ID NO: 207495 - DNA, 20 bp, Artificial Sequence
  Description of Artificial Sequence: Synthetic oligonucleotide
  Target: LAMA2; (-) strand; PAM type: YTN; PAM sequence: TTT
tggatctttcctgctttctc

SEQ ID NO: 207496 - DNA, 20 bp, Artificial Sequence
  Description of Artificial Sequence: Synthetic oligonucleotide
  Target: LAMA2; (-) strand; PAM type: YTN; PAM sequence: TTA
gggtgtcaattttggatctt

SEQ ID NO: 207497 - DNA, 20 bp, Artificial Sequence
  Description of Artificial Sequence: Synthetic oligonucleotide
  Target: LAMA2; (-) strand; PAM type: YTN; PAM sequence: TTG
tgatgttagggtgtcaattt

SEQ ID NO: 207498 - DNA, 20 bp, Artificial Sequence
  Description of Artificial Sequence: Synthetic oligonucleotide
  Target: LAMA2; (-) strand; PAM type: YTN; PAM sequence: TTA
attgtgatgttagggtgtca

SEQ ID NO: 207499 - DNA, 20 bp, Artificial Sequence
  Description of Artificial Sequence: Synthetic oligonucleotide
  Target: LAMA2; (-) strand; PAM type: YTN; PAM sequence: TTT
aattgtgatgttagggtgtc

SEQ ID NO: 207500 - DNA, 20 bp, Artificial Sequence
  Description of Artificial Sequence: Synthetic oligonucleotide
  Target: LAMA2; (-) strand; PAM type: YTN; PAM sequence: TTT
taattgtgatgttagggtgt

SEQ ID NO: 207501 - DNA, 20 bp, Artificial Sequence
  Description of Artificial Sequence: Synthetic oligonucleotide
  Target: LAMA2; (-) strand; PAM type: YTN; PAM sequence: CTT
ttaattgtgatgttagggtg

SEQ ID NO: 207502 - DNA, 20 bp, Artificial Sequence
  Description of Artificial Sequence: Synthetic oligonucleotide
  Target: LAMA2; (-) strand; PAM type: YTN; PAM sequence: TTC
ttttaattgtgatgttaggg

SEQ ID NO: 207503 - DNA, 20 bp, Artificial Sequence
  Description of Artificial Sequence: Synthetic oligonucleotide
  Target: LAMA2; (-) strand; PAM type: YTN; PAM sequence: CTA
gttcttttaattgtgatgtt

SEQ ID NO: 207504 - DNA, 20 bp, Artificial Sequence
  Description of Artificial Sequence: Synthetic oligonucleotide
  Target: LAMA2; (-) strand; PAM type: YTN; PAM sequence: TTC
tagttcttttaattgtgatg

SEQ ID NO: 207505 - DNA, 20 bp, Artificial Sequence
  Description of Artificial Sequence: Synthetic oligonucleotide
  Target: LAMA2; (-) strand; PAM type: YTN; PAM sequence: TTT
ctagttcttttaattgtgat

SEQ ID NO: 207506 - DNA, 20 bp, Artificial Sequence
  Description of Artificial Sequence: Synthetic oligonucleotide
  Target: LAMA2; (-) strand; PAM type: YTN; PAM sequence: TTT
tctagttcttttaattgtga

SEQ ID NO: 207507 - DNA, 20 bp, Artificial Sequence
  Description of Artificial Sequence: Synthetic oligonucleotide
  Target: LAMA2; (-) strand; PAM type: YTN; PAM sequence: CTT
ttctagttcttttaattgtg

SEQ ID NO: 207508 - DNA, 20 bp, Artificial Sequence
  Description of Artificial Sequence: Synthetic oligonucleotide
  Target: LAMA2; (-) strand; PAM type: YTN; PAM sequence: TTG
cttttctagttcttttaatt

SEQ ID NO: 207509 - DNA, 20 bp, Artificial Sequence
  Description of Artificial Sequence: Synthetic oligonucleotide
  Target: LAMA2; (-) strand; PAM type: YTN; PAM sequence: CTT
gcttttctagttcttttaat

SEQ ID NO: 207510 - DNA, 20 bp, Artificial Sequence
  Description of Artificial Sequence: Synthetic oligonucleotide
  Target: LAMA2; (-) strand; PAM type: YTN; PAM sequence: CTC
ttgcttttctagttctttta

SEQ ID NO: 207511 - DNA, 20 bp, Artificial Sequence
  Description of Artificial Sequence: Synthetic oligonucleotide
  Target: LAMA2; (-) strand; PAM type: YTN; PAM sequence: TTG
ctcttgcttttctagttctt

SEQ ID NO: 207512 - DNA, 20 bp, Artificial Sequence
  Description of Artificial Sequence: Synthetic oligonucleotide
  Target: LAMA2; (-) strand; PAM type: YTN; PAM sequence: TTT
gctcttgcttttctagttct

SEQ ID NO: 207513 - DNA, 20 bp, Artificial Sequence
  Description of Artificial Sequence: Synthetic oligonucleotide
  Target: LAMA2; (-) strand; PAM type: YTN; PAM sequence: TTG
aatgtgtttgctcttgcttt

SEQ ID NO: 207514 - DNA, 20 bp, Artificial Sequence
  Description of Artificial Sequence: Synthetic oligonucleotide
  Target: LAMA2; (-) strand; PAM type: YTN; PAM sequence: TTT
gaatgtgtttgctcttgctt

SEQ ID NO: 207515 - DNA, 20 bp, Artificial Sequence
  Description of Artificial Sequence: Synthetic oligonucleotide
  Target: LAMA2; (-) strand; PAM type: YTN; PAM sequence: TTT
tgaatgtgtttgctcttgct

SEQ ID NO: 207516 - DNA, 20 bp, Artificial Sequence
  Description of Artificial Sequence: Synthetic oligonucleotide
  Target: LAMA2; (-) strand; PAM type: YTN; PAM sequence: CTT
ttgaatgtgtttgctcttgc

SEQ ID NO: 207517 - DNA, 20 bp, Artificial Sequence
  Description of Artificial Sequence: Synthetic oligonucleotide
  Target: LAMA2; (-) strand; PAM type: YTN; PAM sequence: CTA
gcttttgaatgtgtttgctc

SEQ ID NO: 207518 - DNA, 20 bp, Artificial Sequence
  Description of Artificial Sequence: Synthetic oligonucleotide
  Target: LAMA2; (-) strand; PAM type: YTN; PAM sequence: CTG
ctagcttttgaatgtgtttg

SEQ ID NO: 207519 - DNA, 20 bp, Artificial Sequence
  Description of Artificial Sequence: Synthetic oligonucleotide
  Target: LAMA2; (-) strand; PAM type: YTN; PAM sequence: TTC
tgctagcttttgaatgtgtt

SEQ ID NO: 207520 - DNA, 20 bp, Artificial Sequence
  Description of Artificial Sequence: Synthetic oligonucleotide
  Target: LAMA2; (-) strand; PAM type: YTN; PAM sequence: CTT
ctgctagcttttgaatgtgt

SEQ ID NO: 207521 - DNA, 20 bp, Artificial Sequence
  Description of Artificial Sequence: Synthetic oligonucleotide
  Target: LAMA2; (-) strand; PAM type: YTN; PAM sequence: TTG
ccttctgctagcttttgaat

SEQ ID NO: 207522 - DNA, 20 bp, Artificial Sequence
  Description of Artificial Sequence: Synthetic oligonucleotide
  Target: LAMA2; (-) strand; PAM type: YTN; PAM sequence: CTT
gccttctgctagcttttgaa

SEQ ID NO: 207523 - DNA, 20 bp, Artificial Sequence
  Description of Artificial Sequence: Synthetic oligonucleotide
  Target: LAMA2; (-) strand; PAM type: YTN; PAM sequence: TTC
ttgccttctgctagcttttg

SEQ ID NO: 207524 - DNA, 20 bp, Artificial Sequence
  Description of Artificial Sequence: Synthetic oligonucleotide
  Target: LAMA2; (-) strand; PAM type: YTN; PAM sequence: TTT
cttgccttctgctagctttt

SEQ ID NO: 207525 - DNA, 20 bp, Artificial Sequence
  Description of Artificial Sequence: Synthetic oligonucleotide
  Target: LAMA2; (-) strand; PAM type: YTN; PAM sequence: TTA
tttcttgccttctgctagct

SEQ ID NO: 207526 - DNA, 20 bp, Artificial Sequence
  Description of Artificial Sequence: Synthetic oligonucleotide
  Target: LAMA2; (-) strand; PAM type: YTN; PAM sequence: TTA
gttatttcttgccttctgct

SEQ ID NO: 207527 - DNA, 20 bp, Artificial Sequence
  Description of Artificial Sequence: Synthetic oligonucleotide
  Target: LAMA2; (-) strand; PAM type: YTN; PAM sequence: TTT
agttatttcttgccttctgc

SEQ ID NO: 207528 - DNA, 20 bp, Artificial Sequence
  Description of Artificial Sequence: Synthetic oligonucleotide
  Target: LAMA2; (-) strand; PAM type: YTN; PAM sequence: TTT
tagttatttcttgccttctg

SEQ ID NO: 207529 - DNA, 20 bp, Artificial Sequence
  Description of Artificial Sequence: Synthetic oligonucleotide
  Target: LAMA2; (-) strand; PAM type: YTN; PAM sequence: CTG
attttagttatttcttgcct

SEQ ID NO: 207530 - DNA, 20 bp, Artificial Sequence
  Description of Artificial Sequence: Synthetic oligonucleotide
  Target: LAMA2; (-) strand; PAM type: YTN; PAM sequence: CTC
tgattttagttatttcttgc

SEQ ID NO: 207531 - DNA, 20 bp, Artificial Sequence
  Description of Artificial Sequence: Synthetic oligonucleotide
  Target: LAMA2; (-) strand; PAM type: YTN; PAM sequence: CTG
ctctgattttagttatttct

SEQ ID NO: 207532 - DNA, 20 bp, Artificial Sequence
  Description of Artificial Sequence: Synthetic oligonucleotide
  Target: LAMA2; (-) strand; PAM type: YTN; PAM sequence: TTC
tgctctgattttagttattt

SEQ ID NO: 207533 - DNA, 20 bp, Artificial Sequence
  Description of Artificial Sequence: Synthetic oligonucleotide
  Target: LAMA2; (-) strand; PAM type: YTN; PAM sequence: TTC
agttctgctctgattttagt

SEQ ID NO: 207534 - DNA, 20 bp, Artificial Sequence
  Description of Artificial Sequence: Synthetic oligonucleotide
  Target: LAMA2; (-) strand; PAM type: YTN; PAM sequence: CTT
cagttctgctctgattttag

SEQ ID NO: 207535 - DNA, 20 bp, Artificial Sequence
  Description of Artificial Sequence: Synthetic oligonucleotide
  Target: LAMA2; (-) strand; PAM type: YTN; PAM sequence: TTC
cttcagttctgctctgattt

SEQ ID NO: 207536 - DNA, 20 bp, Artificial Sequence
  Description of Artificial Sequence: Synthetic oligonucleotide
  Target: LAMA2; (-) strand; PAM type: YTN; PAM sequence: TTT
ccttcagttctgctctgatt

SEQ ID NO: 207537 - DNA, 20 bp, Artificial Sequence
  Description of Artificial Sequence: Synthetic oligonucleotide
  Target: LAMA2; (-) strand; PAM type: YTN; PAM sequence: CTA
tttccttcagttctgctctg

SEQ ID NO: 207538 - DNA, 20 bp, Artificial Sequence
  Description of Artificial Sequence: Synthetic oligonucleotide
  Target: LAMA2; (-) strand; PAM type: YTN; PAM sequence: CTC
tatttccttcagttctgctc

SEQ ID NO: 207539 - DNA, 20 bp, Artificial Sequence
  Description of Artificial Sequence: Synthetic oligonucleotide
  Target: LAMA2; (-) strand; PAM type: YTN; PAM sequence: TTG
tgtctctatttccttcagtt

SEQ ID NO: 207540 - DNA, 20 bp, Artificial Sequence
  Description of Artificial Sequence: Synthetic oligonucleotide
  Target: LAMA2; (-) strand; PAM type: YTN; PAM sequence: TTT
gtgtctctatttccttcagt

SEQ ID NO: 207541 - DNA, 20 bp, Artificial Sequence
  Description of Artificial Sequence: Synthetic oligonucleotide
  Target: LAMA2; (-) strand; PAM type: YTN; PAM sequence: TTT
tgtgtctctatttccttcag

SEQ ID NO: 207542 - DNA, 20 bp, Artificial Sequence
  Description of Artificial Sequence: Synthetic oligonucleotide
  Target: LAMA2; (-) strand; PAM type: YTN; PAM sequence: TTT
ttgtgtctctatttccttca

SEQ ID NO: 207543 - DNA, 20 bp, Artificial Sequence
  Description of Artificial Sequence: Synthetic oligonucleotide
  Target: LAMA2; (-) strand; PAM type: YTN; PAM sequence: TTT
tttgtgtctctatttccttc

SEQ ID NO: 207544 - DNA, 20 bp, Artificial Sequence
  Description of Artificial Sequence: Synthetic oligonucleotide
  Target: LAMA2; (-) strand; PAM type: YTN; PAM sequence: TTG
aagggttttttgtgtctcta

SEQ ID NO: 207545 - DNA, 20 bp, Artificial Sequence
  Description of Artificial Sequence: Synthetic oligonucleotide
  Target: LAMA2; (-) strand; PAM type: YTN; PAM sequence: TTT
gaagggttttttgtgtctct

SEQ ID NO: 207546 - DNA, 20 bp, Artificial Sequence
  Description of Artificial Sequence: Synthetic oligonucleotide
  Target: LAMA2; (-) strand; PAM type: YTN; PAM sequence: TTT
tgaagggttttttgtgtctc

SEQ ID NO: 207547 - DNA, 20 bp, Artificial Sequence
  Description of Artificial Sequence: Synthetic oligonucleotide
  Target: LAMA2; (-) strand; PAM type: YTN; PAM sequence: TTT
ttgaagggttttttgtgtct

SEQ ID NO: 207548 - DNA, 20 bp, Artificial Sequence
  Description of Artificial Sequence: Synthetic oligonucleotide
  Target: LAMA2; (-) strand; PAM type: YTN; PAM sequence: TTT
tttgaagggttttttgtgtc

SEQ ID NO: 207549 - DNA, 20 bp, Artificial Sequence
  Description of Artificial Sequence: Synthetic oligonucleotide
  Target: LAMA2; (-) strand; PAM type: YTN; PAM sequence: TTG
attttttgaagggttttttg

SEQ ID NO: 207550 - DNA, 20 bp, Artificial Sequence
  Description of Artificial Sequence: Synthetic oligonucleotide
  Target: LAMA2; (-) strand; PAM type: YTN; PAM sequence: TTC
attgattttttgaagggttt

SEQ ID NO: 207551 - DNA, 20 bp, Artificial Sequence
  Description of Artificial Sequence: Synthetic oligonucleotide
  Target: LAMA2; (-) strand; PAM type: YTN; PAM sequence: CTG
gattcattgattttttgaag

SEQ ID NO: 207552 - DNA, 20 bp, Artificial Sequence
  Description of Artificial Sequence: Synthetic oligonucleotide
  Target: LAMA2; (-) strand; PAM type: YTN; PAM sequence: CTC
ctggattcattgattttttg

SEQ ID NO: 207553 - DNA, 20 bp, Artificial Sequence
  Description of Artificial Sequence: Synthetic oligonucleotide
  Target: LAMA2; (-) strand; PAM type: YTN; PAM sequence: TTC
aaaaaaccagctcctggatt

SEQ ID NO: 207554 - DNA, 20 bp, Artificial Sequence
  Description of Artificial Sequence: Synthetic oligonucleotide
  Target: LAMA2; (-) strand; PAM type: YTN; PAM sequence: TTT
caaaaaaccagctcctggat

SEQ ID NO: 207555 - DNA, 20 bp, Artificial Sequence
  Description of Artificial Sequence: Synthetic oligonucleotide
  Target: LAMA2; (-) strand; PAM type: YTN; PAM sequence: CTT
tcaaaaaaccagctcctgga

SEQ ID NO: 207556 - DNA, 20 bp, Artificial Sequence
  Description of Artificial Sequence: Synthetic oligonucleotide
  Target: LAMA2; (-) strand; PAM type: YTN; PAM sequence: TTG
atcctttcaaaaaaccagct

SEQ ID NO: 207557 - DNA, 20 bp, Artificial Sequence
  Description of Artificial Sequence: Synthetic oligonucleotide
  Target: LAMA2; (-) strand; PAM type: YTN; PAM sequence: TTG
ttgatcctttcaaaaaacca

SEQ ID NO: 207558 - DNA, 20 bp, Artificial Sequence
  Description of Artificial Sequence: Synthetic oligonucleotide
  Target: LAMA2; (-) strand; PAM type: YTN; PAM sequence: TTT
gttgatcctttcaaaaaacc

SEQ ID NO: 207559 - DNA, 20 bp, Artificial Sequence
  Description of Artificial Sequence: Synthetic oligonucleotide
  Target: LAMA2; (-) strand; PAM type: YTN; PAM sequence: TTT
tgttgatcctttcaaaaaac

SEQ ID NO: 207560 - DNA, 20 bp, Artificial Sequence
  Description of Artificial Sequence: Synthetic oligonucleotide
  Target: LAMA2; (-) strand; PAM type: YTN; PAM sequence: CTA
tcaattttgttgatcctttc

SEQ ID NO: 207561 - DNA, 20 bp, Artificial Sequence
  Description of Artificial Sequence: Synthetic oligonucleotide
  Target: LAMA2; (-) strand; PAM type: YTN; PAM sequence: CTA
gcggtctatcaattttgttg

SEQ ID NO: 207562 - DNA, 20 bp, Artificial Sequence
  Description of Artificial Sequence: Synthetic oligonucleotide
  Target: LAMA2; (-) strand; PAM type: YTN; PAM sequence: TTG
ctagcggtctatcaattttg

SEQ ID NO: 207563 - DNA, 20 bp, Artificial Sequence
  Description of Artificial Sequence: Synthetic oligonucleotide
  Target: LAMA2; (-) strand; PAM type: YTN; PAM sequence: CTT
gctagcggtctatcaatttt
